(19) United States
(12) Patent Application Publication
(10) Pub. No.: US 2007/0067865 A1
(43) Pub. Date: Mar. 22, 2007

(54) Annotated plant genes

(76) Inventors: David K. Kovalic, University City, MO (US); Jingdong Liu, Ballwin, MO (US)

Correspondence Address: ARNOLD & PORTER, LLP, 555 TWELFTH STREET, N.W., ATTN: IP DOCKETING, WASHINGTON, DC, 20004, US

(21) Appl. No.: 11/503,243

(22) Filed: Aug. 14, 2006

Related U.S. Application Data
(63) Continuation of application No. 09/654,617, filed on Sep. 5, 2000, now abandoned.

(51) Int. Cl. A01H 5/00; C07H 21/04; C12N 15/82; C07K 14/415

(52) U.S. Cl. 800/278; 800/312; 800/314; 800/320.1; 800/320.2; 800/320.3; 435/419; 435/468; 530/370; 536/23.6

(57) ABSTRACT

The present invention is in the field of plant biochemistry. More specifically the invention relates to nucleic acid sequences from plant cells, in particular, nucleic acid sequences from maize, teosinte, soybean, Arabidopsis, cotton, Sorghum, rice and wheat. The invention encompasses nucleic acid molecules that encode proteins and fragments of proteins. In addition, the invention also encompasses proteins and fragments of proteins so encoded and antibodies capable of binding these proteins or fragments. The invention also relates to methods of using the nucleic acid molecules, proteins and fragments of proteins, and antibodies, for example for genome mapping, gene identification and analysis, plant breeding, preparation of constructs for use in plant gene expression, and transgenic plants.

### CROSS REFERENCE TO RELATED APPLICATION

[0001] This application is a continuation of U.S. application Ser. No. 09/654,617 filed Sep. 5, 2000, which is herein incorporated by reference in its entirety.

### INCORPORATION OF SEQUENCE LISTING

[0002] This application contains a sequence listing, which is contained on three identical CD-ROMs: two copies of the sequence listing (Copy 1 and Copy 2) and a sequence listing Computer Readable Form (CRF), all of which are herein incorporated by reference. All three sequence listing CD-ROMs each contain one file called “15097E seq list.rpt” which is 297,897,984 bytes in size (measured in Windows XP) and which was created on Aug. 14, 2006.

### INCORPORATION OF COMPUTER LISTING

[0003] This application contains a computer program listing which contains Table 1, which is contained on CD-ROM, all of which is herein incorporated by reference. The computer program listing CD-ROM contains 12 files, each of which was created on Aug. 14, 2006: “15097E comp prog list01.txt” which is 8,536,064 bytes (measured in Windows XP); “1 5097E comp prog list02.txt” which is 8,540,160 bytes (measured in Windows XP); “15097E comp prog list03.txt” which is 7,929,856 bytes (measured in Windows XP); “15097E comp prog list04.txt” which is 9,728,000 bytes (measured in Windows XP); “15097E comp prog list05.txt” which is 9,363,456 bytes (measured in Windows XP); “15097E comp prog list06.txt” which is 9,113,600 bytes (measured in Windows XP); “15097E comp prog list07.txt” which is 9,261,056 bytes (measured in Windows XP); “15097E comp prog list08.txt” which is 8,536,064 bytes (measured in Windows XP); “15097E comp prog list09.txt” which is 9,023,488 bytes (measured in Windows XP); “15097E comp prog list10.txt” which is 7,196,672 bytes (measured in Windows XP); “15097E comp prog list11.txt” which is 9,248,768 bytes (measured in Windows XP); and “15097E comp prog list12.txt” which is 6,709,248 bytes (measured in Windows XP).

### FIELD OF THE INVENTION

[0004] The present invention is in the field of plant biochemistry. More specifically the invention relates to nucleic acid sequences from plant cells, in particular, nucleic acid sequences from maize, teosinte, soybean, Arabidopsis, cotton, sorghum, rice and wheat. The invention encompasses nucleic acid molecules that encode proteins and fragments of proteins. In addition, the invention also encompasses proteins and fragments of proteins so encoded and antibodies capable of binding these proteins or fragments. The invention also relates to methods of using the nucleic acid molecules, proteins and fragments of proteins, and antibodies, for example for genome mapping, gene identification and analysis, plant breeding, preparation of constructs for use in plant gene expression, and transgenic plants.

### BACKGROUND OF THE INVENTION

[0005] The identification and isolation of plant genes belonging to biochemical and regulatory pathways are important in the development of nutritionally and agriculturally enhanced crops and products. Such nucleic acid molecules can be used in a variety of applications. For example, a nucleic acid molecule or a collection of nucleic acid molecules may act as a marker for a developmental or commercially valuable trait such as disease resistance. Additionally, they may be used to obtain homologues in the same or a different species. Nucleic acid molecules comprising coding sequences may also aid in gene expression studies that allow the dissection and elucidation of commercially useful traits.

[0006] The present invention provides nucleic acid molecules that are drawn from maize, soybean, rice, cotton, sorghum, wheat Arabidopsis and teosinte. They exhibit significant homology with known nucleic acid sequences belonging to a variety of biochemical and regulatory pathways.

[0007] Several web sites and databases contain information pertaining to biochemical pathways and regulatory pathways. Examples of such web sites or data bases include: cgsc.biology.yale.edu (the CGSC maintains a database of E. coli genetic information, including genotypes and reference information for the strains in the CGSC collection, gene names, properties, and linkage map, gene product information, and information on specific mutations); labmed.umn.edu (the University of Minnesota's Biocatalysis/Biodegradation web page provides a search engine for compounds, enzymes, microorganisms, chemical formulas CAS registry, EC accession and microbial biocatalytic reactions and biodegradation pathways primarily for xenobiotic, chemical compounds such methionine, and threonine); wit.mcs.anl.gov/WIT2 (this website provides a functional overview which outlines metabolic pathways for organisms such as E. coli); ecocyc.PangeaSystems.com/ecocyc/ecocyc.html (this web site provides an overview of an E. coli metabolic map); biology.UCSD.edu (this web site provides information on signal transduction in higher plants); geo.nihs.go jp (the Japanese National Institute of Health Science server provides information particularly on cell signaling networks); gifts.univ-mrs.fr (the Gene Intereactions in Fly Trans-world Server provides information on gene interactions, mostly centered on Drosophila gene interactions); sdb.bio.purdue.edu (this web site provides a data base of Drosophila genes); genome-www.stanford.edu (Stanford Genomic Research web site provides information on for example, Sacchromyces and Arabidopsis); psynix.co.uk (this web site provides illustrations and computer models of various cytokinins); sdsc.edu/Kinases/pk_home.html (this web site provides information on the protein kinase family of enzymes); transfac.gbf-braunschweig.de (the GBF web site provides information on regulatory genomic signals and regions, in particular those that govern transcriptional control); gcrdb.uthscsa.edu (this web site provides information on G-protein coupled receptors); biochem.purdue.edu (this web site provides information on secondary metabolism in Arabidopsis); home.wxs.n1/˜pvsanten/mmp/mmp.html (this web site provides a flow chart of metabolic pathways); genome.adjp/kegg/regulation.html (this web site, the KEGG regulatory pathways web site, provides pathway maps, ortholog group tables, and molecular catalogs searchable data bases by enzyme, pathway, or EC number); capsulapedia.uchicago.edu/Capsulapedia/Metabolism/RegExpMet.shtml (this website provides expression information); zmbh.uni-heidelberg.de/M_pneumoniae/genome/META/ALL_META.GIF (this web site provides a graphic of metabolic pathways and the ways these pathways interact); moulon.inra.fr/cgi-bin/nph-acedb3.1/acedb/metabolisme (this web site provides information on C. elegans metabolic enzymes); gwu.edu/˜mpb (this web site provides information on metabolic pathways); bic.nus.edu.sg/pathwaydb.html (this web site provides links to biological pathways, such as metabolic pathways, developmental pathways, signal-transduction pathways, and genetic regulatory circuits); and scri.sari.ac.uk/bpp/charttxt.htm (this web site provides graphics of the metabolic pathways of diseased potato).

### SUMMARY OF THE INVENTION

[0008] The present invention provides a substantially purified nucleic acid molecule where the nucleic acid molecule comprises a nucleic acid sequence selected from the group consisting of SEQ ID NO: 1 through SEQ ID NO: 463,173 or complements thereof or fragments of either.

[0009] The present invention provides a substantially purified first nucleic acid molecule, wherein the first nucleic acid molecule specifically hybridizes to a second nucleic acid molecule having a nucleic acid sequence selected from the group consisting of SEQ ID NO: 1 through SEQ ID NO: 463,173 or complements thereof.

[0010] The present invention provides a marker nucleic acid molecule capable of detecting the level, pattern, occurrence or absence of a biochemical process, wherein the biochemical process is selected from the group consisting of photosynthetic activity, carbohydrate metabolism, amino acid synthesis or degradation, plant hormone or other regulatory molecules, phenolic metabolism, lipid metabolism, biosynthesis of tetrapyrroles, phytochrome metabolism, carbon assimilation, glycolysis metabolism, gluconeogenesis metabolism, sucrose metabolism, starch metabolism, phosphogluconate metabolism, galactomannan metabolism, raffinose metabolism, complex carbohydrate metabolism, phytic acid metabolism, methionine biosynthesis, methionine degradation, lysine metabolism, arginine metabolism, proline metabolism, glutamate/glutamine metabolism, aspartate/asparagine metabolism, cytokinin metabolism, gibberellin metabolism, ethylene metabolism, jasmonic acid metabolism, transcription factors, R-genes, plant proteases, protein kinases, antifungal proteins, nitrogen transporters, sugar transporters, shikimate metabolism, isoflavone metabolism, phenylpropanoid metabolism, isoprenoid metabolism, alpha-oxidation lipid metabolism, fatty acid metabolism, glycolysis metabolism, gluconeogenesis metabolism, sucrose metabolism, sucrose catabolism, reductive pentose phosphate cycle, regulation of C3 photosynthesis, C4 pathway carbon assimilation, enzymes involved in the C4 pathway, carotenoid metabolism, tocopherol metabolism, phytosterol metabolism, brassinoid metabolism, and proline metabolism.

[0011] The present invention also provides a substantially purified protein or fragment thereof encoded by a first nucleic acid molecule which specifically hybridizes to a second nucleic acid molecule, the second nucleic acid molecule having a nucleic acid sequence selected from the group consisting of a complement of SEQ ID NO: 1 through SEQ ID NO:463,173.

[0012] The present invention also provides a substantially purified protein or fragment thereof encoded by a nucleic acid molecule comprising a nucleic acid sequence selected from the group consisting of SEQ ID NO: 1 through SEQ ID NO:463,173.

[0013] The present invention also provides a purified antibody or fragment thereof which is capable of specifically binding to a protein or fragment thereof, wherein the protein or fragment thereof is encoded by a nucleic acid molecule comprising a nucleic acid sequence selected from the group consisting of SEQ ID NO: 1 through SEQ ID NO: 463,173.

[0014] The present invention also provides a transformed plant having a nucleic acid molecule which comprises: (A) an exogenous promoter region which functions in a plant cell to cause the production of a mRNA molecule; (B) a structural nucleic acid molecule comprising a nucleic acid sequence selected from the group consisting of SEQ ID NO: 1 through SEQ ID NO: 463,173; and (C) a 3′ non-translated sequence that functions in the plant cell to cause termination of transcription and addition of polyadenylated ribonucleotides to a 3′ end of the mRNA molecule.

[0015] The present invention also provides a transformed plant having a nucleic acid molecule which comprises: (A) an exogenous promoter region which functions in a plant cell to cause the production of a mRNA molecule; which is linked to (B) a nucleic acid molecule with a transcribed strand and a non-transcribed strand, wherein the transcribed strand is complementary to a nucleic acid molecule comprising a nucleic acid sequence selected from the group consisting of SEQ ID NO: 1 through SEQ ID NO: 463,173 or fragment thereof; which is linked to (C) a 3′ non-translated sequence that functions in plant cells to cause termination of transcription and addition of polyadenylated ribonucleotides to a 3′ end of the mRNA molecule.

[0016] The present invention provides a microarray comprising a collection of nucleic acid molecules wherein the collection of nucleic acid molecules are capable of detecting or predicting a component or attribute of a biochemical process or activity, where the biochemical process or activity are selected from the group consisting of photosynthetic activity, carbohydrate metabolism, amino acid synthesis or degradation, plant hormone or other regulatory molecules, phenolic metabolism, lipid metabolism, biosynthesis of tetrapyrroles, phytochrome metabolism, carbon assimilation, glycolysis metabolism, gluconeogenesis metabolism, sucrose metabolism, starch metabolism, phosphogluconate metabolism, galactomannan metabolism, raffinose metabolism, complex carbohydrate metabolism, phytic acid metabolism, methionine biosynthesis, methionine degradation, lysine metabolism, arginine metabolism, proline metabolism, glutamate/glutamine metabolism, aspartate/asparagine metabolism, cytokinin metabolism, gibberellin metabolism, ethylene metabolism, jasmonic acid metabolism, transcription factors, R-genes, plant proteases, protein kinases, antifungal proteins, nitrogen transporters, sugar transporters, shikimate metabolism, isoflavone metabolism, phenylpropanoid metabolism, isoprenoid metabolism, α-oxidation lipid metabolism, fatty acid metabolism, glycolysis metabolism, gluconeogenesis metabolism, sucrose metabolism, sucrose catabolism, reductive pentose phosphate cycle, regulation of C3 photosynthesis, C4 pathway carbon assimilation, enzymes involved in the C4 pathway, carotenoid metabolism, tocopherol metabolism, phytosterol metabolism, brassinoid metabolism, and proline metabolism.

[0017] The present invention also provides a method for determining a level or pattern of a plant protein in a plant cell or plant tissue comprising: (A) incubating, under conditions permitting nucleic acid hybridization, a marker nucleic acid molecule having a nucleic acid sequence selected from the group consisting of SEQ ID NO: 1 through SEQ ID NO: 463,173 or complements thereof or fragment of either, with a complementary nucleic acid molecule obtained from the plant cell or plant tissue, wherein nucleic acid hybridization between the marker nucleic acid molecule and the complementary nucleic acid molecule obtained from the plant cell or plant tissue permits the detection of the protein; (B) permitting hybridization between the marker nucleic acid molecule and the complementary nucleic acid molecule obtained from the plant cell or plant tissue; and (C) detecting the level or pattern of the complementary nucleic acid, wherein the detection of the complementary nucleic acid is predictive of the level or pattern of the protein.

[0018] The present invention also provides a method for determining a level or pattern of a protein in a plant cell or plant tissue under evaluation which comprises assaying the concentration of a molecule, whose concentration is dependent upon the expression of a gene, the gene specifically hybridizes to a nucleic acid molecule having a nucleic acid sequence selected from the group consisting of a complement of SEQ ID NO: 1 through SEQ ID NO: 463,173, in comparison to the concentration of that molecule present in a reference plant cell or a reference plant tissue with a known level or pattern of the protein, wherein the assayed concentration of the molecule is compared to the assayed concentration of the molecule in the reference plant cell or reference plant tissue with the known level or pattern of the protein.

[0019] The present invention provides a method of determining a mutation in a plant whose presence is predictive of a mutation affecting a level or pattern of a protein comprising the steps: (A) incubating, under conditions permitting nucleic acid hybridization, a marker nucleic acid selected from the group of marker nucleic acid molecules which specifically hybridize to a nucleic acid molecule having a nucleic acid sequence selected from the group of SEQ ID NO: 1 through SEQ ID NO: 463,173 or complements thereof and a complementary nucleic acid molecule obtained from the plant, wherein nucleic acid hybridization between the marker nucleic acid molecule and the complementary nucleic acid molecule obtained from the plant permits the detection of a polymorphism whose presence is predictive of a mutation affecting the level or pattern of the protein in the plant; (B) permitting hybridization between the marker nucleic acid molecule and the complementary nucleic acid molecule obtained from the plant; and (C) detecting the presence of the polymorphism, wherein the detection of the polymorphism is predictive of the mutation.

[0020] The present invention also provides a method of producing a plant containing an overexpressed protein comprising: (A) transforming the plant with a functional nucleic acid molecule, wherein the functional nucleic acid molecule comprises a promoter region, wherein the promoter region is linked to a structural region, wherein the structural region has a nucleic acid sequence selected from group consisting of SEQ ID NO: 1 through SEQ ID NO: 463,173; wherein the structural region is linked to a 3′ non-translated sequence that functions in the plant to cause termination of transcription and addition of polyadenylated ribonucleotides to a 3′ end of a mRNA molecule; and wherein the functional nucleic acid molecule results in overexpression of the protein; and (B) growing the transformed plant.

[0021] The present invention also provides a method of producing a plant containing reduced levels of a protein comprising: (A) transforming the plant with a functional nucleic acid molecule, wherein the functional nucleic acid molecule comprises a promoter region, wherein the promoter region is linked to a structural region, wherein the structural region comprises a nucleic acid molecule having a nucleic acid sequence selected from the group consisting of a complement of SEQ ID NO: 1 through SEQ ID NO: 463,173 or fragment thereof and the transcribed strand is complementary to an endogenous mRNA molecule; and wherein the transcribed nucleic acid molecule is linked to a 3′ non-translated sequence that functions in the plant cell to cause termination of transcription and addition of polyadenylated ribonucleotides to a 3′ end of a mRNA molecule; and (B) growing the transformed plant.

[0022] The present invention also provides a method of determining an association between a polymorphism and a plant trait comprising: (A) hybridizing a nucleic acid molecule specific for the polymorphism to genetic material of a plant, wherein the nucleic acid molecule has a nucleic acid sequence selected from the group consisting of SEQ ID NO: 1 through SEQ ID NO: 463,173 or complements thereof or fragment of either; and (B) calculating the degree of association between the polymorphism and the plant trait.

[0023] The present invention also provides a method of isolating a nucleic acid comprising: (A) incubating under conditions permitting nucleic acid hybridization, a first nucleic acid molecule comprising a nucleic acid sequence selected from the group consisting of SEQ ID NO: 1 through SEQ ID NO: 463,173 or complements thereof or fragment of either with a complementary second nucleic acid molecule obtained from a plant cell or plant tissue; (B) permitting hybridization between the first nucleic acid molecule and the second nucleic acid molecule obtained from the plant cell or plant tissue; and (C) isolating the second nucleic acid molecule.

[0024] The present invention also provides a method of analyzing the differences in the RNA profiles from more than one physiological source, the method comprising: a) obtaining a sample of ribonucleic acids from each of the physiological sources; b) generating a population of labeled nucleic acids for each of the physiological sources from said sample of ribonucleic acids; c) hybridizing the labeled nucleic acids for each of the physiological sources to an array of nucleic acid molecules stably associated with the surface of a substrate to produce a hybridization pattern for each of the physiological sources; said stably associated nucleic acid molecules selected from the group consisting of SEQ ID NO: 1 through SEQ ID NO:463,173 or fragments thereof and d) comparing the hybridization patterns for each of the different physiological sources.

### DETAILED DESCRIPTION OF THE INVENTION

[0025] One skilled in the art can refer to general reference texts for detailed descriptions of known techniques discussed herein or equivalent techniques. These texts include Current Protocols in Molecular Biology Ausubel, et al., eds., John Wiley & Sons, N.Y. (1989), and supplements through September (1998), Molecular Cloning, A Laboratory Manual, Sambrook et al, 2^{nd} Ed., Cold Spring Harbor Press, Cold Spring Harbor, N.Y. (1989), Genome Analysis: A Laboratory Manual 1: Analyzing DNA, Birren et al., Cold Spring Harbor Press, Cold Spring Harbor, N.Y. (1997); Genome Analysis: A Laboratory Manual 2: Detecting Genes, Birren et al., Cold Spring Harbor Press, Cold Spring Harbor, N.Y. (1998); Genome Analysis: A Laboratory Manual 3: Cloning Systems, Birren et al., Cold Spring Harbor Press, Cold Spring Harbor, N.Y. (1999); Genome Analysis: A Laboratory Manual 4: Mapping Genomes, Birren et al., Cold Spring Harbor Press, Cold Spring Harbor, N.Y. (1999); Plant Molecular Biology: A Laboratory Manual, Clark, Springer-Verlag, Berlin, (1997), Methods in Plant Molecular Biology, Maliga et al., Cold Spring Harbor Press, Cold Spring Harbor, N.Y. (1995). These texts can, of course, also be referred to in making or using an aspect of the invention. It is understood that any of the agents of the invention can be substantially purified and/or be biologically active and/or recombinant.

[0026] Agents

[0027] (a) Nucleic Acid Molecules

[0028] Agents of the present invention include plant nucleic acid molecules and more preferably include maize, soybean, cotton, sorghum, teosinte, wheat, and rice nucleic acid molecules.

[0029] A subset of the nucleic acid molecules of the present invention includes nucleic acid molecules that are marker molecules. Another subset of the nucleic acid molecules of the present invention includes nucleic acid molecules that encode a protein or fragment thereof. Another subset of the nucleic acid molecules of the present invention is cDNA molecules.

[0030] Fragment nucleic acid molecules may encode significant portion(s) of, or indeed most of, these nucleic acid molecules. Alternatively, the fragments may comprise smaller oligonucleotides (having from about 15 to about 250 nucleotide residues and more preferably, about 15 to about 30 nucleotide residues, or more preferably about 30 to about 50 nucleotide residues, or again more preferably about 50 to about 100 nucleotide residues).

[0031] The term “substantially purified,” as used herein, refers to a molecule separated from substantially all other molecules normally associated with it in its native state. More preferably a substantially purified molecule is the predominant species present in a preparation. A substantially purified molecule may be greater than 60% free, preferably 75% free, more preferably 90% free, and most preferably 95% free from the other molecules (exclusive of solvent) present in the natural mixture. The term “substantially purified” is not intended to encompass molecules present in their native state.

[0032] The agents of the present invention will preferably be “biologically active” with respect to either a structural attribute, such as the capacity of a nucleic acid to hybridize to another nucleic acid molecule, or the ability of a protein to be bound by an antibody (or to compete with another molecule for such binding). Alternatively, such an attribute may be catalytic and thus involve the capacity of the agent to mediate a chemical reaction or response.

[0033] The agents of the present invention may also be recombinant. As used herein, the term recombinant, refers to a) molecules that are constructed outside of living cells by joining natural or synthetic DNA segments to DNA molecules that can replicate in a living cell or b) molecules that result from the replication or expression of those molecules described above or c) amino acid molecules from different sources which are joined together.

[0034] It is understood that the agents of the present invention may be labeled with reagents that facilitate detection of the agent (e.g., fluorescent labels, Prober et al., Science 238:336-340 (1987); Albarella et al., EP 144914; chemical labels, Sheldon et al., U.S. Pat. No. 4,582,789; Albarella et al., U.S. Pat. No. 4,563,417; modified bases, Miyoshi et al., EP 119448).

[0035] It is further understood, that the present invention provides recombinant bacterial, mammalian, microbial, insect, fungal and plant cells and viral constructs comprising the agents of the present invention

[0036] Nucleic acid molecules or fragments thereof of the present invention are capable of specifically hybridizing to other nucleic acid molecules under certain circumstances. As used herein, two nucleic acid molecules are said to be capable of specifically hybridizing to one another if the two molecules are capable of forming an anti-parallel, double-stranded nucleic acid structure. A nucleic acid molecule is said to be the “complement” of another nucleic acid molecule if they exhibit complete complementarity. As used herein, molecules are said to exhibit “complete complementarity” when every nucleotide of one of the molecules is complementary to a nucleotide of the other. Two molecules are said to be “minimally complementary” if they can hybridize to one another with sufficient stability to permit them to remain annealed to one another under at least conventional “low-stringency” conditions. Similarly, the molecules are said to be “complementary” if they can hybridize to one another with sufficient stability to permit them to remain annealed to one another under conventional “high-stringency” conditions. Conventional stringency conditions are described by Sambrook et al., Molecular Cloning, A Laboratory Manual, 2nd Ed., Cold Spring Harbor Press, Cold Spring Harbor, N.Y. (1989) and by Haymes et al., Nucleic Acid Hybridization, A Practical Approach, IRL Press, Washington, D.C. (1985). Departures from complete complementarity are therefore permissible, as long as such departures do not completely preclude the capacity of the molecules to form a double-stranded structure. Thus, in order for a nucleic acid molecule to serve as a primer or probe it need only be sufficiently complementary in sequence to be able to form a stable double-stranded structure under the particular solvent and salt concentrations employed.

[0037] Appropriate stringency conditions which promote DNA hybridization, for example, 6.0×sodium chloride/sodium citrate (SSC) at about 45° C., followed by a wash of 2.0×SSC at 50° C., are known to those skilled in the art or can be found in Current Protocols in Molecular Biology, John Wiley & Sons, N.Y. (1989), 6.3.1-6.3.6. For example, the salt concentration in the wash step can be selected from a low stringency of about 2.0×SSC at 50° C. to a high stringency of about 0.2×SSC at 50° C. In addition, the temperature in the wash step can be increased from low stringency conditions at room temperature, about 22° C., to high stringency conditions at about 65° C. Both temperature and salt may be varied, or either the temperature or the salt concentration may be held constant while the other variable is changed.

[0038] In a preferred embodiment, a nucleic acid of the present invention will specifically hybridize to one or more of the nucleic acid molecules set forth in SEQ ID NO: 1 through SEQ ID NO: 463,173 or complements thereof under moderately stringent conditions, for example at about 2.0×SSC and about 65° C.

[0039] In a particularly preferred embodiment, a nucleic acid of the present invention will include those nucleic acid molecules that specifically hybridize to one or more of the nucleic acid molecules set forth in SEQ ID NO: 1 through SEQ ID NO: 463,173 or complements thereof under high stringency conditions such as 0.2×SSC and about 65° C.

[0040] In one aspect of the present invention, the nucleic acid molecules of the present invention comprise one or more of the nucleic acid sequences set forth in SEQ ID NO: 1 through SEQ ID NO: 463,173 or complements thereof or fragments of either. In another aspect of the present invention, one or more of the nucleic acid molecules of the present invention share between 100% and 90% sequence identity with one or more of the nucleic acid sequences set forth in SEQ ID NO: 1 through SEQ ID NO: 463,173 or complements thereof or fragments of either. In a further aspect of the present invention, one or more of the nucleic acid molecules of the present invention share between 100% and 95% sequence identity with one or more of the nucleic acid sequences set forth in SEQ ID NO: 1 through SEQ ID NO: 463,173 or complements thereof or fragments of either. In a more preferred aspect of the present invention, one or more of the nucleic acid molecules of the present invention share between 100% and 98% sequence identity with one or more of the nucleic acid sequences set forth in SEQ ID NO: 1 through SEQ ID NO: 463,173 complements thereof or fragments of either. In an even more preferred aspect of the present invention, one or more of the nucleic acid molecules of the present invention share between 100% and 99% sequence identity with one or more of the sequences set forth in SEQ ID NO: 1 through SEQ ID NO: 463,173 or complements thereof.

[0041] The term “sequence identity” refers to the extent to which two sequences, nucleotide or amino acid, are invariant throughout the portion at which they are aligned. While there exist a number of methods to measure identity between two polynucleotide or polypeptide sequences, the term “sequence identity” is well known to skilled artisans. Methods commonly employed to determine identity between two sequences include, but are not limited to, those disclosed in Guide to Huge Computers, Martin J. Bishop, ed., Academic Press, San Diego, 1994, and Carillo, H., and Lipton, D., SIAM J Applied Math (1988) 48:1073. Methods to determine identity are codified in computer programs. Preferred computer program methods to determine identity between two sequences include, but are not limited to, the BLAST suite of programs publicly available from NCBI and other sources (BLAST Manual, Altschul et al., Natl. Cent. Biotechnol. Inf., Natl. Library Med. (NCBI NLM) NIH, Bethesda, Md. 20894; Altschul et al., J. Mol. Biol. 215:403-410 (1990), Pearson et al., Proc. Natl. Acad. Sci. U.S.A. 85:2444-2448 (1988), the FAST programs (Pearson et al., Proc. Natl. Acad. Sci. U.S.A. 85:2444-2448 (1988).the GAP and BESTFIT programs found in the GCG program package, (Madison, Wis.) and Cross_Match (Phi Green, University of Washington). Another preferred method to determine identity, is by the method of DNASTAR protein alignment protocol using the Jotun-Hein algorithm (Hein et al., Methods Enzymol. 183:626-645 (1990)).

[0042] Unless otherwise noted, “percent sequence identity or percent identity” for this invention refers to the value obtained when using the BLAST 2.0 suite of programs with default parameters (Altschul et al., Nucleic Acids Res. 25:3389-3402, 1997; Altschul et al., J. Mol. Bio. 215: 403-410, 1990) Version 2.0 of BLAST allows the introduction of gaps (deletions and insertions) into alignments.

[0043] (i) Nucleic Acid Molecules Encoding Proteins or Fragments Thereof

[0044] Nucleic acid molecules of the present invention can comprise sequences that encode a protein or fragment thereof. Such proteins or fragments thereof include homologues of known proteins in other organisms.

[0045] In a preferred embodiment of the present invention, a maize, soybean, Arabidopsis, wheat, cotton, teosinte,

[0046] or rice protein or fragment thereof of the present invention is a homologue of another plant protein. In another preferred embodiment of the present invention, a maize, soybean, Arabidopsis, wheat, cotton, teosinte, or rice protein or fragment thereof of the present invention is a homologue of a fungal protein. In another preferred embodiment of the present invention, a maize, soybean, Arabidopsis, wheat, cotton, teosinte, or rice protein of the present invention is a homologue of a mammalian protein. In another preferred embodiment of the present invention, a maize, soybean, Arabidopsis, wheat, cotton, teosinte, or rice protein or fragment thereof of the present invention is a homologue of a bacterial protein. In another preferred embodiment of the present invention, a maize, soybean, Arabidopsis, wheat, cotton, teosinte, or rice protein or fragment thereof of the present invention is a homologue of a maize protein. In another preferred embodiment of the present invention, a soybean, Arabidopsis, wheat, cotton, teosinte, or rice protein or fragment thereof of the present invention is a homologue of a soybean protein. In another preferred embodiment of the present invention, a maize, soybean, Arabidopsis, wheat, cotton, teosinte, or rice protein or fragment thereof of the present invention is a homologue of a cotton protein. In another preferred embodiment of the present invention, a maize, Arabidopsis, wheat, cotton, teosinte, or rice protein or fragment thereof of the present invention is a homologue of a wheat protein. In another preferred embodiment of the present invention, a maize, soybean, Arabidopsis, cotton, teosinte, or rice protein or fragment thereof of the present invention is a homologue of an Arabidopsis protein. In another preferred embodiment of the present invention, a maize, soybean, Arabidopsis, wheat, cotton, teosinte, or rice protein or fragment thereof of the present invention is a homologue of a sorghum protein. In another preferred embodiment of the present invention, a maize, soybean, Arabidopsis, wheat, cotton, or rice protein or fragment thereof of the present invention is a homologue of a teosinte protein.

[0047] In a preferred embodiment of the present invention, the nucleic molecule of the present invention encodes a maize, soybean, Arabidopsis, wheat, cotton, teosinte, or rice protein or fragment thereof where a maize, soybean, Arabidopsis, wheat, cotton, teosinte, or rice protein exhibits a BLAST E value score of greater than lE-12, preferably a BLAST E value score of between about 1E-30 and about 1E-12, even more preferably a BLAST probability E value score of greater than 1E-30 with its homologue.

[0048] Nucleic acid molecules of the present invention also include non-maize, non-soybean, non-rice, non-wheat, non-Arabidopsis, non-sorghum, non-cotton and non-teosinte homologues. Preferred plant sources of homologues are selected from the group consisting of alfalfa, barley, Brassica, broccoli, cabbage, citrus, garlic, oat, oilseed rape, onion, canola, flax, an ornamental plant, pea, peanut, pepper, potato, rice, rye, strawberry, sugarcane, sugarbeet, tomato, poplar, pine, fir, eucalyptus, apple, lettuce, lentils, grape, banana, tea, turf grasses, sunflower, oil palm and Phaseolus.

[0049] In a preferred embodiment, nucleic acid molecules having SEQ ID NO: 1 through SEQ ID NO: 463,173 or complements and fragments of either can be utilized to obtain such homologues.

[0050] In another further aspect of the present invention, nucleic acid molecules of the present invention can comprise sequences which differ from those encoding a protein or fragment thereof in SEQ ID NO: 1 through SEQ ID NO: 463,173 due to fact that the different nucleic acid sequence encodes a protein having one or more conservative amino acid changes. It is understood that codons capable of coding for such conservative amino acid substitutions are known in the art.

[0051] It is well known in the art that one or more amino acids in a native sequence can be substituted with another amino acid(s), the charge and polarity of which are similar to that of the native amino acid, i.e., a conservative amino acid substitution, resulting in a silent change. Conserved substitutions for an amino acid within the native polypeptide sequence can be selected from other members of the class to which the naturally occurring amino acid belongs. Amino acids can be divided into the following four groups: (1) acidic amino acids, (2) basic amino acids, (3) neutral polar amino acids, and (4) neutral nonpolar amino acids. Representative amino acids within these various groups include, but are not limited to, (1) acidic (negatively charged) amino acids such as aspartic acid and glutamic acid; (2) basic (positively charged) amino acids such as arginine, histidine, and lysine; (3) neutral polar amino acids such as glycine, serine, threonine, cysteine, cystine, tyrosine, asparagine, and glutamine; and (4) neutral nonpolar (hydrophobic) amino acids such as alanine, leucine, isoleucine, valine, proline, phenylalanine, tryptophan, and methionine.

[0052] Conservative amino acid changes within the native polypeptides sequence can be made by substituting one amino acid within one of these groups with another amino acid within the same group. Biologically functional equivalents of the proteins or fragments thereof of the present invention can have ten or fewer conservative amino acid changes, more preferably seven or fewer conservative amino acid changes, and most preferably five or fewer conservative amino acid changes. The encoding nucleotide sequence will thus have corresponding base substitutions, permitting it to encode biologically functional equivalent forms of the proteins or fragments of the present invention.

[0053] It is understood that certain amino acids may be substituted for other amino acids in a protein structure without appreciable loss of interactive binding capacity with structures such as, for example, antigen-binding regions of antibodies or binding sites on substrate molecules. Because it is the interactive capacity and nature of a protein that defines that protein's biological functional activity, certain amino acid sequence substitutions can be made in a protein sequence and, of course, its underlying DNA coding sequence and, nevertheless, obtain a protein with like properties. It is thus contemplated by the inventors that various changes may be made in the peptide sequences of the proteins or fragments of the present invention, or corresponding DNA sequences that encode said peptides, without appreciable loss of their biological utility or activity. It is understood that codons capable of coding for such amino acid changes are known in the art.

[0054] In making such changes, the hydropathic index of amino acids may be considered. The importance of the hydropathic amino acid index in conferring interactive biological function on a protein is generally understood in the art (Kyte and Doolittle, J. Mol. Biol. 157, 105-132 (1982)). It is accepted that the relative hydropathic character of the amino acid contributes to the secondary structure of the resultant protein, which in turn defines the interaction of the protein with other molecules, for example, enzymes, substrates, receptors, DNA, antibodies, antigens, and the like.

[0055] Each amino acid has been assigned a hydropathic index on the basis of its hydrophobicity and charge characteristics (Kyte and Doolittle, J. Mol. Biol. 157, 105-132 (1982)); these are isoleucine (+4.5), valine (+4.2), leucine (+3.8), phenylalanine (+2.8), cysteine/cystine (+2.5), methionine (+1.9), alanine (+1.8), glycine (−0.4), threonine (−0.7), serine (−0.8), tryptophan (−0.9), tyrosine (−1.3), proline (−1.6), histidine (−3.2), glutamate (−3.5), glutamine (−3.5), aspartate (−3.5), asparagine (−3.5), lysine (−3.9), and arginine (−4.5).

[0056] In making such changes, the substitution of amino acids whose hydropathic indices are within ±2 is preferred, those that are within ±1 are particularly preferred, and those within ±0.5 are even more particularly preferred.

[0057] It is also understood in the art that the substitution of like amino acids can be made effectively on the basis of hydrophilicity. U.S. Pat. No. 4,554,101 states that the greatest local average hydrophilicity of a protein, as govern by the hydrophilicity of its adjacent amino acids, correlates with a biological property of the protein.

[0058] As detailed in U.S. Pat. No. 4,554,101, the following hydrophilicity values have been assigned to amino acid residues: arginine (+3.0), lysine (+3.0), aspartate (+3.0±1), glutamate (+3.0±1), serine (+0.3), asparagine (+0.2), glutamine (+0.2), glycine (0), threonine (−0.4), proline (−0.5±1), alanine (−0.5), histidine (−0.5), cysteine (−1.0), methionine (−1.3), valine (−1.5), lecine (−1.8), isoleucine (−1.8), tyrosine (−2.3), phenylalanine (−2.5), and tryptophan (−3.4).

[0059] In making such changes, the substitution of amino acids whose hydrophilicity values are within ±2 is preferred, those that are within ±1 are particularly preferred, and those within ±0.5 are even more particularly preferred.

[0060] In a further aspect of the present invention, one or more of the nucleic acid molecules of the present invention differ in nucleic acid sequence from those encoding a protein or fragment thereof set forth in SEQ ID NO: 1 through SEQ ID NO: 463,173 or fragment thereof due to the fact that one or more codons encoding an amino acid has been substituted for a codon that encodes a nonessential substitution of the amino acid originally encoded.

[0061] Agents of the invention include nucleic acid molecules that encode at least about a contiguous 10 amino acid region of a protein of the present invention, more preferably at least about a contiguous 25, 40, 50, 100, or 125 amino acid region of a protein of the present invention. In a preferred embodiment the protein is selected from the group consisting of a plant, more preferably a maize, soybean, Arabidopsis, wheat, cotton, teosinte, or rice protein.

[0062] (ii) Nucleic Acid Molecule Markers and Probes

[0063] One aspect of the present invention concerns nucleic acid molecules of the present invention that can act as markers, for example, those nucleic acid molecules SEQ ID NO: 1 through SEQ ID NO: 463,173 or complements thereof or fragments of either that can act as markers or one or more of the marker molecules encoded by other nucleic acid agents of the present invention.

[0064] As used herein, a “marker” is an indicator for the presence of at least one polymorphism. A marker is preferably a nucleic acid molecule.

[0065] A “nucleic acid marker” as used herein means a nucleic acid molecule that is capable of being a marker for detecting a polymorphism.

[0066] In a preferred embodiment, the level, pattern, occurrence and/or absence of a nucleic acid molecule and/or collection of nucleic acid molecules of the present invention is a marker, for example, for a developmental, commercial or non-commercially valuable trait such as yield or an environmental condition or treatment. It is noted that many agronomic traits can affect yield. These include, without limitation, pod position on the plant, number of internodes, incidence of pod shatter, grain size, efficiency of nodulation and nitrogen fixation, efficiency of nutrient assimilation, resistance to biotic and abiotic stress, carbon assimilation, plant architecture, resistance to lodging, percent seed germination, seedling vigor, and juvenile traits.

[0067] As used herein, a “collection of nucleic acid molecules” is a population of nucleic acid molecules where at least two of the nucleic acid molecules differ, at least in part, in their nucleic acid sequence. It is understood, that as used herein, an individual species within a collection of nucleic acid molecules may be physically separate or alternatively not physically separate from one or more other species within the collection of nucleic acid molecules. An example of a situation where individual species may be physically separate but considered a collection of nucleic acid molecules is where more than two species are present on a single support such as a nylon membrane or a glass but occupy a different position on such support. Examples of situations where individual species are physically separate on a support include microarrays.

[0068] As used herein, where a collection of nucleic acids is a marker for a particular attribute, the level, pattern, occurrence and/or absence of the nucleic acid molecules associated with the attribute are not required to be the same between species of the collection. For example, the increase in the level of a species when in combination with the decrease in a second species could be diagnostic for a particular attribute.

[0069] In an even more preferred embodiment of the present invention, the level, pattern, occurrence and/or absence of a nucleic acid molecule and/or collection of nucleic acid molecules of the present invention is a marker for a biochemical process or activity where the process or activity is preferably selected from photosynthetic activity, carbohydrate metabolism, amino acid synthesis or degradation, plant hormone or other regulatory molecules, phenolic metabolism, and lipid metabolism, and more preferably selected from the group consisting of biosynthesis of tetrapyrroles, phytochrome metabolism, carbon assimilation, glycolysis and gluconeogenesis metabolism, sucrose metabolism, starch metabolism, phosphogluconate metabolism, galactomannan metabolism, raffinose metabolism, complex carbohydrate synthesis/degradation, phytic acid metabolism, methionine biosynthesis, methionine degradation, lysine metabolism, arginine metabolism, proline metabolism, glutamate/glutamine metabolism, aspartate/asparagine metabolism, cytokinin metabolism, gibberellin metabolism, ethylene metabolism, jasmonic acid synthesis metabolism, transcription factors, R-genes, plant proteases, protein kinases, antifungal proteins, nitrogen and sugar transporters, shikimate metabolism, isoflavone metabolism, phenylpropanoid metabolism, isoprenoid metabolism, alpha-oxidation lipid metabolism, and fatty acid metabolism, and even more preferably selected from the group consisting of: glycolysis metabolism, gluconeogenesis metabolism, sucrose metabolism, sucrose catabolism, reductive pentose phosphate cycle, regulation of C3 photosynthesis, C4 pathway carbon assimilation, enzymes involved in the C4 pathway, carotenoid metabolism, tocopherol metabolism, phytosterol metabolism, brassinoid metabolism, and proline metabolism.

[0070] Genetic markers of the invention include “dominant” or “codominant” markers. “Codominant markers” reveal the presence of two or more alleles (two per diploid individual) at a locus. “Dominant markers” reveal the presence of only a single allele per locus. The presence of the dominant marker phenotype (e.g., a band of DNA) is an indication that one allele is in either the homozygous or heterozygous condition. The absence of the dominant marker phenotype (e.g., absence of a DNA band) is merely evidence that “some other” undefined allele is present. In the case of populations where individuals are predominantly homozygous and loci are predominately dimorphic, dominant and codominant markers can be equally valuable. As populations become more heterozygous and multi-allelic, codominant markers often become more informative of the genotype than dominant markers. Marker molecules can be, for example, capable of detecting polymorphisms such as single nucleotide polymorphisms (SNPs).

[0071] SNPs can be characterized using any of a variety of methods (Botstein et al., Am. J. Hum. Genet. 32:314-331 (1980); Konieczny and Ausubel, Plant J. 4:403-410 (1993); Myers et al., Nature 313:495-498 (1985); Newton et al., Nucl. Acids Res. 17:2503-2516 (1989); Wu et al., Proc. Natl. Acad. Sci. (U.S.A.) 86:2757-2760 (1989); Barany, Proc. Natl. Acad. Sci. (U.S.A.) 88:189-193 (1991); Labrune et al., Am. J. Hum. Genet. 48:1115-1120 (1991); Kuppuswami et al., Proc. Natl. Acad. Sci. USA 88:1143-1147 (1991); Sarkar et al., Genomics 13:441-443 (1992); Nikiforov et al., Nucl. Acids Res. 22:4167-4175 (1994); Livak et al., PCR Methods Appl. 4:357-362 (1995); Livak et al., Nature Genet. 9:341-342 (1995); Chen and Kwok, Nucl. Acids Res. 25:347-353 (1997); Tyagi et al., Nature Biotech. 16: 49-53 (1998); Haff and Smirnov, Genome Res. 7: 378-388 (1997); Neffet al., Plant J. 14:387-392 (1998)).

[0072] Additional markers, such as AFLP markers, RFLP markers and RAPD markers, can be utilized (Walton, Seed World 22-29 (July, 1993); Burow and Blake, Molecular Dissection of Complex Traits, 13-29, Paterson (ed.), CRC Press, New York (1988)). Another marker type, RAPDs, is developed from DNA amplification with random primers and result from single base changes and insertions/deletions in plant genomes. They are dominant markers with a medium level of polymorphisms and are highly abundant. AFLP markers require using the PCR on a subset of restriction fragments from extended adapter primers. These markers are both dominant and codominant are highly abundant in genomes and exhibit a medium level of polymorphism.

[0073] A PCR probe is a nucleic acid molecule capable of initiating a polymerase activity while in a double-stranded structure to with another nucleic acid. Various methods for determining the structure of PCR probes and PCR techniques exist in the art. Computer generated searches using programs such as Primer3 (on the Worldwide web at genome.wi.mit.edu/cgi-bin/primer/primer3.cgi), STSPipeline (on the Worldwide web at genome.wi.mit.edu/cgi-bin/www-STS_Pipeline), or GeneUp (Pesole et al., BioTechniques 25:112-123 (1998)), for example, can be used to identify potential PCR primers.

[0074] It is understood that a fragment of one or more of the nucleic acid molecules of the present invention may be a probe and preferably a PCR probe.

[0075] (b) Protein and Peptide Molecules

[0076] A class of agents comprises one or more of the protein or peptide molecules encoded by SEQ ID NO: 1 through SEQ ID NO: 463,173 or one or more of the protein or fragment thereof or peptide molecules encoded by other nucleic acid agents of the present invention. As used herein, the term “protein molecule” or “peptide molecule” includes any molecule that comprises five or more amino acids. It is well know in the art that proteins may undergo modification, including post-translational modifications, such as, but not limited to, disulfide bond formation, glycosylation, phosphorylation, or oligomerization. Thus, as used herein, the term “protein molecule” or “peptide molecule” includes any protein molecule that is modified by any biological or non-biological process. The terms “amino acid” and “amino acids” refer to all naturally occurring L-amino acids. This definition is meant to include norleucine, ornithine, homocysteine, and homoserine.

[0077] One or more of the protein or fragment of peptide molecules may be produced via chemical synthesis, or more preferably, by expression in a suitable bacterial or eukaryotic host. Suitable methods for expression are described by Sambrook, et al., (In: Molecular Cloning, A Laboratory Manual, 2nd Edition, Cold Spring Harbor Press, Cold Spring Harbor, N.Y. (1989)), or similar texts.

[0078] A “protein fragment” is a peptide or polypeptide molecule whose amino acid sequence comprises a subset of the amino acid sequence of that protein. A protein or fragment thereof that comprises one or more additional peptide regions not derived from that protein is a “fusion” protein. Such molecules may be derivatized to contain carbohydrate or other moieties (such as keyhole limpet hemocyanin, etc.). Fusion protein or peptide molecules of the present invention are preferably produced via recombinant means.

[0079] Another class of agents comprise protein or peptide molecules encoded by SEQ ID NO: 1 through SEQ ID NO: 463,173 or complements thereof or, fragments or fusions thereof in which non-essential, or not relevant, amino acid residues have been added, replaced, or deleted. An example of such a homologue is the homologue protein of all non-soybean, non-maize, non-rice, non-cotton, non-sorghum, non-teosinte, non-Arabidopsis and non-wheat plant species, including but not limited to alfalfa, barley, Brassica, broccoli, cabbage, citrus, garlic, oat, oilseed rape, onion, canola, flax, an ornamental plant, pea, peanut, pepper, potato, rye, strawberry, sugarcane, sugarbeet, tomato, poplar, pine, fir, eucalyptus, apple, lettuce, peas, lentils, grape, banana, tea, turf grasses, etc. Particularly preferred non-soybean, non-maize, non-rice, non-cotton, non-sorghum, non-teosinte, non-Arabidopsis and non-wheat plants to utilize for the isolation of homologues would include alfalfa, barley, oat, oilseed rape, canola, ornamentals, sugarcane, sugarbeet, tomato, potato, and turf grasses. Such a homologue can be obtained by any of a variety of methods. Most preferably, as indicated above, one or more of the disclosed sequences (SEQ ID NO: 1 through SEQ ID NO: 463,173 or complements thereof) will be used to define a pair of primers that may be used to isolate the homologue-encoding nucleic acid molecules from any desired species. Such molecules can be expressed to yield homologues by recombinant means.

[0080] (c) Antibodies

[0081] One aspect of the present invention concerns antibodies, single-chain antigen binding molecules, or other proteins that specifically bind to one or more of the protein or peptide molecules of the present invention and their homologues, fusions or fragments. Such antibodies may be used to quantitatively or qualitatively detect the protein or peptide molecules of the present invention. As used herein, an antibody or peptide is said to “specifically bind” to a protein or peptide molecule of the present invention if such binding is not competitively inhibited by the presence of non-related molecules.

[0082] Nucleic acid molecules that encode all or part of the protein of the present invention can be expressed, via recombinant means, to yield protein or peptides that can in turn be used to elicit antibodies that are capable of binding the expressed protein or peptide. Such antibodies may be used in immunoassays for that protein. Such protein-encoding molecules, or their fragments may be a “fusion” molecule (i.e., a part of a larger nucleic acid molecule) such that, upon expression, a fusion protein is produced. It is understood that any of the nucleic acid molecules of the present invention may be expressed, via recombinant means, to yield proteins or peptides encoded by these nucleic acid molecules.

[0083] The antibodies that specifically bind proteins and protein fragments of the present invention may be polyclonal or monoclonal and may comprise intact immunoglobulins, or antigen binding portions of immunoglobulins fragments (such as (F(ab′), F(ab′)₂), or single-chain immunoglobulins producible, for example, via recombinant means. It is understood that practitioners are familiar with the standard resource materials which describe specific conditions and procedures for the construction, manipulation and isolation of antibodies (see, for example, Harlow and Lane, In: Antibodies: A Laboratory Manual, Cold Spring Harbor Press, Cold Spring Harbor, N.Y. (1988)).

[0084] Murine monoclonal antibodies are particularly preferred. BALB/c mice are preferred for this purpose, however, equivalent strains may also be used. The animals are preferably immunized with approximately 25 μg of purified protein (or fragment thereof) that has been emulsified in a suitable adjuvant (such as TiterMax adjuvant (Vaxcel, Norcross, Ga.)). Immunization is preferably conducted at two intramuscular sites, one intraperitoneal site and one subcutaneous site at the base of the tail. An additional i.v. injection of approximately 25 μg of antigen is preferably given in normal saline three weeks later. After approximately 11 days following the second injection, the mice may be bled and the blood screened for the presence of anti-protein or peptide antibodies. Preferably, a direct binding Enzyme-Linked Immunoassay (ELISA) is employed for this purpose.

[0085] More preferably, the mouse having the highest antibody titer is given a third i.v. injection of approximately 25 μg of the same protein or fragment. The splenic leukocytes from this animal may be recovered 3 days later and then permitted to fuse, most preferably, using polyethylene glycol, with cells of a suitable myeloma cell line (such as, for example, the P3X63Ag8.653 myeloma cell line). Hybridoma cells are selected by culturing the cells under “HAT” (hypoxanthine-aminopterin-thymine) selection for about one week. The resulting clones may then be screened for their capacity to produce monoclonal antibodies (“mAbs”), preferably by direct ELISA.

[0086] In one embodiment, anti-protein or peptide monoclonal antibodies are isolated using a fusion of a protein or peptide of the present invention, or conjugate of a protein or peptide of the present invention, as immunogens. Thus, for example, a group of mice can be immunized using a fusion protein emulsified in Freund's complete adjuvant (e.g. approximately 50 μg of antigen per immunization). At three-week intervals, an identical amount of antigen is emulsified in Freund's incomplete adjuvant and used to immunize the animals. Ten days following the third immunization, serum samples are taken and evaluated for the presence of antibody. If antibody titers are too low, a fourth booster can be employed. Polysera capable of binding the protein or peptide can also be obtained using this method.

[0087] In a preferred procedure for obtaining monoclonal antibodies, the spleens of the above-described immunized mice are removed, disrupted and immune splenocytes are isolated over a ficoll gradient. The isolated splenocytes are fused, using polyethylene glycol with BALB/c-derived HGPRT (hypoxanthine guanine phosphoribosyl transferase) deficient P3x63xAg8.653 plasmacytoma cells. The fused cells are plated into 96 well microtiter plates and screened for hybridoma fusion cells by their capacity to grow in culture medium supplemented with hypothanthine, aminopterin and thymidine for approximately 2-3 weeks.

[0088] Hybridoma cells that arise from such incubation are preferably screened for their capacity to produce an immunoglobulin that binds to a protein of interest. An indirect ELISA may be used for this purpose. In brief, the supernatants of hybridomas are incubated in microtiter wells that contain immobilized protein. After washing, the titer of bound immunoglobulin can be determined using, for example, a goat anti-mouse antibody conjugated to horseradish peroxidase. After additional washing, the amount of immobilized enzyme is determined (for example through the use of a chromogenic substrate). Such screening is performed as quickly as possible after the identification of the hybridoma in order to ensure that a desired clone is not overgrown by non-secreting neighbor cells. Desirably, the fusion plates are screened several times since the rates of hybridoma growth vary. In a preferred sub-embodiment, a different antigenic form may be used to screen the hybridoma. Thus, for example, the splenocytes may be immunized with one immunogen, but the resulting hybridomas can be screened using a different immunogen. It is understood that any of the protein or peptide molecules of the present invention may be used to raise antibodies.

[0089] As discussed below, such antibody molecules or their fragments may be used for diagnostic purposes. Where the antibodies are intended for diagnostic purposes, it may be desirable to derivatize them, for example with a ligand group (such as biotin) or a detectable marker group (such as a fluorescent group, a radioisotope or an enzyme).

[0090] The ability to produce antibodies that bind the protein or peptide molecules of the present invention permits the identification of mimetic compounds of those molecules. A “mimetic compound” is a compound that is not that compound, or a fragment of that compound, but which nonetheless exhibits an ability to specifically bind to antibodies directed against that compound.

[0091] It is understood that any of the agents of the present invention can be substantially purified and/or be biologically active and/or recombinant.

[0092] (d) Plant Constructs and Plant Transformants

[0093] One or more of the nucleic acid molecules of the invention may be used in plant transformation or transfection. Exogenous genetic material may be transferred into a plant cell and the plant cell regenerated into a whole, fertile or sterile plant. Exogenous genetic material is any genetic material, whether naturally occurring or otherwise, from any source that is capable of being inserted into any organism. In a preferred embodiment the exogenous genetic material includes a nucleic acid molecule of the present invention, preferably a nucleic acid molecule having a sequence selected from the group consisting of SEQ ID NO: 1 through SEQ ID NO: 463,173 or complements thereof or fragments of either.

[0094] Such genetic material may be transferred into either monocotyledons and dicotyledons including, but not limited to maize, soybean, Arabidopsis, phaseolus, peanut, alfalfa, wheat, rice, oat, sorghum, rye, tritordeum, millet, fescue, perennial ryegrass, sugarcane, cranberry, papaya, banana, banana, muskmelon, apple, cucumber, dendrobium, gladiolus, chrysanthemum, liliacea, cotton, eucalyptus, sunflower, canola, turfgrass, sugarbeet, coffee and dioscorea (Christou, In: Particle Bombardment for Genetic Engineering of Plants, Biotechnology Intelligence Unit. Academic Press, San Diego, Calif. (1996)).

[0095] Transfer of a nucleic acid that encodes for a protein can result in overexpression of that protein in a transformed cell or transgenic plant. One or more of the proteins or fragments thereof encoded by nucleic acid molecules of the invention may be overexpressed in a transformed cell or transformed plant. Such overexpression may be the result of transient or stable transfer of the exogenous genetic material.

[0096] Exogenous genetic material may be transferred into a host cell by the use of a DNA vector or construct designed for such a purpose. Design of such a vector is generally within the skill of the art (See, Plant Molecular Biology: A Laboratory Manual, Clark (ed.), Springier, N.Y. (1997)).

[0097] A construct or vector may include a plant promoter to express the protein or protein fragment of choice. A number of promoters, which are active in plant cells, have been described in the literature. These include the nopaline synthase (NOS) promoter (Ebert et al., Proc. Natl. Acad. Sci. (U.S.A.) 84:5745-5749 (1987)), the octopine synthase (OCS) promoter (which are carried on tumor-inducing plasmids of Agrobacterium tumefaciens), the caulimovirus promoters such as the cauliflower mosaic virus (CaMV) 19S promoter (Lawton et al., Plant Mol. Biol. 9:315-324 (1987)) and the CaMV 35S promoter (Odell et al., Nature 313:810-812 (1985)), the figwort mosaic virus 35S-promoter, the light-inducible promoter from the small subunit of ribulose-1,5-bis-phosphate carboxylase (ssRUBISCO), the Adh promoter (Walker et al., Proc. Natl. Acad. Sci. (U.S.A.) 84:6624-6628 (1987)), the sucrose synthase promoter (Yang et al., Proc. Natl. Acad. Sci. (U.S.A.) 87:4144-4148 (1990)), the R gene complex promoter (Chandler et al., The Plant Cell 1:1175-1183 (1989)) and the chlorophyll a/b binding protein gene promoter, etc. These promoters have been used to create DNA constructs that have been expressed in plants; see, e.g., PCT publication WO 84/02913. The CaMV 35S promoters are preferred for use in plants. Promoters known or found to cause transcription of DNA in plant cells can be used in the invention.

[0098] For the purpose of expression in source tissues of the plant, such as the leaf, seed, root or stem, it is preferred that the promoters utilized have relatively high expression in these specific tissues. Tissue-specific expression of a protein of the present invention is a particularly preferred embodiment. For this purpose, one may choose from a number of promoters for genes with tissue- or cell-specific or -enhanced expression. Examples of such promoters reported in the literature include the chloroplast glutamine synthetase GS2 promoter from pea (Edwards et al., Proc. Natl. Acad. Sci. (U.S.A.) 87:3459-3463 (1990)), the chloroplast fructose-1,6-biphosphatase (FBPase) promoter from wheat (Lloyd et al., Mol. Gen. Genet. 225:209-216 (1991)), the nuclear photosynthetic ST-LS1 promoter from potato (Stockhaus et al., EMBO J. 8:2445-2451 (1989)), the serine/threonine kinase (PAL) promoter and the glucoamylase (CHS) promoter from Arabidopsis thaliana. Also reported to be active in photosynthetically active tissues are the ribulose-1,5-bisphosphate carboxylase (RbcS) promoter from eastern larch (Larix laricina), the promoter for the cab gene, cab6, from pine (Yamamoto et al., Plant Cell Physiol. 35:773-778 (1994)), the promoter for the Cab-1 gene from wheat (Fejes et al., Plant Mol. Biol. 15:921-932 (1990)), the promoter for the CAB-1 gene from spinach (Lubberstedt et al., Plant Physiol. 104:997-1006 (1994)), the promoter for the cab1R gene from rice (Luan et al., Plant Cell. 4:971-981 (1992)), the pyruvate, orthophosphate dikinase (PPDK) promoter from maize (Matsuoka et al., Proc. Natl. Acad. Sci. (U.S.A.) 90: 9586-9590 (1993)), the promoter for the tobacco Lhcb1*2 gene (Cerdan et al., Plant Mol. Biol. 33:245-255 (1997)), the Arabidopsis thaliana SUC2 sucrose-H+ symporter promoter (Truernit et al., Planta. 196:564-570 (1995)) and the promoter for the thylakoid membrane proteins from spinach (psad, psaF, psaE, PC, FNR, atpC, atpD, cab, rbcS). Other promoters for the chlorophyll a/b-binding proteins may also be utilized in the invention, such as the promoters for LhcB gene and PsbP gene from white mustard (Sinapis alba; Kretsch et al., Plant Mol. Biol. 28:219-229 (1995)).

[0099] For the purpose of expression in sink tissues of the plant, such as the tuber of the potato plant, the fruit of tomato, or the seed of maize, wheat, rice and barley, it is preferred that the promoters utilized in the invention have relatively high expression in these specific tissues. A number of promoters for genes with tuber-specific or -enhanced expression are known, including the class I patatin promoter (Bevan et al., EMBO J. 8:1899-1906 (1986); Jefferson et al., Plant Mol. Biol. 14:995-1006 (1990)), the promoter for the potato tuber ADPGPP genes, both the large and small subunits, the sucrose synthase promoter (Salanoubat and Belliard, Gene 60:47-56 (1987), Salanoubat and Belliard, Gene 84:181-185 (1989)), the promoter for the major tuber proteins including the 22 kd protein complexes and proteinase inhibitors (Hannapel, Plant Physiol. 101:703-704 (1993)), the promoter for the granule bound starch synthase gene (GBSS) (Visser et al., Plant Mol. Biol. 17:691-699 (1991)) and other class I and II patatins promoters (Koster-Topfer et al., Mol Gen Genet. 219:390-396 (1989); Mignery et al., Gene. 62:27-44 (1988)).

[0100] Other promoters can also be used to express a protein or fragment thereof in specific tissues, such as seeds or fruits. The promoter for β-conglycinin (Chen et al., Dev. Genet. 10: 112-122 (1989)) or other seed-specific promoters such as the napin and phaseolin promoters, can be used. The zeins are a group of storage proteins found in maize endosperm. Genomic clones for zein genes have been isolated (Pedersen et al., Cell 29:1015-1026 (1982)) and the promoters from these clones, including the 15 kD, 16 kD, 19 kD, 22 kD, 27 kD and genes, could also be used. Other promoters known to function, for example, in maize include the promoters for the following genes: waxy, Brittle, Shrunken 2, Branching enzymes I and II, starch synthases, debranching enzymes, oleosins, glutelins and sucrose synthases. A particularly preferred promoter for maize endosperm expression is the promoter for the glutelin gene from rice, more particularly the Osgt-1 promoter (Zheng et al., Mol. Cell Biol. 13:5829-5842 (1993)). Examples of promoters suitable for expression in wheat include those promoters for the ADPglucose pyrosynthase (ADPGPP) subunits, the granule bound and other starch synthase, the branching and debranching enzymes, the embryogenesis-abundant proteins, the gliadins and the glutenins. Examples of such promoters in rice include those promoters for the ADPGPP subunits, the granule bound and other starch synthase, the branching enzymes, the debranching enzymes, sucrose synthases and the glutelins. A particularly preferred promoter is the promoter for rice glutelin, Osgt-1. Examples of such promoters for barley include those for the ADPGPP subunits, the granule bound and other starch synthase, the branching enzymes, the debranching enzymes, sucrose synthases, the hordeins, the embryo globulins and the aleurone specific proteins.

[0101] Root specific promoters may also be used. An example of such a promoter is the promoter for the acid chitinase gene (Samac et al., Plant Mol. Biol. 25:587-596 (1994)). Expression in root tissue could also be accomplished by utilizing the root specific subdomains of the CaMV35S promoter that have been identified (Lam et al., Proc. Natl. Acad. Sci. (U.S.A.) 86:7890-7894 (1989)). Other root cell specific promoters include those reported by Conkling et al. (Conkling et al., Plant Physiol. 93:1203-1211 (1990)).

[0102] Additional promoters that may be utilized are described, for example, in U.S. Pat. Nos. 5,378,619; 5,391,725; 5,428,147; 5,447,858; 5,608,144; 5,608,144; 5,614,399; 5,633,441; 5,633,435; and 4,633,436. In addition, a tissue specific enhancer may be used (Fromm et al., The Plant Cell 1:977-984 (1989)).

[0103] Constructs or vectors may also include, with the coding region of interest, a nucleic acid sequence that acts, in whole or in part, to terminate transcription of that region. A number of such sequences have been isolated, including the Tr7 3′ sequence and the NOS 3′ sequence (Ingelbrecht et al., The Plant Cell 1:671-680 (1989); Bevan et al., Nucleic Acids Res. 11:369-385 (1983)).

[0104] A vector or construct may also include regulatory elements. Examples of such include the Adh intron 1 (Callis et al., Genes and Develop. 1:1183-1200 (1987)), the sucrose synthase intron (Vasil et al., Plant Physiol. 91:1575-1579 (1989)) and the TMV omega element (Gallie et al., The Plant Cell 1:301-311 (1989)). These and other regulatory elements may be included when appropriate.

[0105] A vector or construct may also include a selectable marker. Selectable markers may also be used to select for plants or plant cells that contain the exogenous genetic material. Examples of such include, but are not limited to: a neo gene (Potrykus et al., Mol. Gen. Genet. 199:183-188 (1985)), which codes for kanamycin resistance and can be selected for using kanamycin, G418, etc.; a bar gene which codes for bialaphos resistance; a mutant EPSP synthase gene (Hinchee et al., Bio/Technology 6:915-922 (1988)) which encodes glyphosate resistance; a nitrilase gene which confers resistance to bromoxynil (Stalker et al., J. Biol. Chem. 263:6310-6314 (1988)); a mutant acetolactate synthase gene (ALS) which confers imidazolinone or sulphonylurea resistance (European Patent Application 154,204 (Sep. 11, 1985)); and a methotrexate resistant DHFR gene (Thillet et al., J. Biol. Chem. 263:12500-12508 (1988)).

[0106] A vector or construct may also include a transit peptide. Incorporation of a suitable chloroplast transit peptide may also be employed (European Patent Application Publication Number 0218571). Translational enhancers may also be incorporated as part of the vector DNA. DNA constructs could contain one or more 5′ non-translated leader sequences that may serve to enhance expression of the gene products from the resulting mRNA transcripts. Such sequences may be derived from the promoter selected to express the gene or can be specifically modified to increase translation of the mRNA. Such regions may also be obtained from viral RNAs, from suitable eukaryotic genes, or from a synthetic gene sequence. For a review of optimizing expression of transgenes, see Koziel et al., Plant Mol. Biol. 32:393-405 (1996).

[0107] A vector or construct may also include a screenable marker. Screenable markers may be used to monitor expression. Exemplary screenable markers include: a β-glucuronidase or uidA gene (GUS) which encodes an enzyme for which various chromogenic substrates are known (Jefferson, Plant Mol. Biol, Rep. 5:387-405 (1987); Jefferson et al., EMBO J. 6:3901-3907 (1987)); an R-locus gene, which encodes a product that regulates the production of anthocyanin pigments (red color) in plant tissues (Dellaporta et al., Stadler Symposium 11:263-282 (1988)); a β-lactamase gene (Sutcliffe et al., Proc. Natl. Acad. Sci. (U.S.A.) 75:3737-3741 (1978)), a gene which encodes an enzyme for which various chromogenic substrates are known (e.g., PADAC, a chromogenic cephalosporin); a luciferase gene (Ow et al., Science 234:856-859 (1986)); a xy1E gene (Zukowsky et al., Proc. Natl. Acad. Sci. (U.S.A.) 80:1101-1105 (1983)) which encodes a catechol dioxygenase that can convert chromogenic catechols; an α-amylase gene (Ikatu et al., Bio/Technol. 8:241-242 (1990)); a tyrosinase gene (Katz et al., J. Gen. Microbiol. 129:2703-2714 (1983)) which encodes an enzyme capable of oxidizing tyrosine to DOPA and dopaquinone which in turn condenses to melanin; an α-galactosidase, which will turn a chromogenic α-galactose substrate.

[0108] Included within the terms “selectable or screenable marker genes” are also genes that encode a secretable marker whose secretion can be detected as a means of identifying or selecting for transformed cells. Examples include markers that encode a secretable antigen that can be identified by antibody interaction, or even secretable enzymes that can be detected catalytically. Secretable proteins fall into a number of classes, including small, diffusible proteins which are detectable, (e.g., by ELISA), small active enzymes which are detectable in extracellular solution (e.g., α-amylase, β-lactamase, phosphinothricin transferase), or proteins which are inserted or trapped in the cell wall (such as proteins which include a leader sequence such as that found in the expression unit of extension or tobacco PR-S). Other possible selectable and/or screenable marker genes will be apparent to those of skill in the art.

[0109] There are many methods for introducing transforming nucleic acid molecules into plant cells. Suitable methods are believed to include virtually any method by which nucleic acid molecules may be introduced into a cell, such as by Agrobacterium infection or direct delivery of nucleic acid molecules such as, for example, by PEG-mediated transformation, by electroporation or by acceleration of DNA coated particles, etc (Potrykus, Ann. Rev. Plant Physiol. Plant Mol. Biol. 42:205-225 (1991); Vasil, Plant Mol. Biol. 25:925-937 (1994)). For example, electroporation has been used to transform maize protoplasts (Fromm et al., Nature 312:791-793 (1986)).

[0110] Other vector systems suitable for introducing transforming DNA into a host plant cell include but are not limited to binary artificial chromosome (BIBAC) vectors (Hamilton et al., Gene 200:107-116 (1997)); and transfection with RNA viral vectors (Della-Cioppa et al., Ann. N.Y. Acad. Sci. (1996), 792 (Engineering Plants for Commercial Products and Applications), 57-61). Additional vector systems also include plant selectable YAC vectors such as those described in Mullen et al., Molecular Breeding 4:449-457 (1988)).

[0111] Technology for introduction of DNA into cells is well known to those of skill in the art. Four general methods for delivering a gene into cells have been described: (1) chemical methods (Graham and van der Eb, Virology 54:536-539 (1973)); (2) physical methods such as microinjection (Capecchi, Cell 22:479-488 (1980)), electroporation (Wong and Neumann, Biochem. Biophys. Res. Commun. 107:584-587 (1982); Fromm et al., Proc. Natl. Acad. Sci. (U.S.A.) 82:5824-5828 (1985); U.S. Pat. No. 5,384,253); and the gene gun (Johnston and Tang, Methods Cell Biol. 43:353-365 (1994)); (3) viral vectors (Clapp, Clin. Perinatol. 20:155-168 (1993); Lu et al., J. Exp. Med. 178:2089-2096 (1993); Eglitis and Anderson, Biotechniques 6:608-614 (1988)); and (4) receptor-mediated mechanisms (Curiel et al., Hum. Gen. Ther. 3:147-154 (1992), Wagner et al., Proc. Natl. Acad. Sci. (USA) 89:6099-6103 (1992)).

[0112] Acceleration methods that may be used include, for example, microprojectile bombardment and the like. One example of a method for delivering transforming nucleic acid molecules to plant cells is microprojectile bombardment. This method has been reviewed by Yang and Christou (eds.), Particle Bombardment Technology for Gene Transfer, Oxford Press, Oxford, England (1994)). Non-biological particles (microprojectiles) that may be coated with nucleic acids and delivered into cells by a propelling force. Exemplary particles include those comprised of tungsten, gold, platinum and the like.

[0113] A particular advantage of microprojectile bombardment, in addition to it being an effective means of reproducibly transforming monocots, is that neither the isolation of protoplasts (Cristou et al., Plant Physiol. 87:671-674 (1988)) nor the susceptibility of Agrobacterium infection are required. An illustrative embodiment of a method for delivering DNA into maize cells by acceleration is a biolistics α-particle delivery system, which can be used to propel particles coated with DNA through a screen, such as a stainless steel or Nytex screen, onto a filter surface covered with corn cells cultured in suspension. Gordon-Kamm et al., describes the basic procedure for coating tungsten particles with DNA (Gordon-Kamm et al., Plant Cell 2:603-618 (1990)). The screen disperses the tungsten nucleic acid particles so that they are not delivered to the recipient cells in large aggregates. A particle delivery system suitable for use with the invention is the helium acceleration PDS-1000/He gun is available from Bio-Rad Laboratories (Bio-Rad, Hercules, Calif.)(Sanford et al., Technique 3:3-16 (1991)).

[0114] For the bombardment, cells in suspension may be concentrated on filters. Filters containing the cells to be bombarded are positioned at an appropriate distance below the microprojectile stopping plate. If desired, one or more screens are also positioned between the gun and the cells to be bombarded.

[0115] Alternatively, immature embryos or other target cells may be arranged on solid culture medium. The cells to be bombarded are positioned at an appropriate distance below the microprojectile stopping plate. If desired, one or more screens are also positioned between the acceleration device and the cells to be bombarded. Through the use of techniques set forth herein one may obtain up to 1000 or more foci of cells transiently expressing a marker gene. The number of cells in a focus which express the exogenous gene product 48 hours post-bombardment often range from one to ten and average one to three.

[0116] In bombardment transformation, one may optimize the pre-bombardment culturing conditions and the bombardment parameters to yield the maximum numbers of stable transformants. Both the physical and biological parameters for bombardment are important in this technology. Physical factors are those that involve manipulating the DNA/microprojectile precipitate or those that affect the flight and velocity of either the macro- or microprojectiles. Biological factors include all steps involved in manipulation of cells before and immediately after bombardment, the osmotic adjustment of target cells to help alleviate the trauma associated with bombardment and also the nature of the transforming DNA, such as linearized DNA or intact supercoiled plasmids. It is believed that pre-bombardment manipulations are especially important for successful transformation of immature embryos.

[0117] In another alternative embodiment, plastids can be stably transformed. Methods disclosed for plastid transformation in higher plants include the particle gun delivery of DNA containing a selectable marker and targeting of the DNA to the plastid genome through homologous recombination (Svab et al., Proc. Natl. Acad. Sci. (U.S.A.) 87:8526-8530 (1990); Svab and Maliga, Proc. Natl. Acad. Sci. (U.S.A.) 90:913-917 (1993); Staub and Maliga, EMBO J. 12:601-606 (1993); U.S. Pat. Nos. 5,451,513 and 5,545,818).

[0118] Accordingly, it is contemplated that one may wish to adjust various aspects of the bombardment parameters in small-scale studies to fully optimize the conditions. One may particularly wish to adjust physical parameters such as gap distance, flight distance, tissue distance and helium pressure. One may also minimize the trauma reduction factors by modifying conditions which influence the physiological state of the recipient cells and which may therefore influence transformation and integration efficiencies. For example, the osmotic state, tissue hydration and the subculture stage or cell cycle of the recipient cells may be adjusted for optimum transformation. The execution of other routine adjustments will be known to those of skill in the art in light of the present disclosure.

[0119] Agrobacterium-mediated transfer is a widely applicable system for introducing genes into plant cells because the DNA can be introduced into whole plant tissues, thereby bypassing the need for regeneration of an intact plant from a protoplast. The use of Agrobacterium-mediated plant integrating vectors to introduce DNA into plant cells is well known in the art. See, for example the methods described by Fraley et al., Bio/Technology 3:629-635 (1985) and Rogers et al., Methods Enzymol. 153:253-277 (1987). Further, the integration of the Ti-DNA is a relatively precise process resulting in few rearrangements. The region of DNA to be transferred is defined by the border sequences and intervening DNA is usually inserted into the plant genome as described (Spielmann et al., Mol. Gen. Genet. 205:34 (1986)).

[0120] Modern Agrobacterium transformation vectors are capable of replication in E. coli as well as Agrobacterium, allowing for convenient manipulations as described (Klee et al., In: Plant DNA Infectious Agents, Hohn and Schell (eds.), Springer-Verlag, New York, pp. 179-203 (1985)). Moreover, technological advances in vectors for Agrobacterium-mediated gene transfer have improved the arrangement of genes and restriction sites in the vectors to facilitate construction of vectors capable of expressing various polypeptide coding genes. The vectors described have convenient multi-linker regions flanked by a promoter and a polyadenylation site for direct expression of inserted polypeptide coding genes and are suitable for present purposes (Rogers et al., Methods Enzymol. 153:253-277 (1987)). In addition, Agrobacterium containing both armed and disarmed Ti genes can be used for the transformations. In those plant strains where Agrobacterium-mediated transformation is efficient, it is the method of choice because of the facile and defined nature of the gene transfer.

[0121] A transgenic plant formed using Agrobacterium transformation methods typically contains a single gene on one chromosome. Such transgenic plants can be referred to as being heterozygous for the added gene. More preferred is a transgenic plant that is homozygous for the added structural gene; i.e., a transgenic plant that contains two added genes, one gene at the same locus on each chromosome of a chromosome pair. A homozygous transgenic plant can be obtained by sexually mating (selfing) an independent segregant transgenic plant that contains a single added gene, germinating some of the seed produced and analyzing the resulting plants produced for the gene of interest.

[0122] It is also to be understood that two different transgenic plants can also be mated to produce offspring that contain two independently segregating, exogenous genes. Selfing of appropriate progeny can produce plants that are homozygous for both added, exogenous genes that encode a polypeptide of interest. Backcrossing to a parental plant and out-crossing with a non-transgenic plant are also contemplated, as is vegetative propagation.

[0123] Transformation of plant protoplasts can be achieved using methods based on calcium phosphate precipitation, polyethylene glycol treatment, electroporation and combinations of these treatments (See, for example, Potrykus et al., Mol. Gen. Genet. 205:193-200 (1986); Lorz et al., Mol. Gen. Genet. 199:178 (1985); Fromm et al., Nature 319:791 (1986); Uchimiya et al., Mol. Gen. Genet. 204:204 (1986); Marcotte et al., Nature 335:454-457 (1988)).

[0124] Application of these systems to different plant strains depends upon the ability to regenerate that particular plant strain from protoplasts. Illustrative methods for the regeneration of cereals from protoplasts are described (Fujimura et al., Plant Tissue Culture Letters 2:74 (1985); Toriyama et al., Theor Appl. Genet. 205:34 (1986); Yamada et al., Plant Cell Rep. 4:85 (1986); Abdullah et al., Biotechnology 4:1087 (1986)).

[0125] To transform plant strains that cannot be successfully regenerated from protoplasts, other ways to introduce DNA into intact cells or tissues can be utilized. For example, regeneration of cereals from immature embryos or explants can be effected as described (Vasil, Biotechnology 6:397 (1988)). In addition, “particle gun” or high-velocity microprojectile technology can be utilized (Vasil et al., Bio/Technology 10:667 (1992)).

[0126] Using the latter technology, DNA is carried through the cell wall and into the cytoplasm on the surface of small metal particles as described (Klein et al., Nature 328:70 (1987); Klein et al., Proc. Natl. Acad. Sci. (U.S.A.) 85:8502-8505 (1988); McCabe et al., Bio/Technology 6:923 (1988)). The metal particles penetrate through several layers of cells and thus allow the transformation of cells within tissue explants.

[0127] Other methods of cell transformation can also be used and include but are not limited to introduction of DNA into plants by direct DNA transfer into pollen (Hess et al., Intern Rev. Cytol. 107:367 (1987); Luo et al., Plant Mol Biol. Reporter 6:165 (1988)), by direct injection of DNA into reproductive organs of a plant (Pena et al., Nature 325:274 (1987)), or by direct injection of DNA into the cells of immature embryos followed by the rehydration of desiccated embryos (Neuhaus et al., Theor. Appl. Genet. 75:30 (1987)).

[0128] The regeneration, development and cultivation of plants from single plant protoplast transformants or from various transformed explants are well known in the art (Weissbach and Weissbach, In: Methodsfor Plant Molecular Biology, Academic Press, San Diego, Calif., (1988)). This regeneration and growth process typically includes the steps of selection of transformed cells, culturing those individualized cells through the usual stages of embryonic development through the rooted plantlet stage. Transgenic embryos and seeds are similarly regenerated. The resulting transgenic rooted shoots are thereafter planted in an appropriate plant growth medium such as soil.

[0129] The development or regeneration of plants containing the foreign, exogenous gene that encodes a protein of interest is well known in the art. Preferably, the regenerated plants are self-pollinated to provide homozygous transgenic plants. Otherwise, pollen obtained from the regenerated plants is crossed to seed-grown plants of agronomically important lines. Conversely, pollen from plants of these important lines is used to pollinate regenerated plants. A transgenic plant of the invention containing a desired polypeptide is cultivated using methods well known to one skilled in the art.

[0130] There are a variety of methods for the regeneration of plants from plant tissue. The particular method of regeneration will depend on the starting plant tissue and the particular plant species to be regenerated.

[0131] Methods for transforming dicots, primarily by use of Agrobacterium tumefaciens and obtaining transgenic plants have been published for cotton (U.S. Pat. No. 5,004,863; U.S. Pat. No. 5,159,135; U.S. Pat. No. 5,518,908); soybean (U.S. Pat. No. 5,569,834; U.S. Pat. No. 5,416,011; McCabe et. al., Biotechnology 6:923 (1988); Christou et al., Plant Physiol. 87:671-674 (1988)); Brassica (U.S. Pat. No. 5,463,174); peanut (Cheng et al., Plant Cell Rep. 15:653-657 (1996), McKently et al., Plant Cell Rep. 14:699-703 (1995)); papaya; and pea (Grant et al., Plant Cell Rep. 15:254-258 (1995)).

[0132] Transformation of monocotyledons using electroporation, particle bombardment and Agrobacterium have also been reported. Transformation and plant regeneration have been achieved in asparagus (Bytebier et al., Proc. Natl. Acad. Sci. (U.S.A.) 84:5354 (1987)); barley (Wan and Lemaux, Plant Physiol 104:37 (1994)); maize (Rhodes et al., Science 240:204 (1988); Gordon-Kamm et al., Plant Cell 2:603-618 (1990); Fromm et al., Bio/Technology 8:833 (1990); Koziel et al., Bio/Technology 11:194 (1993); Armstrong et al., Crop Science 35:550-557 (1995)); oat (Somers et al., Bio/Technology 10:1589 (1992)); orchard grass (Horn et al., Plant Cell Rep. 7:469 (1988)); rice (Toriyama et al., Theor Appl. Genet. 205:34 (1986); Part et al., Plant Mol. Biol. 32:1135-1148 (1996); Abedinia et al., Aust. J. Plant Physiol. 24:133-141 (1997); Zhang and Wu, Theor. Appl. Genet. 76:835 (1988); Zhang et al., Plant Cell Rep. 7:379 (1988); Battraw and Hall, Plant Sci. 86:191-202 (1992); Christou et al., Bio/Technology 9:957 (1991)); rye (De la Pena et al., Nature 325:274 (1987)); sugarcane (Bower and Birch, Plant J. 2:409 (1992)); tall fescue (Wang et al., Bio/Technology 10:691 (1992)) and wheat (Vasil et al., Bio/Technology 10:667 (1992); U.S. Pat. No. 5,631,152).

[0133] Assays for gene expression based on the transient expression of cloned nucleic acid constructs have been developed by introducing the nucleic acid molecules into plant cells by polyethylene glycol treatment, electroporation, or particle bombardment (Marcotte et al., Nature 335:454-457 (1988); Marcotte et al., Plant Cell 1:523-532 (1989); McCarty et al., Cell 66:895-905 (1991); Hattori et al., Genes Dev. 6:609-618 (1992); Goff et al., EMBO J. 9:2517-2522 (1990)). Transient expression systems may be used to functionally dissect gene constructs (see generally, Mailga et al., Methods in Plant Molecular Biology, Cold Spring Harbor Press (1995)).

[0134] Any of the nucleic acid molecules of the invention may be introduced into a plant cell in a permanent or transient manner in combination with other genetic elements such as vectors, promoters, enhancers, etc. Further, any of the nucleic acid molecules of the invention may be introduced into a plant cell in a manner that allows for overexpression of the protein or fragment thereof encoded by the nucleic acid molecule.

[0135] Cosuppression is the reduction in expression levels, usually at the level of RNA, of a particular endogenous gene or gene family by the expression of a homologous sense construct that is capable of transcribing mRNA of the same strandedness as the transcript of the endogenous gene (Napoli et al, Plant Cell 2:279-289 (1990); van der Krol et al., Plant Cell 2:291-299 (1990)). Cosuppression may result from stable transformation with a single copy nucleic acid molecule that is homologous to a nucleic acid sequence found within the cell (Prolls and Meyer, Plant J. 2:465-475 (1992)) or with multiple copies of a nucleic acid molecule that is homologous to a nucleic acid sequence found within the cell (Mittlesten et al., Mol. Gen. Genet. 244:325-330 (1994)). Genes, even though different, linked to homologous promoters may result in the cosuppression of the linked genes (Vaucheret, C.R. Acad. Sci. III 316:1471-1483 (1993); Flavell, Proc. Natl. Acad. Sci. (U.S.A.) 91:3490-3496 (1994)); van Blokland et al., Plant J. 6:861-877 (1994); Jorgensen, Trends Biotechnol. 8:340-344 (1990); Meins and Kunz, In: Gene Inactivation and Homologous Recombination in Plants, Paszkowski (ed.), pp. 335-348, Kluwer Academic, Netherlands (1994)).

[0136] It is understood that one or more of the nucleic acids of the invention may be introduced into a plant cell and transcribed using an appropriate promoter with such transcription resulting in the cosuppression of an endogenous protein.

[0137] Antisense approaches are a way of preventing or reducing gene function by targeting the genetic material (Mol et al., FEBS Lett. 268:427-430 (1990)). The objective of the antisense approach is to use a sequence complementary to the target gene to block its expression and create a mutant cell line or organism in which the level of a single chosen protein is selectively reduced or abolished. Antisense techniques have several advantages over other ‘reverse genetic’ approaches. The site of inactivation and its developmental effect can be manipulated by the choice of promoter for antisense genes or by the timing of external application or microinjection. Antisense can manipulate its specificity by selecting either unique regions of the target gene or regions where it shares homology to other related genes (Hiatt et aL, In: Genetic Engineering, Setlow (ed.), Vol. 11, New York: Plenum 49-63 (1989)).

[0138] The principle of regulation by antisense RNA is that RNA that is complementary to the target mRNA is introduced into cells, resulting in specific RNA:RNA duplexes being formed by base pairing between the antisense substrate and the target mRNA (Green et al., Annu. Rev. Biochem. 55:569-597 (1986)). Under one embodiment, the process involves the introduction and expression of an antisense gene sequence. Such a sequence is one in which part or all of the normal gene sequences are placed under a promoter in inverted orientation so that the ‘wrong’ or complementary strand is transcribed into a noncoding antisense RNA that hybridizes with the target mRNA and interferes with its expression (Takayama and Inouye, Crit. Rev. Biochem. Mol. Biol. 25:155-184 (1990)). An antisense vector is constructed by standard procedures and introduced into cells by transformation, transfection, electroporation, microinjection, infection, etc. The type of transformation and choice of vector will determine whether expression is transient or stable. The promoter used for the antisense gene may influence the level, timing, tissue, specificity, or inducibility of the antisense inhibition.

[0139] It is understood that the activity of a protein in a plant cell may be reduced or depressed by growing a transformed plant cell containing a nucleic acid molecule whose non-transcribed strand encodes a protein or fragment thereof.

[0140] Posttranscriptional gene silencing (PTGS) can result in virus immunity or gene silencing in plants. PTGS is induced by dsRNA and is mediated by an RNA-dependent RNA polymerase, present in the cytoplasm, that requires a dsRNA template. The dsRNA is formed by hybridization of complementary transgene mRNAs or complementary regions of the same transcript. Duplex formation can be accomplished by using transcripts from one sense gene and one antisense gene co-located in the plant genome, a single transcript that has self-complementarity, or sense and antisense transcripts from genes brought together by crossing. The dsRNA-dependent RNA polymerase makes a complementary strand from the transgene mRNA and RNAse molecules attach to this complementary strand (cRNA). These cRNA-RNAse molecules hybridize to the endogene mRNA and cleave the single-stranded RNA adjacent to the hybrid. The cleaved single-stranded RNAs are further degraded by other host RNAses because one will lack a capped 5′ end and the other will lack a poly(A) tail (Waterhouse et al., PNAS 95: 13959-13964 (1998)).

[0141] It is understood that one or more of the nucleic acids of the invention may be introduced into a plant cell and transcribed using an appropriate promoter with such transcription resulting in the postranscriptional gene silencing of an endogenous transcript.

[0142] Antibodies have been expressed in plants (Hiatt et al., Nature 342:76-78 (1989); Conrad and Fielder, Plant Mol. Biol. 26:1023-1030 (1994)). Cytoplasmic expression of a scFv (single-chain Fv antibodies) has been reported to delay infection by artichoke mottled crinkle virus. Transgenic plants that express antibodies directed against endogenous proteins may exhibit a physiological effect (Philips et al., EMBO J. 16:4489-4496 (1997); Marion-Poll, Trends in Plant Science 2:447-448 (1997)). For example, expressed anti-abscisic antibodies have been reported to result in a general perturbation of seed development (Philips et al., EMBO J. 16: 4489-4496 (1997)).

[0143] Antibodies that are catalytic may also be expressed in plants (abzymes). The principle behind abzymes is that since antibodies may be raised against many molecules, this recognition ability can be directed toward generating antibodies that bind transition states to force a chemical reaction forward (Persidas, Nature Biotechnology 15:1313-1315 (1997); Baca et al., Ann. Rev. Biophys. Biomol. Struct. 26:461-493 (1997)). The catalytic abilities of abzymes may be enhanced by site directed mutagenesis. Examples of abzymes are, for example, set forth in U.S. Pat. No: 5,658,753; U.S. Pat. No. 5,632,990; U.S. Pat. No. 5,631,137; U.S. Pat. No. 5,602,015; U.S. Pat. No. 5,559,538; U.S. Pat. No. 5,576,174; U.S. Pat. No. 5,500,358; U.S. Pat. No. 5,318,897; U.S. Pat. No. 5,298,409; U.S. Pat. No. 5,258,289 and U.S. Pat. No. 5,194,585.

[0144] It is understood that any of the antibodies of the invention may be expressed in plants and that such expression can result in a physiological effect. It is also understood that any of the expressed antibodies may be catalytic.

[0145] The present invention also provides for parts of the plants of the present invention. Plant parts, without limitation, include seed, endosperm, ovule and pollen. In a particularly preferred embodiment of the present invention, the plant part is a seed.

[0146] Exemplary Uses

[0147] Nucleic acid molecules and fragments thereof of the invention may be employed to obtain other nucleic acid molecules from the same species (nucleic acid molecules from maize may be utilized to obtain other nucleic acid molecules from maize). Such nucleic acid molecules include the nucleic acid molecules that encode the complete coding sequence of a protein and promoters and flanking sequences of such molecules. In addition, such nucleic acid molecules include nucleic acid molecules that encode for other isozymes or gene family members. Such molecules can be readily obtained by using the above-described nucleic acid molecules or fragments thereof to screen cDNA or genomic libraries. Methods for forming such libraries are well known in the art.

[0148] Nucleic acid molecules and fragments thereof of the invention may also be employed to obtain nucleic acid homologues. Such homologues include the nucleic acid molecule of other plants or other organisms (e.g., alfalfa, Arabidopsis, barley, Brassica, broccoli, cabbage, citrus, cotton, garlic, oat, oilseed rape, onion, canola, flax, an ornamental plant, pea, peanut, pepper, potato, rice, rye, sorghum, strawberry, sugarcane, sugarbeet, tomato, wheat, poplar, pine, fir, eucalyptus, apple, lettuce, lentils, grape, banana, tea, turf grasses, sunflower, oil palm, Phaseolus, etc.) including the nucleic acid molecules that encode, in whole or in part, protein homologues of other plant species or other organisms, sequences of genetic elements, such as promoters and transcriptional regulatory elements. Such molecules can be readily obtained by using the above-described nucleic acid molecules or fragments thereof to screen cDNA or genomic libraries obtained from such plant species. Methods for forming such libraries are well known in the art. Such homologue molecules may differ in their nucleotide sequences from those found in one or more of SEQ ID NO: 1 through SEQ ID NO: 463,173 or complements thereof because complete complementarity is not needed for stable hybridization. The nucleic acid molecules of the invention therefore also include molecules that, although capable of specifically hybridizing with the nucleic acid molecules may lack “complete complementarity.”

[0149] Any of a variety of methods may be used to obtain one or more of the above-described nucleic acid molecules (Zamechik et al., Proc. Natl. Acad. Sci. (U.S.A.) 83:4143-4146 (1986); Goodchild et al., Proc. Natl. Acad. Sci. (U.S.A.) 85:5507-5511 (1988); Wickstrom et al., Proc. Natl. Acad. Sci. (U.S.A.) 85:1028-1032 (1988); Holt et al., Molec. Cell. Biol. 8:963-973 (1988); Gerwirtz et al., Science 242:1303-1306 (1988); Anfossi et al., Proc. Natl. Acad. Sci. (U.S.A.) 86:3379-3383 (1989); Becker et al., EMBO J. 8:3685-3691 (1989)). Automated nucleic acid synthesizers may be employed for this purpose. In lieu of such synthesis, the disclosed nucleic acid molecules may be used to define a pair of primers that can be used with the polymerase chain reaction (Mullis et al., Cold Spring Harbor Symp. Quant. Biol. 51:263-273 (1986); Erlich et al., European Patent 50,424; European Patent 84,796; European Patent 258,017; European Patent 237,362; Mullis, European Patent 201,184; Mullis et al., U.S. Pat. No. 4,683,202; Erlich, U.S. Pat. No. 4,582,788; and Saiki et al., U.S. Pat. No. 4,683,194) to amplify and obtain any desired nucleic acid molecule or fragment.

[0150] Promoter sequences and other genetic elements, including but not limited to transcriptional regulatory flanking sequences, associated with one or more of the disclosed nucleic acid sequences can also be obtained using the disclosed nucleic acid sequence provided herein. In one embodiment, such sequences are obtained by incubating nucleic acid molecules of the present invention with members of genomic libraries and recovering clones that hybridize to such nucleic acid molecules thereof. In a second embodiment, methods of “chromosome walking,” or inverse PCR may be used to obtain such sequences (Frohman et al., Proc. Natl. Acad. Sci. (U.S.A.) 85:8998-9002 (1988); Ohara et al., Proc. Natl. Acad. Sci. (U.S.A.) 86:5673-5677 (1989); Pang et al., Biotechniques 22:1046-1048 (1977); Huang et al., Methods Mol. Biol. 69:89-96 (1997); Huang et al., Method Mol. Biol. 67:287-294 (1997); Benkel et al., Genet. Anal. 13:123-127 (1996); Hartl et al., Methods Mol. Biol. 58:293-301 (1996)). The term “chromosome walking” means a process of extending a genetic map by successive hybridization steps.

[0151] The nucleic acid molecules of the invention may be used to isolate promoters of cell enhanced, cell specific, tissue enhanced, tissue specific, developmentally or environmentally regulated expression profiles. Isolation and functional analysis of the 5′ flanking promoter sequences of these genes from genomic libraries, for example, using genomic screening methods and PCR techniques would result in the isolation of useful promoters and transcriptional regulatory elements. These methods are known to those of skill in the art and have been described (See, for example, Birren et al., Genome Analysis: Analyzing DNA, 1, (1997), Cold Spring Harbor Laboratory Press, Cold Spring Harbor, N.Y.). Promoters obtained utilizing the nucleic acid molecules of the invention could also be modified to affect their control characteristics. Examples of such modifications would include but are not limited to enhancer sequences. Such genetic elements could be used to enhance gene expression of new and existing traits for crop improvement.

[0152] Another subset of the nucleic acid molecules of the invention includes nucleic acid molecules that are markers. The markers can be used in a number of conventional ways in the field of molecular genetics. Such markers include nucleic acid molecules SEQ ID NO: 1 through SEQ ID NO: 463,173 or complements thereof or fragments of either that can act as markers and other nucleic acid molecules of the present invention that can act as markers.

[0153] The genomes of animals and plants naturally undergo spontaneous mutation in the course of their continuing evolution (Gusella, Ann. Rev. Biochem. 55:831-854 (1986)). A “polymorphism” is a variation or difference in the sequence of the gene or its flanking regions that arises in some of the members of a species. The variant sequence and the “original” sequence co-exist in the species' population. In some instances, such co-existence is in stable or quasi-stable equilibrium.

[0154] A polymorphism is thus said to be “allelic,” in that, due to the existence of the polymorphism, some members of a species may have the original sequence (i.e., the original “allele”) whereas other members may have the variant sequence (i.e., the variant “allele”). In the simplest case, only one variant sequence may exist and the polymorphism is thus said to be di-allelic. In other cases, the species' population may contain multiple alleles and the polymorphism is termed tri-allelic, etc. A single gene may have multiple different unrelated polymorphisms. For example, it may have a di-allelic polymorphism at one site and a multi-allelic polymorphism at another site.

[0155] The variation that defines the polymorphism may range from a single nucleotide variation to the insertion or deletion of extended regions within a gene. In some cases, the DNA sequence variations are in regions of the genome that are characterized by short tandem repeats (STRs) that include tandem di- or tri-nucleotide repeated motifs of nucleotides. Polymorphisms characterized by such tandem repeats are referred to as “variable number tandem repeat” (“VNTR”) polymorphisms. VNTRs have been used in identity analysis (Weber, U.S. Pat. No. 5,075,217; Armour et al., FEBS Lett. 307:113-115 (1992); Jones et al., Eur. J. Haematol. 39:144-147 (1987); Horn et al., PCT Patent Application WO91/14003; Jeffreys, European Patent Application 370,719; Jeffreys, U.S. Pat. No. 5,175,082; Jeffreys et al., Amer. J. Hum. Genet. 39:11-24 (1986); Jeffreys et al., Nature 316:76-79 (1985); Gray et al., Proc. R. Acad. Soc. Lond. 243:241-253 (1991); Moore et al., Genomics 10:654-660 (1991); Jeffreys et al., Anim. Genet. 18:1-15 (1987); Hillel et al., Anim. Genet. 20:145-155 (1989); Hillel et al., Genet. 124:783-789 (1990)).

[0156] The detection of polymorphic sites in a sample of DNA may be facilitated through the use of nucleic acid amplification methods. Such methods specifically increase the concentration of polynucleotides that span the polymorphic site, or include that site and sequences located either distal or proximal to it. Such amplified molecules can be readily detected by gel electrophoresis or other means.

[0157] In an alternative embodiment, such polymorphisms can be detected through the use of a marker nucleic acid molecule that is physically linked to such polymorphism(s). For this purpose, marker nucleic acid molecules comprising a nucleotide sequence of a polynucleotide located within 1 mb of the polymorphism(s) and more preferably within 100 kb of the polymorphism(s) and most preferably within 10 kb of the polymorphism(s) can be employed.

[0158] The identification of a polymorphism can be determined in a variety of ways. By correlating the presence or absence of it in a plant with the presence or absence of a phenotype, it is possible to predict the phenotype of that plant. If a polymorphism creates or destroys a restriction endonuclease cleavage site, or if it results in the loss or insertion of DNA (e.g., a VNTR polymorphism), it will alter the size or profile of the DNA fragments that are generated by digestion with that restriction endonuclease. As such, individuals that possess a variant sequence can be distinguished from those having the original sequence by restriction fragment analysis. Polymorphisms that can be identified in this manner are termed “restriction fragment length polymorphisms” (“RFLPs”) (Glassberg, UK Patent Application 2135774; Skolnick et al., Cytogen. Cell Genet. 32:58-67 (1982); Botstein et al., Ann. J. Hum. Genet. 32:314-331 (1980); Fischer et al., (PCT Application WO90/13668; Uhlen, PCT Application WO90/11369).

[0159] Polymorphisms can also be identified by Single Strand Conformation Polymorphism (SSCP) analysis (Elles, Methods in Molecular Medicine: Molecular Diagnosis of Genetic Diseases, Humana Press (1996)); Orita et al., Genomics 5:874-879 (1989)). A number of protocols have been described for SSCP including, but not limited to, Lee et al., Anal. Biochem. 205:289-293 (1992); Suzuki et al., Anal. Biochem. 192:82-84 (1991); Lo et al., Nucleic Acids Research 20:1005-1009 (1992); Sarkar et al., Genomics 13:441-443 (1992). It is understood that one or more of the nucleic acids of the invention, may be utilized as markers or probes to detect polymorphisms by SSCP analysis.

[0160] Polymorphisms may also be found using a DNA fingerprinting technique called amplified fragment length polymorphism (AFLP), which is based on the selective PCR amplification of restriction fragments from a total digest of genomic DNA to profile that DNA (Vos et al., Nucleic Acids Res. 23:4407-4414 (1995)). This method allows for the specific co-amplification of high numbers of restriction fragments, which can be visualized by PCR without knowledge of the nucleic acid sequence. It is understood that one or more of the nucleic acids of the invention, may be utilized as markers or probes to detect polymorphisms by AFLP analysis or for fingerprinting RNA.

[0161] Polymorphisms may also be found using random amplified polymorphic DNA (RAPD) (Williams et al., Nucl. Acids Res. 18:6531-6535 (1990)) and cleavable amplified polymorphic sequences (CAPS) (Lyamichev et al., Science 260:778-783 (1993)). It is understood that one or more of the nucleic acid molecules of the invention, may be utilized as markers or probes to detect polymorphisms by RAPD or CAPS analysis.

[0162] Through genetic mapping, a fine scale linkage map can be developed using DNA markers and, then, a genomic DNA library of large-sized fragments can be screened with molecular markers linked to the desired trait. Molecular markers are advantageous for agronomic traits that are otherwise difficult to tag, such as resistance to pathogens, insects and nematodes, tolerance to abiotic stress, quality parameters and quantitative traits such as high yield potential.

[0163] Requirements for marker-assisted selection in a plant breeding program often are: (1) the marker(s) should co-segregate or be closely linked with the desired trait; (2) an efficient means of screening large populations for the molecular marker(s) should be available; and (3) the screening technique should have high reproducibility across laboratories and preferably be economical to use and be user-friendly.

[0164] The genetic linkage of marker molecules can be established by a gene mapping model such as, without limitation, the flanking marker model reported by Lander and Botstein, Genetics 121:185-199 (1989) and the interval mapping, based on maximum likelihood methods described by Lander and Botstein, Genetics 121:185-199 (1989) and implemented in the software package MAPMAKER/QTL (Lincoln and Lander, Mapping Genes Controlling Quantitative Traits Using MAPMAKERIQTL, Whitehead Institute for Biomedical Research, Massachusetts, (1990). Additional software includes Qgene, Version 2.23 (1996), Department of Plant Breeding and Biometry, 266 Emerson Hall, Cornell University, Ithaca, N.Y.). Use of Qgene software is a particularly preferred approach.

[0165] A maximum likelihood estimate (MLE) for the presence of a marker is calculated, together with an MLE assuming no QTL effect, to avoid false positives. A log₁₀ of an odds ratio (LOD) is then calculated as: LOD=log₁₀ (MLE for the presence of a QTL/MLE given no linked QTL).

[0166] The LOD score essentially indicates how much more likely the data are to have arisen assuming the presence of a QTL than in its absence. The LOD threshold value for avoiding a false positive with a given confidence, say 95%, depends on the number of markers and the length of the genome. Graphs indicating LOD thresholds are set forth in Lander and Botstein, Genetics 121:185-199 (1989) and further described by Arús and Moreno-González, Plant Breeding, Hayward et al., (eds.) Chapman & Hall, London, pp. 314-331 (1993).

[0167] Additional models can be used. Many modifications and alternative approaches to interval mapping have been reported, including the use non-parametric methods (Kruglyak and Lander, Genetics 139:1421-1428 (1995)). Multiple regression methods or models can be also be used, in which the trait is regressed on a large number of markers (Jansen, Biometrics in Plant Breeding, van Oijen and Jansen (eds.), Proceedings of the Ninth Meeting of the Eucarpia Section Biometrics in Plant Breeding, The Netherlands, pp. 116-124 (1994); Weber and Wricke, Advances in Plant Breeding, Blackwell, Berlin, 16 (1994)). Procedures combining interval mapping with regression analysis, whereby the phenotype is regressed onto a single putative QTL at a given marker interval and at the same time onto a number of markers that serve as ‘cofactors,’ have been reported by Jansen and Stam, Genetics 136:1447-1455 (1994), and Zeng, Genetics 136:1457-1468 (1994). Generally, the use of cofactors reduces the bias and sampling error of the estimated QTL positions (Utz and Melchinger, Biometrics in Plant Breeding, van Oijen and Jansen (eds.) Proceedings of the Ninth Meeting of the Eucarpia Section Biometrics in Plant Breeding, The Netherlands, pp. 195-204 (1994), thereby improving the precision and efficiency of QTL mapping (Zeng, Genetics 136:1457-1468 (1994)). These models can be extended to multi-environment experiments to analyze genotype-environment interactions (Jansen et al., Theo. Appl. Genet. 91:33-37 (1995)).

[0168] It is understood that one or more of the nucleic acid molecules of the invention may be used as molecular markers. It is also understood that one or more of the protein molecules of the invention may be used as molecular markers.

[0169] In accordance with this aspect of the invention, a sample nucleic acid is obtained from plant cells or tissues. Any source of nucleic acid may be used. Preferably, the nucleic acid is genomic DNA. The nucleic acid is subjected to restriction endonuclease digestion. For example, one or more nucleic acid molecule or fragment thereof of the invention can be used as a probe in accordance with the above-described polymorphic methods. The polymorphism obtained in this approach can then be cloned to identify the mutation at the coding region, which alters structure, or regulatory region of the gene, which affects its expression level.

[0170] In an aspect of the present invention, one or more of the nucleic molecules of the present invention are used to determine the level (i.e., the concentration of mRNA in a sample, etc.) in a plant (preferably maize or soybean) or pattern (i.e., the kinetics of expression, rate of decomposition, stability profile, etc.) of the expression of a protein encoded in part or whole by one or more of the nucleic acid molecule of the present invention (collectively, the “Expression Response” of a cell or tissue).

[0171] As used herein, the Expression Response manifested by a cell or tissue is said to be “altered” if it differs from the Expression Response of cells or tissues of plants not exhibiting the phenotype. To determine whether a Expression Response is altered, the Expression Response manifested by the cell or tissue of the plant exhibiting the phenotype is compared with that of a similar cell or tissue sample of a plant not exhibiting the phenotype. As will be appreciated, it is not necessary to re-determine the Expression Response of the cell or tissue sample of plants not exhibiting the phenotype each time such a comparison is made; rather, the Expression Response of a particular plant may be compared with previously obtained values of normal plants. As used herein, the phenotype of the organism is any of one or more characteristics of an organism (e.g. disease resistance, pest tolerance, environmental tolerance such as tolerance to abiotic stress, male sterility, quality improvement or yield etc.). A change in genotype or phenotype may be transient or permanent. Also as used herein, a tissue sample is any sample that comprises more than one cell. In a preferred aspect, a tissue sample comprises cells that share a common characteristic (e.g. derived from root, seed, flower, leaf, stem or pollen etc.).

[0172] In one aspect of the present invention, an evaluation can be conducted to determine whether a particular mRNA molecule is present. One or more of the nucleic acid molecules of the present invention are utilized to detect the presence or quantity of the mRNA species. Such molecules are then incubated with cell or tissue extracts of a plant under conditions sufficient to permit nucleic acid hybridization. The detection of double-stranded probe-mRNA hybrid molecules is indicative of the presence of the mRNA; the amount of such hybrid formed is proportional to the amount of mRNA. Thus, such probes may be used to ascertain the level and extent of the mRNA production in a plant's cells or tissues. Such nucleic acid hybridization may be conducted under quantitative conditions (thereby providing a numerical value of the amount of the mRNA present). Alternatively, the assay may be conducted as a qualitative assay that indicates either that the mRNA is present, or that its level exceeds a user set, predefined value.

[0173] A number of methods can be used to compare the expression response between two or more samples of cells or tissue. These methods include hybridization assays, such as Northerns, RNAse protection assays, and in situ hybridization. Alternatively, the methods include PCR-type assays. In a preferred method, the expression response is compared by hybridizing nucleic acids from the two or more samples to an array of nucleic acids. The array contains a plurality of suspected sequences known or suspected of being present in the cells or tissue of the samples.

[0174] An advantage of in situ hybridization over more conventional techniques for the detection of nucleic acids is that it allows an investigator to determine the precise spatial population (Angerer et al., Dev. Biol. 101:477-484 (1984); Angerer et al., Dev. Biol. 112:157-166 (1985); Dixon et al., EMBO J. 10:1317-1324 (1991)). In situ hybridization may be used to measure the steady-state level of RNA accumulation (Hardin et al., J. Mol. Biol. 202:417-431 (1989)). A number of protocols have been devised for in situ hybridization, each with tissue preparation, hybridization and washing conditions (Meyerowitz, Plant Mol. Biol. Rep. 5:242-250 (1987); Cox and Goldberg, In: Plant Molecular Biology: A Practical Approach, Shaw (ed.), pp. 1-35, IRL Press, Oxford (1988); Raikhel et al., In situ RNA hybridization in plant tissues, In: Plant Molecular Biology Manual, vol. B9:1-32, Kluwer Academic Publisher, Dordrecht, Belgium (1989)).

[0175] In situ hybridization also allows for the localization of proteins within a tissue or cell (Wilkinson, In Situ Hybridization, Oxford University Press, Oxford (1992); Langdale, In Situ Hybridization In: The Maize Handbook, Freeling and Walbot (eds.), pp. 165-179, Springer-Verlag, New York (1994)). It is understood that one or more of the molecules of the invention, preferably one or more of the nucleic acid molecules or fragments thereof of the invention or one or more of the antibodies of the invention may be utilized to detect the level or pattern of a protein or mRNA thereof by in situ hybridization.

[0176] Fluorescent in situ hybridization allows the localization of a particular DNA sequence along a chromosome which is useful, among other uses, for gene mapping, following chromosomes in hybrid lines or detecting chromosomes with translocations, transversions or deletions. In situ hybridization has been used to identify chromosomes in several plant species (Griffor et al., Plant Mol. Biol. 1 7:101-109 (1991); Gustafson et al., Proc. Natl. Acad. Sci. (U.S.A.) 87:1899-1902 (1990); Mukai and Gill, Genome 34:448-452 (1991); Schwarzacher and Heslop-Harrison, Genome 34:317-323 (1991); Wang et aL, Jpn. J. Genet. 66:313-316 (1991); Parra and Windle, Nature Genetics 5:17-21 (1993)). It is understood that the nucleic acid molecules of the invention may be used as probes or markers to localize sequences along a chromosome.

[0177] Another method to localize the expression of a molecule is tissue printing. Tissue printing provides a way to screen, at the same time on the same membrane many tissue sections from different plants or different developmental stages (Yomo and Taylor, Planta 112:35-43 (1973); Harris and Chrispeels, Plant Physiol. 56:292-299 (1975); Cassab and Varner, J. Cell. Biol. 105:2581-2588 (1987); Spruce et al., Phytochemistry 26:2901-2903 (1987); Barres et al., Neuron 5:527-544 (1990); Reid and Pont-Lezica, Tissue Printing: Tools for the Study of Anatomy, Histochemistry and Gene Expression, Academic Press, New York, N.Y. (1992); Reid et al., Plant Physiol. 93:160-165 (1990); Ye et al., Plant J. 1:175-183 (1991)).

[0178] It is understood that one or more of the molecules of the invention, preferably one or more of the nucleic acid molecules of the present invention or one or more of the antibodies of the invention may be utilized to detect the presence or quantity of a protein or fragment of the invention by tissue printing.

[0179] Further it is also understood that any of the nucleic acid molecules of the invention may be used as marker nucleic acids and or probes in connection with methods that require probes or marker nucleic acids. As used herein, a probe is an agent that is utilized to determine an attribute or feature (e.g. presence or absence, location, correlation, etc.) of a molecule, cell, tissue or plant. As used herein, a marker nucleic acid is a nucleic acid molecule that is utilized to determine an attribute or feature (e.g., presence or absence, location, correlation, etc.) or a molecule, cell, tissue or plant.

[0180] A microarray-based method for high-throughput monitoring of gene expression may be utilized to measure expression response Schena et al., Science 270:467-470 (1995); on the website cmgm.stanford.edu/pbrown/array.html; Shalon, Ph.D. Thesis, Stanford University (1996). This approach is based on using arrays of DNA targets (e.g. cDNA inserts, colonies, or polymerase chain reaction products) for hybridization to a “complex probe” prepared with RNA extracted from a given cell line or tissue. The probe may be produced by reverse transcription of mRNA or total RNA and labeled with radioactive or fluorescent labeling. The probe is complex in that it contains many different sequences in various amounts, corresponding to the numbers of copies of the original mRNA species extracted from the sample.

[0181] The initial RNA source will typically be derived from a physiological source. The physiological source may be derived from a variety of eukaryotic sources, with physiological sources of interest including sources derived from single celled organisms such as yeast and multicellular organisms, including plants and animals, particularly plants, where the physiological sources from multicellular organisms may be derived from particular organs or tissues of the multicellular organism, or from isolated cells derived therefrom. The physiological sources may be derived from multicellular organisms at different developmental stages (e.g., 10-day-old seedlings), grown under different environmental conditions (e.g., drought-stressed plants) or treated with chemicals.

[0182] In obtaining the sample of RNAs to be analyzed from the physiological source from which it is derived, the physiological source may be subjected to a number of different processing steps, where such processing steps might include tissue homogenation, cell isolation and cytoplasmic extraction, nucleic acid extraction and the like, where such processing steps are known to the those of skill in the art. Methods of isolating RNA from cells, tissues, organs or whole organisms are known to those of skill in the art and are described in Maniatis et al., Molecular Cloning: A Laboratory Manual (Cold Spring Harbor Press) (1989).

[0183] The DNA may be placed on nylon or glass “microarrays” regularly arranged with a spot spacing of 1 mm or less. Expression levels can be measured for hundreds or thousands of genes, by using less than 2 micrograms of polyA+ RNA and determining the relative mRNA abundances down to one in ten thousand or less (Granjeaud et. al., BioEssays 21:781-790 (1999)).

[0184] In addition to arrays of cDNA clones or inserts, arrays of oligonucleotides are also used to study differential gene expression. In an oligonucleotide array, the genes of interest are represented by a series of approximately 20 nucleotide oligomers that are unique to each gene. Labeled mRNA is prepared and hybridization signals are detected from specific sets of oligos that represent different genes supplemented by a set of control oligonucleotides. Potential advantages of the oligonucleotide array include enhanced specificity and sensitivity through the parallel analysis of “perfect match” oligos and “mismatch” oligos for each gene. The hybridization conditions can be adjusted to distinguish a perfect heteroduplex from a single base mismatch, thus allowing subtraction of nonspecific hybridization signals from specific hybridization signals. A disadvantage of oligonucleotide arrays relative to cDNA arrays is the limitation of the technology to genes of known sequence (Granjeaud et. al., BioEssays 21:781-790 (1991); Carulli et al., Journal of Cellular Biochemistry Supplements 30/31:286-296 (1998)).

[0185] These techniques have been successfully used to characterize patterns of gene expression associated with, for example, various important physiological changes in yeast, including the mitotic cell cycle, the heat shock response, and comparison between mating types. Once a set of comparable expression profiles is obtained, e.g. for cells at different time points or at different cellular states, a clustering algorithm generally is used to group sets of genes which share similar expression patterns. The clusters obtained can then be analyzed in the light of available functional annotations, often leading to associations of poorly characterized genes with genes whose function and regulation are better understood.

[0186] Regulatory networks that control gene expression can be characterized using microarray technology (DeRisi et al., Science 278: 680-686 (1997); Winzler et al. Science 28: 1194-1197 (1998); Cho et al. Mol Cell 2: 65-73 (1998); Spellman et al. Mol Biol Cell 95: 14863-14868 (1998). For example, it is has been reported that both cDNA and oligonucleotide arrays have been used to monitor gene expression in synchronized cell cultures. Analysis of the corresponding temporal patterns of gene expression resulted in the identification of over 400 cell cycle-regulated genes. In order to identify possible common regulatory mechanisms accounting for co-expression, consensus motifs in putative regulatory sequences upstream of the corresponding ORFs were examined. This resulted in the identification of several new potential binding sites for known factors or complexes involved in the coordinated transcription of genes during specific phases of the cell cycle (Thieffry, D. BioEssays 21: 895-899 (1999)).

[0187] The microarray approach may be used with polypeptide targets (U.S. Pat. No. 5,445,934; U.S. Pat. No: 5,143,854; U.S. Pat. No. 5,079,600; U.S. Pat. No. 4,923,901) synthesized on a substrate (microarray) and these polypeptides can be screened with either (Fodor et al., Science 251:767-773 (1991)). It is understood that one or more of the nucleic acid molecules or protein or fragments thereof of the invention may be utilized in a microarray-based method.

[0188] In a preferred embodiment of the present invention microarrays may be prepared that comprise nucleic acid molecules where preferably at least 10%, preferably at least 25%, more preferably at least 50% and even more preferably at least 75%, 80%, 85%, 90% or 95% of the nucleic acid molecules located on that array are selected from the group of nucleic acid molecules that specifically hybridize to one or more nucleic acid molecule having a nucleic acid sequence selected from the group of SEQ ID NO: 1 through SEQ ID NO: 463,173 or complement thereof or fragments of either.

[0189] In another preferred embodiment of the present invention microarrays may be prepared that comprise nucleic acid molecules where preferably at least 10%, preferably at least 25%, more preferably at least 50% and even more preferably at least 75%, 80%, 85%, 90% or 95% of the nucleic acid molecules located on that array are selected from the group of nucleic acid molecules having a nucleic acid sequence selected from the group of SEQ ID NO: 1 through SEQ ID NO: 463,173 or complements thereof.

[0190] In an even more preferred embodiment of the present invention, the microarray comprises a nucleic acid molecule and/or collection of nucleic acid molecules of the present invention where the nucleic acid molecule and/or collection of nucleic acid molecules are capable of determining or predicting a component or attribute of a biochemical process or activity where the process or activity is preferably selected from photosynthetic activity, carbohydrate metabolism, amino acid synthesis or degradation, plant hormone or other regulatory molecules, phenolic metabolism, and lipid metabolism, and more preferably selected from the group consisting of biosynthesis of tetrapyrroles, phytochrome metabolism, carbon assimilation, glycolysis and gluconeogenesis metabolism, sucrose metabolism, starch metabolism, phosphogluconate metabolism, galactomannan metabolism, raffinose metabolism, complex carbohydrate synthesis/degradation, phytic acid metabolism, methionine biosynthesis, methionine degradation, lysine metabolism, arginine metabolism, proline metabolism, glutamate/glutamine metabolism, aspartate/asparagine metabolism, cytokinin metabolism, gibberellin metabolism, ethylene metabolism, jasmonic acid synthesis metabolism, transcription factors, R-genes, plant proteases, protein kinases, antifungal proteins, nitrogen transporters, sugar transporters, shikimate metabolism, isoflavone metabolism, phenylpropanoid metabolism, isoprenoid metabolism, alpha-oxidation lipid metabolism, and fatty acid metabolism, and even more preferably selected from the group consisting of: glycolysis metabolism, gluconeogenesis metabolism, sucrose metabolism, sucrose catabolism, reductive pentose phosphate cycle, regulation of C3 photosynthesis, C4 pathway carbon assimilation, enzymes involved in the C4 pathway, carotenoid metabolism, tocopherol metabolism, phytosterol metabolism, brassinoid metabolism, and proline metabolism.

[0191] In an even more preferred embodiment of the present invention, the microarray comprises a nucleic acid molecule and/or collection of nucleic acid molecules of the present invention where the nucleic acid molecule and/or collection of nucleic acid molecules are capable of detecting or predicting a component or attribute of at least two, more preferable at least three, four, five, six, seven, eight, nine, ten, eleven, twelve, thirteen, fourteen, fifteen, sixteen, seventeen, eighteen, nineteen, twenty, twenty one, twenty two, twenty three, twenty four, twenty five, twenty six, twenty seven, twenty eight, twenty nine, thirty, thirty one, thirty two, thirty three, thirty four, thirty five, thirty six, thirty seven, thirty eight, thirty nine, forty, forty one, forty two, forty three, forty four, forty five or forty six biochemical processes or activities where the biochemical processes or activities are selected from the following: photosynthetic activity, carbohydrate metabolism, amino acid synthesis or degradation, plant hormone or other regulatory molecules, phenolic metabolism, lipid metabolism, biosynthesis of tetrapyrroles, phytochrome metabolism, carbon assimilation, glycolysis and gluconeogenesis metabolism, sucrose metabolism, starch metabolism, phosphogluconate metabolism, galactomannan metabolism, raffinose metabolism, complex carbohydrate synthesis/degradation, phytic acid metabolism, methionine biosynthesis, methionine degradation, lysine metabolism, arginine metabolism, proline metabolism, glutamate/glutamine, aspartate/asparagine metabolism, cytokinin metabolism, gibberellin metabolism, ethylene metabolism, jasmonic acid metabolism, transcription factors, R-genes, plant proteases, protein kinases, antifungal proteins, nitrogen transporters, sugar transporters, shikimate metabolism, isoflavone metabolism, phenylpropanoid metabolism, isoprenoid metabolism, â-oxidation lipid metabolism, fatty acid metabolism, glycolysis metabolism, gluconeogenesis metabolism, sucrose metabolism, sucrose catabolism, reductive pentose phosphate cycle, regulation of C3 photosynthesis, C4 pathway carbon assimilation, enzymes involved in the C4 pathway, carotenoid metabolism, tocopherol metabolism, phytosterol metabolism, brassinoid metabolism, and proline metabolism.

[0192] Site directed mutagenesis may be utilized to modify nucleic acid sequences, particularly as it is a technique that allows one or more of the amino acids encoded by a nucleic acid molecule to be altered (e.g., a threonine to be replaced by a methionine) (Wells et al., Gene 34:315-323 (1985); Gilliam et al., Gene 12:129-137 (1980); Zoller and Smith, Methods Enzymol. 100:468-500 (1983); Dalbadie-McFarland et al., Proc. Natl. Acad. Sci. (U.S.A.) 79:6409-6413 (1982); Scharf et al., Science 233:1076-1078 (1986); Higuchi et al., Nucleic Acids Res. 16:7351-7367 (1988); U.S. Pat. No. 5,811,238, European Patent 0 385 962; European Patent 0 359 472; and PCT Patent Application WO 93/07278; Lanz et al., J. Biol. Chem. 266:9971-9976 (1991); Kovgan and Zhdanov, Biotekhnologiya 5:148-154, No. 207160n, Chemical Abstracts 110:225 (1989); Ge et al., Proc. Natl. Acad. Sci. (U.S.A.) 86:4037-4041 (1989); Zhu et al., J. Biol. Chem. 271:18494-18498 (1996); Chu et al., Biochemistry 33:6150-6157 (1994); Small et al., EMBO J. 11:1291-1296 (1992); Cho et al., Mol. Biotechnol. 8:13-16 (1997); Kita et al., J. Biol. Chem. 271:26529-26535 (1996); Jin et al., Mol. Microbiol. 7:555-562 (1993); Hatfield and Vierstra, J. Biol. Chem. 267:14799-14803 (1992); Zhao et al., Biochemistry 31:5093-5099 (1992)).

[0193] Any of the nucleic acid molecules of the invention may either be modified by site directed mutagenesis or used as, for example, nucleic acid molecules that are used to target other nucleic acid molecules for modification.

[0194] It is understood that mutants with more than one altered nucleotide can be constructed using techniques that practitioners are familiar with, such as isolating restriction fragments and ligating such fragments into an expression vector (see, for example, Sambrook et al., Molecular Cloning: A Laboratory Manual, Cold Spring Harbor Press (1989)).

[0195] Two steps may be employed to characterize DNA-protein interactions. The first is to identify sequence fragments that interact with DNA-binding proteins, to titrate binding activity, to determine the specificity of binding and to determine whether a given DNA-binding activity can interact with related DNA sequences (Sambrook et al., Molecular Cloning: A Laboratory Manual, 2^{nd} edition, Cold Spring Harbor Laboratory Press, Cold Spring Harbor, N.Y. (1989)). Electrophoretic mobility-shift assay is a widely used assay. The assay provides a rapid and sensitive method for detecting DNA-binding proteins based on the observation that the mobility of a DNA fragment through a nondenaturing, low-ionic strength polyacrylamide gel is retarded upon association with a DNA-binding protein (Fried and Crother, Nucleic Acids Res. 9:6505-6525 (1981)). When one or more specific binding activities have been identified, the exact sequence of the DNA bound by the protein may be determined.

[0196] Several procedures for characterizing protein/DNA-binding sites are used (Maxam and Gilbert, Methods Enzymol. 65:499-560 (1980); Wissman and Hillen, Methods Enzymol. 208:365-379 (1991); Galas and Schmitz, Nucleic Acids Res. 5:3157-3170 (1978); Sigman et al., Methods Enzymol. 208:414-433 (1991); Dixon et al., Methods Enzymol. 208:414-433 (1991)). It is understood that one or more of the nucleic acid molecules of the invention may be utilized to identify a protein or fragment thereof that specifically binds to a nucleic acid molecule of the invention. It is also understood that one or more of the protein molecules or fragments thereof of the invention may be utilized to identify a nucleic acid molecule that specifically binds to it.

[0197] A two-hybrid system is based on the fact that proteins, such as transcription factors that interact (physically) with one another carry out many cellular functions. Two-hybrid systems have been used to probe the function of new proteins (Chien et al., Proc. Natl. Acad. Sci. (U.S.A.) 88:9578-9582 (1991); Durfee et al., Genes Dev. 7:555-569 (1993); Choi et al., Cell 78:499-512 (1994); Kranz et al., Genes Dev. 8:313-327 (1994)).

[0198] Interaction mating techniques have facilitated a number of two-hybrid studies of protein-protein interaction. Interaction mating has been used to examine interactions between small sets of tens of proteins (Finley and Brent, Proc. Natl. Acad. Sci. (U.S.A.) 91:12098-12984 (1994)), larger sets of hundreds of proteins (Bendixen et al., Nucl. Acids Res. 22:1778-1779 (1994)) and to comprehensively map proteins encoded by a small genome (Bartel et al., Nature Genetics 12:72-77 (1996)). This technique utilizes proteins fused to the DNA-binding domain and proteins fused to the activation domain. They are expressed in two different haploid yeast strains of opposite mating type and the strains are mated to determine if the two proteins interact. Mating occurs when haploid yeast strains come into contact and result in the fusion of the two haploids into a diploid yeast strain. An interaction can be determined by the activation of a two-hybrid reporter gene in the diploid strain.

[0199] It is understood that the protein-protein interactions of protein or fragments thereof of the invention may be investigated using the two-hybrid system and that any of the nucleic acid molecules of the invention that encode such proteins or fragments thereof may be used to transform yeast in the two-hybrid system.

[0200] Computer Readable Media

[0201] The nucleotide sequence provided in SEQ ID NO: 1 through SEQ ID NO: 463,173 or fragment thereof, or complement thereof, or a nucleotide sequence at least 90% identical, preferably 95%, identical even more preferably 99% or 100% identical to the sequence provided in SEQ ID NO: 1 through SEQ ID NO: 463,173 or fragment thereof, or complement thereof, can be “provided” in a variety of mediums to facilitate use. Such a medium can also provide a subset thereof in a form that allows a skilled artisan to examine the sequences.

[0202] In a preferred embodiment of the present invention computer readable media may be prepared that comprise nucleic acid sequences where preferably at least 10%, preferably at least 25%, more preferably at least 50% and even more preferably at least 75%, 80%, 85%, 90% or 95% of the nucleic acid sequences are selected from the group of nucleic acid molecules that specifically hybridize to one or more nucleic acid molecule having a nucleic acid sequence selected from the group of SEQ ID NO: 1 through SEQ ID NO: 463,173 or complement thereof or fragments of either.

[0203] In another preferred embodiment of the present invention computer readable media may be prepared that comprise nucleic acid sequences where preferably at least 10%, preferably at least 25%, more preferably at least 50% and even more preferably at least 75%, 80%, 85%, 90% or 95% of the nucleic acid sequences are selected from the group of nucleic acid molecules having a nucleic acid sequence selected from the group of SEQ ID NO: 1 through SEQ ID NO: 463,173 or complements thereof.

[0204] In a more preferred embodiment of the present invention, the computer readable media comprises a nucleic acid sequence and/or collection of nucleic acid sequences of the present invention associated with a biochemical process or activity where the process or activity is preferably selected from photosynthetic activity, carbohydrate metabolism, amino acid synthesis or degradation, plant hormone or other regulatory molecules, phenolic metabolism, and lipid metabolism, and more preferably selected from the group consisting of biosynthesis of tetrapyrroles, phytochrome metabolism, carbon assimilation, glycolysis and gluconeogenesis metabolism, sucrose metabolism, starch metabolism, phosphogluconate metabolism, galactomannan metabolism, raffinose metabolism, complex carbohydrate synthesis/degradation, phytic acid metabolism, methionine biosynthesis, methionine degradation, lysine metabolism, arginine metabolism, proline metabolism, glutamate/glutamine metabolism, aspartate/asparagine metabolism, cytokinin metabolism, gibberellin metabolism, ethylene metabolism, jasmonic acid metabolism, transcription factors, R-genes, plant proteases, protein kinases, antifungal proteins, nitrogen transporters, sugar transporters, shikimate metabolism, isoflavone metabolism, phenylpropanoid metabolism, isoprenoid metabolism, α-oxidation lipid metabolism, and fatty acid metabolism, and even more preferably selected from the group consisting of: glycolysis metabolism, gluconeogenesis metabolism, sucrose metabolism, sucrose catabolism, reductive pentose phosphate cycle, regulation of C3 photosynthesis, C4 pathway carbon assimilation, enzymes involved in the C4 pathway, carotenoid metabolism, tocopherol metabolism, phytosterol metabolism, brassinoid metabolism, and proline metabolism.

[0205] In an even more preferred embodiment of the present invention, the computer readable media comprises a nucleic acid sequence and/or collection of nucleic acid sequences of the present invention where the nucleic acid sequence and/or collection of nucleic acid sequences are associated with a component or attribute of at least two, more preferable at least three, four, five, six, seven, eight, nine, ten, eleven, twelve, thirteen, fourteen, fifteen, sixteen, seventeen, eighteen, nineteen, twenty, twenty one, twenty two, twenty three, twenty four, twenty five, twenty six, twenty seven, twenty eight, twenty nine, thirty, thirty one, thirty two, thirty three, thirty four, thirty five, thirty six, thirty seven, thirty eight, thirty nine, forty, forty one, forty two, forty three, forty four, forty five or forty six biochemical processes or activities where the biochemical processes or activities are selected from the following: photosynthetic activity, carbohydrate metabolism, amino acid synthesis or degradation, plant hormone or other regulatory molecules, phenolic metabolism, lipid metabolism, biosynthesis of tetrapyrroles, phytochrome metabolism, carbon assimilation, glycolysis and gluconeogenesis metabolism, sucrose metabolism, starch metabolism, phosphogluconate metabolism, galactomannan metabolism, raffinose metabolism, complex carbohydrate synthesis/degradation, phytic acid metabolism, methionine biosynthesis, methionine degradation, lysine metabolism, arginine metabolism, proline metabolism, glutamate/glutamine, aspartate/asparagine metabolism, cytokinin metabolism, gibberellin metabolism, ethylene metabolism, jasmonic acid synthesis metabolism, transcription factors, R-genes, plant proteases, protein kinases, antifungal proteins, nitrogen transporters, sugar transporters, shikimate metabolism, isoflavone metabolism, phenylpropanoid metabolism, isoprenoid metabolism, β-oxidation lipid metabolism, fatty acid metabolism, glycolysis metabolism, gluconeogenesis metabolism, sucrose metabolism, sucrose catabolism, reductive pentose phosphate cycle, regulation of C3 photosynthesis, C4 pathway carbon assimilation, enzymes involved in the C4 pathway, carotenoid metabolism, tocopherol metabolism, phytosterol metabolism, brassinoid metabolism, and proline metabolism.

[0206] In one application of this embodiment, a nucleotide sequence of the present invention can be recorded on computer readable media. As used herein, “computer readable media” refers to any medium that can be read and accessed directly by a computer. Such media include, but are not limited to: magnetic storage media, such as floppy discs, hard disc, storage medium and magnetic tape: optical storage media such as CD-ROM; electrical storage media such as RAM and ROM; and hybrids of these categories such as magnetic/optical storage media. A skilled artisan can readily appreciate how any of the presently known computer readable mediums can be used to create a manufacture comprising computer readable medium having recorded thereon a nucleotide sequence of the present invention.

[0207] As used herein, “recorded” refers to a process for storing information on computer readable medium. A skilled artisan can readily adopt any of the presently known methods for recording information on computer readable medium to generate media comprising the nucleotide sequence information of the present invention. A variety of data storage structures are available to a skilled artisan for creating a computer readable medium having recorded thereon a nucleotide sequence of the present invention. The choice of the data storage structure will generally be based on the means chosen to access the stored information. In addition, a variety of data processor programs and formats can be used to store the nucleotide sequence information of the present invention on computer readable medium. The sequence information can be represented in a word processing text file, formatted in commercially-available software such as WordPerfect and Microsoft Word, or represented in the form of an ASCII file, stored in a database application, such as DB2, Sybase, Oracle, or the like. A skilled artisan can readily adapt any number of data processor structuring formats (e.g., text file or database) in order to obtain computer readable medium having recorded thereon the nucleotide sequence information of the present invention.

[0208] By providing one or more of nucleotide sequences of the present invention, a skilled artisan can routinely access the sequence information for a variety of purposes. Computer software is publicly available which allows a skilled artisan to access sequence information provided in a computer readable medium. The examples which follow demonstrate how software which implements the BLAST (Altschul et al., J. Mol. Biol. 215:403-410 (1990)) and BLAZE (Brutlag et al., Comp. Chem. 17:203-207 (1993)) search algorithms on a Sybase system can be used to identify open reading frames (ORFs) within the genome that contain homology to ORFs or proteins from other organisms. Such ORFs are protein-encoding fragments within the sequences of the present invention and are useful in producing commercially important proteins such as enzymes used in amino acid biosynthesis, metabolism, transcription, translation, RNA processing, nucleic acid and a protein degradation, protein modification and DNA replication, restriction, modification, recombination and repair.

[0209] The present invention further provides systems, particularly computer-based systems, which contain the sequence information described herein. Such systems are designed to identify commercially important fragments of the nucleic acid molecule of the present invention. As used herein, “a computer-based system” refers to the hardware means, software means and data storage means used to analyze the nucleotide sequence information of the present invention. The minimum hardware means of the computer-based systems of the present invention comprises a central processing unit (CPU), input means, output means and data storage means. A skilled artisan can readily appreciate that any one of the currently available computer-based system are suitable for use in the present invention.

[0210] As indicated above, the computer-based systems of the present invention comprise a data storage means having stored therein a nucleotide sequence of the present invention and the necessary hardware means and software means for supporting and implementing a search means. As used herein, “data storage means” refers to memory that can store nucleotide sequence information of the present invention, or a memory access means which can access manufactures having recorded thereon the nucleotide sequence information of the present invention. As used herein, “search means” refers to one or more programs that are implemented on the computer-based system to compare a target sequence or target structural motif with the sequence information stored within the data storage means. Search means are used to identify fragments or regions of the sequence of the present invention that match a particular target sequence or target motif. A variety of known algorithms are disclosed publicly and a variety of commercially available software for conducting search means are available can be used in the computer-based systems of the present invention. Examples of such software include, but are not limited to, MacPattern (EMBL), BLASTIN and BLASTIX (NCBIA). One of the available algorithms or implementing software packages for conducting homology searches can be adapted for use in the present computer-based systems.

[0211] The most preferred sequence length of a target sequence is from about 10 to 100 amino acids or from about 30 to 300 nucleotide residues. However, it is well recognized that during searches for commercially important fragments of the nucleic acid molecules of the present invention, such as sequence fragments involved in gene expression and protein processing, may be of shorter length.

[0212] As used herein, “a target structural motif,” or “target motif,” refers to any rationally selected sequence or combination of sequences in which the sequences the sequence(s) are chosen based on a three-dimensional configuration which is formed upon the folding of the target motif. There are a variety of target motifs known in the art. Protein target motifs include, but are not limited to, enzymatic active sites and signal sequences. Nucleic acid target motifs include, but are not limited to, promoter sequences, cis elements, hairpin structures and inducible expression elements (protein binding sequences).

[0213] Thus, the present invention further provides an input means for receiving a target sequence, a data storage means for storing the target sequences of the present invention sequence identified using a search means as described above and an output means for outputting the identified homologous sequences. A variety of structural formats for the input and output means can be used to input and output information in the computer-based systems of the present invention. A preferred format for an output means ranks fragments of the sequence of the present invention by varying degrees of homology to the target sequence or target motif. Such presentation provides a skilled artisan with a ranking of sequences which contain various amounts of the target sequence or target motif and identifies the degree of homology contained in the identified fragment.

[0214] A variety of comparing means can be used to compare a target sequence or target motif with the data storage means to identify sequence fragments sequence of the present invention. For example, implementing software that implements the BLAST and BLAZE algorithms (Altschul et al., J. Mol. Biol. 215:403-410 (1990)) can be used to identify open frames within the nucleic acid molecules of the present invention. A skilled artisan can readily recognize that any one of the publicly available homology search programs can be used as the search means for the computer-based systems of the present invention.

[0215] Having now generally described the invention, the same will be more readily understood through reference to the following examples which are provided by way of illustration and are not intended to be limiting of the present invention, unless specified.

### EXAMPLE 1

[0216] This example illustrates the generation of libraries from cDNA prepared from a variety of Arabidopsis thaliana, Columbia ecotype, Landsberg ecotype, Nossen ecotype, Glycine max, Zea mays L., Gossympium hirsutum, Sorghum bicolor, Oryza sativa L (japonica type), Oryza sativa L (japonica type), cv. Nipponbare, Zea mays L. ssp mexicana and Triticum aestivum tissue. A subset of Arabidopsis libraries is used as an example.

[0217] Wild type Arabidopsis thaliana seeds are planted in commonly used planting pots and grown in an environmental chamber. Tissue is harvested as follows:
[0218] (a) For leaf tissue-based cDNA, leaf blades are cut with sharp scissors at seven weeks after planting;
[0219] (b) For root tissue-based cDNA, roots of seven-week old plants are rinsed intensively with tap water to wash away dirt, and briefly blotted by paper towel to take away free water;
[0220] (c) For stem tissue-based cDNA, stems are collected seven to eight weeks after planting by cutting the stems from the base and cutting the top of the plant to remove the floral tissue;
[0221] (d) For flower bud tissue-based cDNA, green and unopened flower buds are harvested about seven weeks after planting;
[0222] (e) For open flower tissue-based cDNA, completely opened flowers with all parts of floral structure observable, but no siliques are appearing, and are harvested about seven weeks after planting;
[0223] (f) For immature seed tissue-based cDNA, seeds are harvested at approximately 7-8 weeks of age. The seeds range in maturity from the smallest seeds that could be dissected from siliques to just before starting to turn yellow in color.

[0224] All tissue is immediately frozen in liquid nitrogen and stored at −80° C. until total RNA extraction. The stored RNA is purified using Trizol reagent from Life Technologies (Gibco BRL, Life Technologies, Gaithersburg, Md. U.S.A.), essentially as recommended by the manufacturer. Poly A+ RNA (mRNA) is purified using magnetic oligo dT beads essentially as recommended by the manufacturer (Dynabeads, Dynal Corporation, Lake Success, N.Y. U.S.A.).

[0225] Construction of plant cDNA libraries is well known in the art and a number of cloning strategies exist. A number of cDNA library construction kits are commercially available. The Superscript™ Plasmid System for cDNA synthesis and Plasmid Cloning (Gibco BRL, Life Technologies, Gaithersburg, Md. U.S.A.) is used, following the conditions suggested by the manufacturer.

[0226] The cDNA libraries are plated on LB agar containing the appropriate antibiotics for selection and incubated at 37° for a sufficient time to allow the growth of individual colonies. Single selective media colonies are individually placed in each well of a 96-well microtiter plates containing LB liquid including the selective antibiotics. The plates are incubated overnight at approximately 37° C. with gentle shaking to promote growth of the cultures. The plasmid DNA is isolated from each clone using Qiaprep plasmid isolation kits, using the conditions recommended by the manufacturer (Qiagen Inc., Santa Clara, Calif. U.S.A.).

[0227] The template plasmid DNA clones are used for subsequent sequencing. For sequencing the cDNA libraries, a commercially available sequencing kit, such as the ABI PRISM dRhodamine Terminator Cycle Sequencing Ready Reaction Kit with AmpliTaq® DNA Polymerase, FS, is used under the conditions recommended by the manufacturer (PE Applied Biosystems, Foster City, Calif.). The cDNAs of the present invention are generated by sequencing initiated from the 5′ end or 3′ end of each cDNA clone. Entire inserts or only part of the inserts (ESTs or expressed sequenced tags) are sequenced.

[0228] A number of sequencing techniques are known in the art, including fluorescence-based sequencing methodologies. These methods have the detection, automation and instrumentation capability necessary for the analysis of large volumes of sequence data. Currently, the 377 DNA Sequencer (Perkin-Elmer Corp., Applied Biosystems Div., Foster City, Calif.) allows the most rapid electrophoresis and data collection. With these types of automated systems, fluorescent dye-labeled sequence reaction products are detected and data entered directly into the computer, producing a chromatogram that is subsequently viewed, stored, and analyzed using the corresponding software programs. These methods are known to those of skill in the art and have been described and reviewed (Birren et al., Genome Analysis: Analyzing DNA,1, Cold Spring Harbor, N.Y., the entirety of which is herein incorporated by reference).

[0229] The generated ESTs (including any full-length cDNA inserts or complete coding sequences) are combined with ESTs and full length cDNA sequences in public databases such as GenBank. Duplicate sequences are removed; and, duplicate sequence identification numbers are replaced. The combined dataset is then clustered and assembled using Pangea Systems tool identified as CAT v.3.2. First, the EST sequences are screened and filtered, e.g. high frequency words are masked to prevent spurious clustering; sequence common to known contaminants such as cloning bacteria are masked; high frequency repeated sequences and simple sequences are masked; unmasked sequences of less than 100 bp are eliminated. The thus-screened and filtered ESTs are combined and subjected to a word-based clustering algorithm which calculates sequence pair distances based on word frequencies and uses a single linkage method to group like sequences into clusters of more than one sequence, as appropriate. Clustered sequence files are assembled individually using an iterative method based on PHRAP/CRAW/MAP providing one or more self-consistent consensus sequences and inconsistent singleton sequences. The assembled clustered sequence files are checked for completeness and parsed to create data representing each consensus contiguous sequence (contig), the initial EST sequences, and the relative position of each EST in a respective contig. The sequence of the 5′ most clone is identified from each contig. The initial sequences that are not included in a contig are separated out. A FASTA file is created consisting of 463,173 sequences comprising the sequence of each contig and all original sequences which were not included in a contig. The EST contigs and original sequences which are not included in a contig are presented in the computer program listing containing Table 1 comprising SEQ ID No: 1 through SEQ ID NO: 463,173.

### EXAMPLE 2

[0230] The GenBank database is searched with BLASTN, version 2.0 (BLASTN takes a nucleotide sequence (the query sequence) and its reverse complement and searches them against a nucleotide sequence database) and BLASTX version 2.0 (BLASTX takes a nucleotide sequence, translates it in three forward reading frames and three reverse complement reading frames, and then compares the six translations against a protein sequence database) using default values with the cDNAs as queries. cDNA nucleic acid molecules that pass the E value threshold of 10e⁻⁸ for the following enzymes are classified. Results from these searches are set forth in the computer program listing containing Table 1.

### REFERENCES

[0231] Each reference mentioned in this specification is incorporated by reference in its entirety. In addition, these references, as well as each of those cited can be relied upon to make and use aspects of the invention.

[0232] Computer Program Listing Containing Table 1

[0233] The entries in the Seq Num column refer to the corresponding sequence in the sequence listing.

[0234] Contig ID

[0235] The Contig ID is the name of the cDNA contig sequence found in the Monsanto SeqDB database.

[0236] 5′ Most cDNA

[0237] Each cDNA contig is comprised of ESTs and/or full length insert sequences. The name of the most 5′ sequence is listed in this column.

[0238] Method

[0239] The BLAST program used to determine homology, either BLASTX or BLASTN, is listed in this column.

[0240] NCBI gi Number

[0241] Each sequence in the GenBank public database is arbitrarily assigned a unique NCBI gi (National Center for Biotechnology Information GenBank Identifier) number. In this table, the NCBI gi number which is associated (in the same row) with a given Contig ID refers to the particular GenBank sequence which is used in the sequence comparison.

[0242] E-Value

[0243] The expectation E (range 0 to infinity) calculated for an alignment between the query sequence and a database sequence can be extrapolated to an expectation over the entire database search, by converting the pairwise expectation to a probability (range 0-1) and multiplying the result by the ratio of the entire database size (expressed in residues) to the length of the matching database sequence. In detail:
E_database=(1−exp(−E))D/d
where D is the size of the database; d is the length of the matching database sequence; and the quantity (1−exp(−E)) is the probability, P, corresponding to the expectation E for the pairwise sequence comparison.

[0244] Blast Bit Score

[0245] Bit score for BLAST match score that is generated by the sequence comparison of the cDNA with the GenBank sequence listed in the Description column. The E-value corresponding to a given bit score is E=mn2^{-S′}. “m” and “n” are two proteins of length “m” and “n”, “E” is the E value and S′ is the bit score.

[0246] % Ident

[0247] The entries in the “% Ident” column of the table refer to the percentage of identically matched nucleotides (or residues) that exist along the length of that portion of the sequences which is aligned by the BLAST 2.0 comparison to generate the statistical scores presented.

[0248] Match Length

[0249] The match length is the number of identical residues between the query and subject sequences.

[0250] % Similarity Score

[0251] Between the two lines of a Query and Subject (database) sequence in BLASTX output is a line indicating the specific residues which are identical, as well as those which are non-identical but nevertheless have positive alignment scores defined in the scoring matrix that is used.

[0252] The number of positives and the number of identities out of the total number possible is the % similarity score.

[0253] NCBI gi Description

[0254] The “NCBI gi Description” column provides a description of the NCBIgi referenced in the “NCBIgi” column.

We claim:

1. A substantially purified nucleic acid molecule comprising a nucleic sequence selected from the group consisting of SEQ ID NO: 1 through SEQ ID NO: 463,173 or complements thereof or fragments of either.

2. A substantially purified first nucleic acid molecule, wherein the first nucleic molecule specifically hybridizes to a second nucleic acid molecule having a nucleic acid sequence selected from the group consisting of SEQ ID NO: 1 through SEQ ID NO: 463,173 complements thereof.

3. A substantially purified protein or fragment thereof encoded by a first nucleic acid molecule which specifically hybridizes to a second nucleic acid molecule, the second nucleic acid molecule having a nucleic acid sequence selected from the group consisting of a complement of SEQ ID NO: 1 through SEQ ID NO: 463,173.

4. A substantially purified protein or fragment thereof encoded by a first nucleic acid molecule according to claim 3, wherein said first nucleic acid molecule comprises a nucleic acid sequence selected from the group consisting of SEQ ID NO: 1 through SEQ ID NO: 463,173.

5. A purified antibody or fragment thereof which is capable of specifically binding to a protein or fragment thereof, wherein the protein or fragment thereof is encoded by a nucleic acid molecule comprising a nucleic acid sequence selected from the group consisting SEQ ID NO: 1 through SEQ ID NO: 463,173.

6. A transformed plant having a nucleic acid molecule which comprises: (A) an exogenous promoter region which functions in a plant cell to cause the production of a mRNA molecule; (B) a structural nucleic acid molecule comprising a nucleic acid sequence selected from the group consisting of SEQ ID NO: 1 through SEQ ID NO: 463,173; and (C) a 3′ non-translated sequence that functions in the plant cell to cause termination of transcription and addition of polyadenylated ribonucleotides to a 3′ end of the mRNA molecule.

7. A transformed plant according to claim 6, wherein said plant is selected from the group consisting of maize, soybean, rice, wheat, or cotton.

8. A transformed plant having a nucleic acid molecule which comprises: (A) an exogenous promoter region which functions in a plant cell to cause the production of a mRNA molecule; which is linked to (B) a transcribed nucleic acid molecule with a transcribed strand and a non-transcribed strand, wherein the transcribed strand is complementary to a nucleic acid molecule comprising a nucleic acid sequence selected from the group consisting of SEQ ID NO: 1 through SEQ ID NO: 463,173 or fragment thereof; which is linked to (C) a 3′ non-translated sequence that functions in plant cells to cause termination of transcription and addition of polyadenylated ribonucleotides to a 3′ end of the mRNA molecule.

9. A transformed plant according to claim 8, wherein said plant is selected from the group consisting of maize, soybean, rice, wheat, or cotton.

10. A method for determining a level or pattern of a protein in a plant cell or plant tissue under evaluation which comprises assaying the concentration of a molecule, whose concentration is dependent upon the expression of a gene, the gene specifically hybridizes to a nucleic acid molecule having a nucleic acid sequence selected from the group consisting of a complement of SEQ ID NO: 1 through SEQ ID NO: 463,173, in comparison to the concentration of that molecule present in a reference plant cell or a reference plant tissue with a known level or pattern of the protein, wherein the assayed concentration of the molecule is compared to the assayed concentration of the molecule in the reference plant cell or reference plant tissue with the known level or pattern of the protein.

The application's sequence listing, which the Patent Office published only in electronic form, follows.

SEQUENCE LISTING (463173 sequences)

SEQ ID NO: 1 - DNA, 854 bp, Glycine max
  unsure (1)..(854): unsure at all n locations
gtcgacccacgcgtccgggatggtgctcgggctcgggacgggctccacggccgccttcgccgtcgccgagatcggcgcgctcctggccgcgggcaagctcgagaagatcgtcggcgtgcccacatccaagcgcaccttcgagcaggcgcagtcgctcggcatcccgctctccacgctcgacgacaacccgctcatcgacctcgccatcgacggtgccgacgaggtttgaccctgacctcaaccttgtgaaagggcggggtggtgctcttcttcgtgagaagatggttgaggcagcatcggacaagtttattgttattgttgacgagacaaaactagttgatgggttaggaggtagtggtctagccatgccagtggaagttgtgcagttctgctggaagtacaaccttgtaagattgcaggaactgtttaaggaggaaggagtcgaggcaaagctaaggtttgaaggcgacaagccctatgttactgacaactcaaactacatcgtcgatttatacttcaagacgccaatcaaggatgcgttggcagcaggacaggaaattgcagctctggaaggagttgttgaccatgggttgttcttgaacatggcgagttcagtgatcattgctggaacggacggtgtcagtgtcaaaacgaagtgagtttttgagttgctttgttgtttgtgttgagttttacaatttaatgtacaagctattggtgtaaaagcagctgataagatgcttcaataaaggtgttcccccaatgtggggattgactatcacttattgtggnnnnnnnnnnnnnnnnnnnnnnnnnnnnnnnnnnnnnnnnnnnnnnnnnnnnnnnnnnnnnnn

SEQ ID NO: 2 - DNA, 1222 bp, Glycine max
acgcgtagtctctatctcttttctccagcagcaccaaaaccacccaacactcgaactcaatatccattattaccaaaaaaaaagaaaaaaggatatcaaacacccttttcatcattaaaactctcagttccctctttccctatcaaaaccctttcccacaacactactcactccagtacaagaaaccctttttcaatttggtttcaacagcacacacacacacacatatatatatatatagcatgtttaccttgaatcattcttctgatttgtaccatgtttcccctgagctctcatcttccttggacacatcctcgccggcttcggagggctctcgtggcgtggcattttccgacgaggaggtgcggctggcggtgaggcacccgaagaagcgggcaggtcggaagaagttccgggagacgcgccacccggtgtaccggggggtgaggaggaggaactcggataagtgggtgtgtgaggtgagggagcccaacaagaagaccaggatttggctggggactttccccacgccggagatggcggctcgggcgcacgacgtggcggcaatggccctgaggggccggtatgcctgtctaaactttgctgactcggcctggcggttacctgttcccgccacggccgaggcaaaggatatacagaaggcagcagcagaagctgcccaggctttcagaccagatcaaaccttaaaaaatgctaatacaaggcaggagtgtgtggaggcggtggcggtggcggtggcggagacaacaacggcgacggcacaaggggtgttttatatggaggaagaagagcaggtgttggatatgcctgagttgcttaggaatatggtgctcatgtccccaacacattgcttagggtatgagtatgaagatgctgacttggatgcccaagatgctgaggtgtcactatggaatttctcaatttaataatgtgttttggtttggtttttgttgttagttttttggagtgaacagtgtctgtactggttttttattagtagtacggatactagttataggtggaaagattgcgagggaccaaaaggaattttcttttgaacccttttttgtcaatgtaatcaatatcacgtatatcatgaagtgaatcccttcaagtttatgtataaattaaataaaagaaaaatctagttttggttatgaatctttgttaaagtaaaaaaaaaaaaaaaaagggcggccgc

SEQ ID NO: 3 - DNA, 708 bp, Glycine max
gaattcggctcgagaaaagaccaggatttggctggggacttttcccacgccggagatggcggcacgggcccacgacgtggcggcaatggccctgaggggccggtatgcctgtctcaacttcgctgactcgacgtggcggttaccaattcccgccactgctaacgcaaaggatatacagaaagcagcagcagaggctgccgaggctttcagaccaagtcagaccttagaaaatacgaatacaaagcaagagtgtgtaaaagtggtgacgacaacaacgatcacagaacaaaaacgaggaatgttttatacggaggaagaagagcaagtgttagatatgcctgagttgcttaggaatatggtgcttatgtccccaacacattgcatagggtatgagtatgaagatgctgacttggatgctcaagatgctgaggtgtccctatggagtttctcaatttaataacgtgcttttggtttggttttttatgttagttttggagtgtgactgtctgtactggttttttattagtagtacggatactagctataggtggcagattgaaagggaccaaaaggaattttcttttgaaaccctttttgtcaaagtaatcaatcgcgtatcatcaagtgaatcccttgatcaagtttatgtatgaattaaataaaagaagaatctagttttggtaaaaaaaaaaaaaaaagggcggccgc

SEQ ID NO: 4 - DNA, 551 bp, Glycine max
  unsure (1)..(551): unsure at all n locations
ccctcattcactctcttttctccggcagcaccaaaaccacccaacacttgaaatcaatatccattgttaccaaaaaagaaagatcaaaacaccctttacatcattatactcagttccctctttccctatcaaaaccctttcccacaacactactcactctagtagtacaagcaaaaccttctaactttggcttcagcggcacatatatatatatatatatatagaacatgtataccttgaaccactcttcatatttgtaccatgtttcccctgagctctcctcttccttggactcgtcctcgccggcttccgagggctctcgcggcgtggcattttccgacgaggaggtgcggctggcggtgaggcacccgaagaagcgggccgggcggaagaagttccgggagacgcgccacccggtgttcccgggcgtgtggaggatggtcttggttctttgggtttctttatttataattattgattgttgattctcnnnnnnnnnnnnnnnnnnnnnnnnnnnnnnnnnnnnnnnnnnnnnnnnnnnnnnnnnnnnn

SEQ ID NO: 5 - DNA, 972 bp, Glycine max
aaactccaaatacctcactccacagttgaacaacaacaccaacaccaacttctggaatgaacattttcaaatccccactggaccatgatttgaactgtggtggaatattccacgactcagcagaagcatcttattcgtctgaaacaaggagcaccccctcagacgaagaagtgattctagcgtcagcgcggccaaagaagcgagcgggaagaagagtcttcaaggagacaaggcaccccgtctaccgaggagtgcgtcgcaggaacaagaacaagtgggtctgcgagatgcgagtccccaacaacaactcacggatttggctcgggacatacccaacgcccgaaatggccgcacgtgcgcacgacgttgcggcgctcgcgctcaggggaaagtccgcgtgcctcaacttcgcggactccaggtggcggctgacggtgccggcgaccaccaacgcggaggagatacggcgagcggcgggggaggctgctgaggcatttgcagttgcagatggggacgacgttaatattgaacaacagcagagtgtgatggccacgaatgatgatgaagttcaagagcctctccagcaggaggaggttcaagacttgcatgatttgcttttgagtattgcgaatgagcctttgatgtctcctccaccctgtgcaagagatggtagggactggaatgacgtggacatatttgatgatgatgaaatctcactatggaacttctcaatttgacgcgtacgtcattaagagtatgactgtatgcatgtttgatgataagcgaaaacacctttttgtgtatgtgattttctatatttttagggacctgttgtgtgtagataaattaagtagcactcgattgattaagttgagtggagttaaacatattgtagttgtatctatgatttgtttcgtgattaaattttaatgacaagtacagttggcaaaaaaaaaaaaaaagggcggccgc

SEQ ID NO: 6 - DNA, 862 bp, Glycine max
gaattcccgggtcgacccacgcgtccgcggacgcgtgggagagtgtgtcgttggaagagagacgacggcggccatggcgacctccttccaggggacgaccaccaagtgcaccgcctgcgacaagacggtgtaccttgtggacaagctcaccgccgacaaccgcatctaccacaaggcctgcttccgctgccaccactgcaagggcaccctcaagctcgccaactacaactccttcgagggagtgctctactgcaggcctcacttcgaccagctgttcaagaggacagggagcttggacaagagcttcgaaggaactccgaaggttgtcaagccagaaagaaacgttgggaatgagaatgctactaaagtctcaagcgcctttgctggcaccagagagaaatgtgttggatgcagcaagacagtctatccaactgagagggtcactgttaataacactatgtaccacaagagctgcttcaagtgctgccatggagggtgcaccatcagcccttctaactacattgcgcacgaggggaagctgtactgcaagcaccaccacatccagctgatcaaggagaaggggaacttcagccagcttgagaatgaccacgagaagacatcacaggctgggtcactggaggaggatgaacaagagtattgatcactgagcacaaccacagatgaataatgaatcctcttgcatttgcctagagcactatgtatttctgtggcgtggttcgatttcagttttaccaatggaggtcatgtgtgttcagagaacaatgatattgttgtcttgtatctgcatgtaaacgttgttatctttgagtcagaaaaaaaaaaaaaaaaaaagggcggccgc

SEQ ID NO: 7 - DNA, 1686 bp, Glycine max
aacaaggcaagggaaaagcgaagtgtgaagacagacacagtgagaatgatgaagcgtcggttccttttggttctcttggttctctatgtcacagtggagttctacgtagaagcagatggtagtggtgggtttgtgagaacaagaggagtgcagcttatgctgaatgggagcccctactatgctaatggctttaatgcctattggctaatgtatcttgcctctgatccttctcagagaaacaaagtctcatcagtgtttcaacaggcttcaaatcatggcctcaacattgccagaacttgggctttcagtgatggtggatatcaaccactacaatactctcctggatcttacaattaccaaatgtttcagggcttggatttcgcaatagccgaagcaagaaaatatgggatcaagatggtgttgagtttggtgaataactatgagaacatgggtggaaagaaacagtatgtggaatgggcaaggagtcagggacagtccataaattctgaggatgacttttttacaaaattcggctcgaggggatactacaaaaaccacatcaaggctgtacttacaagacgtaatagcatcactggagttgcttacaaagacgacccaactataatggcttgggaacttatgaatgagattaggtgcccttctgatcaatcaggaaggacagttcaggcttggatcactgagatggcatcttacctgaaatccatagatggaaaccacttgctggaagctggtctggagggtttctacggccagtcaaagcctcagtctaacccaaacttcaatgtaggaaccgatttcattgccaacaaccaaatcccaggcattgatttcgcaacagtgcactcctacccggaccaatggctatcaagttctagttatgaggaccaaatctcatttttaggccgttggctggatgagcacatccaagatgcacagaacacccttcacaagccacttctatttgcggagtttggtatttccacaaagagttatggtggcaactcaacaccaagggatcggttattcaacacagtatattctgcaatatactcatcagcaagcagtggcggggctgctgttggtggcttgttttggcaacttatggttcaaggaatggattcttatcgagacggttacgaagttgtcttagatgagagcccttcaacggctaatttgatcgctcaagagtctcaaaaactaaaccgaattcgcaagatgtacgccagacttagaaacattgagaagtggaatgaagctaagcaaattagaggtggaaactgaatatgatacgtcttaactaccatgatatatatatatagagagagagagagagagtgaagggagttagaaactttaattgataacttatttgcgtgtggattaatcttcagaatgaagtgtcccaataatcttagtggcaagaattgcctgttattttcgtcaaagtattccaagtgaagtgttctacaaatgcgatagacataactatttattattgagatatttcgagagaaactttgtaatgcacgaactagcatttcatctacactattatgtcggcaagtgaatgtactttgtctaaactgtttataaaatggactgctgacgataatttgaagtgcttcaaaaaaaaaaaaaaaaaaaaaaaaaaaagggcggccgccg

SEQ ID NO: 8 - DNA, 1661 bp, Glycine max
ctcgagccgctcgagccgattcggctcgaggaacacccttcacaagccacttctatttgcggagtttggtatttccacaaagagttatggtggcaactcaacaccaagggatcggttattcaacacggtatattcagcaatatactcatcagcaagcagtggcggggctgctgttggtggcctgttttggcaacttatggctcaaggaatggattcttatcgagacggttacgaggtggtcttagatgagagcccttcaacggctaatttgattgctcaagagtctcaaaaactaaaccgaattcgcaagatgtacgccagactcagaaacattgagaaatggaatgaagctaagcaaattagaggatgaaactgaatatatatatatatatatagagagagagagagagagagaagggtgagttagaaactttaatttataacttaatcgtagtggcaagaattgcctgttattacaagtgaagtgtcctacaaatgcaataaacataactattatagagatatatcgagagaaactttgtaatgtacgagctagcatttcatctactattatgtcggaagtgaatgtacttatgtcaaaactattataaagtggcctgctggataacttgaagtgcttcatataactgttccatctttgattgttgcattttttaatgtaactgtgatgcccgacctaatgtagaatccttcctttgccctgtcagcttcttgaacaccatcggtgtttgctatgatcacatttcttcctatcttggcattcttgtcgattatgcaattcctgattttagtatttgccccgacaccaattggaaccttcccttctgccaccagagatgcaatttcatactcagtttgataatagtcagcacccatcatcatcgtatcctgaagctccacaccagactccaaacgtgagcgtactccaacaatagaatgttgaacgctgcactccctcaagaagcaaccatgagatataattgcatccacaatcttgcggttttctactttggtaggtggtaggaatctgggggaagtgaagaaaggtgtctttggatcatagaattcaaatttaggaggctgttctgttagagcaagatttgcatcaaagaaggactttatagttccaatatcttcccagtagtcattgaacaaatatgcctggacattgtgctcattcacagcagatgggataatttcagatccaaagtcattgcatgaagaacatttccatcttaatagttgcagcaaggtttcagttctaaacacgtagacacccatggatgcaatataaggatgtttttctgcttcttgtggcaataaccctaaaagagtggtgtcaacacgcattgcctttagatctgatcccttaggtttttctgcaaactgtataatccgtcctgtcttatcaattttcatcagtccatagtctgatgcccgactgtcatccatgggtacacatgaaactgtgatatcagcatttgtgtcaacatgtctctgtacaaagttcatgtagtccattcggtaaagatgatcaccagaaagtatcaatatatgctcaacattcttgttcttggcatcctcaaaaacccatataaattgtcttacagcatcggcggtcccttggaaccacttcttct

SEQ ID NO: 9 - DNA, 407 bp, Glycine max
tagaaacattgagaagtggaatgaagctaagtctggcgtacatcttgcgaattcggtttagtttttgagactcttgagcgatcaaattagccgttgaagggctctcatctaagacaacttcgtaaccgtctcgataagatgtacgccagacttagaaacattgagaagtggaatgaagctaagcaaattagaggtggaaactgaatatgatacgtcttaactaccatgatatatatatatagagagagagagagagagtgaagggagttagaaactttaattgataacttatttgcgtgtggattaatcttcagaatgaagtgtcccaataatcttagtggcaagaattgcctgttattttcgtcaaaaaaaaaaaaaaaaaaaaaaaaaaagggcggccaccgcct

SEQ ID NO: 10 - DNA, 614 bp, Glycine max
ctttaccattctccatggagtggcggggaattattatgtttatactataatataataacataattatatttatagtaactactacttatttatttttttaaaatatcttaatttcccaccttaccctacaatcaaggacagaatctatgcaatttaaaagccaacaacgttgagagaagccaagtgtgaagacagacagtgagaaatgatgatgaagcgtcggttccttttggttctcttggttctctatgtcacagtggagcagagtaagctactccaccacgtagaagccgatggtgggtttgtaaaaacaagaggagtgcagcttatgctgaatgggagtccctactatgctaatggctttaatgcctattggcttatgtaccttgcctctgatccttcccagagaaacaaaatctcatcggtatttcaacaggcttcaaatcatggactcaacattgccagaacttgggccttcagtgatggtggatatcaacccctacaatactctcctggatcctacaatgaccaaatgtttcagggcttggatttcgcaatagccgaagcaagaaaatatgggatcaagatggtgttcgagttggtgaataactatg

SEQ ID NO: 11 - DNA, 1587 bp, Glycine max
cccacgcgtccgaaaaaaaaagatatgaagcttcacagaaacgctataagcttaagcctataagtttcttgtttgattagaatggagccccaacactcctccatctacaatcttacaaacctttattcgaagttctgatggctgtgcgatcattctcttacgatgtgttcctcagcttccgaggggaagatactcgttatggtttcactggctatctctacaatgtccttcgggaaaggggaattcacaccttcattgatgacgacgagccccaggaaggggacgaaatcacgacagcacttgaggaggctattgagaagtccaagattttcatcatcgtgctctctgaaaactacgcatcttcctccttttgtttaaacgaactcactcacatccttaactttactaaggagaatgatgatgtgttggttttgcccgttttttatagagtggatccttcagatgtccgacaccacagaggtagttttgcagaagcactagcagatcatgaaaagaagttgaactctaataacatggagaagcttcagacgtggaagatggctctgcaccaagtttctaacatttctggccatcatttccaacatgatgggaacaaatatgaatacaagtttattaaggagatagttgaatcggtgtcaaacaagtttaatcatgatcatttacatgtttcggatgttctggttgggctagagtcaccagtgctagaagtaaagtcgcttctggatgttggacgtgatgatgtcgtccacatggtagggatccatggactcgccggagtgggtaaaacaacacttgctatcgcggtctataattctattgctggccattttgaagcttcttgctttcttgaaaatgtgaaaagaacttccaacacgataaatgggttagaaaaactccaaagcttccttctttctaaaaccgctggagaaattaagttaacaaattggagagaaggaattcccattataaagcgtaagctcaagcaaaaaaaggttcttcttattctagatgatgttgatgaagataaacagttacaagcacttattggcagccctgattggtttggtcttggcagtagagtcatcataaccactcgagacgaacatttgttagctctacacaatgttaaaataacatataaggtgaaagagttgaatgagaaacatgctcttcaattacttactcagaaggcttttgagttggaaaaaggaattgatccaagttatcatgatattttgaatcgagcggtaacttatgcttcaggtcttccatttgttttagaagtaattggttccaacttatttggaaaaagtatagaagaatggaaatctgctctagatggatatgaaaaaattcctcataaaaaatctatgcatacttaaagtaagttatgatgctttgaatgaagatgagaaaagtatttttctagcttgatattgcacccttgcgatttggagcaacccaatacaagcggatctccaattaatgtattactagtcacaatagcagtgaacgatttgatgattgccttaccaaaaaaaaaaaaaaaaaaaagggcggccgccg

SEQ ID NO: 12 - DNA, 1680 bp, Glycine max
  unsure (1)..(1680): unsure at all n locations
gaattcggctcagcgcattatagcacaccacacaaaaaagcaaaacagagagaacaactgttactcacacacgccatgggtaaatgaatggtttttgagcaacagcagttaaaagagaaaagggattcagcgaagatgacatcggttggtgtggcaccaacttcgggtttgagagaagccagtgggcatggagcagcagctgcggatagattgccagaggagatgaacgatatgaaaattagggatgatagagaaatggaagccacagttgttgatggcaacggaacggagacaggacatatcattgtgactaccattgggggtagaaatggtcagcccaagcagactataagctacatggcagagcgtgttgtagggcatggatcatttggagttgtcttccaggctaagtgcttggaaactggtgaaactgtggctatcaaaaaggttcttcaagataagaggtacaagaaccgggagctgcaaacaatgcgccttcttgaccacccaaatgttgtcgctttgaagcactgtttcttttcaaccactgaaaaggatgaactatacctcaatttggtacttgaatatgttcctgaaacagttaatcgtgtgatcaaacattacaacaagttaaaccaaaggatgccgctgatatatgtgaaactctatacataccagatctttagggcgttatcttatattcatcgttgtattggagtctgccatcgggatatcaagcctcaaaatctattggtcaatccacacactcaccaggttaaattatgtgactttggaagtgcaaaggttttggtaaaaggcgaaccaaatatatcatacatatgttctagatactatagagcacctgagctcatatttggcgcaactgaatatacttcagccattgacatctggtctgttggatgtgttttagctgagctgctgcttggacagcctctgttccctggtgagagtggagttgatcaacttgttgagatcatcaaggttctgggcactccaacaagggaagagattaagtgcatgaaccctaattatacagaatttaaattcccacagattaaagcacatccatggcacaagatcttccataagcgcatgcctccagaggctgttgatttggtatcaagactactacaatactcccctaacttgcggtgcacagcttttgatgccttgacgcatcctttcttcgacgagcttcgtgatccaaatactcgcttgccaaatggccgattccttccaccactatttaatttcaaatcccatgaactgaaaggagtcccatctgagattttggtgaaattggttccagagcatgcaaggaagcaatgcccgtttctaggctcgtgaagtgttgtttccatatgagaatgctgcgctttccttttctatttaatatgatatttttgttggtatctttattgtattcggttgccctgtaaaagcagatttagagatacatgctactcattatcacccaacccccgatggttatgtagaataccctgtttcctgtatcacagcagattgtaacatacaatagaggacaaaatgtctgcaattatctaaatgttgcatcaatatttgtatttgttgagacaaaaaaaaaaaaaaaaaagggcggccgccggcgcccgctctagaggatccnagaatacgtac

SEQ ID NO: 13 - DNA, 936 bp, Glycine max
gcgcattatagcacaccacacataaaagcataacagagagaacaactgttactcacacacgccatgggtaaatgaatggttattgagcaacagcagttaaaagagaaaagggattcaccagatagatgacattcctatggtgtggcaccaacttcaggtttgagagaagccagtgggcatggaaagcgcatgcctccagaggctgttgatttggtatcaagactactacaatactcccctaacttgcggtgcacagctttagatgccttgacgcatcctttctttgacgaacttcgtgatccaaattctcgcttgccaaatggccgattccttccaccactatttaatttcaaatcccatgaactgaaaggtgtcccagctgagattttggtgaaattggttccagagcatgcaaggaagcaatgcccgtttcttggcttgtgaagtgtaacagaactgcaagtgttgtttccatatgagaatgccgcgctttccttctatttaaaatgatatttgttggtatctttattgtattcggttgccctgtaaaatcagatttagagatacatgctactcattatcatcctaccccccgatgggtatgtagtagaataccctgtttcctgtatcacagcagattgtaacatacaatagaagacaaaatgtctgcaattatctgaatgttgcatcaatatttgtatttgttgagacactgatgggttgttatttaatttagttatgcttagcgtggtggttggaagttgtaatggccttgtctgtgcatttgtttattttccactctttaggtaaagctctgaccaaacgacttgggacgaagtcttggtgcttgtcttgtatatattgctcgatagactaatattaaactccttatgtgaaagtgatcgtgatcgatgttaatttaatcaaacagttagg

SEQ ID NO: 14 - DNA, 718 bp, Glycine max
tagggttcatgcacttaatctcttcccttgttggagtgcccagaaccttgatgatttggtatcaagactactacaatactcccctaacttgcggtgcacagcttttgatgccttgacgcatcctttcttcgacgagcttcgtgatccaaatactcgcttgccaaatggccgattccttccaccactatttaatttcaaatcccatgaactgaaaggagtcccatctgagattttggtgaaattggttccagagcatgcaaggaagcaatgcccgtttctaggctcgtgaagtgttgtttccatatgagaatgctgcgctttccttttctatttaatatgatatttttgttggtatctttattgtattcggttgccctgtaaaagcagatttagagatacatgctactcattatcacccaacccccgatggttatgtagaataccctgtttcctgtatcacagcagattgtaacatacaatagaggacaaaatgtctgcaattatctaaatgttgcatcaatatttgtatttgttgagacaatgatgggttgttgtttaatttagttatgcttagcgtggtggttggaagttgtaatggccttgtctgggcatatgtttatttttccactctttaggacgacttgggacgaagtcttggtgcttgtctggacaaatattaaactccttaagtgaaagtgatcgatgttatattataatc

SEQ ID NO: 15 - DNA, 496 bp, Glycine max
ctcgcttccttctcttccttctctaactatatatattttctttttctctctgtttcttcctttttattttatgcttttttctccgatgtgactggcgtttgtttggtgtgtttttcgtgtgcgtcgaaccctctgcgttcgttaattttgttttgtgttttcggatcgacttgtttcgcgttcggttgcggggatcttcggtttaggtaaatgagtggtaaatgagtggtttttgagcagaagcagttaaaagagaaagggattcagcgaagatgacatcggttggtgtggcaccaacttcgggtttgagagaagccagtgggcatggagcagcaggtgttgatagattgccagaggagatgaacgatatgaaaattagggatgatagagaaatggaagccacagttgttgatggcaatggaacggagacaggacatatcattgtgactaccattgggggtcgaaatggtcagcccaagcagactataagctacat

SEQ ID NO: 16 - DNA, 639 bp, Glycine max
  unsure (1)..(639): unsure at all n locations
gctttccacacaaaaaagtagaagcactgttttctcacacaattccataaagaataacctctcaaactcactcacatccatctaacttcaacttcctcatcctcacaactcacaatcctccttccttttcctttactttttcttacatacattcatgccaaaggaggtaagtgattgggttttaagctgttaaaatagcaaggaaggtgcaaaatggcttcagttggtgtggcaccaacatcatcaggcttgagagaatccagtggtgttgataggttgccagaggagatgaatgatatgagaattagggatgataaagaaatggaagccaccgttgtcgatggtaacggaacagagaccggacatattattgttactaccattgggggtagaaatggtcaaccgaagcagactataagctatatggcagagcggattgttggacatggatcatttggggttgtcttccaggctaaatgcttggagactggtgaaactgtggctatcaaaaaagttcttcaagacaagaggtataaaaaccgggagctgcaaacaatgcgccttcttgaccacccaaatgttgtctgtttgaagcatngtttcttttcaaccaccgaaaaggatgaactataccttaat

SEQ ID NO: 17 - DNA, 459 bp, Glycine max
  unsure (1)..(459): unsure at all n locations
ggactgtcaccagcgcattatagcacaccacacaaaaaagcaaagcagaaaacaactgttacttacacacgccatgggtatgggtatgggtatgggtatgggtaaatgagtggtaaatgagtggtttttgagcagaagcagttaaaagagaaagggattcagcgaagatgacatcggttggtgtggcaccaacttcgggtttgagagaagccagtgggcatggagcagcaggtgttgatagattgccagaggagatgaacgatatgaaaattagggatgatagagaaatggaagccacagttgttgatggcaatggaacggagacaggacatatcattgtgactaccattgggggtagaaatggtcagcccaagcagactataagctacatggcagatcgtgttgtanggcatggatcatttggagttgtcttccaggctaagtgcttggaaactggtg

SEQ ID NO: 18 - DNA, 1628 bp, Glycine max
  unsure (1)..(1628): unsure at all n locations
gcgcccacgcgtncgnccacgcgtncgnccacgcgtgcgggcccccctctctctcaccctcctcttcacacattttctgtgcgctctaacaaacattctcgttcacactttcagattgtgtgaagatgggggcgggtggccgaactgatgttcctcctgccaacaggaagtcagaggttgaccctttgaagcgggtgccatttgaaaaacctccatttagtctcagccaaatcaagaaggtcattccacctcactgtttccagcgttctgttttccgctcattctcctatgttgtttacgacctcaccatagccttctgcctctattatgttgccacccattacttccacctccttcccagccctctctctttcttggcatggccaatctactgggctgtccaaggttgcatccttactggagtttgggtcattgcccatgagtgtggccaccatgcattcagtgactaccagttgcttgatgatattgttggccttgtcctccactccggtctcctagtcccatacttttcatggaaatacagccatcgccgtcaccactccaacactggttctcttgagcgggatgaagtatttgtgccaaagcagaagtcctgtatcaagtggtactctaaataccttaacaatcctccaggcagagtcctcactcttgctgtcaccctcacacttggttggcccttgtacttggctttaaatgtttctggaaggccttatgatagatttgcttgccactatgacccatatggtcccatttactctgatcgtgaacgacttcaaatatatatatcagatgcaggagtacttgcagtatgctatggccttttccgtcttgccatggcaaaaggacttgcctgggtggtgtgtgtttatggagttccattgctagtggtcaatggatttttggtgttgattacattcttgcagcatactcaccctgcattgccacattacacttcctctgagtgggactggttgagaggagctttagcaacagtggatagagattatggaatcctgaacaaggtcttccataatattacagacactcatgtagcacatcacttgttctccacaatgccacattatcatgcaatggaggctacaaaggcaataaaacccattttgggagagtattatcggtttgatgagactccatttgtcaaggcaatgtggagagaggcaagagagtgtatttatgtggagccagatcaaagtaccgagagcaaaggtgtattttggtacaacaataagttgtgatgattaatgtagccgaggcttctttgaactttcccttgtgactgtttagtatcatggttgcttattgggaataattttgttgaaccctgatgttggtagtaagtatctagacagttgcatagcggttttgtttacagaataagatatagcctctctgaacagtttgattattgcaccatggtttgcaatcggtgcatgtcgaccaagtttctcaagactgtggagaagcttattcttgttccagttcttgaatccaagttgttaccgtattctgttattattgacttagaatccttaaccttttctgctgttttctcaaaatcgtcactcgcaaatgaatcacatttcaaa

SEQ ID NO: 19 - DNA, 1605 bp, Glycine max
cacgcctacgtaagctcggaaattcggtccaagctcctcgagctcctcttcacacattttcttagctctctccaacaatccctctcgttcacactttcagattgtgtgaagatgggggctggtggccgaactgctgttcctcctgccaacaggaagtcagaggctgaccctttgaagcgggtaccatttgaaaaacctcagtttagtctcagccagattaagaaggccattccacctcactgtttccagcgctctgttctccgctcattctcctatgttgtttatgacctcaccatagccttctgcctctattatgttgccacccattacttccacctccttcccggtcctctctctttcgtggcatggccaatctattgggctgtccagggttgcatccttactggtgtttgggtcattgcccatgagtgtggtcaccatgcattcagtgactaccagctgcttgatgatattgttggccttatcctccactccgctctcctagtcccgtacttttcatggaaatacagccatcgccgtcaccactccaacacaggttctcttgagcgagatgaagtatttgtgccaaagcagaagtccagtatcatgtggtactctaaataccttaacaatccaccaggcagagtcctcactcttgccgtcaccctcacgcttggttggcccttgtacttggcttttaatgtttctggaaggccttatgatagatttgcttgccactatgacccttatggtcccatttactctgaccgagaacgacttcaaatatatatatcagatgcaggagtacttgcagtatgctatggccttttctgtcttgccatggcaaaagggcttgcctgggtggtgtgtgtttatggagttccattgcttgtggtcaatggatttttggtgttgattacatttttgcagcacactcaccctgcattgccacactacacttcctctgagtgggactggttgagaggagctttagcaacagtggatagagattatggaatcctgaacaaggtcttccataatattacagacactcatgtagctcatcacttgttctccacaatgccacattatcatgcaatggaggcgacaaaggcaataaagcccatcttgggagagtattatcggtttgatgggactccatttgtcaaggcaatgtggagagaggcaagagagtgtatttatgtggagccagatcaaagtactcagagcaaaggtgtattttggtacaacaataagttgtgatgattaatgtagccgggggcttcttgtccgtcaggtgggatggtttgaactttcctttgtgactgtttagtatcatgcttgcttattgggaataattttgttgaaccctgatgttggtagtagtatctagaaagtagcatagcgtttttgtttgcagaataagatatagcatctctgaacagtttgattattgcaccatgttttgcaatcagtgcatgtcgactaagtttctcaagattgtggggatgcttattcttgttccagttcttgaatccaagttgttatcatattctgttattgaaaaaaaaaaaaaaaaaaagggcggccgccgttactcccgat

SEQ ID NO: 20 - DNA, 478 bp, Glycine max
cgctcgagccgattcggcccagcaattggaacgagggaagtgttcccgccatgggaatggagcgagtgcagtgtgcctatgcctctctggacgaagcgttcgaaatagggaaagaggcgtatcaggggcagcagtacagccagatttacttcgcgcgccttcatttgatgcgaacacttttatattccctcgttcctcattggaaacccaattttcccgtgtgcacagtgctgggattggaagaggggaaggagtgtgtcattgttggaaccctctataaacacatgaagctcaaaccttgcattcttgatgagtattccaaggagagatcagtggttccacttgtcaagccacataacttcatacacccggatgatcacctagttttggaagatgaaagctggcaggttaagctcagtgggagtatcattttgccatctgaatatgtaacacgaattgggggtgctatacttggaaa

SEQ ID NO: 21 - DNA, 366 bp, Glycine max
tcgcttacgcgtccgttcctattcacacattttctgtgcgctctaacaaacattctcgttcacactttcaggacgaagcgttcgaaatagggaaagaggcgtatcaggggcagcagtacagccagatttacttcgcgcgccttcatttgatgcgaacacttttatattccctcgttcctcattggaaacccaattttcccgtgtgcacagtgctgggattggaagaggggaaggagtgtgtcattgttggaaccctctataaacacatgaagctcaaacctttgcattcttgatgagtattccaaggagagatcagtggtttccacttgtcaagccacataacttcatacacccggatgatcacct

SEQ ID NO: 22 - DNA, 334 bp, Glycine max
gcgtagtaagctcggaaccatatcgatatcgcgccgctccagccgttctcgttcacactttcagattgtgtgaagatgggggcgggtggccgaactgatgtatcctcctgccaacaggaagtcagaggttgaccctttgaagcgggtgccatttgaacaacctccattcagtctcagcaaatcaagaaggcattcacctcactgtttcatcgtactgttgtcgctcattctctatgtagttacgactcacatagcgtctgctctatatgtgcaccatacttcactcatccagctcttcttctagatgcaactatggctgcaagtcatctactga

SEQ ID NO: 23 - DNA, 2004 bp, Glycine max
ctcttttgcaccgcaaacagcttcacttcacactctactcccaaaatggcggctgctacgacgtcgtattcttccgcaatcgccgcctcgtccgataccctagccaaacctgcttccaccagaacattctccgccaccaacctcgcccttcaatcgtcgtcttccaagctcggtttcaaatccctaaagcttcaccgatgcgccgccgccgccggctccgccctcggcgcgcggatggtgtcggcgccggcggtcaaggcccccgcactgctcgatttcgacacgaaggttttcaagaaggagaagattaacctcgctggacacgatgagtacatcgtaaaaggaggcagggatttgtttcacttgttgcccgatgctttcaagggtatcaagcagattggtgttatcggttggggatctcagggacctgctcaggctcagaatctacgggactctcttgctgaagcaaagtctgatattgtggtcaagattggactcaggaaaggttctcgttcctttgccgaagctcgggcagctgggttttctgaggagaatgggactctaggtgacatatgggaaactgtctcgggcagtgatcttgtgatgctgttaatttctgattccgcgcaggctgataactatgagaagatattgtctcacatgaagccaaacagcatacttgggctttcccatggttttcttcttgggcatttacaatcattgggacttgactttccaaagaacattagtgtaattgctgtgtgcccaaagggaatgggtccatctgtaaggaggctctatgtccaaggcaaagagataaatggtgctggaattaatgcaagttttgcagtccaccaggatgtggatggcagggctactgatgttgctttgggatggtctgttgcccttggttctccattcacttttgccactacattagagcaggagtacaggagtgatatctttggggagagaggaattttacttggtgctgttcatggagttgtggaatccttgtttaggagatacactgataatggaatgaacgaagatctggcctataagaatactgttgagtctataacagggattatatctaaaaccatctcaactaagggcatgctagctgtatacaatgctttatctgaagatgagaaaagggaatttgagaaggcttatagtgcttcttattatccttgcatggaaattctgtatgagtgctatgaggatgtagccagtggtagtgagattcgcagtgttgttctggctgggcgtcgcttttatgagaaagagggtctacctgcttttcccatgggtaacattgatcaaacccgcatgtggaaggttggtgagcgtgtccgatctacaagagcagccggtgatcaaggcccattatatcctttcactgctggtgtctttgtggcattgatgatggcccagattgagatcctgaggaagaaagggcattcctactcggaaatcattaatgagagtgtcattgaggctgttgactctttgaatcctttcatgcatgctcgtggtgtttctttcatggttgataactgttcaaccacggctaggttgggttcaaggaaatgggctccacgatttgactacatcctaacccagcaggccatggtggctgtggacaatggaactcctgttaacagggacttaatcagcaacttcctgtcagacccagtgcacggagccattaaagtttgcgctgaactgagacccacagtagacatttctgtgccaccagatgcagactttgttcgtccggagttgcgttctagcaattagaacttaaaagcaattatggctttcacttcgaatctttttcagatttctcagaactgcagttatcttgttagtttgggttttcatgattggatgctagtgtgtaagttgtattgtcattttacagtttgtacccgcctgtgttctgccactgaaaaaaaaaaaaaaaaaaaaaaaaaaaaaaaaaaagggcggccgccg

SEQ ID NO: 24 - DNA, 575 bp, Glycine max
gtggacaatggaactcctgttaacaggttcttattcagcaacttcctgtcagacccagtgcacggagccattaaagtttgcgctgaactgagacccacagtagacatttctgtgccaccagatgcagactttgttcgtccggagttgcgttctagcaattagaacttaaaagcaattatggctttcacttcgaatctttttcagatttctcagaactgcagttatcttgttagtttgggttttcatgattggatgctagtgtgtaagttgtattgtcattttacagtttgtacccgcctgtgttctgccactgaggaacgttacttggtgtcctatttaaatgagtcacgctagtacttaccattagaggctgagaaggattaaggattttacgatcttaatttcacgtttctaacagttccttgcaagccttccgtcagttttagccccggaaccatcttagtgatcacggtaactcgatctggtcatagacggtcgaattgaacatgcatatagtgaagaaaatgttaatgcgttgagtattcctataattttctttgaattttttttacttt

SEQ ID NO: 25 - DNA, 755 bp, Glycine max
gagtgcgatgaggataatgcagctggaagtgagattcgcagtgttgtcttggctgggcagcgcttttatgagaaagagggtctgcctgcagatcccatggctaaaattgatcagacccggatgtggaatgttggtgaccctgtctgttctacaaggccacctggtgatctacgtccatcatcaccatttactgctagggtctacctggcattgatgatggcccatattgacatcctgaggaagaacgtgcattcctactccgatactaataccgagagtgtcactgagtctgtcgattctctgaatcctttcatgcatgctcgtggtgtttcattcatggttgataactgttcaactacggcaaggttgggttcaaggaaatgggctccccgatttgattacatcctaacccagcaggccttggtggctgtggacaatggagcacctatcaaccaggacctaatcagtactttcctgtcagaccaagtgcatggagccattgaagtttgtgctcaactgagacctacagtagacatttctgtgccaccagatgcagactttgtccgtcccgagttgcgtcagtctagcaattagaacttgaaccaaattcttgagcctattcctttttggaatgcttagaatagcagctgtcctgttggtttgaattttgttcatatggttgagtgctgtgctgtggaagtctgtattatcactatgtagtactgagattttaataatggggaatgttgcctcgt

SEQ ID NO: 26 - DNA, 440 bp, Glycine max
ctattaaccgggacttaatcagcaacttcctgtcagacccagtgcatggagccattaaagtttgcgttgaactgagacccacagtagacatttctgtgccaccagatgcagactttgttcgtccagagttgcgttccagcaattagaacttaaaatcaattatggctttcacttcgaatcattttcagatttctcagaactgcagttttgttgttagtttgggttttttagttttgttttcttggttgaatgctagtatgtaagttgtattatcattttgtagtttgtactcgtctgtgttctgccactgaggaacgttacttaatgtcctatttaaatataataagtctgtaaactacgtccacagacgagtcacattagagggtgagacggattaaggattttacgatcttaatttcatgtttcttacagttccttgc

SEQ ID NO: 27 - DNA, 516 bp, Glycine max
ggaattaatgcaagttttgcagtccaccaggatgtagatggcagggctactgatgttgctttgggatggtccgttgcccttggttctccattcacttttgccactacattagagcaggagtacaggagtgatatctttggggagagaggaattttacttggtgctgttcatggagttgtggaatccttgtttaggagatacactgataatggaatgaacgaagatctggcctataagaatactgttgagtctataacagggattatatctaaaaccatctcaactaaggttgtattttcatactcgtctagcattaaatttttgtctgttggactcccccatcccttccccaaaaccctggatagtgtgctggtacagggaattctgtgagttgtgactagccttttgcacttattggtttggatagggcatgctagctgtatacaatgctttatctgaagatgagaaaagggaatctgagaaggcttatagtgcttcttattatccttgcatgga

SEQ ID NO: 28 - DNA, 1410 bp, Glycine max
gaagacgacagaagggggtgtgagtggatagcgatagcaatagcatcgacatctattcctcccggtacctgtatagtgaattcggctcgagcggctcgagattatgtagagagagagactcagtgaagaaagaaagatatgagataattccttctttatcttttttcatagcagtgaagaaaaaactgagaaagcatgggcgtggactactacaagattcttcaggtagatagaagtgccaaagatgaggatctcaagaaagcatatcgaaggctagccatgaagtggcaccctgataagaaccctaacaacaagaaagaggctgaagctaaattcaagcaaatctccgaagcttatgatgttttgagtgatccacagaagcgaggaatttatgatcagtatggtgaggaggggttgaatggggtgccgccaggcgcaggtggttttcctggtggtggcgacggtgggccgacgtcattccggttcaaccccagaagtgcagatgatatattttccgagtttttcgggttttcgagaccttttggtggtggaatgggggacatgggtggccgagctggtggctctggattttccaggggtggcccgtttggtgaagatatctttgctcaatttaggagtgcagctggggagagctgtggccatatgcaaaggaaaggtgcagccattgagagacaattgccttgtagcttggaggatttgtataaagggactaccaagaaaatgaagatttcaagggatgttagtgatgccagtgggagaccctccacagtagaggaaatacttacaattgagatcaagccaggttggaagaaaggaacaaaaataacttttcctgaaaagggaaatgagcagagaggagttatcccttcggaccttgtctttattattgatgagaagcctcatagtctctttaaaagggatggcaatgatcttgttgtcacccagaagatatcgcttgtagaagccttgacaggttacacagtgcagcttgacaacccttgatgggcggaatcttacattccccattaactccactattagtccaacatatgaagaagttgtcaaaggagagggtatgcccattccaaaagaaccttccaagaagggaaacttaagaatcaagttcaatatcaagtttccctccaggcttacatccgaacagaaaagtggcatcaagcgattattgacatctccttaagcaacagcagtagctcttcctaccatttagctaacattgtaagatgtcagttattttatgcttggtttatttgttttcaaatggaaattgctgccgctgtgaactggatttcagttagaacagtttattagaggatgatatttgttaaaaaaaaaaaaaaaaaaaaaaaaaaaaaaaaagggcggccgccg

SEQ ID NO: 29 - DNA, 418 bp, Glycine max
ggggattggactagcagcagcatcgacatctattcctcccggtacctgtattgtatcagaaggaacgtgatatcatgatgctgtaaagagagagagatatgagataattcacaattcctcctttatcttggtttctagcagtgaagaaaaaaacagagaaagcatgggcgtggacttctacaagattcttcaggtagatagaagcgccaaagatgaggatctcaagaaagcatatcgaaggctagccatgaagtggcaccctgataagaaccctaacaacaagagagaggctgaagctaaattcaagcaaatcttctgaagcttatgatgtttggagggatccacagaagcaaggagtgtatgaccagtattggtaggaggggctgaatggggtgccgttggccccaggtggttttcc

SEQ ID NO: 30 - DNA, 413 bp, Glycine max
ggtatgcccattccaaaagaaccttccaagaagggaaacttaagaatcaagttcaatatcaagtttccctccaggcttacatccgaacagaaaagtggcatcaagcgattattgacatctccctaagcaacagcggtagctcttcctaccatttagctaacattgcaagatgtcagttgttttatgcttggtttatttgtattttcaaatggaaatcgctgctcgctgtgaactgcaatttcagttagaacagtttattagaggatgacatttgttaattggttcgtgtcttctttagtttttggtagtgaaaattttcttaacctctttttcacttgtttatgtgaaaagtgcctgtgcaagaattgaatttctttgtattagtattattcttacccccgtgttgcttttcc

SEQ ID NO: 31 - DNA, 1392 bp, Glycine max
  unsure (1)..(1392): unsure at all n locations
gaagctttaccgccgatggcacccgtccgtaagctcggaattcggttcgagggggacttgttttgtgttgaaatacattggtttatgggaagagagcaaggcaggaagtcagtgtttataaaacgacagtaggagcctggtctggtcggtgtggcactcaaacattgtttgttgtaggaagaggaatcttgagaaatggcaggggacagcaagagcaagattctgttcatcggagggactggttacatcggaaaattcatcgtggaagccagcgccaaagctggccacccaactttccttttggtgagggagtccactctctccaaccccgcaaaatcacccctcatcgacaatttcaaaggcctcggtgtcaatcttgttttaggagatctatacgatcaccaaagtttggtgagtgctataaagcaggtcgatgtggtaatttctactgtaggacacctgcagctagctgatcaagataagatcatttctgcaattaaagaagcaggaaatgttaagaagttctatccatctgagtttggaaatgatgtggaccggactcatgcagttgaaccagccaagtctgcatttgcaacaaaggccaaagttcgccgagctattgaggctgaaggaattcccttcacttatgtgtcaagcaacttctttgctggttacttcctgcccaacttgtcacagcctggagccacagctgcccccagagacagagttattatcctaggagatggaaaccccaaagctgtttttaacaaggaagaggatattggaacttatacaatcaattctgtggatgatccaagaaccttgaacaaaattctctacattagaccaccagctaataccttgtcgtttaatgagcttgttactctctgggagggaaagattggtaaaactcttgaaagaatctatgttccagaagaacaactcctgaagcaaattgaagagtccgcaccacccgtgaatgtgatcctgtcaattaaccactcttcttatgtaaagggggatcatactaactttgaaattgagtcttcttttggagtggaagcttcagctctatatcctgatgtgaaatacatcactgtggatgagtaccttaatcagtttgtctaaggtgcaaagcctagctgataagtttgtttaattggtaaaactttgttttctaaataaagagaatcatgtagtaagactgaattgctgcatgtgctcctcaaaagaacaatgtatgaaatacctatgctatgctatatgctatgatacctttattacatgcatattggtgtcatcgattttaattttannnnnnnnnnnnnnnnnnnnnnnnnnnnnnnnnnnnnnnnnnnnnnnnnnnnnnnnnnnnnnnnnnnnnnnnnnnnn

SEQ ID NO: 32 - DNA, 924 bp, Glycine max
cttcgctttcgatctctttctcttccttctcatcattctcatattattgtcgccacttcgacctcaatcacccccgctcgcactcgctcttcccttcctctggtggcgacaatgtcgactcctgctaggaagaggctgatgagagacttcaagaggctgcaacaagacccgcctgcagggatcagtggtgccccccaggataacaacataatgctgtggaatgctgtcatatttggtcctgatgatactccatgggatggaggcacgttcaagttgacactccaatttactgaggactatccaaataaaccaccgactgtacgatttgtgtctcgcatgtttcatccaaatatttatgctgatggaagtatttgtttggatatattacaaaatcagtggagtcctatttatgatgtggctgctatactcacatctatccagtcattgctttgtgatcccaacccaaattctcctgcaaactctgaagcagctcgaatgtttagtgagaacaagcgtgagtacaatcgaagagtgagggaaattgtggagcagagttggacagcagattaagttcatccttatatgcatgggaagctttgaaggcatgaatttggttgcagtgatggcaactataagaatgattgtgcaaactcatcacatttatattctctgctgatatgaatgatagcatcatcttatctttaatttattatagcttctgcattgcatatgtcagttaatgtaaaatagaattatgcgtgtcaatttactttcgattgttgtcagacattcaacatgaaaattatagtttgctgaactggttatgatttcatcaaggtttttgaaaaaattagcttcaatttggtttacaatggatcatgagtgctttacccattaagaaaaaaaaaaaaaaaaaaaaaagag

SEQ ID NO: 33 - DNA, 1160 bp, Glycine max
acacgagctatagagctatgacgcacgctgcccgtcagactcgggtgattagaccccgactcaattacaccacgcttctaaattctgagaatgaattcgtaagatcgaagcaatagcctttttctctgccgccactggtttcgatcccacacccacaaacgcaaaccctccatcctttgaatgctcttgcgttttcctttcactacctcattcctaactcacacacacacaacgggtgatatcaatgtcgactcctgctaggaagaggctcatgagagatttcaagaggctgcaacaagacccgcctgcaggaatcagcggggcacctcaggataacaacataatgctgtggaacgctgtcatatttggtcctgatgatactccatgggatggaggcacgtttaagttgactcttccaaatttactgaggattatccaaacaagccaccaactgtacgatttgtctctcgaatgtttcatccaaacatttatgcggatggaagtatttgtttggatatattacaaaaaccagcgggagtcctatttatgatgtagctgctatactcacttctatccagtcattgctttgtgatcccaacccaaattctcctgcaaactcagaagcagctcgaatgtttagtgagaacaagcgggagtacaatcgaagagtgagagaaattgtggagcaaagttggacagctgactaagcttatcttcgcatgcttgtgggcctttgaagtcatgaattagattgcactgctggaataagaatcattgtgccaacttactgaattttatgccgcattccttactcttctgaatgttaggatcatctcatctttaattcattgtagtttatgcattgtccatgtcagttcatgtattatagaatcctgtcaatttgcaccaagttgttgtcaacacaatgtataagttgtagttttctgaattggttacgatcacaaggatttgttaaactagcttcaatttcaaaaaaaaaaaacaaaaaagaaccactgcttaatctaaaaaacggtctacaaaaagaatggctgtacaacatatgctgaacttcaaatgcaccagcgctcgctgccagatgacggaaaacctgcactccagatcgcgcggtcacatgattacctctcccagagagtcac

SEQ ID NO: 34 - DNA, 503 bp, Glycine max
ctcgagccgaccaaattatatatgatattttaagcgttgtttggggaagggtgattagaccattcaattacaccacgcttctaaattctgagaatgaatatcgtaagatcgaagcaataaccttttttcctctgccgccactggtttcgatcccacacccacaaccctccatccttcgaatgctcttgcgttttccttaaactgcctcattccgaagccatacacacataacggtttttctaggtgctagcaatgtcgactcctgctaggaagaggctcatgagagatttcaagaggctgcaacaagaccctcctgcaggaatcagtggcgcccctcaggataacaacatcatgctgtggaatgctgtcatatttgggcacgtttaagttgattcttcaatttactgaggattatccaaacaagccaccaactgtacgatttgtctctcgaatgtttcacccaaacatttatgcggatgggaagtatttgttggatatattac

SEQ ID NO: 35 - DNA, 946 bp, Glycine max
atgttttttatagcatgaattccttttattgaagaaaagtatttacattcaacaaaatacaaatgaatgtcatcttgaattgcacaatgaaataactcgaatgttacaccgatagtataccatgtttctgtttgtacttaagtgtagttctttttccttcccccgatatttccatgtgttcaattatatctatatgacagttactaaaaatacaaaatgtcaaacttcactagcccaaatatcatacaatggacatcttacgatacaacaacgtacaattttgctttgcctttcagaactgttttctgggctagcaagttaagcttgtgcttgattcaagggttgccttagcaagccacaataagccaggatcattccgtttcaacaccaagtaagcattttcctttccaagattgtcaaacataacatcttcgctgaagccaaccaaaaatagaatttccaaggcagctttattatttacaatattcctctcaatgactggattagccttccgtaatctcttgtatttttccacctcagggtgttcaatcacattcctgattatttttaggagagtttggaggattgaagtagcttgcattgcactaacttcacttcttagcatttccagagcctcagacaaacggttacaaacagcagtcgtggtgtcatttatcctctgaaactcttgatcatcaggatcaggctcatcggtttgcagagtagataaaattggtgtggaaaccacatcattgggatcgggttctagaactggagcaatagattctgtggatctttctaaattatcaatggatgtgtatgtcgcagccatatactcagcacctgtctccgaatgaaaacgttgcgcatgatgagaatcttctggatcagcctcctgtttcattccattgataatatgatcgtcagggtcaggcttaccattaag

SEQ ID NO: 36 - DNA, 481 bp, Glycine max
  unsure (1)..(481): unsure at all n locations
cctacattcaattacaccacgcttctaaattctgagaatgaatatcgtaagatcgaagcaataaccttttttcctctgccgccactggtttcgatcccacacccacaaccctccatccttcgaatgctcttgcgttttccttaaactgcctcattccgaagccatacacacataacggtttttctaggtgctagcaatgtcgactcctgctaggaagaggctcatgagagatttcaagaggctgcaacaagaccctcctgcaggaatcagtggcgcccctcaggataacaacatcatgctgtggaatgctgtcatatttggtcctgatgatactccatgggatggaggcacgtttaagttgattcttcaatttactgaggattatccaaacaagccacccactgtacgatttgtctctcgaatgtttcacccaaacatttatgcggaatggngtatttgtttgatatattacaaaaaccag

SEQ ID NO: 37 - DNA, 422 bp, Glycine max
cccacgcgtccgattcaattacaccacgcttctaaattctgagaatgaatatcgtaagatcgaagcaataaccttttttcctctgccgccactggtttcgatcccacacccacaaccctccatccttcgaatgctcttgcgttttccttaaactgcctcattccgaagccatacacacataacggtttttctaggtgctagcaatgtcgactcctgctaggaagaggctcatgagagatttcaagaggctgcaacaagaccctcctgcaggaatcagtggcgcccctcaggataacaacatcatgctgtggaatgctgtcatatttgggtgagctgaattgaaattggataaagataaaaccggtctgcttacttgaattattttggtactttggtttttattttattttttttccacactt

SEQ ID NO: 38 - DNA, 636 bp, Glycine max
aaaatatatagcaagtatcctgctatgcagtagtcatcattttataattattttgtaaaaggtaattttcctcctttgcagtcattgctttgtgatcccaacccaaattctcctgcaaactctgaagcagctcgaatgtttagtgagaacaagcgtgagtacaatcgaagagtgagggaaattgtggagcagagttggacagcagattaagttcatccttatatgcatgggaagctttgaaggcatgaatttggttgcagtgatggcaactataagaatgattgtgcaaactcatcacatttatattctctgctgatatgaatgatagcatcatcttatctttaatttattatagcttctgcattgcatatgtcagctaatgtaaaatagaattatgcgtgtcaatttactttcgattgttgtcagacattcaacatgaaaattatagtttgctgaactggttatgatttcaaaaaaaaaaaaaaaaaaaaaaaaaaaggggcgccccccgccaagggacccctccacccggggaataattccgggccgggacccggggggggaacaagtttccccaaaggggggccgtataagccctgggggaaaccagggcaaaggctgttcccgggggaaaat

SEQ ID NO: 39 - DNA, 433 bp, Glycine max
aaatcaacgccccctaatcataaccctctttctttctcttccttttcatcattctcatgtcctcaatcaccccccctcgcactcgctcttcccttcctctggtggcgacaatgtcgactcctgctaggaagaggctgatgagagacttcaagaggctgcaacaagacccgcctgcagggatcagtggtgccccccaggataacaacataatgctgtggaatgctgtcatgtttggtcctgatgatactccatgggatggaggcacgttcaagttgacactccaatttactgaggactatccaaataaaccaccgactgtacgatttgtgtctcgcatgtgtcatccaaatatttatgctgatggaagtatttgtttggatatattacaaaatcaggggagtcctatttatgatgtggctgctatactcacatc

SEQ ID NO: 40 - DNA, 1227 bp, Glycine max
ggacgcaccattgacaattcgcggtttgttacctcactttgttttttttctctgcagtaatagaaaaaaaagaaagaaagaagaagaagaagaagaagaagaagaagatgttgagggttgcagctagaaggctctcttctctctcctcctcctctccgtggcggcccaaccacgccgcttccgcttatgtctctcgaaacgcagtcgttgatgaccgcagatccgatccttcctcccatcccctttttcccttcagaggttttgctactgaatccctgatccacccaatagaaaacagcattattcctgagattcctgcaactgttactgctgttaagaaccctacttctaagattgtctatgatgagcacaaccatgaaagatttcccccaggtgacccaagcaagagggcatttgcctacttcgtccttacaggtggtaggtttgcttatgcctctttggtccgtctccttgtcctcaagtttgtgcttagcatgtctgccagtaaggatgttcttgctctggcttcacttgaggttgatctctccagcattgagcctggcactacagtgaccgttaagtggcgtggaaagccagtgttcatcaggcgccgaaccgaggatgatatcaagctggcaaacagtgttgatgttggatctcttcgcgatccccagctggatgctgatagagtcaaggacccagaatggctcattgtgattggggtttgcacccatttgggttgcattccattgccaaatgctggtgactttgggggatggttttgcccttgccatggatcacattatgatatttcaggcagaattaggaaggggccagcaccatacaatctggaggttcctacttacaccttcttggaagaaaacaagttgatgattggttgaaaataaatatggttctgcatacaagcggaatgagtttacaatttctttttttaaaatttatttggattacaatgcgcctttcggacgtcttttaccttcaagttcttgttgggtatgtttagcaagtggtttatgtaacttggaaattgtaactgttaccctttggcgagacttatatcaataatcgcctgacttttagttagcatattgtcgacgagttcaagaatattgaagtttgcaccatgtataaacattttaaaattttgcttataaagttcgtatcttggaattgcccaaaaaaaaaaaaaaaaaagggcggccgccg

SEQ ID NO: 41 - DNA, 580 bp, Glycine max
attcccggtcgaccccgcgtccgcccacgctccgaagaagagccacgctgaggcctaagatctccgaattccaagcgcctcttgatagggtctcccaccctaaccaagccagatcccgttttcaattccttctcagtttccttttctctgaaaaaacatgttgagggttgcagctagaaggctctcttcttctctctcatcttcttctccgttgcggcccaatcacgccgcttccgcttttctctctcgaaacgacgtcgtcgtcgatgaccgcagatctgctccttcctcccatccccttcttcccttcagaggttatgctactgaatccctgatccacacaaaagaaaacagcattactcctgagattccgccaactgttactgctgttaagaaccctacttctaagattgtctatgatgatcacaaccatgaaagatttcccccaggtgacccaagcaagagggcatttgcctacttcgtacttacaggtggtaggtttgcttatgcctctgtggtccgtctccttgtcctcaagtttgtgctaagcatgtctgccagtaaggatgttcttgctctg

SEQ ID NO: 42 - DNA, 352 bp, Glycine max
acggctggaagacgacagaaggggggctatggtagtaacttttcctggtccattcaccttataatcggaagaagagccatactgaggcctaagatctccgaattccaagcgcctcttgatagggtctcccattttcaattccttctcagtttccttttctctgaaaaaagatgttgagggttgcagctaggaggctctcttctcctctctctcttcttctccgttgcggcccaatcacgccgcttccgcttttctctctcgaaacgacgtcgtcgtcgatgaccacagatctgttccttcctcccatccccttcttcccttccgaggttttgctactgaatccctgatccac

SEQ ID NO: 43 - DNA, 980 bp, Glycine max
gtcgacccacgcgtccgcccacgcgtccgcggacgcgtggggcaagcaagctcgatctactactactactagctggtacacatactagccagcctgccagccagcttgccatggcgcccaccgtgatgatggcctcgtcggcaaccgccgtcgccccgttccagggtctcaagtccgccgccagcctccccgtcgcccgccgcagcaccaggagcctcggcaacgtcagcaacggcggaaggatccggtgcatgcaggtgtggccggcctacggcaacaagaagttcgagacgctgtcgtacctgccgccgctgtcgacggacgacctgctgaagcaggtggactacctgctgcgcaacggctggataccctgcctcgagttcagcaagctcgggttcgtgtaccgcgagaactccacctccccgtgctactacgacggccgctactggaccatgtggaagctgcccatgttcggctgcaccgacgccacgcaggtgtacaaggagctgcaggaggccatcgccgcgtacccggacgccttccaccgcgtcatcggcttcgacaacgtcaggcagacgcagtgcgtcagcttcatcgcctacaagccccccggcagcgagtagagaccgtggctagatcgacccatggccatgcctctgcctgttgatcggatcaccttcttgcattggttcctctctctctctccctccttttttttccctttatctcatcatttcttttctcctgcatgcaatggttccttttgcttccaacaattctcctgctgatgtatccagcatggcatcatccatctacaattacgtacgtagtgcaacgactgtcgattcgttgggtgaggaacatatatgtgaatgcaagctccggctaccatacatgtgtaatgtgtaatagatatatatacaaaactgccgaggcgccgacaatactttaaaaaaaaaaaaaaaaaaaagggcggccgc

SEQ ID NO: 44 - DNA, 1182 bp, Glycine max
gaattcggctcgagggaacaggggaggtgttgaactgttccgcggagaataatggggatctctttcatggtgttctaggggggcttggccaatttggcattataacccgggcaagaattgtcctagaaccagcacctaccatggtaaaatggattagagtgctgtactcagatttcacagcattcacaagagaccaagagaggttaatatctgcagaaaagacttttgactacattgaaggatttgtgataataaacagaactggtcttctaaataactggcgattatccttcaacccacgagacccggtccaagctagtcatttcaagtcggatggaagaactctcttctgccttgaaatggccaaatacttaaacgtggaagaaatcgatgcagcaaatcaggaagttgaggaacatttgtcccgtttaagctacatcccatcaactcttttttcaacagaagtcacatttgtagatttcttagacagggtgcacatatccgaggtcaagttgcgttcaaaaggcttgtgggatgttccacatccatggctcaatcttctaatacccaaaagccaaatactcaactttgcacaagtcgtcttcgggaacatcctatcagaaactagcaacggccccgtccttatctacccagtaaacaaatcaaagtgggacaacagaacttctgttgtgattccagaggaagatattttctacttagtggcatttcttacatctgcagttccatcttcaaatggaactgatggcctagaacacatactaagtcagaacaaaagaatattagaattctgtgaaagagcacaacttggagtgaagcagtatttgccccactacaacacacagcaagaatggagggcccattttggtcctcaatgggagacttttctgctgagaaagtccgtttatgatccattagcaatactcgcccctggccaacgtatatttcaaaaagcaataaccttctcatgaccacatttttattattaattattaaaaatctgaaaaaaaaaaagagaagaaaagtccttcatggcatgtgccaaaatgaaaaaaaaatgttatatgatccagacaggttttgacattgaccatacagaatgcaattgcaaaggaagaaggttcattgatagtagagaaaaaaaaaaaaaaaagggcggccgcc

SEQ ID NO: 45 - DNA, 1411 bp, Glycine max
  unsure (1)..(1411): unsure at all n locations
gaattcggctcgagatggtgaactctttcacagtgtacttggagggctaggtcagtttggcattataacaagagcaagaatattcctggaaccagcacctgccatggtaataatgcatcaaggacaataataatataccagaaacaaggtcctatcaattttaattagtggtatgcaattaagtaccggttgtgatcatggagtatttctgtttttgaacaggtaaaatggatcagggtgttgtatgcagatttcacagcattcattagagaccaagagaaattaatatttgcagaaaaggcctttgattatgttgaaggatttgtgataataaacagaactggtctgctaaataactggagctcatccttcaacccacaagacccagttcaagctagtgagttcaagtcagatggaagaactctcttctgcctagaattggccaaatactacaatcttgaagaaacccttctagtgaatcaggaagttgagaaacatttgtcccgcttgaactatatcccatcaacactttttctaacggaagtcacatatgtagactttctagacagggtgcatacctcagaggtcaagttgcgttcaaaaggcttgtgggatgttccacacccatggctcaatctttttatacccaaaaccaaaatacaccatttcgcagaggttgtcttcgggaacatcgttaaagaaacaagcaacggccctgtccttatctacccagtaaataaatcaaaatgggacaacagaacttctgttgttattccagaggaagatattttctacttagtggcatttcttgcctctgcagtcccctcttccaatggtcctgatggccttgagcacattttgagtcggaacaaaaaaattttagagtattgtgaaagagccaatcttggggtaaagcaatatttgccccactactctacacaggaagaatggacggcgcactttggttcccaatgggagattttcaagaaaagaaaatcactttatgaccctttggctatacttgcccctggccaaggaatatttcaaaaatcaataaccttctcatgacggtagccacgttttagtaatgagaagaaaaaaaaaggcccttatggcatacatatgtgaatatattcctgcatatgcatactgtgtgtgttgcaccaagacagcacaagagttactgggtcaatacaagagaacaaaggtttcaaacgtgaattattattatagggtttcaaaaaatataccaatattatcagtgctagaaacgaatgtatatatcaattttgcnnnnnnnnnnnnnnnnnnnnnnnnnnnnnnnnnnnnnnnnnnnnnnnnnnnnnnnnnnnnnnnnnnnnnnnnnnnnnnnnnnnnnnnnnnnnnnnnnnnnnnnnnnnnnnnnnnnnnn

SEQ ID NO: 46 - DNA, 576 bp, Glycine max
gggaagttgagaaacatttgtcccgcctggactgtatcccatcaacactttttctaacggaagtcacatatgtagactttctagacagggtgcatacctcagaggtcaagttgcgttcaaaaggcttgtgggatgttccacacccatggctcaatctttttatacccaaaaccaaaatacaccatttcgcagaggttgtcttcgggaacatcgttaaagaaacaagcaacggccctgtccttatctacccagtaaataaatcaaagtaatgcttggtttcttctttctttctttttttccaccaccaatctttaacataaattaaaattgagtttattaggcatgaaatcattgatgagtctaattatattctaatcagaaattattattattatttttaagatagttacaatgaagggtcaaatatatagtcctctaattaatttataaaaaactaataatttttgttcctcttcacagtaaaaattatctatgattaatagacaaaaatcattatttttttaaattcagaaactaaatttattaaagttaaaatataaatcaatttttaccgaa

SEQ ID NO: 47 - DNA, 1488 bp, Glycine max
  unsure (1)..(1488): unsure at all n locations
tctctctcgacgacgggtcactatacgtcgacgtttcgggaggggcattatgggaagatgttctcaaacgctgcgtttcggagttccgcctcgcgccgcggtcttggaccgattacctcggcctgaccgtcggcgggacgctctccaatgccggcgtcagcggccaggccttccgctacggcccgcaaaccgccaacgtaacggaattggaggtggtgagcggcaaaggcgaaaccttagtctgttccgaatcacaaaattcggaactcttcttcgccaccctgggaggattaggccagttcggcatcataactcgcgctcgagtcccggttcaacaagccccggacatggtgagatggataagggtggtgtacacagaatttggcgacttcactcgagacgcagagtggctggtgactctccgagagggtgatggttttgattacgtggaaggtttcgtttttgtcaacagtgacgacccttgcaacggctggaccaccgtccccgtgggccccaaccaatacttcgacccggttcggattccttcaaccgccggcccggttctctattgcttagaacttgcccttcattatcgtaaccaagaccatccttccgcagttgatatggaggtggatagattacttggacggttaagattcgttgagggtctaaagttcagcgtggatgtgacgtacatggaattcttgctacgtgtgaagcgtgtggaggaggatgcaaaagccaatggaatctgggacgcaccccacccatggctgaatatgttcgtctccaagtccaacatcgctgaatttgatcgtgaagtgttcaagaaaatcctcaagcacggagttggtggccccattctagtgtaccctcttttgcgaagcaagtgggatagtcgacactcggtagtggtgccggacagcaacattttctacattatagccttgctccgatttattccaccacccccaaagggaccacctacagaactattggtggaacaaaaccatgagattattcagttgtgctacaacagaggcttcgatttcaagttgtatctccctcactaccagtcaaaggagaactggatgcgacactatggagataagtggtccagattcgtcgagagaaaggccaattttgatcccttggctattcttgcacctggacagaaaattttttcccgaatccctcaacccttgtctatcacttaaatattaattattttagattaatatattgcttttttttttctttttctttttctcaacccactgtgaccattttgtcttgatttcatttttttttctctctttctcttgactcccccctttccttttgtttctgtccccaatcgctccaaccatttaccacaccgttgtagccatattgtaaatgaatattttgggggtgaaattaatatcaatcttgatcttttgtactgccgaaaaaatanaaataaanaataaaaaaaaaagcggccgc

SEQ ID NO: 48 - DNA, 1217 bp, Glycine max
  unsure (1)..(1217): unsure at all n locations
gaattcggctcgagtctctctcgacgacgggtcactatacgtcgacgtttcgggaggggcattatgggaagatgttctcaaacgctgcgtttcggagttccgcctcgcgccgcggtcttggaccgattacctcggcctgaccgtcggcgggacgctctccaatgccggcgtcagcggccaggccttccgctacggcccgcaaaccgccaacgtaacggaattggaggtggtgagcggcaaaggcgaaaccttagtctgttccgaatcacaaaattcggaactcttcttcgccaccctgggaggattaggccagttcggcatcataactcgcgctcgagtcccggttcaacaagccccggacatggtgagatggataagggtggtgtacacagaatttggcgacttcactcgagaccagagtggctggtgactctccgagagggtgatggttttgattacgtggaaggtttcgtttttgtcaacagtgacgacccttgcaacggctggaccaccgtccccgtgggccccaaccaatacttcgacccggttcggattccttcaaccgccggcccggttctctattgcttagaacttgcccttcattatcgtaaccaagaccatccttccgcagttgatatggaggtggatagattacttggacggttaagattcgttgagggtctaaagttcagcgtggatgtgacgtacatggaattcttgctacgtgtgaagcgtgtggaggaggatgcaaaagccaatggaatctgggacgcaccccacccatggctgaatatgttcgtctccaagtccaacatcgctgaatttgatcgtgaagtgttcaagaaaatcctcaagcacggagttggtggccccattctagtgtaccctcttttgcgaagcaagtaagtacaatttttgacggtgaaatcaaataatatttctcatttctatacaattcctataaacttttaccttattgcactttagtccatctttgtctttattttgtatgtatagttttttcctctttttttcccacaaatttaaaattgaacaaatatatgttttgtgaaaagtaaaatttcaaaacatttgaaacaaacatgcatttagtttgttgttggtatcttaattgtacaactttgatttattggttnnnnnnnnnnnnnnnnnnnnnnnnnnnnnnnnnnnnnnnnnnnnnnnnnnnnnnnnnnnnn

SEQ ID NO: 49 - DNA, 1050 bp, Glycine max
ccctcgcgtccgcttttttcttctaataatggctgcaaaaacacgttcccttgcatccatctatgatgtgttcctcagcttcagaggtttagacacacgccatggtttcactggcaatctctacaaagctcttgatgacaggggaatctacactttcattgatgatcaggaattcggctcgaggcttcccagaggagaccaaataacatctgcactttccaaggcaattcaagagtccaggattgctattactgtgctttctcaaaactatgcttcttcctcgttttgtttagatgaacttgtaaccatccttcactgcaagaggaaagggttgttggttataccggtcttttacaaaatagatccttctgatgtcagacaccagaaaggtagttatggagaagcaatggctaagcatcagaagagcttcaaagctaagaagcttcagaaatggaggatggctttgcaacaagtagctgacttgtctggctatcatttcaaagatggagattcatatgaatacaagtttattgggagtattgttgaggaggtctctaggaagattaatcgtgcttatttacatgctgtggattatccatttggtcaatggtcacaagtgatggagaatcaaataaacatgggttaaagcaccttcaaagcatcctactttcaaaattacttggtgagaaggacatcaacttaacaagttggcaagaaggagcttcaatgatacgacataggctccgacgaaagaagattctcttaattttagacgatgttgacaagcgcgagcaattaaaggctattgttggaagatctgattggtttggtcccggtagcagagttatcattaccactcgggacaaacatctgctaaaatatcaccaggttgaaagaacttatgaggtgaccaaatctctagtgaatacaagtatattggtaatatcgttgatcaaatctctagtgagattaattggtaggataacaggaataggaaacaacaaggcaccagtaacaggaagcacaaaaaaaaaaaaaaagggcggccgc

SEQ ID NO: 50 - DNA, 1365 bp, Glycine max
ctctgcattcggctcgagagcagccatccacattcatactaagatttcttatcatggcttcgggatcaccttcctcttcctcttcctccaattacgatgtgttcctcagcttcagaggggaagacacacgtcatggttttactggccatctctacaaagctcttcatgacaagggaatccacactttcattgatgatgaggagcttccaagaggggaggaaataacaccagcacttatgaaggcaattcaagattccagagttgccatcactgtgctctctcaaaactatgcttcttcctcgttttgtttagatgaacttgcaaccatccttcactgtcaccagaggaaacggttgttggttataccggtcttttataaggtggatccttctgatgtgagacaccagagaggtagttatgcagaagcattggcaaagcttggggcgaggttccagcatgacccggagaagttgcaaaaatggaggatggctttgaatcaagtagctgacttgtctggctatcatttcaaagatggaaacagagattcatatgaatacgagtttattgggagtattgttgaggagatctctaggaagtttagtcgtgcttctttacatgttgcggattatccagttggtctagagtcagaagtgacagaggtaatgaagcttttggatgttggatcccatgatgttgtccatatcatagggatccatggaatgggcgggttaggaaaaacaacacttgctctggcagttcataatttcattgctctccatttcgatgaatcctgttttcttcaaaatgtgagagaagaatcaaataaacatgggttaaaacaccttcaaagcatccttctttcaaaattacttggtgagaaggacatcaccttaacaagttggcgagaaggagcttcaatgatacgacataggctccgacgaaagaaggttctcttgattttagacgatgttgacaagcgccagcaattaagggctatggttggaagacctggttggtttggtcccggtagcagagtcatcattaccactcgggacaaacatctgctaaaatatcatggcgttgaaagaacctatgaggtggaggttttgaatcacagtgccgctcttcaattgcttacgtggaatgcttttaaaagagaaaaaattgatccaagttatgaggacgtggaatctgctcttgaacattataagagaagtcccggtaatgaaatcatcctagagattctaaaagtaagctttgatgctttgggggaagaacaaaagaatgctttgaaacgtaagattagaaattttgaactccaaaaaaaaaaaaaaaaaaaaaaaaaaaaaaaaaaagggcggccgc

SEQ ID NO: 51 - DNA, 1194 bp, Glycine max
agaattggattgtttatttcatttgtatcatgttattgttgggtttggttattagtgtatagggttagtaagggatttggttcttggtgatggattcaattggcactgtttgaatgaggtttttggtgtttgttttgatcctgcagtgatagtagtcttgcgaatgcaatctcgcgttcgaaacctgctgtttatcaagaacaagttcagattcaatccgggactacaaggggtcccagaattcggctcgagccaaagcttaatgtgtctgatccgcacggtcggatccagatgcagcaacatgtacaggaccctggatatttgttgcaacaacaatttgaacagcaccagcagttgcagtcacaacaaccgcaacagcaatttgaacagcaacatcaccagcaccagcagacactaccgcaacagcagcaacagtttattcatggcacacactttattcaccataaccctgctattcctgcatattatcctgtatatccttcccagcaacatccccagcatccacaggtttactatgtgactgcgagacaggcgcaggcttacaacctgcctgtgcagcaggctaatatgggtgagtctgcagggaacatcgcctctagccgaccacaaactccaccaaatccttctacattggttcaacaacctgctacttacaaccccatcagaaatgctcccatgcctaaaactgaaatgaatgcttacagagctgcaactgcaggcacccctcaacttgttcaagttcctacgagccaacatcagcagcagtatgtcacatactcacagattcaccatccttctcagtccatggctcccaattctgctgcccctgccaattatgcttttgattatgcggatcctgctcatgctcaaatatactactctcaacctatggcacccacaatgccttcacagtaccagactatgatgatgcaggaaggttcagctcagcatccctcagacagcgtgaagcagcagcagataagaacctcacaaccattataagccagtccttaaaaaaaaaaaaaaagggcggccgcaaaatgggtttgtttccctttaagtttttataagcagttcttgtcgtcatgtttgataaaactgtttgtgggatggatttggataagggaaaaaaagcccaattaggaaccgtggtccacctgggccttttttttg

SEQ ID NO: 52 - DNA, 567 bp, Glycine max
cgagtctgcagggaacatcgcttctagccggccacaaactccaccaaatccttctacattggttcaacagcctgctacttacaaccctattagaaatgctcccatgcctaaaactgaaatgaatgcttacagagctgcaactgcaggcaaccctcaactagttcaagttcctacaagccaacatcagcagcaatatgtcacctactcacagattcaccatccttctcagtccatggctcccaattctgctgcccctgcgaattatgcttttgattatgcggatcctgctcatgctcaaatatactactctcaacctatggcacccacaattccttcacagtaccagactatgactgctgctgctgtgatgatgcaggaaggttcagctcagcatccgtcagacagcgtgaagcagcagcagcagatatgaacctcacaaccattataaaccattccttaaaaaaaaacaattttgaaaaaaatgggtttggtttccctttaagtttttatatgcagttcctatcgtcatgtttgataaactgtttgtggtatgtgtatttggataga

SEQ ID NO: 53 - DNA, 474 bp, Glycine max
gaaaaccacccactcctccaccacaggttcagtcacagacacaagcacagtcacaggcacaaacgcaaacacttgctcctcaatttcaacagaagtcaactggtggtggcgccgttgttgatttgccttctcctgattcagtttcaagtgatagtagtcttgcgaatgcaatctcgcgttcgaaacctgctgtttatcaagaacaagttcagattcaatccgggactacaagggttcccagtaaccctgtggatcgaaagcttaatgtgtctgatccgcacggtcggatccagatgcagcaacatgtacaggaccccggatatttgttgcaacagcaatttggacagcaccagcagctgcagtcacaacaaacgcaacagcaatttggacagcaccagcagctgcaatcacaaccgcaacatcaatttgaacagcaccaacaccaacaccaacagacactgcggaaacagcagc

SEQ ID NO: 54 - DNA, 2491 bp, Glycine max
gtgggttctttttcttcttccctccacttttccaggctctcggttttgaggttctcttctttatacggatggcagcaccattggcatgtcttgttgggagtggtttatctatacagagtaataaataactcttggcaaggacgtcaatggaagatatctcttctcatatcataggctttcagcacagagtaaggagtcaaagacaatatgcataaaggcatccttggatcaaaggaagcatgaagggagaagaggatttctgaaattgttgaatgtgggagttggcttacctgtattattaggaggtgggaaagcttatgctgatgaacaaggaccttcctcctccagaatgtcttattccagatttcttgagtatttggataagggtagagttaaaaaagtggatctgtttgagaatggaaccactgctgttgttgaggctgtttctcctgagttgggtaatagggtgcagcgagtgcgtgttcaacttcctggacttagccaagagctccttcagaaattcagggaaaagaacattgactttgcagctcatagtccccaagaagagtcaggttctcttttagctaacctgattgggaatctggctttccctttgatcttgattggaggattgttccttctctcgagacgatccggagggatgggaggtcctggtggccctggatttcctcttgcttttggtcaatccaaagccaagtttcaaatggaaccaaacaccggagtgacatttgatgatgttgctggggtggatgaagccaagcaggactttatggaggtggtggagtttttaaagaagcctgagaggtttactgctgttggggctcgcattcctaaaggagttcttcttgttggtcctccaggaactgggaagaccttgttagccaaggctattgctggtgaagctggtgttccatttttctctatatcaggttctgagtttgttgagatgtttgttggtgttggtgcttctcgtgttcgtgatttgttcaagaaggcgaaagagaatgccccttgcattgtctttgttgatgaaattgatgctgttggaagacaaagagggactggaattggtggagggaatgatgaaagagagcagaccctcaaccaacttttgacagaaatggatgggtttgagggtaacacaggtatcattgtcgttgcagcaactaacagggctgacattcttgactcggccttgttgagacctggccgatttgatagacaggtgacagttgatgttccagatataaggggaaggactgaaatcctaaaggttcatgctagcaacaaaaagtttgatgctgatgtttctcttgaagtgattgcaatgagaacacctggctttagtggagctgatcttgcgaatctgttgaatgaagctgctatattagctggtcgccgtggaaagacagctatttcatctaaagaaattgatgattctattgataggattgtggctggaatggaaggaacagtgatgacagatgggaagagcaaaagcttagtggcatatcatgaagttgggcatgctatttgtggaactttgactcctggtcatgatgctgtgcaaaaggtaacactagttcctcgcggtcaagctcgtggtcttacatggttcattcctaatgatgacccaactctgatctccaaacaacaactctttgcaagaattgttggaggactaggtgggagggctgcagaagaaattatttttggtgagcctgaagttacaactggagcagctggtgatttgcagcaaatcaccagtttggcaaaacagatggtgaccacatttggaatgtctgatattggtccttggtcacttatggaaccatcagcacaaggtggggatgtcatcatgagaatgatggcaaggaactcaatgtcagagaggcttgcagaagacattgatgctgccatcaagaggatctcagatgaagcatatgaaattgcactggagcatataaggaacaaccgtgaggccattgacaagattgtggaagtccttctggagaaggagactctgagcggagatgaattccgtgctatattgtctgagtttgttgaaattccagctgaaaaccgtgttgctccttcaactccagtaccagccactgtttgaatagcctatatatgtaacatctttcatatgtattatcttagaatacagaatgccctctgcagcctgctccatatttgtgaatgattaaagattctaccttactttttcattttttgtagtgttgacaaatgacaacagagagtatgtataaaagagaaactgtttttagtgtaaaaatttgtagtttctttacgtctataatacagtgtaactttaataaacctttatttttaaatgtagagttgtaacgggtgagacacaatgtttagtttttttttataaatggaaatgaaaaaaaatactaacttaaatactttaaaaaaaaaaaaaaaaaaaagggcggccgcc

SEQ ID NO: 55 - DNA, 506 bp, Glycine max
tgatgttatcatgagaatgatggcaagaaactcaatgtcagaaaagcttgctgaagacattgatgctgctgtcaagagactctcagatgaagcatatgaaatagcattgagccaaataaggagcaaccgcgaggcgattgacaagattgtggaagttctattggagacggagacaatgtctggagatgaattccgagctctcctgtccgagtttgttgaaattcctgctgaaaatcgggtccctccttcaactccctcaccagttgctgtttgaattgcctatatgccactgcaatgtagtgtagctttccacttactgaattttctgaaattgtgaaatatttgtaatatacccctggctcctaattttagtaatgacaaagatcctagcttgcttctttatttcttttttcttgtgttggcaacggaaaatgtaagtttcttcacaattagtacataatgtatccttagtgaatagtaatgatattaactcattgtatcattgt

SEQ ID NO: 56 - DNA, 575 bp, Glycine max
ctatgcaccaccaataagctccataccttctaattctctactctctctcacttctctctatcacatttttcttacaagatggcagcatcatcagcatgccttgtagggaatggtttatctacacggggtaatagaataactctcaagaaggacttcaatggaagaagatatctctactcaccttggagactttcatcattgaacaacaataaggcatcagaagcattttccataaaggcatccttggagcaaaggcaacaacaagaagggagaagggggtttctaaaactgttgcttggaaatgtgggagttggtttgcctgcactattgggaagtggcaaagcttatgctgatgaacaaggggtttcatcctccagaatgtcttactccaggtttctggagtatttggacaaggacagagttaaaaaagtggatctttatgacaatggaaacactgctgttgttgatgctgattcgcccgagttggggaaccggtcacagtatgttagagttcaactccctggacttaaccaagagctccttcagaaattcagggaaaagaatattgactttgc

SEQ ID NO: 57 - DNA, 358 bp, Glycine max
gttgggttcttcttgttttcaaccttaattatcaattttatttacttcttattttcgttatttattttttgctaataatttgattgttggaattgtcaatggtggaccctttgagccaaagtgttcatatttgaagttaaatctttccaccaattggactgagactgcttacagtttcagaatttgtcagaaaaagcttgtcccgattgcatttttgttcctgtacgtactcttattgatacggatggcagcaccattggcatgtgttgctgggagtggtttatccatacagagtaataaaattgtcaaggacttctatggaagatatctcttctcatatcataggctttcagcactg

SEQ ID NO: 58 - DNA, 1575 bp, Glycine max
gaattcggctcgaggaagaaaaaacaataaaacatgtcccattttggtcggaaactcagccgctcctccaccgtccggcgacggttccaccaccgcgtttccctgctccagcggtgcctcctccgcgtcctccaccgcatcctcctctgctccgggagcaaggccaccaatgccacgtatagcatgctgccgccggcattgccctctccgccgccgccggtgagctccgacggcgagcttggccgtgaagagatggacctttcttcgtcggcggtgtttcagacccatgacttggactctgatttggtttccttgaagatcagcttgttgggggattgtcaaattggaaaaaccagctttttggcgaaatatgttggggatgaaaaagagcagcaagggaaccagagggaagggttaaatcagatggacaagactttggttgttgaaggagcacgtatatcgtattgtatctgggaagtacaaggtgatggaaaatcagaagaccaactcccaatggcttgtatggactccgtggcaattttgattatgtttgatctaacaagtcgatgcacattaaacaggtatcttctatgttgtgtcacttttaaatttaaaattaattcaagctttttcaagagctaattgctaatataaggtgaatttttcaccattttttgggggtgctttgtgtttccattgtgggtgtttgatttcagtgtcgtgggatggtacaaagaagccagaaaatggaatcagacggcaattccagtgttgattggaaccaagtttgatgatttcattcagctccctattgatttgcaatggaccatcgccaatgaggcaagaaaatatgcaaaggccctcaatgccaccttgttcttttcaagtgcaacctacaacatcaatgtgaataagatcttcaagttcatcactgctaaactctttgacctaccatggacagtggagaggaatctaactgttggggaacccatcattgacttctaaattgtacaatacataaagttttgaagttgagtgatatatcaaagtcaaccgggctccaataggagtgccatgagtccatctcaatcacacttggggcaatagagttgttaggtttggacacatgtcaattcctatgaaaattacaagcctcttcaatcaccaccaccaacaataaggttttatacaaggggaggaataaagggcaagttagaaatagaagaaattgaaacaaaggagaggactataaggttttgtagcataacaagagaagggaactaatgcattattgagtacaaattagtcattaatggtgctcttgtcttgattattaaggaagtgtcctgtgagttactgtcaaaagcacatagaaaatgagattaggatgtaccgaatctccttttgtttcatttttatgcatttctcacccagttttgaagttctggtaatccaaagcttcttctgaataaataaatcattttgtatgattcccttatctgtgtcactcaagtctcagggatctttcaatttaatagaatttaacatcaaaaaaaaaaaaaaagggcggccgcc

SEQ ID NO: 59 - DNA, 1217 bp, Glycine max
gacgacagaagggggcacaaaaatacaatacaaaacaaaacagagcaaagagagagtgtgtgaaaagtgaaacaaaaaacagaacaacaatggcgacacttaaggttcctcagcctcttccccccgttgcagatgattgtgagcagctccgaaaagccttctcaggttggggaactaacgaggagctgattgtatcgatcttggctcataggaatgctgctcagaggaagcttatcagagaaacttatgcccagacctatggagaagatctcctcaaggccttggacaaagaactcacgagtgattttgagaggctggttcatctttggacacttgattctgctgaacgtgatgcatttttggcaaacgaggcgactaaaaaatggacttcaagcaatcaggttctggtggaaatagcctgcactaggtcctctgaacaattgtttgctgcgaggaaggcttaccatgttctttataagaagtctctggaggaggatgttgctcatcacacaacaggagacttccgtaagctcatactacctctggttagttcttatcgatatgaaggagatgaggtcaacttgaccctggcaaaaactgaggcaaaattgctgcatgagaagatttcaaacaaggcttataatgatgacgacttcatcaggattttggccacaaggagcagagcacagattaatgctactttgaatcactacaaagatgcatttggacaagatatcaacaaggacctgaaggctgatccaaaggacgagttcctgtctttactaagagcaactgtgaagtgcttgatccgtcccgagaagtacttcgagaaggttgttcgcttggcgatcaacaagcgaggaaccgatgaaggagcccttacaagagtggtggccacaagggctgaggttgatttgaaaaacatagcagatgagtatcaaaggaggagcagtgtccctcttgaacgtgctattgttaaggacaccaccggtgactatgagaaaatgcttgtggcgcttttaggacatgatgatgcttgacatactcctttgtgtttgtgtgtgtgtacttgtggcagagttactatatagtgtgcagtgtactgctttgtggttccatgttgttgtgttttctggccattattgtcttcctttgttgaataaaatgaaccactttggcacaaaaaaaaaaaaaaaaaaaaagggcggccgcgattg

SEQ ID NO: 60 - DNA, 641 bp, Glycine max
aatcactacaaagatgcattcggacaagatatcaacaaggacctgaaggctgatccaaaggacgagttcctgtctatactaagagcagatgcgaaaggctagatcacggcagagagatgcgcagagaaggttggtcgattggcgatcaacaagcgaggaaccgatgaaggagcccttacaagaggggaggccacaagggctgaggctgatttgaaaaacatagcagatgagtatcaaaggaggagcagtgtccctcttgaacgtgctattgttaaggacaccaccggtgactatgagaaaatgcttgtggcgcttttaggacatgatgatgcttgacatactcctttgtgtttgtgtgtgtgtacttgtggcagagttactatatagtgtgcagtgtactgctttgtggttccatgttgttgtgttttctggccattattgtcttcctttgttgaataaaatgaaccactttggcacactttggtgggtttttgaagcccctagaattgattgagtgtcaaacataaatggaatcctgcaatatatatgtggttcagattttgtaaatcactagtgactttagggtcacttttctgaagttaaatatatatacagagacaactaagtttggttcgcttctt

SEQ ID NO: 61 - DNA, 428 bp, Glycine max
ttccgcttgcaaaagaccaccagagggggccccatttttcctttccaaaccaaaccaggccaacgggggggggtgggaaaggtgaaccaaaaaccagaccaccattggcgacacttaaggttcctcaccctcttccccccgttgcagatgattgtgaccagctccgaaaagccttctcaggttggggaactaacgaggagctgattgtatcgatcttggctcataggaatgctgctcacaggaagcttatcagagaaacttatgcccagacctatggagaagatctcctcaaggccttggccaaagaactcacgagtgattttgagaggctggttcatctttggacactcgattctgctgaacgtgatgcatttttggcaaacgaggcgactaaaaaatggacttcaagcaatcaggttctggtggaa

SEQ ID NO: 62 - DNA, 1746 bp, Glycine max
gaattcggctcgagggaaattaagcaaaaccgcgtaggtgctcaaatcatagtctcagcatataaagtaatatcttaacctatctgcttaattgtttgattgtgatggcggatgaagggggaattgagaagcggcgctacgatgtttttctgtgttttagaggggaagacacgcgctacaccttcacaggtaatctctatgctgctttgcggcaggcgagattgaggaccttcttcgatgatgggttcaagagtggcgaccaaatctttgacgttgttcttcaagcaattcaggaatcaaggatttcaatcgttgttctctccgaaaacttcgcttcttcctcgtggtgccttgaagaacttgtgaagatccttgagtgcagggaaacaaagaagcaactcgttattccaatcttttaccgcatggatccctccgacgtaaggagacagactggttgttatggggagagcctggctcaacatcaatatgagttcagaagcgactccgagaaagtacgcaattggcaggaagctttgactcatgtcgccaacttgcccggatggaggttcagccggtaccaatatgaatatgaattcatcgaagacattgtgcgacaagccatcgtcgccattgtaccccgctatagcatttttctgagttttagtggaaacgatacccgctcctttacaggttttctcaacaatgcattgtgcaggagtaggtaccaaaccttcatgaatgatggggaccaaatttcacaatctactaatggagttattgaagaatcaaggctttcgatcattgtattttctgaaaactatgcacgttcctcgtcctgtcttgattttcttttgaccatccttgagtgtatgaagacgaaaaaccaactggtttgccccatcttttacaaagtgttaccgtcggatttaaggcatcaaagaaatagctatggtgaagccatgactgagcatgaaaatatgttgggtaaggactctgagatggtgaagaaatggaggtcagctttgtttgatgtcgccaacttgaaaggattttacttgaaaaccgggtacgaatatgaatttattgacaaaatcgtggaaatggccagtaaaatttaaaatggcttaaatcgatcaggtcctcgctcaagtgtcaactagaaggaaatatagactgaagtgccgtggaaggcagaactaatcaattcaacagattacaaatggttctatgagcagtcataagctcacagattgatactagtagttgtaatgtttacaatcggcactgaggaattgatttggaagtctgaattttacttcgaacattagcaatttctagaaaggtgaatatataagtcctgagggccatggccagaggcctgtcatcttgaaattgtgacacacactctcgtttaagtcatatttactttgatttcccaaatgtcatgcatatccaaacaattgtatgagctagattaaggaagctttagcattaaacagagtggagccaaatacccagttaagatgctgaatgatgtctctgttcagaatcaaccgacatagttattcatgatgtatataatcgaatttcgaaagacacaccaaacatatccttgcatgataaaaaaaaaaaaaaagggcggccgccctgggaagattttcaagattgtggagtgtcacaaatgcccttaaaaaagtgatcaacacattatgattttaattagttaatagtaaaatgattgctgct

SEQ ID NO: 63 - DNA, 722 bp, Glycine max
gaattcggctcgagcaatagcatatctatggcttctacttgttcttcctctttttccgttaccaaaaaatatgatgttttcatcagctttagaggagaggatactcgcgctgacttcactagccatcttcatgctgctctgcgcagaaacaacatcgatacatacatagactacaggatccacaaaggagacgagatctgggtagaaatcatgaaagcaatcaaagagtccactctcttcttggttattttctcagagaactatgcgtcttctagttggtgcttgaatgaactcatccaactaatggaatacaagaaacatgaagatgttgatgttattccggtgttctacaaaatagatccatctgaggtacgcaaacaaagtgggagttatcacatggcattcgcaaaacacgagaaggatagaaaggtgacggaggacaagatgcaaaagtggaagaacgctctctatgaagcagccaatttatcaggcttcctttctgatgcgtacaggtgcatgttgtgtccatatattatagtgtttcagcttttgtttatataaattctaatgtttaaggattattttcacatactacacataactcatgtctataagcaaacctcaaaccaattaaatgtaactaattttacaagacaaagtgatgtagtgaaacgtaagggaaaaggaaatgaggattcaaaaaaaaaaaaaaagggcggccg

SEQ ID NO: 64 - DNA, 1748 bp, Glycine max
caaaaacaccaattctcggcggccgccctttttttttttttttttttttaaaaaaaatcaatcatcttacttatttattctccgaaaatggttgatttacattggaaatcaaagatgccaagttccgacatgccttccaaaactctaaaactctctctctccgacaacaagtccttaccctctttgcaactacccttccgcaccacagatatctctcacgccgcaccttctgtttgcgccacttacgactactatctccgtcttcctcaactcagaaagctttggaactcctcagattttcctaattggaacaacgaaccaatcttaaaacctatcttgcaagctctcgaaatcaccttccgctttctctccattgttctctccgatccaagaccttactccaaccacagagaatggactcgcaggatagagtctcttatcacacatcaaattgaaatcattgccatactttgtgaagatgaggaacaaaattccgacacacgtggcactgcaccaaccgctgatctcagcaggaacaatagcagcgagagcagaagctacagcgaggcaagcctgcttccgcggcttgccacgtggtacaaatccaaggacgtagcgcagaggatccttctctcagttgaatgccaaatgaggaggtgttcctacacgctgggtttgggtgagccgaacctagcgggcaaaccgagcctgctctacgacctcgtgtgtaagccgaacgagatccacgcgctgaagacgacgccgtacgatgagcgcgtagagaatcacgagaaccacgcgttgcacgcgacgcaccagatcgccgagtcgtggatccacgcgtcgcggaaggttctagagaggatcgcagacgcggtgctctccagaaccttcgagaaggcggctgaggactgctacgccgtggaaaggatctggaagcttctcgcggaggtggaggacctccacctgatgatggatccggacgatttcttgagactgaagaatcagctctcggtgaaatcctccggcggcgaaacggcttcgttctgcttcaggtcgaaggagttggttgaactgacgaagatgtgcagagatctgaggcacaaggtgccggagatattggaggtggaggtggatccgaagggaggaccgaggattcaagaggcggcgatgaagctctacgtttcgaagagcgagttcgagaaggttcacttgttgcaggcgatgcaggcgattgaggcggcgatgaagagattcttctacgcgtataagcaggtgttggcggtggtgatgggaagttcagaggctaacggtaaccgagttgggttgagttgcgactcggctgactcgttgactcagattttccttgaaccgacgtattttccaagcttggatgccgccaagacttttcttggatacctgtgggataataacgataataacaaatggatatgataagggaaaaaaaaaaaaaggcgcaaaaacgatggccaaagtgaaattttcggtttgggcattttatggataatgttattcagtttagtttggtagtgttacacctcaataaagagggaaaaagcaaaaaacaaaagatgtaatttagaaattcttttttttctttaaggaaaagtggattaaattctgtaatggtcttgatcgttgtaaaatatttaacaaattatctttggagaaatgcttccacggtgtgttatttttttagggttcctgttaaataattatttactttt

SEQ ID NO: 65 - DNA, 673 bp, Glycine max
ctttgttcttcatgctccccaacccaacattcccatccactccttaatttcctctttctttcaaacttcacatgccacaactcttctccttcatctcatataaatacccttccttcttccctcttccctcttcaattcattccacaccacaaaaacaccaattctccaccctctcattgaaaaaaaaacaaccaaacaaaaaaaatcaatcattttattttatttttctacgaaaatggttgatttacattggaaatcaaagatgcctagttccaaaacaccaaaactctctctctccgacaacaagtccttaccctctttgcaactacccttccgcaccacagatatctctcccgccgctccttccgtttgcgccgcttacgactactatctccgtcttcctcaactcagaaagctttggaactccactgattttcctaattggaacaacgaaccgattctaaaaccaattttgcaagctctcgaaatcacgttccgctttctttccattgttctctccgatcccagaccttactccaaccacagagaatggactcgccggatagagtctctcatcatgcatcaaattgaaatcattgccatactttgtgaagatgaggaacaaaattccgacacacgtggcactgcaccaaccgctgatctcagcagcagc

SEQ ID NO: 66 - DNA, 786 bp, Glycine max
cttactcctcctgcagttgaggcaatatcagtgagttttgcagagtgagctatccccggtggaaaccctcggacggaggaaccggcatcgtcctgcttcagatcgaatgagttagtggacctgacgaagatgtgcagagatctgaggcacaaggtgccggagatattggaggtggaggtggatccgaagggaggaccgaggattcaagaggcggcgatgaagctctacgtttcgaagagcgagttcgagaaggttcacttgttgcaggcgatgcaggcgattgaggcggcgatgaagagattcttctacgcgtataagcaggtgttggcggtggtgatgggaagttcagaggctaacggtaaccgagttgggttgagttgcgactcggctgactcgttgactcagattttccttgaaccgacgtattttccaagcttggatgccgccaagacttttcttggatacctgtgggataataacgataataacaaatggatatgaaaacgaaaaaaaaaaaaaacaaaaacgatggtcagagtgaaaatttctttatggatggataatgttattcagtttagtttgatagtgttacacgtcaaaaaaaatgaagaaaaaaaaagcaaaagacgcaatctagaaattcattttttcttttaagggatagtggattaaattttgtaatggtcctgatcgttgtaaaatatttaacaaattatttttggacaactgcttccacgttgttattttttttcaggtttcctgttaaataatttatttatttgatac

SEQ ID NO: 67 - DNA, 560 bp, Glycine max
ctccttaatttcctccttctttcaaacttgacaaagccacaactcttctctcatctcatataaatacccttccacgacaccaatttcttcatcctctcattgaaaaacaagactaatcatcttacttatttattctccgaaaatggttgatttacattggaaatcaaagatgccaagttccgacatgccttccaaaactctaaaactctctctctccgacaacaagtccttaccctctttgcaactacccttccgcaccacagatatctctcacgccgcaccttctgtttgcgccacttacgactactatctccgtcttcctcaactcagaaagctttggaactcctcagattttcctaattggaacaacgaaccaatcttaaaacctatcttgcaagctctcgaaatcaccttccgctttctctccattgttctctccgatccaagaccttactccaaccacagagaatggactcgcaagatagagtctcttatcacacatcaaattgaaatcattgccatactttgtgaagatgaggaacaaaattccgacacacgtg

SEQ ID NO: 68 - DNA, 2183 bp, Glycine max
gaattcggctcgaggtcattcagtgaaagctcatagaccaaatactctgtctgcactccagtgcttttacaatcatggaaaatcatggtgcagtgtctgaaaccaagtgtacgtttgatgttttccttagttttaggggtgaagatacccgtcacacatttacttgtaaactctatgatgctttgtggctgaagggaattgacacctttatggataataaagagctgaagaatggagacaaaattggccctactcttcataaagccattgaagaagcaaggatttcagttgttgtcttgtctgaaaattatgcagattcttcatggtgcctcgatgaacttgtcaagatccacgagtgtatggagtcaaaaaaccagctcgtttggcccatcttctacaaagtgaatccctcggatgtgaggcatcagaaaggaagttatggtgtggccatgactaagcatgaaacaagtcctggaatagacttggagaaggtgcacaaatggaggtcaaccttgaatgaaatagccaacttgaaaggaaaatatttggaagaagggtaggtaaaaatggtaaaatatatatggtgttattaattttcgctgtttgcttcttgttaatttatggccaaggatgattgttcatatttcgatttgtggcgtgtctttggctttatatacacttttcctcatcatttttgttttacgcaaaatgaagtttgaacctcatgtgaacatcttttaacttcagtgtacttctgaatgtcatgaaaatgtccgatatataataactacttctgcaggttagtaatttttttcctcctttctattttacttttacttttgggtattctgtctatgaataactgtgttattataggccagaaattttatttccaaacatattttctgctagggatgtaacactttgccgattatgatccaaactcaaatttgtccccagctagaagtaggtcgtagaattaatttttgagaaattcaaacatggtactaaactaagtttggagtttcaatagtatgtttcaagtccccaaatgggtacccaaacatatcctaagtgagctggattggaccagatttgttctgtatattttactacccaaccctgatcaatatacacaaaatataatttggcaaaatcaatttgttgcttaatttaaagagcattgttttttcaggagggacgaatccaagtttattgatgatcttgctactgacattttcaaaatagtatcttctaaagatttatctagagaaatgtttatagtcggacgagagtatcgagttaaagaattgaaattacttctagatcttgagtctcgtgatatcacttgcctgttagggattcatggaactggtggaattggcaaaactacacttgcaaaagctttgtatgactccatttacaagcagtttgacggtacaagttttctcaacgttggagaaacctcaaatcctaagacagacttaaaacatctgcaagaaaagcttttatcagagatacttgaggacgacaaaatccactggagaaatattgaagaaggaaccgcaaaaatagaaaggagacttggttttaaaagagttctaatagttcttgacaatgttgatgacattaaacagttgaataatttggcagggaaatgtgcttggtttggtcctgggagcaggatcatcataacaacgagagataaacatttgctagatcttggtgaggttgaaaagagatatgaagtgaaaatgctagatgagaaagagtctctagagctcttttgtcattatgcctttcgaaaaagttgtcctgaatcaaactataaagatctgtccaatcgagcaatgagttgttgcaaaggccttccattggccttagaagtactaggctctcatttgtttaaaaaaaatgtggatgtatggaaggacgcattggatagatatgaaaaaagtccacatggaaatgttcaaaaagttcttagaataagctatgatagcctgttccgccatgaaaagtctatttttcttgatgttgcatgttttttcaaagggcaacgattggattatgtaaaaactgtactagatgcatctgatttcagctcaggagatggtattacaacattagttaataaatcacttttaactgttgactaaaaaaaaaaaaaaaagggcggccgc

SEQ ID NO: 69 - DNA, 1408 bp, Glycine max
cactttcctacaattttcttttcatcacaaaacaacccctcgcatatattatatttgttgattcattatttgtatccacaaacacttgttcttccttcacagttttgcaattgaaatggcttctacttctaatgccatcatccaatgcacctcttctttcttcttcgtttgagtatgacgtgtttgtgagcttccgcggtgaagacacacgcaacagcttcaccgcttttctttttgaagctctgaaaaaacaaggcatcgaggccttcaaagatgataaagatatcaggaaaggcgaatccatagcaccagagctaatacgagccattgaagggtctcatgttttccttgttgtcttttccaaggactatgcttcctcaacttggtgcctgcgtgaactagcacatatctggaattgcattcaaacatcttccagacatcttctgcctattttctatgatgttgatccatcacaagtgcgaaaacagagtggagactatgagaaagcctttgcccaacaccaacaaagttccaggttccaagagaaggaaattaacacatggagagaagttctggaactagtagccaatctctctggttgggatatcagaaataagcaacaacatgcagtgattgaagaaattgttcagcagataaaaaatatcttgggttgcaaattttctactcttccatatgataatctagttgggatggaatctcattttgctacattatcaaagctaatatgtctggggccggttaatgatgttcgagttgttggaattactgggatgggtggaataggaaagtcaactcttggtcgagctttatatgaaagaatctctcatcaatttaatttctcttgttatattgatgacgtaagcaaactttatcgactggaaggtacattaggtgtacaaaagcaactactttctcagtctctaaatgaaagaaatctagagatttgtaatgtatgtgatggaacacttctggcatggaagaggttacccaatgcaaaggcacttatagttcttgacaatgttgatcaagataaacagcttgatatgtttactgggggtagaaatgatctgttacgtaaatgcctaggtaaagggagcatagtcattataatttctagagatcaacaaatattgaaggcacatggagtagatgttatttaccaagtggagccattgaatgacaatgatgctcttcaattgttttgcaaaaaagcatttaaaaataattatattatgagtgattttgaaaaaaaaaaaaaaaaaaaaaaaaaaaaaaagggcggccgccgactagtgagctcgtcgacccgggaattaattccggaccggtacctgcaggcgtaccagctttccctatagtgagtcgtattagagcaggggattcaagg

SEQ ID NO: 70 - DNA, 2165 bp, Glycine max
  unsure (1)..(2165): unsure at all n locations
gaattcggctcgagatcttccagacttcttctgcctattttctatgatgttgatccatcacaagtgcgaaaacagagtggagactatgagaaagccttttcccaacaccaacaaagttccaggttccaagagaaggaaattaaaacatggagagaagttctgaaccatgtaggcaatctctctggttgggatatcagaaataagtagcagaaaatgttgaggtcataataattgaagatccatatgacatccttcgaacaagaacaatgagggtcgatgctctatcaacaatgagtagccttaagcttctctaccttggatattggaacgttggcttcgaaatcaatttttcaggaacacttgctaagctttccaatgaattaggatatcttagttgggaaaagtatccttttgagtgtttgccaccaagttttgaaccggacaaacttgttgagttgagactaccttacagcaacatcaaacaactttgggaaggcacaaagcctctacccaacaatttgaggcatttgaatctctctggctccaaaaatctaattaaaatgccatacattggagatgccctatatcttgagagtcttgatctcgaaggatgtatacaactcgaagagatcggtctgtccgttgttctttcacgaaagcttacttctctgaatttgagaaattgcaaaagtcttatcaagttgccacggtttggagaggatctaattcttaaaaatctagatctcgaaggatgtaaaaaactcagacacattgatccatccatcggtcttctaaaaaagctagaatatttgaatttgaaaaactgcaaaaatctagtaagcttacccaatagcatactaggcctcaattctcttcaatatctgattctctctggctgttcaaaactgtacaacaccgagttattttatgaactaagggatgcagagcaattgaagaagattgatatagatggagctcctattcatttccaatcaacatcttcctactccagacaacatcaaaaatcagttagttgcttaatgccttcctccccaatatttccatgtatgagtaaacttgatctaagtttctgtaatttagttgaaatccctgatgctattggaattatgagttgcttagaaaggctagatttaagtggtaacaattttgctacactgcccaacctcaagaagctttccaaactggtctgtttaaagttacaacattgcaagcagttgaaatctttgcctgagctcccttcacggattggcttcgtaactaaagcattgtattatgtaccaagaaaagcaggattatacatttttaactgcccagaattagttgatagggaacgctgcactgacatgggtttttcatggatgatgcaattgtgtcagtaccaggtgaaatacaagattgaaagtgttagtccaggaagtgaaatacgaaggtggttgaataatgagcatgagggaaattgtgtaagcttagacgcatctcctgttatgcatgaccataattggattggcgttgcgttttgtgcaatattcgtcgtacctcatgaaacactctcagcaatgagtttttcagaaacagaatatccattccatttgtttggtgatattcgagtggatttatatggagatttagatctagaacttgttttagacaaatcagatcacatgtggctattctttgtgaatcgacatgacatcattgcagatttccatctcaaggacaaatatcttggcagattggtttcgagatatgatggagtgttgaaagagtcatatgcggaggtgaagaaatacggatatcgctggctatataaaggggatattgaacaaaggaagcacaaatttggggaaattgaagaaaatgtgagctgaagggagaaaagatgatgcaaggtcctcccaggaaaagatagtaaagttgaagcttaggccgtagaatcatcatttcttctctcattttattcatttgagttgtccttcaaattttgaataagcttggtggcgtaaaatcaggttttaaatttttaatccactatatctaagaataaaattcaatgtcattataattaaaaattgcataatttgattttcnnnnnnnnnnnnnnnnnnnnnnnnnnnnnnnnnnnnnnnnnnnnnnnnnnnnnnnnn

SEQ ID NO: 71 - DNA, 1445 bp, Glycine max
gaattcggctcgagctcgagccgctcgagccgattcggctcgaggcaaactttatcgactggaaggttcagcaggtgtacaaaaagacttactttctcagtctctaaatgaaacaaatctaaagatttggaatttatcttatggaacagaactggcatggaggaggctacacaatgcaaaggcacttatagttcttgacaatgttgaagaagataaacagcttaatatgtttactgcgaatagaaagaatctgttacgtgaacgccttggtagaggaagcatagtcattataatttctagggatcaacaaatattgaaggcacgtggagcagatcttatttaccaagtgaagccattggatgacaccgatgctcttcgattgttttgcaaaaatgcatttaaaaataattatattatgagtgattttaaaacgttgacttctcatgtactatcacattgtgaaggtcatcccttagcaattgaagtattgggctcatctttgtttggtaaagatgtctcttattgggggagtgcattggtttccttaagagaaagtaaaagtattatggatgtgttgcgaataagttttgatcaattggaggatacacacaaggaaatatttctagatattgcatgtttcttgtacgatcatgatgtgatatatgtgaaggaaattctagattttcgtggatttaatcccgaatacggcctacaagttctcgttgataaatcacttataaccatgcgtaggatagttgaaatgcatgacgttttgcgcaatttgggcaagtatattgttagagaaaaatcaccttggaatccatggaagtggagtaggttgtgggatttcaaagatctcaacatagtttcgttggataataaggcaacagaaaatgttgaggccatagttcatgaagaagactatgacattgaaaaagactctgacttagaagaagactctaacttagaagactatgacttagaagactctgacttagaagaagactctgacttagaagactatgacttagaagaagactctgacttagaagactatgacttagaagaagactctgacttagaagactctcactttcttccaacagtgagggtggatgctctatcaacaatgagtaaccttaaacttctcaaatttagatacgctggctacgaaatcaattattcaggaacacttactaagctttccaatgaattaggatatcttacttgggtaaagtatccttttgagtgtttgccaccaagttttgagccggacaaacttgttgagttgattctacctaaaagcaacatcaaacaactttgggaagatagaaagataatatcaattattattattattatttttctatattgttttcatttaaataaacaaataaaaaggcaaactttcttaaaaaaaaaaaaaaaaaaaaaagggcggccgc

SEQ ID NO: 72 - DNA, 1115 bp, Glycine max
catgtatgcgtgaacttgatctaagtttctgtaatttagttgaactccctgatgctattggaattatgtgttgcttacaaaggctagatttcagtggtaacaattttgctacactgcccaacctcaagaagctttccaaactggtctgtttaaagttacaacattgcaagcagttgaaatctttgcctgagctcccttcacggatttacaattcttgatagactaagaccagcaggattatacatttttaactgcccagaattagttgatagggaacgctgcactaacatggctttttcatggatgatgcaattgtgttctcaggtgagattgttctctttatggtattaccattttggaggtgttactccaggaagtgaaataccaaggtggttcaataatgagcatgagggaaattgtgtaagcttagacgcatctcctgttatgcatgaccgtaattggattggcgttgcgttttgtgcaatattcgtcgtacctcatgaaacactcttagcaatgggtttttcaaattcaaaagggccaaggcatttgtttggtgatattcgagtggatttttatggagatgtagatctagaacttgttttagacaaatcagatcacatgtgcctattctttcttaaacgacatgacatcattgcagatttccatctcaagcacagatatcttggcagatgggtttcgagatatgatggagtgttgaaagagtcatatgcggaggtgaagaaatacggatatcgctgggtatataaaggggatatagaacaaaggaagcgcaaatttggggaaattgaagaaaagtgagcagaagggagaaaagatgatgcaagctgctcccaggaaaagacaaaatagttgaatcttaggctgtagaatcatcatttcttctctcattttatccatttgagtcgtccttcactcatcccaccaattcacaagtgtcataaagggaactcatgcaaatttttaataagcttggtggcgtaaaatcaggtttttggttgttatgggatgcttgtgtagctgtctttgttggttaagaatattgcttttttttccttttttggtttgagtaatgtttaacagagagtgatgca

SEQ ID NO: 73 - DNA, 554 bp, Glycine max
gtgtaccatggtgccttcttgacccctgatagcctgacaaagaagcataagaacatggcatactggtactgttgcagcccataatgctggccatcttgttgaatcattggagaagaggaattgggagatgcatatgttccatatggtgcataaccataaccttgatggtacatataagagcagttatccccataaacaccttgagccatccctccatcaaggttcatatatctggaataagcattccaatcaccttgcccatcataacctccataataatacgcagatgggtatccatttggaacaaagcatgaatttggattgaatggcttggccctccctttagctgccccattggaaaaagcaggtccattcttcttcgcaggctcagcaactccaatggctttggactcagagtccagagtcaaattctgcaataaatctgcagttttgtcagaagaaggagcaacagctgccatgatcgaaatcagagagagaaagggtcgccgccaactccgtgttctttgggtttgagacacagagagacgcgtggg

SEQ ID NO: 74 - DNA, 650 bp, Glycine max
ttctggaacaagtagccagtctctctggttgggatatcggaaataggaacacttgttaagctttccaatgaattaggatatcttggttgggaaaagtatccttttgagtgtttgccaccaagttttgagcccgacaaacttgttgagttgattctacctaaaagcaacatcaaacaactttgggaaggcacaaagcctctacctaatttgaggcatttggatctctctggctccaaaaatctaataaaaatgccatatattggagatgccctatatcttgagtggcttgatctcgaaggatgtatacaactcgaagagatcggtctgtccgttctttcacgaaagcttacttctctgaatttgagaaattgcaaaagtcttatcaagttgccacagtttggagaggacctaattcttaaaaagctatatctcgaaggatgtcaaagtctcagtcacattgatcaatccatcggttttctaaaaaacctcgatcatttgaatatggaaaactgcaaacaactcaaacgcattgatccatccatcggtttaccagaaaagctcagagaattgaatttgaaaaactgcaaaaatctagaaagcttacccaatagcatactaggtctcaattctcttaaatatctgaatctctc

SEQ ID NO: 75 - DNA, 315 bp, Glycine max
ctgcagtaacatggctttttcatggatgatgcaattgtatcaggtgatccattctttttacagatctgaaggtgttagtcctggaagtgaaataccaaagtggttcaataatcagcatgagggaaattgtgtaagcttagacgcatctcatgttatgcatgacgataattggattggcgttgcgttttgtgcaatattcgtcgtacctcatgaaacaatctcagcgatggctttttcaaaaacagatgggtactaccccgggttttaatgatattccagtggatttttatgaagatgtagatctagaacttgttt

SEQ ID NO: 76 - DNA, 533 bp, Glycine max
ccaatcaccttgcccatcataaccttacctccataataatacgcagatgggtatccatttggaacaaagcatgaatttggattgaatggcttggccctccctttagctgcccccgcgagcggcccttacaacaccgagttattatatgaactaaggggtgcagggcaattgaagaagattggtatagatggagctcctattcatgtccaatcaacatcttcctactccagacaacataaaaaatcagttagttgctcacggcccgcctccccaatatttccatgtatgcgtgaacttgatctaagtttctgtaatttagttgaaatccctgatgctattggagttatgagttgcttacgatggctagatttaagtggcaacaattttgctacactgcccaacctcaagaagctttccaaactgttctgtttaaagttacaacattgcaagcagttgaaatctttgcctgagctcccttcacgtgcagtaggaccagaattatacatgtttaactgcccagaattagttgatag

SEQ ID NO: 77 - DNA, 1554 bp, Glycine max
gaattcggctcgagccaggatttatattatcgttttatctgagaattttgcttcttcctggtattgcttagttgaagttgttatgattcttgatgagttcgctaaggggaagggtagatggattgtgccgattttcttctacgtggatccctctgttctggttcgtacttatgaacaagcattggctgaccagaggaagtggtctagtgatgacaaaattgaagaatggaggactgctttgactaaattatctaaatttcctggcttctgtgtcagcagggacgggaatatatttgaataccaacatattgatgaaatcgttaaagaggtctctagacatgttatctgcccaattggacttgatgaaaaaatatttaaggttaaattgcttttgtcctctggatcagatggagtccgcatgattgggatatgcggagaagctgggattggtaaaacaactttagcccatgaagtttttcaccacgctgacaagggatttgatcactgtctcctcttttatgacgtgggaggaatttcaaatcagtctggaattttgtcaatactccatggaaaaagggtttttataatttttcaagatattaaacatttcaagcagttggaagacattcgagaactaactaagcagcttggttctggcagcaaagtcatcattacagctcaagataagcatttgcttgatagatatgggattggatttgaaagtatatgtgaaataaaagggtttagtgattcagaagctgatcgattgcttgaattcaaagttcttaattctgcaactgttagtcctaagtatgtgaacattctaaaccgaatcaagtcttatgcccttggtcatccatggactttggaagtaatgtgttccaacttgagtggaaaatcaatagaagaatgtgaatctgcattactcaagtatgaatctataacagatagagacatccaaaagatactagaagtaagctttattgctttggaaaaatgtcagcagcagatgttgattcacattgcattgtacctcaaagaccagaaattggtagatgttgaagctgaactttgtaataagtataaagtgtgccccagattagatattagagtgttgcttgataaatctcttataaaaattaatcaccacggtcaagtgacattgcatacctctacacaggaaatgattaaagataaagcttcacgttttgaggagcatggaaaccaagaaatgcaatttgtcttaaatgatggaagcggggattgggatccgatggaattggattgacaattaccagaaatcttgctgcttcaaagaaaaaagtttacttctgctcctgttcatcagtagttaataattttttccttgtgtgtgtatcatggtttattttgaaatttacatttctgaaaatctggtctttaaccaagctgaatggtgttgtttgatgcatgtaactgacttcacctagcgggaaaaggctttttgttgttgttcttgtattttgaggtttacacttcagtgtgttaaaaaaaaaaaaaaaaaagggcggccgc

SEQ ID NO: 78 - DNA, 1643 bp, Glycine max
  unsure (1)..(1643): unsure at all n locations
ggagggaggcattttttgtaccgagatgcgcattaatgaaaaatgaataatgaataagaacacgaggcagggcagaggagaaggccttgtgattcatcatgacgaatgaacccaacaacaagtacgatgtttttctgtgtttagttggcccagatacccgctacaccttcgctggtaatctctataatgctttgcgccgcaacagaatcaatacctttttcacagaagataatcatcatgatgagctactactcatgaatggcgaccaaatttcaccctttgctctaagagcaattaaagaatcaaacttgttaattgttgttctctctccaaactacgcatcatccccaaggaatcttgatgaatttgtggccatcgttcggtgtataaagaggaagaagcaactgctgcttcccgtcttttacaaagtggaacgaggggaaataatggatgcaatatttagtggacctgatcaacaagcgctctgtgtattcgaagaaagatttggagattacaaagagagggtgaatgaatggaaggacgccttgctagaagtctacggttggactgctatggaataccaaaatgggtccggatacgaatatgaattcatccgagagattgttgatatagccaagaggcgccagcgccgccgatatgatgtttttctgagttttaggggaagagatacccgccactctttcacaggttttctctataaagccttttgccgggagggattctacgtcttcatggatgatgagggattggagggtgggaatcaaatttcacctacgattatgggagcaattgaaagatcaaggctttcaattgtagtgttctctgaaaactatgggtattccacgtggtgtcttgatgaactttccaagatcattgagtgcgtgaaaaccaggaatcaaatggtttggccaatattttacaatgtggaaaagtccgatgtatgcaatgaaacaaaaagttatggtgatgccatgactgcccaggagaaaagatttggaaaggactctgggaaggtgcataaatggaggtctgctttgtctgaaatcgccaacttggaaggagagcatctcagggaaaatcagtaccaatatgaatttatcgaaaggattgtggaaaaggccattaatataccaagtccttgctccaatgacagctacgaggaagagtcaagagtgtcaaaatgcacgcattgggagattgggagctgtgtagtcagctgatagtgacatcagcaagcagccttgaatttatgtgtgcttaacgatgttgttactatatccagttcaattctcaaggtttattatgttccttttacatcttgtgtaattcttgaggtctcgtgtttttctttttttttggtgtgtaccaaggtccaaggattatgtctgagattaacatctcccttttaatactactactcttccgccggccgccaaaaaaaaaaaaaaaaaaaaaaaaaaaaaaaaaaaaaaaaaaaaaaaaaaaaaaaaaaaaaaaaaaaaaaaaaaaaagggcggccgccgactagtgagctcgtcgacccgggaattaattccggaccggtacctgcaggcgtaccagctttccctatagtgagtcgtatgagannaangggtttcnaa

SEQ ID NO: 79 - DNA, 911 bp, Glycine max
  unsure (1)..(911): unsure at all n locations
cgaattcggctgagatcgtcccaatgctccattggtgcttaagggcatcacttgtacttttaaagaaggtagtagagtgggagtcgtaggaaggactggaagtggaaaaagtacactcataagtgctttgtttcgcttagttgatccagcaaaaggttatattcttatagatgggattaacatatgctcaattgggttgaaggatttgagaatgaagctaagcatcatccctcaagaaccaactcttttcaagggcagcattaggaccaacttggaccctctaggcctgtactcagatgatgaaatatgggaggctttagagaaatgtcagctcaaggaaactatcagccgtctaccaaatctcttggactcttctgtgagtgatgagggaggaaattggagcttgggacagcgccaactgttttgtcttggaagagtactacttaagaggaacagaattcttgttctagatgaagctaccgcatccattgactccgccacagatgccattctacaacaaataattagacaagaatttgtagaatgcacggttataactgtggctcacagggttccaactgtaatagatagtgacatggtcatggtcctctcctatgggaaattggtggaatatgaggagccttcaagactaatggagaccaactcctcattctcgaagctggtagctgaatattggtccagctgcaggaagaattcttcctcaaatcttagcagacagcaacattgaataatgaataataacattatggaaaatcacgtgcagacttactttttcactgttttacttttaaaataatctacctgatgcagagttatatatcaaaaaaaaaaaagggcggccgaaaannnnnnnnnnnnnnnnnnnnnnnnnnnnnnnnnnnnnnnnnnnn

SEQ ID NO: 80 - DNA, 455 bp, Glycine max
tgagtgatgaaggtggaaattggagcttgggacaacagcaactgttttgtcttggaagagtactacttaagaggaacagaatacttgttctagacgaagctactgcatcgattgactctgcaacagatgccattctacaacaagtgattagacgagaatttgcagaatgcacggttgtaaccgtggctcacagagttccaactgtaatagatagcgacatggtcatggtcctgtcctatgggaaactagtggaatatgatgacccttcaaaacttatggagaccaactcttggttctctagattggtcgctgaatattggtcgagctgcaggaagaactcctccccaaatattaacaggcagcaacattgaacaagaaaagggagtacaaacaaactgaaggaaaactgaataaattgaattttagatgtgcctggatcctcttatttacccaag

SEQ ID NO: 81 - DNA, 1638 bp, Glycine max
gaattcggctcgagcaaaactcagtttccaattcaccaaactcacaatggttgatctagattggcaaacaaagatggttcactccaacatcatgcctccaatgtcccccaaactctctctcccggatcataacattccaatcccaactttgcaactcccccttcgccaaaacgacatcaccgcagcgtcgtctcctatctgcgctgcatacgacaactaccttcgtctccctgagctcagagccctctgggcctccaaggacttccccaattgggccaacgagcccatcttaaagcccgccttacacgccctcgaaatcaccttccgcttactcgcaaccgttttctccgacccgagaccgtacatcaacaaacgcgagtggacccgacgcgtcgagtctctcgccacggcccaaatccagatcatagccatgttatgcgaagacgaagaagaaaaccccgagacacgtggcaaggcacccgtgactgacattaacggctttaccggtcaaagcagaagctacagcgaggaaagcctgctcccgcgcctcgccacgtggcagaaatccaaggacgtggcgcagaggattctcaattcggtggactacgagatggggaggtgcacctacaccttaggtttaggagaggcgaatatcgcgggaaagaagatatttctcttcgacgcggtttgcaggccgagggagattcactcgttggagacgacgccgtttgatgattacgtggggaaccacgagaacaagacgctgcacgccacgcagcagatcgccgagtgttggacgcgctcggtgaagaagctgctggagagagtaacggagtcggtggagaaaaaggcgttggagaaggccgcgagtgagtgccatgcggtggagcggatctggaagttgttaacggaggttggggacatgaacctcatgatggatccagaggatttcttgaggctgaagaaggagttagggatgatgagaactgcgggcgaaacggtggcgttttgcttcaggtcgagggagcttgtggaggtggcgagggtgtgtaggaatctgagggagaaggtgccggagatattggaggtggaggtggaccccaagggtgggcccgggatgatggaggcggcgatgaaggtttactcggagaaagagaaagggaaggttcatgttttgcaggggatgcaggggattgaggtggcgatgaagaggttcttctacgcgtataagcaggttgtgacggttatgatggggagctccgaggccgataatgggttcaccaagatattccttgaacccacttatttccctagcttggatgctgccaagacctttcttggttattacaaccaaaattaattcttttattcacttcaattccatcttactcacacaaagaaacaaaaaggattgaattttgtaaacaaatctttgtctgtaaaaatatatttatttgacttctttttggatcaaaaaagggcgaccacggccccccctttgaattttaaaagtggtggtgttttaaaatgcattacagcaaacaccttttttctttcaatgtgatttagctttcaaagctgtggcagttgtgctacagatggtggtaaaaaaaaaaaaaaaaaaaaagggcggccgcc

SEQ ID NO: 82 - DNA, 1671 bp, Glycine max
ggagccgcgactttcaaattccttgttcttcttcatgtgtgtctccctctcgtataaatacactaccatcttccatttcctcttcgaattcggctcgagaaacatggttgatctagattggcaaacaaagatggttcactccaacatgcctccaaagtcccccaaactctctctcccggataataacattccaatcccccttcgccagaacgacatcaccgcagcgtcgtctccaatctgcgctgcctacgacaactacctccgcctccctgagctcagagccctctgggcctccaacgacttccctaattgggccaacgagcccatcttaaagcccaccttacacgccctcgaaatcaccttccgcttactcgcaaccgttttatccgacccgaggccgtacataaacaagcgcgagtggacccggcgggtggagtctctcgccacggcccaaattcagatcatagctatgctgtgtgaagatgaagaagaaaaccccgagacacgtggcacgacgccaccggtgagtgacattaacggcttcatcgctcaaagcagaagctacagcgaggagagcctgctcccgcgcctcgccacgtggcacaaatccaaggacgtggcgcggagaatcctcgattcggtagagtaccagatgatgaggtgcacgtacaccttaggtttaggagaggcgaatctcgcgggtaagaagatattcctttacgacgccgtttgcaggccgagcgagattcactcgttggagacgacgccgtttgattacgtggggaactgcgagaacaagaccgctgcacgcgacgcagcagatcgcggagtgttggacgcgcgcggtgaggaagctgctggagagagtggtggagtcggtggagagaaaaacgttggagaaggcggcgagggagtgtcacgcggtggagcggatctggaagttgttaacggaggttgaggacgtgcacgtgatgatggatccggaggatttcttgaggttgaagaaggagttggggatgatgagaaattgcggggaaatggtggcgttttgcttcaggtcgagggagctcgtggaggtggcgaggatgtgtagggatctgaggcagaaggtgccggagatattggaggtggaggtggaccccacgggtgggcccgggatgatggaggcggcgatgaaggtttactcggagaaagagaaaaggaacgggttcgagaaggttcatgttttgcaggggatgcaggcgattgaggtggcgatgaagaggttcttctacgcctataagcaggttgtggcggttatgatggggagctccgaggccgataatgggttcactcagatattccttgaacccacttatttccctagcttagatgctgccaagacctttctcgcttattattgggaaaataataatcaaaatggggttccctgctagttaattaaaaaattaatcaattaattcctagtcatatatacttactcacacaaacgggaaaacaaagagaaaaaaaaaaaggactaaatttttgtaataggttggtgtaaacaaatctttgtctgtaaaataatatttatttgactattcttttggatcatgttctttcggctgctttaaattatgacctgatccccgcttttgaattttaaaaaaaaaaaaaaagggcggccgc

SEQ ID NO: 83 - DNA, 2590 bp, Glycine max
gaattcggctcgagaaaaacacactgtatgaggtgaaagaggttcttgagcttctagacatagagaattttcagcagaaacttaaaggtgttggatcaccaatcaagtgtccttttggtgttcctgaaaaccctggattcactgttgggttgaatccactgttgagcaagttgaagatggaggttctcagggacggtatgtccacccatttgttgactggtttgggtggatctggtaaaacaactttggctacaaagctctgtagggatgaagaagtcaagggtaaattcaaggaaaatattttatttttcaccttctcacaaacgcctaagttgaagaatatcatagaaagactatttgaacattgtggataccacgttcctgagtttataagtgatgaagatgcaattaaacggttggaaattttgctgcggaaaattgagggaagtccacttttgttggtcttggatgatgtttggcctggatcagaagccctcattgagaaatttcaattccagatgtctgattataaaattgtggtgacttcaagggttgcatttcctaaatatggcaccccatatgttttaaaaccacttgctcatgaagatgcaatgaccctattccgacatcatgctctcttggaaaaaagcagttcacatattcctgacaaagaaattgtccaaaaggttgtgagatattgcaagggtttaccgcttgccgttaaagtgattggtagatcactcagtcatcggcctattgagatgtggcaaaagatggtggaggaattgtcacaaggtcattctatacttgattctaatattgaattacttacatgcttccaaaagctcttgcatgttttggaagataatcccaacaacaaggagtgcttcatggacttggggttatttcctgaagaccaaagaattcctcttcctgttcttcattgatatatgggcagtgttatatggatttgatgatgacggcatagaagcaatggacatcataaataaattagactccatgaatctggttaatgtcttagtagcaaggaaaaattcaagtgactcagacaattactactacaataaccactacgtcatcctccatgatcttctaagagagcttgcaatctatcaaaacaacctggaaccaattgaaaagagaaaaagactgattaatgacataaatgaatccgaggagaagcaacaaggcatgatagcccgcttattgtcaaaattttgcagatgcagtgttaaacagacactccaacaggtccccgcccgcacattgtctatatcagctgatgaaacaaacacttcatatcagtcccacatacaaccatccctagctgaagttctggttttaaatcttcaaactaagaagtattcctttccagagtacatagagaaaatgagtgaactaaaagttcttatcatgacaaattatggttttcatccgtgtgaactagacaatttcaaactactcagctctgtatcaaacctgagaagaatcagactagagcggatttctgttcctcacttaggggcattgaaaaatcttggaaagttatccctctacatgtgtagtaacataagtcaggcttttgaaaatggtaccatcacagttttggattcatttccaaaactatcagatttgaacattgactattgcaaggatatggtgaaattgcctactgggatctgtgatattgtctcactaaagaagctcagtattactaattgtcacaagcttagttctctgccccaagaaattggacagttgttgaatttggaactcctgaacataagttcctgtactgatttggaagagataccagattctattgtaaaactttctaagctaagacttcttgacctctcaaactgcataagcctttcaagtttaccagaggacattggtgatctatgtaatctcaggaatctcaatatgacaagctgtgcaaggtgtgaattgccatactcagtaaccaatcttgagaatttgaaggtggtggtatgtgatgaagagacagctgcttcatgggaagcattcgaagctatgcttccaaatctgaagttagaggttcctcgagtcgaggttaacttaaactggcttcattctattagctcctaagacatgacctggttcatgggaagcatttgaaactatgattccaaatctaaagtttgaggttcctcgagttgatgttaactgaagctggtttcgttcaatttgctcctatgacctctttctataaatgttagaccaatggccgtgactgtttcatgtgtaataatcttgtttaaaatatggataataatgtgtattcaagttgctgtagtagtatttgcatgtttagtgtaaacagtactatgttacttgaaagaagttggcgattttatttgttgtatgtgttgtcatgagtgaacatcttagcatgatgatgtccacaaaataattgaactatggtaagttaaaaagtttgtttttataaagtaagtaaaaaagggcggccgcttaatcttatgtccctccaatttttcgttctgattcgtttcccgattaatgtaatgtatgaaatcgcgtattt

SEQ ID NO: 84 - DNA, 641 bp, Glycine max
ttcacgcgtccgcccacgcgtccgacttctttcatatcgttaacaagaagaacacgtaacagaaagacacatccaaaggaagtctctggttatttcaattaattaagagaaaggactcgaatagttggttattcatggaagacaccgcacaacaaatcaagcgtccttttggtgttcctgaaggaccagaattcactgttgggttggatgtacctttgagcgagttgaaggtggagcttcttaaagaaggtgtgtccatcattatgctgactggtttaggtggatcaggaaaaaccactttggctacaaagctttgttgggatgaacaagtcataggtaaattcaaggaaaatattttatttgtcaccttctcaaaaaagcctaagttgaagattattgtagaaagactatttgaacattgtggatatcaagtgcctgagtttcaaagcgatgaagatgcagtcaatcaattgggacttttgctgaggaaaatggatgcaagtcctatgttgctggtcctggatgatgtctggcctggctcagaagccttagttgagaaatttaaagttcagatatcagattataaaattttggtgacttcaagaatagcattccatagatttggcactccattcatctta

SEQ ID NO: 85 - DNA, 441 bp, Glycine max
tttcttttagtaacctatagcttttgcctggatggtgtggtaggcataatatgttccacaataaagaatgtttcttgcagtgcgccaaaaatatcttggcgtttgcggagtgataagtggctatcttctttaattgctagaggcatttataatagtcaagaaagtgaggttcctcttatagatctattttgtactctgctagcccatgctgaaccggagcaacgtattgtagcagttaagcatttgggaatacttcttggccaatgcacaaatggagaaagagctgcgatgaattctaaaatttgcactgacttcattcgaaataagttagttttatccattcctaattatgttctgtcttgtctggtttctagtacttgggatgaagttgttgtgctggcatcatctgatttgtcattacaaataaggattcatgcgatg

SEQ ID NO: 86 - DNA, 2561 bp, Glycine max
gaattcggctcgaggccttctgaattgcatgctaagtttatttatttattgatagagaagctttgggagttgcgagatgaaaatgtgaagaagatgtgggatcttctggaggatgaggaagtcttcattattggcatagatggaatggggggagttggaaaaacattcatggcaactcatttcaagaatgagattaaaagaaaggggactttcaaggatgtcttctgggtcactgtttcccatgatttcaccattttcaaattgcaacatcacattgcagaaacaatgcaggttaagctttacggagatgagatgaccagagcaacaattttgacgtcagagttggagaaaagagaaaaaacactgcttattttggatgatgtttgggaatatattgatctgcaaaaggtggggattcctcttaaagtgaatggcattaaattgattatcacaactcgtttgaaacatgtgtggctacagatggattgcctaccaaataatacaataacaatattcccctttgatgaactagaagaagaagcttgggagttatttttgctaaaacttggacaccgtggaacacctgcaagacttccccctcatgtactagagattgcaagatctgttgtaatgaaatgtgatggtttaccacttggaatcagtgcgatggctcgaaccatgaaagggaaaaatgagatccattggtggagacatgcattgaataaacttgacagattggaaatgggagaagaggtcttaagcgtactaaaacgtagctatgacaatttaattgaaaaggacatccaaaaatgtttcttacagtctgcactgtttcctaatcatatttttaaagaggaatgggttatgatgcttgttgagagtgggttgttagatggaaagaggagtttggaggaaacatttgatgagggacgtgtcataatggataaactcattaaccattctttgttgttaggttgtttgatgttacgaatgaatggtctggtgaggaaaatggcgtgccatatcttgaacgacaatcacacttacttgataaaatgtaatgaaaaattgagaaagatgcctcagatgcgggaatggacagctgatctggaggcagtttctttggcgggtaatgagatagaagaaatagcagagggcacatcacctaattgtccacgcttgtccaccttcatcttatctcgtaattccatcagtcatattcccaagtgttttttcagacgcatgaacgctctaacacaacttgatttatcatttaatcttagattaacatctttgccaaagtcgctgtctaagttgaggcttcttacttctttagtgctccgtcaatgttcaaaattgaaagatatacctccactgggagatctacaagcattgtcaagattggacatttcaggttgtgattcgctcctcagggtaccggaaggcttgcaaaatctaaaaaagttgcaatgccttaatctttcccgcgatttgtatttatcattgttacccggatgcgcactgcccggtttgagcaatatgcaatatctggatctccggggttcgtcaggtataaaagtagaagatgtaaaagggatgactatgcttgaatgttttgcagtaagctttctcgatcaggattactacaaccgttatgtgcaagaaattcaggacactggttatggacctcaaatctattttatctattttggaaaatttgatgattacacacttggatttcctgagaatcctatttatctttgtcttgaattcaagcgtcgaagggtatgttttggagattgcgatgaattaccctatttactgccaagagaccttacggaattacttgtaagtggcaatgatcaatgggaatgcttatgtgctcctctgtcatctaatggtcctctatctttaaaggacattaacattaaacactgtacaaaattgaagagtttattctgtgtatcttgttccttatgcactaatatccaaaacctcaaatctttgaaacttgataatttgggtagtttaagtgtcctctgcaaggaagatgttgctggtttaacacaatctttatctcggagtggggtgttttctcatctcaaggaattgagtatcgagaaatgccatcagatagagaagttgctgacgccagggttagtgccacaacttcaaaacctggcgtctatatcggtagaggactgcgaatcaataaaggagatatttgcgggagatagttccgacaacattgcacttcccaatttaaccaaattgcaactacgctatttaccagaattacagacagtgtgcaaaggaattttactctgtaactctgagtatatattctacatcaaggattgtcccaattatgaaacacccagaattggtggtcgtgtatgattgattctgttgattcagattatggtacttattttatgtggcttactctttgtattcgtaattcttgtaaagaaaaaacaaaatcataatttgctttttgaaatagtatactcgcttttattggtaaaaaaaaaaaaaaaaaaaaaaaaagggcggccgcc

SEQ ID NO: 87 - DNA, 648 bp, Glycine max
gaattcggctcgagattcttcgttattgtgttcccttctccaatgatgccggaaagtgacatcactctatcctctttcaggcttcgttgggacgtgttcctgagcttcaggggcaccgacacgcgggacactttcaccatgagcctctaccacgctctccaccgccgcggcctccgcgtcttccgcgacgacgacgggctggagcgcggcgacgagatccagaagaagcttctggaagccattgaagactccgccgccgccgtcgtcgttctctctcccgattacgcgtcttcccattggtgcctcgacgaacttgccaagatttgcaagtgtgggaggctgatccttccggttttctactgggtcgacccttcccatgtcagaaagcaaaagggtccctttgaggattctttcgggtcccatgcaaacaagtttcctgaagagagtgttcagcagtggagggatgccatgaaaaaagtgggtggaatcgctggttatgttttggatgagaaatggttggttataaattaatattttgctagatatgaaaattgtttcagcttttaactttttagaatctctataatctatatggtttatccttgtcctgaaaaaaaaaaaaaaaaaaaaaaaaaaagggcggccgcc

SEQ ID NO: 88 - DNA, 1633 bp, Glycine max
cccacgcgtccgcccacgcgtccgcccacgcgtccgcccacgcgcgctaactttcgcatattcgaaaaccaaaagcatgggtcagggaacaccgggcggtctgaaccggcagggtcttccgggggaccggaagccggacggcggcgacaagaaggagaagaagttcgagccggcggcgccgccggcccgcgtgggccgtaagcagcgtaagcagaagggcccggaggcggcggcgcggctgccgacggtgacgccgctgtcgaagtgcaagctaaggctgctgaagctggagcgcataaaggactacctcttgatggaggaggagttcgtggcgaaccaggagaggctgaagccgcaggaggagaaggccgaggaagacagatccaaggtcgatgatctccgaggttctcctatgagcgttggaaacctcgaagagctcatcgacgagaatcacgctattgtttcctcctccgttgggcctgagtactatgtcggaatcctgtctttcgttgataaggatcagttggagcctggttgtgctattttgatgcataataaggttctttctgttgttgggcttcttcaagatgaagttgatccaatggtctctgtcatgaaggttgagaaggctcctctggaatcttatgctgacattggtggtttagatgcccaaatacaggaaattaaagaagcagttgagctacccctgacgcatcctgaactatatgaagacattggtatcaagcctcctaagggggtcattttatatggagaacctggaactgggaagaccttgcttgcgaaggctgtggcaaactcaacatcagcaacattcttgcgtgttgttggtagtgaattgatacaaaagtacttgggagatggcccaaaacttgtaagagaacttttcagagttgctgatgatctttctccttctattgtattcattgatgaaattgatgcagttggtacaaaaaggtatgatgctcactcaggtggagaacgtgaaattcaaaggaccatgttagagttgctgaaccagttagatggttttgattcaagaggagatgttaaagtgattctggcaaccaacagaattgaaagtcttgatccagctttgctacgacctggtcgaattgacaggaagatagaatttcctctccctgatatcaaaacaagaagacgcattttccagatacacacttcaaggatgacattagctgatgatgtcaacttagaagaatttgttatgactaaggatgagttctctggagctgatataaaagcaatatgtactgaagctggcttacttgctttacgagaacgccggatgaaggtgacgcatgccgacttcaagaaggcaaaggataaggttatgtttaagaagaaagaaggggtgccagaaggactgtatatgtgaagcatcttcatcatttaccccggccttctttctttattacagtctttttgttgttctgtgaacggatgtttgtattttgatttgtggtcgtttatgggtctacattatcacgggatttaatctcaactatagttacatagctttctttgatttaaaaaaatcgggaaaattttcctgccatttcttcaaaaaaaaaaaaaaaaagggcggccgccg

SEQ ID NO: 89 - DNA, 477 bp, Glycine max
caaaaatatcattcctctttgttcctaaacacggggcactggtttcgaaccctcgttgtggttaggtcttcttcacctttcgaattttggaatccatgggtcagggaactccgggcggcatgaaccggcagggcgaccggaagccggacggcggcgacaagaaggagaagaagttcgagccgtcggctccgccggcgcgcgtggggcggaaacagcggaagcagaaaggtccggaggcggcggcgcggttgccgacagtgactccggtgacgaagtgcaaactgcggcttctgaagctggagcggatcaaggactaccttctgatggaggaagagttcgtggcgaatcaggagcgactcaagccgcaggaggagaaggccgaggaagacagatccaaggtcgacgatctccgaggctctcccatgagcgtcggaaacctcgaagagctcatcgacgagaatcacgctattgtctcct

SEQ ID NO: 90 - DNA, 532 bp, Glycine max
ggagatgtaaaagtgattctggcaaccaacagaattgaaagtcttgatccagctttgctacggcctggtcgaattgacaggaagatagaatttcctcttcctgatatcaaaacaaggagacgcatcttccagatacacacgtcaaggatgacattagctgatgatgtcaacttggaagaatttgttatgactaaagacgaattctccggagctgatataaaggcaatatgtactgaagctggtttacttgctctacgagaacgtcgaatgaaggtgactcatgccgactttaagaaggccaaggataaagtgatgtttaagaagaaagaaggggtgcctgaagggctgtatatgtgaaaaactatcctctattatctctggccctcttgtctttcttttaacgttctagttatgcgaacaaatgccaattcatttgtattctgcgaacaaatgtcagttgtattttaggggctttgaatctcaacaacgattttaattcaatatagttttctttcaatttccttgattttag

SEQ ID NO: 91 - DNA, 1674 bp, Glycine max
tttgatggcttctaaggccatcatccaatacagctcttcttcttcttcatctcatgcgatcatcactacatatgatgtgtttgtcagcttccgcggtgaagacacgcgcaacaacttcactgcttttctctttgatgctctctttgaaaatggcatccatgccttcaaagatgatacacatcttcagaaaggcgaatccatagcacccgagctgctactggccattcaagggtctcgccttttccttgtggtattctctaagaactatgcttcctcaacttggtgtttgcgtgaacttgcacacatctgcaactgcactgatgaagcatccccgagtcatgttcttccgattttctatgatgttgatccatcagaggtgcggaaacagagtggttattatgggatagcctttgcagaacacgaagaaagattcagagaagatatggagaagatggaagaagtgcagagatggagggcagctctgattcgtgtggccaatctctctggttgggatatccgaaataagtaagtacaaatttatatgcagtcagtcatattatatccatgtgcatacatttcatcatttcttagtcacgttgttttatcaaacttactatcgctttctaaagtagagttcagagaagttgaggaggtaacatgcaaattgactctaaatttatacatgtttaacgcgaatggtgtttaaaaactttgaaattatcttatcctgtacatatatacattctgttgtggttctgataatttgccattctttattttctttaaattttcaggtcacaacctgcactgattaaagaagttgttcaaaatataaaatatatcctaggtcccaactttcaaaatcttccaaacggtaatctagtcgggatggaatccagtcttgaagaattagaaaagtgtttacgattagagtcggttaatggcgttcgtgttgttggaattagtggaatggggggaataggaaagacaactcttgcccgtgcattatacgaaaagatttctgatcaatatgattttcattgttttgttaatgatgtaaacaaaatttatcaacattctggttcactaggtatacaaaaacaattactttctcagtgtctaaatgatgaaaatttagagatttgtaatgtttctaagggaacatatatggtatcaactatgctacgcagtaaacaaggacttatagttcttgataatgttaataaggatgaacaactatgtatgtttacagggggtagagagactctattacatgaatgctttggtgaaggaagcagaatcattataatttcaaggaatgaacacatattaaggacatatggagtaaatcatgcttaccaagtccggccattgaatcaagacaaggctgttaagttattttgcataaatgctttccattgtaactatattatgagtgattatgaatggttgaaacgtgatgtactatcacatgctcaaggccatcccttggcaattaaagtaataggcaaatctttgtttggtcgaaatgtttcacagtggagaggtacattggttaggctaagtgataataaaagtaaggatattatggatgtgttgcgaataagttatgatgatctagaagaaaaagataaagaaatatttttagaaaaaaaaaaaaaaagggcggccgcc

SEQ ID NO: 92 - DNA, 1914 bp, Glycine max
gacgcacgcacgcgtacagcagcgaattcggccttcgccgacggtattgtatgacatcttttttgagcaaggggggaagcgccttgtgccagtgggtctaggtgatgatgatcaatgcattgaggatgactttactgcatggaaagaagaactgtggccagcattggatgaattgcttagagatgaggacgatgcaactgtgtctacaccttatactgctgcagttttggagtaccgggttgttattcatgatccattggaagcatctgtcgacgaaaagaagtggcataatgtaaatggtcacgccattgtggatgctcaacatccagtcagggcaaatgtggctgtgagaaaggagcttcatactcctgcatctgatcgatcttgcactcatttggaatttgacatttcaggcactggagttacatatgaaactggggaccatgttggtgtttactgtgagaatttgtctgaaactgtggaagaggcaataaggttaataggtttgtcaccagatacctatttctcaatccatactgatgatgaagatggcaaaccacgtagcggaagctccttgccacctacattcccaccctgtactctaagaacagcacttacacgatatgcagatgttttgagttcacccaaaaagtctgccttgcttgccttagctgctcatgcatctgatccatctgaagctgatcgactaagacatcttgcctcacctgctggaaaggatgaatattcagagtgggtgattgcctctcagagaagtctccttgaggtcatggctgaatttccatcagccaaacctccaattggtgtcttttttgcagcagttgctcctcgcctgcagcctagattttattcgatctcctcatctccaagaatggtgccaaacagaattcatgttacctgtgcattagtacatgagaaaatgcccaccggaaggattcacaaaggagtgtgttcaacatggatgaagaattctgtaccattggagaaaagccaggactgcagttgggctcctatttttgttaggacctccaactttagactcccttctgataataaagtgcctataatcatgattggtcctggcactggattggctcctttcagaggtttcttgcaggaaagattagctctgaaagaaggaggagctgaactcggcccctcagttttattctttggatgcaggaaccgtcaaatggactacatctatgaagacgagttgagtcacttcgttaatactggcgcacttgatgagctcattcttgccttctctcgagagggacccaccaaggagtatgtacaacataaaatgatggagaaggcttcagaaatttggagcatgatatcacaaggagcttacatttatgtgtgtggtgatgccaagggcatggccagggatgtacaccgcgccctgcacacaattttgcaagagcagggttctctcgatagttccaaggctgagagcatggtaaagaatctacaaactactggcagatatttgcgcgatgtatggtgatgatatctgaatgcaagccgtgggggtgacgaagatattaataaaacatagagttgtggctagaggattttgaaagggccttatttgtgccacctttcattagtgccctcaaaattgagggggggcgcttgttgccatcacgacgacatttcctacgattctttttcactatattttctaaaggattctttttggttcgtgtaatttattatatactgtttatacctagactatgaactattttacttcagttttctttttgtaatgtatgatgaacctcaaagaaaggttcagagacgcagacaattccttgtactgtatgaactataaaaaaatgtttggaggtaaagaaattattttgtgcaagtgttattattagattt

SEQ ID NO: 93 - DNA, 1324 bp, Glycine max
ccagtctgggttggtgggcgttgttggttcagtgttgtggtgtttgtttccctcccaagaatataacccccctctccactcccacccgtttctttcttcagagtctctctctctctctcaactcccaattactttgttgcatttcacacaccaacttcccatagaagagagaagagagaagagactcttccttccatcctgcaactcaaatcatcatgcaagactccagctcaatgaagatctcccctctggatctcatgtccgccatcttcaagggcaagctcgacccctccaacgtctcctcctccaccaacgccgccgccgccgccgcttcctcctcgagaaccgcgacttcctcatgctcctcaccacctccgtcgccgtcctcatcggctgcgtcgtcgtcttcatctggcgcagatcatcctcccccaaggccaagcctctcgagcctcctaaacgcgtcgtcgagaagcttcccgaaatcgaagtcgacgacggcaccaagaaggtcaccatcctcttcggcactcaaaccggcaccgccgaaggcttcgccaaggccacagctgaagaggccaaagcgcgatacgagaaggccacgttcagagtcgtcgatatggatgattatgccgccgatgacgatgaatacgaggaaaggttcaaaaaagagactcacgttcttttctttttagctacatatggtgatggtgagccaactgattatgccgcgaggttttattaatgggttacagaggtgaggttgagactgttcccgtgggcattaaggttgagagcttatgtgttgactttgtgtgcttttgtggaggatttaggggggtgagaaaggagaagggtggcttcagaatcttcactatggtgtgtttggccttggaaacaggcagtatgagcattttaacaaggtggcgaaggtagtggatgacatgctcgttgagcaaggggggaagcgccttgtgccagtgggtctaggtgatgatgatcaatgcattgaggatgactttactgcatggaaagaagaactgtggccagcattggatgaattgcttagagatgaggacgatgcaactgtgtctacaccttatactgctgcagttttggagtaccgggttgttattcatgatccattggaagcatctgtcgacgaaaagaagtggcataatgtaaatggtcacgccattgtggatgctcaacatccagtcagggcaaatgtggctgtgagaaaggagcttcatactcctgcatctgatcgatcttgcactcatttggaatttgacatttcaggcactggagttacatatgaaac

SEQ ID NO: 94 - DNA, 697 bp, Glycine max
  unsure (1)..(697): unsure at all n locations
caagtgccccgtcactggcaagaggattcaggggattccacacttgaggcctgcagagtacaagacccacccaaatagtgggaaatagtggtgaaaagggcttacatctgttctatttcagtggttaaatttaatgtattgattcatccaaacttgtctgcatttcaagattttcattttccccctaaaagtggtttttcgcttcctggttttgtaaaaaatttattattttttaggcttactttttgtctgtcatctaaaaaaacaaaaaaaaaaaaaaaaaaacctcaactcccaattactttgttgcattacacgcaccaaccagagagtgagagagagagaagagactcttccttccttcaatttcttcaaccaccaccagcatgcaagactccggctccatgaagatctcccctctggatctcatgtccgccatcatcaagggcaagctcgacccctccaacgtctgctcctcctcctccaacgccgcagctgccgtcctcctcgagaaccgtcaattcctcatgctcctcaccacctacgtcgccgtcctcgtcagctgcttcgtcatcttcatctggcggagatcctnctcccccaaggccaagcctctcgaaccaccaaagcgcgttatcgagaagctttccgaaatcgaggtcgacgacggcaccaagatagtcacccatctttttcg

SEQ ID NO: 95 - DNA, 414 bp, Glycine max
cacagatatgaaaccggggaccatgttggtgtttactgtgagaatttgtctgaagctgtggaagaggcgataaggttaataggtttgtcaccagatacctatttctcaatccatactgatgatgaggatggaaaaccacttggtggaagctccttgccacctacattcccaccctgtactctaagaaaagcacttgcacaatatgcggatgttttgagttcacccaaaaagtctgccttgcttgccttagctgctgatgcatctgatccatctgaagctgatcgactaagacatcttgcctcacctgctggaaaggttgaatattttattattttatatcaagggaattttaagtaactttttctacttatttttctcattcgtatgctactcttgtgtgcctttgtaggatga

SEQ ID NO: 96 - DNA, 781 bp, Glycine max
  unsure (1)..(781): unsure at all n locations
ctgaatttccatcagccaaacctccaattggtgtcttttttgcagcagttgctcctcgcctgcagcctagattttattcaatctcctcatctccaagaatggtgccaaacagaattcatgttacctgtgcattagtacatgataaaatgcccactggaaggattcacaagggagtgtgttcaacatggatgaaggtacttatatttgtttcctatattatggttaaactatttaagatcggcaaagtataatctactaaaaagattgtctttaagtacaagtatcagcttgaatttgacaaaggaaatctatgccatggttgaatagtatttttattatcaatgcctggccacttttgatgacaatacctggttcttttagatatccataatcttctgagtttatttttctccatttcaaaacaaaacttaccatttggtttgatgtccagaattctgtgccattggagaaaagccaggactgcagttgggctcctatttttgttaggacgtccaactntagactccctgctgataataagtgcctataatcatgattggtcctggcactggattggctcctttcagaggtttcttgcaggaaagattagctctgaaagaaggaggtttcgattttagctcctccttctttcagagctaatctttcctgcaagaaggaggagctgaaatcggcccctcagttttattctttggatgcaggaaccgtcaaatggactacatctatgaagacgagttgagtcacttcgttaatactggcgcac

SEQ ID NO: 97 - DNA, 450 bp, Glycine max
gccaaggcgcgatacgataaggccacgttcagagtagtcgatatggatgattatgctgccgatgacgatgaatacgaggaaaggttcaaaaaggagactcacgttcttttctttttagctacatatggtgatggtgagccaactgataatgccgcgagattttataaatggtttacggaggggggtgagaaaggagaagggtggcttcagaatcttcactatggtgtgtttggccttggaaacaggcagtatgagcattttaacaaggtggcgaaggtagtggatgacatgctcgttgagcaaggggggaagcgtcttgtgccagtgggcctaggagatgatgatcaatgcattgaggatgactttactgcatggaaagaagaactctggccagcattggatgacttgcttagagatgaggacgatacaactgtgtctacaccatatact

SEQ ID NO: 98 - DNA, 2647 bp, Glycine max
gtccagtcacgccaagccaaggcgctatcatatcaattcctcttccccaaaccaacatcacacgcaatgccatgctctagtcttgcccgcttcaaatattcattctttttttctatataacgatcatgaaattgtaattattctgtcgaattgctgcttctaataagcccacagaaaccgagcgagcgagagaaatggcacatcaccggcggcgccaccactattaccaacgcttccctctcatgattccggcgttttccgccgtcgccgccgcgctactctttctcttcgctctcctttcgtttttagctccttctcccgtcgaaaccgatcgtatccaccggagacgccaacgaattcggctcgaggttcaaaaggatgaggcgattgaaaattctgcgttccgcgttccgagtgatggaggaaagttgggacgcaatatctggagttctcgaaattcagagcacttctatggatgcagcaattccagcaacaagtttcaaaaagctcaagtgattacacagccgaatcggtatttgatgatcacaacaagtggaggcttgaatcaacaaagaactgggattacagatgctgttgttgctgcgcgaattttgaatgctactcttgtagttccaaaattggatcaacgatctttctggaaagactctagtaacttctcagagatctttgatgttgattggtttatatcatttctgtcaaaagatgtcaaaattatcaagcaacttcctactaagggtagtaggaaagcattatctgcatacaatatgcgggttccaaggaagtgtaatgaaagatgttatataaatcgcatattacctgtactccttaaaaaacatgctgttcagctcaacaagtttgactacaggcttgcaaacaggttggataccggaatatcagaagctgagatgtagagttaattaccatgctttaagatttaccaacccaatacttgcaatgggtgaaaaattggtccatcggatgaggatgagaagcaagcattatattgcactgcacctgagatttgaacctgatatgcttgcattttctggatgtgattatggtggaggggagaaggagcagaaggaactgggtgtaataaggaggaggtggaagacattacataaaagcaatcctgatagggcaaggaggcagggaagatgcccattaaccccagaagaagttgggctcatgctaagagcattgggatatgggtctgacattcatatttacgttgcatcgggggaggtatatggagggaaaagaacattggcacctctcagagcattatttcctaatttccattcaaaagagaccattgctaccaaggaagaattagaaccattttcttcattttcttctcgcatggctgcactcgacttcattgtttgtgatgaaagcgatgtttttgtaaccaataataatggaaatatggcaaaaatattagctggacgaaggagatactttggccataaaccaaccattcgtccaaatgctaaaaaactttatcgattgttcttgaatagaagtaattcaacatgggaagcttttgcttctagtgtccgtactttccagaaaggcttcatgggggagccgaaggaggttagaccaggtagaggcgggtttcatgagaatccatcgacctgcatatgtgaagattctgcagcagccaaagtggacaaaaattcacaatctagaaaatataggaaggataatacaacgaagaaaaatgtagcaaatgatgaaccggatgttggcaatgtgtctgagtggccagacatggatgatgatgatgatgatgatcagaatgatctagcagagaagggtacatttaatgaaacaatttcggactatgatgctctgacttcgaggatcctgagttggaggaaattatatcagattagtgaaggtgccttattcagtgttgatgtacctgttgacttattatggctctttgcccccatcacttaagcagctcgatttgacagctgcttataaagctaaaaaacaggaacagaaaaggcacgtctttctcaatactggccgaactatagtaaaaagacatctcaaaaatttaatcgtacgatcatcttctgcatttttaaggacataatggtctcagtttgatgctgaatttttggagtgtttagacttgtacgaatctgtaaagaggttatcagaagtgagcaagtagagttagacgacaaccatccgaatatagctgcacacaaaattgagtttgttaagtaggaaaatctgtatatcttgaggaaaatcgttgcagttgatagactgtacacctttgttcctgtctttctttgacatcgaagcagtcaacttcacttttagaagcaactagatgccaactacagtttttgtgcctaaaggtaacatatcaatagtgatgaccagacactttagccgttttaagaacatggataaattctttcatataagcagtcactataaaaagtagatttgatttcgcaaattgcgtgcgtgttgtgtgtgagggtgtaaaatgataattgagtgaactctggtccctgtctgactgaggaagggaaagcaattcaagatctgaaagggctggcattttgatacaaaaaaaaaaaaaaagggcggccgc

SEQ ID NO: 99 - DNA, 1148 bp, Glycine max
gaattcggctcgaggttctgatgggaaaaccttctactgtctagagatggcaaaatatttcaaccctggtgaagctgaagccatgaatcagagtgtagcttacctactgtcaaagttgagttacattccatccacactcttcctatcagaagtttcttacgtggaattcttagacagagtgcatgtttctgagaaaaagctaagagcacaaggcttgtgggaagttccccatccttggctgaaccttctgatcccaaggagtgagattcataactttgctgaagaagtatttggcaatattcttaaagacacaaacaatggacccatactcatttaccccgtcaaccaaacacggtggaacagcaaaacatcattgattaccccagaggaagatattttttacctagtagcattcctatccttagctctcccaaattctaccggtgcagacagtttagaacacattctagcccaaaacaaaagagtcatagatttctacactggtgccaaaatgagagtgaagcaataccttcccattacagcacacaggaagaatggcaagtccattttgggtcacgatgggagacattcgtggaaagaaaaagggcctatgaccactagcactgctagccctggccacaaaatctttcaaaggctgtctcctcttcgtgttagttttctagtgtgttgtaaggttgtgaactaatgataaattacgtaagagtgttgcttcctgcacctctctggcatcccattacattacggaatgtccaatctgtaatgtaatttaatcattctgtaatgtaatggggcatgaagcaaaatttgaaggtgcacgaagtttcacttgttaattaatcatgtatgtttctttcttccctctggccttgctctcaataattgtgagcgtggccaatgtattttctattcaaacggagccttgctttttaggtcatggttagaagattgaagattgggtcaagagaacactaagttgatggtgatgttttaagctctttgcaggaaattaagtttaaattttagggccacccttgtaagagaaaaatatcagcaaagaaaaatgtaaagcaaaggttaaataaatagaaatttgttattaccaaaaaaaaaaaaaaagggcggccgcc

SEQ ID NO: 100 - DNA, 672 bp, Glycine max
gaattcggctcgagaaataatcaggtgggacaataggatgtcagcatcaatacccgacgaggatatcttctacacagttggatttttgcattcaagtgggtttgataattggaaggcctatgatgctcaagataaagaaattctacaattctgtaacgactctgggatcaacgttaagcaatatcttccccactaccgcacacaagaagattggacaaaccattttggccctaaatggaggacttttgtagaaagaaaacaccagtttgatccaaaaatgattctatcacctggacaaagaatctttaacaattaaactagctttaaaaaaaatatataatatggtgggactacccaagttagctagctggctgatctcaagtgtacacataggacccagaattcagatgatagcctttgtacttgtttttgttaagagggtggggttaaaagctgcatgactttggcatatatgtagatcaggttacacatactttagatacgttaggttgacaaaatcatgtgtgaaagatgcacacagctagctgtgtacctttctttctctctctctctttctttctctctgtccctcaatttgtctatcactaaaaagattactatagtttagaacctagtaaaaaaaaaaaaaaaaaaaaaaaaaagggcggccgc

SEQ ID NO: 101 - DNA, 751 bp, Glycine max
gaattcggctcgaggtcatcaaggacatttttcatgctggaattaatttccttgttaaaggagctaacaggggaagatttgaagaaattgggtaccttgcaagtacaggtttgagattcagattgaggttgaacttggagtctggagtgttgtatttcatccaagacatcttcaacgtcaagcatggcaactttgagctcaataagccagtctctcactggcatatttccaaactgtttttgttcagcatcatcaagcacagcttggatggagaggagcttgttttctaagtccctccgcaggttctggtcgatctttgttccacgaaagaaatccagaacttgaggagaagccagcttctgaaatagagccccgaggaaagaagaaagaacagcaccaccaacgcattctaatgccattgtatggtaggaaagggagcagtggaatcgatgaatggaaatctgtgttttcaagtgcagcttatgccaatcactcagtgcaatgaagtggtcatcaaatcaaagtaaagatctttttgtttcaaggtcagtcaaccaacaactattgagtcttgccgacaacacaaaccttaacagctgtattccatcaatcagtgagtggctaggatttttaattcaattgttgtataaaaaggctagatttttaagtttttagacttctagtacaaaattattcttttttaatatttagaaattatattattttaaaaaaaaaaaaaaagggcggccgc

SEQ ID NO: 102 - DNA, 1000 bp, Glycine max
gaattcggctcgagttcatttctaactttctttttctttgcagtttaccttgtagctcatacatatttcagtgtagagactagagacagacagatcctgtgtgcacttgttccgatccaacaccatatcgtatttctctggatgataagcttgagaaggggaaagaaatatcgccatcacttgttagagcaatggaagaatcattcatttcgttgatcatattctgaccggactatgcatcttcacgtttgtgcttagaagaactcgtgacaatacttgaatgcagagataaatatggacagactgtaatccctgttttctgcaaaatggaacccgcagatataggacatcaacttgagagttagataaatgcatttgctgagcatggaagaaaatatgagaccaacgtagtgcaactctggagagatatgcttagaagaaaactgctaaggtatccgggattgtgtcgtcaaatcggttcctctgtctgtcctctcaacaaagctcatcctcaaagccaatgtgtaaggtctgcgacaccacattcgccgcgtcaacccagatgtgtcccgatttcaaattttggttgtgcaccatctcctggttgttaaaatccatagccattcccgaggatcaatcgagtgaactgtactattctgtaggggccattgcagttggaaaccatccatattatgcatattgtagagtggcaagtaaccgaagctggagtttgacttgaatgatggttctaatgtcttcatcttatataaaaagaaagttgtagttatagtcaatggtggaggctacggtggaccacctttatagggttctctaccaaaaaaactaagactattttgtgttaagcacgcatgatatgaatggttattgaccatgtagaacgtgccaacacattctagcattaattttaattagtatgtaacttgcatgttttatttaaaggagaatgctcttgttaaaaaaaaaaaaaaagggcggccgc

SEQ ID NO: 103 - DNA, 1202 bp, Glycine max
cttcgagcgctcgagcggtcgacgctcgagtataacacttagcattaatttgggataatttcatttagaattcggctcgagctcgagccgaaacttttttcatctaataatggctgcaacaacacgttcacgtgcatccatctacgatgtgttcctcaacttcagaggggaagacacacgctatggtttcaccggcaatctctacagggctctttctgacaagggaattcgtaccttctttgacgaagagaagcttcacagcggagaggaaataacacctgcacttttgaaggcaattaaagattccagaattgccatcactgtgctctctgaagactttgcttcttcctcattttgcttagatgaacttacatccattgttcactgcgcccagtataatgggatgatgattataccagtgttttataaggtgtatccttctgatgtcagacaccagaagggtacttatggagaagcattggctaagcataagataagatttccagaaaagttccagaattgggagatggctctgcgtcaagttgctgacttgtctggctttcatttcaaatacagagatgaatatgagtacaagtttattgagagaattgttgcgtcggtctctgagaagattaatcctgctagaatacatgttgccgatctgcctgttgaacaagagtccaaagtgcaagatacccatcaagagcaagaatacagagaggctttcaaggtgtttgacaaggatcaaaatggctacatttcagcaagtgagttgaggcaagttctgatcaaactgggtcaaaacacaactgttggagaggtggaggagatgattgcaactgcagatttcgatggtgatggtcaaattagctatgatgaatttgttaagactatgaaaatttaaaccaacaaattaataagtcttccaattaatgtttgttgtattttacttttatcacatgcattgatgtgaatgatctcagccgcccatttcatttgttcaaacttcaacccgtaattattctttcagttttagtttagtattcttcatgtttcaaaattaattggagtaaatttattcaagaactgtggaaattagactctatctttaatttcttgaaacattaatgtatgctacaattttatgatgccaataagttgagttccaaggtaaaaaaaaaaaaaaaaaaaagggcggccgc

SEQ ID NO: 104 - DNA, 916 bp, Glycine max
ctccctctctcttttctaagtcacaaaatattgtcttagttttcatttgaagctcaaacattaacaccatggcagatgttctgagtgaagaacagattagtgagatcaaagaagcctttggcttgtttgacaaagatggtgatgggtgcattactgtggacgaatttgtcacggttatccggtcattggttcagaaccccacagaagaagagctccaagacatgataaacgaggtagatgcagatggtaatggaaccattgaatttgttgagtttttgaacttaatggccaagaaaatgaaggaaactgatgaagaggaagatctcaaagaggctttcaaggtgtttgacaaggatcaaaatggctacatttcagcaagtgagttgagacacgttatgatcaatctgggtgaaaaactaactgatgaggaggtggagcagatgattgaagaagcagatttggatggtgatggtcaagttaattatgatgaatttgtcaagatgatgatgactattggatgaaattttcaaacaacaaatttattgttcgaattcgatcatttgggccccaatctcattcactcgcatgaaataataagtcttccaatcaatttttggtgtattttacttgtagcacatgatatgaatgaccaatgtattagagtgacatctcagccaatttgatttgttcaaactccaacccataattattctttcagttttagtttagcattccttatgttttaaaattaattagagggaatttattcaagaacttctgaaattagactcttttttgaaagattaatgtatgctacaatttattctttctcttgtgaacatggtattgctacaatttatttatatcattcagaaaaataaaaaacagcacaagaattaaacaaaaaaaaaaaaaa

SEQ ID NO: 105 - DNA, 259 bp, Glycine max
cggctcgagaatttgttgagtttttgaacttaatggccaagaaaatgaaggaaactgatgcagacgaagatctcaaagaggctttcaaggtgtttgacaaggatcaaaatggctacatttcagcaagtgaggtatatgtataaacttttattctttctattcactttttattgtaactttctttctctgacggcaatgaccaatcacagtattcatgagatttctgacaaagtaaggttccttcaaacttgaacaaaaa

SEQ ID NO: 106 - DNA, 1943 bp, Glycine max
ggtgaatcatgcgcaccaaggttaactccaaaagggcttgttggagttggtaaacgaattgtacatgtagaatcattgctgcaattagaagccgcggatgttcgtattattggaatctggggcataggtggtattggtaagacaaccattgcacaagaagtttataataaactctgttttgaatatgaaggttgctgttttttggctaacataagggaagagtcaggaagacatggaataatctcattaaagaaaaatcttttttcaacattattaggagaggaatatttgaaaattgacacacctaatggattgcctcaatatgttgagagaaggcttcatcgtatgaaggttcttatcattcttgatgatgtcaatgactcagagcaactagaaactttagctagaacagattggtttggaccgggtagtagaataatcgtgacaactagagatagacaggtgcttgctaatgagtttgctaatatatacgaggttgagccattaaactttgatgaatctttatggcttttcaatttgaacgtctttaagcaaaaacatcctgaaatagagtactatgagctatcaaagaaagttgtcgattatgccaaaggcattccgtttgttcttaaacttttgggtcaccgtcttcatggaaaagagaaagagatatgggaaagccaattagaaggacaaaatgtgcaaaccaaaaaggttcatgatattattaaattgagttataatgatcttgatcaggatgaaaagaagatacttatggatattgcatgttttttctatgggctgcgtctagaagttaagaggataaaacttttattgaaagatcatgattattcagtggcttcgggattagaaagattgaaggataaagctcttatcagtatttctaaagaaaatatggtatcaatgcatgacattataaaagaaactgcttggcagattgctccccaggaatctattgaagacctagaagccaaattcgactatttgatcctgatgatgtctatcaagtactaaaatacaacaagggtaacgaggctatcagaagcatagtcgtcaacttgttgagaatgaagcaattgcgattaaaccctcaagtatttactaagatgaacaagctccattttctaaatttttatagtgtatggtccagcagtactttcctccaggatccatggggcttgtatctttctcaagggcttgaatctttgccaaatgaactaagatatcttaggtggacgcattaccccttggaatctttgccttcaaagttttctgcagaaaatcttgttgagttgcacttgtcatatagccgtgtgaaaaaactttggctaaaagtaccggatcttgtgaatttaaaggtccttaaactgcattcatcagcacatgtaaaggagctgccagacttatcaacggccacaaatcttgaaataataggtctccgattctgtgtagggttgactagagtgcatccatcagttttctctctcaaaaagcttgagaaattggatttaggtggatgcacttcccttacaagccttcgaagcaatatccatatgcaatcccttcgctatctctcccttcatggctgcttagaactaaaggatttctctgtgatctcaaagaatctggtaaagttgaatttagaactaactagtatcaaacaattgcctttatctattggatctcaaagcatgcttaagatgctacgtctagcatacacttatatcgagaccttgccaacaagcatcaagcatcttacaaggctgcgacatctagatcttcgatattgcgcggggcttcggactctaccagagcttcccccatcacttgaaacactagatgtccgcgaatgcgtgtcattggagactgtaatgttcccttctattcctcaacaaagaaaaaaaaaaaaaaagggcggccgc

SEQ ID NO: 107 - DNA, 699 bp, Glycine max
aatgatcttgatcaggatgaaaagaagatacttatggatattgcatgttttttctatgggctgcgtctagaagttaagaggataaaacttttattgaaagatcatgattattcagtggcttcgggattagaaagattgaaggataaagctcttatcagtatttctaaagaaaatatggtatcaatgcatgacattataaaagaaactgcttggcagattgctccccaggaatctattgaagaccctagaagccaaattcgactatttgatcctgatgatgtctatcaagtgctaaaatccaacaagggtaacgaggctatcagaagcatagtcgtcaacttgttgagaatgaagcaattgcgattaaaccctcaagtatttactaagatgaccaagctccattttctaaatttttatagtgtatggtccagcagtactttcctccaggatccatggggcttgtatctttctcaagggcttgaatctttgccaaatgaactaagatatcttaggtggacgcattaccccttggaatctttgccttcaaagttttctgcagaaaatcttgttgagttgcacttgccatatagccgtgtgaaaaaactttggctaaaagtaccggtaaatattatatctcttatataggatctttttaatctctataatttgaaaaaaataaaaataaaacctattttagtc

SEQ ID NO: 108 - DNA, 1766 bp, Glycine max
atttacgcctacttaatgtagaattcggctcgagcagagtccatgtttgtagaataaaggaaatggacgaaaatgagtcccttgagcttttcagttggcatgcttttagacaagcacatccaagagaagacttgattaaactctcaatggacatagttgcttactgtggaggactaccactagctcttgaagtccttggatcttacttatgtgagaggacaaaagaagaatgggaaagtgtgttggcaaaactaaggaaaattcccaatgaccaagtacaagagaaacttagaataagctatgatgatttagattgtgaggaaaagaatatattccttgacatatgttttttctttattggcaaggatagagtcaatgttacagagatattaaaaggttgtgatctgcatgctgaaattggaataacaatcctggttgaaaggagcctcataaagcttgaaaagaattacaagatcaaaatgcacaatttgctacgtgacatgggaagagaaattgttcgtcaaagttctctagaggaacctgagaagcgtagtcgattgtgggttcaccaagaagtgcttgatttgttgttagaacatactggaacaaaagcaattgagggcttggctttgaagttacaaagaactagtggacttcacttcaatactaaagcatttgagaaaatgaagaaattgagacttttgcaacttgatcatgtacaacttgttggagattatgagtatcttaacaaaaacctaagatggctttgtttgcaaggatttcctctacaacacataccagaaaacttgtaccaggaaaatctaatttctattgaattaaaatatagtaatattagactagtatggaaggagccacagttgctgcagaggctaaagatcctcaatcttagccattcaaggaacttgatgcacacccctgatttttcaaaactaccaaatcttgcaaaactcaatctcaaagattgtccaagattgtctgaggtgcaccaatccattggagacctaaataatcttcttgtgataaatttgatggactgtacaagtctaagcaatcttccgaggaggatctatcagttgaaatctttgcaaactctcatcttttctggttgttcaaagattgacatgttggaagaagatatagtgcagatggaatccttgactacactgattgcaaaagatacagccgtaaaagaaatgcctcaatcaattgtaaggttaaaaaacattgtttatatatccctctgtggacttgaaggattagcacgtgatgtttttccttctctcatatggtcttggatgtcaccaacagcaaatctcagatcttgtactcactcatttgggagcatgtcaacttctctaacctccatggatattcatcataataatttgggtgacatgttgccaatgcttgttagactttcaaaacttcgaagtattttagtgcagtgcgactctaagtttcaattaacccaaaaattaagtaaagttatggatgacttatgtcaagtaaaatttacagaattggaaagaacatcatatgaatcacaaatttcagagaatgccatggaatcttatttgattggaatgggacgctatgaccaagtcatcaatatgcttagcaagagcatatcagaggttctttcttactcaatatttgtttacctcagctttattattcatcttgtaattaagagaacatgctataatatttattttagcttaaaaaaaaaaaaaaagggcggccgc

SEQ ID NO: 109 - DNA, 885 bp, Glycine max
gaaaaaatgggcagattatagtgcctgttttttaccatgttgacccaacccatgtacgccatcaaacggaattcggctcgagtgcttttgcaatgcacgaacaacgttttgttggcaacatgaacaaggttcaaacttggcggcttgtgctgggtgaagtagccaatatatctggctgggattgcttaaccacaagggtggagtctgaactagtagagaaaattgcaatggacatattacaaaagttggactctattacaagcgggggcctagaaagacgcatagcaacgtacaagcaaatggcacagcaaaagctagaaaagtcactgaagacgagtaacatgagagacatggaagacttgatcacgacactgctccaacttggggagctgaaattggagaaggccatgcgcactgatgattcgagcgtttgggatgacctaatggcaacgtacgagcgtgtattgcagcttaaacaggacaagtggatgcgaacgtttaataccaaagacatggaggacttagtagctacaaggcagcatgttatgcagattcagagggagcaatccaatcgtaagatcgggttccgcggtatatagacgcagatttaagttgaatagattttgggtagtgtgtgctaattatgatttatcaataatattcataatcatatgtatcagaattctcaaatgcatgtaaccgtaacaaattgtggccatacatcatagaattcaaagtagaggagaggagtgacattcatttgaggatacatatgattaaaattgataaaagaaaccaaggacggatgcagaaaattttagttgtggaggcaatatcatatatataacttagtgaggacaaaaaaaaaaaaaaaagggcggccgc

SEQ ID NO: 110 - DNA, 2396 bp, Glycine max
gaattcggctcgaggaaaatttttgggaggaaatgaaatttgctttagttgatgttgaaaatggaagtaggataataatcacaaccaggcaccgtgaggttgcagagtcttgtaggacatcttctcttgttcaagtgcatgagttgcaacctttaactgatgacaaatctttcgaattgttttgtaaaacagcatttagatctgaattagatgggcattgtccacacaatcttaagggcatatcaactgaaattgttaaaaagtgtggaggtttaccactagctattgtggccactgctggccttttatctcgcaaaagtagagatgcacgtgaatggcaaagatttagtgagaatctaagttcagaattaggaaagcataccaaattaactcccgtgacaaagattttgggtttaagttattatgatttgccttaccatctcaaaccatgcttcttgtatttcggaatatatccggaagattatgaagttgagtgtgagggattgattctacaatgggtagctgcggggtttgtcaaatctgatgaagccacacaaacattagaagaagtggcagaaaaatatttgaatgagttgatccaaagaagtttggttcaagtatcttcatttacatggtctggcaaaattaaaaggtgtcgtgttcatgacgtagtacgtgaaatgatccgcgagaagaatcaagatttaagcttttgccattctgctagtgagcgtgggaacttgtccaaaagtgggatgattcgtcacctaacaatagcctctggttccaacaatttgacgggaagcgttgaaagctcgaacattcgatcacttcatgttttcggtgatgaagaattgtcagaatccttggtgaagagtatgcctacaaagtacaggttattaagggtacttcaatgtgaatgtgctccaatgtattattatgttccgcgcattgaaagtttgggggacttatcatttttgaggtacttaagcttcagaagtgggaagatagtccatcttccaaaattaattggtgagctgcacaaccttgaaacattggatctaagagaaacttatgtgcgtgtgatgccaagggagatctacaagcttaagaagttaagacaccttctgagtgataatagtgggtttcaaatggatagtggcattggagatctaacatccctacaaacactacgtgcagtggacctaagacataatacagaagaagtagtaaaagggttggaaaaacttacacaattaagggtgttgggcttgacacaagttgagccaagattcaaaagttttctgtgctccttgataaacaagatgcaacacctggagaagttatatattacttcaggactaggtaggaacatggatttgcattttgatgtatttgcacctgtacttcagaaggttcgtcttctggggaggttaaacgtgttcccaaactgggttgccaagctccaaaatcttgttacgttgtccttgtcatccaccgagttgacacatgatccattgccactacttaaagatctaccaattttgacgcaccttagtatcctccattttgcatactatggtgaagttttgcagtttccaaacagggggtttcgaaacctaaagcaaatacgactggcagaattgcttaaattgaaatccatcgttattgaagatggagcattgccttctctcgaaaagctccagttaggccttattggcaaactgacagaggtgcctcgtggtattgacaagttaccaaagcttaaggttttccattgtttttgtatgtcagatgaatttaaagaaaactttcatctcaacagaggacaacgtcctcaatggacaataacatgatagtggaagtccgtctttcaaagctctgggatttaagtgtgacggacttctacttgaattgatactttcgcaacaagagcgttgaatcatcatgaaaactgccttggaattcagcattgttccttcaagtctccaaataaacagaatatgtggacctatcttaatttctttagcaaagtgataaaacttctgaattaatggtagtgatgtaaaacatttggctttttgattcagtgccttcttagatacatcatgtttgcaccatgttatgagaatttatctttcacagattgtaagacctattcattgaaatctgttttctatttgtgaatgaggagaaaaacaatgtgtcactgtataacttctggatgaggagaattttttttttaattttgataaaatttccttgctagtgttttcttgtggatgcttccattcactacacataaatcattgtaacaaaattaacaatgcaacattttcctaatgcgactatggtatatatattgtttccaaaaaaaaaaaaaaaagggcggccgc

SEQ ID NO: 111 - DNA, 1354 bp, Glycine max
gaattcggctcgaggcatgtctctgctggtcaaaataattcgactcccctggccaaaacgaccacgccctccaattaaatctcttagttgacctgaatcattaacatcatcaagaaagaggagaacctttgtccgtttgagtctttcacttgaaatacttatgcctccctctacaagctctttctcatagttgcttcttgtacgttgtattccatgtctttctatttcttccggaacatttaaaacaagactgctggaacagaactgtgacgccaattggtgatatatttgccctgcaatcgtagtctttccaattccccccaagccccaaattcctatgatccgaatatccagtgtctcaagcttcatcaagagcttgatttgtgtaatatgggtttcaattccaacaaattcttgatgatcacaactggaagaactattcaattttgtcaaaatatctttcacaatttctgcaacaagtgtggcttctggactggctcataataaaacaaaataaagtatcagaacctgttttaataaacttctccttaaacacttctaggtaaaaaagaaaatatcatatattggatagagacagatattggagtcctacataatattggtcttgaatttgtaaatacacaagagaattacttgattaatacaattttagcatctaagtaaattaaaagaagtctaaaacatctcaaaagagcatgtaattattaaagacctggttttttgtgaatcccagcccgcgatctcagctgcttcagttagagcagccttccatgcatgcactttgtcgatgttgtctgcaaatcgatgtttatacttaacgaattcttctgcatatgtctctctctgatgcctaacaattgatggatccaccttatagaaaactgggatcacaacccttccatatctcttcttgcaattgagtatctttgtgagttcatccaaacaccatgtggaagatgcatagttctgggagaaaacgacaacataaatcatagattcttctattgctttgtggagtgcaggtgaaatctcttcgcctctggctagtctgtaatctatatatgtttcaatcttattcctctgtagttcagcataaatgtgactaatgaagttgtcacgggtgtcttcccctctgaagttgaggaacacatcatgcctaattacaggaagaagagacacagcagctgatgaagaactccccgccattgtaatcaaatttctttcttgcctctgcaactcttagtctgagtctctcaggtcttcgactatagcatgaataaaaagcaaactacatgaaatcttaaccacaaaaaaaaaaaaaaagggcggccgc

SEQ ID NO: 112 - DNA, 2443 bp, Glycine max
  unsure (1)..(2443): unsure at all n locations
aacagaatcttctaatattccctcttctctctccttctatttatccttccctccataacagtaacaaccaccaccacctctgcaacacaacacacataacacgtaacaaagagaatgagagcgctaaattcgcacgtgctcctcgtagatcttcactcccaccatcacgtgcccacctcaaccctctcctacctcagaaactcccgcttcatatcatccctccgtcgacgctccccaagaaccggaatccgatgtacggcgtcgccggagattcgccgcccctccgatcgcttctacggctcctcgccgtcgacgtcgcgcccggaggacctcaacctcttcctggaactgctccctctgaagatgcgaagggaactctatcgccaccgcgaaatcggaggcctcatagagattgtcatggatttgggaagaaaacctctcgccaggttcccttccggtgattgggtcatctctgaacaacccatagcgcaagaggatttacgccatgccgaattcggctcgagtgagttttctgatgacaacaggtcaggtattgataggtctttgcatcggataagcgcgattcggaatcggaaaatgcaaatcattgggcttacttgtcgggtgggtcgagctgtgggtggcagtgctgaaattatacgtgatttggttgaggatggaggttctatcttggtcattggacctcctggagttggcaaaacaaccttaatcagagagattgctaggatgctggctgatgagttcaggaagcgtgttgtaatagtggatacatctaatgaaattggaggtgatggagatgttcctcatgcaggaataggcagggccaggaggatgcaagttccaaatgtgaatatgcagcataatgttatgattgaagcagttgaaaatcacatgcctgaaaccattattattgatgaaattggaacggagcttgaggcattggcagccagtactattgctcaaagaggagttcaattggttggaacggcacatggaatgaccattgaaaacataataaaaaatccttatcttcagattcttgttggtggcatagagagcgtaacccttggggatgaggaggccaggaaaagaaaagtgcagaagacaattctcgaaaggaaaggaccccctacattttcatgtgcggttgaaatgatatctaaaactgaatgccgtgttcatcatagattagatgcaactgtggatgccattttggcaggaaaacctccattatttgaaatccgtcaatgggatgattctgacaacgagttgccaaaatatgctccattgcccgaagaaaatcttggagaaacttctgacttaactaacaataatatcacgagttctgacaatgaacctagtgaggatgataaagatcacccacgtacttggtccacgaaatggagtaccagtggacctgtgatgacgaggagttcaccaatgcaagtttatacttacaagattcttgaagctgatctgctacaagtggccaaggtaatggggcttgaagatgtaatagatgtgactgatgacattggaactgctgaagcaattctagcatccagttctgagatacgacaaaacccatggatccgtggtgtggcaaagttccatcacgtacctgtatttgttatcaagtccaataccatggcacaaatggtcaaggcagtgcgcatgatccttgggctagaatcctttggccctacaccaaagaagccattaaatgaatgcttggatattgaaattgaggacgatgaaccaaaacgaaaaccatctttggaagagattgatgccttggaggaggtccggcttgcaatagagtacattgtgattcctggtggagaagctgtggaacttcttcctagacgttctgaaattattgcccggcagcttgaactcgttcaaagttatcagttggctgctgaaaagtcaggtaccgatcagaatcccaggttgcaaattcttccattgaggctaaatacaaaaaaagcctctaaatctactgttgcccgcaagaaaacaagtcctacctcaatgtctactggtgacagcggcaatggcaccagtgttaccaggcttcctattttgcctgaataattcaattctttccccaattctaacgattcacttcactggtttgtacatgtatgatgtatgtaacatgtacagtcatacaagtggtgtaaataatttattcatagcctaagagcttgtatctcaattggggtgtgacatttatgacggaagtttgatcctccgccaagctaccccttcttgtaccaaggtatatatattgaaaaaatcaatctacataaaatgtaatatatcattattttaaaaaaaaaagggcggccgcnnnnnnnnnnnnnnnnnnnnnnnnnnnnnnnnnnnnnnnnnnnnnnnnnnnnnnnnnnnnnnnnnn

SEQ ID NO: 113 - DNA, 261 bp, Glycine max
gcaacaaccacctctgcaacacatagcagatataataaagagaatgagggcgccaaattcgcacgtgctcctcatagatctcccacttcatatcctccctccgtcccccacgcttccctagaaacggaatcccatgtacggcttcgccggacattcgccgcccctccgatcgcttctacggctcctctccatcgacgtctcgcccggaggacctgaacctcttcctggagctgctccctctgacgttgcggagggaactgt

SEQ ID NO: 114 - DNA, 739 bp, Glycine max
accagtttgcatctagaatatttgataaacccgaaccatgactggtagcttcatttcatggctccaaaataaaaagtgaagggtgggaaagggggaggttgtggaacttagcagcgaagcgaggaagatgcaaagtcaacaaacagtgaaagaagaagatgatgaaggtccacctccgggatggcaacctctccccgctcagccaccgccaccgccacgtccatccggttgggctcaaatggtttgcggttcttgtcgtcgcctgctttcatatccacgaggtgccaaacatgtcaaatgttcatgctgtcagactgtcaacattgtattagaagctgatcaggttgggcaagttaagtgtggcagttgtgcggtattgctgatgtacccatatggtgcttcacaagttagatgttcatcatgccgatttgtgacagaaattggggcacacaacaagcggcctccatggtctgtacaacaaaggaagccatctcctccaaaaactggttgttagtggcctgtccgttggcctagtagatggatcatccttgtacatcaaacaaattaggtatgaggattcatgtaccaatctcaaaattgctttgttattgagatacgcatccttaaggaattatttattaatgtaaagttttggaatttcaccagaatttttaagatgaagtttcacttgagagtcttctattcctgcttgcaaaaaaaaaaaaaaaagggcggccgc

SEQ ID NO: 115 - DNA, 2703 bp, Glycine max
tcggccacgcgttcgcccacgaattcggcttcaacttgctccctcagaagcgaagaagaagccacagagaactagtctcctactctcacccgcaagaaaaaaatggcatctcacatcgttggatacccccgtatgggtcccaagagagagctcaagttcgctctcgagtctttctgggatggcaagagcagcgccgaggatttgcagaaggtgtcttctgatctcagggcatccatctggaagcagatggctgatgctgggatcaagtacatccccagcaacactttctctcactatgaccaggttctcgacgccaccgccaccctcggtgccgttccaccaaggtacggctggaccggcggcgagattgggtttgatacctacttctccatggccagaggtaatgctaccgtgccagctatggagatgaccaagtggttcgacaccaactaccactttattgtccctgaattgggccctgatgtgaacttcacctatgcttctcacaaggctgttgatgaatacaaggaggccaaggcgcttggagtggataccgttccggtcctcgttggccctgttacatacctgttgctctccaagcctgccaagggagttgagaaatccttttctctcctctctctccttcccaaggttcttgctgtctacaaggaagttattgctgaccttaaggcagctggtgcttcatggattcagtttgatgagcctacccttgtcttggaccttgagtctcacaagttgcaagcattcactgacgcatatgcagaacttgcgcctgctttgtctggtttgaatgttcttgttgagacctactttgctgacatccctgctgaggcatacaagaccctcacatctctgaatggcgtcactgcatatggatttgatttggtccgtggaaccaacactcttgatttgatcaagggtggatttcccagcggaaaatacctctttgctggagtggttgatggaaggaacatctgggccaatgaccttgctgcttctctcactaccttgcagggtcttgagggcattgtgggcaaagataagcttgttgtgtccacctcctcctcccttcttcacactgctgttgatctagttaacgagaccaagttggatgatgagatcaagtcatggctagcttttgctgcccaaaaaattgttgaagttaacgcattggctaaagcattgtctggcaacaaggatgtggccttcttctctgctaatgctgcagctcaggcttcaaggaagtcctctccaagagtgaccaacgaggctgttcagaaggctgctgctgcattgaagggttcagatcatcgccgtgcaacaaatgtcagtgccagactggatgctcaacaaaagaagctcaaccttccaatccttccaaccaccactattggatccttccctcagactgtagaactgaggagggtacgccgtgagttcaaggctaacaagatctccgaggaagagtatgttaagtcaattaaggaggaaattcgcaaagttgttgaacttcaagaagagcttgatattgatgttcttgttcatggagaaccagagagaaatgatatggttgagtacttcggtgagcaattgtcaggctttgccttcactgttaatgggtgggtgcaatcctatggttcccgttgtgtgaagccaccaatcatctatggtgatgtgagccgcccaaagccaatgactgtcttctggtcatctctggctcagagctttaccaagcgcccaatgaagggaatgcttaccggtcctgttaccattctcaactggtcctttgttagaaatgaccaacctagatctgagaccacctaccagattgctttgtctatcaaggacgaagtggaagaccttgaaaaggctggcatcactgttatccaaattgatgaagctgctttgagagagggtcttccactgaggaaatcagagcaagctcactacttggactgggctgtccatgccttcagaatcaccaatgttggtgtgcaggataccactcagatccacacccacatgtgctactccaacttcaacgacatcatccactccatcatcgacatggacgccgatgttatcaccattgagaactctcgctccgacgagaagcttctgtcagtcttccgcgaaggtgtgaagtatggtgctggaattggccctggtgtctatgacatccactccccaagaataccaccaactgaagaaattgctgacagaatcaacaagatgctggcagtgctcgagaagaacatcttgtgggtgaaccctgactgtgggctcaagacccgtaagtacactgaggtgaagccagccctcacaaacatggttgccgcagcaaaactcatccgcaacgaacttgccaagtgaatggtataagaaagtagaatcttccaagtcatttggttctgctttatattataatacaccaaagaaaaattttctctatattgggttgtttcaataactgtgtgtggaatatttaggtgtcttagcatgctctgtgagcaattgattcttcctcaacccctccccccttatttttccccactcctgttttccctaatgaatgttgtatctttgcggcttcgccgcaatccttattgatctggaattttaccagttttgtgcaaataactatgagcatctatatcgagtatttcaaaatacatgcttaag

SEQ ID NO: 116 - DNA, 690 bp, Glycine max
cctcgcctttcaaatcaaaacgtgattatctcacagtcgtttcggggtacattcttgtgcactcagttattctctctctctctctggagcgtcgtcgtttcgttagggcacaaaaccccttttcggatcggtggagcaaggcctcgccggcgagattcccgaggctgttcaatcagcgatcgagcaccggcgaaaagcggcgaagatgaaggttttcgtgaagactctcaagggcacgcacttcgaaattgaagtgaacccttcggacacgctttctgaagtgaagaaaaatatagaaactgttcagggtgcagatgtctatcctgctgcacagcaaatgcttattcatcaaggaaaagttctaaaggatggtactactttggaggaaaataaagtagctgaaaatagttttattgtaattatgttatcaaagactaagagttcatctggtgaaggatctactacttcaactgctccatcaaccaaggccccacagacaagtacagttcctgcttcaacccctccagcgtcagtagttcctcaagcttctgctcctgctctgctcctgctcctgctgcaactggggcactgcctgcatcagttactgcacctatatcttcaccttctcctgctccagccccaactcctgctcctatatcttcagacgccgggggaggggccggtttcctt

SEQ ID NO: 117 - DNA, 490 bp, Glycine max
cccacgcgtccgctttacacttcgcctcactctcttttatttcgttcctctattcgctacgtcgtcgttagggtcgtcttcggatcggtggaacttgactgcgccggcgtgaattccgacgctgcgagtggcaccgaattgcgatagcggtgacgaatatgaaggttttcgttaagactctcaaaggcactcacttcgaaatcgaagtgacgccgcaagacacggtttctgaagtgaagaaaaatatagaaactgttcagggtgcagatgtctatcctgctgcacagcaaatgctaattcatcaagggaaagttcttagggatgcttctaccttggaggagaataaagtagttgaaaatactttcattgtaattatgctatcaaagagtaagagcccatccggtgaaggatctactacttcaactgctccatcaaccaaggctccacagacaagtacaggtcccgcttcaacccctccagtgtcagtagc

SEQ ID NO: 118 - DNA, 360 bp, Glycine max
tcggaagtttcgcctccttccaagagccctgaaattgactgttaattagggtttctgaagtgaagaaaaatatagaaactgttcagggtgcagatgtctatcctgctgcacagcaaatgcttattcatcaagggaaagttcttagggatgcttctaccttggaggagaataaagtagctgaaaatactttcattgtaattatgctatccaagcctaagagttcatctggtgaaggatctactacttcaactgctccttcagttaaggcaagtgcaactcctacttcaacctctgtgtctgctgcgcctcaagctcctgcttcaactggagcaacgcctacacctgttactgccccagctg

SEQ ID NO: 119 - DNA, 506 bp, Glycine max
agatgaccagaagacggtcattggctttgggcggctctggctcagagctttaccaagcgcccaatgaagggaatgcttaccggaccagttgagaatggtaacaggaccggtaagcattctcaactggtcctttgttagaaatgaccaacctagatctgagaccacctaccagattgctttgtctatcaaggacgaagtggaagaccttgaaaaggctggcatcactgttatccaaattgatgaagctgctttgagagagggtcttccactgaggaaatcagagcaagctcactacttggactgggctgtccatgccttcagaatcaccaatgttggtgtccaggataccacccaggtacactcttttggatcatcgcatatcactgaattataaattttttttgttcatcctcattttcacatatgtatgtaataatctaacttttcgtatagacagatccacactctcatgtgctacttcgacttcaaccgacttcatccattcc

SEQ ID NO: 120 - DNA, 426 bp, Glycine max
cccacgcgttcgcgcactcgtccgctgcagaatacgactgaagggagagcttgatattgatgttcttggtcatggagaaccagagagaggtgatgtggttgagtacttcggtgagcaattgtcaggctttgccttcactgttaatgggtgggtgcaatcctatggttcccgttgtgtgaagccaccaatcatctatggtgatgtgagccgcccaaagccaatgactgtcttctggtcatctctggctcagagctttaccaagcgcccaatgaagggtatgcttaccgggcctggtaccattctcaactggtcctttggtagaaaagacccaactaaaacttaaaacaactaacaaaatggtttggcttttaaaggccaaatggaagaaccttgaaaaggctggcatcactgttatccaaattgatg

SEQ ID NO: 121 - DNA, 460 bp, Glycine max
atgttgtaatatttattctgctgttactcatggcttcttttctttcctctcaggctgctgcattgaagggttcagatcatcgccgtgcaacaaatgtcagtgccagactggattctcaacaaaagaagctcaaccttccaatccttccaaccaccactattggatccttccctcagactgtagaactgaggagggtacgccggaattcaaggctaacaagatctccgaggaagagtatgtaaagtcaattaaggaggaaattcgcaaagttgttgagcttcaagaagagcttgatattgatgttcttgttcatggagaaccagaggtccgctctcatttcataacatgactaaatattagtcttttgaattgaagatagcttctttctttctgaagagcaactactctttgcatattttctttccttattgttagattgctgattccaaaattgcagcac

SEQ ID NO: 122 - DNA, 2327 bp, Glycine max
cgaactgctctcggccgccaccgttgcgcccacacaccttccctttgtttccattttccattttctcattctcacttccaaaactcctccattcatttctcgcatttctaccttccaaagctctttctctaagatcgagctttggaaaacttgaggaagcatttgagtaacaaccccttttcagatccctgaagggttgtgttcatttgtcgaaataataacaacttgcttggaacaagcataataagcatggcaagcgcgttgcagcagcttcaaggggttcaagggaaactacctttgtgtatgagtgtgaggaggggcttgcatcattgcaagtctcaaattgggtttgcagcacttggtgctcctgtttgtgcaaggagagtttggggcaatagggtggcattcagtgtcactacttgcaaggcctcaacaagtgatgtgattgagaagaatgcgactgagaatgggatggtgagtagtgagggtgaaaccagtttcacttgtgtcatgaagtttggtggctcctctgtggcttctgctgataggatgaaagaggtggctacccttatattgagttttcccgaggagaggcctattgttgttctctctgctatgggaaaaacaacaaacaagcttttgctggctggagagaaagctgtgagttgtggtgttatcaatgtatcaagtattgaggagctttgctttataaaagatctgcatctaaggactgtggatcagcttggtgtggacggatctgttattgcaaagcatctagaagaattggagcaacttctgaaggggatagctatgatgaaagaattgactaaaaggactcaggactatttagtctcctttggagaatgcatgtcgacaaggatctttgctgcatatcttaataaaataggtgtcaaggctcgccaatatgatgcatttgagattggttttataacaactgacgacttcacaaatgcggacattttggaagcaacttatccggcagtcgccaagagattacatggtgattggctctctgatcctgcaattgcaattgttacaggcttccttggaaaggcccagaaatcatgtgcagtgacaacactgggtagagggggcagtgatttgacagctacagcaattgggaaagcactagggttacctgagatccaggtatggaaggatgttgatggtgtcctaacctgtgatccaaatatatacccaaaagcggaacctgttccttatttgacatttgacgaggctgctgaactagcgtactttggtgctcaggttctgcatccacagtctatgagacctgcaagagaaagtgatattcctgttagggttaaaaattcttacaatcctaaagctccaggtactctcatcaccaaggcaagagatatgagcaaggcagtgttaacaagcattgttttgaaacgtaatgtgaccatgttggatatagtgagcactcgcatgcttggtcagtatggtttccttgctaaggtgttttcaatctttgaagagttaggcatatcagttgatgttgtagctacaagtgaagtcagtgtttccttgacattggatccatcaaagctatggagcagagagctaattcagcaggaacttgaccatgttgtagaagaactcgagaaaatcgctgtggtgaatctcctgcagaatagatccatcatctctctcattggaaatgttcagagatcatcactaatattggagaaggctttccgtgttcttcgaacccttggcatcacggtgcaaatgatctctcagggtgcatctaaggtgaacatctcattggttgtaaatgacagtgaagcggagcagtgtgtgagggctctccacttagccttctttgagagtgagctctcagagttagagatggattacaaaaatggtaatggctctgttcatgaattatctttaggggacacttgagtgtttcaattcttttcattaagatatgtatcccaattttatatgctaatgtcaagcaagcatttttgagttcctcctagtcttgtgtcactgtgatgtaccagaacaatgtattttacctgaagatagatgctggttgggaggaatggcaaagcattagtgtataactagtcttggtagttggtattactagtgagtaaacctttgtattcttttgtagctgcttccaaagggttaataaccagctgcaaatcaatttttggttgctatttttaagaaaaaaaaaaaaaattctcaaaaaaaaaaaaaaaaaaaaaaaaaaaaaaaaaaaaaaaaaaaacaaagggggcccccccattttttgcccccccccccgg

SEQ ID NO: 123 - DNA, 1849 bp, Glycine max
  unsure (1)..(1849): unsure at all n locations
gaattcggctcgagggtggctttgcggatattgaaacgagttacacgtgtgtcatgaagtttggcggctcctctgttgccaatgcagaaaggatgagagaggttgccaaccttattctgagcttcccggaagagaggcctataattgttctctctgccatgggaaagacaactaacatgctgttgctggctggagaaaaagctgtaagctgtggagtaactatggctgatagtattgacgagctcagcattataaaagatctgcatctcaggactgtggaagagcttggagtggacagaaatgctattgagaagcatctagaagaattggagcaacttttaaaggggatagctatgatgaaagagttgactccacggactcaagattatttagtttcatttggagagtgcatgtccactaggatctttgctgcatatcttaatacattaggaattagggcccgccaatatgatgcatttgagatgggtattataacatctgatgacttcacaaatgctgacattttggaagcaacatatcctgctgttgcaaagaggttacatagtgattgggtttgtgatcctgctattccaattgttacaggcttccttggaaaggcacgaaaatcatgtgcagtgacaacattgggtagaggaggaagtgatttaactgctacaactattggaaaagcactagggttgccagaaatccaggtatggaaagatgttgatggtgttctaacctgtgatccaaatatatgcccacaagcaaaacctgttccatatttgacatttgatgaggctgctgaacttgcatactttggtgctcaggtcctgcatccacagtctatgagacctgctagagaaagtgatattcctgttagggttaaaaattcctacaaccctaaagctccaggtactctcattgctaagacaagggatatgagcaaggcattattaactagcattgttttgaaacgtaatgtgaccatgttagatattgtaagcactcgcatgcttggtctgtttgggttccttgctaaggtattttcaatattcgaagagttaggtatatcagttgatgttgtagctacaagtgaagttagtatttccttgacattggatccatcaaagctatggagcagagaactaattcaacaggaacttgactatgttgtcgaagaactggaaaaaattgcagtagtaaatctcttaaagaccagatccataatctctctcattggaaatgttcagagatcatcactaatattggagaaggcctttcatgttcttcgaactcttggggtcactgttcaaatgatctctcagggtgcatctaaggtgaatatctcgttagttgtaaatgacagtgaagcagagcagtgtgtcagggctctccacaaagccttttttgaaagcgaactctttgaattagagaatgaatgcatacctggaaatggttctgttcctgcattatcttagggggatactttggttttgccaatatagcagattaataccttatcttatgcgttaagaaatgttttggctagcactagtacagtatttattagtcctgttactactagagtatacctttgtatattctggtcgcctcctccataaggggggatgaccagctgcaagaagttatttgtaatttattgtgagtgagtttgaataaacttcttaatactgagaattatgtaattgatatcactatctatcattatattattgggttagaattgtcctatcaataaagttaatcttttgttttnnnnnnnnnnnnnnnnnnnnnnnnnnnnnnnnnnnnnnnnnnnnnnnnnnnnnnnnnnnnnnnnnnnnnn

SEQ ID NO: 124 - DNA, 599 bp, Glycine max
ctttcaaaaggttaataaccagctgcaaaagaatacaaaggtttactcactactcactagtaataccaactaccaagactagtgatacaccaatgctttgccattcctcccaacccagcatatttcttcaagtaaaatacattgtccaggtactctcatcaccaaggcaagagatatgagcaaggcagtattaacaagcattgttttgaaacgtaatgtgaccatgttggatatagcaagcactcgcatgcttggtcagtatggtttccttgctaaggtgttttcaatctttgaagagttaggcatatcagttgatgttgtagctacaagtgaagtcagtgtttccttgacactggatccatcaaagctatggagcagagagctaattcagcaggcaagtgaacttgaccatgttgtagaagaactcgagaaaatcgctgtggtgaatctcctgcagaatagatccatcatctctctcattggaaatgttcagagatcatcactaatattggagaaggttctgtattatgctccctttatttaaattagttcatatcctaactttcacttatgtataaagatttactgaatttattaca

SEQ ID NO: 125 - DNA, 1403 bp, Glycine max
gaattcggctcgagattttactctgcagcagcagccaccacccatggcgtcgttttccgccgccgtcgctcagttctcccgcgtttcaccttctcacacttcgctccactctcactctcacggcacgctcttccaatctcaatgccgccctttcttcctctcgcgcacttcccattcactccggaagggtcttactttaccacggggaagagaggcaccgagtacatctgtacgtgcttcatttacagatgtttcaccgaatgtgtccttggaggaaaaacaactacccaaaggagaaacttggtctgttcacaaatttggtggaacctgtgtgggaacctctcagagaataaaaaatgttgcggacataattcttaaggatgattcggagaggaaattggtggttgtttctgcaatgtcaaaggtgacagatatgatgtatgaccttatccacaaggctcaatcacgcgatgagtcttatacagctgcattaaatgctgttttggagaagcacagtgcaactgcacatgacatacttgatggagataatcttgctactttcttgtctaaattgcatcatgatattagtaaccttaaggcgatgcttcgtgcaatatacatagctggtcatgcaacagagtcctttacagattttgttgtgggacatggagaattatggtctgctcagatgttgtctctagttattaggaagaatgggactgattgcaaatggatggatacaagggatgtccttatcgtaaatcctactggttctaatcaagttgatcctgactatttggaatctgagcaaagacttgaaaaatggactctttgaatccatgtaaggtaatcattgcccctggtttcattgcaagcacacctcaaaccattcctaccacactgaagagagatggaagtgactttctcggcagcaattatgggtgctcaagtcaccgctggtggaatatttagtgatattttacgacttgcctcatatcttggtgctccatcgtaagtgtcattctgcaagcataattttctgcatgtatggttttgcatcctctgctccacgacacgcattatctgaagcgacgaagaattgcttttatgtccaaaacgtgaattttgatcgaaatgaatgatgtcgatggatatccgaacacatgcaaatttgtaccatctatttatttatcttgattttcttcgtaggttatttgcttcttataacgttgtagtaatgtaagcttgtttctcttatcttttgtctggaagaataataagggaatggaacagaactccattaaccttgattgtgagttacattgtaaaggaacggaagtaaacagaatttattataaaaaaaaaaaaaaaaaaaaaaaaaaaaaaaaaaaaggggcggccgc

SEQ ID NO: 126 - DNA, 1581 bp, Glycine max
caagcactcctggtgttagtgcctcccttttcaatgcattggctaaggccaatataaatgtccgtgctatagcgcaaggctgttctgagtacaatattactgttgttgttaagcgagaggattgtataaaggctttacgagctgtccattccagattttatctctcaagaaccaccatagcaatgggcattattggacctggattaattgggagcacactacttgaccagctaagggatcaggcctcaaccctgaaagaagaattcaacattgatttgcgtgtaatgggcatacttggttcaaagtcaatgcttcttagtgatgtgggcattgacttagctagatggagagaacttcgagaggaaagaggagaagtggctaatgtggaaaaatttgttcaacatgtacatggaaatcattttataccaaacacagcattagtggactgcacagctgactctgccattgctggctattactatgactggttgcgcaaaggaatacatgtagttactccaaataagaaggcaaattcaggaccacttgatcagtatttgaagttaagagctcttcaaaggcaatcctatacacattacttctatgaagcaactgttggagctggtcttccaattgttagcactttacgtggcctccttgaaactggagacaaaatactgcaaatcgaaggcatctttagtgggactttgagttacatatttaataacttcaaagacggccgggcttttagtgaggtagtttctgaagcaaaggaagcaggttatactgagccagatccaagagatgatctatccggaacagatgttgccagaaaggtgataattcttgctagggagtctggtttaaagctagaactgtctaatattccagttgaaagccttgtgccagaaccactacgagcttgtgcatcagctcaggagtttatgcaagagctaccaaaatttgatcaggagttcacaaagaaacaagaagatgctgagaatgctggggaagtcttgagatacgtgggagtggtggacgtgactaatgaaaaaggagtggtagagctgcgaagatacaagaaggatcatccgtttgcacaattgtctgggtcagataacattattgcatttacaacacgaaggtataaggatcagcctctgatagttcgtgggccaggagctggtgctcaagtcacagctggtggaatatttagtgatattttacgacttgcctcatatcttggtgctccatcataacgcataattttctgcatgtttggtttcacatccaccgctccgtaacacattatctgaagttgcttttatgtccaaaacgtgaattttgatcgaaacgtatgatgtccatggatatccaaaaacatgcaaatttgtatcatcaatttatttatcttgattttcttcttaggttatttgctgcttataacgttgtaatgtaagcttgtttctcttatcttttgtctggaagaataataagggaatggaacagaactccatttacctttttttgagttatattgtaaaggaacggaagtaaatagaattattataattttcaacttcc

SEQ ID NO: 127 - DNA, 994 bp, Glycine max
  unsure (1)..(994): unsure at all n locations
tttttcacaggactctcaattaaaatcaggggggccggcaggattcttttgaagatgaaccctctcaaaatggcagttcagcatatactcctcaaaatgggggactaaatatacctcatacagtggtcaatcaaaccatgtctatcatacctatctctgcaggtggtgctcctggagctgttcctggtcccacgacaaacttaaatataggaatggattattggggtacaccagcttcatccaacattcctgcacttggcagaaaggttccatctactgcagttgctggagggatggttaccgttggatctcgggatagtgctcagtcacaactttggctacaggatgaaagagagcttaaaaggcaaaggcggaagcagtctaacagggaatctgctcgcaggtccaggttgcgcaagcaggccgagtgtgatgagttagctcagcgtgctgaggctttgaaggaagaaaatgcttctctccggtctgaagtaaatcgaatcaggagtgattatgagcagctactctccgagaatgcagctctcaaggagagacttggggaactacctccgaatgatgatcatcatcataggtctggcaggaatgatcagcatgtgggtaatgacactcaacagagtgggcagacagaggccgtgcagggtggtcattagcaccaaccaaccacttcatgctgcctttcagggagataatctaacttaaatagcaagagcaagatcttgtttcggataggttgtagttcaaattgtattaatgctgaccatttatcgtcttaagatctgtttaatgttatgtgatccttcattcctaatttaccttttttttaactcattcaaaacgacctggattgtatgtagtgtgtgaattctgtgtcataccttatctgcagcttcaaagttagtgttcccacaagcaatgtatactgagccagatccaagagatgatctatccggaacagatgttgccagaaagnnnn

SEQ ID NO: 128 - DNA, 656 bp, Glycine max
aaatggtactctttgaatccatgtaaggtaatcattgccactggattcattgcaagcacacctcaaaacattcctaccacactgaagagagatggaagtgacttctcggcagcaattatgggtgctctatttaaggctcgtcaggtcacaatttggacagatgttgatggtgtgtatagtgcagatcctagaaaagttagtgaggctgtgattttgaagacactgtcttatcaagaggcttgggaaatgtcttattttggtgccaatgtcttgcatccccgcacaattattcctgtgatgcgatatggcatacccattatgataaggaacattttcaacctttctgctcctggaacaaagatctgccatccttctgttaatgatcatgaagatagccagaacctgcaaaattttgtcaaaggatttgcaaccatagacaacttggcacttgtaaacgtcgagggaactggaatggctggtgttccaggtactgccagtgctatttttggtgcaggaaaagatgttggagctaatgttatcatgatatctcaggctagtagtgagcattctgtatgctttgctgtgcccgagaaagaagtaaaagctgttgctgaggcattgcaatctagatttcgtcaagctttggataatgggcg

SEQ ID NO: 129 - DNA, 543 bp, Glycine max
catccctttgcgcaattgtctgggtcagataacattattgcatttacaacaccgagggataaggatcagcctctgatagttcgtgggccaggagctggtgctcaagtcaccgctggtggaatatttactgatattttacgacttgcctcatatcttggtgctccatcgtaagtgtcattctgcaagcataattttctgcatgtatggttttgcatcctctgctccacgacacgcattatctgaagcgacgaagaattgcttttatgtccaaaacgtgaattttgatcgaaatgaatgatgtcgatggatatccgaacacatgcaaatttgtaccatctatttatttatcttgattttcttcgtaggttatttgcttcttataacgttgtagtaatgtaagcttgtttctcttatcttttgtctggaagaataataagggaatggaacagaactccattaaccttgattgtgagttacattgtaaaggaacggaagtaaacagaatttattataatttttaacttcgctaactgtcaatttaat

SEQ ID NO: 130 - DNA, 931 bp, Glycine max
  unsure (1)..(931): unsure at all n locations
tatatatatatattcctctaaagttctaacattcacatactcccacgcgtccgggttaaccatgaagtttatgtatcttgcattcctacttctatttgttttctctagccaattcttgcttggaggagcagatgcttcccccagacaagtgattgacacagaaggcaagaaagttcgagctggcgtagattactatatccgaccggtcccaacaaccccatgtgatgggcgtgggccgtgtgtggttggaagtggctatgttctcatagcaaggtcatccaaccacacttgccctcttagtgttgcggtggtggagggtttccgtggcctagcagtcacattcaaactagttaaccctaaaaaaggggtcattagggtttctactgacttgaacatcaaaacctccctaactaacacaagttgtagtgagtccacggtctggaagctagatgcctttgatgattcaactggacagtggtttgtgaccactggtggtgtgttgggaaaccctggcaaggataccatcgacaactggttcaagattgaggagtatgatgatgattacaagctcgtgttttgccccacagtgtgcaacttctgcaagcctttgtgtaggaatgttggggtgtttagggatagtaatgggaaccagcgcgtggctctcactgatgagccttacaaagttaggttccagccatctgcttgaagcttcattaatgcatatgcatgaaaaaagatatgtaattaatgagaacatgatatttcatctggaaaattaagcatcatcatcatgcacgaataaaattgatgcttttgtcatattctatttttgtatgaataaattacgtattgatatcttctgatgnnnnnnnnnnnnnnnnnnnnnnnnnnnnnnnnnnnnnnnnnnnnnnnnnnnnnnnnnnnnnnnnnn

SEQ ID NO: 131 - DNA, 1144 bp, Glycine max
gcggccgccctttttttttttttttaaaaaatgaaacaggtgatcatttaatcatatttttacaacaactcttataaactattaatgaatccaaagaggatttacctctctcagtacaaaaaaatctactagggtgtaactaaattctttttcatatcctccgtaaaggaaaaaaagaacacgctcctaaaaagttgccactttcctagtatgtactcgtcccaactctccttccaaacccagaaataaaaacacacacacataaacgcaacccaacacaacagcatcaaaacaaacaaacaacacagtttttcttgtctctatattcttccggccaccgcagatggcggcggagcacgacagctgctgctcgcgctgtgtcaccttcctaataaccataggcctcacagcgctcttcctatggctgagtctccgcgttgacgaaccaaaatgctacctcgactacatttacgttcctgccctcaacaaaaccctaaattccaattccactcacaacaaaaacaccacaatactcttcgctctcaagctcaccaacgggaacaaggacaaaggcatccaatacgacgacgttctcctctccttcagagtcttcgagagcgtcaacctcacgcgcccactcggcaacgccaccgtgcaaaggttctaccagggccaccagaagaaggccaccaagcacggaaacttcagcggcggcggcggaaacctcaccgcggcggtggctgggagaatgtggtaccgtgtggactatgctactgcggtgaagtacaagattctcttctggtacacgaaacggcaccgtttatggggaggggcaaatgtggaaattggcgattcgggaatgaaggtgtatcgtaaagccgttaggcttggagggaagaaccccgtggtgatcgagtccggcgcatctaagctcagtggacgctatcgtgcgcttcttctttcccttcttctccctttttgtggcttgtgggtttagttgacttgactttttcacttcacccacttttgtgtgtattgttattattttatttttgtaatttgtattgtgacttttctttttgtctagttccaattcaaagattagagatgattatattcaaaaaaaaaaaaaaagggcggccgc

SEQ ID NO: 132 - DNA, 2026 bp, Glycine max
cacgcgtccggaattcggctcgagagacagaggagagagaaagagagggagtaagtgggtaaaggaaagaaaactaaagaaacaaacctaacacaacacaaatccttgaaacgacgacggaaatggccgtttcgagctcgcacatgcgtttcacctttgagtgccgctccgatcccgatttctcgccccccccgccgtccttcgacaacctccgccgccgaaacttccgctcctccgcaggatccggcgcggcgtttcacggcatctcctccctcatcctccgcttccctcccaacttccagcgccagctaagcaccaaggcgcgccgcaactgcagcaacatcggcgtcgcgcaaatcgtcgccgcttcgtggtcgaacaacagcgacaactctccggccgccggggctccggcgccgcccgcggccaccgccacggacgccgctacggtgcctctccccgtcgtcgtcgccgccaacgaggacgtcgttgtctccgccgcggcagacgagaacggggctgtacagttaaacagtagttcttattcttcatttttgaaatccgatgcaagcaaaacgattcatgccgctgaaagactgggtaggggtattgagactgatggaattaccacccctgtggttaacacttctgcctacttttttaagaaaaccgctgatctcattgatttcaaggagaatcgtcaagtgagttatgaatacgggcgctatggaaacccaacgacggtggttctggaggagaagataagtgcattggagggggccgaatcaactgtgataatggcgtctgggatgtgtgctagcgtagtcctgtttatggcactggttccagctggtggacatcttgtgaccactacggattgttataggaagactagaatattcattgagacttttcttccaaagatggggatcacgaccactgtaattgatccagcagatgttggagccttggaatctgcattggagcagcacaatgtgtctctattcttcactgagtctcctaccaatccattcctgagatgtgttgatattaagctggtttcagagctttgccacaagaaggggactttgctctgtattgatggtacatttgcaactccattgaaccagaaggcccttgcccttggcgctgatctgattctgcactccttaacaaaatacatgggtggacatcatgatgtccttggtggttgcataagtggttcaattaaggtggtttcgcaaattcggactttgcaccatgttttgggtggtacacttaacccgaatgctgcatacctattcatcagaggcatgaaaacgctgcatctccgtgtacagcagcagaattcaacaggaatgaggatggccaaacttttagaggcacatcccaaggtgaagcgggtctactatccaggcttgccgagtcaccctgaacatgagcttgccaagaggcagatgactggtttcggtggtgttgtcagttttgagattgatggagatctacataccacaataaaatttattgattcattgaaaatcccatatattgcggcctcgtttggtggctgtgagagcattgtggatcaacctgctattttgtcttactgggatcttcctcagtcagaaagggccaagtacaagatttatgacaacctggttcgcttcagctttggagttgaagattttgaggatttgaaggctgatgtcctgcaagctctggaagctatatagacagttttcctgattcacccaagtttttttcttttataattgtgctatttgtttgttatcacatctggcgattcaattgaattttgatcgtctaatgttctgttggaattgtgttaagatgaatggtctctaatttggatgttatgaaacttgtgatgaattgttgaaattgaaacctctatttgatgaaaaaaaaaaaaaaaagggcggccgctatcaaagcaggatatctgagaattggaaaatgataaatggtatgaaagcagtttcgtgtgaaatttgcacgaatgtat

SEQ ID NO: 133 - DNA, 546 bp, Glycine max
cagttttgagattgatggagatctacataccacaataaaatttattgattcattgaaaatcccatatattgcggcctcgtttggtggctgtgagagcattgtggatcaacctgctattttgtcttactgggatcttcctcagtcagaaagggccaagtacaagatttatgacaacctggttcgcttcagctttggagttgaagattttgaggatttgaaggctgatgtcctgcaagctctggaagctatatagacagttttcctgattcacccaagtttttttcttttataattgtgctatttgtttgttatcacatctggcgattcaattgaattttgatcgtctaatgttctgttggaattgtgttaagatgaatggtctctaatttggatgttatgaaacttgtgatgaattgttgaaattgaaacctctatttgatgatattcttacccgtttttcctacaaatatcaaagcaggatatctgagaattggaaaatgatacaccgtatgaaagcagtttcgtgtgaaatttgcacgaatgtat

SEQ ID NO: 134 - DNA, 441 bp, Glycine max
aggtgaagcgggtctactatccaggcttgccgagtcaccctgaacatgagcttgccaagaggcagatgactggtttcggtggtgttgtcagttttgaggtgggaatttgacaagttgctattcaaacatgtggtttcctaataacactattttttttttcttttatcaagaatggtgtattggataacatcatgtgccatattttttttatagttaaattgccaatattgcagattgatggagatctacataccacaataaaatttattgattcattgaaaatcccatatattgcggcctcgtttggtggctgtgagagcattgtggatcaacctgctattttgtcctactgggaccttcctcagtcagaaagggccaagtacaagatttatgacaacctggttcgcttcagctttggagttgaagattttgaggatttga

SEQ ID NO: 135 - DNA, 494 bp, Glycine max
ttttactgttgtcttgggcccttgcaattataaatttataattgttatagatttgtcatatatatgtaacatactttccctttgatgaacagaccactgtaattgatccagcagatgttggagccttggaatctgcattggagcagcacaatgtgtctctattcttcactgagtctcctaccaatccattcctgagatgtgttgatattaagctggtttcagagctttgccacaagaaggggactttgctctgtattgatggtacatttgcaacaccattgaaccagaaggcccttgcccttggcgctgatctgattctgcactccttaacaaaatacatgggtggacatcatgatgtaagttggcatgttcaagatttagtttgatggaaaaacaacacaaatatgttacatttcaggtgttcagagttaagcgtcaaggagcatttttcctctttcaggcccttggtggttgcataagtggttcaactaagg

SEQ ID NO: 136 - DNA, 1751 bp, Glycine max
gaattcggctcgagaattaagcaacattttactgggtatataagtggagagtgtaactgaaattatgtggaggtgcatcaatggaagaattgccagaagatttttatccacttcttctgccagtgcccgtggttggtgggaccatgtaaggccagcaccgaaggaccccattgttcgtgtgaacgaggcatttctagctgacccttttccccataagatcaatcttggaataggtacttataagggtgatgatggcaaagctttcattcctcaaagcgttcgtgaggcagaaacaaagattcagagatgtaaattggaggagtcaaacgcttccgcagtcagatcaaaatttgttcaggagtgtgtgagattagcatatgggaatgattcaaatgttgtaagagaaggattgtttgcaggagttccaactctgtctggaaccggtgcatgtcggctttttgctgaatttcaacggcatttctatcccgattctcaaatgtatctaccagatcctacttggtcaaatcaccacaatatatggagacaggctgaaattccagtcaaaaccttccactactaccatccagatacaaagggtttagattttgctgcactcctcaatgatgtcaagaatgcaccagattgttctttcttcttgcttcatccgtgtgcccacaacccaactggtgttgaccccactgaggagcaatggagagaaatatcataccagttccaggtaaaaaatcatttcccattctttgacatggcttatcaaggattttcaagtggggatcttgacaaggatgcaatagcacttcgaattttccttgaagatgggcatttgattggttgtgctcaatcttttgcaaagaacatgggattatcagaacataaagctggttgtcttagtgttttgtgccagagtataaagcaagtagctgcactaaaaagccaactgcagctgatgtcccatgcaatgtatagcagcattccttttcagggtatttcactagttactatgatattaagcgagccagatacagaagcactttggagaaaagagataaaggtcatggctaaacggattcaaactatgcgaactaccttgcggcattgtcttgagaacttgcattcatctttcaattgggagcacataactgatcaggttggcatgttctgtttttctggattaacccctgatcaggttcaacagatggagaagctgttccatatatacatgacccctgatggaagaatgagcatgtcaggtgtgacctctagcaatgtggattacttggcaaatgcaatacatcaggtgaccagaatcgatgaggaagccctaagatcatgttacgtatagcattattagtccttttctaccttattctgatcatagggtacataaccatttttttctcttttgtaattatctatgtacctgatatacatcataccaatttagtgaaaatattgaagtcaatatttttggaccatcgtggatattactctaaaaaaattatttgtaaacacagccacatattaagtgatgaatgaaataacagatttacgtatgcctcttgaaaaaatagttatgcatcttgacttgcaacagctatgaataagcttttcttgtccaagttggtctagttttctttctttgtctccaataaaatcttcagttggtgaggccaagataatatataaaacttaagttgtaagtgaaaaaaaaaaaaaaaaaaaagggcggccgc

SEQ ID NO: 137 - DNA, 699 bp, Glycine max
tcggacgcttgggtttgcaatgcatatacagtttttcaatatctgcaaaaagtttgtatgctgtagtcaccacaatatatggagacaggctgaaattccagtcaaaaccttccactactaccatccagatacaaagggtttagattttgctgcactcctcaatgatgtcaagaatgcaccagattgttctttcttcttgcttcatccgtgtgcccacaacccaactggtgttgaccccactgaggagcaatggagagaaatatcataccagttccaggtaaaaaatcatttcccattctttgacatggcttatcaaggattttcaagtggggatcttgacaaggatgcaatagcacttcgaattttccttgaagatgggcatttgattggttgtgctcaatcttttgcaaagaacatgggattatcagaacataaagctggttgtcttaggtaagaatagtcctatatcctagtgagtagagattcagaggcagagcatattctatgacacgtataatagaagttagatgtcaaacatgttccataacgcatttttgaggcaaggttcaagtacatgatattatgattgttataacatgaagctcaactttgtaataatattgccattatgtttaactattttgcttcttatgttcttttcagctttactaatctacaataaaatctatacagtgtttt

SEQ ID NO: 138 - DNA, 1661 bp, Glycine max
gtcgacccacgcgtccgtacggctgcgagaagacgacagaagggggtgtaagacaagtttttctgaaagcaacaaatagaaaaagaggttgggacatggaatagaaattggattctggcctcctccctctgttttaaaatccatcagcagccgccaactctctcaataaaacctgctttctatttttctcaacctaaaatcccatccaccaaccttatgatgatgtcttcactctctgtttcgcgccacaaccacctcttctcgggccctctcccggcccggcccaagcccaagcccagcttttcctcttccaggatccgaatgtccctccaagaaaacggcccctccatcgccgtcgtgggcgtcaccggcgccgtcggccaggagttcctctccgtcctctccgaccgcgacttcccctacagctccatcaaaatgctcgcgtccaagcgctccgctgggcgccgcatcacctttgaggacagggactacgtcgtggaggagctgacggcggagagcttcgatggcgtcgacatcgcgctcttcagcgccggcggctccattagcaagtacttcggccccatcgccgtcgatcggggaacggtggtcgtcgacaacagctccgcgtttcggatggacgagaatgtcccattggtaattcccgaagtgaacccggaagcaatgcaaaacatcaaagccggaactggaaagggcgcactcattgctaaccctaattgctccaccattatatgcttgatggctgctacccctcttcatcgacgtgccaaggtgttacgtatggttgttagtacctatcaggctgctagtggtgcgggtgctgctgcaatggaagagcttcagctgcaaactcgtgaggtgttggaaggaaaaccgcccacttgtaaaatatttaaccgacagtatgcttttaatctattctcgcataatgcgtctgttctttcaaatggatataatgaagaagaaatgaaaatggtcaaggagaccaggaaaatctggaataataaggacgttaaagtaactgccacatgcatacgagttcctgtcatgcgagctcatgctgagagtgtgaatcttcaatttgaaacaccccttgatgaggacactgcaagagatattctgaagaatgctccaggtgtagtggttattgatgatcgtgaatccaatcattttcctactccattggaagtttcaaacaaggatgatgttgctgttggtaggattcgccaggacctatctcaggatgggaaccaagggttggacatctttgtatgtggggatcaaattcgcaagggagctgcacttaacgcaatccagattgctgagatgttgctatgagatctggtttttaaaggatgtggtacttgaagactatgcttcttttgaaacagttttgtatcttctagttgtatgaggttattcatttcttttgtgagaaagtacgaggatcttttcaacgatgtggtagcacactaactggaaacagtttttttaaggttttgtgcttaatttctgtaatccttatcaccgggaataacaataattggttatggcaaaggagaatcacctaatgtttcatcttttgaataaagaatttgttcactaaaaaaaaaaaaaaaaaaaaaaaaaaaaaaagcggccgc

SEQ ID NO: 139 - DNA, 556 bp, Glycine max
  unsure (1)..(556): unsure at all n locations
cgctcgagccgaatcggctcgagatggaattggcagacaagttggagcgtggtggtctgttttccaatccaacacttaatctctctcttcgcagcctaaaatcccaatggcttcactctctgttttgcgccacaaccacctcttctcgggccccctcccggcccgccccaagcccacctcctcctcctcctccaggatccgaatgtccctccgcgagaacggcccctccatcgccgtcgtgggcgtcaccggcgccgtcggccaggagttcctctccgtcctctccgaccgcgacttcccctaccgctccattcatatgctggcttccaagcgctccgctggccgccgcatcaccttcgaggacagggactacgtcgtccaggagctcacgccggaaagcttcgacggtgtcgacatcgcgctcttcagcgccggcagctccatcagcaagcacttcggccccatcgccgtcaatcgtggaacggtcgtagtcgacaacagctccgcgtttcggatggacgagnaggtgcctttagtaattcccgaagtgaacccc

SEQ ID NO: 140 - DNA, 1590 bp, Glycine max
gcgtgaggtaggtgaagacctctcggacttggaacgcagaacgaatgattcatcaatttaggagagttttggccgccaaataagaattcggctcgagcggctcgaggtcccaacgctaaaccaaaccaaaactaaaacaatgttgtctgtctgagtttacattgagagtgcccaagttcgaattcgaaagcaaaaacatgtttttggcgagacccattttccgaggaccctccctttgggcgttgcactcttcctatgcatattcctctgcctctgcagctgctattcaagctgagagaaccatcaaagaagggcccagaaacgattggagccgagaccaagtcaaatccatctacgactctcccattctcgatcttctcttccacggggctcaagttcacagacatgctcataacttcagggaagttcagcagtgtactcttctgtctatcaaaacaggagggtgcagtgaagattgttcctattgtcctcaatcctctaagtatgatacaggagtcaaaggccaacgccttatgaacaaggaagctgttctccaggctgcaaagaaggcaaaagaggctgggagcactcgcttttgtatgggtgctgcgtggagggatacactaggaagaaagaccaacttcaaccagatccttgaatatgtgaaagacataagggacatgggaatggaggtttgttgcacccttggcatgctggagaaacagcaggctgttgaactcaagaaggcaggtctcactgcttataatcacaatcttgacacttcaagggagtattatccaaacataatcacaacaaggacttatgatgagcgtcttcaaacccttgagtttgttcgggatgcagggatcaatgtttgttctggaggaattatagggcttggagaagcagaggaggatcgtgtaggtttgttacatacattgtcaacactccccacccatccagagagtgttcctattaatgcacttgttgctgtaaagggaacccctcttgaggatcagaagcctgttgaaatatgggagatgattcgcatgatagcgactgcacgtatcataatgccaaaagcaatggtaagattatcagctggcagagttcgattctccatgcctgagcaggcattgtgctttctggccggtgcaaattctatattcactggtgaaaagcttctcactactcctaataatgattttgatgctgatcaactcatgtttaaagttcttggactcctcccaaaagctccaagcttaaatgaaggtgaaactaatgtgacagaagattataaggaagcagctttttctagttgagctgtcaacggtttttaaaaagtgtgatctttcaatttctctaattgctcattagcatgtactgatgttaggtttcattgaattttgtctattctcagctttgaagacacaaactccaacagttaaaaataaatattgaaattatttatttttcaaaaaaaaaaaaaaaaaaagggcggccgctaaatgtaaaaaagatgttgacccttttcagcgtgatcattctaaaattatgccccaatatcatggtggtggttggagttttgcc

SEQ ID NO: 141 - DNA, 412 bp, Glycine max
gaggtgaagactgaagaggtagctagtactgctccctctgcgacttcgtttcgtagagggattttggccgccaaataaacagtctcaccataaactccaaagtcccaacgctaaacgaaaccaaaccccaaacacaaataccgttgttgtctgttgtctctgtcgtgtctatattcgcagatctctcactcattctctgttgtttctctgcccaacttcgaattcgaaagcaaaaacatgtttttggcgagacccattttccgagcaccctccctttgggcgttgcactcttcctacgcgtattcctctgcctcagcagctgcaattcaagctgagagagccatcatcgaaggacccagaatcgattggggccgagaccaagtcaaatccatctacgactctcccattctcg

SEQ ID NO: 142 - DNA, 259 bp, Glycine max
ctctcggacttggaacgcagaacgattgattcagcaacttaggagagttttggccgccaaataaacactctcactattaactccaaagtcccaacgctaaaccaaaccaaaactaaaacaatgttgtctgttgagtttacattgagagtgcccaagttcgaattcgaaagcaaaaacatgtttttggcgagacccattttccgaggaccctccctttgggcgttgcactcttcctatgcatattcctctgcctctgcag

SEQ ID NO: 143 - DNA, 2485 bp, Glycine max
ccactcgggacaagcatctgctagaatgtcatgaggttgaaagaacttatgaggtgaaggttttgaatcacaatgctgcgaattcggctcgagctcgagccgcttttaaaagagaaaaaattgatccaagttatgaggatgtcttgaatcgtgtagtaacttatgcttctggccttccattggctttggaagttataggttccaacttgtttgaaaaaactgtagcagaatgggaatctgctatggaacattataaaagaattcccagtgatgaaatccaagagattctaaaagtaagctttgatgctttgggggaagaacaaaagaatgtttttcttgacattgcttgttgcttcaaagggtatgaatggacagaggttgataatatactccgtgacctttatggtaactgcacgaagcatcatattggggtgttggttgaaaaatctctcgtaaaggttagctgctgtgatactgttgaaatgcacgacatgatccaggacatgggtagagaaattgagcggcagagatcaccagaagagccagggaagtgcaagagattattggttaccaaaagatatcattcaagttttaaaagacaacacggggactagtaaaattgaaatcatatgtctggatttctccatatctgacaaagaagaaacagtggaatggaatgaaaacgccttcatgaagatgaaaaaccttaaaatacttattattagaaattgcaaattttccaaaggtcccaattattttccagaaggtttaagagtactggaatggcacagatatccttcaaattgtttaccatctaactttgatcctatcaaccttgttatatgcaagttacctgacagctccattacgtcatttgagttccatggctcatccaagaagctcgggcatctaacagttttaaattttgaccggtgcgaatttttaacaaagatacctgatgtatctgatctcccaaatttgaaggaactttcatttaattggtgtgagagtttagttgcagttgatgactcaattggttttctgaataaacttaaaacattgagtgcttatggttgcaggaagcttacgagttttccgcctctcaacttgcctctcttgaaacacttaacccttggtgggtgttcgagtcttgagtattttccagaaatattaggagagatgaaaaacataaccggacttgctttgcatgaccttcccataaaagaattgccattttcatttcaaaatcttattggactcctgtttttatggctggatagttgtggaattgttcagttacgatgtagcttagccacgatgcccaaactgtgtgaattctgtataacggatagttgcaacaggtggcaatgggtagaatcggaagaaggtgaagaaaaagtagtgggctcaatactatcttttgaggccacggactgcaatctatgtgatgattttttttttataggttccaagaggtttgctcatgtaggatatttaaatctaccggggaataatttcacaatccttcctgaattcttcaaagaactgcaatttttaacaactcttgtggtgcatgattgcaagcatcttcaggaaattagagggcttccaccaaacttaaagcatttcgatgcaagaaactgtgcatccttgacttcctcgagtaaaagcatgcttttaaatcaggaactgcatgaggctggaggaatcgagtttgtatttccaggaacaagtataccagagtggttcgatcagcaaagcagtggacattcaatttctttctggtttcgtaataaatttccagccaaacttctttgtcttcatattgcaccgtctactgggtcttttatccggtatccagaggtgttcatcaatggaaaatttcaagaatttgagtcccatgagacggacgatacagaaagtatgttgggattggatcatacacatatctttgatctccaagcgtatgctttcaaaaataataatcagtttgaagaagtggcttgggaaaaggaatggaaccatgtggaggttacatatcaaagtgtgttagacgatgaagaagaagagagtgaagaaggtgtgttagacgatgaagaagaagagagtgaagaaggtgtgttagacgatgaagaagaagagagagaagaaggtgtgttagagttagagagctcagtcattaaagcaattggaatccatatagtcagagaagaaggcagtatggaggaagatattcgatttgatgatccttatctcagcagctctgcatcagactacaaaccatagctttggggacacgcaagttttccatagcttttttcttttttttttttattttattattttggtttccgttgtcaaaaattcacttaacccaacttctgttcaccctatcttcatcatgtacttttgacgcatttttatatattcatttttcacgactttatgcattttctatatataacctttcaagttttatctttct

SEQ ID NO: 144 - DNA, 1172 bp, Glycine max
  unsure (1)..(1172): unsure at all n locations
catgacttgattcaggacatgggcaagcgaatagaccaagaatcctcagaagatccagggaagcgaaggagattgtggttaacaaaagatataattgaagttttagaaggcaactcgggaagtagagagattgaaatcatatgtctggatttatccttatccgagaaagaagcagcaatagaatgggaaggagatgccttcaaaaagatgaaacaccttagaatacttattattagaaatggtaaattttccaaaggtcccaattattttccagaaagtttaagattactggaatggcaccggtatccttctaattgtttaccatctaattttcctccgaaggaacttgccatatgcaagttacctcaaagttgcattacgtcatttgggttccatggctcaaggaagaagttcaggaagctaaaggttctgaaatttgactattgtagaattttaacagagatacctgacgtatctgttctcgtaaatttggaagaactttcatttaatcggtgtgggaatttaattacagttcaccactcaattggttttctaaataaacttaaaatattgagtgcttatggttgcagcaagcttaccacatttccacctctcaacttgacctctcttgaaggacttcaactttcagcttgctccagtcttgagaattttccagaaatattaggagagatgaaaaacttattgatgcttcaattgttgggccttcttggcgtaaaagaattgccagtttcatttcaaaatcttgttggactccaaagtttaatcctgcaagactgtggaattgttctgttaccatgtagctttattgccatgatgcccgaactgtcttcattcctcgctgattattgcaacaggtggcaatggatagaattggaagaaggtgaagaaaaattgggctcaataatatcttcaaaggcacaattgttttgtgccacgaattgcaatctatgtgatgattttttcttagcaggtttcaagaggtttgctcatgtangatatttaaatctatcggggaataatttcacaatccttcctgaattcttcaaagaactgcaatttttaagaactcttgacgtgagtgattgcgagcatcttcaagaaattagagggcttccaccaatcttagagtantttggtgcaagaaactgtgt

SEQ ID NO: 145 - DNA, 839 bp, Glycine max
gaattcggctcgagagatattgtcatgcactctgctacaaaatttattgctggacatagtgacattatggctggtgtgcttgctgtgaagggtgaaaagttgggaaaggaattgtatttcttgcaaaatgcagagggttcaggcttagcaccatttgactgttggctttgtttgcgaggaatcaagacaatggccctgcgaattgaaaaacaacaggataatgcacagaagattgctgagttccttgcctcccatcctcgagtgaagaaagtgaattatgctggcttgcctggtcatcctggtcgtgatttacactattctcaggcaaagggtgcaggatctgtgcttagcttcttgactggttcattggaactttcaaagcatattgttgaaactaccaaatacttcagtataaccgtcagctttgggagtgtgaagtcccttattagcatgccatgctttatgtcacatgcaagcatacctgctgcagttcgtgaggccagaggtttaactgaagatcttgtacgtatatctgtgggaattgaggatgtgaatgatctcattgctgatcttgacaatgcacttagaacagggcctctttaatgttttttttgtctaaatattcatccttaggaagttgcattggcaagatgttagttagcatgttgaggatttgagagcatgcattgttatcttttctttggattcttgtgagtggaaatttgatgtgtttcttacgtgcatgtaataaaatccgtatttcctgtaattttcttgttacaattgttatcctcaccttcaaaaaaaaaaaaaaaaaaaaaaaaaaaaagggcggccgc

SEQ ID NO: 146 - DNA, 2056 bp, Glycine max
cccacgcgtccgaaaaaacaattaggatttgttaataaaagcgtaggctttcggttttccacatcgtagatctggagtgagtcgcggcggcggctggcaagtagtagtattaaaaaagttgatgggataattggcattggttgagtttggttcaaattgagaaaatcattactccattaaccattcattcaccaatcctccatggcttcctcttctctgtttcagtctctccctttctctctccaaacctctaaaccctacgcgcctcccaaacccgccgcccacttcgttgtccgcgcccaatcccccctcactcagaacaacaactcctcctccaagcatcgccgccccgccgacgagaacatccgcgacgaggcccgccgcatcaatgcgccccacgaccaccacctcttctcggccaagtacgtccccttcaacgccgactcctcctcctcctcctccacggagtcctactcgctcgacgagatcgtctaccgctcccaatccggcggcctcctggacgtccagcacgacatggatgccctcaagcgtttcgacggcgagtactggcgcaacctcttcgactcgcgcgtgggcaaaaccacctggccttacggctccggcgtctggagcaaaaaagaatgggtcctccccgagatccacgacgacgatatcgtctccgccttcgagggtaactccaacctcttctgggccgagcgtttcggcaaacaagttcctcggcatgaacgatttgtgggtcaaacactgcggaatcagccacaccggcagcttcaaggatctcggcatgaccgtcctcgtcagccaggtcaatcgcttgagaaaaatgaaccgccccgtcgtcggtgttggttgcgcctccaccggtgacacatcggccgctttatccgcctattgcgcttccgctgccattccttccattgtgtttttgcctgctaataaaatctctcttgcccaacttgttcagcctattgccaatggagcctttgtgttgagtatcgacactgattttgatggttgcatgcagttgatcagagaggtcactgctgagttgcctatttatttggctaactctctcaacagtttgaggttggaagggcagaagactgctgctattgagattctgcagcagtttgattggcaggttcctgattgggtcattgtgcctggaggcaaccttggcaacatttatgccttttacaaagggtttaagatgtgtcaagagcttgggcttgtggataagattccaaggcttgtttgtgctcaggctgccaatgctgatcctttgtatttgtactttaaatccgggtggaaggagtttaagcctgtgaagtcgagcactacatttgcctctgccattcaaattggtgatcctgtttccattgacagggcggttcacgcgctaaagagttgcgatgggattgtggaggaggccacggaggaggagttgatggatgctacagcgcaggcggattctactgggatgtttatttgcccccacaccggggttgctttaactgcattgtttaagctcaggaacagcggggttattaaggccactgataggactgtggtggttagcactgctcatggcttgaagttcactcagtccaagattgattaccattctaaggacatcaaggacatggcttgccgctatgctaacccgcccatgcaagtgaaggcagactttggctcggttatggatgttttgaagacgtatttgcagagtaaggctcattaggttagcattgcaagttttgctcctcctgagtttgctcattatttacttacttttaggcactactgctgtattgtcttttctatgagctaggtttgagtgttgtaataatttgcttgctgcattatgtatgccgtctagtgttccatattggggcatccttagtatttgttgtagattttctttgctgagcatttgatataatagctcaagtaggaaaatgaattgggtactatgaggaatgcatatcattggcttgttattaaaaaaaaaaaaaaaaaaaaaaagggcggccgc

SEQ ID NO: 147 - DNA, 2431 bp, Glycine max
gtccggcatcaaaatcagtctccaaactctgctgatgtcagggaaggagaatattaggcggagcagatcgatagaaacgcagagtagcattctgggacgtggatacgaacattgaattcggctcgaggaaaattgaactgctcaaggatggcatgtcggtccttgtcttgactggtttgcctggatccggcaaaaccacactggctaagaagatctgttgggacactgacatcaaaggcaagttcggggtaaacatatttgtcacagtctccaaaacacccaacttgaagagcattgtagggacagtgtttcatggctgtagacgtccggtgccggagtttcaaagtgatgacgatgcaattaaccgattaagagctctgctgctgagtgtggggggaaatgataaaaatccaatattattggtcttggatgatgtttggcctggctcagaagcccttgttgataagtttacagtccaaataccttattataagatcttggtgacttcaaagggttgcatatccaagatttggcaccaagattttgttgggtcaacttgatcacaatcaagcagtggcccttttcgctcactatgctaaactaaatgacaatagctcatacatgcctgaagaagatcttttacacgaggtgcttactcttttaattgatcacaatcgaacagccttttatcttattcactgatttgctctgaaactaatattgcagatcgtgagacgttgtatgggttcaccattggtgcttaaggtcactgccggatcactctgtgggcagccttttgagatgtgggaaaaaaagaaggatcgtttacaaaatcaatccaaaatggaatttagtcaaactgatttgttttgtcatcttcaacgaagtttagatgcgttggaggatgagttccacatccacgaaaaggtgtgcttcatggatctagggcttttccctgaagaccaaaggatccctgttcctgccctcattgatatgtgggcagaactgtatgaacttaataacgatggtagcaacgcaatggccatcatccatgatttaaccaccaggaatttgattaatttcatagttacaaggaaagtttcaaaggatgaagacaagtactacaataaccactttgtaattctacatgatctccttagagagttagcaatccgtcaaagcacagagaaaccatttgaacaagacagactgattattgacataacgggaaatgattttcctgaatggtgggtgggagaaaatcagcaaggaaccatcggccaaatgttcccatgtttctccagaatgataagacagaaacagctaaaggttgctgcccgcatattgtgtatttcaactgatgaaacgtttaattcagattggcgtgacatgaaaccttacaacactgaggttctgattttaaatcttcactctagccaatactcattaccgtgttttacaaagaagatgaaaaaacttaaagttctgatagttacaaattatggttttcatcgttctgagataaagaagtttgagctgcttggttctttatctaacttgaaaagaatcagattggaaaaggtttcagtcccttccctctgcgaattgaagaatttgcaaaaattgtctcttcgtatgtgtaatacaaggcaggcttttgaaaactgttctatccaaatctcaaatgcaatgccatatcttgaggaaatgagcattgactattgcaatgatttgattacattacctgatggactgtgtgagattagcccattgaagaaacttagtatcactaactgccacaaactttctgcactgccacaaggtattggaaaactggagaatctggaagtgctaaggctatgttcctgctctgatttgctagagatgccaaattcttttgaagggcttaacaagctaagctgtcttgacatctcagactgtgtaagtcttaccaaattaccagatgatattggtgagttgaagaagcttaagaagctatacatgaagggttcaaaactgggtgaattaccatactccgtccataagtttgaacaatttaagcatgaaataaatgtgatctgtgacgaagaaacggttaccttatgggaaaattttcgtgcctttcccaatttgaagatagagatatttagagaggacattgacttgaattggcttcatggagttcattcctgagacttgtttcctgaaattgattgtgactcagcatcatgttgggattggagaacgatgttcgtctagtgaaaaacacgagtttgtgttagcatcaatgtggaatgtgttgaaagaacattcatgtgttattttagcatggtcatttatactttttgttatcaaaaaaaaaaaaaaaaaaagggcggccgcaaaaaataaaaaagggagattgtcgtgtatgacatcttattttataatt

SEQ ID NO: 148 - DNA, 549 bp, Glycine max
cgtaccctttaactattctcaacgattaaaaaattaaatttcgcaactgttttggaaatgtatggactaataagaaatactcctgcgctgtgccatacttcatcttccactgttgctcgcatatttgctgcctctgctgatgaaacgtttacttcagattggtgtgacatgctacctgatgaagctgaggttctagttttaaatcttaactctagccagtacccattaccgaagttcacagaaaatatgagcaaacttaaagttctgatagtcacaaattatggtttccatcgttcagaattaaacaattttgagctacttggttctttatctaacttgaaaagaatcagattggaaaaggtttcagtcccttccctctgcatattgaagaatctgcgaaaattgtcccttcatatgtgtaatacaaggcaagcttttgaaaactgttctatccaaatctcagatgcaatgccaaatcttgtggagatgagcattgactattgtaatgatctggttaaattgcccgatgggctgagtaacatcacccca

SEQ ID NO: 149 - DNA, 1167 bp, Glycine max
cggctcgagcggctcgagctcgagcgaattcggctcgaggcaagaagaaagcagagcctctactacatcatcacattcacatttcagtaccttctctttctcccagtctctcacacacaacaattgaagaagaaaatggttgacaatgattcgctctcggaattcctcgcatctgcggtcgacgcggctcagaaagctggcgagattattcgaaaaggcttctaccagaccaaaaatgtggaacacaaaggacaggttgatttggtcacagaaactgataaagcatgtgaagaactcatatttaatcatctgaaacagctttatcccactcacaagttcattggggaagagaccacagctgcctatggcactacagaacttacggatgaacccacatggatagttgatcccctggatggaactactaactttgtgcatgggttcccctttgtttgtgtctccattggtctcacaattggaaaaactcctacaattggtgttgtatacaatccaataattaatgagctttttactggaatccatggaaaaggtgcctttttgaatgggaatcccataaaagtatcgtcacaaactgaactaatcagctctcttcttgcaactgaggctggaacaaaacgtgacaaagaaacagtagatgcctctaccgataggattaaaagcttacttttcaaggtgagatctcttcgaatgagtggctcctgtgctctgaatctgtgtggaattgcatgtggaaggctggatgtattctttgaacttggctttggtggtccttgggatgtagcaggtggtgctgtcattgttagagaagctggaggtgttgtatttgatccgtccggtgcagattttgacataacatctcagcgagtagcagcttcaaaccctttcttaaaggatgcacttgttgatactctgcgccaaatggtgtgagaaatttactattaatcaatggcaagaacttatcatataagccatctttgttagttcgtttagcttttgctcaaataattttttagattctcagttttaagtaaaagttgcatgataaaaatgttttagaatttttaacttcttctgtggattcagagtattcaataataaatcactttaaatcctttcaaaaaaaaaaaaaaaaaagggcggccgccg

SEQ ID NO: 150 - DNA, 1065 bp, Glycine max
gatcgcgatcgaattcggctcgaggggtgcgcttcaagttgaagttctcaatctgattgcaaaggagaaaatgggtgataatgattcgctctccgaattcctcgcatctgcagtcgacgctgcttgcaaggctggtgagattattcggaaaggtttctatcagaccaagaacgtgcagcacaaaggactggttgatttggtcactgaaactgatcaagcatgtgaagatctcatatttactcatctcaagcaactttactccactcataagttcattggggaggaaaccacagctgctggtggcaatgcagaacttacagatgaacccacgtggatagttgatcctctcgatggaactactaattttgtgcatgggttcccctttgtttgtgtctccatcggtcttacaattgggaaagttcctacagttggcgttgtttacaatccaataattaatgagcttttcactggaattcgtgggaaaggtgcttttctaaatgggaaccctataaaagtatcatcacaaactgaactaatgagcgctcttcttgtgactgaggttggaacaaaacgtgacaagttaacaatagatgcctgtacaaataggatcaatagcttgcttttcaaggtgagatcccttcgaatgactggctcctgtgctttaaacctttgcggaattgcatgtggaaggctggatgtatgctttgaacttggctttggaggtccttgggatgtggcaggcggtgctgtcattgttagagaagccggaggtgttatatttgatccgtctggtgcagattttgacatcacatctcagcgggtggcagcttccaaccctttcttgaaggatgcccttgttgatgttctgcaccaaatcgtgtgagaagcttactattaatcaatgacaaggagaaattgagtcagccttatgttaattcatttcccttttgttaaaatgctttgaattgtgggattcatggcgtcaattatttttctaattctcttgtgaccttaccaaaatattagtatttattctttaaaaaaaaaaaaaaagggcggccgccg

SEQ ID NO: 151 - DNA, 506 bp, Glycine max
cccacgcgtccggaactggatagacagagtgtagtacgtgaaaaggaaagcgcaagaagaaagcacagcctctactacatcatcccatttcagtaccttttctttctgagtctcagtttcaacaattgaagaagaaaatggttgacaatgaatcgctctcagaattcctcgcatctgcggtcgacgcggctcagaaagctggcgagattattcgaaaaggcttctaccagaccagaaacgtcgaacacaaaggacaagttgatttggtcacacgaaactgataaagcatgtgaagaactcatattttataatctcaaacagctttatcccactcacaagttcatcgggggagaaaccaccgctgccggtggcaccgcagaacttacagatgaacccacctggatagttgatcccctcgatgggactactaattttgtgcatgggtaaatcaaatatccatctaatgttttcattgatacattcatattttcatatcatatggattg

SEQ ID NO: 152 - DNA, 1353 bp, Glycine max
gcggccgcttttttttttttttttttttttttttttttagcatgaaaatggtgcatatgtaacatttgagttttgattaagagggacttgacaaacaactagacatagacatggatccctgcctactaagattgacagtcaaggatttagctttgctagtatacaattttttgacattagcactttggtcttgcattaacctagctaagcttcttttagcattggatctgaaaggacaattggaggccaagaacccatccaccaagtgcaagtaagcctccaagtcatgacaacacgccatgtcagcatcgggcttaagatatggcgacatcttggtgtgcacacgcagctctgttcccacgtgcgagtatgctaagggcgtgttctcctccaacacacccccaccaacgttccgtattttctgttcaagctcttcgctcacaaagatccctggaactctggtaatcacgtcttgcgagttcactattcttagaactgtgacgtttttagcggttaagcgatccccaaaggccttgttaccaacacgaggccctccgaaggagaaaacagccacgggtggaactttggggcagcacgtgcttatctcgtcagccaccaataaggctagcgtcgcaccaaggctgtgccctatcacactgatgctcaactcttctcctctgtaaagatcaatcagtctcctcacttcttctacaacggattctgccagactcgccacctgtgctccttttgttttgtacaagctcatgaacccgcactctactttggcttttccttcttcgtctcccatttccaccatatgggccctgagattctccgcccattccatacacgtggaagttccacgaagagagattataatgtctcttcttcccatccgtgctatttctcttctatcctcgcaaacagccacgtatccgacccagcttgatctctgggtcatccatcccagatccggtgccacttcatcaacccatttgggtaaaccaattgatgatgttgcatagaggcttttggtcattcggtatgatctatctggaagtgccacgtgttgtggatgtggcggctcctccgttgacatggcggggtctgaatggaaggcttgatacgcggcttggacgaattcgccgtagcgaacgacctctcgccggagattctcgtctagagggtctaacatccctttccagtcgttgctgccgtgatattctctccagcggccgccgaggatgttcctcggggaatactcccccgtcatggagaggaggcgctggaggcgtttgaggtggcgcggggaccccttctgtcgtcttctcgcagccgtctcgagccgaattc

SEQ ID NO: 153 - DNA, 1239 bp, Glycine max
gcggccgccctttttttttttttttttttttttttaaagggaagcatatgagttttgattaagatggactaggcaaacaattagacatagacatagatccctgcctactaagattgacagtgagggattttgccttgctagtatacaacttctttacattggcactttggtcttgccggctcctggccaagcttctcttagcattggatctgaaaggacaattggaggccaagaacccatccaccaagtgcaagtaagcctccaagtcatgacaacacgccatgtcagcatcgggcttaagatatggcgacatcttggtgtgcacacgcagctctgttcccacgtgcgagtatgctaagggcgtgttctcctccaacacacccccaccaacgttccgtattttctgttcaagctcttcgctcacgaagatccctggaaccctagtaatcacgtcttgcgagttcactattctcagcaccttgacgtttttggcagctaagcgatccccaaaggccttgttacccacgcgaggcccaccgaaggaaaaaacagccacgggtggcacttgggggcaacacgtgcttatctcctcagccaccaataaggctagcgtcgccccaaggctgtgccctatcacactgatgctcaactcttcacctttgtatagatcgatcagtctcctcacttcttctacaacggattctgctagacttggcacttgtgctccttttgttttgtacaagctcatgaacccacactccactttgggctttccttgggcttcttctgagctatcgttgtcgggcatgtcaatcatatgagccctgagattttctgcccattctagacacgtggaagttcccctgagagagatcacaatgtctcttcttcccattcgtgttatctctctcctgtcctcgcaaacggctacatatcccacccaacttgctcgtgccgtcttccatcctagatccggtgccacgtcatctacccatttgggtaaaccaatggatgacgtggcgtagaggcttttggtcattcggtaggatctatcgggaagtgccacgtgttgggtgtgtggcggctcctccgttgacatggcggggtctgaatggaaggcttgatacgcggcttggacgaattcgccgtagcggacgacctctcgccggagattctcgtcgagagggtccaacatccctttccagtcgttgctgccgtggtattctctccagcggccgc

SEQ ID NO: 154 - DNA, 2014 bp, Glycine max
gcggccgcccttttttttttttttttaacgcaaaacacatttgacattgaattcaacaatggaagtgaacaaatacaaaacacattgatttccagcatccatatacactacagagtggtagtacccctttttttgagacacgaacgaacgtccctactacttaataaccaaagctagacaacaaaacaaaacacacaaacctacataggcaagaggtacatacatcatttatttaatttccccatataaaccacatcacaacaacacattaatgctccctctaatatcagaattactcatcatgcggttgcggttgttgctgtcactgttgttctctttacatcccttgcctccacctttgcatcccttgcagcagcttcccttgcatcccttgcagctgcctcccttgcatcccttgcagctgcctcccttgtatcctgtgccttgctctgaatatcctgcccaacctccttggtcttctgccccacttccttcgtcttctgccccacgtactccgccgcctcggcgaggtgatgcttcgcggcggcggcgaggttctccgaggctggctgggtctcccggatgtagttcaggatccaggagaaggaagacagcgccgtgagcccgaaggcccccgacgtcaggaacccggccacggccaggccgatggcgaccgtggctggaaccagcaccgggctgaagaggacgaagagcggcgtggcaactgccagtccggtgagggttcctgccagggtcaatcccgccaggaggagcaggatgccaccgaccgggaggccggcgaggacggcgaggacctgggaagtcgttggacctctctcggaatggtaaatggagggcgctttgacgccggcttcataacgcggcggttcgaaacgggctccgggggggacgacgccagcttcgtagcggtgtgttgttgtgaattcggctcgagcacagtgccaccacacagtggtcatggttgaaggtgaagtttagggctaacactaatgaagatgatgatccttcaaccatgaccacagtgccaccacacagtgtccaagtgcacacaacaacacaccgctacgaagccggcgtcgtcccgccggctcgttttgaggcgccgcgttacgaagccggcatcaaggcgccctcttccatttaccattccgagagaggtccgacgacctctcaggttctcgcagttgtcgccggccttccggtcggcggcatcctcctgctcctggcaggactgaccctggctggaactctcaccgggctggtggtggcaacaccgctcttcatcatcttcagcccggtgctgattccggccacggtcgcaattggcctggccgtggccgggttcctgacgtcgggagtctttgggctcacggcgctgtcgtccttctcctggatcctgaactacatccgggagacccagccggcgtcggagaatctggccgctgcggcgaagcaccatctggcggaggcggcggagtacgtggggcagaagaccaaagaagtagggcagaaaaccaaggaagttgggcaggatattcagagcaaggcacaagatacaagggaagcagctgcaagagatgcaagagatgcaagggaagcagctgcaagagatgcaagggatgcaaaggtggaggcgagagatgtaaagagaacaacagtgacagcaacaaccgcaaccgcatgaacgtgatgagtattaatgtgttgttatgaacttatgatgttggtttatgtggggaaataaatgatgtatgtacctcttcttgcctatgtagtaggtttgggtgttttgttgtctagctttgcttatttagtaattagtagaagggacgttcgttcgtgtctcataaaaaggggtactaccactctggcaatgtgatttgtatttgatgaattcaatgtgaaatgtgttttgcgttggtgtatgttaaaaaaaaaaaaaaaaaaaaaaaaaaaaaaaaaaaaaaaaaaaggggcggccgcgctgacctac

SEQ ID NO: 155 - DNA, 892 bp, Glycine max
ctctcgagcctttatacccccaactaacaataattccttcacttgcagaacttagttctctgttgcatcatcatcatcttcattagtgttagccctaaacttcaccttcaaccatgaccacagtgccaccacacagtgtccaagtgcacacaacaacacaccgctacgaagccggcgtcgtcccgccggctcgttttgaggcgccgcgttacgaagccggcatcaaggcgccctcttccatttaccattccgagagaggtccgacgacctctcaggttctcgcagttgtcgccggccttccggtcggcggcatcctcctgctcctggcaggactgaccctggctggaactctcaccgggctggtggtggcaacaccgctcttcatcatcttcagcccggtgctgattccggccacggtcgcaattggcctggccgtggccgggttcctgacgtcgggagtctttgggctcacggcgctgtcgtccttctcctggatcctgaactacatccgggagacccagccggcgtcggagaatctggccgctgcggcgaagcaccatctggcggaggcggcggagtacgtggggcagaagaccaaagaagtagggcagaaaaccaaggaagttgggcaggatattcagagcaaggcacaagatacaagggaagcagctgcaagagatgcaagagatgcaagggaagcagctgcaagagatgcaagggatgcaaaggtggaggcgagagatgtaaagagaacaacagtgacagcaacaaccgcaaccgcatgaacgtgatgagtattaatgtgttgttatgaacttatgatgttggtttatgtggggaaataaatgatgtatgtacctcttcttgcctatgtagtaggtttggggaattc

SEQ ID NO: 156 - DNA, 1079 bp, Glycine max
gcggccgccctttttttttttttttttttaacgcaaaacacatttgacattgaattcaacaatggaagtgaacaaatacaaaacacattgatttccagcatccatatacactacagagtggtagtacccctttttttgagacacgaacgaacgtccctactacttaataaccaaagctagacaacaaaacaaaacacacaaacctacataggcaagaggtacatacatcatttatttaatttccccatataaaccacatcacaacaacacattaatgctccctctaatatcagaattactcatcatgcggttgcggttgttgctgtcactgttgttctctttacatcccttgcctccacctttgcatcccttgcagcagcttcccttgcatcccttgcagctgcctcccttgcatcccttgcagctgcctcccttgtatcctgtgccttgctctgaatatcctgcccaacctccttggtcttctgccccacttccttcgtcttctgccccacgtactccgccgcctcggcgaggtgatgcttcgcggcggcggcgaggttctccgaggctggctgggtctcccggatgtagttcaggatccaggagaaggaagacagcgccgtgagcccgaaggcccccgacgtcaggaacccggccacggccaggccgatggcgaccgtggctggaaccagcaccgggctgaagaggacgaagagcggcgtggcaactgccagtccggtgagggttcctgccagggtcaatcccgccaggaggagcaggatgccaccgaccgggaggccggcgaggacggcgaggacctgggaagtcgttggacctctctcggaatggtaaatggagggcgctttgacgccggcttcataacgcggcggttcgaaacgggctccgggggggacgacgccagcttcgtagcggtgtgttgttgtgtggacttggacactgtgtggtggtacttgtgtggtcatggttgaaggtgaagtttagggttttgcaatgaagatgatgatgcaacagtgctgcaagtgaaggaattgttcgagccgaattcaatcggctcgagt

SEQ ID NO: 157 - DNA, 285 bp, Glycine max
cccgccaggggagcaggatgccaccgaccgggaggccggcgaggacggcgaggacctgggaagtcgttggacctctctcggaatggtaaatggagggcgctttgacgccggcttcataacgcggcggttcgaaacgggctccgggggggacgacgccagcttcgtagcggtgtgttgttgtgtggacttggacactgtgtggtggtacttgtgtggtcatggttgaaggtgaagtttagggtttgccatggaggtgatgatgcaacagtgctgcaagtgaaggaa

SEQ ID NO: 158 - DNA, 1492 bp, Glycine max
tcttgggaattcggctcgagttcaaacttgaagcattgcattctgctatttaattccactacgtacacgcacattctcctcaaagacaacaatggcaccaacagccaagactctgacttacctggcccaggagaaaaccctagaatcgagcttcgttcgggacgaggaggagcgtcccaaggttgcctacaacgaattcagcgacgagatcccagtgatttctcttgccggaatcgacgaggtggatggacgcagaagagagatttgtgagaagatcgtggaggcttgcgagaattggggtatattccaggttgttgatcacggtgtggatcaacaactcgtggccgagatgacccgtctcgccaaagagttctttgctttgccaccggacgagaagcttcgttttgatatgtccggcgccaaaaagggtggattcattgtctccagccatctccaaggggaatcggtgcaggactggagagaaatagtgacatacttttcgtacccaaaaagagagagggactattcaaggtggccagacacgccagaagggtggagatcggtgactgaggaatacagcgacaaagtaatgggtctagcttgcaagctcatggaggtgttgtccgaagcaatggggttagagaaagagggtttaagcaaagcatgtgttgacatggaccagaaggtggtggttaattactaccccaaatgccctcaacctgacctcactcttggcctgaagcgccacacggatccgggcactatcaccttgctgcttcaggaccaagtgggtggacttcaagccaccagggacaatggcaaaacatggatcaccgttcagcctgtggaggctgccttcgtcgtcaatcttggagatcatgctcattatctgagcaatggaaggttcaagaatgctgatcaccaagcggtggtgaactcaaaccatagccgtttgtccatagccacttttcaaaacccagcaccaaatgcaactgtttaccctctgaagataagagaaggagagaagcctgtgatggaggaaccaatcacttttgctgaaatgtacaggaggaagatgagcaaggacattgagattgcaaggatgaagaagctggctaaggaaaagcatttgcaggaccttgagaatgaaaagcatttgcaagaacttgatcagaaggcaaaacttgaggccaagcctttgaaggagattcttgcttaattaataataattacatatgtatcatttgcatgcccccttggtgtttttagtattttttaagggccatgaattaataatagtccttacctttgtgcttttgtacgtcttatgatttatcctttgtggggatatcatgtgttgtgttcagttgcctatgtcttattagctagctggctcatctatgtataccttatatttgcctctattataaatgaaaataagtggcactgtctttattattggctgcaaaaaaaaaaaaaaagggcggccgcc

SEQ ID NO: 159 - DNA, 575 bp, Glycine max
tagtggggatgcgccactgcatgaatctgttggggataaatagattgtcctagatctggggtcaataaagagcttactgcatcctcaacaaaagcatggcttgagaaaatgggaatcaagtatatatagatgtggacaaaggtaataaaatcattgaatgtagctattagatcataactacatatttgtatatataccttgtgtgagtgaaatgacaaattgttatttaactataagttttcttttctattgtactgctaaatttgatttgtattatgtacaagtgcatttttcctggtttcatcaaagaattagaacaattatggctacaactttgtatgttgcatacattagaggatcattaattcaaaaaaggatattcaatttgcatggacttatatatgtaggatgcatgtcatttgatgctattgttcagatttcatttgatgttattatttaatttgcatggtctgatttaatttataggtaccagagatcaatgtaaaaaaaatgcaacaataaaacgaagaaaataaaaaaaaaaacttagacatacaaagacggtttccgaaaac

SEQ ID NO: 160 - DNA, 1324 bp, Glycine max
gaattcggctcgagctcgagccgattcggctcgaggagagaattaagattttataatttaacttttttggggtgtgattaaaagagaagctagctaaaaaaaatgggttcagcatccgaaagtgtttgcgttacaggagcttctggtttcatcgggtcatggcttgtcatgagactcatcgagcgtggctacaccgttcgagccaccgtacgcgacccagtaaacatgaagaaggtgaagcatttggtggaactaccaggcgcaaagagcaaactgtctctgtggaaggctgatcttgctgaagagggaagctttgatgaagccattaaaggctgcaccggagttttccacgtggccacccccatggactttgaatccaaagaccctgagaatgaagtgataaagcctacaataaatggggtactagacatcatgaaagcatgcttgaaggcaaaaactgtgcgaaggctaatattcacgtcctcagccggaaccctcaacgttattgagcgccaaaagcccgttttcgacgacacatgctggagtgacgttgagttttgccgtagagttaagatgactggttggatgtattttgtttctaaaacactggcggagaaagaagcatggaaatttgccaaagagcagggcctggacttcatcactatcattccacctcttgttgtcggtccctttctgatgccaaccatgccacctagcctaatcacggctctatcgccaatcacaggaaatgaggaccattactcgatcataaagcaaggtcaattcgtccacttagatgatctctgtcttgctcacatatttctgtttgaggaaccagaagtggaagggaggtacatatgcagtgcatgtgacgctaccattcatgacattgccaaattaattaaccaaaaataccctgagtacaaggtccccaccaagttcaagaatattccagatcaattggagcttgtgagattttcttccaagaagatcacagacttgggattcaaatttaaatacagcttagaggacatgtacactggagcaattgacacatgcagagacaaagggcttcttccgaaacctgcagaaaaagggctttttactaaacctgcagaaactccagtgaatgccatcatgcataaataggcattcatatctttgtatctgtgtgatggctgtgcaacttgcttttcttattccgtttcttgattaacgtttctgttttatgaaaaattagaaatgtgagtggcttgtaaggccaggttatcttcaataagttaataaaaaccatcttctaaaaaaaaaaaaaaagggcggccgc

SEQ ID NO: 161 - DNA, 649 bp, Glycine max
agaatatatataaataatacttaccacttttatttattacattattattattattattattattattattattattattattattattattattattattattattattattattattattatatgcatgcttcagctaacatgaagaaggtgaagcatttggtggagccgccagattccaagaccaaattgtctctgtggaaggctgatcttgctcaagagggaagctttgatgaagccattaaaggttgcactggtgttttccatgtggcaacccccatggattttgactccaaggacactgaggggaaaataaagcagacaatggacaaggccttttgggatggtatcatggaaaatgaagcaggtgaaaaaaggccttgcatcacattcttccaaagacatgggtggtcaattatgaaatttatcccttatggtacggtatatgtaggaatatgtgttgtataacttgatttgtaatattggagtagggaattaagtatatataaatgcggacaaaggtaataaaatcattgaatgtagctattagatcataactacatatatgtatatataccttgtatgtgtgaaatgacaaattattatttaaaaaaaaaaaaaaagggcggccgccgactagtgagcacgt

SEQ ID NO: 162 - DNA, 587 bp, Glycine max
  unsure (1)..(587): unsure at all n locations
tnttcactccacatgtttctcattccttttctaagtcgattaatatttacagagtgaagattttatttttctttctttctttggaagataaagaatgggttctaagtccgaaaccgtttgcgttactggggcttctggttacatcggatcatggcttgtcatgagactcatcgagcgtggctataccgttcgagccaccgtactcgacccagctgatatgagggaggtgaagcatttgctggatctgccaggtgcagagagcaagctgtctctgtggaaggcagaacttacagaagagggaagctttgatgaagccattaaaggctgcactggagttttccacgtggcaacccccatggattttgactccaaggaccctgagaatgaagtgataaagcctacaataaacggattgctagacatcatgaaagcatgcgtgaaggccaaaactgtccgaaggcttgtattcacttcctcagcgggaactgtggatgttacggaacacccaaaccctgtcatcgatgagaactggtggagccatgttgacttctgcataaaggtcaaaatgaccgggttgatgtaatttg

SEQ ID NO: 163 - DNA, 307 bp, Glycine max
cctcgagccgaatcggctcaggctaagccttataaataataagaccaaaaaaaaaaaaccaccaaacaacgagagagagaacatgggttcaagttcagcatccgaaagtgtttgcgttacaggagcctctggtttcatcgggtcatggcttgtcatgagactcatcgagcgtggctacacggtccgagccactgtacgcgatccagctaacatgaagaaggtgaagcatttggtggagcttccaggtgcaaagaccaaattgtctctgtggaaggctgatcttgctcaagagggaagctttgatgaa

SEQ ID NO: 164 - DNA, 1809 bp, Glycine max
gaattcggctcgagcttacttgaagttgtgctattcaatcccaaagccacagaaataatattattcagattttagagactgaaaacatcatggccaacctcgacctcgacccattccagacaagcatcttaatcctcgtcccaatagcactcctggtggcgttactatctcgtactcgtcgaagagcaccctacccaccaggcccaaagggtttaccaatcataggaaacatgttaatgatggagcagctaacccaccgcggcctcgccaacctggccaaacactacggcggcatcttccacctccgcatggggttcctccacatggtcgccatctccgaccccgtcgccgcgcgtcaggttctccaagtccaagacaacatcttctccaaccgcccagccaccatcgccatcagctaccttacctacgaccgcgccgacatggcttttgcccactacggccccttctggcgccagatgcggaaactctgcgtcatgaagctcttcagccgcaagcgcgccgagtcctggcagtcagtccgcgatgaggtcgacgccgccgttcgcgccgtcgctagcagcgtcggaaagcccgtcaacattggagaattagtgtttaacctcaccaagaacatcatctaccgcgccgcgttcgggtcgagttcccaagaaggccaggacgagttcattaaaatactgcaggagttctccaagctctttggcgcgtttaatattgcggattttataccctatctcgggtgcgtggatccacaaggtttgaactcgagactcgctagggcacgtggcgcgctcgatagcttcattgataagatcatcgatgagcacgtgcataagatgaagaatgataagagcagtgaaattgttgatggagaaacggacatggtggatgagttgctggcgttctacagcgaggaggcgaagttgaacaatgaatcggacgatttgcagaactctatcagactcactaaggataacatcaaggctatcattatggacgtgatgttcggaggcacggaaacggtagcgtcagcgatcgagtgggccatggcggagctcatgagaagcccagaagatcaaaagcgggtccaacaagagctggcggatgtagtgggcctggaccgtcgggccgaagagtccgatttcgagaaactcacttatctcaaatgtgccctcaaagagaccctccgcctccaccctccgataccgctcctcctccacgagacggcggaggacgccaccgtcggcggctacttcgtccccaggaaggcgcgtgttatgatcaacgcgtgggccattgggagggacaagaattcctgggaggaacccgagagcttcaagcccgcccggtttcttaaaccgggcgtgcccgatttcaaagggagcaacttcgagttcattccattcgggtcgggtcgcagatcctgccccgggatggtgttggggctctacgcgctcgagttggcggtggcgcacctccttcactgcttcacgtgggaattgccagatgggatgaagccaagtgagatggacatgggtgacgtgttcggactcaccgctccaagatccacgcgactcattgctgtgccaaccaagcgcgtggtgtgccctctcttttaaaaaaacaacaatttggatcttttttcttccttttttttgtattttctttttatccctcaattatacataatcatattaaaataatataaagggaaaaaaggcagctacacaataagaatgtgggagtatttggaagaaaaaaaaaaaaaaaaaaaaaaaaaagggcggccgc

SEQ ID NO: 165 - DNA, 625 bp, Glycine max
  unsure (1)..(625): unsure at all n locations
acgcgtacgtaagctcggaattcggctcgagcacttacttgtagttgcgaaatcatccaaacacattccatctattaagattttagagagtgaaaatggattggcaaagcatgatgggcaacctggacccattccaaagaacaatcttaatcctcgtcccactaacactactcctgctgctgttactatctcgtacccgtccaagaccgccctatccaccaggccctaagggcttcccaatcataggaaacatgtttatgatggaccagctaacccaccgcggtctcgccaacctggccaaacactacggcggaatcttccaccttcgcatgggcttcctccacatggtcgccatctccgaccccgatgccgcgcgacaggttctccaagtccaagacaacatcttttccaaccgccccgccaccatcgccatcagctacctcacctacgaccgcgccgacatggccttcgcccactacggccccttctggcgccagatgaggaaactctgcgtcatgaagctcttcagccgcaagcgcgccgagtcctggcagtccgttcgcgacgaggtcgactccgccgtccgcgccgtcgccaacagcgtcngaaaacccgtcaacatcgg

SEQ ID NO: 166 - DNA, 532 bp, Glycine max
ttactcgtccgcgatctccaacgcagaagcggcgcgtgaggttctccaagtccaagacaacatcttctccaaccgccccgcgacaatcgccatcagctatttaacctacgaccgcgccgacatggctttcgcgcactacggtcccttctggcgccagatgcgcaagatctgcgtcatgaagctcttcagccgcaagcgcgccgagtcatggaacaccgtcagagacgaagtcgacttcatcatccgttctgttacgaacaacctcggaagccccgtcaatgtcggagaactcgtcttcaacctaacgaagaacatcatctaccgcgccgcgttcgggtctagttcccaggaggggcaggacgagttcatttcgattcttcaggagttctcgaagctcttcggggcttttaatgttgcagatttcgttccgtttcttgtgtgggttgatcctcaggggctcaacaagaggcttgtgaaggcacgtgcctcgctggatagcttcattgacaagatcatcgacgagcacgtgcag

SEQ ID NO: 167 - DNA, 1071 bp, Glycine max
gtcgacccacgcgtccgccaccctcctggacccgcaggcctgggagagcctcaagtttcccgtgatagcgaagcctctcgttgccgacggcagcgccaagtcgcacaagatggcgctcgtgttcacgcgcgacgcactgaacaagctcaagccgccgatcgtgctgcaggagttcgtgaaccacggtggcgtgatcttcaaggtgtacgtggtgggcgagcacgtgcgctgcgtgaagcgcaagtccctccccgacgtgtccgacgaggagaaggcgctcggcggcgtttccgaggacctgatgtcgttctcgcaggtctccaacctcgccaccgtgaacgactgcgacggctattaccgtttgatgcatctcgacgacgacaccgaaatgccccccgacgccttcgtcgtcgacatcgctgggggcctcaggcgcgccctcaagctcaacctcttcaatttcgatgtcataagagacgctcgatacgggaaccgttatcttatcattgatatcaactatttccctgggtacgccaaaatgcccggctacgaggccgttttgacccagtttttctgcgaagtaatgctcaagaagaaacagcaagaggaacaacagcaagaagagggtaacgctcctaaggagaaagaggaatctcttcaagcttgagataattttgtcacacagatgttgttctgtcggtgtcggtgtttggtggtttttgggtaacccgaatttccccagtggacccattggttggcacgagttgcaaatttcgatttagggtgcagttggtacagtagggttgtttgtggctagttttttttaaccctcttcaacaacatgtatattcctttcaccattgctctctggagataggtaccttttcaaataccctcaacatttaggaaagttgtattttgcggcttaagattaccaagctagaaactgtttactttgtgttttttttactcaataacttcatttttcccattttgccaaattctattctcattttggattatcttgctttgtttaaaaaaaaaaaaaaagggcgggccgccattcagtta

SEQ ID NO: 168 - DNA, 1518 bp, Glycine max
caaatatatagctacgagggaacttcttcagtcattgctagctagctcactaatcactatatatacgacatgctacaagtgaagtgaccataactcagttcgaaatcataaaattcttccaccaagttatgggtttccttgtgttgcttcttttctccctcttaggtctctcttctagttccagcatatcaactcatcgttccatattggaccttgacctaaccaagtttaccacacagaaacaggtgtcttcactgttccaactatggaagagtgagcatggacgtgtctaccataaccacgaagaagaggcaaagagacttgagattttcaagaataacttgaactatatcagggacatgaatgcaaacagaaaatcaccccattctcatcgtttaggattgaacaagtttgctgacatcactcctcaagagttcagcaaaaagtacttgcaagctcccaaggatgtgtcgcagcaaatcaaaatggccaacaagaaaatgaagaaggaacaatattcttgtgaccatccacctgcatcatgggattggaggaaaaaaggtgtcatcacccaagtaaagtaccaagggggctgtggaagcggttgggcgttttctgccacgggagccatagaagcagcacatgcaatagcaacaggagaccttgttagcctttctgaacaagaactcgtagactgtgtggaagaaagcgaaggttgttacaatggatggcactatcaatcgttcgaatgggttttagaacatggtgggattgccactgatgatgattatccttacagagctaaagagggtagatgcaaagccaataagatacaagacaaggttacaattgacggatatgaaactctaataatgtcagatgagagtacagaatcagagacagagcaagcgttcttaagcgccatccttgagcaaccaattagtgtctccattgatgcaaaagattttcatttatacaccgggggaatttatgatggagaaaactgtacaagtccgtatgggattaatcactttgttttacttgtgggttatggttcagcggatggtgtagattactggatagcgaaaaattcatggggagaagattggggagaagatggttacatttggatccaaagaaacacgggtaatttattaggagtgtgtgggatgaattatttcgcttcatacccaaccaaagaggaatcagaaacactggtgtctgctcgcgttaaaggtcatcgaagagttgatcactctcctctttgagccgtaaaggttcaatacaacgagtgcttgttttcttagggacaagcattgtacttatgtatgattctgtgtaaccatgagtcttccacgttgtactaatgtgaagggcaaaaataaaacacagaacaagttcgtttttctcaaataatgtgaaggtagaaaatggaaccatgcctcctctcttgcatgtgatttaaaatattagcagatggttttttcttaaaaaaaaaaaaaaaaaaagggcggccgc

SEQ ID NO: 169 - DNA, 409 bp, Glycine max
ctcgctcttcgttccgctcgatctcgagccgctcgagccgattcggctcgagaaaattcttccaccaagttatgggttcccttctgttgcttcttttctccctcttaggtctctcttctagttccagcatatcaactcatcgttccatattggaccttgacctaaccaagtttaccacacagaaacaggtccctctcactgttccaactatggaagagtgagcatggacgtgtctaccataaccacgaagaagaggcaaagagacttgagattttcaagaataacttgaactatatcagggacatgaatgcaaacagaaaatcaccccattctcatcgttcgaatgggttttagaacatggtgggattgccactgatgatgattatccttacagagctacagagggtag

SEQ ID NO: 170 - DNA, 2848 bp, Glycine max
gaattcggctcgagattaaaagatctgtgtggaaatcatgaatggtttggtcaaggaagtgtattaatcattacaactagagatctacacctactggacctacttaaagttgattatgtttatgaaattgaggaaatggacgaaaatgagtcccttcagctttttagttggcatgcctttggacaaccaaaaccaagagaagacttcaatgaacttgcaagagatgtagttgcttattgtggaggattaccattagctcttgaagtccttggttctcatttaattagtaggacagagacagagtgggaaagtgcattgtcaaggttaaaaatgactcccaatgatcaaattcagcaaaaattaagaataagttttgatgatttatatgatcatatggaaaaacatatatttcttgacatatgttgtttctttattggtaaagacaaggtctatgttacacacatactaaatggatgtggactacatgctgatattgggttaacagttctcatagagcgtagccttgtaaaagttgaaaagaataacaaacttgcaatgcataatttgctacgagaaatgggaagagagattattcgtgaaggttcaagaaagaaacttgggaagcgcagtcgtttgtggtttgatgaggatgtagttgaaattttgacagagaaaactgggacagaggctattgagggattggctctgaaattgcattcaaacaaaagatattgcttcaaagctgatgcttttgcagaaatgaagagattgagactgttgcaacttgataatgtagaactcactggagattataggttttgcagtggctaaaattcctcaatcttagtcactccaagtacttgaaagaaacccccgacttttcaaaattaccaaatcttgaaaagctcattctcacagattgttcaagtttgctcaaggtacaccaatccattggagatctccagaatcttctatttataaatttgaaggactgtaaaagcctaagtaatctccccagatcgatatataaattgaaatctttgagaactctcatcctatctggttgttcgaagattgacacattggatgaagatataatgcagatggaatccttgacaacactaattgctgaaaatactgctgtgaaacaagtgccctttccaatagtaagttcgaaaggcattgggtatatatccatttatggatatgaaggattttcacatcatgtttatctttctatcatgcggtcttggatgctaccaaaaatgaatcccctatcttgtattcgctcgtttagtggcacttcatcatctccaattcccatggacatgcagaataaaaatttgagtgatctagcaccaccaatttcaaattttcgaagtgttgtggtgcaatgtgagacagagattcaactatttaaccaaataagaacaattctagatgatgtgtatggtgcaaattttagtgaattagaaataacatcatatacatcccaaagttcaaatcattccgtgaagtcttatttgattggcattggagattttgagcaagtcttcatttctctcagcaacagcatatctgagggattggcaacctgtgagtcttctgatgtttttctccctggtgactattatccgtattggttggctcatacaggtgagggacagtcagtgtatttcactgtgcccgaggattgtcgcataaagggtgtaactttgtgtgttgtttatttatcaaccctcgaaaacatggctactgaagttcttattggtgttttaatggttaattacacaaagtgcgccatccagtttcacaagcgagagactttattttcctttaatgatgtagattggcagggcataatatcattttttggacctggaagacaaggtggagatttttgttatttttgggaatggattggcgatcaagaagacagctgtgtatttaatttgtgatgaatccattgaaatggaaatgacaaagattgaaatggacatggagccttcacatttgtattgtgatgatgtcattgaaaaggacacggagccttctaatttgtattgtgatgatgtcattgaaaaggacatggagccttctcgtgagcaaaagaaagtgacaaagaatgagagattagtacgactcaacaaaattttaaaaaaatattttccaagaaagtagagttttgaactaatttttactgggcatgccaaagtcattgtctaggattttggaaagtgccaaaattatgtacttttagggtgtttttaagtcatttttcttgctcttaccttgatttagaaggttgttgggacaaagattgctttgtttccactattttctgaatttaagtttagtattttgatttctttgttatatattgtagtaatttatcccatattttttttagaaaaaaagggtctgaagatggagaatttatcttggggagcaactatgatgtgttgaatcttcaaacggatcaacttggtcaacaaaattctggaagaataaaaactggcatatggtcaagccaaaatttcatggctgagtggatttacacttgaaatggaaatgttgtttatgtatttttaggtctaacccgtgaatatagatagattctccctcccttttgctttcatcattgtaacagtttgcaacttttgtactgtttttgtgttttcttcatccatcttcttccccaccatggataatcccatgtcgcttattgtcatgagtgactaagttctcttgttgtaagggataaatgtaatcatttcttaactctcatgcatcttttgatataaatgattatatatttctcataaaaaaaaaaaaaaagggcggccgc

SEQ ID NO: 171 - DNA, 2016 bp, Glycine max
ctcgagccgcgaattcggctcgagccaaatggctattccttcactaataaaccagccacaaagaacaccctctctcacattctccttcctcctctttctcgctatctgcaccccattggatgctgctcacaccgacttcgcaggttcagcctgcctcaaagtttcccctagccacttcgccggctcggtcaccgaagtcatcgctgccatacgtcaactcgcttcgatcctctcacgcttcggctctcccttggccaacttccgcctcagcaccgccatcgccgactgcctggacttgctcgacctctcctccgacgtcctctcctgggccctctcggcctctcagaaccccaaagggaagcataacagtacggggaacctgagttcggatttgaggacatggctaagtgcggcgcttgcgcatccagagacgtgcatggagggattcgaagggacaaacagcattgtgaagggtttggtctcggcaggcatcgggcaagttgtgtcgttggtggagcagcttcttgcgcaagttcttcccgcacaggatcaatttgacgccgccagcagcaaggggcaatttccttcttggattaagcccaaggaaaggaagctgctgcaagcaattgcagtcactcctgatgtcactgtagctttagatgggagtgggaactacgctaagatcatggacgcggtgcttgcggcacctgattatagcatgaagcgttttgtgattttggtaaagaagggtgtttatgttgagaacgtggagatcaagaagaagaagtggaatattatgattcttggacaggggatggatgccaccgtcatctccggtaaccggagtgtcgtcgacggctggaccaccttccgctcagctacattcgctgtgagtggcagagggttcatagcaagagacatatcctttcagaacacagcagggcccgagaagcaccaagcagtggcactaagatcagactctgacctttccgtgttcttccgatgtgggattttcggttaccaagacagtctctacacccacacaatgcgccaattcttcagagactgcacaatcagcggcacagttgattacatcttcggtgacgccactgcagtgttccaaaactgcttcctaagagtaaaaaaaggcttaccaaaccaaaagaacacaatcacagcacacggtagaaaagacccaaatgaaccaaccggtttctcattccagttctgcaacataactgcagattctgatcttataccttctgttggaaccgcacaaacgtacctggggagaccctggaagagttactcacgaaccgttttcatgcaatcgtacatgagtgaggtgataggggcagaagggtggttggagtggaatggaaactttgcattggacacattgtactatgctgagtacatgaacactggagcaggtgctggagttgctaaccgtgtgaagtggccagggtaccatgcattgaatgattcgagccaggctagtaacttcaccgtgtctcaatttattgaggggaatctatggttgccttcaactggagtaaccttcactgcgggactcacagtttaacagaaataaactactgccacgccttggcactctcttgtacttaattatataaagttattatatatttatagtttatatcataggaagaaaaaaaaggtattataagaaagaggtgaatgggtccgtgttcactttaattaattggtacttgattattaaagattttccattttttggtataggagtacttggggagttcggtgttttttttcttcttttttttattaaagggaggctatagccattacaaacgaataactctagggaaacaagttcccatacaatcactccaaagcaaacccttacaatctacaggaagtagctcgaaaatgtgcactcctatagggatgtcaagacccttggctgccaaacaatcagctacattatgcaacatttgtttcctgaaaaaaaaaaaaaaaaagggcggccgc

SEQ ID NO: 172 - DNA, 436 bp, Glycine max
cgaagtctcctcgccctttaaatatccaacctctctgactcgttatttgccccccactcccgcccccaaatggctattccttcactagtaaaccatcctctagcattcagcttctccttcctcctctttcttgctctctgcaccccattggctgctaacaacaccgatttcggaggttcagcctgcctcaaggtttcccccacccacttcgccggctcagtcaccgaagtcataactgctatacgacaagtcgcttccatcctctcacgcttctcccctcccttcgccaacttccgcctcgccaccgccctcgccgactgccttgacttgctcgacctctcctccgacgtgctctgctgggccctctccgcctctcagaaccccaaagggaagcataacagtacggggaatctgagttcggatttgaggacatggc

SEQ ID NO: 173 - DNA, 1322 bp, Glycine max
  unsure (1)..(1322): unsure at all n locations
gaattcggctcgagcaagaccttcattatatattgtgcacaataaactatctattttccaacttcaatattcactgttgttgagtattctaattctaatgaggaacaggggtgtgtgggaagatgcaagcacagcaacagtgcttgtacttgtgctatgttcatcgtatggaattgcagaagtaaagtcacagtcacagaaggtatctggtttgtttgtttttggagattcattggttgaagtaggcaacaataacttcctaaacaccatagcaagggcaaattactttccttacggcatcgacttcggcaggggttccactggccgattttctaatggcaaatccctcattgacttcattggagacttgctgggcattccttctcctccaccttttgcagatccctccactgttggaaccagaatactttatggtgtcaattatgcatcagcttctgccggcattctggatgagtcagggagacactatggtgatcggtatagcctgagccagcaagtcctgaactttgagaacacactgaatcagtataggacaatgatgaatggaagtgcattgaatcagttcttagccaagtctatagcagttgtggtaactggaagcaatgactacatcaacaactacctcctgcctggcttatatggctccagtcgaaattatactgcccaagactttggcaatctacttgttaatagctatgtgcgacaaattttggcactacatagcgtaggattaaggaagttcttcctagcaggaattgggccactgggttgcatccctagtcttcgagccgctgctttagccccaacaggaagatgcgtggacttggttaatcagatggttggaacttttaatgaagggcttagatcaatggtggaccaactcaacagaaaccatcctaatgctatctttgtatacggtaacacttaccgtgtctttggtgatatcctaaataaccccgcggccttcgcgtttaatgttgtggatagagcatgttgtggaataggaaggaaccgaggtcaactaacatgcctcccattacaatttccatgcacaagcagaaaccagtatgtgttttgggatgccttccacccaacagaatctgcaacttatgtcttcgcatggagagttgttaatggagcgcccgatgatagttatccaattaatatgcaacaaatggctaccatttaatccactctatcttcctgtattctcctttcatttataaaccaaaaaagtgtaccaaaagtgaagccaaattctacatctattgttgggtataaaataattacttttgggctnn

SEQ ID NO: 174 - DNA, 760 bp, Glycine max
cggcggccgcccttttttttttttttttttttttttttttttttttttttttaagatacacatagcatcattccgatccattccaataaagaaacaagctatatcaaggaatatgtctctctctgtatcatcacttaaaccatcatagcttatttttaacttcttttgtacttgatcatgaggaattctcttaagtttgtctaatacagtcttccattctattatcttcatatcaaacaaatggcaaccaaggactgtaagagctaatggcaaacccccagaatattcaattacatcatttgaaagttcagtaaaaccttctcttggacttgcttgcttgaatgcatgccaactaaaaagctcaatagactcactttcatccatttctttcattgtgtacattttgtcaactctatcccctctaagaatatgcttatctctagttgtgatgattattctactccctgaaccaaaccattcgcgacttccacataaagcactcaattgctccacatcattcacatcatcaagtacaagaaatacccttttactgcaaagtctttccttcaaagcttgttttcctaattcaacattatgtatctttcttttcgttttgtagatatcaaatagaagttgttcttggaaacgaattgcgtcttgcctccaaagttccccaatttgttcaagaaagctccttccctcaaaattgcgaccaatcttattgtaaatggcttttgcaatggttgctcgagccgaattc

SEQ ID NO: 175 - DNA, 1705 bp, Glycine max
  unsure (1)..(1705): unsure at all n locations
gtcgacccacgcgtccgatccgatcccacccggcagcggcgctgcgcaatggccacccacgcagctctcgccgcctcccgccggcgtcgtccaggcacggcgtgcagaggctggacttcgccgacttctccgggctcaggccggggtcgtgctccgtgagcgctgccgcgcgggaggcgtccttctccgacgtccttggcgcgcagctcgtcgccaaggccaccggggagaacgccgtgagggcgcccgcagaggcgaagctgaaggtggcgatcaacggcttcggccgcatcggccggaacttcctccggtgctggcacggccgcgaggactcgccgatcgacgtcgtcgtcgtgaacgacagcggaggcgtcaggaacgcgtcccacctcctcaagtacgactcgatgctcggcaccttcaaggccgacgtcaagatcgtggacgacactaccatcagcgtcgacggcaagcccatcacggtcgtctccagcagggacccgctcaagctcccatggggtgagctcggcattgacatcgtcatcgagggcaccggagtcttcgtcgacggccccggcgccggcaagcacatccaggccggcgcgaagaaggtgatcatcacggctcccgccaagggcgccgacatcccgacctatgtcgtcggcgtcaacgagggcgactacgaccacagcgtcgcggacatcatcagcaacgcgtcctgcacgaccaactgcctcgcgccattcgtcaagatcttggacgaggagttcggaattgtcaaggggaccatgacgacgacgcactcgtacaccggcgaccagaggctgctggacgcgtcccaccgcgacctccggcgggcccgcgcggcggcgctgaacatcgtgccgacgagcacgggcgccgccaaggccgtggcgctggtgctgccgcagctgaaggggaagctgaacggcatcgcgctgcgggtgccgaccccgaacgtgtccgtggtggacctggtgatcaacaccgtgaagactggcatcacggccgacgacgtgaacgcggcgttccgcaaggccgccgccggcccgctgcagggcatcctggatgtctgcgacgtgccgctcgtgtccgtcgacttcaggtgctccgacgtgtcctgcaccatcgacgcgtcgctcagcatggtcatgggcgacgacatggtcaaggtcgtcgcctggtacgacaacgagtgggggtacagccaacgcgtggttgatctggcgcacctggtggcggccaagtggcccggcgcggcggcggccggcagcggcgaccctctggaggacttctgcaaggacaaccccgagaccgacgagtgcaaggtgtacgaagcatgaggccacggttctttccacgacggaacgtacagcacgggcgcgagggttctttccatagagaataatatacagattattcgcccaaagagacgtatgttatatatatatgagttgtatgcagtcaccgaactggtacaggtttccgctttccatttcctgttgggagtcttgtagtgtaatcctggggtgtgtatttgtttcatcaatcatgcctgccgattggaatctcgtttcaccnnnnnnnnnnnnnnnnnnnnnnnnnnnnnnnnnnnnnnnnnnnnnnnnnnnnnnnnnnnnnnnnnnnnnnnnnnnnnnnnnnnnnnnnnnnnnnnnnnnnnnnn

SEQ ID NO: 176 - DNA, 1111 bp, Glycine max
  unsure (1)..(1111): unsure at all n locations
gaattcggctcgagatcaagcttttgatgcaacctcaccccaattgtgatggcgatggagataaaagtttgtgttattcccatagtgggtattggaggcttagggaagaccacacttgcaaagttggtgttcaatgataataggatggatgaacttttcccattgaagatgtgggtgtgtatctccgacgaatttgacattaggcagattataattaaaattatcaactccgcttctgcttcagctccaattattgctctttctcaccaagaaaacattaatagcttcaatattgagcagttacaaagtcgtcttagacacaacctttctggaaagaagtatttactagtcaatggattcaaggagctgcagacactttagggacattgttaattttaaattgtcatagtttttagattcttcctgagtggctgacaacaatgactcatcttaagatactccatattgctaactgtcctcagctgctgtatctcccaagtggcatgcatcgcctcagcgccctagaagaattaagcatagatggttgtcctgaattgtgtcgaaaatgtcaaccacaatgtggtgagtactggtccttcatcactcacatcaaacgcctttccattggagaaacaagagaagggcaactcatttttcgaatgttgtcgcgtctacagttaagattgcacgattagtaaagctaaaatgcacaccatggagaccgcaatttaaattctgatcatgaatgaaatattattttgcttctaaaattttcaatttattaaaaacaaaattggcatggggcaaaagaagttaacggttcatcatttgtatagccattgtaggcatttgcatttctagcgtttgtctcttgaatacttcaagtattagttttagaaagaaaaagcatcattttatataaattctcatgatgacagaggggcacttcacagaatcctccaccttcagcttttgtaatctgtccactagtttgagctaaatctattttcttttcatcnnnnnnnnnnnnnnnnnnnnnnnnnnnnnnnnnnnnnnnnnnnnnnnnnnnnnnnnnnnnnnnnnnnnnnnnnnnnnnnnnnnnnnnnnnnnn

SEQ ID NO: 177 - DNA, 919 bp, Glycine max
  unsure (1)..(919): unsure at all n locations
gaattcggctcgaggaataagtttgtgctggtactatttactgtttcctgggtccttctctttggtttgctagatggtaaacctcccataggcagtggtcgagtaatatgggacactggtggccaacagctgttcgcatcttatgcatactacattacggcaaggcatcctgatttaggcagtggtggcctcaaactcatcaagactggaaactcaacttgcccaaatactattttgcaatattttcccaagtacacccatggcctgccaatgtatttgctcatatctgtaataagcaatttcatcgtctatgaaggtaccccactggctatttttatggcaaagaagccaaattgtgttgaatcgttggttcctgatcctatgaagggatctccggatccaccaagtccattgaatcccccaaactcctctagattgttggtgtttgtggacaattcaatccacaagacatgtgtgggtactgctggtcctgaagctcatccaggcctactaacgtatagtggcacttttcacattgagatcctagaaaacgttcgatttggatacagctcttacaagcttgtgttttgtttcgatggctcagactaccaaaattgttcctatattgggacctatgataatggtgagggtggaagacgtttgattctcactgagactaatcccttcttattttcttttgttcatgcacttaaatttgatgggactattaagtccgtaggttgaatgatatatctcaagactagattagattaagattagatggtcttgagtgaatgtaatcacatactttgttgttttgatctgcattaactctgctccaaataaaacctcaatgcaaacattgaataagtgaaatgaataattaatggttatgctttcttgtannnnnnnnnnnnnn

SEQ ID NO: 178 - DNA, 911 bp, Glycine max
ggtttgagcgaagagaaacatttgaacatggctgccacattcttctctcacttgtcgcttcttcaatccaacaacaacccttctctctctcacacaccctctcgcctccctcattctctcaccaaccgtgtcaaaccctccctcggtgtggtatctgtggccaaaagggtaagtggagtggtgccaaaggccaatttgaatgccttggaggccaattcgggtttccccatttcggctaagaagtccaacaacaaccccattgttgttattgacaactatgacagtttcacctataatctctgccagtatatgggggagttagggtttcactttgaggtctaccgcaatgatgagttgacagacggaggagttgaaaaggaaaaattccagaagagtgctgatatcacccgggccaggagcacctcaagattcgggcatatctttgcaaacagttttggagcttggaccaactgtgccattgttaggtgtgtgcatgggtttgcagtgcattggagaggcttttggagggaagattgttcgtgctcctcatggtgtcatgcatggaaaaagctctatggtttactatgatgagaaaggagaagatggattacttgctggactatcaaatcctttcttggctggtagatatcacagccttgtaattgaaaaagagagctttcctcatgatgaacttgaggcaacagcatggacagaagatggtcttataatggctgctcgtcataagaaatataagcatctacagggtgttcagtttcatccagagcgcatcataaccccagaaggcaagacaattgtccgtaattttgtcaagcttatcgagaaaagggaggctggtggctcttgaaacaatgtttgatgtgtatagttaaaattgtggattgacgcagcat

SEQ ID NO: 179 - DNA, 1315 bp, Glycine max
gagccattcgtcatagcaacaaacaggcatctgagcgtggttcaccctatttacaaacttttgtttcctcactatcgtgacaccatgaacattaattcacttgcccgcaaatccttggtcaatgcagacggtattatagagaaaacattcttgtggggtaggtactctttggaaatgtctgctgttatttacaaggactgggttttcactgatcaagcattgcctaatgatcttgtcaagagaggagttcgcggttaaggatccatctgctccccatggagttcggcttttgattgaggactatccttatgcttctgatgggctagagatatgggatgccatcaagtcctgggtgcatgaatatgtctcattctactacaagtcagatgcagcaattcaacaagatcccgagctccaagcttggtggaaagaacttgtccaagtgggtcatggtgatttgaaagataagccatggtggcaaaagatgcaaactcgtgaagagttgattgaagcctcggctaccctcgtatggatcgcttcagcccttcatgcagctgttaactttggacagtatccatatggaggtttaatcctaaacaggccaaccattagcaggagattcgggcctgggaaagggtctgctgagtatgcagctttggctaagaaccctgagaaggagtttttgaagactattactggcaagaaggagaccctcattgaccttacaattatagaaatcttgtcaaggcacacatctgatgagttctaccttggggagagagatggtggtgactattggacttctagatgctggttccactagaggccttcaagaggtttggaaagaagcttcaagagattgaacaaaagcttatacagaagaacaaggacgagacgttgagaaaccgcagtgggccggctaaaatgccttacactttgctctatccttctagtgaggagggattgactttcagaggaattcccaacagtatctccatctaggggctctatggttgttgcagtactttccctggttttcaataaaaggtgaatagaagggaatatgattccttcatctacctatgtatggttaagttatgtatttggggtgattgaatgttctcgtgtttgctgttaagtgttaataaagaaattactgtttgtataaattgctgttaagtgttctcgcgcatgtttcaacaatgatagctggcatggcaaagtgcaaactagaataaatcatcatcttatgtaaacgatttccattacagcaagggttgtccttaaaatttcattgcccgtgtattcatatttt

SEQ ID NO: 180 - DNA, 555 bp, Glycine max
cttgagaatctgtcatcacgtttcataagcttactgggacgtttttagcctataataatttgccacgcataataataccagtgttgttactgagacaaaattccagggtacaaagcgagcatcaattcgaacctatgaaatccgtgtctaatatttgaaggaaacacgcacccactctccattgacaaaaattattaagaatttggaacagaagaaaacatataatgggggaaaaaatactaacatatacctctctatgggtgtaattagctggctgcctgctcatttagagtcggtgaaatctgcatcgatgacatctccgtcgggtcccttacctgaggattctgaggggccagagtcggcaccgggtggtggtgttggccctcctgcgcctgcagctcctggttggttgtaaagggactgaccaagctgcatgacttcctgatttagtgcagccatggcatccttgatagcttgggttgaacccccagaaatggcgtctttaagctctcctagttttgcttcaaccttctctttcacagggccaggaacctt

SEQ ID NO: 181 - DNA, 3068 bp, Glycine max
gagagtagtgtgtggttgacagttaagaagtagcaaagatgtttccattcgggcacaatgggtcaaaagataaagcgggactatggtggttatgcagaagaatgtgttggctatacaacagcatcaccagtgttgacgggatcgtcggcaccggcttagacttcttaggtagtgcactcgatacagttacttttttagcctcctccatctccatccaacttattagtgctaccaaggctgatggtgggaaaggaaaagttggaaaggctacaaatttgagaggaaagataacattaccaaccataggagctaaggaagaagcatacgatgctcaatttgattgggacagtgacttcggaattcccggtgcattttatattaagaacttcatgcaaaacgagttctacctcaagtctttaattctcgaagacattccaaaccatggaaccattcacttcatatgtaactcctgggtttacaattcaaaacactacaagactgatcgcattttctttgccaacaatacatatcttccaagcgagacaccggctccacttgtcatgtacagagaagaagaattgaagaatgtaagaggggatggaactggtgagcgcaaggacatgggatacgatctatgattatgatgtctacaatgacttgggcgatccagataagggtgaaaagtatgcacgccccgctcttggaggatctgccttaccttaccctcgcagaggaagaaccggaagacgatagactacataagatcccaacagtgagaagcccagtgattttgattaccttccgagagatgaagcatttggtcacttgaagtcatcagattttctagcttatggaatcaaatctgtggcccaagatgtcttgcctgtgttgactgatgcattcgatggaaatcttttgagccttgagttcgataattttgctgaagtgcgcaaactctatgaaggtggagttacattgcctacaaactttcttagcaagatcactcctataccaataattaaggaactttttcgaactgatggcgaacagttcctcaagtatccaccacctaaagtgatgcaggtcgacaagtctgcatggatgactgatgaagaatttgcaagagaaacaattgctggtttgaatccaaatgtcatcaagattattgaaggagttcccactaagtagcaagctacatactcaagcctatggtgatcatacctgtataataacaaaagagcatttggaacctaacttaggtggtctcactgttgagcaggctatccaaaacaagaaagttgttcatcttagatcaccatgactatctcattccaatattgaggaaaataaatgcaaataccacaaagacttatgctacaagaaccatatttttcttgaaaaatgatggaactttgacgccattggccattgagtgtaagtcaagccacatttctcacggtgaagcatatgctcctgttagagaagtctacgtgccttctgagtgaaggagttgaagcttacatttggttactggcaaaggcttacgttgttgtgaatgatgcttgctaccatcaaatcattagccattggctaaacactcatgcggttgttgagccatcgcgacatagcgacaaacaggcatctgagcgtggttcaccctatttacaaacttctgtttcctcactatcgtgacaatgcgaacattaattcacttgcccgcaaatccttggtcaatgcccgacggtattatagagaaaacattcttgtggggtaggtactctttggaaatgtctgctgttatttacaaggattgggttttcaccgatcaagcattgcctaatgatcttgtcaagagaggagttgctgttaaggatccatctgctccccatggagttcgacttttgatcgaggactatccttatgcttctgatgggctagagatatgggatgctatcaagtcttgggtggaagaatatgtctcattctactacaagtcagatgaggaacttcaaaaagaccccgagctccaagcttggtggaaagaacttgtagaggtgggtcatggggatttgaaggataagccatggtggcaaaagatgcaaacttcgtgaagattgggttgaagcttcggctaccctcatatggattgcttcagctggtcagtgctgctgttaactttggacagtatccatatggaggtttaatcctgaataggccaactattagcaggagattcatgcctgagaaagggtcttctggattatgatgcgttagctaagaaccctgagaaggagtttttgaagactattactggcaagaaagagaccctacattgaccttacaattatagaaattttatcaaggcacgcatcttgatgagttctaccttgggcagagaaatggtggtgactacttgacttctgatgccgggccattagaggcctttaagaggtttggaaagaatcttgaagagattgaaaagaagcttatagagaagaccaataatgagacattgagaaaccgctatgggccggctaaaatgccttacactttgctctatccttctagtgaggagggattgactttcagaggaattcccaacagtatctctatctaagggctctatggttgctgaagtactgtccctggctttaaataaatgtgaaatagaaggaatctgattccttcatcagttgtgtatgtttaagttatgtatttggagtggctgaatgtacttgtatttgtcattaataaaccatgtttgtgtaatggaaaccaaaataataaatgcaatcatgcaggtttgaactttttaaaaaaaaaaaaaaaaaaaaaaaaacctcgtgccgaattcggcacgaggaaaaggcaggctggtggctcttgaaacaatgtttgatgtgtatagttaaaattgtggattgacgcagcatactagaaaataaagaaaaggtataatagcacctttgtcagccacaatttagaatatcatagaaaatcttggtagggaagaacctttagcctgatagatctattatttgatttccctaagatatataaaagtttgg

SEQ ID NO: 182 - DNA, 3048 bp, Glycine max
gacaagctaggcacaacaaaaccacaatctaagttagtgttgagagaagagtgcgtttgtttgtttgaaattaacatagttgcaaagatgtttggaatcatcggaggaaacaagggtcacaagataaaggggaacttggtgattatgcgaaagaatgtgttggatatcaacagcattaccagtgttaagggtgccatccggaaccggcattaatcttcattggaggagtcgtcgacaccgttactgctttggcgtcccacatctccatccagctcattagtgccaccaaggctgatggacatgggaaaggtaaagttggaaaggctacagcatttaagaggacaaagtgtcgttgccaaccttgggagctggcgaagatgcatacgaagttcaattttgattgggacagacgacttctgaattcccggggcattttacattcataacttgatgcctggtgagtcatatctcaagtctgtaactctcggagacatctcaaaccacggaaccattcactgggtgtgcgactgctgggtttacaactcaatatcctaccattctgatcgcatcttgtttggcaacaatacatatcttacaacgcgagacaccggctacacttgtcaagttcagagaagaagacctgcagaatgtaagatgggatggctctggcgagcgcaatgaatgggataggatctatgattatgatgtctacaatgacttgggcaacccggatagcggtgataaatatgcacgccccgttcttggtggttcagccttaccttaccctcgcagaggaagaaccggaagaggaaaaactagaaaagatcccaacagtgagaagccgagcgattttgtttaccttccaagagatgaagcatctgatgacttcaagtgaccaaatgcttcatctcttggagtcatcagattttctcgcttttggaatcaaatctgtatcccaagatgtcttgcctgtcttgactgatgcattcgatggaaatattttgagccttgagttctgataactttgctgaagtgcgcaaactctatgaaggtggagttacactacctacaaactttcttagcaagatcgcccctataccagtggtcaaggaaatttttcgaactgatggcgaacagttcctcaagtatccaccacctaaagtgatgcaagtggatacagtctgcatggatgactgatgaagaatttgctagagaaacgatagcgtggggtaaattcaaacgtcattaagattcttgaggagttcccaccacgtaccaagctagattctcaaacccacagtgatctcacccctctataataacaacacaacatttggaacctaacttgggtgggctcactgttgagcaggctatccagagcaagaagctgttcatcttagatcaccatgactatctcattccatatttgaggaaaataaatgcaactaccacaaagacttatgctaccagaaccatattttttcttgaaaagtgatggaactttgacgccattggccattgagttaagtaagccgcatcctcaaaggtgaagattatggtcttgtaagcgaagtctacgtgccttcgagcgaaggagtttgaagcttacattttggttactggcaaatgcttatgttgttgtaaatgactcgtgctaccatcaactcgttagccattggctaaacactcatgcggttgttgagccattcgtcacagcaacaaataggcatctgagttgtggttcaccctatttacaaacttttgtttcctacactatcgtggacaccatgaacactaattcacttgcccgcaaatccttggtcaatgcagacggtactatagagaaaacatttttgtggggtaggtacgctttcgaaatgtctgctgttgtttacaaggactgggttttcactgatcaagcactgcccaatgatcttgtcaagagaggagttgccgttaaggatccatctgctccccatggagttcggcttttgattgaggactatccttatgcttctgatgggctagagatatgggatgccatcaagtcctgggtgcaagaatatgtgtcattctactacaagtcagatgcagcaattcaacaagaccccgaactccaagcttggtggaaagaacttgtccaagtgggtcatggtgatttgaaagataagccatggcggcaaaagacgcaaacatgcgaagagatgaatgaagccacggccaccctcatatggatcgcttcagcccttcatgcagctgttaactttggacagtatccattatggaggtttaatcttgaacaggccaaccattagcaggagattcatgcctgagaaagggtctgctgagtatgctgctttggctaagaaccctgagaaggagtttttgaaaactattactggcaagaaggagaccctcattgaccttacaattatagaaatcctgtcaaggcacgcatctgatgagttctaccttggggagagagatggtggtgacttctggacttctgatgctggtccactagaggccttcaagaggtttggaaagaagcttcaagagattgaacataagcttatacagaagaacaaggatgagacgttgagaaaccgcactgggccagctaaaatgccttacactctgctctatccttctagtgaggagggattgactttcagaggaattcccaacagtatctctatctaagggctctctcattgaggttgctgtactactctgcctgtttttcaataatgtgaaataggaggaatatgattccttcatctacctacgtatggtcaagttacatttggggtggttgaatgttctcgtgtttgctgttgaagtgttaataaagaaattctgtttttataacagatcgaagagaaagcaataaaggcaatcacgcatgtttcaacgagtgatagctggcatgacaaagtgcaaactagaataaattatcatcctatctaaacgatttccattacagcaagggttgtcattaaaattttattgcccgtgtattcatattttgcattgcctcaaagctac

SEQ ID NO: 183 - DNA, 3032 bp, Glycine max
gacatggctatcaatcaatcttctgagagtgtttggttgaaagtaacaaagatgtttcctttcgggcaaaagggtcacaagataacacgggactatggtggttatgcagaagaatgtgttggatacacaacagcatcaccagttgttgaagggatcgttgaccaaggcttaggcttcataggcagtgcagtcgatgcacttacttttgcagccaccaaaatctccatccagttgattagtgctactcaaggctgatggtgggaaaggaaaaattggaaagagtacaaatttaagaggaaagataacattaccaaccttggggagctggcgaacaagcatacgatgttaattttgaatgggacagtgacttcggaattcccggtgcattttatattaagaacttcatgcaaaatgagttctacctcaagtctctaattctcgaagacattccaaaccacggtaccattcacttcgtattgcaactcctgggtttacaattcaaaaaactacaagactgatcgcattttctttgccaacaatacataatctttcaagcgagacaccagctccacttttgaagtacagagaagaagaattggagaatggtaggaggggatggaactggagagcgcaaggaatgggataggatctatgattatgatgtctacaatgacttgggcaacccggatagcggtgataaatatgcacgccccgttcttggtggttcagccttaccttaccctcgcagaggaagaaccggaagaggaaaaactagaaaagatcccaacagtgagaagccgagcgattttgtttaccttccaagagatgaagcatttgcgtcacttgaagtcatgcagattttctcgcttactggaatcaaagctgtatcccaagatgtcttgcctgtcttgactgatgcattcgatggaaatattttgagccttgagtttgataattttgctgaagtgcacaaagctctatgaaggtggagttacactacctatcaaactattcttcagcaagatcgcccctataccagtgatcaaggaaatttttcgaactgatggcgaacagtttcctcaagtatccaccacctaaagtgatgcaggtggataagtcagaatggatgactgatgaagaatttgcaagagaaacgattgctggtttaaatccaaatgtcattaagattatagaggagttcccactaagtagcaagctagatactcaagcctatggtgatcatacctgtataatagcaaaagaacatttggagcctaacttaggtgggctcactgttgagcaggctattcaaaacaaagaagttgttcattttaaatcaccatgactatctcattccttatttgaggaaaataaatgcaaataccacaaagacttatgctacaagaaccatatttttcttgaaagatgatggaaccctttttgttgacaccattggccattggagttaagtaagccacatcctcagggtgaagaatatggtcctgttagcgaagtctacgtgcctgccagcgaaggagctggaagcttatatttggttactggcaaaggctacatgttgttgtgaatgctgcatgctaccatcaaatcattagccattggctaagcattcaatgcattgtttgagcccatttgtcatagcaacaaacaggcaactgagtgtggttcaccctatttacaaacttctgtttccttcactaccgtgacaccatgaatattaattcacttgcccggaaagccctggtcaatgcagatggtattatagagaaaacattcttgtggggtaggtactctatggtatatgttctctgtcatttgacaaggactgggttttcactgatcaagcattagctaatgatcgtgtaaagagaggagttgctgcataaggacccatctgctccccatggagtacgacttttgattgaggactatccttatgcttctgatgggctaaagagatggggatgccatcaagtcctggggtgcaagaatatgtctcattctactacaagtcagatgaggaactccaaaaagaccctgaactccaagcttggtggaaagaacttgtagaggtgggtcatggtgatttgaaagataagccatggtggcaaaagcatgcaaactcgtgaagagttggttgaagctgtccgctatcctcatatggattgcttcagcccttcatgctgctgttaactttggacagtatccatatggaggtttaatcctaaacaggccaactattagcaggagattcatgcctgaaaaggggtctcctgaatatgaacgcgttggctaagaaccctgagaagggagtttttgaagactattactggcaagaaggagacgggcattgaccttacagctatagaaatcttgtcaaggcacgcatctgatgagttctaccttgggcagagagatggtggtgactactggacttctgatgccggtccattagaggcatttaagaggtttggaaagaagcttgaagagattgaaaagaagctacacagagaagaacaaagatgacccattgagcaacccgctatgggccagctaaaatgccttacactctgctctatccttctagtgaggagggattgactttcagaggaattcccaacagtatctctatctaaggaccctatggttgcttaagtactgttcctggttttaaaataaatgtgaaattgaaggaaccagattccttaatcagttgtgtatgcttaagtcatgtatttggagtggctgaatgtattctgtatttgtcattaataaagagagttgtgttagtataatggaaaccaaaataataaatgcaatcatgcatgttttaacttttaacaatgctgctgtgaagtgcaaactagaagaaaatatcatcttatctgagtcgcaatttcaattgcagcaagggttagtttttaaaattgcattggccatgtatccaagatatcatttttcctgccaagtcagggcagtataggaaattctagtccacaagctgttatatgacc

SEQ ID NO: 184 - DNA, 1202 bp, Glycine max
cctgtcccagccgccggacaccatcaacgggtccatccgtgtgacggtgcagggcgaggtcatcgagttctgcttcggggaggagcacctgtgcttccagactctgcagcgcttcacggccgccacgctggagcacggcatgcacccgccggtctctcccaagcccgagtggcgcaagctcatggagtcgacccacgcgtccgccacggaggagtaccgctccgtcgtcgtcaaggagccgcgcttcgtcgagtacttcagatcggctacaccggagaccgagtacgggaggatgaacatcggcagccggccagccaagaggaggcccggcggcggcatcacgaccctgcgcgccatcccctggatcttctcgtggactcagaccaggttccaccttcccgtgtggctgggagtcggcgccgcctttaagttcgccatcgacaaggacgtcaggaacttccaggtcctcaaagagatgtacaacgagtggccattcttcagggtcaccctggacctgctggagatggttttcgccaagggagaccccggcattgccggcttgtatgacgagctgcttgtggcggaagaactcaagccctttgggaagcagctcagggacaaatacgtggagacacagcagcttctcctccagatcgctgggcacaaggatattcttgaaggcgatccattcctgaagcaggggctggtgctgcgcaacccctacatcaccaccctgaacgtgttccaggcctacacgctgaagcggataagggaccccaacttcaaggtgacgccccagccgccgctgtccaaggagttcgccgacgagaacaagcccgccggactggtcaagctgaacccggcgagcgagtacccgcccggcctggaagacacgctcatcctcaccatgaagggcatcgccgccggcatgcagaacactggctaggcggcttctcttcactcacctgcagagtgcaccgcaataatcagcttccggatggtggcgttttgtcagttttggatggaaatgccgaactggcagcgtctgttttccctatgcatatgtaatttcctgcctctttatattcactcttgttgtcaagtccaagtggaaaatcttggcatattatacatattgtaataataaacatcgtacaatctgcatgctgttttgtaataattaattaatatcccagcccaaa

SEQ ID NO: 185 - DNA, 527 bp, Glycine max
  unsure (1)..(527): unsure at all n locations
gaattcggctcgaggttttaaattgtttcagtgatttaaggaaaatgggttccaaggctttgctcgtccttgttgtgttcttggcttttgtcctcgttctttctggtgaagttgcacccgaagatatggatgagaattttcatgcaaatgatgtaggtgttgctgatacaaatatggtagatgaaatgaaatatagttacagtagttggcgaactggtgctgcactgccttgtcctcctaattgctgttatgtgttccatggaaagtgtataccgtgctgctgaaccgcataactaagtaggaacttttgctaagaattagttgttgctatcactattgctatgtatagataaagagaaatgctagcaacacaaactacatgagaagtgtagttatgcatggaataaaaatgaaaatccctcatacttaataaaagaatgttagattaatttgacatgatttctctttcnnnnnnnnnnnnnnnnnnnnnnnnnnnnnnnnnnnnnnnnnnnnnnnnnnnnnnnnnn

SEQ ID NO: 186 - DNA, 1008 bp, Glycine max
gaattcggctcgagaattgcatcatcagtttctaaaatttttgcatccacattgacatatcctcacgaggttgtacgttccagattgcaagaacaagggcatcattcggagaaacggtactctggtgtgattgattgtattagaaaggtttttcaacaagaaggtgtacagggtttttaccgaggttgtgccaccaaccttctgaggacaacaccagctgctgtgatcacattcaccagctttgaaatgatacaccgatttcttgtttccctttttccttctgatccacggcctcatattttgtgacgattgatcttggtggtcatctgtcttctgtagcagttagattccaaaaaaatatgttgtttgcaggttgtacgttccagattgcaagaacaagggcatcattcggagaaacggtactctggtgtgattgattgtattagaaaggtttttcaacaaggtgtacagggtttttaccgaggttgtgccaccaaccttctgaggacaacaccagctgctgtgatcacattcaccagctttgaaatgatacaccgatttcttgtttccctttttccttctgatccattttgtgacgattgatcttggtggtcatctgtcttctgtagcagttagattccaattcataagctagtccagctgagtaatccttctcttggcgatgcagatatcattctttgtgacttagttgtttatgtatggtagatccccattatattccaacctagcaacctcaactgagcctggtttccctggtcaaacttgtaaatttgagtgataacaacgatgaagatgataaagtgatatgagatgtcctttgcttgcttattttattttgaaactgctgaatcctgtaaaacatccagcacgatctggatttgctgtattgatgagaatcatgcaatcagcgaatctaaattgttatacgaagataagacagtttatatttaaaaaaaaaaaaaaaaaaaaaaaaaaaagggcggccgc

SEQ ID NO: 187 - DNA, 1148 bp, Glycine max
  unsure (1)..(1148): unsure at all n locations
actcgagccgctcgagcgaattcggctcgaggagattgaggcgggggttgatttggaagaaacccagctaaggtaattcctcgcaacccctaactaaaccttcaaaggatcatcatgggcagtcacaatgctttggctgccactttcggaatattaggtaacatcatttctgtgatggtgtacttggctccggtgccaacgttttaccggatatacaaaaagaaatgcacggacggtttccactcgctgccatacttgttgtcattaatgagttctatgctttggttatactacgccttcctcaaaattcatgacggcgttgttccccttattacgatcaactcgatcggatgtgtcatagagctcatctacattctcacctacattaaatatgcgcacaaggatgcaaggaacttaacctataccctatttgcggcgatgaatattggcttcttggccttggtcctttcctcgcgttttgctctaaatggttcccaccgggtcaaagtcattggatggatttgtgacgccgtttcactcagtgtctttgcatcacctctaagcattatggcaaaagtgattagaacaaagagtgtacagtttatgcccttctatttgtcatttttcctcacactgaatgccataacgtggtttgtatatggtttgtctatgcaagacaaatgcatttatattccaaatgtgggagggtttgcactggggctagttcagatggtgctatatggcatttacaggaagggcagtgagagtgagaaggagcaaggtttaggtgaaggagtgataaacattgttgttgtgaacccgttgggacctgctgaagtcttcccaattgcagtggatgataacaaagtcaaagatcttgttgttgttgatgatgtcactgtgagtcaacaagagaaagagaaaaacgtggaagccaaggatgattgcccagtgtgatgtttttagttacggccgccaggatcatactctgcttttcctctatgttacgttatgtgtgtcgatcagttaccaattaattgttctctataacatcaaacctaccatcatcatcatcatcatcttaatgcattacgcctagctactactttaannnnnnnnnnnnnnnnnnnnnnnnnnnnnnnnnnnnn

SEQ ID NO: 188 - DNA, 354 bp, Glycine max
actcgagcctattcggctcgagcggagattgaggcgggggttgatttggaagaaacccagctaaggtaacatcatttctgtgatggtgtacttggctccggtgccaacgttttaccggatatacaaaaagaaatgcacggacggtttccactcgctgccatacttgttgtcattaatgagttctatgctttggttatactacgccttcctcaaaattcatgacggcgttgttccccttattacgatcaactcgatcggatgtgtcatagagctcatctacattctcacctacattaaatatgcgcacaaggatgcaaggaacttaacctataccctatttgcggcgatgaatat

SEQ ID NO: 189 - DNA, 525 bp, Glycine max
gaattcggctcgaggaaccaccaatcaatctgttctaccctggcattgtgttgtttctagttggcatcattggcaacttctaccaccattaccttctgtccaaattgaggggaaagggtgaaaaggagtacaagattccaaagggtggcttttttgagcttgtgatttgcccccactacttctttgagattactgtgttttatgggatcttcttcatttctcagacattatattcattcgctttcgctgtaggcactactatgtacttggtgggtaggagttactcaactaggaaatggtatctttctaagtttgaagatttccctaagcatgttaaggctgtcatcccatttgtcttctaaatgttgtaatgaacatctaattctacttgagttgtaagtgtgctgctagattgtgtttattggaattgcagctctccaacatccaagtttgagtgatttaataaactattttttaactttggttgattaaaaaaaaaaaaaaaaaaaaaaaaagggcggccgc

SEQ ID NO: 190 - DNA, 1597 bp, Glycine max
gaattcggctcgagaaagaacctgacccaggatgaggatcgcgtgagcactcctcttcagatccgcacaagcattgcatatcaaatcaagcatcctgttccttatctctgtctctgcatttcccttccttcttcttctctctctctctctaaaaccctaattctatacatggaagggaaatctcaaatctaatgactaattaattaatccatcgatcaagcatggagtccgaactcaaagacctcaattcgaagccgccgaacggcaacggcaacagcgttcgcgatgaccgtcctctgctgaagccggagcctccggtctccgccgacagcatcgccgatatggagaagaagttcgccgcttacgtccgccgcgacgtgtacggcaccatgggacgcggcgagttgcctcccaaggagaagctcttgctcggtttcgcgttggtcactcttctccccattcgagtcgttctcgccgtcaccatattgctcttttattacttaatttgtagggtttgcactctcttctctgcgcccactggcgaagaggaacaggaagattacgctcacatgagtgggtggaggagaaccattattgtttcgtgtggacgcgccctctccagactcatgcttttcattttcggcttttattggatccccgaatcgaactctgcctctcaggaagacaagagtcggcagcccgaagagttgaggagacctggcgtaataatttctaatcatgtgtcgtacttggatattttgtatcacatgtcttcctcattccctagttttgttgctaagagatcagtggctaaacttccgctagtcggtctcatcagcaagtgccttggttgtgtctatgttcagcgggaatcaaggtcatcagacttcaagggtgtttcagctgttgtcactgacagaattcgagaagctcatcagaatgagtctgctccattaatgatgttatttccagaaggtacaaccacaaatggagagttcctccttccattcaagactggtggttttttggcaaaggcaccggtacttcctgtgatattacgatatcattaccagagatttagccctgcctgggattccatatctggagtgcgccatgtgatatttctcctgtgtcagtttgtgaattatatggaggtgatccgattacctgtttaccatccttcacagcaggagatggatgatcccaaactatacgctaataatgttagaaggttgatggctactgagggtaatttgatactttctgatattgggctagctgaaaaacgaatatatcacgctgctctcaatggtaataatagcctgcctagtgttttgcatcagaaagacgaatgataatttcatggccccccgtctcaaatgaaatgtagttcccgtcgagttttagtttcaaacttagtatctgcttatgaatggacagcttgtgtgtgaggggtatttatagctaaatagtacacattcacctaaacatctgaatggtacttgtgtaattttcttgtaaataatgtgaccaataatgttttaattgctggtgaactcaattgagccacacaaaaaaaaaaaaaaagggcggccgc

SEQ ID NO: 191 - DNA, 450 bp, Glycine max
gggcgtgagtagttctgttgagatccgcataagcaaatcaatcatcctgttccttccttatctctgtctctgcatttccctccctaaaaccctaattctacatttggaaaggaaatctcaaatctaatgactaattaatcaatcaatcgtattaataatccatcgatcaagtatggagtccgaactcaaagacctcaattcgaagccacccaactgcaacggcaacgccaacagcgtttgcgacgaccgtcctctgctgaagccggagcctccggcctcctccgacagcatcgccgagatggagaagaagttcgccgcgtacgtccgccgcgacgtagtacggcaccatgggacgcggcgagctgccggcgaacgagaagctcttgctcggcttcgcgttggtcactctcctccccattcgagtcgttctcgccgtcaccatattgctct

SEQ ID NO: 192 - DNA, 572 bp, Glycine max
  unsure (1)..(572): unsure at all n locations
gaattcggctcgagaagcagatgaatatgtaattcctcatggtgattgggttgaaattgtctcctctccacattatctgtctgaaatcgttatatacgctagttttgtggtagctactggaggatccaacctaacaatctggctgctttttgtttttgtggtggcaaatctgtcatttgcagctgtggaaacacatggctggtatcgtcagaaatttgaagattatccaagtagtcgctttgctataattccatttattctgtgagattgtgaagcaatgtgtaattatcacaattgatcacggcaaagaacttcattatttcccaaggtgtacttgtttagattaagctattttagtttagagaatcttatacttcaaatacctaaacctaaataatatttggctttgtttttggtgtaaaaatccaaacattcagagtcagtcgtgtattatttacccaccaaaataatacctaaaatagttatgattgcattcattnnnnnnnnnnnnnnnnnnnnnnnnnnnnnnnnnnnnnnnnnnnnnnnnnnnnnnnnnnnnnnnnnnnnnnnnn

SEQ ID NO: 193 - DNA, 1873 bp, Glycine max
ctcatccctgtcctaactccatttcatttgaattcggctcgagcctctctcgctcttgttccgattttagggtttttctaatgggtctcggtaacgatgaagaagaggacaataacaacaacaataataataataagaataacaatgataaggttgtggatgacggagatgctggaggaggaaagtctttcggttcagtgtcgtgttccatttgcctcgaggttgttgccgataatggggatagatcctggtctaagcttcaatgcggtcatcaatttcatctcgattgcattggttcggcattcaacataaaaggagcaatgcagtgccctaattgtcggaagattgagaaaggtcaatggctatatgctaatggttgtcggtcatatcctgaatttagcatggatgagtggactcacgatgaggacctttatgatcttagctactctgagatgtcctttggagttcattggtgcccttttggcaacctggcacgacttccatcatcctttgaggaaggggagttttcgtcatctgcatatcatgatgtattgggacaacatgctatatttgctgaacatacagctgtgtcatctgccagtcatccttgcccgtatattgcttactttggaccaatacatccatcctcctcgaattcgggtggaactgtatcagaagcttcaaacttcaaccattggaatggctcatctgtgcccagtgacatgccaacttcctacacatttcctgctgttgatcttcattatcgcagttgggaacaccactcccctcctttctctacagcaagtagtcgtctagttgctgctgatcagccatcagtatcccctggtagtcaaaggccagccaggggtggttcggatgtaccaagatcaggatcttttatgcatcccttccttgttggtcacagttctgctgccagagtggggagctcggttgcttcctcaatgatccctccttatcctggtagcaatgctcgtgcccgtgatagagtccaggctcttcaggcatactatcaaccacagcaacctcctaattcaaccacaatgcggacacctattgcttctggcacccgaagatccagtagtcataatggatctcctcaattagccccaataaccacatcgtcagaccaaagtggtggcttctttcttatcccatcaagttcatcaggacacaattttcaagaagaaaatcatcatctaccaaatcacttccatgcttgggaaagagaccacttgccttcgttgtcattgagccatgtcgatagagattcaggttggagagcgtaccaccaggccaccagccggtcagacccaggtaccaggtccagcagctttcgtttgaggcatggatcggatagaacgccttcacaaaatcggtaatacacttgtatcctgttcactgtgaagcaaactaccattactatggaaaattatgtatgctttgaaaaatgttacatattgctttggcactttggcctttgggtctgtcctgttatgacagtatatactctggctggccttggaattgatttttccatagccaccagtgtgatggacatttgcttcctctagttttatttgccctggtgggcataaaataagatggtgtatctagttggggaaatcaggttttggaagaaatactggggcgttgtgatttcaagtgatgatgaatcaagtggatgaaagcagctgtggttggatttgtagtgggtcaactatttatgtttgataatgacactcatgcaattgctgtgtatttgagaatacaagtacttttacttctaccccatggcaagagtgatttgtaaaaaaaaaaaaaaaaaaaaaaaaaaaaaaaaaagggcggccgc

SEQ ID NO: 194 - DNA, 399 bp, Glycine max
ggtgtgatggacatttgcttcctctagtttatttgccccggtgggcataaaataagatggtatatctagttggggaaatcaggttttggaagaaatactgggacgttgtgatttcaagtggtgaatcaagtggacgaaagcagctgtggctggatttgtagtgggtcaactatttatgtttgataacaacgctcatgcaaatgctgtgtattgagaatacaattttacttctactccatggcaagagtgatttgtaaactgttgtgcaagaattgagccaaggtatatggtaatggaactcgcatgagaactaccatacctcggaataataggagttcaaaggctggttttaaaacaatcgtaaaactggttttttaataaaaccctattcccaacccc

SEQ ID NO: 195 - DNA, 365 bp, Glycine max
gcgcttttggttataaaagatgaaaagtgatggatctcagaatcgtcactggctagtgaaatatgctcaggtcatatgattgatattccatgcacattttggggttacaactttcaatggattaatttctgctgttgtacaactttcaatgcattaatttctgcagttctgctgccagagcggggagctcggttgcttcctcaatgatccctccttatcctgggagcaatgctcgtgcccgggatagagtccaggctcttcaggcatactatcaaccacagcaacctcctaattcaaccacaatgcggacacctatcgcttctggcacccgaagatccagtagtcataatggaccagctcaatta

SEQ ID NO: 196 - DNA, 488 bp, Glycine max
cggaaataaaaaaatcccaaagaaattcaatcttcttcatccccaaaccaaagacttgagatctcagattacaccctttcttcctttgttttctcattcctgtcctttctcagacaacaccatctctctctctcttgttccctttttagggtttttgtaatgggtctcggtaacgacgaagaagaggataacaataacaatgataaggttgtggatgacggagatgttggaggaggaaagtctttcggttcagtgtcgtgttccatttgcctcgaggttgttgccgataatggggatagatcctggtctaagcttcaatgcggtcatcaatttcacctccattgcattggttcaccattcaacataaaaggagcaatgcattgccctaattgtcggaagattgaaaaaggtcaatggctatatgctaatggttggcgctcatatccttaatttaacatggatgagtggactcacgattaggatcttta

SEQ ID NO: 197 - DNA, 629 bp, Glycine max
cacacatacttattcataaaattgtattaattcgctaatacgaaaaaaagacaatgcaacaattttatttttatacatcactcaatgttctgccaactcaatatccatagagaaaacatgcaaactgacttgaaaacattaaaatgcattattcttgatcttctttcatatgatgatacttcacttcaagaagaagaagcagcagcaacagcagatgcatgcttggctatggtggcttgaaggtcatccttactagcaccaaccaccttgtccacgatcttgccattctttcaagaagaggaaggttggcatggcctcaatgaaatattcttcaccaccagccttcactttcatcaacatccactttgaggaagatcaattcaggagttttcttttgcaatctcctgcaagaactggggccataaaacggcatggaccacaccaggaagcactaaaatccaccacaatcagttttttggagtcttttgcattctggagttgcagcttccactcatcaacggtgtcgacgccgatgacctgtccctcttccacttcagccattcacaaaatctaagtctagagagagagagacagagagagagagagcttgaaattgtaaatgatatacc

SEQ ID NO: 198 - DNA, 1830 bp, Glycine max
agaaggggacaactcaaacattctctccattggtccttaaaaaacccaccatccacaacaatggccaacctagttttttccctttgtcttctggctgatcagtggctgctgcttcgctttcagttccagagagcggcctcagcaaaacgagtgccagatccaggaactcaatgccctcagaccggataaccgtatagagtcagaaggagggctcaattgagacattggaacccctaacaacaagcccattccagtgtcgccggtgttgccctctctcgctgtaccctcaaccgcaacgcccttcgtagaccttcctacaccaacggtccccaggaaatctacatccaacaaagtaaagggtatttttggcatgatatacccggggttgtcctagcacatttgaagagcctcaacaacctcaacaaagaggacaaagcagcagaccacaagaccgataaccagaagatctataacttcagagagggtgatttgatcgcagtgcctactggtgttgcatggtggatgtacaacaatgaagacacttcctgttgttgccgtttctattgattgacaccaacagcttggagaaccagctcgaccagatgcctaggagatactatcctgcctggaaccaaagagcagaagtttctaaacatatcagcaagagcaaggaggtcatcaaagccagaaaggtaagcatcagcacgaagaagaaaacgacagaggcagcatattgagtggcttcaccctggaattcttggaacatgcattcagcgtggacatagcagatagcgaaaaacctacaaggagagaacgaaggggaagacaagggagccattgtgacagtgaaaggaggtctgagcgtgaagagaaccacccacggacgagcagcaacaaagaccccaggaagaggaagaagaagaagaggatgagaagccacagtgcaagggtaaagacaaacacttgccaacgccccccgggaagccaaagcaaaagcagaagaaatggcattgacgagaccatatgcaccatgagacttcgccacaacattggccagacttcatcacctgacatctacaaccctcaagccggtagcgtcgcacctgcaccaggcttgtacttaccgagccttctcgtagctccagactcagtgctgagtttggatctctcggcagaaatgcaatgttcgtgccacactacaacctgaacgcgaacaagaataatatacgcattgaatggacgggcattgatacaagtggcgaattgcaacggtgagagagtgtttgatggagagctgcaagagggacgggtgctgatcgtgccacgaaactcttgtggtggctgcaagatgcacagagtgcacaacttcgagtatgtgtcattcaagacgcaatgatacacccatgatcggcactcttgcaggggcaaactcattgttgaaacgcattacccagaggaagtgattcagcacactttcaacctaaaaagccagcaggccaggcagataaagaacaacaaccctttcaagtttctgggttccacctcaggagtctcagaagagagctgtggcttagagccctttttgtatgtgctaccccacttttgtctttttggcaatagtgctagcaaccaataaataataataataataatgaataagaaaacaaaggcttttagcttgccttttgttcactgtaaaataataatgtaagtactctctataatgagtcacgaaacttttgcgggaataaaaggagacaattccaatgagttttctgtcaaaaaaaaaaaaaaaaaaaactcgcgcctagttctctcctaagaacccca

SEQ ID NO: 199 - DNA, 1801 bp, Glycine max
agaagacgacagaaggggacaacacagacattctctccattgtctttgaacactcatcaccagtggccaagcttgttctttccctgtgtttcctatcttttcagtggctgcttcgctctgagagagcaggcacagcaaaatgagtgccagaacactgtaagctgaatgccctcaaaccggataaccgtatagagtcggaaggtgggcttcattgagacctggaaccctaccaacaagccattccagtgtgccggtgttgcccttcctttttcgctgcacccttatactgaaatgcccttcgtagaccttcctacaccaacggaccccaggaaatctacatacaacacaggtaactggtatcttttggcactgatattccccggagttgtctctagcatcttatcatagagtccgcaacgaatctcagcaatcgaggacgtaagccagaggccccaagaccgtcaccaaaaggtacatcgcttcagagagggtgatttgatcgcattgcctactggtgttgcatggtggatgtacaacaatgaagacactcctgttgttgccgtttctattattgacaccaacagctatggagaactagctcgaccagatgcctaggaagattctatcttgctgggtaccaagagcaagagtttctacagtatcagccacagaagcagcaaggaggtactcaaagccagaaaggaaagcgtcagcaagaagaagaaaacgaaggaggcagcatattgagtggcttcgccccggaattcttgaaagaaggcgttacggcgtgaacatgcagatagtgagaaacctacaaggtgagaacgaagaggaggatagtggagccattgtgacagtgaaaggaggtctaagagtcacagctccagccatgaggaagccacagcaagaagaagatgatgatgatgaggaagagcagccacagtgcgtggagcacagacaaaggttgccaacgccaaagcaaaaggagcagcaatggcattgctgagaccatttgcacaatgagacttcgccaaaacattggtcagcattcatcaactgacatctacaaccctcaagctggtagcatcacaaccgccaccagccttgacttcccagccctctggcttctcaaactcagtgcccagtatggatcactccgcaagaatgctatgttcgtgccacactacaccctgaacgcgaacagcataatatacgcattgaatgcggcgggctattggtactagtggtgaattgaccatggttgaaaagagtgtttgatggagagctgcaagagggaggggtgctgatcgttccacacaactttgcggtggctgcacaatcccagagcgataactttggagtatgtgtcattcaagaccaatgatagaccctcgatcggaaaccttgcaggggcaaactcattgttgaacgcattgccagaggaagtgattcagcacacttttaacctaaagagccagcaggccaggcaggtggaagaacaacaaccctttcagcttcctggttccacctaaggatctctcagaggagagttgtggcttagagagccctttttgcatgtggtacccccactttgtcccttttgggctctagctagtgctggtagcagtaaataagaatgaataaaagaaacaaaggcttagatgccctttgttaagtgtagaataacgggtatagtaactatgtacccttgtgtaatgagtcactcaagtacctatgcgggaaaagcataaataaaagaagaaattccaataaaaaaaaaaaaaaaaaaagggcggccgcc

SEQ ID NO: 200 - DNA, 1587 bp, Glycine max
ggcaacgaaaatgaaaaactcctatataaggcaaagctgcctctggctgtaaccctaatagaattcggctcgaggtttggctcttcaagacttgcttcttttctatttaattcctaaaatcccattcttcttcgctcattcctctgcactgccatcatccccaacttcctcacaaggttaacaaggactaaagagttgtgccaccatgtcggacgatgaaagggaggagaaagagttggatctctcttctgccgaagttgtcaccaaatacaaaaccgctgctgagatcgttaacaaggccttgaagctagttatttcagaatgtaaaccaaaggcgaagattgtggatatttgtgagaaaggggattcatacattagagagcaaactggaaatgtgtacaagaatgtgaagaggaagattgagagaggtgttgctttcccaacatgtttatcaatcaacaacgttgtctgccatttctctccactagccagtgatgaggccgtgttggaagaaggtgatatattgaaaattgatatggcatgccatatagatgggttcattgctgtggtagctcacacccatgttcttcaggaaggtcctgttactggaagggcagctgatgtcattgctgctgctaatactgctgctgaggtggccttgaggcttgtcaggccgggaaagaagaacaaggatgtaagtgatgcaattcaaaaggttgctgctgcctatgactgtaaaattgttgagggtgttcttagccaccaaatgaagcagtttgttattgatgggaataaagttgtgcttagtttgtctaatccagacacaagggttgacgaagcagagtttgaggagaacgaagtttatgcaattgatatagtaacaagcactggggatggcaagcctaagctgttggatgagaagcagacaactatttataagagggctgttgacaagagttatcacttgaagatgaaagcgtctaggttcattttcagtgaaataagccaaaaatttccaatcatgccattctctgctagggctttggaagagaaaagagctcgacttggtttggtggaatgcgtcaaccatgagctcttgcagccatatcctgttttgcatgaaaagcctggtgattttgttgcacatatcaaattcacagtcttgttgatgccaaatggatcggatcgaatcacaactcatccactccaagaattgcagcccacaaaaacaatagatgatcctgatattaaggcctggctagccttgggcacaaagacaaagaagaaaggtggtggaaagaagaaaaaaggtaagaaaggggagaaggcagatgagtcagctgaagctgagcctatggactcaacaaacgaggccactcctcaagagtgacttaactctcctcccctctcctctcccccaaacaatgaaagaagttttttcatttcattttcgataccccttttcaattttggtacactgttcaccaaattgtattttgcttggatatcaattttagtatagtgttccgacattgattctaatagcaattttcatatgctcaaaaaaaaaaaaaaaagggcggccgc

SEQ ID NO: 201 - DNA, 1510 bp, Glycine max
aataaaactataaatatattcacataagtatgaatgttgagtttctacaggcaagtaaaataatttataggactaatgaaatattcaacactaccctcaatggcaaagctacagtccaagtccaatttaacgaatatataatataaataaaaaagagatagcgaagaaaaaaggattagaaagtatcgttttcctctgacttctgagaaacttctgggaatcggtcccaaacggttaaacgacgcacgtgacgtctccgcgtgccggtttcggattccctacagcactacgtatctaatctaaaatgtttcattcgattagccgtcgccgcgtgtcagttgcacaccctttgatttgtcctgtgacacggactcaaccacggcgtttcctgattctcgcgatggttctggcaatccaacggctcagatttcacgtctgcagaacccacgtgatgcaggcgcagcagggtatcttcctctcctcctcctcctcctcctccgcaatctcgaccacttccacttcctcctcctccctctctcgctcgcttcgctccaatcgccacgccaaacagcttcggattcggaattagatttatctccttcggcaccgtatccgccgcgtcctcgccggagctccgtttcaccggcatcaaatccagtggcttcaccgccgtcatgccggactccctgcttccctgtgctccaccggcgccgccgtcagtttggtaactgccgttgctgtttccgtttttgtttccgtagcttgacatgagagaatatatgttgttgcagagcgatctcatctcggcgagttctttcgttaactgaacgttctctttcctaagccgctcgttctcgtcgagaagctccgccggcgctcgcaacggcgacgagttcgacgatatcacctgctcctcgccagagttcgacggcgatatgatcggtatcgcggtcaacggcatcggcaccgtaaccgtcgtcggcgcagtcggagacggcgccggcgatgagatcttccgccgctgaatttcgcaaagaagccgcttctcgcctcggcggaaataatcgttcgagaactcccaccgatcaggcacaactttcctgaatccgtaagtgttgagttggcgaacgaagctagagaaattattgtgtttgaaaaatttaggaagcaagtctctggcgaaaacggtagggttccagacgataaacgttgacccgtcgtcgttccaggaaataacgtcgtcgatggattggtcgtcgacgagttgataggttttggtgagaaagggcgtgggaattgatctctgagactccgcggaggcggaggcggaggcggtagcggcggagtcgccgttgtgttccaccggcggcggtggagccatggaagaggaggcgcagatcaatgggtatttttgcgggttatcggtgttgaaacgcgagggaacggagaatgatgttatggtggttctagaaggttccgttggaaatataaggatgagagagagagagag

SEQ ID NO: 202 - DNA, 1132 bp, Glycine max
  unsure (1)..(1132): unsure at all n locations
tgggttcatttctgctgttgcacacatacatgctcttcaggaggggccagggcaggacgggcattcgatgctcttgcagcagcaaacaccgctgccgaagtggccttgcggcttgtaaggcctggaaggaagaacaaggatgtaactgaagcaattcagaagattgccgcagcgtatgattgtaaaattgttgagggtgttcttagccaccaaatgaaacagtctgtgattgatgggaataaggttgtgctaagtgtatccaatccagatacaagggctgatgatgcagagtttgaggagaatgaagtttatgcaattgatatcgtagcaagtactggagatggcaagccgaagcttttggatgaacagcagacaactatttataagagagctgttgacaagagctatcacttgaagatgaaagcatctaggttcattttcagtgaaataagccaaaagtttcccatcatgcccttctctgcaagggctttggaagagaaaagagctcgtttgggtttagtggaatgtgtgaatcatgagctcctgcaaccttatcctgttctgcatgaaaagcctggtgattatgttgcacatatcaaattcactgtcttgctaatgcccaatggatcagatcgtgttacgtctcactcactccaggagttgcagcccaccaaaacaatagatgatcccgaaatcaaggcgtggctagcattgggcacaaagacaaagaagaaaggcggtggaaagaagaagaaaggtaagaagggggcagaagctgaaccaatggatgcaacaaatgatgctacaccccaagaacaagattgagagacaaaaaccctttgattttgcttttgatccctttcaattttggtacatttttcaccaagttgtatctgcttgattgtgaatttagtacagctttcggacatccaatgttaataggaatttgatttccttggctattgtacttgacctgaatgctgtactcctgattaagcataaatatgcttaattgttggaggggttttaatttataaacaaaagatatcaaatttaaaacccaattacatggttggaaatgtatgttgtgaggttttgnnnnnnnnnnnnnnnnnnnnnnnnnnnnnnnnnn

SEQ ID NO: 203 - DNA, 1056 bp, Glycine max
acccgcgtgatgcaggcgcagcagcgtatcttcctctcctccacctccacaatctccaccacctcctccctctctcgctcgattcgctccaatcgccacaccaaacagcttcggattcatctcctccggcgccatctccgccgcgtcctcatcggagctccgcatcaccggcatcaaatccagcagcttcaccgccgtcatgccggactctaaacttccgtgcgcgacaccggcgccgcctttagttttgtaactgccgttgctgtttccttttccgttggcgtttgcataatttgacatgagagaataaatattgttgcagagcgatctcatctccgcgagctctttcgttaactgaacgttctctttcctcagtcgctcgttctcgtcgagaagctccgccggcgatgagttcgacgacgtcacctgctcctcgccggagttcgacgccgatatgatcggtatcgcagtcaacggcatcggcgcagtgaccgaaaccgtcgccggcgccgtcggagacgacgccggcgaggagatcttccgccgctgaatttcgcacagaagccgcttctcgcctcggcggaaatactcgttcgagaactcccaccgatcaggtacaacttttctgaatccgtaagtgttgagctggcgaacgaagctagagaaattgttgtgtttgaaatatttaggaagcaagtctctggcgaagacggtagggttccagacgataaacgttgatccgtcgtcgttccaggaaataacatcgtcgatggattggtcgtcgacgagttgaaaggttttggtgagaaacggcgtgggaatggatctctgagactccgcggctgcggaggcggatgctgaggcggtggtggcgcagtcgccgttgtattccacaggcagctttgccatggaacaggaggcgcagatcaatggagatttttgcgggttatcggtgttgaaacgcgagggaagggcagaatgatgttatggtggccccgcccgcgtgggcggacgcgtgggcggacgcgtgggcggacgcgtgggcggacgcgtggg

SEQ ID NO: 204 - DNA, 876 bp, Glycine max
cagcgtatgattgtaaaattgttaagggtgttcttagccaccaaatgaaacagtttgtgattgatgggaataaggttgtgctaagtgtatccaatccagatacaagggttgatgatgcagagtttgaggagaatcaagtttatgcaattgatatcgtagcaagtactggagatggcaagcgtaagcttttggatgaaaagcagacaactatttataagagagctgttgacaagagctattactcctcctcctcatcatctgcaatctcgaccacttccacttcctcctcctccctctctagctcgcttcgctccaatcgccacgccaaacagcttcggattcggaattaaatttatctccttcggcaccgtatccgccgcgtcctcgccggagctccgtttcaccggcatcaaatccagtggcttcaccgccgtcatgccggactccctgcttccctgtgctccaccggcgccgccgtcagtttggtaactgccgttgctgtttccgtttttgtttccgtagcttgacatgagagagtatatgttgctgcagagcgatctcatctccgggagctctatcattagctgaacgttctctttcctcagtcgctcgttctcgtctagaagctcgaccggcgatgagttcgacgacgtcacctgctcctggccggagttagacggcgatatgatcggtatcgcagtcaacggcatcggcgcagtggccgaaaccgtcgccggagccgtcggagattaagccggcgaggagatcttccgccggtgaatttcgcacagaagccgcttcccgccccggcggaaaaactcggtcgaggactcccgccgatcaggggctacttttctgaatcacccgaagctgagg

SEQ ID NO: 205 - DNA, 782 bp, Glycine max
  unsure (1)..(782): unsure at all n locations
anngtctccctagaacgcaatttaaaatgccgctaatttaaagggggtatgaattatcatcaactacaaagcaatacacgggaagggagaaaaattaaccaactcacacagcttgtaagcaccacaaacacaaacagctgaaaggaagcatatgaaatacataaaacattaaagtaaaactttacatgttaccacggcgtatatcaaattccatcagacaagctgatttcttgaacataataaattcagtacacaagcaaacgaaaataacagatagaacagtaaatattcaaaatctaggatagatggtccaaatgtccgaggagctcaaccacatcataattctagtggccatatttctgaaactcccactcactgttatctagaggacaaacttgacgagtcttgagccatcgactgatgcaatggaagtgaaaagcatggttacaaactccccaagccacagtgcattcctcgctagtggcgctagcctggttggcttggcactcgatgcagagatccatgatgtggttccggcagatagcacagttatcgacaacgatgtcccaagcccagagagcgacggcgttccacttcttgatctcgaagcgcttgggcttcttggaagaaggaccggcgctgctcgagggctcgccggcgggaaccataggcacgtcggaatccagagtcgccatcggaatctcgctctctttctcttgcaactctgtgtgtgtgtgtgtgatttgtgtagtagtgattagtgcgtgagtttatttctttga

SEQ ID NO: 206 - DNA, 570 bp, Glycine max
tttttttttttttttagaagcgactcttctgaataaaattccaataggcaagcaaaagacaacaagtaatgtagagctatttttttttttatcagcagtaatgtagagctataaatttgatagaaatgctacaatccaaatgtccaagttggaagtagctcagccgcatcaaagttctagtgaccgtatttctgaaattcccactcgctattatctagaggacatacttgacgggtcttgagccatcggcttatgcaatggaagtgaaaagcatggttacaaactccccaagctacagtgcattcctcgctagtggcgctagcctggttggcctggcactcaatacagagatccatgatatggttccgacaaatagcgcaattatccacgacaatatcccaagcccagagggaaaccgcattccacttcttgatctcgaaacgcttcggcttcttggtggacgaagaaggaccggcgctgctggaggcttcgccggccggaaacacggtcacgtcggaatccagtgtcgccatgatgcctctcggactcggtcagagtttttctgccgtc

SEQ ID NO: 207 - DNA, 433 bp, Glycine max
cactgttatctagaggacaaacttgacgagtcttgagccatcgactgatgcaatggaagtgaaaagcatggttacaaactccccaagccacagtgcattcctcgctagtggcgctagcctggttggcttggcactcgatgcagagatccatgatgtggttccggcagatagcacagttatcgacaacgatgtcccaagcccagagagcgacggcgttccacttcttgatctcgaagcgcttgggcttcttggaagaaggaccggcgctgctcgagggctcgccggcgggaaccataggcacgtcggaatcaagagtcgccatcttcttttatctttctcttgcaactctgtgtgatttgtgtagtgcttagtgggtgagtttatttcttcgaatgtggaataaccagtagtgaaaggtactggcatgtttaaa

SEQ ID NO: 208 - DNA, 376 bp, Glycine max
tttgcatgctataatattccataaatcttgtcattgagtgaattaacaccaccgttttgccacattgttagagaaggatatgatcgaattaggaactgggggcgtaactatatgcgaaagcatttagaagtgactcttttgaataaaactccaataggcaagcaaagacaacatgtagagctataaagttgatagaaatgctacaatccaaatgtccaagatggaagtagctcagccgcatcaaagttctagtgaccgtatttctgaaactcccactcgctattatctagaggacatacttgacgggtcttgagccatcggcttatgcaatggaagtgaaaagcatggttacaaactccccaagctacagtgcatt

SEQ ID NO: 209 - DNA, 1442 bp, Glycine max
gaattcggctcgtggttcagtaagaatctgattagaattgaaagttaaaggttaattgtgatcactagctactatttggtgcactgtgaaaaataaacacatgttgatgaacttgaaaagagccccttgttcactataaattagttgtggtagtttccactgccttagctgcaaactaaaccaattttcttcgtctgtgtaacaaacacttcaacaatctactctatacccgatttacaagatgagttcatttagccaaaatccctatgttttagttctgttcctcgttctcactgtgtggatatcccgtgtaatgtctcgcgggctcattacatctgagagacatgagaaatggatggcacaatatggtaaggtttacaaggatgctgcagagaaggagaaacgtttccaagtattcaaaaacaatgtgcagttcattgagtcattcaatgctgctggggacaaacctttcaaccttagcattaaccaatttgcggaccttcatgatgaagaatttaaggctttactaaacaatgttcagaaaaaggcaagtagggtggagacagcaacagaaacatcgtttaggtatgagaatgtaactaagattccttctaccatggactggaggaaaagaggtgctgtcactccaatcaaggaccaaggctacacatgtggaagttgttgggcatttgcaactgtggctactgtcgagagtctccatcaaataactacaggtgaattggtgtccctatcagagcaagaactagtagattgtgttagaggtgacagtgaaggttgccgtggtggttatgtggaaaatgcctttgaatttattgctaataaaggtggaataacaagtgaagcatactatccttacaaaggaaaagatagaagttgtaaggttaagaaggagactcatggtgtggcacggattatagggtatgagagtgttccttctaatagtgaaaaggcactcctaaaagctgtggcaaatcaaccagtttcagtttatattgatgcaggagcaattgctttcaaattttactcaagtgggatttttgaagcaagaaattgtggaactcatctagaccatgctgttgcagttgttggttatggtaaacttcgtgatggtacaaagtattggctagtaaaaaattcatggagcactgcatggggtgagaaagggtacatgaggatcaagcgagacatacgtgccaagaaaggcttatgtggaattgcttcaaatgcctcttatccaatcgcttaataagtgttcttgataattcatataaatctgaaaaggtcattataatcgtatatatgcacgcatctaccaaaaaaaaaaaaaaagggcggccgcgcataggttgtgctagtactaaaattgcgtgtaaacttttatttcaaccatatataatgagaataagatattgctagtatga

SEQ ID NO: 210 - DNA, 401 bp, Glycine max
ggctgcaaattaaaccaattttctttgtctatgcaacctacacttcaacaaagcttctctaaacccaatagctctgattacaagatgagttcatttagccaaaaccactatattttagttttgttccttgttctcactgtgtggacatcccacgtcatgtctcgcaggttgtctgaggcctgcacttccgagagacatgagaagtggatggcacagtatggtaagctttacaaggatgctgctgagaaggaaaaacgtttccaaatattcaaaaacaatgtgcacttcattgagtctttcaatgctgctggggacaaacctttcaaccttagcattaaccaatttgctgaccttcataatgaagaatttaaggctttactaactaatggtaacaagaaggt

SEQ ID NO: 211 - DNA, 262 bp, Glycine max
cttcgttcagtaagaatctgattagaattgaaagttaaaggttaatacgtgatcactagctactatttggtgcactgtgaaaaataaacacatgttgatgaacttgaaaaggcactcctaaaagctgtggcaaatcaaccagtttcagtttatattgatgcaggagcaattgctttcaaattttactcaagtgggatttttgaagcaagaaattgtggaactcatctagaccatgctgttgcagttgttggttatggtaaac

SEQ ID NO: 212 - DNA, 1473 bp, Glycine max
gaattcggctcgaggcctctggaagcacttgatcaagactcaagagtgaacaaaaaaaaaatgatgggtacccttaaggtgtccaacagtagtttatacatattttcgaagttcctagtaatttgtatggtgatgatgatatctttggttgattcaagttattccttgtgtgattttgaggcaatcttcaattttggtgattcgaattcagatacgggtgggtttcatacaagctttcctgcacagcctgctccctatggaatgacttacttcaaaaaaccagtggggcgtgcttctgatggaaggcttattgttgattttctcgctcagggtcttggattgccatatttgagcccatatctgcaatcaattggatcagactatactcatggggctaactttgcgtcttcagcctccactgtgattccgcccacaacttccttctctgtcagtgggctaagtccattttccctctctgttcaactcaggcaaatggagcaattcaaagccaaagttgatgaatttcatcaaacaggaacaaggatatcatctggaacgaaaatcccttctccagatatatttggaaaggccctttacacgttctatattgggcaaaatgacttcacttccaaaatagcagccactggtagtattgatggagtgaggggcagccttcctcacatcgtttcacaaatcaatgctgctatcaaggagctatatgcacaaggggggcgtgcatttatggtattcaatcttggtcctgtgggatgctatcctggatacttggtggagcttcctcatgctactcccgactatgatgagtttggatgcattgtttctcacaacaatgctgtaaatgattataacaaactgttgagggatacattgactcaaaccggagaaagtttagtagatgcttcccttatttatgcggacacacactctgctctcttggagctctttcaccaccccacattctatggactaaagtataataccagaacatgttgtgggtatggaggcggtgtctacaactttaaccctaaaattttgtgcggccatatgctagcaagtgcttgtgatgaaccccagaactatgtgagctgggatggcatccatttcacagaagcagcaaacaagattgttgcacatgccattctaaatggttctcttttttatcctcctttccctcttcataaacactgtgatctccaacctattggttgatccagtgcttgcagctaggggtctttcgtatttaccgattaagctattttgaaatgctcagctatcatattgttaaataatgttttggtttgtgggtgtccggtgccactttcatgcttgtgtgtaatagtttgaacaaaaacatgttacttcttggtatcattactatttgatgaaaaagaaaaaaaaaatcaaatacaagttaagctttgataaaaaaaaaaaaaaaaaaaaaagggcggccgc

SEQ ID NO: 213 - DNA, 1816 bp, Glycine max
ctgtattatttccttcttcagcttagctcaaccacttccacttcaacaatcaacacggcttcatcactcgcaaccatactcgtcgccttgccccaaaccccgcaatgccgtagcaccttccgatccgatccacccaaactatccctaaccctaaaacccaaggccactgttacatgtaaggccaccctgtccactaccctggagactagcatccagcagcagcagcagcaagatgaccaaaaacaaaagcccgtggccgaggtgtggcgcaagatccacggggaggacaactgggccgggcttctggacccgatggacccggttatgcgaggcgagctgacccgctacggcgagatggcccaggcctgctacgacgcattcgacttcgacccgtactccaaatactgcggcagctgcaggttccccttgcccgaattcttcgactccctgggcatgaccaacgtgggctacaccatgacgcggtacctctacgccaccgccaacatcaacctcccgaacttcttccgcaagtcacgctggcctcacaagatgtggagcaagcacgccaactgggcgggcttcatcgccgtctccgacgatgaaaccagcaagcgcctcggccgcagagacatcgttatctcgtggcgaggcaccgtcacccacgtggagtgggtggcggatttgctgaatttcctgaaaccgatctcccctgacattccctgttcagacaggaaagtcaaggtagaggccggtttcttggatctgtacacggacagggagccagggtgcgggtactgtaagtactctgcgagggaacaggttttgggagaggtgaagcggttgatggagaagtatgcggacgaggaggttagtgttacgatagccggacatagccttgggagtgcgatggcgatattgagtgcctttgatattgttgaaactggggtgaatgtggggaaggatgggagaaaagcgcatgtttcggtgttttcgttttcggggccgagggtggggaatgttaggtttaaggagaggttggagggggagcttgggattaaggtgctgagggtgcataatgctcatgacatggtgccacagtcgccggggttgattttcaacgaggattcgccgcagtggttgctgaagctggtggaggggtggtttccgtggtgttacttgcacgttggagaggagttgcagttggaccataagaaatccccgtttctcaaccctgacggggatgcttcctgcgcccataacttggaggctcacttgcacttgctagatggataccatgggaagaatcgtggatttgagcgaacaagtgagagggaccttgctctggtgaacaaggactgtgacttcttgaaagatgagcattcggtgccaccacggtggaggcaagacttgaacaaaaacatggtcaggactgaagatggacgctgggtgctcgctgatcgtccactagctcaagatccacatgaagatattgatcatcatctcggagagctaggcctcgcttcttctcatactcacactcataattgaatggattcattgcatcttttggagactatcttggagtatttttgcacgagcaccacgcttataaaaacaaaatcaatttaaaagttggaatggtattcaaataactcaacttataaatattgttatggactttattgttaaaaaatataatatagttattaagataaatatgctaacagatgtaaacattagagttattggtttatctatataaagataagtttagcggaaaaaaaaaaaaaaaaaaaaaaaaaaaaagggcggccgc

SEQ ID NO: 214 - DNA, 2000 bp, Glycine max
gaattcggctcgagggaacactgaccattactgttggcaaagaccagaggacatgacaaccgaccgtcatgcctacaaggtcgatccgagcaatcccggttccgatctcgccggagaaaccgccgccgcaatggccgccgcatccatagttttcagacgctctaaccctgcctatgccggcgaacttctccgccatgcctaccagctatttgattttgctgacaaatacagaggcaaatatgacagcagcatcacggttgcccaaaagtattacagatccatcagtggttacaatgatgaattgctctgggctgctgcttggttgtatcaagcatctaacaaccagtattacttggattaccttggaagaaatggtgattccatgggtggaactggttggaacatgactgaatttggttgggatgtcaagtatgctggtgttcagacattagttgccaagttcctgatgcaaggcaaagctgggcatcatgctccagttttcgagagatatcagcagaaggctgaatctttcatgtgttcatgccttgggaagagtagtcgcaatgttcagaagactccgggtggcctcatcttccgccagagatggaacaacatgcagtttgtcacaagtgcctcatttttagccactgtctactctgactaccttgcttcatctggtagaaacctgagatgcagttcagggaatgtcccccctgctgagcttctctcccttgcaaagtctcaggtggactaccttcttggggacaacccaagagctactagttacatggtgggctatggaagcaacttcccacaaagggttcatcacagaggttcatccattgtttccatcaaggttaacccttcatttgtcagctgccgtggaggttatgctacatggtttagcagcaaaaggagcgaccccaacctgctcactggtgctcttgttggtggacctgatgcatatgatgactttgctgatgaaagagataactatgagcagacagagccagcaacatataacaatgctcctcttattggtattctggcaagactaggtggaggtcatggtggctataaccagcttcttccagttgttgttccagctcctaagcctgctgttaccaagcctcaaccaacccccagtcccaagacaactccttctccagcttcatggtcaggcccaatttccattgaacagaaaaggaccacctcatgggttgccaatggaaaaacttattacagatactcaacagtcgtgactaacaaatctaacaagagtctcaattctctcaatctttcaatatccaagctttatggtccaatctggggtgtcacaaagtcaggtgattcatacacattcccatcatggctcagctcattatcagctggcaaaagccttgaatttgtctacatccattctgcttcagcagcagatgtctccgtgacaaactacgtgttggcctgagagtgacatgggaatggtttactgctttgttgtgtaagattgtgtagccatacaaatgtgcagcgaggggagtgtctttacgtttttccttctataatttggtgtcaaatcttcttcttcttcttcttcccttgtgtattttgcatttcagtaggttagatcaaaataggtagattatataagatggaaggaccggagcagaaaggagtgaagagacaaaaggcagagctcatcctctttcttctccgctttacaacttatatacagtgagtgatacaagacagacagtgaaacagtgttgttgagaagtttaaaaaaaaaaggtgaacttctcaatatttcagagaagagtcatcacttgtatttttcaacagctttggatgtcttttctgtgtttgatgttgtaagctttgcagcattttgtaatctctacagagaaacagtttgtgctatatagtattatgtttttgtgctgtgcaatactaatttggttatttcaagttgatgcctattaaattaattgaatggttgg

SEQ ID NO: 215 - DNA, 417 bp, Glycine max
ggatgaagataggatgcttctgaaattccgatgctcaataaggtccttaagtaaaaaatactactgtcgtcacagatctgaatctggtcccctctggtatcgtgtagtactagtattttagttgcatctaataaatgaggatacccaagaagttgatttaataaatgttcaccaacttaacataagctatttgattttgctgacaaatacagaggcaaatatgacagcagcatcacggttgcccaaaagtattacagatccatcagtggttacaatgatgaattgctctgggctgctgcttggttgtatcaagcatctaacaaccagtattacttggattaccttggaagaaatggtgattccatgggtggaactggttggagcatgactgaatttggttgggatgtcaagtatgct

SEQ ID NO: 216 - DNA, 1799 bp, Glycine max
agaatcgaactcgagccgaattcggctcgagctcgagccgaatcggctcgagttagttcttttccatggctctattattcttctactttttggttcttatttcctttgccttcacaaccattatagtacaaaaaataagaaagaaacccaagaaaactgatgacacaacttgtaaaataccccatggtcctagaaagctacctattataggaaatatatacaatctgctatgctctcaaccccatagaaaattaagagacctggccataaaatatggacccgtgatgcatcttcaacttggacaggtttcaactattgtcatttcatcccctgagtgtgctagggaagtgatgaaaacccatgacattaactttgccacaaggcctaaagttctagctattgaaataatgtcttacaattccacaagtatagcttttgctggctatggaaattattggaggcagctaagaaaaatatgcacattggagcttttaagcctaaaacgcgtcaactcattccagccaattagagaagatgagctcttcaatcttgtcaaatggattgattcaaagaaaggatcccccatcaacctcactgaagcagtacttacatcaatttacacaattgcttcaagggctgcctttggcaagaattgcaaagaccaagaaaaatttatatcagtggttaaaaaaacatcaaaacttgctgcaggttttggcattgaagatttgtttccttctgttacttggcttcaacatgtcactggcttgagggctaagcttgagaggttgcatcaacaggctgatcagataatggaaaacatcatcaatgagcataaagaggcaaattcgaaagccaaggatgaccaaagtgaagcagaagaagatcttgtggatgttctcatacaatatgaggatgggagcaagaaggatttttccttaactagaaacaagatcaaggccataattctggacatttttgctgctggaggtgagacaacagcaacaaccatagattgggcaatggctgaaatggtaaagaatccaacagtaatgaagaaagcacaatctgaggtgagagaggtatgcaatatgaaagcaagggttgatgaaaattgcatcaatgaacttcaatatttgaaactaattgtgaaagagaccttgaggttgcaccctccagctcctcttttgctgccaagagaatgtggtcaaacatgtgagatacatggttatcacataccagccaaaaccaaggtcatagtcaatgcctgggcaattggaagagatccaaactattggactgaatcagagaggttttatcctgagaggttcattgatagcactattgactacaaagggagtaattttgagttcattccttttggtgctggaagaaggatatgcgcaggaagcacatttgctttgagagctgcggaactagcccttgcaatgttgttgtatcactttgattggaagcttccaagtggaatgagaagtggagaactggacatgagtgaggattttggagtcacaactataagaaaagataatctattcttggttccttttccatatcatcctttgcctgtctcatgagctcagaatgagaaactgaaacatttggtgatggctgtcacatttacttcagaataaagatcttctgttaattgaaattagactttgtgctgtgattggttgtaacagaagatggaaattgtgactactgcatattaaaatagcttttatatatcctcaatgttaattaactttgataaaaaaaaaaaaaaaaagggcggccgc

SEQ ID NO: 217 - DNA, 2068 bp, Glycine max
gaattcggctcgagtgaaagttgaaaaacaatggatggcttgttttgtttttatgatgatgagtagtattatataataatttatgggagcagaaagacaagacaaaacaagagagaatgagtggcggaggaggaggagaagagggagcaactctggagttcactccgacgtgggttgtggccgccttttgcacagtcatcgtcgccatttccctcgccgctgagcgcctccttcattatggcggaaagtttctcaaagccaaggaccagaagccgctctacgaagctctccagaagatcaaagaagagctgatgcttttggggttcatttccctgcttttgacggttacacaaaacggcattaccaaaatctgcgttcgtcccagtttgacgcgccacatgctcccttgtaatctcgacgccggtgaacactccacgcctgagtccgagtccgccactaaaattggttactgcgtccgcaaggtcacaccctctcactccctcacttttcttttccttagatctcatctaatccaccacccctcgtcctcgccttttgttttgtttttcactttttcagaacaaggtacctttattatctttggaagcacttcaccatcttcacatcttcatttttgtcctcgctgtcgtacacgtctccttttccttactcaccgttgtcttcggaggcgccagaatacgtcagtggaaacactgggaagattcaattgctaaacagaactacgaaactggccgagttctcaaaccaaaggtcactcaggtacaccagcatgattttatcaggggtcgttttgccggttttgacaaagactctgctattgtcggttggttgctatcctttttaaagcagttttatggatctgtgacaaaatcagattatgtgacattgcgacatgggttcattatgacccactgcaggacaaatccaaagtttaattttcacaagtacatgattcgtgccctcgaagatgatttcaagcaagttgttggtataagttggtatctttggctctttgtggttatcttcttgttgcttaacatcaatggttggcatacgtatttctggattgcttttattcccgtcgttcttttacttgctgtgggcactaagctggggcacgtaataacccaactagctcaagaagtagctgaaaagcatgcagccatagaaggtgatttagttgtgcagccatcagatgatcacttttggtttcaccggccccgtgttgtcctctttttgattcactttatccttttccaaaatgcctttgagatagcattttttttctggatatgggtcacatatggatttgactcctgtataatgggacaagttcgatacattgttccaaggcttgttattggggtatttattcaggtactatgtagctacagcaccctgccactgtatgcaattgttacgcagatgggaactcactataagagggcaatatttaatgagcatttgcaacaaaacattgttggttgggcacagaaggcgaagaagaggaaaggactaaaagctgatggcaatcctggccaaggaagttctcaggagagtgctaatacaggaatccagcttgggtcaattttcaagaaggcatctgctccaggaggcagttcttctgccaccaaagctgatgggaccaactcagtgtagcctatagaagtgaagatttacagtcttattttgtaaagttgctcacaaattgcagttttctttatattattttgtttgctaacagtgtagcattgtgggacatgtgtttgacttggtgtaggcgtaaggtcgaagttctatatgagtagatgctagtaatgccattggcatttctaacttctaagattcgtcatcacctccttactacactcgtcctccctcaggtttttgcctctgatacttccgtagacaggctgacactgcctttctctctaacttgagttcctgttaaaattatgtgtcttttatttaatgtaaagttaagctactttaggttgataaagttcaagacaaacttggtaaaaaaaaaaaaaaaaagggcggccgc

SEQ ID NO: 218 - DNA, 517 bp, Glycine max
gagacagagccgggaatggagcgtgagtaaatgaaagatggagatggtgactgttgactaatttaagggagcagaaagacaaaacgacagacagattggagagagaatgagtggcggaggagaagagggagcaactctggagttcactccgacgtgggttgtggccgccttttgcacagtcatcgtcgccatttccctcgccgctgagcgcctccttcattatggcggaaagtttctcaaagccaaggaccagaagccgctctacgaagctctccagaagatcaaagaagagctgatgcttttggggttcatttccctgcttttgacggttacacaaaacggcattaccaaaatctgcgttcgaccctctttgacgctccacatgctcccgtgtaatctccacgacgctccagcaaaccacgaatctcatttccagacatttttccctggaacagccaggcgccttctctctggggaacactccacccccgagtccgcctctaaaattggttattgc

SEQ ID NO: 219 - DNA, 436 bp, Glycine max
gaggaggaggagaagaggaagcaactctggagttcacaccctctcactccctcacttttcttttccttagatctcatctaatccaccacccctcgtcctcgccttttgttttgtttttcactttttcagaacaaggtacctttattatctttggaagcacttcaccatcttcacatcttcatttttgtcctcgctgtcgtacacgtctccttttccttactcaccgttgtcttcggaggcgccagaatacgtcagtggaaacactgggaagattctattgcaaaacagaactacgagactgaccgagttctcaaaccaaaggtcactcaggttcaccagcatgattttatcaggggtcgttttgctggttttggcaaagactctgctttagaaaggatagcaaccaaccgactatagcagagtctttggttgctat

SEQ ID NO: 220 - DNA, 1378 bp, Glycine max
  unsure (1)..(1378): unsure at all n locations
ggaggaattcggctcgagggcccttcgatgtcttcttgtgtttcaatgaggcagagacacgccacagcttcacaggtactctctatcacgctttacagagcgccagattcaagacttacatggagaatggcaagttgagacgtggcgacaaaatcgcaaccgctattctcactgcaatggaagcatcaaggatttcaatcgtcgttttctcaccatactttgcctcctccacctgctgccttgatcaacttgtccacatccatcgctgtatgaataccaaaaaccaactcattttgccaatcttttacgacgtcgaccagtccgatgtaagagatcagctaaatacatttggccaagccatgcttcaacaccaacatcgtttcggaaagagctccgacaaagtgctccagtggagctcagttttgtctcatgtcgccaacttgaccgccttctgtttctccagtactggggaccaatatgaatatcaatttgtggaagagatcgtggattgggtcaccaagaccgttccccgcaatgatgtttttctgagtttctgtggaagagatactcggtactcctttacaggttttctctacaatgccttgagccggagtggtttcaaaacctacatgaatgatgatggggaccagatttcacaatccactattggaaaatcaaggctttcaatcattgtattttctaaaaattatgcacattcctcgtcgtgtcttgatgagcttttggcaatccttgaatgcatgaagatgaaaaaccaactggtttggcccatattttacaaagtggagcccagggatataaggcgtcaaagaaatagttatggtgaagccatgactgaacatgaaaatatgttgggtaaggactctgagaaggtacagaaatggagatcagctttgtttgaagccgcaaacttgaaaggatggacctttgaaaccgggtatgaatatgaagttattgaagaaattgtggaaagggccattaaaatttaaaatggattctatgtaccaaccacgaagtccttgctcaagtgtcaactagaaatcaaccgataaaattcaactggcggttctataagtagcaggagctggttcacaaattgacgataacatgtctcattaggagggaatgaatgaaggatattcagaaacttgatcagcatgtcatatttctcagcgtaataaatacgaaaccttgtcttcagccaggctattgtagccactgcctatttctacacatttgatctgacatttctatggatttcattggacgtctnnnnnnnnnnnnnnnnnnnnnnnnnnnnnnnnnnnnnnnnnnnnnnnnnnnnnnnnnnnnnnnnnnnnnnnnnnnnnnnnnnnnnnnn

SEQ ID NO: 221 - DNA, 1223 bp, Glycine max
gaattcggctcgagtgtagatatacctcttgataaagaggccttggactggaacaccaggatgaaaattgcagcaggtgctgccaaaggactggagtacctacacgacaaagctaatccaccagttatttatagggatttcaagtcgtcgaacattctgttggatgaaagtttccacccgaagctgtctgactttggacttgccaagttgggtccagttggcgacaaatcacacgtctcaacacgtgtaatgggtacatatggttattgtgccccagaatatgctatgacagggcagctgacagtgaagtccgatgtgtatagctttggggtcgtcttgctagagttgattactggtcgtagggccatcgacagcaccagaccacatggagaacaaaatcttgtctcatgggcacgtcctcttttcaacgacagaaggaagctccccaagatggccgacccaaggctggaagggcggtaccccatgcgcgggctgtaccaagccctggcggtggcttccatgtgcactcagtcggaggccgcttcgcggccactgatcgcggacgtcgtgaccgctctgtcctacctggcgtcccagccgtatgaccccagcacagctttcgcttcaaggaggcttggtggaagcaagcctggcgagaacggcggcagggtggtttccaggaacgacgagaccggaacctcaaggtcgccggggaaggaccgggaggactcgcccagggacctcccggctatcctcctgaacaaggacctcgaacgcgagcgcatggtggcggaggccaagatgtggggcgacagggagcgcatggtggcagaggccaagatgtggggcgaccgggagcgcatggtggccgaggccaagatgtggggcgagaattggcgcgacaagcggcgcgctgagaatgggcagggcagcctggactcgccgcctactaggaacagctaggggactggggagagcctttcacacattccatccatgcttatcggttgtttatttccaggtcgattttcgttgccgcggcggcgacgggcagggccaggggcagggtcagggagggttagatgtacatttctagggcagcgtcgtactggatagtgaatgcatttggttgtacttgtaaattctcagaaaatttttgtgagaatgaaaggacgcattttgagttccactcgtaaaaaaaaaaaaaaaaaaaagggcggccg

SEQ ID NO: 222 - DNA, 1197 bp, Glycine max
gaattcggctcgagcatcaccatcccttccttgaaccctctgcccacacccatcacagccccctcaacaaacatcccttctccttccaccatgctgccgccggttccggtcatatatccgctgccaacgccgtcaacatcctccccaccagctgtgccggtcaccaatcctgctgtcaccacgccttccacgtcccctccgtcgacaccaacaccattcaacaacccaccattgttgaacccaacgccgacccctgctcctacagtcacggccccagctgcttcaggccgggaggtctggtgcgtggccaaggctgctggctcaagtgaagccgcgcttcagaacgcgttggactacgcgtgcggcattggaggagtagattgttcggcgattcagccgtcagggagctgctactatccgaataccatccaagcccatgcatcctacgcgttcaacacttattaccagagaaaccctgtttcttccagctgcgactttggggggacggcaatgctcgtcactgctaatccaagctctgggagctgtgtctttgcatcatcattgccatcgtcgtcaagctctactgttggatatgatcccgcgtccacggctactccatcgtcaccgtcgtctggttccgactcgggagcacccgtgctgaatgccagtggggcaggttcttctgaatcatcagattttggctttgacatcccaggagctgtcaatttgggcagcggttggaggtcagtctcaccacccaactggccctgggcagccctggtctggattctagtagcattgtgtgtgcacaaagaagggatggtctgaaaacctgtgagagcatctgcagtattttggagacagattgcaaagtagccaggtggtgtagagaccagtagagagctacaaagctagagaatcggaccttagcatggctaagtttatcgatgtatgtatgaagtatggtgctccagttcgtagtagcaactgggaactgatgtagtcctgatggatggacttggactcaccctgatcggtcactcaggcactctgtagtgtagatgtaggcatgtagctgctgctagtagtagtagtaatgcaagtactgctttgcatcgtatgggtgagagagttgaacaactaatggaatgcaaatgtgccgttttgttttaaaaaaaaaaaaaaaaagggcggccg

SEQ ID NO: 223 - DNA, 1455 bp, Glycine max
gaattcggctcgagctttggttcatcttcggcagcttctacaccaactttagcctctgtgtttgcaactggttcctccactgtgccatcagcggctgcagcttctgcagcatctgggtcgtcgttcccagctgtttctaccagtggttttagttttgcagttgcgccatcatcatcagcagctgcagctactgccactaccaccactgtcacaagtgcttctacatctgcaggcatgacaaccacggctcctttgactggaacaacggggtttccaaattttaatcttcaaacaactaccccagcttctacctcatctcccacactggcatttggtgtttctactactgctgctagctcatcagccaccagcaccacaactcaagcaacttcctcagctgttcaagtcagcagcacaggtccgactactactacatctatcactccagcagcatcccaagcacctaagctaccatcagaaattgttggcaaaaatgttgaggagattattagggactggaacaatgagcttcaagaccgtactgcaaaattcaggaaacatgccaccgcaatagctgaatgggataagagaattctgcaaaacagaaatgttcttattaggcttgaggctgaggtggctaaagttgttgaaacacaaacaggcttggagcgtcaacttgaattgatagaaactcatcaacgagaggtagacaaggctctacagagtatggaggaggaagctgaacgcgtattccaggatgaacgagtgttacttcatgaagatggagctgcttcagcaagagatactatgtatgaacaagcagaagttgtggagcatgaactgcaacatatgacagaacaagtaaaatccatcattcagactatgaatgctactcagggtggtgagctcgagtccgctgatagtatgacaccatttgatgttgctgtccgaatactggataatcaactgcgttccctgatgtggattgatgagaaggttaatgagttctctggcagaatacagaggctgcctaacaacagcgtttcagccgaacgtgactctggaattcccaggttttggttaagctgattaattcgccgcattttcttgcggccctaatcgaggttcagtaaacattcttcgcttggttattctgctgctccaccggccaaggtttcgcgttattttctccccgttcaagcactttggtgccatgtagctctagccggttcactctggattggtaccattcagtgtcacttgtgcacacttcagcatagtttctatttgtttaacgttggacgtgattacggcatgtttggatctatttgtgttaactgttttagaagctaaaattagcactatttacgctattgtgttcaatatggagcacaagtctgcagaactaatctcaactcactttcatcccttaaaaaaaaaaaaaaaggcggccgc

SEQ ID NO: 224 - DNA, 780 bp, Glycine max
gaattcggctcgagttcagaatggcttctagcaagctctttgcggttggcctcaccgtcttactaagcattattggactgtgcaatgctattagggtggtaaaccacgccaccgcagatggacaaggcggtggaggtggtggaggcggcgggagcggaaccagctatggctccggatccggctccggctacggcgatgccgaggcctatgacggcagtgcccagtccccaacctctggccacgcatatggcagtggatccggggacggtggtggcgtttggcaaggtgacgacgagtgcgcgtccggttacggggcgggcggcgcatccggtgaaggccatggcgactcaggtaactccaacaccgatggcgctgcgaatgcgagcggagctggcggcgggggcggttctggtgggagcaatgggaatggcagccggatctggtggcggcagtggagttggagaaggcgaaggcgataactatggtccctatggttcgagctacgcaaatagcggtggcgccggaaggggaagcggaggcggtcgtaatggtggattcggcggcggttccggtggtggagcggggagcagtggtggtgccgcgtcaggttatgatgatggcagctacaacggatcaacaccttaattatgttcatttgtttgtaccacactgtcaagcaaccgacacgtactgatagggtttttctgtgcttgtgaaataatttggcctttctgagcgatgcagaagtttgttctaaaaaaaaaaaaaaagggcggccgc

SEQ ID NO: 225 - DNA, 816 bp, Glycine max
gaattcggctcgagcgaggagcttcccgcggccgagcagcaggcagccgccgaggcggaggccgcggctcctgctggtgccgaggagcccgtcgcggccgaaccggccgccgaggcggaggctgctgctcctgctggtcccgaggagactcctgcggtcgagcaggaggcagccgccgaggaggaggctgctgctgctcctcctgctggtgccgaggagcccgccgcggccgagcctgtcgccgaggcagaggctgctgctcccgaggagctcgccgcggacgagccggaggctcctgctcctgctcctgctggtccccaggagccggccgccgaggcggaggctgctgctcctgaggagcccgagaaggccagcgagtgaggccgtgcgcacgcagcggcggcggccagggcccaggccccaggggatcggcgtgcgcgcgtggcggggtagtctctcgcgcgcgtacatggcagtatgacacgggattttgctgttcagtacgctacggttactggcgtctctctgtgtgtgtgtgtgtgtgtgtcgtacgtagcccggtacgtagctagcagtgactgtcgcgtggacgtgtccggtgcgggctgcgagtgacgtgggctaaataaagtgtgcgtcgggtggtaatggtggtggggcccggtgtcagtgcgcgcggtgccccatgcctgccgcggctgcagcttgttgtgtcttgtgttggttgagttcctgttctttctgtctatctattctcacgcatggcagtttgggtaaaaaaaaaaaaacaaaaaaaaaaaaaaaaaagggcggccg

SEQ ID NO: 226 - DNA, 1140 bp, Glycine max
cccacgcgtccggtttttcagaattcggctcgaggaaacgtcacttcaggtttgaaaaaggttacgaatgatatgaagactaagaatcgcaccgatagaactggagttgttggggctattgaaaaagaaactcctgcaagttcacgtgtgttttctaaagctggacctccaaaatttgaacttcaaatgggccgcaaatgggttgttgagaatcaaattgagaagaaagacttggtcattgaagattgtgattcaaagcagtctgtatatatttatggatgcaaaaactctgttttgcaaattctaggcaaggtcaacaatataacaattgacaaatgcacaaagattggagttgtatttaaggatgttgttgcagcatgtgagattgtaaacagtaacggggttgaggttcaatgccagggtgcagctcctacaatttcagtggacaacacttctggctgccagctatatctgagtaaagactctttagaagcatccataagtacagcaaagtcaagcgagatcaatgtattggttcctggtgctgatcctgatggtgattgggtggagcattctttgccacaacaatacattcatttgttcaagaatgagcactttgaaacaactcctgctgctcattctggaggttaaattgattgccaatttggacttttggagtctctatttatatttaaatcgttttggaatactgtgggagtggcttcaatttgttgtttcgtcaattcatttacaaacacagtcatatatataggtttaccgtatacttgctgcttattctagtgatttttccatgggtttattgaaccattggaatcatccatacggtttttttttttagtagttttcttctgattgagcgtgtttttgtcgtaagttgcattatgcaattggtttttttagctttcagaggacatctacatttgtctgaacatgttggtttgattctggtgcttttgcatatttgaggatagagcaatgattatgtactcaggtgcattcggaaagatatttgtgtatctgtttttttgaatcgattagtcctcccagtttgtattgagaaaatgaaacgagttgtgaacttaaaaaaaaaaaaaaaaaaaaaaaaaaaaagggcggccg

SEQ ID NO: 227 - DNA, 1237 bp, Glycine max
gaattcggctcgaggcaagctgcgggatacaatcaaatcttttggctgtgtgcagggaattctgatctcaaattgtccacggctatgcagcgaaattcttgacaagttgaaccacccttttctacttgcattatctatatgcttccttccagaccaaaactcacgtttgtttgattactaattattgtcctggaggagaactattccaacttcttgatcggcaattctgagttacccaattccgaggagaactatgtcctgaaagaggaatgtcgagcttcaattctgagttacccaattccaattcagggttgaggatgttacaagagtctgggatccttgctgaccagtgaccagggttgaggatgttgccaagagtcgaagaccgttgctgctagaatgtcaaggtaaagagaaacgttgttagttagtatccttttaaggtaaaaaaaagggaagatttaacgtataagcggagctgcacaaaggtacgtagcatttatgatttaactgtttgttgggttgacttggttttcttcagttttgtagaaggtactaagatgtaggcatgctagatccttattgcttgattgttgactgtccaagcattctggtaatactgatttaatatggcttatactaatttcaagctttctggtaatactcatttcataacgccacttaaaatttttttagttggatggaaaggctacttgtgttttactgatttcatatggcttatacttatttcatatgaaattaacaaatatctagaaattttgttaatgaaagttcgatgacattttaaatccaatgtatatcattccacaggagacaaagctattgatataaggaggaagcactaaatagtataacctaggatacaaagctattgatataaggagtaagcactacacattgtgctatgaggagcacttcatggaacaagaaagaattgcaataaaattccattcttagcatatgactaggtgaattgctttaaggaatcttgtgctgaaggatgtcgagacacaatgctctgataggatgtgacattggggtatagggttttatattaattgtatgaagtcttagacggtcttgtttgaaccgagatgaccttattatatgatgtagaagaaaataaatgtgagccttttatccctttgaaagacttgtatttaaaaatgtaaaaaaaaatacttttaattaaaaaaaaaaaaaaaaagggcggccg

SEQ ID NO: 228 - DNA, 598 bp, Glycine max
tccttccacgcgtccgcccacgcgtccgcaagagtcgaagaccgttgctgctagaatgtcaaggtaaagagaaacgttattaattagtatccttttaaggtaaaaaaaaaaaggaagattttacgtataagcggagcttcacaaaggtacgtagcctttatgatttaactgtttgttgggttgacttggttttcttcagttttgtagaaggtactaagatgtaggcatgctagatccttattgcttgactgttgactgtccaagcattctggagacaaagctattgatataaggagtaagcactacacattgtgctatgaggagcacttcatggaacaagagagaattgcaataaaattccattcttagcatatgaggacaccacatctataaattgaagttcttgcagagttatatgcaaaccaatgaggttgtgagggccattgttatatgaaagttgagaatttgtgcaggctttcaagtagaggtttttttcttgaccattgggtatatatcacaataagtagatatgaagttcatgaaacttggaacaagaccagatactttttacagtgaacaagctaccaggagtcttgtt

SEQ ID NO: 229 - DNA, 706 bp, Glycine max
gtcggccgactcgtacgcccacgcgtccgatttattctataattggtgcctatgttataccaatcttagttccgaaatttcaattgaaaattactgtgaaaacaagtgccaaagccagaggtttgttgagtctttttttatagttttttttactctactctagagccattctaagtttctcttcgagtcctagcttgcttctatgtccttttcattgctttaattgttgaataatccttgaaaaattgtcttgttaaaactccattggtttagctttcatttcatttttttttagtctttggttattgcttgtctctttgtttccttgtttgtgagttgccatatagggaattggaaaggaggattggtgccatcccttgaagaatttgagtcaagaagcaaggggccaaccaccttaagagctattggactaagaagcactccaaattgagtgaaacaccaaagagagaacaaccaccaaaattgaggacctttttgtaattttgtaattggcaatttactttgctttcaaattttgtaacaaaaaggcctttcattggaagtaagttgggagcctccaataggtcaccctacttccatttgtgtgtaataattttaggcaattttcccttaggatagtgagtgttttgttgggaaccttaaatgtggtcatccaaaccctcttacgattcacctagtttacatt

SEQ ID NO: 230 - DNA, 746 bp, Glycine max
cccacgcgtacgatttattctataattggtgcctatgttataccaatcttagttacagacattcgcttgaaaattactgtgaaaacaagtgccaaagccataggcttgctgagtcactgtctataggtctttatactctactctagagccattctaagtctctcttagagtactagcttgcttctatgttcttttcatttctttaatcgatgaataatccttgaaaaattgtctcgttaaaactccattggtttagctactatttcattttttcttagtctttggatattgcttggctctatgattacttggttgtgagcttccacatcaagaattggaaacgctgattctggccatccattgaagaaatctcgtcctgattcatagagccaaccaccttaatagctatttgactaaaaagcactccaaattgtgtgaatcaccttagagattacagccaccccaattgtggactttttttttgtaattttgtaatgagtattaacaccaaagataaaatagccaccacaatttgttttgctttcaaattttgtaacaaaaaggtctttcattggaagtaagttgggagcctccaataggttaccatccttccatttgtgtgtaataattttaggcaattttcccttaggatagtgagtgttttgttgggaaccttaaataagatcatccaaacactcataggatccgcctagtttgcaaaaaaaaaaaaaaaaaaaaaagggcgg

SEQ ID NO: 231 - DNA, 501 bp, Glycine max
  unsure (1)..(501): unsure at all n locations
gcatttatgatttaactgtttgttggcttgacttggttttcttcagttttgtagaaggtactaagatgtaggcatgctagatccttattgcttgactgttgactatccaagcattctgggaatggaaaggaggattgatgtcataccttgaagaatttgagtcaagaagcaaggggtcaaccacaattgaggactttttttttgtaattttgtaattgacaatttgctttgctttcaaattttgtaacaaaaaggtctttcattggaagtaagttgggagcctccaataggtcaccctacttccatttgtgtgtaataattttaggcaattttcccttaggatagtgagtgttttgttgggaaccttaaataagatcatccaaacactcttacgatctgcctagttaaaaaaaaaaaaaaaaagggaaaacccaataatttataacaaaaaatttttaagggnnnnnnnnnnnnnnnnnnnnnnnnnnnnnnnnnnnnnnn

SEQ ID NO: 232 - DNA, 1824 bp, Glycine max
gaattcggctcgagccacctcgccgcgaccacacctcctctcctcccctccggctcctcctcctcgcatggcgacagcctctcgtccctagccccccagatccagcggcgcgcacctacacacgcgcaaggaaccgtagacgcgcccccgcgcctcccctctctcccgtcctccgccacccatggacgcggggaatggctgcagcgcgcgggcgctggcggcgtgcgtcgtcggcggcatcgtgctgggcgcgtcggtgctcgcgctccacctcgcgggcgggcccgccgccatcccgcccctgcccctgccgccgcccatcggcgcgcttctccgtcgccgccgccgccgccgccccgtgcgcgtctacatggacggctgcttcgacatgatgcactacggccactgcaacgcgctgcgccaggcgcgcgcgctcggggacgagctcgtcgtcggcgtcatcagcgacgacgagatcaaggccaacaagggaccccccgtcacgccgctccacgagagaatggtaatggtccgtgctgtgaaatgggtggatgatatcattccagatgcaccttatgccataactgaagaattcatgaacaagctattcaatgagtacaacatagactacattatccatggagacgatccttgtttgctacctgatggtactgatgcctatgctcttgccaaaaaggctggtcgatacaagcagattaagagaaccgagggagtgtcgacaacagacattgttggacggatgcctctttgtgttagagagagatcatctgatgcacataaccactcgtcactacaaaggcagttcagtagtggacatggtcagaaagttgatgatactggatctggaactggaacaagagtatctcattttcttcccacatctaggcgaatagttcaattctcaaatagcaagggtccaggtccagattctcggatagtttacatagatggtgcttttgatctgttccatgctggacatgtcgagatcttacgacttgctcgagaacttggagattttttgcttgtggggattcacacagatcagaccataagtgcaacacgaggacggcatcgcccaatcatgaatctccatgagcgaagtttgagtgttttggcttgtcgttatgttgatgaggtgatcattggtgctccatgggatgtttcaaaagacatgattaccacgttcaatatctctttagtcgttcatggaacaattgctgagaacatggacttcacagaggacgatttacacccatatgctgttccaatggctatgggcatctaccgccgactggagagccccctggatatcacaacaagtacaatcatcaggaggatcgttgctaaccatgaagcttaccagaagcggaatgagaagaaggaagccagcgagaagaagtactacgagggtaaaagctttgtgaacggggagtgaaggtcggagtagcagcaggactcgcgtggagattgctgcctcgttcattttaggtctcccagccttttagcagaggcaacagttggtcgatctacagttgtaccctttcttttttctttttcatcttcttcagtaatctttgatgatcttgctgacatagcttaggaagcataggagcatttctccccggtgtctgcagccaattttcctcactgtgttgtatatgcgccttccagctgctgagctgcatttgagatctataggcttttccacacagagacacatacagattttgaaattgtgcgctgcagtatgaagaagatcatgaatgttagcgtgattaaaaaaaaaaaaaaaaagggcggccg

SEQ ID NO: 233 - DNA, 1525 bp, Glycine max
gaattcggctcgagataccccgctcctctcctccccgtctgccggctcccttcttcttcgctgtcgacgacgcggactccccgccgcgctccctctctcaggcctcgcggggtgatcagaggcggctgggagactcgtgcgctccgacgagtccggttacggcgcggtaattaagcaggggaggagccggccctgagcggcggagtccaaaatgagtgacgacgtggtatggcactgcatccgccacaaccactgcagcttcatgtccaagatcacaacggggatcttctgtcgcaacccctacaacgcgacgggcatctgcaaccggagctcctgcccgcttgccaacagccgctatgccaccatccgggatcatgaaggtgttttctatctgtatatgaaaaccgctgaaagggctcatctgccaaacaaattatgggagagagtcaaactgccgaagaattatgagaaagcaatggaagtcataaacaaacatcttgaattttggcctaagctacttgtgcacaagatcaaacagcggctgacaaaaatgactcaatatcgtataagaatgaggaaacttcaactgaaagtgagggagaaggtcatgacaatgcccaggaagcaaacacagcgtgatctccggagaatggagaaagctgaaagggctgctcaactagaaaggaatattgaaaatgaattgaaggaacgcctgaacaaaggtgtttatgctgacatctataatgttcccttcaaagcgtttgatgaggttcttgatatggaaagagatgaagtggttcttgaagaagaggaggaagaagaaggtgaggtatatgttgaaggcgatgacatggaagagatggatgacatggaagactttgaaggcctcagtgatggaggcacggatgacgatgatgttttggatgatcccgtatcaaggaaatccaagggatcctcttcttattcgaagcaaaatgtcgggaaaaggtctaggaaggttatgactgaggtggaagaagacgaggagataaatacgaggcaaaggcaaagggcgtgagtgcgagatgtgcaactgcaacgacggttatatgatgtcagatgccggcaggcagccacttctgatgtatgttggatcattttatacttgccttcgtactgtaacgcggagtgctgagacgtcaattaattttggccgtggtttacatggcctaatatgttatgagcaagaaaaaagaaacgggtgataactcagttgaggatgtgggagaccatctagttttcgaggtgaatttaggcatctatttttgtaagttacagattggtctagctttgttctttgttacaaggaaaaccagagtcatgcgtttactaacacattctgagttgtcattgaggatttgggatatcctaagatcctaggtgagtagcctaaaccgtatatttcgttgactgtatcaaggtggcaacagtagctacaaaatcacatcccggtttcgtttctaaaaaaaaaaaaaaagggcggccg

SEQ ID NO: 234 - DNA, 876 bp, Glycine max
gaattcggctcgagtgaaaccaccaggtcatgtatatcctttagcgatattgtgccatgatataatgccccctccactgaaggttgagaaagaaattggggagaaaagaattatatcctttcatggggctggcatatcagtggctccagcattaagcttttctgaaaccactgctactagtgaaaatcctgaaaaggctaaggagttattctcaaaagccctgtacgattctgtgaccgagcaatataatgtgctgaaatctgcgatacatggcaaaaaaggatttgaagcatcaactcctgtagtttctttgtcacagccatggaagtagttgaaattggcatttcttcattacaatttgctctgatgcagaagcaagttacaagacttcagtcaaacaatttcaactgatttacttctgagggactgcctattactacaccggtcaccgaatgatttgagcttgatggaagtttgcagtcaaatacatatttttcatttcatttgtccttttgctcttggttgccgttatcagcattcaattcatctggaatctgtttcagttcagaaggttcaaattcagctgcgtactgtacaggtctctcttagttcggtgtcagattcagttcattgactgataaaatactaaattttttccctgcaattttgtgatcaggcttagctagctgaatagataaaatctaattacttccgtttgtattttaagttaactttgttccattatagatgaatagatgttaatattacatgttcagaatcaagttgttcagacggggtcagtgaataaactggtccaaatgctaatgcaagattatttatattggcaaaataaaaaaaaaaaaaaaagggcggccg

SEQ ID NO: 235 - DNA, 1763 bp, Glycine max
gaaagcaagtttgttattcagagagagaactcggtgtggctggccgacagaaaattttctattggatgacaaggaagttggctatccattgcttagtgtaaagcgaagaagtgtgaacaaatatcctcagaagctgccttttcaaaagcaaatacatttcgatttataaaaaagattgtactagtagtagtagaaaccaatattaaaaaggaaagaaagaaaaataggagaaaaagatgaaaaatcacacatagaccctttcctctctcgatactataactgcgaatgcgtaggggacagtgagagccagatgtctcctctatatagttcgtaacgcctctttcttacctctcattcatgcattagcaatatttctcaatctctcttcttacccatttcctccccccctctttctcttttcttgttctgtttttattttcactgttctctgataacaacgttgttagttgtcaccatggttgttctgtctcagccagcattaaaccagtttttccttctgaaaacatgcaagcccacgcccttgttcgcggggattcctgtggtcgacctcacggaccccgatgccaagacccacatagtcaatgcctgcagggacttcggcttcttcaagctcgtgaaccacggtgttccgttacagttcatggccaatttggaaaacgaaaccctcgggttcttcaaaaaacctcaatccgagaaagacagggctggtccccctgacccttttggctacggcagcaagaggattggccctaacggcgatgtcggttgggtcgaatacctccttctcaacaccaaccctgatgtcatctcccccaagtcacagttcattttcagagaaggtcctcagaatttcagggcggtggtggaggaatacattagagcggtgaagaacatgtgctatgaggtgttggaattgatggctgagggattggggataacgcagaggaatgtgttgagtaggttgctgaaggatgagaagagtgattcttgcttcagacttaaccactacccgccatgcccggaggtgcaagcattgaacggaaggaatttggttggatttggagagcacacagacccacagataatttctgtcttgagatctaacagcacctcaggcctgcaaatctgtctcacagatggcacttgggtttctgtcccacctgatcaaacttcctttttcatcaatgttggtgacactcttcaggtaatgactaatgggaggtttaaaagtgtaaagcatagagttttggctgacccaaccaagtcaaggttgtcaatgatctactttggaggaccacccttgtgtgaaaagatagcacctttaccttcactcatgttaaaaggagaagagagtttctacaaagagttcacatggtgggaatacaagaaggctgcgtacgcgtcaaggctagcggataatagactcggcccttttgagaaatctgctgctgattaaggaggcaaagtgtgtcaaaattctactactcaattttggcacgtgttgttaggccaacttttttattttttattttttttgggtgtgtgtatctaggttccaaacagttgactttacttgagatatatagaaaatgaataggttgcttatgcacttccttttaatccttgttctttttcttgtttgattgaagtgtaatagtcactactgcccttctattatcaatgaaacgcaactctagtcacagcttttcaaaaaaaaaaaaaaaaaaaaaaaagggcggccg

SEQ ID NO: 236 - DNA, 1655 bp, Glycine max
ggagtttgtttaattgtttctcgaattcggctcgaggacggctcctaaataataatcccacttctctccttcgccgcctcaaagtctttcgtggaatacgatgctgttttctcggatatcgaaaaacctcagaggcagcttcaactcttgtcggtggtttcggtccatcggagaccacaaccactgctttctttccccgcacaattttcattcacgcggtggagactctactcaacaggttatgagaagtttaattttttcaaagggcctcagcactgcatagtagtagatatctgatccatcatcaaagcagctccatagttgaggatgaacatgatccattttcactggttgcagatgaactgtcacttcttggcaacaagttgcgagcaatggtagttgctgaggttccaaagcttgcctcggctgctgaatacttcttcaaaatgggagtggaaggaaaaagatttcgccctacagttttattgttaatgtcaactgcactaaatctaccaatacatgaagcacctcctcctatcgagataggaggtactttgacaactgatgtacgtttaagacaacaacgcatagctgaaataacagagatgattcatgtggcaagccttcttcatgatgacgtattggatgatgcggataccagacgtggtattggttcattgaattttgtaatgggcaataagttggcagtgttggctggagattttttgctttctcgggcttgtgttgctctcgcctctttgaaaaatacagaggttgtatctttattggcaaaagttgtagagcatcttgtaactggggagaccatgcaaatgactacaacatctgatcaacggtgtagcatggaatattatatgcaaaagacctactacaagactgcatctttaatatcaaatagttgcaaggcaatagccatccttgcagggcaaacagcagaagttgcaatgcttgcttttgagtatggaaaaaatctgggtttggcatttcaattgatagatgatgtgcttgatttcacaggcacatcagcttcccttggaaagggttctttatcagacattcgtcatggaattgttacagctccaatattgtttgccatggaggagttccctcagttgcgtacaattgttgatgagggcttcgaaaaccctgcaaatgttgatcttgctctggagtatctaggaaaaagccgaggtatacagaggacacgggagctagccgtggagcatgctaaccttgcagcagcagcaattgattccttaccggagaacgacgatgaagatgtaagaaaatcaaggaaagccctgatagatctaactcacagagtcattacacgaacaaagtgaaaggaagactctcccctccctttttttgtttttgtgggtagctaaaggataaaagatcttagtaaaatcaagactaaaaattgttttgttaccatcaatttttctataatggtccccccaagcccgaatgtgtgggggaaaataagctgtttctaggattaatgtcgtcattcgcttttcttatttatttagattaaatctccttccctctgtttgttctccattgttgtaataatgactttgggctagttttgccaccttaaaaaaaaaaaaaaaaaaaaaaaagggcggccg

SEQ ID NO: 237 - DNA, 577 bp, Glycine max
ccatcggacaaaatgacggagtatatggttgtgcttcggcgtcgtcactacatttctaattcataataaacggtggttggagtttgtttaattgtttctccctctttctttctcttttgacggctcctactaatcccacttctccatcgccgcctcagagtctttcgtcgaatacgatgctgttttctcggatatcgagaaacctcagaggcagcttcaactcatgtcggtggtttctgtccatcggagaccacaaccaccgcttcctttcgctgcacaattttcattcacgtggtggagactctactcaacaggttatgagaagtttaattatttcaaagggcctgccagcactgcatagtagtagatatctgatccatcatcaaagcagctccatagttgagatgaactgtcacttcttggcaacaagttgcgagcaatggtagttgctgaggttcctaagcttgcctcagctgccgaatacttcttcaaaattggagtggaaggaaaaagatttcgccctacagttttattgttaatgtcaactgcattaaatctatcaatacacgaagcacct

SEQ ID NO: 238 - DNA, 1819 bp, Glycine max
gaattcggctcgagatcaaagcatccatactgcttatgtgagagcaataagatccgctgagcactttgtatatattgagaatcagtattttttgggctcctcctatcattggccttcatataaaaacaatgcaggtagataaacttaattttccaatatcttcaactttataaggcattgctagtttttgcgttgttacaaaatcaaattctggcctttaggtaatgtacctatatatatgccacagacccagaagatataattgtgtatctatgaaggaacaaacatggcaggttagtgggaggcgcatgaatatacaacaaatcatttgcatattaatcctgttaagtgtcactatccaagataaagacttggcattagagggagttttggatgttaatagaggaagttgaaaattgaaagaaggatacacttgtttttttcagtacaagtcaataaagtctatggttcgtgcgagagataaaaggaggatataaagacacaagtttacaaccttgcattcgtttccatgttagatttcttaatcttaagagtttattaggtaaatatggtgtgcaccaaaaggtgtttgaagggtttattattgctttattttttctttttgtaatattgttttcaaatgcctgcatacattatacaaattcatatttattgctaacatttaagggaaatataccactctcctgatcctaagtttcagtagcatttgaatattaagtcaatttgagaggtacacattgctgtagtttttacaaatacactgcaagtgtaaggtttttatttcttatcttaacaggtgctaaccacttggttcccatggagttggctttgaaaattgctggtaagatcggtgcaaatgaacgtttttgtgtatatatagttataccaatgtggccagagggtgttccaacaagtgctgctgttcaagaaatattgttctggcaggtcacattagctgaaccacaataatatatggacagacaatgtctatgatgtacaagattgtagctgatgcccttgaaaaagcaggactttcttatcagtatcatccacaagattatctcaatttttactgccttggaaagagagaaccacaatccacaaatatttcaccaacaccaaatccatctgaaaaccgcgctttggtatcagttaaaaaattcagacgttttatgatttatgttcatgccaaaggaatggtagttgatgacgaatacgtaattattggatcagcaaacattaaccagagatccttagatggttcaagggacacagaaatagctatgggtgcctatcaaccaaaatatacatggacagaaaagaatgctcatccacgtggccaggtgtatggatacagaatgtcactgtgggctgagcaccttggcagtcttgatcattgttttgctgaacctcacaacctggaatgtgtcagacatgtcaacaaaattgccaaacgaaactgggacatatatgtgtctgaggaagagaatcggatgaggggacacttgatgcaatatccagttaagatcagcagggatggaaaagtcagtgcacttgatgattatgaatcctttcctgatgttggtggcaaaattcttggatcaccaaattcacttccggatgcattaaccacctgattaaccaaagtcttagaatattcgcctacagatatatatagccgctaagaattgcagctcaaaaaattggtaatgatggtaaagccaatttatatacacttaaaattaccttttgtatgtaaatttctgtatttgataaaaaaaaaaaaaaagggcggccg

SEQ ID NO: 239 - DNA, 1260 bp, Glycine max
gaattcggctcgagcaattttactttgccataacggtgagtttagagagggaataatggatggaagaggaggctgttgcatcgccaggtatgtacccggtgcatcccacgggtccaccgtcgacaaaataatgcttaggtttcgtccaatcgctcccaaacccgccgccgcggccaccgcttccgacggctcttcgtccgagagcagtgacgcttttctcaaaaacggaaccactaaaagaaagtacgtaagagataacaactacaccagcaaacgaagaatccgccggagaaagaacacttcctcgccggagaaaaagcagaagccggtggtgactcttccgttgcttccggaaactcccgatcggaaggattctcgggcaaaggatctaactccatcaccagctaaaccagtacgaaacaacaacaacaacaacaacaagagcaagaacttgaatattattaacaagaacgtgccggtgtgggtgagttttgagaatcgaagccttacgatgatgggagggtggtgttcgtgtgtgacggtggagggcgtgacggacacgtgcttggagagcgagtggctggggagtacagacgaggaacggagactgaacctcagcaatgacacgtgtccagggttcatatcagacggttacgggagggtgacgtggacgaacgaggcgtacgggaagatgatgatgatgaagggcgagggtgatgagggacagggaccagtgttgctggtgaataaggtgaatacggtggttccgcacgcgtcgttcacgtgcttggtgagggtggtgcaatactcgtgtgggaaggagagaaactcgctcacggtgccctgcgatgtgtggagaatggactgtggtgggtttgcatggagattagacgttaaaactgcgcttagcttgagattgggttattagttcacaaaggtatcacgaactcgaaatacaaaacggcgtcgctccatggtcgtagaactataacactatttcttctcttttaagagcttagaatcgtgaatatatatatctatatatctatatatatatatatataactactgacgctaagctagcttgtttcactgtaaattcatatatgcatgtagcttgtcttttgttctcttagatggttttttctgatttgagtttgagcttggaacagtagctgtgagctaattatgaataactcgctacgtaccgttatggttaaaaaaaaaaaaaaaaagggcggccgacttttgttacgtcac

SEQ ID NO: 240 - DNA, 1410 bp, Glycine max
  unsure (1)..(1410): unsure at all n locations
cggctcgaggttggataagtgaaccagtgggtatttcaaaggctgattcattcccacaaactggattactggagcaaataaatacaacagctgataaaagtgattacttgtggtactcattaagcattgattataagggtatgctggttctcaaactgtccttcacattgaatcacttggtcatgcccttcatgcttttattaatgggaagcttgcagggagtcaaacaggcaatagtggcaaatataagttcactgtggacatccctgtcacactagtggccggaaagaacacaattgatctcttgagtttaaccgtgggacttcagaactatggagccttttttgacacatggggagcggggatcactggtccagtgatattgaaaggtttggcaaatggcaacacacttgatctctcctaccagaagtggacttatcaggttggcctcaaaggggaagacttaggtctgtctagtggaagttctggacagtggaattcacaatctaccttccctaagaaccaaccattgatttggtacaagacaacctttgctgctccatccggcagtgatccagttgcaattgacttcacggggatgggaaaaggtgaggcttgggtgaatgggcaaagcatcggacgatactggcctacatatgtggcttcagatgctggttgcacggactcatgcaattatagaggaccttacagtgcatccaaatgtcgcaggaattgtggaaagccatcacagacactataccatgtaccgcgatcgtggttaaaaccaagtggcaacattcttgtattgtttgcggaaaagggaggtgatccaacacaaatatcttttgtcacaaaacagacagaaagtttgtgtgcacatgtatccgattctcacccaccacccgtagacttgtggaactcagatacagaatcaggaagaaaagtaggtcctgtgctatcactcacttgccctcatgataaccaagtcatctcttccattaaatttgctagctatggaacaccccttggaacctgtggtaacttctaccacggacgctgcagcagcaacaaggctctttctattgtgcagaaggcctgcattggatcaagcagttgtagtgttggagtatcaagtgagacattcggaaacccttgtagaggagtggcaaaaagtttagcagttgaagctacttgtgcgtagacagacatgtttcttcaataacacttcccaattttctgaagatgattccttctaataagcaaaagtagatttgtaattttaggaacatccaagaaaatatagtcaactaaaacagtttagtctcacatgcaataaaaaagaaaagtctctaagctgatgcaagatagtacgtgataaatggtatttttnnnnnnnnnnnnnnnnnnnnn

SEQ ID NO: 241 - DNA, 2108 bp, Glycine max
cacagacacaaggtttggtcttgttaggttacctctgtgacatttgtgctgctagttcatatatttgcggctgacaccgagaaggaaagcaggaaaaaaacaaaaaggagcagatgggtagctcaggtttctcatggaaattggcggatcatccaaagcttccaaagggtaagactgtggctgttgtggtattggatggttggggagaggccacacccaatgagtacaactgcatccacaaggctgaaacaccctgcatggattcacttaaaaagggtgctcctgaacggtggagattggtcagggctcatggtactgctgtaggacttccaacagaagatgacatgggcaatagtgaagttggtcacaatgcccttggggctggtcgcatatttgctcagggtgctaagcttgtcgaccttgctctagcctctggaaaaatttttgaaggagaaggtttcaagtacataaaggaatgttttgaaaatggcacattgcatctcattgggctactgagtgatggtggagttcactccagacttgatcagttgcagttgttgcttaaaggagttagtgagcgaggtgttaaaagagtccgtgtccatattcttacagatggccgtgatgttttggatggctcaagtgtggggtttgtggaaacccttgaaaatgatcttgcaaacttgcgcgcaaaaggtgtcgatgctaggatagcatcaggtggaggtcgtatgaatgtcacaatggatcgttatgagaatgattggagtgttgtgaaacgagggtgggatgctcaagttcttggtgaagccccttataagtttacaaatgctcttgaagctgtcaagaagctgagggcagaaccaaaggccaatgaccaatatttgcctccttttgttattgttgacgagagtgggaaacctgttggtccgatagttgatggtgatgctgttgttacattcaacttccgagctgatcgtatgacaatgattgctaaagctcttgagtatgaaaattttgacaaatttgatagagttcgttacccaaaaatccgctatgctggaatgcttgaatatgatggtgaattgaaacttccaagtcattaccttgtttctccaccagagattgacaggacttctggtgaatatttagtgtataatggtattcggacttttgcttgcagtgagactgttaaatttggccacgtcacattcttctggaatggaaaccgctctgggtattttaatgcagaattggaggaatatgtggaaattcctagtgattctgggattacattcaatgaacaaccattaatgaaagcattgcagattgctgaaaaggctagggatgctattcttagcgggaaatttgatcaggtacgcgtcaaccttccaaatggtgacatggtggggcatacaggtgacattgaagcaacagttgtggcatgcaaggcagctgatgctgctgtgaagatgattcttgatgcaatagagcaagtgggtggaatttatgttgtcacagctgaccacgggaatgctgaggatatggtcaagagggataaatctggaaaaccacttctaggcaaggatggaaaaatccagattcttacttcccatactcggctcgaggtgccaattgctattggtggtcccggattggcccctggtgtaagattccgaaatgatgttccaaccggcgggcttgccaacgttgctgcaactgtgatgaatcttcatggattcgaggctcccagcgactatgagacaactctcgtagaagtggttgataactaggaaccaatagatgaatttttataatttgaaaaacaaacagggaaagctgtagattgcagccctcaaaataattgaaagttttcatccttattccacatgtgtggtggttttgttcttatgagttaccaataccagtctgcagttgacagaaaagtatacctaattaatggcattttggcactctcttttaactttctatgattatgctgaattacatttgagttaggtattttgtgattggcaatttgcaaggccatctttaaatcatgcttgtgaaatgcctttactagggctgattcgtgtgttatgatgttg

SEQ ID NO: 242 - DNA, 1203 bp, Glycine max
cttagcctcagttatctccttcttcttctttacataggccctttcttctcttcccccattttttcctctttcttcctcgcctagctagctccagaaaattaggatctgcttcagatctagtgtttccctgtcccaaatcacgagtccattgagtttgattttgtggatgaaaagcatagatagggcttttgcaaaactctccaatgtttcttgaaattatatgaccatgcgtcgaattcgtatgctgcactccttctccgtcgtgttcctctactggttctacgttttctcatgaactccctcttaaatccgtgattaattagatctatctccttagttaatccttgtcttttccaataattaattagatctgcgtctcctttttggattagtttcttttttggttctgttatcaaatcaaataaaaaatctccttctcggaaatggcatcaccgatccaacaacaacaacgctcgactactacaagttctggatctgaaggaggagatccgcatatgatcgacgagaggaagcggaagaggatgctgtcgaaccgcgagtcggcgcggcgatcgcggatgaggaagcagaaacagctggaggatctgaccgatgaagttagcagattgcaaagcgcgaacaagaagcttgcggagaacatagaggccaaggaagaagcgtgcgtcgagaccgaagcggcgaacagcattctgagagcacagacaatggaactggccgatcgattgcgcttcttgaactccatccttgagatcgctgaagaggtcgaagggttatccgttgagattcccgagattccagatcctctcctcaagccctggcagattcctcatccgatacaaccgattatggccaccgcaaacatgtttctgcgttgatcattcctgaggattttactttaattagggttattcagtgcggtagtaactttctctgttatgtgtattatattactattagtgttatctgtctgcatcaaaagtatcgtgtggtcatcaatgcattgggttcctgagagagatgaatgtgaggtacagggtgttgatggctggtagtggcagtgtgtgtccctttgcgcgacttgtaatcattttttatggtggctgttttattttaattaaaagtaatctcatcttctatgtttgttgttttattttaacaactaaatctaatcatcgttatcct

SEQ ID NO: 243 - DNA, 517 bp, Glycine max
ggccaacctttttttttagtattttttttctataaaacctaacctcagcctcaattatcaccttctttgccatagccctttcttttcgcgtcccttcccccaggttttcggctcgagttaatccctcgcctatatcttcagaaaattagatctgcttcagatctagggtttcccttttccaaatcacgagtccgttgagtttgattttgtggatgaaagcatagggatagggcttttgcaaacctctccaatgtttctcgaaattatatgaccatgcgtcgaattcgtatgctgcactccttctccgtcgtgttcctctactggttctacgttttcgcatgaactccctctcaaatccgtaattaattagatcgatctccttccgtagttaatccttgtctctttttcaataattaattagatctgcgtctcctatttcctttttttgttttgttctgttatcaaaatcaaataaaaaatctccttctcggaaatggcgtcgtcaatccaacaacaa

SEQ ID NO: 244 - DNA, 375 bp, Glycine max
cgctgaagaggtcgagggattatccgttgagattcccgagattccagatcctctcctcaagccctggcagattcctcatcccatacaaccgattatggccaccgcaaacatgtttctgcgttgataatttcttttgctctttctcgtttggggattttagtttaattagtgtggtaacttttctctgttatgtgtattattactattagtgttatctgtttgtgtcaaaaatatcgtgtggtccgcaatgcattgggttcctgagagagatgaatgtgaggtcaggtacagggtgttgatggctggtagtggcagtgtccctttgtgcgtcttgtaatcgtttttaaatagtcgtgttttattttaatcaaaagc

SEQ ID NO: 245 - DNA, 408 bp, Glycine max
tatagaagactatgacgtcggatccacgcgtacgttaaacccgaattccggtccaacccaatttttccaccttcctccccgcctagccagccccaagaaaattaggatctgcttcagatttaatgtttcccctgtcccaaatcacgagtcaattgagtttgattttgtggatgaaaagcatagggatagggcttttgcaaacctctccaatgtttctcgaaattatatgaccatgcggcgaattcggatgctggaatccttcttcggcgtggttcttccaatgggtccaaggtttcctaaggaattccttttcaattcggtaataaattagatcgatctccttcggtagtaaatcctggccccttttccattaattatttgaaccggggcttctaattcccttttttg

SEQ ID NO: 246 - DNA, 951 bp, Glycine max
actcgagccgaatcggctcgagattcttctttcagcaactcataactggggtcagctattgccatgctatgcaagtatgtactcgggacttgaagcttgaaaacactttgctggatggaagcccggcacctcgtttaaagatatgcgattttgggtactccaagtcttcagtgcttcatcagtaaccagagtcaactgtgggaactcctgcatatattgctccagaagtattgctgaaacaagagtatgatggcaagcttgcagatgtctggtcatgtggagtaaccttatatgtgatgctagtgggagcatatccttttgaggatcctaatgaaccaaaggactttcggaagacaattcagagagttcttagtgtccagtattccattccggacggtgttcaaatatctccagagtgtcgccaccttatttcaaggatctttgtttttgacccggcagagagaatcaccatgtctgaaatctggaaccatgaatggtttctgaagaatctcccggcagacctgatggacgagaagataatgggcaatcaatttgaagagccagaccaacccatgcagagcatcgatacgatcatgcagataatttcagaagctaccgtaccagcagttgggacctattcttttgaccagtttatggaggaacaaatttatgacttggaatctgaatctgatgctgaatctgatcttgatatagatagcagtggggagatagtgtatgccatatagtttgatcttagttacacttgaaagacaacaacatattaaatggagagagcattttcagcatcaagagatatatacgtggtgcccgcattttctgtagattagcatggataatacaaacttcatgttaatatttatgtattcagtgttggttgctgagggaagaaatgattgttaccctttaaaaaaaaaaaaaaagggcggccgc

SEQ ID NO: 247 - DNA, 727 bp, Glycine max
cccacgcgtccgcggacgcgtgggcagagggttctcagtgtccagtattccattccagacaatgttcaagtatctcctgagtgtcgccaccttatctcaaggatctttgtttttgaccctgcagagagaatcactattcctgaaatattgcaaaatgaatggtttctgaaaaatcttcctccttacttgatggatgaaaagatcatgggtaaccaatttgtagaatcagatcaagcccatgcagagcattgatacgatcatgcagataatttcagaagctaccatacccgctgcagggacctattctttagaccagtttatggctgataacataatagatgatgacatggatgaattagactccgactttgagcttgatgtagatagcagtggggagatagtgtatgccatataatttaatcatcgtctgcattttagagacagcataatgaaagtacagcatcttaatattcaacacgacgatctcccttaatttaatcatggaaaaagaaatttgtggagatcgtatttcctgtaagattggatgatacacaaagttcatcatgttaatttgtatgttgtatgcttcttggaactgccgaggaagggaacatgattcttactctctagaaggcttggtggcttagaaatcataactacccttccctcttctcctgttgcatacttgttatatatatatatatatatatacacacattaggctttt

SEQ ID NO: 248 - DNA, 1747 bp, Glycine max
tgaatgcttaaaggaattagaaaaggcaacaaagaagaccactatgcttttatcataatctttataagcgcataaacactggcgcaaatgatttatcatcctgaattcggctccaacttttcacacatgaccatgctacctcattcattaactatgattgcaacactaataatcatttttcttgcacaaacacttgtgggggtgagttcacttcctgaagctgataaaataaccaatttgccggggcagccacgggtcgaatttcagcaatattctggttatgtcaccgtggatgatcaaaatcaaagagctttgttttactactttgttgaggctgaagaaaacccttcttccaagccattagtcctatggttgaatggagggcccggttgttcatcgattggagttggagcttttgctgagcatggtcctttcagaccaagtgacaacaatgttcttgagataaatgataaaagttggaacaaagtggcaaatgtgctatacttggaatcaccagctggtgttggattctcttactctagcaatgaatctttttatgccttagtgacagatgaaatcacagctagggataatcttgttttcctacagcgttggttcactaaattccctgagtactcaaataacgacttcttcatttcaggggagagctatggaggtcactatgttccacaactttcacaacttattgttcaaaccaagaccaacttcaatctcaaggggatagcaatagggaatcctcttcttgagtttaatactgatttcaactccagatctgagtacttttggtctcatggactgatatcagattcaacatacgaagtcttaactagagtctgcaacttttcctcaattaggagacaaatccaaaatgggaatcttagaggcgtttgtgtaaaagcaaataagctattgaatactgagattagcaactttatagataaatatgatgtcactctcgatgtttgtttgtcatcagtaaatcaacaggcttatgtgctgaatcaactgcaagagacacagaagatagatgtttgtattggtgataaaacaaccacatacttgaacagaaaacaagtccaaaaagctctacatgctaatcttgttggagtcaccaaatggtcaacttgcagctcagttctgcattatgactatcagaatctagaaataccaacaattcctattctagggtcacttgttaagtctggcatcaaggttctagtatacagtggagatcaagattcagtgattccattaataggttcgcgatctctagtgaatggattagccaaggaaattggacttgatacaacagtggcctatagagcctggtttgagggaaaacaggtggcaggatggacaaaggtatatgggaacatcttatcatatgccactataagaggtgcatctcatgaagctcccttttctcaaccacagagatcactgctgctacttaaagcatttctggaaggaaagccactacctggtgttgcataaaatatgaacagatttaattaacaccaggcgttgttatttgccgcaataagtagaaatgctttcaaaatccacacagaaactgattattgctattggatcatcttatgattgttatgttctgctctctacaattctatgctttactttctttctgaacaatgtgctgaaggttcacaggatgaagtacaaggactgaaatttacaataaaaaaaaaaaaaaaagggcggccgc

SEQ ID NO: 249 - DNA, 1353 bp, Glycine max
gaattcggctcgagggtatataaatcgatgcctttgctcaggaactatgattacgttgcaggcctgcaacattgaggaagatggtttatttgtttttgatttgcatagtgatggcagtggccaaaggtttgtgcttcttgtattgtattactgaaaagagctgtaagctttgtaattaagcacgtacttactcttactgcatgtaggcacttgaatgctgccattagagaaaacgagtcaaataatccattggattcaaatggttctgtttttggctttcctcccaaccggtccccatattcatgcattcaaatgaatgggaaagaagtcttttgctttgctgtaagatgtgtaccacaatcaattgaatttgcccttggaaaggctggtctcccggcatctagcattgattggttacttctacaccagttacacaaaatgatctagtataaaataaaattctagcattttattgggatgcgcaaaattgtgttttttttacgttggcttatgatctgtgcaataaatattttcttcttttagttcattaaaccattatcctaaagggcactggttagcattacccttgtttttatcctttacttgctaaagtagctggcatcaggttaatttgtatgctcatttcctagtaaaaagaatgtgaaagtgaaatgtaaattaaaaaggtggaaaacctgatctatcctttatatcaagcaattcattagctgcacatgtgtgttatactattactttgctgagtggtaagatcaactttatgattgaaaacagaataccattttagttactatgggaattgcatgacatgcttgataatatattggagaaaggcaaaattaaggttgcatacttgcacttagggtgccttaattcatataagtgcaggcaaacaagaggattatcgatgcagttgccgctcggttagaactcccctcagaacgggtgatatcaaatttggctaataatagtaacacaagtgcagcttccattcctttgactttggatgaagcagttcgaagcggtaaagttaagccagggcaaactattgcaactgctggctttggcgcgggtcttacttggggttcggcaattgttcgttggggctaaatgcttttccttcactgcagaatcactactagagaagaatttcagttccaagtgtagctttcttacacatatgtgtagaaaatggggtttggggaatttgcaaaaggatggatatgaataacattcagcactgcctcaacttgtcatattctttttgtcttcaatttacattctccttgctcttctaaaaaaaaaaaaaaaaaaaaaaaaaaaaagggcggccgc

SEQ ID NO: 250 - DNA, 1116 bp, Glycine max
tggtcttatgacattacagctgcatgtagtggatttgtgttgggtttaatatcagctgcttgtcacattaggggaggtggatttaataatgttctagttattggggcggatgctctctcacgatatgttgattggacagacagagggacctgtattctttttggggatgctgctggtgctgtactagtacaggcctgcaacagtgaagaagatggtttatttggttttgatttgcatagtgatggcagtggtcaaaggcacttgaatgcttccattaaagaaaatgagtcaaataatgcattggattcaaatggttctgtggttggctttcctcccaagcagtcctcatattcatgcattcaaatgaatggcaaagaagtctttcgctttgctgtacgatgtgtgccacagtcaattgaatctgctcttcaaaaggctggtctccctgcatctagcattgattggctacttctccatcaggcaaaccagaggattattgacgcagttgccactcggttagaactcccctcagaacgtgtgatatcaaatttggccaattatggtaacacaagtgcagcttccattcccttggctttagatgaagcggttcgaagcggtaaggtcaaggcaggccagactattgcaacggctggcttcggtgctggtcttacttggggttcagcaattcttcgttggggctgaatgcttttctttcacggcagaattgcaaatagagaagaatcagttgcaagtgcagctgtccaaataccccacattcttacacaattgtagaaaatggggtttggggaatttgcaaacggatagatatcattaacatccagcactccctaaacatttccctttctttttgtcttcaagttattttgtcttcaatttacattctccttgggcttcctttctcaagtaccatttttttttctttttgaggcatgtatttgtcattcagatttatttgaaacgaggcttactatttatgtttctcaatggtacttgtaattaaaaatgcagcatgccaagtgtttgcttgcttgtactttaaacaaacttgtcaacaccaagccaccccctttaatttagttatttgtttttggatct

SEQ ID NO: 251 - DNA, 853 bp, Glycine max
ggtctacgttcggctcgagttgaattcggctcgagcggctcgagcggctcgagatttttcatacaacacattctttctagacacgcaacacctagaagatttccttattctttttggtgctaaaccgttgggatatagcaacaacatgttaggaatgaagagacatagagataatgaagggtcagagagcttagatttggcaaaatgtcttgtgctgttctcttgtccaatagaaagcaacaaggcacaacagaaaggttttggggctgtggaatttgagtgcaagacgtgcagccgcaagttctcttcttttcaagcactgggagggcacagggcaagccacaagaggcagaagctagagggggaagaactcaaagaacaagccaaaactcttagcttgtggaacaaaccaaaaatgcacgagtgctccatttgtggacttgaattctctctgggccaggctctgggtggccacatgagaaaacacagagctgctctcaacgaagggtttcctataattccttctatcgaccaagttattgcgaaaatcccggttctgaaaaggtcgaatagcaccagagttatgtgcttggacttggagttacacctgtagagaatgaatgactgaactaccaagtcacccaagctcctttttctttgttcttattaacttttctacattttttacctgtttctggacacatgtattctttcattttttgtgtgaaaattttattgacttttcccttatagatgattgattctttattctggacacatgtattattttgttaatacgattatcaaaagttcttagtgttttaaaaaaaaaaaaaaagggcggccgccgact

SEQ ID NO: 252 - DNA, 709 bp, Glycine max
gggatccatcgaaattctagacacacaacacataaaagatttccttgttctttttactgcttaaccgttcggctatctcatatatgaacaacaacatgttaggaatgaagagacggagagatgataatgaagggtccttggatttggcaaaatgtcttatgctgttttcttgtccaatagaaagcaacaagacacaacagaaaagttttggttctgtggaatttgagtgcaagacgtgcaaccgcaagttctcttcttttcaagcactgggagggcacagggcaagccacaagaggcagaagctggagggggaagaactgaaagaacaggccaaaagtcttagcttgtggaacaaacccaaaatgcacgagtgctccatttgtggccttgaattctctctgggccaggctctgggtggccacatgagaaaacacagagcttccatcaacgaagggtttcctattattccttctatcgaccaagttattgcgaaaatcccggttttgaaaaggtcgaatagcaccagggttatgtgcttggacttggagttacacctgtagataatgactctgtgcttggaatcaactatgaaatcaccacctcaacttctttttctttgttctgactaactctttttacctctttctggacacatgtagtattctttcatttttgtgtaaaaatttcattgacttttcccttataaaga

SEQ ID NO: 253 - DNA, 1887 bp, Glycine max
cacagttttagtgacagagaggttttcttttctctttatcttcaagatctgagtattgaatgcatagatggattggctttcgtcctcagtcctgggcattacgaaaagtttcagaatgaggcccgttgtactcacttagagccattcatctgcaaccaccagttcgataatgatgatgtgaaaccctttgatataacacagattaagggttattggaaacaggaaattctcaggtacatgtatacccaattggactcgaagtctagtgggagttccaggcaatcagatgatgacctggaacttgatgaaaatcatatgactaccgtttttatcagacctaagaagaggctgcgccttaccaaagcagatgatgccaaagaagcagttgatttggttggccttaaaacagaaaatgtgaataacagtaagaataataccaaaatcaatactggaaacaattctgggaaactgattgggcacacaaacatgacagcaaccattaaagggacaaatgaacatgcttcacaccatttagttgtaggttccctagtcgaggtcctctctcaagacggtgggatgagaggatgctggttcagagcttctgtcattaagaagaataaagataaagtcaaggtgcaatatcaagatattcaggatgctgtcgatgaaaccaagaagcttgaggaatgggttttagcttccagaattgcagtgcctgacaacctgggtcttcgaatgcgtgggaggaccatggtccggccagctccaccatccaacaaacgagaactatcgtgggtcggcgatgttggttttgttgttgatgcttggtggcatgatggatggtgggaaggcattgttgttcaaaaggactcggaatctaattgtcatgtttatttcccaggggaaaaagtggtgtcggtatttggtcctggtaacttgagagagtctcaagattgggtggggaaggagtgggtatttgtgagggaaagacctgatcttgtggcttctgttttatctagcttgaaaacaaaacaaaactcatgcaaatccaattccaataacatccaatcaactggagcaatcaccagagatggaatacaatttgggcaatcggatacttgcttggattctgataaggatagaccaagaaaagctgaagtggttccagaccttttgaagaatgttttgtcatcccagttaaggtggaagaccaccagaaagaggaaacgtggaagaagcagcgcctcatatcagaagccacggtgcactgacacccatcagaaaaggtcaccgaatgttatgaaatcaaatgctcctgacagttttttgatcccggcatcattgaaagttgatcatgatgactgcaagtatgttggggatccttccatcttcagttcttcagttgtgccttctttaactaacatggttatgtgtaggtgactccatgattcatatcttagtttccgggttctttacttctctcactcctttgcttttaagtacatgtatttagcccctaaaccttagtgcatcttttcgatgcctgtcttgtccagatcttcacgtccagtatctattctcttcgtccatttcctttgataacagagaaatttatcttaggttagtctttttctttcccacctttcattagttttgtggtttgtggcatcgaagccaaggaggcaaggatgatgccatacaagttttggcataggaaaaagtgtaacgtagtggaataaccaagggtggctttgacttataggatagattgtgttcttttcatataaaatgatccaatgtaatttgtgtaaaactttctataagagtagcaattttcttgttcttttatattttgagaaaaaaaaaaaaaaaaaaaagggcggccgc

SEQ ID NO: 254 - DNA, 440 bp, Glycine max
  unsure (1)..(440): unsure at all n locations
atgtgtaggtgactccttgatccatttcttagtttctgggttctctactctcactctttgccttcnaagtatgtacttatttagcccctaaaccttaatgcatcttttcgatgccctgtcttgtccagatcttcatccaggatctcttttcttcgtcaatttcctttgttaacatagaaatttatcttaggttagtctttttcttccccaacctttcattagttttgtggtttatggcatcgaagccaaggaggcaaggatgatgccatacaagttttggcataggaaaaagtgtaacgtagtggaataaccgaggatggctttgacttgtaggataagatagtgttttttttttcttttttttcatatgggaatgatccaatgtaatttgtgttaaccttctcctataagaatagcatagcagtttgcttgttctttta

SEQ ID NO: 255 - DNA, 1335 bp, Glycine max
gaattcggctcgagtttgaatcttgttctctctaatctctctcactacaatggagactccatcatccacagcaagaagaatcacaagatcccaaatcgcctccaacaacaacatccccgtttcaagaaaaaagaacgaggactgctcagaaaagagcgtttcaaaaacgcggcagagaagcagcgtgcaacagcaggaacggtgtgcgctggtcgacatatcgaacgattcaccgatcgcggggctggcgaacgggaaggacatcattgagacgccgttgtcgtcgatggcgaagaagaagagggtgaagaagacgatgaagactccggggtcgggagaggctctgctgaggggccaggtgaagaccctcttgcagagggtggaggaagaggctgtgatttcgaagctatcgatggaaattgttgcaccctttctgaaacttgcgaattcttctccaatgtcgcttcttgcgcccactcccgcaaacacaccacaagtccccaatctttctgaagtggctttggtgtctccaccttctagtgtggttgaagaacaattgatctctcgggtggtgaatgaaatatttgaagggaagaagaacgagaatgctgaatgtgagaagagtgtgataaccaggtccttgctgttggacttctcggacaaatccgaggtttcagaatgctcttctgaggtgacatatcaggaagtgacacaaggaagtgttggtagccgtgggtccaccgaggatgatggtgcttccatttggtccattcaggtgaatgcgagcacgcatgacgaagatgaggacgatgaggaaatgggtgaagaggaagaagaagaagaagaagattattgcgaggatgctgaagagtgttatgattatgttggagggttgtcacttgaagagctatgtgctgggatgaataacattagtgtgaatgagaacaagggttgtgggaagcacacgaggtttgtgtacgatagtgaggatgagattgtggagaaagtgatagaatgttgtgctgagtctgatgtgatgcgtttgaagggtttgccaacacccaaaggaaagcaccttcgctttcctcaggaggaagaaaattcctctgacttgtgatttttgataattggtgctgctgcggtttggtttggtattgtctttcttgacaccactgttttggttaatggtgtgattggggaagctaaattgctgctccaataaacacaaccattgttatttttctttatcaataataaataaaccattgcttgtttaaaaaaaaaaaaaaaaaaaaaaaaaaaaagggcggccgcttatttttctttatcaccggg

SEQ ID NO: 256 - DNA, 932 bp, Glycine max
gaattcggctcgagcttggctgcggctggaagagacgtggttgctaacatatgggatatccgtgctagtaggcagatgcataaactttcaggacatacacaatggatacggtccataagaatggttggtgacactgtgattactggtagtgatgattggacggcaagaatatggtctgtttcccgaggaacaatggatgctgtcttagcttgccatgctgggccaatattatgtgttgagtattcttctttagacagaggaataattacagggtccactgatggcctgctacgtttttgggaaaatgatgatggaggtatacgctgtgcaaaaaatgtaacaattcacaatgctgccatattatctatcaatgctggggagcactggttaggcattggagcagctgataattctttgtcgctctttcaccggccccaagaaagacttggtggtttttctggcactgggtccaagatggctggttggcagctttacagaacaccacagaaaacagttgctatggtaaggtgtgttgcttcagacttggaaaggaaaaggatatgcagcggtggtcgcaacgggcttataaggctgtgggatgcaactattaatatttgagttcaatcgttaaatgcattttcacgtttgtaaattgtaacaattttaaaggtgaaagacaaggtacttaatgaagaggaggggttatctccattattttttgtttattttccttatagtatataaaaatgtgcaaagatatgtctgatgagtccaacttgcgaacacttgtaattttgtggttagaggtttctgtattctgaatgtacatactgctacgaagaacaaattttattagtgtggatagattagttataatgtctaccattgaagtctcaaaaaaaaaaaaaaaaaaaaaaaaaaagggcggccgc

SEQ ID NO: 257 - DNA, 662 bp, Glycine max
gcccttgctgtttttgatagaatatcaaaacctgatttcctgtcgtctgtatctaagaaaggcctctacttcaaagaattactccgaattcggctcgagggaaaccaacatgtgaaagaaattcgtggtgttgggctaatcataggaatagatttagatgtacctgcctcaccctttgtcgatgcatgccgaaattctggccttttagtattaactgctggaaaaggaaatgttgtcaggcttgtcccaccattgatcataacagagaaagagctcgagctagcggccgacattttgtgcaaaactttaccagttcttgataactaggagtgtaagagaaagaggtttggctttacaagcaaaatagaaaacttaattggttgtgtattgttgagtagcttttagatgccaaaacttcatggtttccctttcatttaagatgtctcgatggtaagaatatttcagaaatattgtagcatttctttgattatgcgtcccggatcagatggtttacatggtctattctctttctgcaagagatttatttgggtattttttgtcatataaagtgtaataataactacaaggtcttctgagttcccctcataaccgtagataaactatcttcttttggtaaaaaaaaaaaaaaaaagggcggccgc

SEQ ID NO: 258 - DNA, 1321 bp, Glycine max
gaagaaaccaacacttgggggtgtctcagatgagaggaaatcagaatcaacttctagtgtagttaatgcatcagaacttccacctcatctccttcttgaaagaattcggctcgagccgacaatgaaccaaggaaacattgctaaatggaggaaacaagagggagacaagattgaagtgggtgatatattatgtgagatagagacagacaaagctacacttgaatttgagagtcttgaagaggggtacctggctaagatacttgctccagaaggttcaaaagaagtggcagttggacactctattgcaataacagttgaagatgcaagtgatattgaagctataaagaattctgttggtttgttgagctgctaaccaagtagcaccagcaccagcgggccccaccaacatcacccaagttcttgagaaagcaggccaattcacaaccttcatcaaacttctcaaggcctcacaaatagctgatagaatcaattcgcagctcaacaactcaaaccaaggcctaaccgtatttgcacccactgataatgcattctcaagcctcaaagcagggacactaaactccataaactcacaagaccaaatgcagttgatacagttccacattctccccactctctacaccatctcacagttccaaaccgcaagcaaccctttgcacacgcaagctgggaacagtgatgatggagagtaccctttaaatgtcaccacctcagggaaccaagtgaatgtaacaactggggtggttgatactacagtgtccaatactatctacagtgataaccagcttgcagtgtatcaggtagataaggtacttcttccaatgaagcttttcggcgcaacggcaccggctgcttcaccggcagaggctccggcaccgaccaagccggagaaaaatgtccgggctggggctgctgattctccttcagggtcgtcggacacgtccgctgatgcttcgagtgcagtgagtttgaaaaggcacacagttgaaggtgttacctttgttgctgcagttgttgtcatgattgtttcttgtttctgaatgtaagtcctaggatggctcatttttcttggtttttttttttatgttattctttcttttttttgctccagcgagtttgggttgattgatgatgatggtggagatctcgtgtgctgttattgctacgaagttaagaaaattttgggttctatataaatgattttttttcttttctttcaaatccataagttagagttggagctatttgtttactattgttgaaaaaaaaaaaaaaaaaaaaaaaaaaaaaaagggcggccgcc

SEQ ID NO: 259 - DNA, 932 bp, Glycine max
cggctcgagcttagcttagtcttcttaatttcctcactcgcaagtcacaccaatggcaaagctattcaatttcctccctctcctcttcctcaacatcttcattcaaacaatttcagcccaagtagcaccagcaccagcgggccccaccaacatcacccaagttcttgagaaagcaggccaattcacaaccttcatcaaacttctcaaggcctcacaaatagctgatagaatcaattcgcagctcaacaactcaaaccaaggcctaaccgtatttgcacccactgataatgcattctcaagcctcaaagcaggaacattaaactccataaactcacaagaccaaatgcagctgatacaattccacattctccccactctctacaccatctcacagttccaaacagcaagtaaccccttgcacacgcaagctggaaacagtgatgacggagagtaccctctaaatgtcaccacctcagggaaccaagtgaatgtaacaactggggtggttgatacaacagtgtccaatactatttacagtgataaccagcttgcagtgtatcaggtagataaggtgcttcttccaatgaagcttttcggcgcgatggcaccagctgcttcaccggcgaaggctccggcaccgaccaagccggagaaaaatgtccgggcaggggctgctgattctccttcggggtcggacacgtccgctgatgcttcgagtgcagtgagtttgaaaaggcacatggttgaaggtgttacctttgttgttgctgttgttgccatggttgtttcttgtttctgaatgtaagtcctaggatgactcatttttcttgtttttttctttttatgttttttttttcgtgttgggttgattgatgatggtggtggaaatctcgtgtgcttattgctacgaagttaagaaaattttgggttcc

SEQ ID NO: 260 - DNA, 520 bp, Glycine max
caaatcttagtcttcttagtttcctcactcacacaaatggctaagcttatccatttcctccttttccttttcatccaagcaatttcagcccaaacaccagcagcaccagcgggccccaccaacatcacccaagttctagagaaagcaggacaattcacaaccttcattaaactcctcaaagcttcacaaatagctgatagaatcaattcacagctgaacaactcaaaccaaggcctaaccgtgtttgcacccactgataatgcattctcaagcctcaaagcaggaacattaaactccataaactcacaagaccaaatgcagctgatacaattccacattctccccactctctacaccatctcacagttccaaaccgcaagtaaccccttgcacacgcaagctggaaacagtgatgatggagagtatcctttaaatgtgaccacctcagggaaccaagtgaatgtaacaactggggtggttgatacaacagtgtccaatactatctacagtgatactcagc

SEQ ID NO: 261 - DNA, 1366 bp, Glycine max
agggaaagagaatatgggtttcatatgtgggttccaagttcaacaatcatttttgaatcttaaataagagaacagcccaaaacctttcaaaatacacatgctgcaaattgctcacccaatcaccagccatgggagaggttgacgcagcattcatccaagacccaccacacaggccaaagctctccaccatccaagccgaaggaattcccataattgatctctctccaataaccaaccacagagtttcagacccttctgctattgaaggcttagtgaaggagataggtagtgcatgcaacgagtggggtttcttccaagtaacaaaccatggagtgcccctcactctaaggcaaaacattgagaaagcctcaaaattgttctttgcacagagtgcggaggaaaagagaaaggttagcagaaatgagagctctccagcgggttattatgacacagaacacaccaaaaacgttagggactggaaagaagtctttgattttctagccaaagaacccactttcattcctgtcacttctgatgaacatgatgatcgagtcaatcagtggactaatcaatcccctgaataccctctaaactttagggttgtaacacaagagtatattcaagagatggaaaagctgtcctttaagattttagagcttatagctttgagcttaggccttgaagcaaagaggtttgaagaatttttcatcaaagaccaaactagctttattcgactcaaccactatcctccatgcccttaccctgaccttgctcttggcgttggtcgacacaaggaccctggtgccttaaccattcttgcacaggatgaggttggaggacttgaagtgaaacgtaaagcagatcaagagtggataagagtgaaacccaccccagatgcttatatcatcaacattggtgacactgttcaggtttggagcaatgatgcatatgagagtgtggatcacagagtggtggtcaactctgagaaggaaaggttttccattcctttcttcttcttccctgcacacgacaccgaagttaagcctttggaggagctgataaatgagcaaaacccttcaaaatataggccatacaagtggggcaagtttcttgtccacagagggaacagcaattttaagaagcaaaatgaggagaacattcaaatttatcattacaagatagcttaaagggtaaattgtgtatgatattatcatgatatgaggcagcgttgatccaagacaacgttactgatatgaataagtccgatcaacttcactgctaaatttcctagtgtgccttatgtattgaacaatcactgaataaaagaactaaattattaccaaaaaaaaaaaaaaagggcggccgc

SEQ ID NO: 262 - DNA, 534 bp, Glycine max
gacggagattattataaaagataaaactccctttataacttctgagttactgatacaaaggcacaactcttcatccatgaaaatcagttttgtttataaacatatacaaataattaggtggtgaaattgaaacaagtaaacctccaaaaaccagtaaccactccgtatattatcttattggcaaagtactcaatcatcagcactagcaacagccatgggagaggtagacccagctttcatccaagacctagaacacagaccaaagctctccataatccaagctgaaggaattcccataattgacctctctccaatatccaaccacacagtttcagatccatcttccattgaaaacttagtgaagcagatagggagtgcatgcaaggaatggggtttcttccaagtaaccaaccatggggtgcccctcactctaagacaatcattattaaaacctcaatattgttctgtgcacataatttgcacgagataataaaggctaacatttatgacagtgttccaaatgattacgattac

SEQ ID NO: 263 - DNA, 1595 bp, Glycine max
agacgctctcaacaaccaccacttctcttccaaagaagataataagaacccaccaccacaaactgctgctcacaaggaagaagttgtaagaattcggctcgaggatgctgccccagcaaaaaccgaagaggagcaagctgaaacaaaggaggaagaggaaaagaaggaggaagtgaaagaaacgaatgaagaagctgcggtggatgatgatggagcaaaaactgtggaggccattgaagagaccgttgttgctgtctcttctaccgttcagcctcaagctgaagagaaagcttcatcgccacttccacctgaagaggtttccatttgggggataccgctgcttgcagatgagaggagcgatgtgattctgctgaagtttctgcgcgcgagggagttcagggtgaaggaggcattcaccatgctgaagaacacgatccagtggaggaaggagtttgggatggaggagttgatggaggagaagctcggggatgagttggagaaggtggtgttcatgcatggctttgacaaggagggtcaccctgtgtgttacaacatctatggggagttccagaacaaggagttgtacaagaagactttttctgatgaggagaagagggagaagttcctgaggtggagaattcagttcctggagaagagtataaggaagctggatttcaaccctggtggcatatgcaccattgttcatgttaatgacctcaagaattcccctggacttgccaagtgggaacttagacaagccaccaaacatgccctacaattgcttcaagacaattaccctgaatttgttgccaaacaggtgtttattaatgtgccatggtggtacctggcagtgaataggatgataagcccttttcttactcagaggaccaaaagcaagtttgtctttgctgggccttccaaatcaacggaaacccttttgagatacatagctccggagcagcttcccgtgaagtacggtggactaagcaaagatggggagttcggaaatatcgatgctgtcacagaaatcacagtgaggccggcagcaaaacattcggtggaattttcagttactgagaactgcttactctcttgggagcttagagtaataggttgggaagtaacttatggggcagaatttgtgccaagctcagaaggaagctacacagtaattgtccagaaggctagaaaggttgcttcatcagaagaaccagtgctttgcaacagttttaaggttggtgaacctgggaaagttgttctcaccattgacaacacaagctctaagaagaagaagctcttgtatcgcttgaagaccaagccttccccttctgactaaaatcatcattgttatgtgtatgtgcaagtgggaaggggaagaacagtgccagaattgcttgcttacattcctgcatcaacttctaccaagacaccagtgcttcaaagattaactttccagctgttcatatatgaatataaagtttttgtttttaattttttggcctttttgttttgatgattattatgtgttcaaccatattatataattatatatacctctttctgtgttaaaaaaaaaaaaaaaaaagggcggccgc

SEQ ID NO: 264 - DNA, 667 bp, Glycine max
ggatgaatagatagagacttcatgtttgccttgtatggtagaatggttttaatgttatttatttatttttgtgtgtattggggacgtgcaactgagaactccctactctcttgggagctcagagtaatagggtgggacgtgacctacggggcagagtttgtgccaacctcagagggaagctacactgtgattctccagaaggctagaaaggttgcttcatcagaagaaccggtgctttgcaacaactacaaaattggtgaacctgggaaagtggttctcaccattgacaatcaaagctctaagaagaagaagctcttgtaccgcttgaaggtcaagccttcttctgactgagaatcttatcattgttatgtacatccataagggagatggagaagagcagtgcctacatgggttacttgattacattcttgcattcacttctatctcccaagatgttcaaagcttcaaagatgtggactttgctgctagaagaggaaagttttaatgataatcgtgatcatgtgtttcaatcatatataatttttctgtgtttctttaattatttattattgttatcattgttggaggggatcttttgatttttgaattcttattctatatttggaggagaaaataattgcgctatttatctgtataaatttcatgt

SEQ ID NO: 265 - DNA, 1848 bp, Glycine max
agacaaaactctcagatacacatgttttattcaaaacaaaagcaaaaaagcggccgccctttttttttttttttaaaaaagacaagttgattgccaaagccaaccaaaacaagtaaaactttaacattatatatatagagagcactctgcaaaagttacaggtagcaaataatgtacacacctctctcacaaaatgcaacaagcggcaattcatgagtactgctgtgctgtccagtgcacatcctacttttaatatatatatttactttgttttatttaattattaattaactaatacacattaaaaagaagattgattttaagtttgaggtagagtaggtgatgaggaggatcagaaggaagaagccttggcgagtgacttgatggtaacatcgggacccagaacaactggtttaaaatcgaacgtaaacgtgtcgtaacgcaggaagaattccaccaagtagagcctgcacatgagcaccaccagattcttggcgggacactgtttatcatccggtgtgggctcctccgtctggggtccgttggaccacaagacgtgtctcaagagcttttccccgtcgtggccaaggaacctgtgggccacaaagtcctcggcgttctcgaagatcttcggatccttggtagcgaacggctgatatccgaagatcatctctcccttcttgatctcgtacgccgcatcgtggctctccaccaccagatcctccctggccttcgcgtactggaacggcaccgcgggctctatcctcaggacctcatacaccactgatttggtcaaagtcatctgatccaacgcccggagactcacccctccttcgtccttaacaacggtcctgatctcctccgcgagctgcttgtgtaaaccctccccagccagtcctagccacttgatcaaaatcggaaactggttcactaacccaccctgcgcgttgaacgataacatgaacacaagattgtggcacgcttcgtccctctttatccccacgcgctccgcttcgtccagaatcgcagtacctgctgtcgagagaccttcgtagagtttcttgtagctggatttgacagtccatgctggaaaggggattgacctgattaagaaatcctccacgtagttgaagatcctgggtaagcctagagtggccagaggagccagctgagctgccagccaggtttggaccaggctggggccgtcggagccgattatggtttcggaggggtctttgtcggagaggagacggaagaggaagttgaaggtggcggagccgacggaggagttgaagctggccttgccggatttgccggccagcttgtcttccagatcagagaagtggtcggagaggttgttgcggaagagtgggaggaaggtttcgtgcttggaggcgaggaagttaaggtagaagcgcttgaggagcgcgtgggagggttcggtggtgtcctggaaggcacacgcgcggtaaccgccggtgaaggaggtggaaggcatgaaggtgccgtcgagaacatcgcgcttatcgaccttggagttgtcgaatagaatggggaaggagacaccgtcgaggagagcgatgactctaggattagaggaaatgaaaggacccggtggcatgttggttcgtataaccgtagagttgtactttttaattcgttcggcaaagaacttgtcgcgtccttggttgtagaaatagtcatgtctgtcactcatgggtccaaagaaaggaagcccgtagcttccagggatgggtttcaggggaagcttgctgtcggaagaagccattggtgattgtgctaaaggtgtgtgcttgctagtgtagtgttgtgctcgagccgaattcc

SEQ ID NO: 266 - DNA, 1314 bp, Glycine max
agatacacatgttttattcaaaacaaagggcggaatataaatcaaattcggtgcattgatataaaaaagacaagttgattggccaagccaaccaaaacaaggaaaactttaacattatatatatagagagcactctgcaaaagttacaggtagcaaataatgtacacacctctctcacaaaatgcaacaagcggcaattcatgagtactgctgtgctgtccagtgcacatcctacttttaatatatatatttactttgttttatttaattattaattaactaatacacattaaaaagaagattgattttaagtttgaggtagagtaggtgatgaggaggatcagaaacagagtgattcaccattctgttatcaaaatcttcacctccaagatgagtatcaccagcagtggctttcacttcgaaaatcccctcctcgatggtcaatattgaaacatcaaaagtgccaccaccaaggtcgaaaataagcacgttctgttcaccttttctcgaagccttcttatccaacccatacgcgatggcagcagcggtgggttcattgataatcctcaacacattcaaacccgaaattgcccctgcgtccttcgtagcctgcctctgcgagtcgttgaagtacgcagggacagtgacaacagcgttcttcacggcgtgtccgagaaacgcctctgccacttccctcatcttgaccaacaccatggaagatatctcttcggcggagaatttcttctcctcgcctttgtaattgaccacgatcatgggcttgtcgccagggccagccacgaccttaaacggccacagcttcatgtcgttttgaactgaagagtctgagaatctgcgaccgattaaacgcttggcgtcgaagacggtgttctgcgggttcatggcgacttggttcttcgccgcgtctccgatgagcctctcggtgtcggtgaaggctacataagagggagtggttcggttgccttggtcgttggggatgatctcgacgcggtcgttttgccacacgcccacgcagctgtaggtcgtgccgagatcgatgcctatggctttgccttcctttgtcgccattgatcaatcacagagctgttaatttcaccaaaagaaaataaaattttcagaattactggagagttttgtagagtggttttttatgtgcagatattgttgtgagtgaggtgagagagagaacccaaaccgcaatttataggccgcgttagaaattagagtgagttcgagaatatacgagattaggaagaaagtagcagagctggctagagagttctcgagtgtttgatc

SEQ ID NO: 267 - DNA, 727 bp, Glycine max
aaacgcaagtatctgcttctctgttttggacttttaatgtattaattggaactcgtgctaacagattcacaaacttagccttagccatacgggatgtaaggatatgcaaaagtggctaaatttatcaaagaacctaaactttatattactgccatcaattattaagtgatcattgcaatagatattaccataatcattcactactacatatacaagaagaaccttgaaccactggtagtagtttctaacctaccaatgcacatttttggttttgttaccaccatacaaacggaagaggctgaaagcagaaatacaagacatgaccaccatgctaaggctagccacaaaagcactagctatcccttctcccacttggttgcagaatttcccatacatgttgcatatcttcatccattgcagctctggctggccaacccttgcaatcatacccgattgccctgccgccgccaatgccaccactgttacataggccattacctgatcaccagaaaaaatggcccaagctaggggcttgctgaagagtactcttcccctgatcatactaaggatacagcgcaacccttggattaaggagtagccagcagctaacccatttgcaaccaccaggaacaccaaagacttcatgtctgtaaatttagcttccttctgaaatgagaaaaactccttgacttcggaatcagtccccacaagaacagctgcaagaacc

SEQ ID NO: 268 - DNA, 653 bp, Glycine max
cggtaaccacttatatattattttatatggtagcaatatattatttcacgaataacaagattcctgtcttgatcagcataggggtaactctgttcgtgtatcatggcacttcttgtgctccataatatatatttgttttatttgcctatgaaaaaggaaaagtcacacataagtgacaaaacagggggaaaaaaacccgatacaaaatattgatagataatagtaatatcttaagaaggccaatcaagctcgtccagtgcgccttccaactttgagtgctaattcggtatcaattttgagggagacgtctagtgctttcacagaatgagtcaacgaaccactagaaatgtaggtcactccgctttgcccaattttatgtacagtatctagtgtgacattgcctgatgcctcagtctcatatctcccatttatcaactgcacagcttcttttagcatagatatgtccacatccccatttggtagaggtacaaccatattgtccaacattattcgagtcaaagaagtctttgtttgagatgaataatgtaaaacttcttccacttcctcaagagtcctggtctccacctcaacctccatttgaagattgttttgctccagatgcaggtcaacagcttctcgagccgctcccgccg

SEQ ID NO: 269 - DNA, 732 bp, Glycine max
tcggaataggttgagaaaatctgctccttcttggtgggaattgtagtgttccgcggaattagtacagtcataacaccacccgcagtttcgagcccgagactgagaggtgtaacatccagcagcaacaaatcctgaaccttctcgtctccttcaccgctcaagatggcagcttgaactgaagcaccgtatgcaacagcttcatcggggttaatgctcttgcaaagctctttcccattgaagaaatcctgcaagagttgctgaaccttggggatcctagtggaccctccaacaagcacaacctcatgaacatgactcttgtctatcttggcatcacgcaaacacttctccaccggctccatgcacttcctgaacaaatccatgttcatttcctcaaacctcgccctcgtgattgtagcatagaaatcaatcccttcgtataaagaatcgatttcaatagttgtctgcgcggtagaagagagtgttctctttgctctctcacacgctgtcctcaaccttctcaacgctctagcattcccactgatgtccttcttgttcttccttctgaattcagaaacaaagtgattcaccattctgttatcaaaatcttcacctccaagatgagtatcaccagcagtggctttcacttcgaaaatcccctcctcgatggtcaatattgaaacatcaaaagtgccaccaccaaggtcgaaaataagcacgttctgttcacctttt

SEQ ID NO: 270 - DNA, 287 bp, Glycine max
cgcgacttggttctaggcggcgtcaccgatgaccctctcggtgtcggtgaaggcgacataggagggggtggttcggttgccttggtcgttggggatgatctcaacgcggtcgttttgccacacgcccacgcagctgtaggtcgtgccgaggtctatgcctatggctttgccttcttttgtcgccattgatcaatcacggagcttctagtttcaaagacaagagataagaaaatcttcagaattggagagttttgttgtgtttgtagagtagtttcgtactcgagccg

SEQ ID NO: 271 - DNA, 1628 bp, Glycine max
gatccgaattcggctcgaggcagaccctgtatggagtggcgaatggcgctgtggtctcaaattttatgcatagtcactctgctgttatgcagcgattgtgcagcatcttttgccaaggagcagcaaaaggaccgggttggtaggctcccaggtcaaggcttcaacatcagcttcgcacactatgctgggtacatcaccgtcaatgagaaagctgggagaacactcttctactggttcattgaggcacttgaagatcctcattctaagccccttgttttgtggctcaatggagggcctggatgttcgtccattgctttcggacagtcagaagaagttgggccttttcatataaattcagatagcaagaccctccatttcaatccctattcttggaaccgagttgccaacattctttttcttgacactcctgttggggttggattttcatattcgaataacaaatccgacatgctgatcaatggcgatgagaggacagctgaggacaatttagtatttctattgaattggtttgagcgtttccctcaatataaaagaagcaactttttcatcagtggtgagagctatgcagggcattatgttcctcaacttagccaagttattgtaaagtacaactcggttacaaaagaaaatgctataaatctgaaaggtttcatggtaggaaatgctctaacagatgatttccatgatcaattgggaatgtttgagtttatgtggtcaagtggtttgatttcggatcaaacatacaagcttttgaacctactatgtgattttcagtcagttgagcacccgtcacattcatgcgaaaaaatctgggaaattgctaatgaagaacttggaaatatagacccatacagtctctttactcctccgtgccaacatgctaatgttagccagttaagtcggctggtgagaagaaagcatagaattggtagactcagtgcagagtatgatccatgcactgaaaagcactccattgtatacttcaatcgacctgatgtccaaacagttcttcatgttgatccagatcataagcctgctacatgggagacctgcagtgatgaggtatttacaaactggaaggattctccaagaacagtgctcaatatttatcatgaacttattcagatgggattgaggatatgggtgttcagtggtaatacagacgtggtaatacccgtgacatctactcgctatagcataaaagctctcgaccttcctactgtgagtccttggcgagcatggtatgatgatggggaggtgggaggatggactcaagaatatgctggccttacgtttgtggttgtaaggggtgcggggcacgaagttcctttgcattcaccaaaacttgctttgacactgttcaaagccttcctagcaggaacatcaatgcccaatcttgagctagtcggtgcctcctgaatttacgttaatattctccctttaaataagttctaattgactgtatttgactgtttcacatggggaatccgatgttgatttcttttacgcgttactcaatttgtgttttttttttatgtaccaaacaaaatattagatgtaccgatttatgttaaaaaaaaaaaaaaaaaaaaaaagggcggccgccg

SEQ ID NO: 272 - DNA, 1750 bp, Glycine max
gaattcggctcgagcatctccaagtgcgtgcgccggccgccccctatcccgccggccctgtgtgtgttccggctcaccaagcgccgactacccctacgacaccgtgcccaacaaggtggagcacctcttcttcgcgcagatctaccacgaccgcaagcagcgggaggcgcgcatgtcgctgccccgcgccgagcgcgcgcgggcgccgtacgtcgacttcctcaagcccatcatcgccgacggcgacacgggcttcggcggcgccacggccaccgtcaagctctgcaagctcttcgtggagcgcggggcggccggggtccacctcgaggaccagtcctccgtcaccaagaagtgcggccacatggcgggcaaggtgctcgtcgccgtctccgagcacgtgaaccgcctcgtcgccgcgcggctccagttcgacgtcatgggcgtcgagaccgtcctcgtcgcgcgcaccgacgccgtcgccgccacgctcatccagaccaacgtcgacgcgcgcgaccaccagttcatagtcggcgccaccaacccgggcctcaggggccagagcctcgcggccgtgctgtcggccggcatgtcggcgggcaagagcggcagggagctccaggccatcgaggacgagtggctggccgcggcgcggctcaagaccttctccgagtgcgtcagggacgccatcgcgggcctcggcgtcgcgggccaggagaagcagcgcaggctccaggagtgggaccgcgccaccggcggctacgacaggtgcgtgtccaacgaccaggcgcgcgacatcgccgccagcctcggcgtcacgtccgtgttctgggactgggacctgccgcggaccagggaagggttctaccgcttcagggggtccgtggcggcggccgtggtccggggccgcgccttcgcgccgcacgccgacgtgctgtggatggagacgtccagccccaacgtggccgagtgcaccgccttcgccgagggcgtcaaggcggcgtgccccgaggcgatgctcgcctacaacctctcgccgtccttcaactgggacgcgtctgggatgacggacgccgagatggccgccttcatcccgagcgtcgcgcgcctcggctacgtctggcagttcatcacgctcgccgggttccacgccgacgcgctcgtcaccgacacgttcgcgcgggacttcgcacgccgcggcatgctggcctacgtggagaggatccagagggaggagaggatcaacggcgtggagacgctggagcatcagaagtggtcgggcgccaatttctacgacagggtgctcaaggctgtgcagggtggcatctcctcgactgcagccatgggcaaaggagttactgaagagcagttcaaggatccacggcccgcaactgggagcagtggcctgcaagttatggccaaatccaggatttgatgaagactcagaagaagaagaatgatttggagaaggctctaaataaattcgaaaaaaaaataagctgggttcagttcatcagcaatggggaagctgctttccaagttctaaactgaacataatcagcataaatgaatcaacgaatcgtctagctagctacgtacggatggagttctgagttgtgactccaaatgaaaacccaggttgggttgaaagtattggtgtcaatctgtgagattatttatcacttcagattgaatatatgatttggttttggtaaaaaaaaaaaaaaaaaaaaaaaaagggcggccgccg

SEQ ID NO: 273 - DNA, 1041 bp, Glycine max
gaattcggctcgagtccaaatcttgtcactctgattggttatcatgcttgtgaaacagagatgtttctcatatacaattttttatcaggtggtaatctcgaaaagtttatccaggagaggtccacaagggatgtggagtggaaaattcttcacaagatcgcattagacatagcccgtgcactcgcctatctgcatgatacgtgtgttccccgcgttcttcaccgcgatgtcaagcccagcaacatcttgttggatgatgatttcaatgcttatctatctgactttgggttggctagacttctggggacttcagagacacatgctaccactggtgtagccggaacattcggctatgttgcacctgaatatgccatgacgtgccgtgtttctgataaggctgatgtgtacagctacggtgtggtgcttctggagttgctctcagacaagaaggcattggatccttcgttttcttcttatagaaatggtttcaacatagtggcatgggcatgcatgctactgaagcaaggaagggcaaaggagttcttcactgctgggttgtgggaagcaggacctggagatgatttggtagaagtgcttcacttagcagttgtgtgtactgttgacattctctctaccagacctacaatgaaacaggttgtaagaaggcttaagcaacttcaacccctaacatgctagccccttgtgtgtgtggctgtgttcctttaacattattaatcttagaaatattccctttggaatttgtaatctgtaatttagcattttttgtggatttaggttgagttcccaatttgtacttattccccccgtgtacatttttatatagttgtgtccccaattttccatgctcttgactaggtatatttaggtttgggggcttggtgttgattctgcagaagaatgcagatatttgatttccccttcatacacgtgcattccatgtctatttgttcaataaaattgaagaatagaatatgtattttgaaaggaaaaaaaaaaaaaaaaaaaaaaaagggcggccgc

SEQ ID NO: 274 - DNA, 2353 bp, Glycine max
gaagccattcaataatataatgatgattcttcatgttaaatctttgcccttctgattaaccttgcaacttcgagaaatttcaaccacctctctctcccaaaatctcatagtgtgctgcttcagcgtctggtagcaaagatggcgacattgactgcttcaagtaacttagtctctagaaattctcatgtccaccatggaccaacaactgcttcatatgagtctaaagcagtagcaatgggacttagatctctaaagcagacaaatactcatagtggacttagaatttttaacccggtggatgagctacttaacagaaccccaattaaaaccaatgcaatgcaagctatgaggaagggacctcaaggcaagaatgcctggcctaaaggtataatcacatgtggcatgactttcataattataggaacggaggtggctccatggtgcaaaactggtgggttgggagatgttcttggaggtctaccaccggcattggcaggttttgggcatcgagtaatgactattgtgccgcgctatgaccagtacaaagatgcatgggatacaagtgttgtaattgaggtgaaagtaggagatagaacagaaaaggttcgcttcttccattgttataagaggggagttgatcgtgtctttgtggatcacccttggtttcttgaaaaggtatgggggaaaactggacaaaaactttatggaccaactactggaaatgattacgaagacaaccaactgcgttttagcctcttttgccaggctgctttggaagccccaagggttctgagtcttaattccagtaaatatttctctggaccatatggtgaagatgtcatttttgttgccaatgattggcacactgcccttatcccctgctacttgaaaagtatgtaccagtcaaggggcatctatacgaatgcccgggttgttttttgtatccacaacattgcttaccaaggaagatttgcattcgccgacttctcacttctaaatctcccagaccaatttaagagctcctttgactttattgatgggcatgttaaaccagtggttggaaggaaaatcaattggttgaaagctggacttatagaatcatggtttgtgataaccgttagtccaaactatgctaaagaactggtgtcaggtccagacaaaggagtggaattggacaacatcattcgcaaaattgatgatgatggtcgtttggttggaattgtgaatggcatggatgttcaggagtggaatccaaccactgacaaatatatagctgtcaaatatgatgtttcaacagtattggaagcaaaggctcttctgaaagaagccctccaagcagaagttggattgccagtcgacagaaatattcctctcattggtttcattggtaggcttgaagagcaaaaaggttctgatattcttgcagaagccattccccaatttatcaagcagaatgttcagttggtagccctaggaacaggaaaaaaacaaatggaaaagcagcttgaggaacttgaaatatcataccctgataaggccagaggagtggcaaaattcaatgttcccctagcccacatgataatagctggagctgattttatattggttcctagcagatttgagccttgtggtctcattcagttacaagctatgcgctatggatctgtaccaattgttgcctcaacaggtggattagttgacactgtcaaagaaggcttcactggatttcagatgggtgccttcaatgttgaatgtgatgctgtggatccggctgatgtggatgctatatcaaagactgtcaaaagggcccttgcagtctatggaactccagcttttacagaaattatcaagaactgcatggctcaagatctttcatggaaggggcctgctaaggagtgggaggaagtgctgctaagcttgggagttcctggcagtgaacctggaagtgatggagaagaaattgctccacaggcaaaggaaaatgtggcaacaccataataataagaacaaagatgtgagggaagcctctcctagtctgagtctcgtgaagttctcccagccccttgcttgttattaatattatgttttatatccttcttccaaatttttgttttcttctaaatagattatagaaatgtacatggacacggaaattacactattcgaatcagtgtaatgagtgcaggtctttcaagattagcataaattaaagcgtttcttaatagcctcgatatgacacaggctatgttgggcaaacaaggagttgtgctgtatatccaacttgtactgcattgtgcccattgtatctgcatgtttggctccaaaaggaaacgtttataaaccgtaattttac

SEQ ID NO: 275 - DNA, 523 bp, Glycine max
tcgcccaacatagcctgtgtcatatctaggctattaagaaacgctttaatttatgctaatcttgaagacatgcactcactacactgatttgaatagtgtaatttccgtgtccatgtacatttctataatatatttagaagaaaccaaaaattggaaaatgtggcacccccataataatgagaacaaagatgtgagggaagcctctcctagtctgagtctcgtgaagttcccccagccccttgcttcttattaatattatgtcccatatccttcttccaaatttttgttttcttctaaatagattatagaaatgtacatggacacggaaattacactattcgaatcagtgtaatgagtgcaggtctttcaagattagcataaattaaagcgtttcttaatagtctagatatgacacaggttcccaggctatatttggctccaaaaggtgggtttttttttttatataattttattttgatcctgttcatgtctcgaatctaagactattaacatgggttatatc

SEQ ID NO: 276 - DNA, 1407 bp, Glycine max
gaattcggctcgagcggctcgagtttatgtgtctgatttgaggttggagcgtagttagcttctcttttctgccgaaagctgcagaattgtgttgttttctctcctttgggggtcaaacaagcggttctcttcatgatgccaagtgttaaccctgacaaagattccgagccatttgttgagaccgatccaaccggtcgctatggtagatacagtgagttgctcggatgtggtgctgtgaagaaagtgtaccgtgcatttgatcaagaagaaggaatagaggtggcatggaaccaggttaagctgaggaacttctgtgatgaccctgccatgttggataggctttactctgaagtgaggttgctcagaagcttgaccaacaagaacatcattgcactttacaatgtgtggagggatgagcagagaaacactttgaatttcatcactgaggtttgcaccagtgggaatttgagggagtacaggaagaagcacagacatgtttccataaaggccctaaagaagtggtctaagcagattttgaaagggttgaattatttgcacttgcacgatccctgcatcatccacagagatctcaattgcagcaatgtgtttgtcaatgggaatactggccaggttaagattggtgacttgggtttggcagcaattgtgggcaagaaccattgtgcacacacgattcttggcacaccagaatttatggctccagagttatacgatgaagactacacagaattggtggacatatactcatttgggatgtgtgtgttagagatggtgacagtagagattccttatagtgaatgtgacaatgttgctaagatatacaagaaggtgtcttctggagtaagacctgctgccttgaacaaggtcaaagatcctgaggttaaggctttcattgagaagtgccttgctcagccaagggctaggccttctgcagctgagcttctaagagatcctttctttgatgagattgttgatgatgatgacgaaaatgatgactgttcttgttcatatcaatagaataatatttcttacagtgttggttttttaatttgattcacctaccttttcagtatgcaatgtcaatttgggcagcctagatagaagtgtgaaaattaaattgtttttattttccatttggcgagttgtgaaattggataaggtttggttgatgaatatgggggttaccaggggagggcttgattggggttggtgtcattttgtacataggaaattttactgactgttgtgcagcatacattgaatgatgatttgatttggcaatatatgttaaaaaaaagtatattagatgtaatcagcagtcaatgaatgcatgatggaatataaatactatatcttgaaaaataaaaaaaaaaaaaaaagggcggccgc

SEQ ID NO: 277 - DNA, 1092 bp, Glycine max
gcggccgccctttttttttttttttggatgaacaaatgatcctcaactcttttcaaaaagccaattgacccattttgaagtattggcaattgtcacacattgtcttcacccgactgataaaagataaaaacaatgcaattcctattaaaatatattaaccgtaccaatctcaaattctcaatcgcgcttatttatggcttctagagttcattctgacaaataatttattccaaaaactcactgagcagttgttatagaaaacccaaggcatgagggaaagaatcagttggcaccataaatccacttctctgcattgctagtgaaactaaccaactcctctggcttaaaccacaacttaatctcatccttggcagtttctggaccatcactcccatggatgatgtttcttccaacaacaacagcaagatcacccctaatggttccaggttctgatttctgtggatctgtggctccaattagctttcggccataggaaataactccctgtccttcccacaccattgcaataacagggccagagcttagaaaatcacacagcccatcgaagaagggtctttctttcaggtcgtgatagtgcctttgggcaaattcctttttaggaatcactactttaattcccacaagcttgtaccctttccgctcaaaacgagatataatctcagaaatcaggcctctctgcactccatcaggcttaatggcaatgaaagtgcgctccagctcagctgcgcgcacctcctgatcttggaacatgtaagctgcggcaggaagagcaagagctcctgaaatccatgatgatgatgatgatgaagaagcggatccatttccagaaccgttctttccgtaaaaaagaggcactttgctgctcaatgaaacagccgcagcagccccaagcgcacgtccttgagagtgaaaacgagaggatagaagggacctcgcggctctggaagcagatttgcaaacctgtgaggccatcttcttggctcagtggcagagagagcggagagtgaaggaacaactattatcggttcttttaactcactttactgctgtttccgagcttacgtgcgcgtg

SEQ ID NO: 278 - DNA, 406 bp, Glycine max
cagtgtatagtgttgcaattcttaagatcatctttaccccagcttgcccttcgtcaacaatatattaaatcaccctttcatcatcaggcttaatggcaatgaaagtgcgctccagctcatgctgcgcgcacctcctgatcttggaacatgtaagctgcggcaggaagagcaagtgctcctgaaatccatgatgatgatgatgatgaagcggaaccacttccagaaccgttctttccgtagaaaagaggcactttgcagctcaatgaaacagccgtagcagccccaaccgcacgtccatgggaggctctggaagcgggagagaagggacctcgcggctctggaagcagctttgcaaacctgtgaggccatcttcttttgttggcacagaaatctgcgacgcgtggtc

SEQ ID NO: 279 - DNA, 1187 bp, Glycine max
gaattcggctcgagcaacacttcatttcttactctcactgaaaaaaaatagcttgttcacaccatcctattttttcaactcatatatacaaatatatataacatggcttctaccttctctcgaagcctagcacttgtaagcttttacattgtcgtttgtgctgccggtaacttgaaccaagactttcagcttacgtggggagatggtcgtgctaaaatactcaacaacgaaaatcttctcactctctcccttgacaaggcctctggctctggcttccaatccaaaaacgaatacttatatggcaagattgacatgcagctcaagctcgttcctggaaactctgctggcactgtcactgcctattatctgtcttcaaaaggatcaacatgggatgagattgacttcgagttcttggggaatctgagtggcgatccatacattctacacaccaatgtgttcagccaaggcaagggcaacagagagcaacaattctatctctggtttgacccaactgcagatttccacacttattcaattctttggaatccccaacgcattgttttttctgtggatggcacccccatcagggaattcaagaatttggaatcaataggagttccttttccaaagagccaaccgatgaggatatactcaagcctatggaacgctgatgattgggccacaaggggtggactcatcaagactgactggtccaaagctcctttcactgcatcctacagaaacttcaacgccaatgcttgtgtttggaactctggaaaatcctcatgcaaatcaaattcttcaccttcctctgcatctcccactaatgcatggttatcacaagagcttgattccactgctcagcagaggttgcgttgggtgcagaagaactacttgatttacaattactgcaccgacaacaagagatttcctcaaggccttccactcgaatgcaaacactcctagagcctataggactcacatctcgcactacccataacaagtgttgcaatataatcttatgaaccattcttttaatttttgtaaaaaaaaaaaaaaaagggcggccgccttgagtgctatagtgctgttattatacaaatatacaatgtaaaaatatcccatgtaaaataatgcttctgttttttttttaaaaaaaaaataatgcttctcttgtttgtatgtat

SEQ ID NO: 280 - DNA, 1119 bp, Glycine max
cggttgcgtgggcggacgcgtgggttcactaatcactaccaattgctaaagatatttcactcactggtcacactactaatacagctttctggagatggcttcaactgtctcttacatgcttctacttccccttctagtgatggttgcctttgctggggacttaaacaaagactttgacatcacatggggagatggccgctccaagatactaaaccatggagagttactcactctttcattggacaaagcatctggctcaggttttcaatcaaagaatgagtatctctttgggaagattgacatgcagctcaagcttgtccctggaaactctgctggcaccgtcactgcctattatttatcttcaaaaggatcaacttgggatgaaatagactatgaatttcttggaaatctgagtggtgatccatacatccttcacacaaacgttttcagccaaggcaagggggacagggaacaacaattctatctatggtttgacccaactgctgatttccacacttactccatcacgtggaacccccagaggattatattctctgttgatggcactcccattagagagttcaagaatttagaatcaattggagttccttttccgaagaggcaaccgatgaggatatactcaagcctatggaacgctgatgattgggccacaaggggtggacgcatcaaaaccgattggtccaaagctcctttcactgcatcctacagaaacttcaacgctaacgcttgtgtttggaacagaggaaaatccacatgcaaatcaaattcaccatcctctaatgcatggctatcacaagagctggattccactgctcagcaaaggctgagctgggtgcagaagaattacatgatttacaattattgctccgacaaaaacagatttgctcaaggccttccactcgaatgcacacattcgtagaggacttcatcttccactagcacaagtgttacattataatttcatttaccattcttttattttatttttttttaattcctgttcacagtttgtgctcttttacgatgtaaaatatatcgcatgtaaaataacggttctgttatttggatgtcaaattttttcatgatttttgaacaagt

SEQ ID NO: 281 - DNA, 572 bp, Glycine max
ttgatggcactcccattagagagtttaagaactcggaggctattggggttcccttcccaaggaatcagccaatgaggatgtactctagtttgtggaatgctgatgactgggccacaagaggtggccttgtgaagacagattggacacaagctccgttcacagcttcctacagaaacttcaatgctgaggcttgcatatggtcttctggagcatcttcttgcgctaaaacttcttctacacccaccagtggcagtggttcatggttttcacaggaattggacgctacaggccatcagaggttgaagtgggtgcagaagaactacatgatttacaattattgcacagacactaagcgcttcccacagggtcttcctccagaatgcaacatctcttgagagaaaaacattgcaacgcattccttatattttctatgatcagaatgtcataccactaccagtattagttttattgttgtagctactgtagttaaattctttcatttgttcccctgtttggcatcactatgtaaacaaatatggccatttttataataaaataaattcttttgctat

SEQ ID NO: 282 - DNA, 841 bp, Glycine max
cttagcatcatttcatatatacaaataacatatatggcttcttccttctctccaagcctatcatcacttgtgcctctgcttgtgagccttttcattgtggtttgtgctgccggtaacttcaaccaagactttcagattacgtggggagatggtcgtgcaaaaatactcaacaacgccaatcttctcactctctcccttgacaaggcctctggctctggcttccaatccaagaacgaatacttatttggcaagattgacatgcagctcaagctcgttcctggaaactctgctggcactgtcaccgcttattatctatcttcaaagggatcaacatgggatgagattgacttcgagttcttggggaatctcagtggtgacccttacattctgcatactaatgtgttcagccagggcaagggcaacagagagctgcatttctatctctggtttgacccaactgcagatttccacacttattcaattctttggaatccccaacgcattgttttttctgtggatggcacccctataagagaattcaagaatttagaatcaattggagttccttttccgaagaggcaaccgatgaggatatactcaagcctatggaacgctgatgattgggccacaaggggtggacgcatcaaaaccgattggtccaaagctcctttcactgcatcctacagaaacttcaacgctaacgcttgtgtttggaacagaggaaaatccacatgcaaatcaaattcaccatcctctaatgcatggctatcacaagagctggattccactgctcagcaaaggctgagctgggtgcagaagaattacatgatttacaattatt

SEQ ID NO: 283 - DNA, 380 bp, Glycine max
ccctcgagccggctcgagcggctcgcgctaatcataatcacttccaactgctctcactagtcactactactactggagatggcttcaactgcctcttgcacttctatttccccttctagtgatggttgcctttgctggtgacttaaacaaagactttgacatcacttggggagatggccgcgccaagatactaaacaatggagagttactcactctttcattggacaaagcatctggttcaggttttcaatcaaagaatgagtatctctttgggaagattgacatgcagctcaagctcgtccctggaaactctgctggcaccgtcactgcctattatgtatcttcttcctttaactttattactattatattattgtaga

SEQ ID NO: 284 - DNA, 1349 bp, Glycine max
ctcgagccgctcgtagcatttcgaattcggctcgagcgctctgatcttctacagcattcttctgcaattcaaatcaaattttcaaaccatggcttcctccaccaacgctcttcctcccaccggcaacggcctcatcgtgagcttcggcgagatgctcatcgatttcgtccccaccgtctccggcgtgtcccttgcggaggctccgggcttcctcaaggcccccggcggcgcccccgccaacgtcgccatcgccgtcgcgaggctcggcggaaaggcggcgttcgtcggaaagctcggcgacgacgagttcgggcacatgctggctggaatcctgaaggagaacgacgtgcgatccgacgggatcaacttcgaccagggcgcgcgcaccgcgctggcgttcgtgaccctacgcgccgacggagagcgtgagttcatgttctacagaaaccccagcgccgacatgctcctcacgcccgaagatctcaatctcgaactcatcagatctgcaaaagtattccattatggatcgataagtttgatcgtggagccatgcagatcagcacacttgaaggcaatggaagttgccagggaagcagggtgcttgctctcttatgacccaaacctgcggctacccttgtggccctccgccgaggaagcacgtcagcaaatactcagcatatgggacaaggctgatgtaatcaaggtcagtgatgtggaactggaattcctaaccggaagtgacaaaattgatgatgcatctgctctctccctgtggcaccccaatttgaagttgctccttgtcactcttggcgaacatggctctagatactataccaagaatttccatggatcagtggaggcttttcatgtcagcacggtcgacacaactggcgctggtgattcctttgttggtgctctattaagcaagattgtcgatgatcaatccgtacttgaagatgaagcaaggttaagggaagtactcaagtttgcaaatgcgtgtggagcaattacaactactaaaaagggagcaattcctgctcttcccacagaggctgatgccctcaacctgatcaaagaggcatagaaatttaatgctagtagcttttggttttctttatatatatgtcttcatccttttcctttcgcgttggacttgcttgctatcaacttcagatggattttgtttcttggttttctttgttttatttacccctcattctgcattaacggtaatatcatatgatttggggttttgccaaatgatttctttcaaattctgagattgagattattggttgaatgaaaatttgagtccttatcaaaaaaaaaaaaaaaaagggcggccgccg

SEQ ID NO: 285 - DNA, 613 bp, Glycine max
cccacgcgtccgcccacgcgtccgcgaaaacagtgttccaaaatccaaacacactctctctccccatggcgttgaacaatggcgtccccgccaccggcaccggcctcatcgtcagcttcggtgagatgctcatcgacttcgtccccaccgtctctggcgtgtccctggccgaggcccctggcttcctcaaggcccccggcggcgcccccgctaacgtcgccatcgccgtgtcgcgcctcggcggcaaagccgccttcgtcggcaagctcggcgacgacgagttcggccacatgctcgccggaatcctcaaggaaaacggcgttcgcgccgacggcatcaactttgaccagggcgcacgcaccgccctggccttcgtgaccctacgcgccgacggggagcgtgagttcatgttctacagaaaccccagcgccgacatgctcctcaagcccgaagaactcaatctcgaactcatcagatctgcaaaagttttccattacggatcaatcagtttgatcgtggagccatgcagatcagcacacttgaaggcaatgaagtagccaaggaaatctggtgcttggctctctatgaccccaaccctcgtctacctttgtgg

SEQ ID NO: 286 - DNA, 563 bp, Glycine max
  unsure (1)..(563): unsure at all n locations
gaagcactatgacgtccatgcacgcgtcgtaagctcggattcggctcggctcccaacagtgtccaaatccaacgcacactttttcccccatggggttgaacaatggcgtccccgccactggcaccggcctcatcgttagcttcggcgagatgctcatcgacttcgtccccaccgtctccggcgtgtccctggccgaggcccctggcttcctcaaggcccncggcggcgccccagccaacgtcgccatcgccgtgtcgcgactcggcggcaaagccgccttcgtcggcaaactcggggacgacgagttcggccacatgctcgccggaatcctgaaggagaacggcgtgccgcgccgacggcattcaacttcgaccagggcgcgcgcaccgcgctggcgttcgtgaccctacgcgccgacggagagcgtgagttcatgttctacagaaaccccagcgccgatatgctcctcacgcccgaagatctcaatcagtaactcatcagatctgtacgcaaatctattttctcaattcctcgagccgattcggctcgaggcggccgctcgc

SEQ ID NO: 287 - DNA, 590 bp, Glycine max
gaattcggctcgaggaaatgcagcccagcgcaaactatttgatgaactgggaatagttgctgacgaattacctgttgaccagttcatcctccttgggaggatgctttacatggctccttcagatggaaaatggggcgaacacgagttggattacctcctgttcatggttcgtgacgtgaagctcaacccgaatcctgaacaggtggccgacgtcaagtacgtgaaccgcgatcagctgattggagctgctcaggaaagctgatgctggggaagatggcgttaagatgtccccttggttcaggctggtggtggacaacttcctcatgggctggtgggatcatgtcgagcaagggactctgcagggggcagcggacatgaaaaccatccataaattgtaagcctgtagtcttgtagatccgcgaagcacgtgctgtgctccgttgagaaataagcgtttctgcaggtgtttgcgctgcctttgttttagccatcattctgatggaaatagtcgataaagtcataatagagtgctcttaaatagggaacataactatttatattgaaaaaaaaaaaaaaaagggcggccgccg

SEQ ID NO: 288 - DNA, 519 bp, Glycine max
cccacgcgtccggcgagacgagccgtttctaattaatgataggtgtcaagtggaagtgcagtgatgtatgcagctgaggcatcctaacagaccagtagaacttccaaatatgttcgtttggatcccaacttagaagataatgatcttgatgacagatttcggggtctgcaacgtcctaatgtgagaaaagataagtggttagagattgagatgggagagttcttcaactcaggcttggaagaagatgaaatctatatgaatgtcagggaaactagtgatatgtggaagcacggcttcattcttgaaggaatagaagttaggcctaaacatgtttgatccgtcaaatgattgtacttaggcctaacctgaatggatcgatggatggtggtgtttgctacagtggagggagacccggaataatacagacttgttatctgcataaattgtttttctgatttagcttttttgagataaaaaatcaacttattgttaaaaaaagattacaaaaggactttatgg

SEQ ID NO: 289 - DNA, 425 bp, Glycine max
gccgtttctaattaatgataggtgtcaagtggaagtgcagtgatgtatgcagctgaggcatcctaacagaccaggcagaccttgaatgagaagataggccaactaaactctgccattgataatgtatcttcccgtttgagaggtggcaacaacgtacctgctgcaaagatagaaagtgatcctgaggtggaagcaaccatgtgagacgcattcagtttgatactgtggtcgatgatgttttaaattggtggaaatataatgaattgaaaatgaaatctcttcttttttttgacggtttgaaggataaaatcttgctgggactaatgtagtttttctaaagactggactaaatagttaaagctgtcaaatttttaccttcccccccatcccccctttaataatggatgatttttgtttctgtgcat

SEQ ID NO: 290 - DNA, 394 bp, Glycine max
catgaattgattttttcaaaatgttttgcttgtctttaatttgtgccacaaataatcaaataagctatttttgagttgtcttactgtacaagtaggttccaagaagttgcgaggctttacgctgtgtgctggttctaacatcactgggcagataaagacccgcgtcttgtccccaaatactcagtacgcagctcttcttgtgttccagatgatcgatgccagtggatttcaccaccatcctgcgatgttatcagtaagtaatgttggaggcagtagaacttccaaatatgtttgcttggatcccaacttagaagataatgatcttgatgacagatttcggggtctgcaacgtccaatgtgagacaagataagtggttagagattgagatgggag

SEQ ID NO: 291 - DNA, 573 bp, Glycine max
agataaatggggttcttgcgagtctccattacggttagggcaaggctcttaaagttataggtgggtgccactcactagggtttactctctcttcctttcgacatctttaatattgccttctacatactcgcacattttgaagacgtaaaacgatcgaaccctaaatatgcgccgactgcaaacattgaaacaagtttcatgggcctccgatttagatctttgtcaggataggctattcttatcagaggaatctccttcacaggttgggctaaattctcaagataacctccaagcaaaaacatcattgtcgctgcgtccaggttgagcacgttctgatgacattctgcctcctggatttgagggaactcatgctaaaagtcagtccgagattaagctatcccaaataccagttattaaatggattactcctccaaagggtacattggagagtttgagtacgttgatgatcacagagctggaaaaattgttgttgaattgaatggtagactgaacaaatgtggggttattagtccgcgttttgatgttggtgtcaaagagattgaatgttggact

SEQ ID NO: 292 - DNA, 521 bp, Glycine max
gaaggtcacggcgagacgagccgtttctaattaagaataggtgtcaagtggaagtgcagtgatgtatgcagctgaggcatcctaacagaccagtagaattcacacttggaaaaatatgactagctttgtttacaatttagctagaagcaactgctataagatatgaagagggaagaagaatcaatttcaaagaaatagaaaattctcatatttcaggtatcaagatattgagtttctccaccttctagaagtctttcttgttttgtcaagtgaatctggaatcttaggagaatcattctgattttccactaaatgtgttgtccttccaagtttgctgagtttcttccacccactgctccacgcagaagtatgcttctgctttatcatcttatcaaattgtttctgctaactagcctgatcattttgaatctccatgtacttggctttcacactctcaagctcaaactttagtgtgtagatgtcttttatagcatctgtccttccttcttgtaattattgtt

SEQ ID NO: 293 - DNA, 398 bp, Glycine max
gaatgaataaaaccaacttgtctactcgtaaatcgtaatctcctaagctataacaacgtcctctctctctctcactccctctctctctctctcatggcaacttgtttcgctccgttctccgtttcaggtggatctcatgagctgatggttaacaaagcgagttggactctaagctcactgttcaaaggagatcaaaccttgtgatcaagaggaaccacacttcttcaattagtgcagaataccgagataatagaggaggtggaggtggggattttgctgctggctttcttctgggtggtgcagtttttggaactctagcttatatctttgctccccagtttgtgatgcagatcagaagatctctgctaaacgaagatgagtatgggtttcgcaaggcc

SEQ ID NO: 294 - DNA, 603 bp, Glycine max
ctttcttaactttctctctcttctgtgttctgttctgaggactctctctcttccattcattcatcattcagcgtctctttaaataggctctctattcaaaaccatatcttccaatccaaccaaaaaaagattatcttttttaaggatatatccacaccgtgcttcttgcccttctctctctcttcctcacacccaagaagaaaaaaaaagaaaatttctcttttttttgtgatttttttatttgttttgcacacccttcctgaaatctagagacaagccgcaaaattaatccatacccagaatttctctctctgaaatatcttgtggggcttatctgctttttgttgtttttgtttgtacccttcgattcttcaccttcatagttgaagatatatacaaagtatatataatagtatataaagccgtgtttgttgggtgttttggaggatctgctttgttttgctgtgttcagtggattgtgttaaaggggttttgaagatttttgttgaagttgaaaaatctgagagttttttggttgaagttctgctcccatggctgctcaattgcaaaaatctgcagatgaaatgaggaagaagcttcatg

SEQ ID NO: 295 - DNA, 812 bp, Glycine max
cccacgcgttcggtggctcctggcggcacgtgtggcggtatcggctataaataaaggggtctctcttatgttctaagtttgaagcggcgccaccatagttggtgtagctagcgagggagggatatagggggaagcgtttattcattcattaagatggcatcggagcttcaattgcccccaggcttcagattccatccaacggaccaggagctggtgttgcactatctctgccgtaaatgcgcgtcgcagcctatcgccgttcccatcatcgccgaaatcgacctctacaaatacgacccctgggacctacccggtaacattatcttcaacttctgatatattcttattcttaattcttaattcattcattttttgaattgttattgtacaggattggcttcctacggagagaaagagtggtacttcttttcaccacgggaccggaaatacccgaacggttccaggccgaaccgggcggcgggaaccggttactggaaggcaaccggggcggataagcccattggccaccccaaaccggttgggataaaaaaaagctttggtgttttacgcagggaaagctccgaaaggggacaagagcaattggatcatgcacgagtatcgtctcgccgatgtagatcgctccgttcgcaaaaagaacagcctaagggtacatacatacatgaatgatgatgcatgccctttctagttcaagattattaggataggataattgcatgaaattacgactttgccctcaagttgaagctgaggatgataatcatttcccatgcatattgcaaaatctatggccg

SEQ ID NO: 296 - DNA, 538 bp, Glycine max
tcggctcgagctttcatgtgaatcactagaaccaacttacatacctcacattcattccactccacttaacaactaccttctcgcattgtctccgaagcacaccaaattaaaaccacacgcacccgcgacgacacaccgtatcaccaaacgacaacaacaaccacgcgcgtttcgcacctcacgaactcggagaagcaaacgcagcgtcgtcgattcgtcactcgcaactcgggcacgcgcggcgatggcgtcggtccacagcaccgtcgctccccgtaccttcctgccgtcaattcccaagccgagagctcctcttcacgccgcaaagttcgtgcgccggcggcgcgcacaactttcggagactgtcgcgcaacctcattctctccggaaacaaacgcgcggtggcggcgaactcggctgcggaggagttcgacgtgatatcggtgcagagcgacgacatcaccgaccagcaggagggcgtggtggtgagccgcgtcgagatggaaggcggagactgcgaattggcgacgcaggtgag

SEQ ID NO: 297 - DNA, 514 bp, Glycine max
gataaaaggagatccaaagtaaagaacacagatggcatgacaccacgaaaccaaattaaaaactgcgccttctctgtctctgtttgttcttctcactttatattctctctctgtgtatatctcttcactcttattattccttctcttctcaacgacgatggaggacccatcagcagcaacaacgttgttgctgaacagcgaatattcgaggctgttcgtcgaggacacggacttgtacaatcgcattgtgttgggaaccctcttgccgcacttcgtgtggggcccactcccgcacttcctccagacgtggcttcgcaattacctcggcggcgtcctcctctacctcctctccggcctcctgtggtgcttctacatttattattggaagcgcaacgtttatgttcccaaagatgctattccctctcgaagagccatgctcttgcaaatatctgttgctatgaaagccatgccttggtacactttgcttccaactgtttcggagtacctggtagaa

SEQ ID NO: 298 - DNA, 1694 bp, Glycine max
aaggatatatccacaccgtgcttctcgaccttctctctctttttcttaccaaaaaaaaaaaaacaatagttcctctttttttgtgattttttgtttttgcacacccctcctgatacactagagacaagccgcaaaattaatccatacccagaatttctctctctgaaatatcttgtggggtttatctgttttttgttcaccttcatagttgagaagatacataaagttgattttctttaatataatagtaatataaagctgtgtttgttgggtgttttggaggatctgctttgctttgctgtgttcagtggattgtgttaaaggggttttgagaattcttgttgaagttgaaaaagctgagagtttttggttgaagttctgctcccatggctgctcaattgcaaaaatctgcagatgaaatgaggaagaaggttcacggtgattcttcaacgggtgaacttaataattccaattcgtgtgcatctgggatgtggtttgtttgttcaggttccttccaagggtgcaagttccccttctgattcaagatcatgtgtatcatctataggggatgcttctggcagtgttaaggaagttgatgtggatcatgagtacttgtccacagatcagggtgttccttatcctgctggtggctattatggttactactatccaggttatggtggtttctatggagagtcagacaaccaagcgtactatgttggtgccgatgccgtggatcttcagtaccctgtcatgcaagcagataatggatcttatgtctatctcgtgccaggatttcagactggctacccttcatactatcatcctctaagtccagctggtattgaaggacagtatgttggccataacgtctacccccctggctccatctatcaacaaccgattggatcgcctggttattatccagcttctctatcatatggagagttacagccaacaacatactcgtgggattcacctctaatcaatcaagatgggttacaaggacatggttataatgaactggctggtaaaccaaatggtagatccaatttgtcttcccagagtcatactagtggtgtggtgtcaaagtctgcacccccacctaactcggcagaagggaagggtttgacatcattattagaggtctcatcaactcatgttaagcataaccagccaaaacaaacaaacaaggcaccagtttcggtcctccattcacctgttgcaaagtttcccgcatacaatcaaggaaagagcggattcctctatccaaacaacttgcttaatgtgaaagcaaacacaaagggctgggttagtactgaaaagttgaaacagagaaacaaggtcaacgattcactcaatgagcagaatcaaggtcctagaacagctaatgcaaaaggtgcattaatgtctggaggtaattctgtgagaggctcagccccaggtgggagtggaaatgttaccaacaaaatcaggacagatcagtacaaccttcctgattttccaaccaaatatgatcatgcacttttctttgtcatcaaatcttacagtgaagatgatatccacaagagcatcaagtacaacgtgtgggcgagtactcctaatgggaataagaggctggatggtgcatttcaggatgcacagaagagaatggaagagaaaggatgcaagtgccctgtgttccttttcttttc

SEQ ID NO: 299 - DNA, 938 bp, Glycine max
gcggccgcccttttttttttttttttagcaaacaaccttttgaagacacttatattacagacacaaaagaccatgttaacaacattataagattccaatgtaaccaccatcaatgacacataaattacagattataaataatgtaataagacgccgcattaggtaaaaagaactagttgttcctgataatcaactaatgacatgtctgaaggccacttcctttccaccttttttccccatccaacttttagaaacgaccgtggaaatattacatatgacagacttgtgtgactaaaatacgcaataatggcaagtgcctaaaaccatcatcagtgcattagaagctggaagtcatcatcattattcaccactttataatcatatccaagtttgttggcacgatcgtagaactcatccatctcacttttgggtacctgtattccaactagcacatttgctccagtttcaccctcccctcggtaatggaataaactgatattccaacgtggactgaaggggtccaaaaatttcatcaaagcaccaggtctttctggaaaggtgaaacgacagagaacctcattctgaatgtttgatcggcctcccatcaagtaacgcaagtggtctttcaccaagtcactttctgtgagattgtaagttttgagctgagaagattccatcctctcctgcattgctcttaattcggagactgtgtgaatcccaacactgtaaaggacaacagccttctcattggagttatatctgtatttgaattctgtgatgttcatctgccccaccaattcacaaaactgttttgaaactgcccggctcctctggcaaaacagttgccagcacagcctcttgtttacggccaacgttagcgagttcagttacaacccgaagtttatcaaaattcatgtttgctccactggttattacta

SEQ ID NO: 300 - DNA, 789 bp, Glycine max
cgacagaaggggacctcaaaaaacaaaaatcaataccttagagaaaacaaaagcacagaatcgaaagaagagttcttttttaagagagattgggatggcttcgacgaagaagatcacactgaagagttcggacggcgaggccttcgaggtggaggaggcggtggcggtggcggtggagtcccagacgatcaagctcatgatcgaggacaactgcgccgacagcggaattcctctccccaatgttaccagcaagattctggccaaggttatcgactattgcaagaagcacgttgaggccaatttcgctgattatgaagcccagtgaggatgaactcaaggcttgggacgctgatttcgtcaaggttgatcaggccacactctttgatctcattctggctgcaaattacttgaatatcaagagccttttggaccttacttgccagacagtagcagacatgatcaagggaaagactcctgaggaaattcgcaagacattcaacatcaagaatgacttcacccctgaggaagaggaggaagttcgtagggaaaaccaatgggcctttgaatgagtttataattctgctactttttaaatttcaatgaaaagatatgccctatagttgctagtttatttgtgttttatgtttcgcgtttctgacttgtcttttttttttttaacttgtgggggcaatcttgaaattgtaagtaatagttgaatatggtgggaggaatgctcttgagtctggtatctcagctttactgttaattcattgtccaactcttctgttg

SEQ ID NO: 301 - DNA, 437 bp, Glycine max
ctcgcgttgtctccaaagcacgccaaattacccacacgcaaacgacaacaaccgcgcgcgtttcacaccttcataactcggagtacgcatacgcagcgtcgttgactcgcaactcgtaacttggcctcgcgcgccgatggcgtcggtccccagcaccgtcgctccccgcaccttcctgccgtcgattcccaagccgagagctcctcttgccgccgcgaaatccgtcgccagcgccgcgcgcaacttcccgagactttcgcacaacctcattctctccggaaacaaacgcgcggtggcggtgaactcggcgtcggaggagttcgacgtgatatcggtgcagagcgaggacattaccgaccagcaggagggcgtcgtggtgagccgcgtcgagatggaaggtggagacggcgaattggcgacgcaggtgagccgattcg

SEQ ID NO: 302 - DNA, 760 bp, Glycine max
ctcgagccgttagtcttcttctgcacccgcgccgtttctgtgcatttactctgctacctagtgacaatggtgagggttagtgtgttgaatgatgctcttaagagcatgtacaatgctgagaaacgggggaagcgccaggtcatgattaggccatcctcaaaagtgattataaaattcctttttggtgatgcaaaagcatgggtacattggagagtttgagtacgttgatgatcacagagctggaaaaattgttgttgaaattgaatggtagactgaacaaatgtggggttattagtccgcgttttgatgttggtgtcaaagagattgaaggttggactgctaggctgctcccctcaagacagtttgggtatattggggtggactacctcagctggcatcatggatcatgaagaagctaggagaaagaatgttggtgggaaagtgctgggtttcttttactagtttaattagtttcctttgaaaattttgctctgatttcagttcttgaaactcaccggttgtaatgatcaatgtgttagacccgtagtttatcaagtatagcattagcaggagatgtttttctggtgtgctttgttttgtttgctaaaccaaattggtcgccataatttcaacggattttttcatcgtggcagtattagctatggttgaatcagtcttgctattatggttgaataagtctaagtgggagataactcattccataaactatcattccataaactaacttatgggttgagtt

SEQ ID NO: 303 - DNA, 1247 bp, Glycine max
tcctttttttttttttttttattagaaaattggattcaatatactagaaattccgtaatgggccttctctgtctttcaaatcccttcaatattagagaagtagaatttagatgaatgagcaactatgctctccttaattccgctttcttactaaaggttgaaacatactctcaaagtttataaaatttctacattcctcatttgcttgtaaccaaacactgttaaaaaaaaaagtctaattttcctatgatctgctaaaggaagggaatacaggcgattggcgagcaaacaaccttttgaagacacttatattgcagacacaaaagaccaggcaacaacatataagattccaatgcttcccaaaaaaaaaaagaaaaacataaactaccgattataaaaatgtgataagacacctcactaggtaaaaagcactagttgttcctctaatcaactaatgacatctaaccttttgaagcgacagtggaaatattaaatatgataatcttgtccactaaaatacacaataatgacaagtgcctaaaacccccatcagtgcattagaagctggaagtcatcatcattattcaccactttataatcatatccaagtttgttagcacgatcatggaactcatctatctcacttttgggtacctgtaatccaactagcacgtttgctccagtttcaccctgttggtcagtaagtataaggatgccatcagaaagaaaatgcagaaaggacaaaacttagatgcagctcattacttgcttttagtactgttctccaatcagaattggagtttcacgtcagataaaagtttgctttaaagattaaagcaagttaccaagataaaactctaattatgattggagaacaacaccaaaacaacataaggacctgcatttgagttttgtctgtgcataaaaccacatgcagtggtgtttgattaaagtaagagaaagtaaaaaattcccacctcccctcggtaatggaataaactaatattccaacgtggactgaaggagtccaaaaatttcatcaaagcaccaggtctttctggaaaggtgagacgacaaagaacctcattctgaacgtttgatcggcctcccatcaagtaacgcaagtggtctttcaccaagtcactttctgtgagattgtaagttttgagctgagaagattccatcctctcctgcattgctcttagttcggagattgtgtgaaccccaccactgaaaaagaatacaat

SEQ ID NO: 304 - DNA, 699 bp, Glycine max
gctaaacattaacaccttgggttggctgtagctcacagctcgctctcctcgccgtttctctcaacgctagtttcaagtctccttgtgacaatggttgagggttagtgtgttgaatgatagctctgaagatcatgtacaacgccgataaacggggcgaagcgccaagtcatgattaggccgtcctcgaaggtcataataaaatctctcttggagatcgcagaagcatgggtacattggtgagttcgagtatgttgatgaccactgggctggcaaaatcgcggttgaatagaatggcaggctgaataagtgtggggatataagccctcgctttgatgttggtgtcaaagagattgaaggttggactgcaagactactaccctcaagacagtttgggtatattgtcttgacaacctctgctggtatcatggatcatgaagaggataggagaaagaatgttggtggtaaagtgttggtttctctactactaggcttgcattttgtttgaggttcgctccgatgaagtttgagattctcattggttttgatggaccatgtgctagtttgttgctagcgccagaagttttatagagaggaagagttttaattattttttttcgcgcattttatttgtgaaaacgacttggtcattctaatctttttttcttcaacactgttttttctcatacaaattgggttggc

SEQ ID NO: 305 - DNA, 886 bp, Glycine max
attatttctgagcacaccctccttctcattttcattatctagctagcgttaccactttcaatttcaaattcactctcagaaattagaatggctagccaatcaaacactaaatcagttcacgatttcacagttaaagatgccaggggaaataatgttaatctcgccgattacaaaggaaaggtccttctcattgtcaatgttgcctcacaatgcggcttgactaattcaaactacacagagcttaaccaattgtttgagatatacaaatggaaaaggacttgaaattctggcattcccatgcaatcagtttggggctcaggagccaggaactaatgaagagattgtggagtttgcttgtactcgcttcaaagctgagtttcccattttcgacaaggtacgtaggttctgtccttaattaattcttctcacttatctcattcttagaatcatcgatctgtttcattgaattaggtggatgtgaatggtgacaatgctgctccactgtacaagtttctgaaatcaagcaaaggtggactctttggggatagtatcaaatggaacttctccaaattccttgttgataaggatggaaatgtcgttgaccgttatgcacccacaacttctcctcttagcattgagaaagacataaagaagctgctagatgcatgaatgactggagtggccactaaatgaaaaataatgattagaataacatcatgaataatgtactgcagatcagatattaattagtggaatttcctccgtatttgtactgaaacagttgctctgctcatgtacctctgaattactatttgcttggtcatctatataaaaatgtgtatcaatttatataaaatataatattattttttattttttattatat

SEQ ID NO: 306 - DNA, 1366 bp, Glycine max
cactcacacacaccaatggaatcataacaagaaaaagataaacactccccagagttcaaagagcaagcactatttcctctgttgtgtcttttttcaatttgttttccctctctgtagcagcagcagcagcagtgatggaacgtgctcgcaggctagcaaaccgcgccattctgaggcgtctggtttcagaggcaaagcagcatcagaagaatgaatccgtgctgcactcttccaccacccccatgctgctctactcttcctccaggtgcatgtcctctgttctgcgaagcaggtgtgatccaaaacagagacccttctgggaaggaacatcaacatgaacatgaacatgtcacgcggcgttgttgttgctgctgctgctggttttctcggcgttggctcggcccggtccatctcggtcgaagcgcctctcacgaacgaaaaccttcccccggcggcacacctctgccaccccggaggagcagagcaagatggcagagtcgtgtggcttcgagtagcctcgactccctcgtggacgccaccgtgcctaagtcgatacgccttaaggatatgaagttcgggaaattcgatgcagggcttacagagaaccagatgatagagcacatgaaggacttggcctcaaagaacaaggttttcaagtcctacattggaatggggtactacaacactcatgttccaccagtgatcctgaggaacattatggagaaccctgcttggtacactcagtacacaccttaccaggctgagatatctcaggggaggcttgagtcactgctgaattaccaaaccatgatcactgacctcaccggcttgcctatgtccaatgcttcattgcttgatgagggaactgctgctgctgaagcaatgtccatgtgcaacaacattcagaaagggaagaagaagaccttcatcattgcaagtaactgccaccctcaaaccattgatatttgcaagacaagggctgatggttttgatctgaaggttgttactgcagatcttaaggacattgattacaagtctggggatgtttgtggtgtgcttgtgccagtaccctggcactgagggagaggttttggactatggggagtttgtgaagaaggctcatgctcatgaggtgaaggttgttatggcaagtgatttgttggcactgactgtgttgaagcctcctggtgagttcggggcagatattgttgttggctcggctcagcaggttcggggtgccaatggggtatggagggcctcatgcagctttcttggccacttcacaagagtacaagaggatgatgcctgggagaatcattggggtcagtgtcgattcttccggaaagactgctttgaggatggcgat

SEQ ID NO: 307 - DNA, 1427 bp, Glycine max
gttaattgatggtaagaaggaaaggtgagtgagaaattgtgaagaagcggagtaactcctgaacatgacgttcatgccgtaactccaagcgcatgattgaagagcccaccctcacctcgctgacgtggcacgttttcactgggccatttcgtctcgtcgggattcatcccaacacaccaataaacaataccaatagcagtcactctcactcgttttctctttctctctctctgctctgtgttttttctctctgcagaatttcccaaatttctccactaccctatctcctttgctcctgaaactcccacattcttcaccagctctgcacgcttcttcaatacgaatgcaatttcgctatttgacatccgagtatcagtgccttaacgggtgaattggaattggaaaatgcttgaggcaatggaaagttcggtcaatggtgggttcacccatttgcagagctgtggagatcagcagcgaagaagagttatcggtgcttcctcgtcacaccaaagtggtcgtaacaggaaataaccgcaccaaatcggtgctcgtcggtcttcaaggtgttgttaagaaggccgttggactaggtggatggcattggctggttcttacaaatggtattgaagtgaagctacaaaggaatgctcttagcgtgattgaagcacccaccggtaacgaggaagatgatgaccttgaatttgaaaatatgccgtggaatggatcagatatggcatcggacgacacacagaagtcccacaaatcgaggcatagaatgcatagaacattgggatcatctcacaagaccatgagtaggtcattctctggcgattcacagtcaaagggctccgtttctatgcctcatgggtccacgaaggtagacttgagcaaacttgaaatggctgcattgtggagatattggcgacattttaatctggtggatgcggtcccaaacccatcaaaagagcaactagtagacgttgttcagaggcatttcatgtcgcagcaaatggacgagttgcaggtgattgtgggatttgtccaagctgcaaagaggcttaagactgtctgcaaatgagatggaatgatgcgagaaaatgatatttgaatgaaaagtataattgtctatgctaacaaagataatgtcatgtaatatccacttcccttcgtattatgtagcatgttttatcggtgatttttaactttctgttgtagtagtaggttagtagtttgaggttatagaggttcttactcttttgtagccacccggttgtgtagatatatatgtgacaattgcaactggatcatcagggaagtcaccaccatggctttcttttcaacttgattcaatgtattgctgacctgggatctgggaagtgggttttcagagacctcaatgtatatatattttagtttctcccaacagg

SEQ ID NO: 308 - DNA, 1499 bp, Glycine max
agaagggggaagcggcgccaccatagttggtgtagctagctacggagggatatacggggaagcgtttattcattcattaagatggcatcggagcttcaattgcccccaggcttcagattccatccaacggaccaggagctggtgttgcactatctctgccgtaaatgcgcgtcgcagcctatcgccgttcccatcatcgccgaaatcgacctctacaaatacgacccctgggacctacccggattggcttcctacggagagaaagagtggtacttcttttcaccacgggaccggaaatacccgaacggttccaggccgatacgggcggctggaaacgggttactggaaggcaaccggggcggataagcccattggccaccccaaaccggttgggataaaaaaagctttggtgttttacgcagggaaagctccgaaaggggacaagagcaattggatcatgcacgagtatcgtctcgccgatgtagatcgctccgttcgcaaaaagaacagcctaaggttagatgattgggtgctttgccgtatttacaacaagaagggcacgatcgagaagttccaaccaagcagcgatgttgttgttagccgaaaaatggaatcatcggagatcgaagacaggaagccggagattctgaaaagcggaggaggttgtcttctgccgccggttccgccgccgcaagcgaaggcgtcggtgaagaaggattacatgtacttcgacccgtcggattcaatcccgaagctgcacacggactcgagctgttcggagcacgtggtatcgccggaattcgcgagcgaggtgcagagcgagccaaagtggaaggagtgggagaaaagcctcgagtttccgtttaattacgtggatgccactctgaacaacagcaacagcttcacgacgcaattccagggcaataatcagatgatgtcgccgctgcaagacatgttcatgtactggcccaacaagcccttctgaacaaaccgatccaacgccgcccattcgcatttgcacggtagcacgagactcaaggtctatgagtgtgcctgtgcgaccacacacagacgattatttatcaagttagcttagctagggcaaagaaagataaaaacattgaagctggaaacgcatgtgtttgttgggtccaccgtctgcaccggttctttttggtgttttgctatgtgacgacgacgacgacgatgacgatccaacggtgcatgtttgttgacctgtccctagtagtagtagcatgtgtacagctatcgtatgtagaatgtagataggttcactactacacgttgttgtcatgtgatcatagaagctctcttaccgggaaaaataaaaattgatagaaggatggaaggtgtatttggaccttccctaattaatatttgttgaattattatcattagtatgtgttacatctaatttagtaggtgctcctttctcttgttttttaggtcctttttaatcgagtatcgtgatatcctac

SEQ ID NO: 309 - DNA, 881 bp, Glycine max
acgcctccaaacgctgcgaaaacgacagaaggggacctacagcaatccattctcaattgcgaaagcaaaacgcatagaatcgaaagaggggaaacgacaacgaacagttacggttagggattttgagagatggcatcgactaagaagatcatcctgaagagttcggacggtgatgccttcgaggtggatgaagctgtggcgctggagtcgcacacgatcaagcacatgatcgatgacgactgcaccgacagtcgaatccctctccccaatgtcaccagcaagattctggcgaaggttatcgagtactgcaagaagcacgttgaggcgaacagtgctgatgagaagcccagtgaggatgtgctcaaggcttgggacgtggatttcgtcaacgttgatcaggccactctcttccgatctcattctggctgcaaactacttgaacatcaagagccttttggaccttacttgccagacagtttcatacatgatcaagggaaagactcctgaagaaattcggaagacattcaacaatcaagaatgacttcacccctgaggaagaggaggaagttcgtagggaaaaccaatgggcgtttgaataagttttatgattctgctgcttttgaaatttcaatgaaaagatatgccctatagtttctagtttatgtttctgactattttgtttgttttatttatgtttcgcgtatcaaacttgtcttcttttttgaacttgggcaatcttgaaattgtaagtaatagttgaatatggtgggaggaatgcttttgaatctggtatctcagctttattgttaattcattgtcaaacacttctgatcctcctagatatccatcctttaaagtggagaaaaagatcttttgaacat

SEQ ID NO: 310 - DNA, 975 bp, Glycine max
ccgaatcaaaataaggcccgcgagctcactatactacgcgcgccctttattttttttttttttttttttattttaaaaataacacacacttgggacattattacgacgggtaaaagatgtgtctaaatttttaatgactcaaaacatactcatcaagagggtcatgcctaatttcctttaatgattgtcaacaacacggaccaagccgaaaggaaaaccccgaatcccagatcatgcagaggattccgcattttcagaagatctgccagtagcctgtggaacagaaaaagctggcataagagtattaccagcaatttccaaaatcttgagaaattcccaagagaatggtcaaaaactagtagactggtttgggattggcaaataaggaaacttaaatgccatgaaggtttgatttggcccactcgagcaactccacatttcaaaaccattattaggaccacatacctctattggttaagatcaattcccaggtttgtggttccgattttttccacttacatgcttcatcatgctctgtactgttgctgtttgttaaaaatacttgtaccaatgaggcccaatcactccgtttgattgctgcattcccagacatcacaatcttaaccattaaacagcctttcttcacaagcagcaactctcaacaagttactaattggagaattttgtataaagtgtgatccaatctccagttttgtccactaaaattcctccaccgagaaggtcaaataagaaaattgacaaaaaagctctgcttgctagaatcaaaattcaatggtgttctcactgttcgccatttgattccaaacagtttgctggtgaaatagactgaggaatggtgcccaaaagacgagaacctgaaataccaggattgagcccatatgcacacatattgtttatggttgtcaacttaacaccaatgacaaaatcacctggtattgtagacatgaactatca

SEQ ID NO: 311 - DNA, 1625 bp, Glycine max
aacggacggaatctgaagcctgggggcaattcaagctctgatgccatcttactcagatatatatccctccctagctacagattccatccaacggacgaggagctggtgttgcactatctctgccgcaaatgcgcgtcgcagccaatcgccgttcccatcattagccgaatatcgacctctacaaatacgacccctggggacttcacccggattggctacttatggagagaaagaagtggtacttcttttcaccacgggaccggaaatacccaaacggttcgaggccgaaccgggcggctggcaccggttactggaaggcaaccggggcggataagcccattggtcagcccaaaccggttggcattaaaaaagctttggtgttttacgcagggaaagctcctaaaggggacaaaagcaattggatcatgcacgagtatcgtctcgcagacgtagatcgctccgttcgcaaaaagaacggccctaaggttggatgattgggtgctttgccgtatttacaacaagaagggcacgatcgagaaactgcaaccaagcagcgatgttgctcatagccgaaatatcgaatcctcggagatcgaagacaggaagcccgagattctgaaaagcggaggaggttgtcttccgccgcctgtgccggtgcctgcgccgccgcaagcgacggcgaagacggattacatgtacttcgacccgtcggattcaatcccgaagctgcacacggactcgagctgttcggagcaagtggtatcgccggaattcgcgagcgaggtgcaaagcagagcccaagtggaacgagtgggagaaaagcctcgaatttccatttaattacgtggatgccactctcaacaacagcttcatggcccaattccagggcaataatcagatgctgtcgccgctgcaagacatgttcatgtactttcccaacatgtcctttttaacacatcatgatggttttaaattacgatccgcaattgctcttaagattttctgactcaccatgcgaccacaatcgtaatttaaaaccatgtcacataaaatccacgcgcgccgcccattcgcatttgcacggtagcacgagactcaaggtccatgagtgtgcctgtgcgaccacacacatacgattattgatcaagttagcttagctaggccaaagtaagaaagaaagaaacattgaagctggaaacgcatgtgttggctccaccgtttgctttggtattttgctatgtgatgatgacgacgacgatccaacggtgcatgtgtgttgacctgttcctagtagtagtagtagcatgtgtacagctattgtagaatgtagataggtacactactacacgttgttgtcatgtgatcatagaaaggtctctcaccgtacaaaaaataaaaaaaaaagtgatagaaggtctatttgatagaccttctaattaatatatgttgaattattattagcatgtgttacatctaatttattaggcgtgcctttgtcttttctcatttttttaggtctttttaaattgagtatcgtgatatcctactgtgtttactttttcatttcaatatcttttgttttttatgtactactataatataattaatataaaacaattttagtt

SEQ ID NO: 312 - DNA, 799 bp, Glycine max
aggggcgtgttttcatcattgtcgttctgaacggaaaagcacacggcgcagctaccctgaggcttctcttctcttctcttgtctgtcgcgaattaacaatgttaagggtaaccgtgctgaacgatgctctgaagagcatgtacaatgctgagaaaaggacgaaagcgccagctcatcgattagcgccatcctccaaagtcattatcaaattccttttcggtgatgcaaaaagcacggatacatccggagagtttgagttatgttgatgaccatatgggctggtaaaatcctgggctgaattgaccggtagactgaacaaagtgtggggttattagtccccgttttgatgtgggcgtcaaagagattgaaggttggactgctaggcttctcccctcaagacagtttgggtatattgtattgactagctctgctcggcatcatggatcacgaagaagctaggagaaaaaatgttggtggtaaggtattgggcttcttctactagagtttaatttcgattaagaggatgtcaggaatttcaattttgagattcatcggttgtaatggaggataatgctagccccctagtagtatcaatcatagcaggacctgttttgtgatgttccttattttgtttgcaaaaccaagttggtaactataacttttattttcttttatcattatttttctttataccaaaatgtactggccaagttgttttaaacagtgagaactttgattagaaagtgggagcatggcgatgtttgagttggtgtgggcgagtcatgatatttcattgaaa

SEQ ID NO: 313 - DNA, 1045 bp, Glycine max
gctgggccttttgggctcttgggtatcaagccttgtgttggctgtaatagaataagcttcaattggaaacgccagagctccatcaccggaacaagacccaggcaggtgtcgcagtacgcggagaaaggacgctatcataaatatatttgtccccgctgctctctatttcagccactcgtatattcttcctccgctcaacaactataagattatcttcttcttcttcttctcttcaattcttctccaatcccaaccgcaccctcttccgtccctttcttcacacttccttcaaaccacttccttcgtctttctctttccgaacagatcacactatggccacctcaaacgccaaatcagtccatgatttcaccgttaaagatgccaaggggaaatgatattaaccttggtgactacaaaggaaaggtccttatcattgtcaatggttgcatcacaatgtggcttgactagttcttataacactcagctcagtcagttgtatgagaaatacaaacagaatggtctggagattctggcatttccatgcaatcagtttggggcacaggagcctggatctgatcgagcagatacaagagtatgtatgtactcgcttcaaggcttgattttcccgtttttgacaaggttgatgtgaatggtgacaaggctgctccactgtacaaatatctaaaatcaagcaaaggtggactccttggggatggcatcaaatggaacttcgccaagttccttgttgcataaagagggaaatgtggttgatcgctatgcacccacaacttctcctctgagcattgagaaggacttgctgaagttgttggatgcatgaatgaagctatgaatgactggagctgccaataaatgaattgtgattagaatataaattatgaataagaaatgtattgcagatggtactgcaatttcctgtgtgccttgtatgtgtaccgaaacagttactcttgtagctctgacattaggttcataaccatgagattgtgtacttattattgtgtgaatgtaaacttaagcttccttt

SEQ ID NO: 314 - DNA, 877 bp, Glycine max
  unsure (1)..(877): unsure at all n locations
agaaggggatccccaatcagagagaaaagttagggttcacaacttttccttttccttttgcttgcgaatctgaatcaaataatcaatcatccattcattattcactcatgtcgaccggcgaagaaaatcacgctgaagagttcggatcggcgaggctttcgaggtggaggaggcggtggcgctggagtcgcagacgataaagcacatgatcgnatggacgactgcgccgacagcgagcatccctctgccgaacgtgacgagcaagatcctggcgaaggttatcgagtactgcaagaagcaccgtcgaggacggcgaatccccgaagacagaccctcccgaggacgatctcaaggcctgggacgctgaattcgtcaaggtcgaccaggccacgctcttcgatctttatcctggctgctaactacttgaacatcaagagcctgctggaccttacatgtcaaactgtagccgacatgatcaaggggaagactccagaggaaattcgcaagccctgttaacattaagaatggcttcacccctgaggaggaagagcaagttcgtcgggaaaaccaatgggcatttgaatgattttgttaatctcaaaaaatctgaatcaaagatctgccatgtggatttatgctatgcttgtttgtttatcaaagatctctcttgtagatttgcctatgctatatacttgtttgttttatattcaagactatttccgttgcctgtgttccctacgactagtcataagaattatcttccttcatgaacttaagagcactttgaattgtaagtaatagttatgatgagggatgcgttgattctgacacgagggttattgagttcaataacagccaacccttggctccatatttt

SEQ ID NO: 315 - DNA, 4683 bp, Glycine max
  unsure (1)..(4683): unsure at all n locations
gtcaaccaatcgtcactattgatgattttgctgctgtcgcatcagagccatctgctgaggctcaattgattccattaatttcaagtgctccatacccattgaacatggcaagtttagaggaaaagggaatgcactttgattcccagatcatgatgtgctcttcaaattttttggaaccttctcctgaagccaagattagagatgacatggcttttaaaaaatagaagacatgttttagataacagttgaacctaaaacctggagtggaatatgatgagagcgattttaccaaaaatcagcggtatttactcaaaacttggtttcatgatcattatgttgtagaccaaacttttgaatcttatgctgatcttttggcatattgcttcactaaatgggagagacatgtgaaggaacaagagtctaatttgtctcaaattaaaggcaagaaaagtgagagtggccatttcaataattttcaacaacttatggatttggcagtttcatggaatctcagtgcaaatatcatgaaggaacgaatcaaagctgataaaagtgatatggtttatgtcttctctgctggaaggaaggacaaaattgtacattgcttcttgaataaagaaggcgaatgcagtatacgtcctgattcaatagaagatccagaagcacaacttttgctcaaagcttcagaaactatgctcatgaaagcttatgcttttttgaagtataacaatgcgaccaatttgattgtccaggactcatttggcagaattggtcaatgaagacttttatgcatggacaatttaattttattggcacaatttgaactccagcttttcatcgacaaattgctgcacacttggagaccatgcccttatggcaaaaagcaattttgtgtggaatgggacattgtttgtctcggaaaagcaaagaaacatgcgtattctgggatgaaggaaacatctgtaacttctgtttcatacatgctcttcatcatttgtacagaagttacaggattggccagtaccactgatcaatcattttctggaaccattctacgcaacaattttgcggaacaaccttctggaaactacttttcctttcttagagatgctggtaatgggggagtttttgtatggtaatgttgctgtcagcatatcacaacttgcaggtgttgctcgacgcccaaagtagaaagcccaacagatatgaagtgtcccaatacagatattgtaatggtgccaataacagcgcagagcatggtgttgaaggccagatgtactttcgatcagtctgtagtagccattatgtctaaatgcaaagccagcatgagaatggggaaacactgatgctcaaattttgatggttccagggcgcagattcatagctcatggacattttttcaaaaatctggactcagaaagtgcgagtccaaattgttacatctgaaaagagttactgggcatatgtatgatcctgacaagtttcaggatgtttgacaacagtgaaataggtctttatcctaatcccactttggaagatatcccacattcatcttgggaccttttttgctgggacagtggagaaaactttgccaaatcaatttgtctgcagaattgctctctgttgaaattggatactgttactggcgcaatattatcctgagtgggctccaattaattgtcgagttcatcgacaaccaattcacatcactagtagggaattatgtcagcaagcacgatgtcagtcattgaatatgatgacttgtacaattccaaatggattgtggttcattggttgttagcaaaggttggaaatccacaaacaaattgttggtttcgcatgtttgctggaagcaacggaatactgggatatgcttcattgataccatacgttgagccagtacgtgcaagctccaaagtgctgaagtttactttgacttcttccctgtggaggttgatagtcaagagggagttgcgtcacattaggtgaattgaaatctgtctcctacttttctcactgcctacaaaaaacacgattttgatggaaactcccaaggagatggcaactgcgatctaccttgtgcacaaatattcctgagtgtctgtgactaacactgatgagagattacgtaggcacagaacatccagggatatgatccttttcttggtgggaatcaaaaattatgccattccattgatgcccctagatgaagaaattctttctaagagttgcacaagatatggtttgaggaatggtttgattgtgttgatgaggaggattcctttgaggaagtttctttaagtgcagcacttaatggtgttgagggtttggactatatggaaagaattcctcttgccacatctgaggggtttcctccatgtgcttccacgcaaaactggtgacaaaggcaaaaggagattttgtctctggggatggtgaagagatgacattggattccgggcaaccagtgttgaagaggcttacaacaagctaatagttgaacttgagaaaagtgttcctacattggttggcattgaatagtcccaaggatgagaaacttcctcgtcgcaaaatttctgacgaaccacaagattaaactccatagggagaatagtgaagcagcgcgtcttaggtttgtggtccgtcaaaagtttttagtattttgtgaggttcattattctctaaaagggcactagcttagttgtcaagtttggaatcaacccatgactccatggtaatgtgactggtttggcccaattagatantactgagtatagggcaacgatattctgtgttgcgattattgctagttttggatggttttgattaccaagcaagttatgagcaagatggcagaaatgataaacagtctttgtggtggtggatgaaaaatttgatgcgtgaaaggacgcacctgctgttggcttgatgagtcaaggatgggcaatttgtaagaaagaatgtttggagacgttgaattgtggaatccccttcttggattttccgctcacagttattttgcaaatagcattttttaaatgagaatgctcattaagatattagctatgaaaaattactgcgccaggcttaaagcttcaagtatgtttttacaatcctttcaaaaatttagtttcttttgtgtgtgtatgggggatgataaccttaattagtggttcatgaatatgtcaagccttactttagtggttctaaattgaaaagctttctagctggtcataatatcaccattactgatggtattgacaagaccaattccatctttgcaatttagaaagttagcagattgtgattttctcaagagaaactttaagcagatgtctaatgttttatgggtggctcctgaggacaaggcgagtttatggtcacaacttcattatgtttcgtgcaataatctggaaatgcaagaagcttatcttgtcaatctcgtaaatgtgttacgagaattgtatttgcacagtccagaggaagctcgccaattgagaaggaaagctctctctcgtattgaatggcctgcaaaaagctgatgtgcctaccatagcacagattgaagagttccattcgatgcagaggatgatgaatgctcctgattcaaatgataatattgatttactgttgagcattgatttgttgggtttacaaggagcaggtaaagcttttccaaacaaaattgtttttgatgataagcttgtgttggctaaccacacaagaattctttgatggaaattttccagtgagattcttggttacccaatttttcgtgaattgtctttgatcgtgtaagtcaattaccttcagaagctgtatcgttgtaaatgttacatgtggtaagtggacggtgggtggtttcacccaccacctgcttgggattagttctgcgagttaacaatcgctcctcagatatcaacaaaaaagattcggctcagccacttgggaaaaggtaagaaaattgttttttcttactaagagttgaatccttttccagtagctttacttggctgtggtgttttggcgttaagaaatgaaaattctgaggttctaacgccaactaaccctatgctgactccgacttcttaagaactgtaaagagtctcaaactatttggttgatgaggtgtcctttttgcatttgtgaacctagtatgtaatatttaaacacactcattgcacatagtaatgcgctttatttaagtgaacaaaatattacaaactagttaacaaatgcgaaaggacactcatcaaccaaatatttaagactcttgcagttctcaagaagccttgtcaacattggatttgtggcattagaactcagaatttcgttcttaacaccaaaaagaacagctaacaaggccacaggaaaaggatcaactctagtcaaaaagacaattttcttacctttcccaagcgctgtccgaatctttcttattgatatctgaggagcgattgttaactgcagaactaatccaagcagtagtaggcaaaccaccacgcccactcccacaaacaacattaacaatgacagcttctgcgggcaattgactcacagggtaaagacaattaacaaatattggtaaccaagaatctgttggaaaatttccatcaaaaaattcttgtgtatttgccaataccaatttatcattaaacacaacttatttgggaaggccttgcc

SEQ ID NO: 316 - DNA, 1417 bp, Glycine max
gcggccgccctttttttttttttctcattaaatttcaaataatttttaccaaaagaatctcagtatatccaatatgttaaatacttctgtagagagctaacaactcctcggtagtgttgtaatccagtcaaaaagtatttcactatgcacatatgatagtaaattccaaatctcaataaataggtggatcaggattgaataacacagattctctccagatgagttccttgatatcttcttcagtgaaagatggttgctcaaaatcaaaactgaaaggtctaacgcaagcaggttcctcattaatatcatgaagaggagccaagtatgggtgacacagagcttcttcaactgtgatgcgcctatttggatcaaagacaagcatcttctctaacaaatcaacagcaccaggagacatacttggaaatctagcagcaaattgttgccttggatattgtggaagctgtctcacatatctacgagcattatcacttcgtagaaatccaaggctagtgtcatcaggtgagcctatgagctccgtaatcagcctgagctgatgaacataatctttccccagaaataggggttgtcttgttatgatttcaccaaggatgcaaccaacagaccaaatatcaatggcggcagtatattctgagcaattaagaagtaactctggagctcggtaccaccgagtaaccacatactcagtcatgaaatcagtctcagatgtagttctagcgagaccaaagtctgcaatcttaagatcacagttggcattcagtagcaagttgctaggctttagatcacggtgcagaacatttgctgagtgtacatatttgagtcctcgtaacaactgatacagaaaataccgacaatgatcatcagtcaattgttgattggattgaattatttgatgcagatcagtatccattaactcataaacaatgtacacatcattgaagttatacctttgtggtggtcgaataatgtctttaagggctatcacattttcatgttccatgtgccgaagaagtttaatttctcgtagggtccttttggcatctattctgttgtcaaatgcattgccaaccttcttaatggcaacttcttcatgcgtctctgcatttacagcagcacaaacaattccatatgctcctcttcccacagggcgaataggagggacatacttcctagagacctcaaagaggtttccatagatattatactgaacatagcctccaccatgagtgtgaactcctctgatgtcagctgaagcaggagctgactcaagagccatgtatgtctgtgtggcgctgaatgatccaaaaccagaagatgaactcgagccgaattcacagggaaagcaaggatttttatgagaaaggagctaaattcggacgcgtgggcggacgcgtgggcg

SEQ ID NO: 317 - DNA, 754 bp, Glycine max
  unsure (1)..(754): unsure at all n locations
cactcttaagctcccaaccccattcaatcgccccntactacgccttagatgtcggcccaaaacatctgctgcatgtacatatttgagccctggtaacacctcatacagaaaataccgaccatgatcatcagtcaattgctgattggaacgaattatttgatgcagatctgtgtccattaactcagaaacaaggtacacatcattgaagttttccttctgtggaggacgtataatatctttaatggacataatatttgcatgatccatgtgccgaagaagtttaatttctcgtaaggtccttttggcatctattctgttatcaaatgcattgccaatcttcttaatggcaacttcctcacctgtctctgcatttacagcagcgcaaacaataccataagcgcctctacccacagggcgaataggagggacatactttctggaaacttcgaagagattgccatagatattgtactgaacatagcgtccaccatgagttggtactcctctgatgttgttgtgttcagctgactcaacagcagacatgtcttgtgtgtgtgtctatgacctcttcttttcttctcaactcaattcaacaccaacaccaacaccaaaaacaacttggaaggaagaagaaagatgagagacccaaaataaatagggtgattcagagtggaaaagaagcaaactttccgacacttgagtttggaggacaaagtgagagagagagcgacggacgcgtgcctccggcgggttt

SEQ ID NO: 318 - DNA, 767 bp, Glycine max
ggaatactctaacaaaccattacatttaatttaatttaaatgtcatacaatgggaatatgagatactgtctgtccccacaaattaaaagttttcttgtgaatttttcttgatgtaaaggataggaaaaactggcaagaacagttcaatgcactaaactatggaccttgattctaaaaagaaggatagaagtacaccaaggagttggagctttaggatattctgctgaaacatattttgatcctttctttcctcagtacatctcaacaatatgattatccaagtatctgagatgagactaaaacgaaagaaaccttcaacaaactcagtgaatctcagtatctccaatacgttttcatatcttctgtgcgctgcaacttgccaagtagtgatcataaaatgtatattagtcatcagataatccactaagcatatacaacataaatacaaaatctcagtagactggtggaacaggattgaacttcacagattctctccagatgagttccttgatgtcttcttcagtgaatgatggttgctcaaagtcaaaactgaaaggtctggtgcaaacaggttcctcattgatgtcatggagaggtgccatgtatgggtggctcaacgcctcatcaactgtaattcgcctgtttggatcaaagatgagcatcttctctaacaaatcaaccgcaccaggagacatgtcgggaaatctagcagaaaagttttgctttggatattggggaagctgttttacatatctacgagcattatc

SEQ ID NO: 319 - DNA, 1068 bp, Glycine max
gaattcggctcgagagagaaaagcgcgctatatacaagaacttgagcgcaaggttcagactcttcagacggaagccacaactctttctgcccaattgacattataccagagggacacatctggccttagtactgaaaatacagagcttaagctccgtctgcaagccatggagcaacaagcacagcttcgcgatgctcttaatgaagcattgaagaaggaagttgagagacttaaggttgctaccggtgaggggatgagccacactgaatcctttaatctgggaatgcaccagatgccattttccggatcaaatttcattccaatcccgccacaatcaggtccttctggtcaccagaacatgcagatgccaccatttggtcactccccatccacaatgccaactcatcaactgcatcaaacaagttctcatccatattcagaaatattgcaaaatgaacagcttggtcgtttccaagggcttgacattagtagcaaaggatcaactctcgtgaagtctgaaggcccctcgctctctgcaagtgagagtagcagtacattttgaatttgacagaaaatgcttgacctgctgacttatccatgctattcattgctcatagggttgacatttagtcaactagtgaaggtacctcatttcatgattcagatttgaggattaattcttaactatttattctaagggttgctcgccaaaaaggggaagcacccttggggttttgttgcaaagttcacagtaatcatgtttcagcatggcatttggtgtttctgggcgctggaatattgggaatgaaaggtcattcccattgtatctttgtatttgtatcatcgtttacgtgatagcatgtaaactgtgtgatttattgttgtgttttacttcattcatagtccaagatggactcttttttttttttctttgtataattagttttagatttattcatagtcgttgtacaatccaagagttttgggtacttgttgtattaaacttcttctgagataagaccttttttttgaaaaaaaaaaaaaaaaaaaaaaaaaaagggcggccgc

SEQ ID NO: 320 - DNA, 1164 bp, Glycine max
gaattcggctcgagggggaagaaacatttaatttgggttgataatagtttatgttaagatatcactactgctatatatatgttgccatagccaagttagccttataaagggaaactcacttgccttatttttggttttgagattgagctaaaggccaactcaaccatcgaatttgttggtgattgaaagagaaggaagaagaagcaggaaatggaagcagtgagagctggtcgagaaggagcaataggtctaggtcaaggtgatggcgtagccaaggacagcactgagactgaactcaccaaaatccgtctcctcagggcaattgttgaaacccgtgatccctcttccaaggaagaggatgattttatgattagaagattcctgcgtgctcgtgatttagatgtagagaaggcttcggcaatgctcctcaagtacttgaaatggagaaattcatttgttccaaatggctctgtatctgtgtcagatgttcctaacgaacttgcacaagataaggtgttcatgcaaggacacgacaagataggtcgacctatacttatggtcttcggtggaagacattttcagaacaaggatggtcttgatgaattcaagcgatttgttgtttatgttcttgataaagtatgtgcaagtatgccacctgggcaagaaaagtttgtcggtatagcagaacttaagggatggggatactcaaacagtgacgtgcgtggatatcttagtgctctatccattttgcaggattactacccagagagattggggaagttgtttattgtgaacgcaccatacatctttatgaaagtgtggcaaattgtttacccattcattgacaacaaaaccaagaaaaagatagtatttgtggagaaaaataaggtgaaatcaacactgctagaagagatggaggaaagtcaggtcccagagatattcggtggctcactgccattagtcccaattcaagatagctaattaattaagtaaccgctgacagaataaggagaggcgggcctaaaaataaatattgttatttcttatttatgtgtttctatgccgttttctttttacccaattactttacactgttgtatcagctatcaatattcagtagtaaatgagtacgattttttttaaaaaagggcggccgcaaaaagg

SEQ ID NO: 321 - DNA, 1376 bp, Glycine max
tgcacgttgtaggctctttgtacgttttacacgtcagctcttcaaaacgacgcctccatcagatctctgcagcccgaattcggctcgagttgttgcgttgcactcgcggaagcggagaaaaccaaagaatcaagcttagtcaaagtgtctgtgactgtcacacacagtctttaagatctggaagcgcttctcacttgcccacaataagaattcctctcaaatttcaatttttcatttgaaaataataaaaccctaaaagaggggttgcaagcaaaatgagaagctcgaagatgtggatggttttcatgtgtctgacggtgagcttcttcgctcgcattgaatcgctatccgtgacggtgaacgacgtcgagtgcgtctacgagtacgtactttacgagggcgacaccgtttcggggaactttgttgtcgtcgaccatgacattttctggagctctgatcaccccggcattgatttcacggtgacaactgctgcagggaatactgtccacagtatcaagggaacctctggtgacaagttcagttttaaagccccatcacatggaatgtataaattttgttttcataacccttactcaacacctgagactgtttctttctacattcatgttggtcacatcccctctgagcatgatcttgccaaagatgagcatttggacccaattaatgttaagatcgctgagctcagagaggcactagaatctgttacagctgaacagaagtacttgaaagcccgtgatgcaaggcatcgtcatactaatgagagcacacggaagcgtgttgtattctacactgtgggagagtaccttctcttggctgctgttagtgcactgcaagtcatatacattaggcgccttttcagcaagtcagtggcctacaatcgtgtttgagtcgccttcatgattaacgttaatggcttccttcattagcaacagggttaggtttacatatgcgttctctattcattcaacagtacgattacgatcccttggtgaacacttttttttttcttttcaacagagactccacttgtatgttgatacccaacaagatatttaaattccttagcttgaatttcaatggattcacagaaatcaaaccgtgtgggaatcaataccaagtttgtaaaatggtagtctgagttcctaaaatggttgaaaaactgaaagtaaaattagacttttttggtaactctaagcccatactgcttattttttacctgttcttttaggacttggctctttatgttgttcacttctactggcaaaaggtgaaacatctccacaaattaaaaatttgatgttatatatgattgtaatttgtaataaaaaaaaaaaaaaaaaaaaaagggcggccgc

SEQ ID NO: 322 - DNA, 1349 bp, Glycine max
gtgagaattcggctcgagagaagaaaaacaaaaccctcactgagcgctgctgctttgagagagagatggctccgaaccttgaatgtcgtatgtacgaagcgaagtacccggaggtggacatggcggtgatgatacaggtgaagaacatagcggacatgggggcgtacgtgtcgctgctggagtacaacaacatcgagggcatgatcttgttctcggagctctctcgccgtcgtattcggagtgtgagcagcctcatcaaggttggccgcatcgagccggtgatggtgctccgtgtcgacaaggaaaagggttacatcgatctcagcaagcgcagggtctccgaagaggacatccaggcctgcgaggagaggtacaacaagagcaagctcgtccactccatcatgcgccacgtcgctgaaaccctcaacatcgatttggaggagctttatattcacattggatggcctttgtatcgcaaatatggtcatgcttttgaggctttcaaaataattgtgactgatcctgatactgttttaagtactctcactcgtgaagttaaggaagttggccctgacgggcaagaggtgactaaggtggtgccagctgtatcagaagaagtgaaggattctcttgtgaagaatattagaagacgaatgaccccccaacccttgaaaattagggcagatattgaaatgaaatgttttcaatttgatggagttcttcacattaaggaggcaatgcgtaaggctgaagctgtgggaaatgatgactgccctgtcaaaattaaacttgttgctcccccactttatgttcttaccacccagacactggacaaggagcaaggaatattggttctcaacaatgccatagcttcttgcactgaagcaatagaacaacacaagggtaaacttgtggttaaggaggcagctagagcagtgagtgaacgtgatgataaattgcttgccgagcacatggctaagctacgccaagataatgaagaggtcagtggtgatgaagacagtgaggaggaagaagatacaggaatgggcgaggttgatgtggataatggtgccgggataacagagtgacaaaaaacttgtgggtatagtagtaaggcatagatagcagagtccggctttactaattctgtcttttgttttttttttttcttaattcttttcaaactgtctttaaatgcggttgtacaatacaagcttgaattactttatgttgagatgtcttgtaacttacgaagcgattttgaagtttcttgatgagggtgttcaacccgaactaaggagatttacagttacttcaaaaaaaaaaaaaaaaaaaaaaagggcggccgc

SEQ ID NO: 323 - DNA, 436 bp, Glycine max
gggtaaacttgtggttaaggaggcagctagagcagtgagtgaacgtgatgataaattgcttgctgagcacatggctaagctacgccaagataatgaagaggtcagtggtgatgaagccagtgaggaggaagaagatacaggaatgggcgaggttgatgtggataatggtgccgggataacggactgacaaaaaacttgtaggtatagtaaggcatagatagcagagtacggctttactaattttgtcttttttattattattctttacaaaactgtctttaaatgcggttgtataatacaagcttgaattactttatgttgagatgtcttgtattttattttttgatgtcaagtgatgtcttgtaacttgcgaagcgattttggagtttcttgacgagggtgttcaacccaaactaatgagatttacagttacttc

SEQ ID NO: 324 - DNA, 1870 bp, Glycine max
ttcagtttcacatatgcacatgcattctctctctctctctccacaatctcacctcgcctgtcagaataactcgtgactcactcagtcgccacaacacaaacatggtaataaaataataaaatactatacatatatatatatacccaccatcgaaaaatcagaacagaacccaaccaaagcagctatggcggcgatgcagaggccactcaagagaaccattgcaatcgccaagctacgcgcgtgcttttcctctctccgacccgccgccgccgccgacatcgtcgcgtcctccgccgccgcagctcccgccgttcgatcaccagccgcacccttacaacggtcccttcgccgatgaagtcctcgccaagcgcaaaacgttcctcggtccttccgtcttccactactataagaaacctctgaatatcgtggaagggaagatgcaatatctttatgatgatagtgggaggcgttaccttgatgcatttgcgggaatagttactgtttcttgcggacattgccaccctgaaattttgaatgctatcacggagcagagtaaacttctgcagcatgctacaaccatatatctacaccatacaataggtgactttgctgaggcattggcagcaaaaatgcctggaaaccttaaggttgtttattttgtaaattctggttcagaagcaaatgaattagcaatgatgatggcccgtttatatactggtaatctcggtatgatttctttgagaaatgcatatcatggggggagttctagtacacttggtctgactgctctgaactcgtggaaatacccaattccagagggccatgttcatcatgttatgaatccagatccatatcatggagcctttgggacatcggctcgaggttatgcaaatgatgtccaagaccatattgactatggaacttctggaaaagttgctggatttatagctgaaacaatgcagggagttggaggagctgttgaactggcaccagggtatttgaaacttgtttatgacattatacataaggctggtggtgtctgcattgccgatgaagttcaaactgggtttggtcgaacaggaagccattattggggatttgagacacagggtgtcattcctgatatagttaccatggcaaagggtattggcaatggtctgccattaggagctgtagttacaactccagaaattgcaagtgtgttggcccaaaagattcaatttaatacctttggtgggaaccccgtttgctctgctggtggacttgcagtgcttagggttcttgataaggagaagcgtcaagctcactgtgccgatgttggatctcatttgcttgaacgattgagatttctcatggaaagacatgacatcataggaaatgtaaggggaaggggcctaatggtaggcatagagttggtcactgaccgagacaacaagacacccgcaaaggctgaaactgctgtcgtgtttgaaaaactcagagagcttggtgtgctagttgggaaaggaggacttcatggcaatgttttcaggatcaagccaccaatgtgtttctccaaagatgatgcagattttcttgtggatgccttggattattctctatcaaagttgtgagctgattgtgcatagcatgaaatgaaatcttcgatattggaaccaaattactacaagccaacaacaaaagttcgtttagttcatagaaatcaccatgaataatgtaatgttctccacgttgccaagagaggggtttccctcccttagctgagcattataagttgaatgcaaactattttgtatataaatttggattcataacatcaaaataaagagtaatgtttaattccaaaaaaaaaaaaaaaaagggcggccgc

SEQ ID NO: 325 - DNA, 897 bp, Glycine max
gcggccgcccttttttttttttttttttttttttttttttttttttatacccaaataataactctggtggaagtgggttgcagcctgaccactcataaactccaagtaccgtgacccagaactttccccaggatggaatagcttccaaaccaccgtggtcgaggatccattttctgcctctagccattgccctgtcttcaccatcttcaggcccttctccaagaattctcaaggcaatgtagctcaacgctgacccaaacattgtgctgtgactctctatatgcaatccccaacctccatcttcgttctgatgattatacaaataacgaataatttccttctggtgttctggtcctaaaacatcatttagggaccctgtaatatagagtgccattaccaaaggttgaaggaaaaacaaagggccagcagattctgctggccagtggccatcatgggcttgaatagaggaatagaaattgatagcctttctcattgtagtgatcaatgcttcctccgttacgttttccgtgtctttcacgttcactcttgctagaatgggcccacacgtgttctcctttgtgagctgcattctcatgagtaggtcaccgctttgcttaatgcaaaaccggttctttttgtattcctctcgtaccctttcaacttgagcacgttcttgtggagttccagcattaggatcaaactcccagtgttgacgtccaatgaaattgttcacagagattaacccatctcctccttctgctatcttcaacttccacatactactgacccaaaattaagaagaatatgtatgtttcaaacttccgacagctacagacagaaaaaaactcgtccaacgtgttgatttaagtctttgataacaaagctcgagccgaattc

SEQ ID NO: 326 - DNA, 1158 bp, Glycine max
gcggccgccctttttttttttttttttaaaaaaaataaatataaaatcaaatatttattaagaataaaatcatatttaagtctattaatcatgtatcccaaacatttatgccttttcatgttattcaacggtaatcgggaggatcacctactttattacaatttataaccaacaagtgcagggtaaaatgtcttcactcaaaagcagcagaggcaggggctggaggatcaacaagaaatatatcaagaagttcatcaatggatgtgtagttataatcaggatatagctgtgaagcttcaaggtcatcttctcctatctcgaacctcacgaggtcccctctaacaaatacactatgaaggatagaaacgggaatattgtgtggagggggtaaggtctgtgataggttgacaatctcttcctcagcaacaaaatccttgcgaaaattttgaccacttttttgctcccacaatgctatcaactcattttgtgatatgatattcttcgagggtcggtagataacaacacgattgtatgttcttggatcattcgctactttaatagtgtacatggcgatatcttcttcatagtttagcacagcttttgtatcaccgttgccatagacagtaatttcgtaaggacgaagcaaataattgacaaagtaagcaccaaaacagtttgcagagacaaaggtataagggatcccagctgcttcaatttcccttctaatttttcttttcttatcgaggaaagcttggaacggaggaagagggtttactctatcttcttccaccccaaaatctgatggaaggaatctctttatattaccagcaactttgatagcatctataattttgagttgctccatcacttgagggtatggaagagaacatatcacaatgtctacttgtttaatcactgccagaatctggtcatgctcaagttctccatggacaagtgtgacccccatagagttgaactccttgcaaagctgtgccttagaggaaggagtttgtgcatcaagagggcgagtgtagacaaaagttggatggcctaacgtgacgcttgccttcaccatatacttccctatgtaaccagttcctccaaatataagaatcctactcttcctaatcgcctccattgctagctcgagccgaattc

SEQ ID NO: 327 - DNA, 1100 bp, Glycine max
gaattcggctcgaggtcactttacattggttgctagcaagtggtatggggaggcaaccctgctgtgacaaacttggggtgaagaaaggtccatggactgctgaggaagacaaaaaactcataaacttcattctctccaatggccagtgctgttggcgagctgttcccaagcttgctgggcttcggcgttgtggtaagagttgtcgtcttcgttggactaattatctaaggcctgacttgaagagagggctcctcacacaggctgaagagcagcttgttatcgatctccatgcccgtcttggcaacaggtggtccaagattgctgccaggttaccaggtaggacagacaacgaaattaaaaatcactggaacacccacatcaagaaaaagctccttaagatgggtattgatcctgttactcacgaacctcttaacaaacaagtctcatccaaagatagttcatcccctgcagagcatttctcacaagtgaataacattaacattcatcaggttgagcaaaatgatggggttctcaactcagaagagaattcaacctcatcaccggctgaaaattcttctggggaagaatcccttttggtggatagcatttgcagtgatgtttctctaattaacagcatgtggctggatgaaactcctctgatggacacattatgggacaatacacctaaagttgagaatgcaaataataacatgggcttaccaataggggaggataattgtgcttggttgttggactgccaggactttggtattcatgattttggcttcaattgtttcagcgaggttgaaacaaatgtactgcaagctataggcatggacagaaaagggctttaggatgcagtacatatggtaattaaagttagttgtccttaagaaacagagcatgcaatcaaaaaatatgtgtatatgtgaatgtgacaaaatgggaataaatcctctcgtgtccatgtcacgttcaaattttgtgtttataactttcttgatgaatattagataaagttctccttatttattatttgtcaagaaagtgatacacacgagatttgaacgtgaaaaaaaaaaaaaaaaaagggcggccgc

SEQ ID NO: 328 - DNA, 351 bp, Glycine max
tgattgctgtctcaggtggtccaagattgctgccaggttacccggaagaacagacaatgagattaaaaatcattggaacaaccataatccagaaaaaactctttaagataggtattgatcccgttactcatgagcctctcaaaaaacaagctgcagcatcttctcaggatagttcatcctcccctgcagagcatttgccgcaacctggcaataaccttgatgatcaggtcaaagaaactgaagggattcttctcaactcagaggagaattcaagttcatcacaagctgaaaattcttctggggatgattcacttttgctagatagcatttgcagcgacgattctctattaa

SEQ ID NO: 329 - DNA, 319 bp, Glycine max
ggggtcattactcattacaagctagtgttggtaagacttttgcatttagtttggggaattgcaatattggtcagctagctaggaagtggtgttgtttttgtgttagtgctatgggaaggcaaccctgctgtgacaaacttggggtgaagaagggtccatggactgctgaggaagacaagaagctcatcaacttcattctcaccaatggccaatgctgttggcgcgccgtgccaaagctcgctggcctcaagcgctgtggcaagagttgtcgccttcgttggacgaattatcttcgtccagacttgaagagagggctact

SEQ ID NO: 330 - DNA, 932 bp, Glycine max
gcggccgcccttttttttttttttttttttttttttttttttggtcagaaagtatacatctaaggaattataaggagatactgtcacccagctagttcaatgaataatagaaaatacagccttgataatctcctatttaggccaaataacctagttgcttggccaatacatctacatcttcaacacctagtacaccttgatcttctataccctcattgagcaaatcttgccaaaacacttcatcaatatatctctctctactattttctagttgaacatgttcttcctccattattctcttctggctttcaatattctcctcatcgagattcaaagcaaggtccaagtcaggtacctcaaactctaataccttgtcatcactgtaatattcctgcggttcaagtttaacgaaatctgaacactcttcagcacaacctaataactcatcatcgtcatcggcaacttcaacaacattaggcccttgatcaataggcctcctcttcttgttggaaaaaacttccctcaagctccctttctccactccttttgctgagccaattgttgcacgaaattggattctgcattgccctggccaagaaattcatcatttgtttctgtttctgttcagtcattttgatccttccttccatttcttggaggtgagatttggtactttgttgctgttgtctgagcttcaccaactccaccataagaacttgcctgtctcgccttaaccgatcaatttctccatctaattcaaactgccccacctcaacaaaaggctcttctacaccttgctgcatcgcgtgctgatgggattgatgatgatttgctttcctccttctaatgttcttcagaagaatcctttgccctctaagaaacatctcattagcaaactcccacttatctggatcaaccctcgagccgaattc

SEQ ID NO: 331 - DNA, 1299 bp, Glycine max
gcggccgccctttttttttttttttgtaacaatattaaaacagattatattattatttttcaggtagaacattacataaatgataaatgtggatactttcttgagaacaggacaaacacaagcaaccactacgaaacagacaatggtagtgcagcaaaaaagcctgcataggccttttctgaaagaaaaacagaaggaagaactgcatttgttttattaagcattttgcagagtgataaaatcatataagtgctttggttcctaagatttcggaaatcagacaaactgatccaaatattcagaaacagtgctgtattccacgtgaggataagcctcagaagcctcaaggtctttggcagggtcaatctcatacactgcatctccctttatctgctgtgagtggtatagtgccagaagataattatttgggaaagaagtctccttaatttgcttaagaacttcttcttctgaaacataaattttctcaagagttttcccaatttttttctcccacaaagagatgatatcatttaaggacaaataattgtttgggagtcttatgtgcacggctttgttcaaggctctagggtcatttgctgcttcgatggtaaaagttcccacatcagcctcagtaatatacgctcctttcacatttccatctccttgtatgaacaccttgtccctaggaggaacagtgatgtcaatctgtgccaggttacgtaagaaataaccagtaaaggcatgacaacataggtaagtgtaaggaattccttcagcttcaattactcttcgaattttcgctttttcctcgaaaacttctcttacaggctcagccgcatcgtgacggtccacatccagcccaaattcagatgggaaaaatctcttgacgtttccagcttcttttattgctgcaacgatcttgacttggtcttctattagtagtctaccaaatgagcagattactacatcaacttgcttgattgcattaaccagactttcatgatcgttcatatctccctggattagagtaactccagaattttggaagctctgaatgagctcttccctggtttcaggattagcagcagtgacaagccttggcttgttaacagaggcaggggtgtccctaaccaatataaaagtgggattccctgcctttacacttgcccaaactatgtgtcttccaatggctcctgtgggtcccaaaaccaggattctatctttcggagccatggaagatactagtctaaacaagcactgtgttttcaagctatgtacgtaacttatatggaactaaat

SEQ ID NO: 332 - DNA, 1219 bp, Glycine max
aaaatttaaacagtgcttccgacccaagattagagtattattaaggtaaaaaaaaaaaaaagattacattaatgtggatggtttccgaaacataggacaaaagcttcctttttcgcaaaaaagaaaaggcataggttttattgagcactttgcagagcaacaaaaattgcatcaattactcaaaaatcagacaaactgattcaaatattcatcgacggtggtgtattccacgttaggataagcttcagaagcctcaagatctttggcagtgtcaatctcatacactgcatctccctttatctgctgtgagtggtacaatgccagcaggtaattgtttggaaaagaagcctccttaatgtctttaagaaccttttcctctgaaacataagttttttcaagagtcttcccaattttgttctcccacaaagagatgatctcatttatggtcaaataattcttagggagtcttatgtgcacggttttgttcaaggcattagggtcattcgctgcttcgatggtcaaagttcccacatcagcctcagtcacaaacgctcctttcacatttccatctcctagaatgaataccttgtccctcggaggaacagtgatgtcaatctgtgccaggttacgtaagaagtaaccagtaaaggcatgacaacataggtaagtgtatggaattccttcggcttcaattattcttcgaattcttgctttttcctcgaaaacttctctaactgggtcaactgaatcgtgacgatccacatccaatccaaattcagatggaaaaaatctcttgacgtttccagcttcttttattgctgcaatgatcttcaactggtcttcaattagtagtctaccaaatgcacagattacgacatcaacttgcttgattgcattaaccagactctcatgatcattcatatctccctgaattagatttactcctgaatttttgaagctctcaatgagctcttccttggtttcaggattagcagctttgaccagattgaccctgttgttagagccaggggtgttcctcaccaacacaaatgttgggttccctgccttcacacttgcccagactatgtgccttccaatggctccagtgggtcccaaaatcaggattctatctttcccagccatggaattggaagaaattaaaactagtccaaacaattgcagtgtgtttttctggttttgataggtaatcaaactagca

SEQ ID NO: 333 - DNA, 511 bp, Glycine max
tttttttttttttttgtctagatgatgtgcaaacagtagcacagattatattattatttttcaggtataacattacattaatggggataggttcttcagaacaggacaaacaccagcaaccaccacgaaacaaacaatgccacaatggtagtgttgcaaaaaggccttttctgaaagaaaaggaaaaactgcattaattttattaagcattttgcagagtgataacatcataaaagtgctttggttcctaagatttcggaaatcagacaaactgatccaaatattcagaaacagtggtgtatttcacgtcaggataagcctcagaagcctcaaggtctttggcagggtcaatctcatacactgcatctccctttatctgctgtgagtggtacaaagccagcaggtaattatttgggaaagaagtctccttaatttgcttaagaacttgttcctctggaacataaattttctcaagagtcttccctattttttttctcccacaaagagatga

SEQ ID NO: 334 - DNA, 765 bp, Glycine max
gaattcggctcgagaaaacccactttgtttctttaggaaggttgtaagattagaatgtaaaaatataagataaggatgtggaaatataagtgctttatcattattagattacttatagagtggaaatatgagtgatttatgattattagataaggaactaatcaagtgcatgatgagagtggagtaattatggatggatcttgactctttgtaacagcaactacaattacgggcaagctggcaaagcacttggtctggatttgataaacaatccggatcttgtagccacagacgcaaccgtgtcattcaagacagccctatggttttggatgactgcacagggaaacaagccatcaagccatgatgtgatcactggaagatggactccatctagtgctgacagctcagcgggtcgggctcctggctacggtgtcatcaccaacataatcaacggtggcctcgaatgcggccacggccaggataatcgggtccaagatcggatcggcttctaccgaaggtactgccagatgatgggaataagccccggagacaacttggattgtaacaatcaaaggccatttgcttaagcaaattgctcacatatatcatccatatagagaataaatagtatgtaataaaggatctaccatgatcttacatgtactgggaaacttgtttctaaagaagttccccttatcttgattaaataagaaactttaatattttaccaccttttaaaaaaaaaaaaaaaaaaagggcggccgc

SEQ ID NO: 335 - DNA, 1043 bp, Glycine max
gatacaattcacaccgtacaccgtttctttcacttcacaaaaatgaaaaacatgaaattgtgttcggtgatgctatgcttatcactagcgttccttcttggggccacagcagaacaatgtggcacacaagctggtggagcgttatgcccaaatagattatgttgcagcaaatttgggtggtgtggtgacacagattcctactgtggagaaggttgccagagccaatgcaaatctgcaacaccctcaacaccaactccaacaacacctagtagtggtggagatattagcagactcattagctcttctctctttgatcaaatgcttaaataccgaaacgatggccgctgttctggccatggattctacagatatgatgctttcattgccgctgctggctctttcaatggctttggcacaaccggtgatgacaacactcgcaagaaggagattgctgctttcttggctcaaacttctcatgaaaccacaggtgggtgggcaagtgcaccagatggtccatatgcgtgggggtattgttttatcaacgaacaaaaccaggcaacttattgtgatggtgggaattggccatgtgctgctggtaaaaaatattatggccgaggaccaatccaacttacacacaactacaattacgggcaagctggcaaagcacttggtctggatttgataaacaatccggatcttgtagccacagacgcaaccgtgtcattcaagacagccctatggttttggatgactgcacagggaaacaagccttaaagccatgatgtgatcactggaagatggactccatctagtgctgacagctcagcgggtcgggctcctggctacagtgtcatcaccaacataatcaacggtggcctagaatgctgccacggccaggataatctggtccaagatcggatcagcttctaccgaaggtactgccagatgatgggaataagccccggagacaacttggattgtaacaagtaacagccatttgcttagcaaattgctcacatatatcatccatatagagaataaat

SEQ ID NO: 336 - DNA, 812 bp, Glycine max
tcactgccacttctgctccatctggaaacatccccttatacactgttccatagccaccccttcctatgactctcccctctgtgaagttggaggttgcttttaagatgtcagcatgtgtgaaaactgtcttgtttaggtggaatatcttgacagtatcggaataccctgctgaggatccggtgctgcctgaatcatgtgcttgcttctttgtattattcttcatgaggtatcctggttccacctttggacttttcaccaagaaacatatcaccaggaaaagaagtccaaagaccatgatagcaagtgctagagccaaaaccaaagaccattttgtgggatttttcaagactttgggtaaagtcctatttctatcatcagtgatgttaaagaacaggttcaaaagggggtcacccaaatatgaatccttgtcaaaagtgagtaagtgtccagctggtgggactgcaccagatatgagaggattatatgagatgttgaacatgctaagctcatccaagcgtgccaaagttacgggaaatgctccggagaaattgttacaagacaaatccagatcctgtagacacttcatgttgccaatatcacttggaagttcaccagaaaaattgtttctggtcatgttcaagactacaagtggcaaacctaccatctctggagggaatttcccagtgaacttgttatccccaaaatgcaacatgctgaagttcaccatgttcccaatttctgaagggatttcaccactcatttggttcccacttagctgaacataccctgctatgtgtgctcgagccgaattc

SEQ ID NO: 337 - DNA, 625 bp, Glycine max
gaattcggctcgagggtctagttaccacttatgtcaactagcacatccacttctaaaagcatctggatatgggagcatagtgtttatatcctccattgcaggtctgaaagctttgccttacagttctgtgtatgcatcctctaaaggagctatgaatcaattcactaagaacatagcattggaatgggcaaaggataatattcgcgcaaatgctgtggcaccggggactgttaagactgtacttctggattctatcatgaaagctgctgctgaagctgataaagccgttgagtatatagtgtctcaaacaccagttggtagacttggagatcccgaggacatatcaccactggttgttttcctttgccttccagctgcttcatacatcactggccagattattactgcggatgggggttacataatttaaagtgtaatgccaaaaataattataaaataaaataaatgcccaaaacataaatctcaagatcaactaggtttttaagaaggtccgaaactaatgattatctgtagttgttttaagtacaatatttcaagtgttataatgtttccaatgtgtgaagttctttttatcaaaaaaaaaaaaaaaaaaaagggcggccgc

SEQ ID NO: 338 - DNA, 736 bp, Glycine max
gaattcggctcgagcggcatgtaaaccacgataagataaattgtttctcttctctgcaaaaaggcgtgtcctattgaaaacatattttggggaaaaaaagtataagaagattgaaatcaaattgagccctaaagatctctcgtcggacgcggagagtttcactttcacccttcggttctcgatgtcagcgtttgacaatgttgttggtgggaaattgaagttgaagggaaaagcactggatgtggctggtggagtgaagaagaagaaaaagaagaacaagagaaatcaggaacaacttctgcaagtcgccgaagatgaagtttcagcaggtggaaatacagaacaggccaaagatcctaatgatggagatataaatgatgtgagtgaattaagcgggaaagggaagacagcccattatgatgatcatcttacaccggcggagaggcgatacatagagcagagggagcaacttgatgttcacagattggctaagatttctaataaatctcaccgtgatagaattcaggatttcaaccaatatcttgcaaacatgagcgagcattatgatattcctaaagttggtcctggatgattcaatgaaggccaatccttatcatttgtatttgttcgttaatactactattaatgccgtgtgcccgcacaatggttattgtcactgcttattgatactctgttttggattaagctaaaaaaaaaaaaaaaaaagggcggccgc

SEQ ID NO: 339 - DNA, 783 bp, Glycine max
gaattcggctcgagtccctccaatgagaaccctatcagggtttagaaggtcttgaatagctgttccctcagagagaaactcaggatttgacaaaatttgatacttgatgcccttgctattagtattatggcatagaattttctcaattgcctcagctgttctaactgggacagtggatttctcaacaacaactttgttacacctggaaacatcagctatcatcctagctgcactctcccaataggtcaagtccgcagccttgccggctccaagtcctctgatttttgttggggtgttcactgagacaaagattatgtctgcttcatgcacgtgtttttcaacattggtgctgaagaggaggttctttcctctgcactgattcaccacttgttctaggccgggctcgtaaatggggagcttgttgctgttccaagctgatatgcgagagtgtgagatgtcaaccacagccacttcaattgaggggcatttgagggcaatcacagccattgttggaccccctacataccctgctccaattccacatatcttcaccatcttcttttgcttacaaattacaacctgcgaatcatgtctgatactatttcagctcaaacaaaattttgcatgcattgagtcactaatagatcggcttagtgggcagagtttaagtaaattgcaagttcaaatttagttgtccttattgttttttttttatttaaaaaaaacaacactacactagtagtgttttccttctttcaaaaaaaaaaaaaaaagggcggccgc

SEQ ID NO: 340 - DNA, 251 bp, Glycine max
agatgtcaaccacagccacttcaattgaggggcatttgagggcaatcacagccattgttggaccccctacgtacccggctccaattccacatatcttcaccattttctttgcttacaaattacagccttatattatattggtaaatatctttgtgtgcaacgctcagacttcactgcaaagagatacgataaattaactgggtgggggagagtacaaatgataagatgaggattctaatatgggaatgctg

SEQ ID NO: 341 - DNA, 737 bp, Glycine max
gaattcggctcgaggttcctctgagtagtgatggctagcctcaagtttgcatgcgtagttgcggtgatatgcatggttgtggtgatcactgcacccatgacaaatgccatcacgtgcggggaagtagccagatccctatctccatgcatcaattaccttcggagccgccgcggcggatcaccggaggcggaatgctgcagaggagtcacgagcctcaaccgcgccgccagtaacaccgccgaccgacgcaccgcgtgcaattgcctgaaatccgttgccgcttctatttctggtttaaatgccaacaacgcagcttcactccccgggagatgtagagtcagggtgccctacaggatcagcacctccaccaactgcaacaggatcaggtaatgaatcgtgcatggatccggggaggaagaaatggaagggaaatttttcaatagcacaatactatatatcattttgtcattgtagagttataattaataaatcaaagggcgatgactggtgactacacttatgcgactgtcatcttggtatcagcgtgtgtagtcgtttcagactttgttctagatatgttaatgttgttgtgttcactgaaatttgtctgtttgttggtgcatgtaataaagacaaatgtaataaattccttgctactttactttaatttttgcagtttgcttttaataacagaatattgcagtttccttgtaaaaaaaaaaaaaaagggcggccgc

SEQ ID NO: 342 - DNA, 800 bp, Glycine max
gaattcggctcgagtaaagccactaccttcattgaaaaaatacaagcttcagatggatcatggtatggttcttggggagtttgcttcacttacggtgcttggtttggggtaaaaggtctgattgctgctggaaggagtttcagtaattgctcaagcatccgtaaagcttgtgaatttctgctgtccaagcagcttccttctggtggctggggagagagttatctgtcctgtcaaaacaaggtgtattcaaatctggaaggcaacaggtctcatgtggtcaacactgggtgggctatgttggctctcattgatgctggacaggctaagagagattcgcaaccactgcaccgggcagctgcatacttgataaattcccaattggaggacggtgactttccgcagcaggaaataatgggagtcttcaacaagaattgcatgatcacatacgccgcatacagaaacatattccccatttgggcgttgggagaataccaatcccaagtattgcaatctcgttaatcgagccttagttagggtgtcatcctaattatttcgacctgtggacagtaaaagaaataataataataacctatttttcttttatttccatggctctcttaaaatgtttgtgactaatgagtttagtagtcagctaaaaaaaaaagcaaacacgtggagaatgcctgtaagttttttctattactcatagacgcctctcttgctttccctgcagcagaggaattaaatatatacataaatagagatataaatgtttaaaaaaaaaaaaaaagggcggccgc

SEQ ID NO: 343 - DNA, 1260 bp, Glycine max
gagcttgacgtccatgccgcgcccaacgctggattcggctaggccaagaaaatacaagccgtagaagagggctcgctctttcgtgtttttgttcgcgaaggaaactctatccttagctatcgcgatggatcggtaccagaaggtggagaagccaagagctgaaactccaatcgatgaaaacgagatccggattactagtcagggaaggatgcgcaactacattacttacgccatgagcttgcttcaggagaaaggttctaatgaaattgttttcaaagcaatggggagagctatcaacaaaaccgtgacaattgtggagttgatcaagaggagaattgtgggcctccaccagaatacagcaattggatccactgatatcactgatacttgggagcccctagaggaaggcctccttcctttggagacgacaaggcacgtgtcaatgataacaataaccctttcaaagaaggaactcgatacatcgtctgtggggtatcagcctccactaccagctgaccaggtgaaggctgctacagattttgattatgaaggagagggttcacctaatggtcgtgttcgtggtcgtggtggccgaggcaggggaaggggcagaggtaatggctttatttcagctgattatgaggatggaggttgggatcgcaataggggaaatgctaggggcaggggtagaggaagaggacgtggctttcgtggtcgtggaaggggagggtacaatgggccccatgttgacatgcaagatggaggatacaaccaagatgtacctcaaggccgtggtcgtggccgtggcagggggggatatcgtggaaggggtcgtggcttccgatcgaatgggccaatccaagcagctgcctgaggcaaccagtaggccgccattagtgcagtgcagatgacttgactagtgaaagaaagccatgtctaattttatgttttcttttatttgttcaattttcttcatttcccccttctttttctctggggccctgaagaactgtagggcattttcttcttacagttttatgtagacttttagttttcagactgctgccacataaggcggcaaccctttatgttttagaccttggtcagatgcttgaacagttgtacttctgttttggccctgaatctcaattctttaatttttattttctagagatgtgttcaaattgatgtttttttttcctttcctattcttacaccctctatttcatttttgggcaattaagaaaagattatgctccc

SEQ ID NO: 344 - DNA, 657 bp, Glycine max
gcggccgcccttttttttttttttttattttattgggaaaaggagcaaaatctactttatttctttggttacagacttgcagtaaatatataaaacacttcagactataccccgcaatactaaaatatataaaactatgcatgtctagcagaaataattttttatctggtacatgtttactctaaggactctgcttattgatgatctcctcgataagatctgcagcttcctgaactgttgagatgctctgtgcactatcttcttctacggtgataccaaattcctcctcaagccccatcacaatctcaaccgtatcaagtgaatcagctccaagagctgtgaatgttgactcgccattgactttagagtcatccgatagagcaagttggttctttacaattttgcacaccttctctactgtctctggtttagcagcacaggaaactgtaaggcgaattgaccgtggctgtgagctaaaagaaacattccttctcccatagcttgaaattgagctatacctttggccagcaattgaattaaatgccaatctctgattcagcttgagacggagaaagcgttcggagagtgaagctccggtgaacgtgttcgtcgccatggaggtttgtgcaaagatgcaaagagaattgagaaggcggc

SEQ ID NO: 345 - DNA, 901 bp, Glycine max
  unsure (1)..(901): unsure at all n locations
agtataattcttaattattcagctagatacgagactgaataaaattaacatacaatatcattgacataaatctacatctattaaaattagcatatcattgacaaaaaccccttaatgcaaaaacacaacttgatataactaacttccagaaacaaacaaaaggttggactaatttgtttttcttctcagacttgttttaatcacgcaacaacagagttcacaactaaaacactcgagactcagaattgccccacaccataaatattgatcggcatggagactatgatgagttcctgttttacacaaaccttctggtacatgtttactctaagaactcttcttctgaacgatttcttcaataagatctgcagcatcctgaaccgtagcgatgctctgtgcactgtcctcttcaatggcaataccaaatgcttcctcaagtgccatcacgatctcaaccgtgtcaagggaatcagcaccaagagttgcaaattttgactccccagtcaccacatcagtttcaggcatagccagctgcttctttactattttgcacaccttctctactgtctctggtttagcggcagcacaggaaattttaaggcgaattaagcgtggctgcaagctaaaagaaacattctttctcccaaagctggaaattgaagcagatgtcgggccagaaattgaggcaaatgcctgtgtttgaggaatgacagatcgcatggagagagatgtgccagtgaatgcattggtggccattgtggtgtgctgctgaaatgcaaaggcgcagaggaaaaatggagaaaggaggagagagggtcgnacgcgtgggcgcacgcgtgcgcgnacgcgtgggcgnacgcgtgggcgnacgcgtgggcgnacgcgtggncgnacgcgtggg

SEQ ID NO: 346 - DNA, 1705 bp, Glycine max
gcggccgccctttttttttttttttgcactcaagaagaaactactaatatatttggattattagtgcatttaaaaacaattgccaattcgcaaataaacttattcttattttggttacaacctgatcaccacaaaaaaatgaaacatcttataaacattttgatacacaaccttatgggatcaaatacaggtgaaccataagaaaatacattttaactccatatttgaatatatcagcgatcatcaactaaccaataacctagtccttcttggcataaaatctcctgtacatggaatcaacattggtgagatagaaggtgcctggagttaagtagctacagtccttgcttgtcacaaagtccttacccccataacggtgttccatgatcttcaatgtttcaacgaacttttcaggaggaatctcaactctctgcttcaacttgtccgaaacattcatcactgttacaatgtttgacaagttaaacggatgttgaccctcttgaagctggaaggagaacattgtagctgttaaaccacttccatatgaaaacataactacccgtttacctaccaacgaactgttcttattgtgaagaagagatgcaaatgctgcataaagagatgcagtgtacatgttaccaacttgctttgggattagtgtgctgggctgcacctttgcatcatatagatgttttgcagcttgctggtttgccttttcaagatcacgactttgataactctcatcaccagataaggatgcatatggtgcaagggtttccctggcaacttcatcaacaaaactggcatttctcaagaagtcattgaagtatagtcggccaaaacttttctgcacaagcttgttatatggagaatgaaacacaaaataatcagaatctgacattgaaaaaggcctcccctccaatttttcaaatttctcacagtaaagccggtaacaggaatcaagtgccatgagataacaggtctgtgagagttttccatcaacaattggatattcgctagcaaggtttggcttgtaaaaatcatatgcatgagacatgtgactgcctctgagtttgctttcaaaagcaataggagcatctggccctacaagcatggcaattgcagcagctcctccagtgggacgagcaggtccttcagcatataccgcagtgtctgtacaaacaacaagtccataacgtccatcccatgagctactctccacccaattcacacagttgaacaaagcagccgttcctccatagcatgcattagttgaatcaacaccttcaatgtcagtattaccacttgcctcaaaaacttgcatcaggaaggtcttaattgatttgcttttgtcaataacagtttcactcccaaccgccaaatgtccaatttgctttggatcaacattaaatttttcaagaagtgaagtaactaccgtcaagctcattgagataacatcttcaacctcagagcagaaggccatgcaatcctgtccaagcccaatagtatatttccctttgctcaccccatcatgaccctccaaagcatcctgggtgacgcaggtgggagggaagtagatgtccatggcaaggattcccacattggcagggcgtgaagaggccatggaagagaattttccctctctttcttttggggcctgtttggatttagagaaaatggggtaaatagtgctcgagccgaattc

SEQ ID NO: 347 - DNA, 605 bp, Glycine max
gcggccgcccttttttttttttttttgagttcaattcaaagcatatattctggtgctgattcatggaggccgggtacatttcagctagtgctggatcaatggcagtcactagaggtataggcaggtagcacacatctgaggctagcttattggcgcttactgtacagtagtacgatacaacaacaggagaaaacgtctagttgtgtggaatatttatattgtaataacgacgacgttctgtgcttgcatgctgcgtgcagttcgctcagcttgtgccagtgccagcctcgcccttgagcaagcgcgagaaccacagcgccgatgctttcgggtgcctggacagcccgttcttgtagtccacgtagactatgccgaacctcttggtgtagcccattgcccactcgaagttgtccaggaacgaccacgcaaagtacccgcggacatcagctccgtccttgatcgcttgcgcaactgaattgaggtaccctttgaagtaaccgaccctcgtcgtgtcgtttaggacctggtcaagcgttgcggattgatcgtcctcttcatccatgccattctcagtaacataaattgctggatctcgagccgaattc

SEQ ID NO: 348 - DNA, 1219 bp, Glycine max
gaattcggctcgaggcaaggggagcaacatcgccatccagctggatggcaacctgctgggatcaaacgacctggacaagtacacggcgagctggatcgaattgtctcacgttaacaacatcgggatcaccggctcgggcacgctggacggccaggggaccgccgtttatagcaagagcaagaccgacaacgtgaaggcgatgcccaacacactggtgctgtttcacgtgatcaacgccactgtcgccggaatcaaactactcaactccaagttcttccacatcaacatcgacaactcagagagcatcaccgtgaaggacgtgaacatcaccgcgcccgccgacgttgagaacacggacggcgtccacgtcggaggctcctccaagatcagcatcctcaactcgaccatcggcaccggcgacgactgcgtctcgattgggcccgggtgcaacggcgtcttggtggacagcatcacctgcggccccgggcagggcatcagcgtcggctgcctaggccgctacaaggacgagaaggacgtgagcgacatcacggtgcggaactgcgtgctcaagaacaccaccaacggcgtgcgcatcaagtcgtacgtggacgccgagtccgtgctgacggcctcccatctcaccttcgagaacatcaggatggaggaggtggccaaccccatcgtcatcgaccagtacttctgcccgcagaaggtatgccctggcaagcggagcaactcctcgcatgtctccgtcaaggacgtcacgttccgcaacatcaccggcacgtcgtccacgcccgaggccatcagcctgctctgctcggagacgcagccatgcagcggcgtctccctcatcgatgtcaacgtggagtacgccggcaagaacaacaaaaccatggccgtctgcagcaacgccaagggcaccgccaagggaagcatcgaggcactggcttgcctggtctgatgatgaccttccttttgcatgcatgcatggtatctcatccttgatgatgatctagctcactagttctttttaatttccgcttcattcgcttttccaaattcgattgtgtttcagccaagttgtttagcgggacatctcttgtctgatcttcctgctaaatagagttggactcctatatatagaggccttccggcacatataatatacgtcggaccaatattattgtgatcaaaaaaaaaaaaaaagggcggccgc

SEQ ID NO: 349 - DNA, 898 bp, Glycine max
gaattcggctcgagggccatggcggagccgcaccccttctcccccctgcctcgcgcgcggcggccgagatggtgctgagcgcctgagcctgccctcctacgggctcactggcacgctctccacggccatcggtaacctcacgttcctgcgtatgctaaacctgagctccaattgattccgcggggaggtcccagcgaccatcgttcgccttgcgcatctgcaggcgctagaccttagctacaacgccttctctgaattccagagctgcgattcccgaggccatggagcagcagacaatatcaattgccaaagctgccattacaatagtactcattttagggacttcagttcttgcagctgtcaatccaattgcaggatgctatgacgctcttaagatcactctgtcgaccaatccaaggaaggcacctgaagcttagggaggacacctcacaagtcacagctgcccgtgttgcatctgtgtgattttgtaatttgaatgagcaaatctatctggcgtcagtgcggggttgggtttcctagagggaggaacatcgtgggatgcaggtcccaaggaacaccagatattttgaggcagaccgtggcgaggtgcccaagggcagcgcctagatcttcttctggatggtcaagttctggaacgataatgtggcagaggagatgccctggtcttcgtacgtatatgttacttactcccactctcaacatagcagtagtaagtgcttgtttctgatgaatgtatcaatcaatgctatgcgccactgtaaaatattcttctcaaacattaacatttgatctgatgtataatgtaatgtggcatgtcctccatatcagagttctccatgcttattttttgataaaaaaaaaaaaaaagggcggccgc

SEQ ID NO: 350 - DNA, 1148 bp, Glycine max
  unsure (1)..(1148): unsure at all n locations
gaattcggctcgaggaaaactctcccttgaaggtcatagattttggcttgtctgactttgtgaagccagatgaaagactaaacgacattgttggaagcgcatactatgttgctccagaggtcctccacagatcttatgcctacatcttgctctgtgggagtaggcctttctgggcgcgcacggagtcgggaatcttccgagctgtcttgaaggcggaaccgagttttgatgaggccccatggcccactctcacggctgaagctaaagattttgtaaaaaggcttcttaacaaggattaccgcaagagaatgacggctgcacaagctctcagtcatccatggatccgtaattctcaacaagtgaaggttcctttggatatgataatctataagctaatgagagcgtacatcagctcgtcttcgctgcggaagtctgctttgagggccctagccaagacgctgacgacggaccaactcttttatgtgagggagcagtttgaattgctgggcccgaacaagaatggttacatctcattgcaaaatctgaaatcggctctagcgaagaactccacggatgcaatgaaggactccagggttgtcgattttgttaacaccgtgtgcgctcttcagtacaggaaactggatttcgaagagttcgccgcttccgccatcagcgtctaccagatggaagccctggagacctgggagcagcacgcgaggcgcgcgtacgagctgttcgacaaggaaggaaaccggcccattgtgatcgaggaacttgcgtcggagctcggacttggcccgtcagtgcctctccacgttgtcctccaagactgggtcagacacgccgacgggaagctgagcttcctggggttcatcaagctcttgcacggggtctcgtcgcgctcgatcccaaaggcctagcattgtacaccatccatccatcgtcgttgttgttgtagttgtactgaagtaaagctgttgtgtagacgagtgtacagatgaggatagggaaaagaaatgaacatgatggaagactggaagggccgtaagatttgcggctgctgtttgtcaatgccaaattgccattgcctgcagctgcnnnnnnnnnnnnnnnnnnnnnnnnnnnnnnnnnnnnnnnnnnnnnnnnnn

SEQ ID NO: 351 - DNA, 1952 bp, Glycine max
gaattcggctcgaggctcctccatggccatggccatggcccgaccttgtgctttccttctcttcttcctagttcttttctcctacgacggatccggtcctgggagcagcaggaggactaggaggagtggcgtcgcgcaggccacgcagagagtcttcctgtatccacaggctcccaaggtctcctccatcgtgagcagcaagtacaggaccgcgtaccacttccagcctcccaagaactggatcaacgatccaaatggaccaatgtactacaatggtatctaccaccagttctaccagtacaacccaaacggctcgctctggggcaacatagtctgggcgcactcggtctccacagatctcgtgaactggatccggctcgcgccggcgatagagcggacgactccgagcgacatcaatggctgctggacaggttcagccaccatcctaaagagcggccggcctgccatcatatacaccggcgccgacaccgagaagcgtcaggtccagaacgtggcgttccccaagaacctgtccgatccgtacctgcgggagtgggtgaagccacacgacaacccggtgatccagccggtcggacgagggctgaacccaggccagttcagagacccgacgaccggctggatcggcccggacgggctgtggaggatagccgtcggggccgaggtcgacggccacagcgcggcgcttctgtacgagagcgaggacttcgtgcgctgggacagagtggaccacccgctctactcctccaacgcctccgccatgtgggagtgcccggacttcttcgcggcgatgccgggcgagaactccgggctggacatgtcggctgcggtcccggatggcgccaagcacgtcctcaagatgagccttgacggctctgacaagtacatggtcggcgtctatgatctgaaaggtgacgcctttgtgccggataccgtgatcgaggaccggaggctgtggtcaaggattgactacggcaactactacgcttccaagtcgttcttcgactcgaagaaagggaggagggtcatatggggctggacgaatgagacggacagttcgtcagacgacgtcgccaaaggatgggctggaatccatgcaattcccaggactatatggttggataaagacagcaagcagctgctgcaatggccggtcgaagagatcgagtcgctccgaggaaaacaagtcagacaccaaggcctggagctcaggaagggggatctgtttgagattaaggaaattgacactctgcaggcagatgtggagatagatttcgagctcacatccataggcagtgccgacccttttgacccttcctggctcttggacatcgagaagcagtgccgggaagcgggcgcgtcggctcatggcccgttcgggctcgtggttcttgcttctgagagcatggaagagcacacctccgtgcacttcagagtgtactacagatcacaggagaagcacatggttcttatgtgcgccgatctgaggaaatcgtccttgagaccggagctgtacacgccagcctacggaggcttctttgagctggacctggagaaggaaaagacggtggtatctctgagaactttgatcgatcgctctgcggtggagagcttcggtggaggcggcagggtgtgcatcatggccagggtctatccggcggcgctcgtcgacgacggcggcactcgcatgtacgcgttcaacaatggcactagcaccgtcagagtgccccggctagaagcgtggagcatgaggagggcacaggttaacaagggatgaggaggaacacaaggccatttgatagctagaggagaggaacagagcatgggcacatgaattaaacacacactgctggtttaatttgctggaattaatcaatcaatcaatcaacaaacacacgaagattaaatcaaaaaaaaaaaaaaagggcggccgc

SEQ ID NO: 352 - DNA, 1222 bp, Glycine max
gaattcggctcgagatttaccatccacaatcttgagtttggagcgcatcacattggcaaggcaatggcacattgtgacaaagctacaactgtatccgatacatactcgaaggaagtggccggacatggagctattgcacctcactactataaattccatggaattcgaaatggaattgatcctgatatttgggatccatatactgacaaatttattccggtccattatacatcagagaatgttgttgagggcaagagtgctgcaaaaaaggcattgcagcagatgcttggattacagcaaactgatacccctgttgttggaatcatcactcgtctaacagttcagaagggaatccaccttatcaaacatgcaatgcatcgagctcttgaacgcaatggacaggtggttttactgggttctgcaccagatcctcgcatacaaagtgactttacaaatttggccagtaagctgcatggtgaataccatggccgagtgaagctatgtctaacctatgacgagccactgtcacatttgatatatgctggcgcagacttcattctcgttccttccatcttcgaaccttgtggtctaacacagcttattgctatgcgctatggatccatcccagttgttcggaaaactggaggcctgtacgacaccgtttttgatgtcgacaatgataaggatcgggctcaagcacaaggtctcgagccaaatggattcagtttcgaaggagctgatagcagtggtgtggattatgctctcgacagagccataaccacattttatgatgcacgcgactggttcaattccctttgcaagagggtaatggagcaagattggtcatggaacagacctgccctagactacatggagttgtaccattctgctcgcaaaagctgatagcttttaccactagggaaatcaggctcgttttgcccaggttagaagcatctcagcctcaggccttgtgcaaattcatttgtgcactgggaagaaaagagtaccgactggccttgagcatgcccgccgtctaaggatgcaacacacaccgtgtatagttagagaatgctactcgtcgtacgtttcatgcatgtgttttgtgtatacacctcatgtagcttgcaaaacaacagtacgacgtatcccggccgtctaccatgcctgagggcgtatataggctataggcttatgcaaaaaaaaaaaaaaaaagggcggccgc

SEQ ID NO: 353 - DNA, 878 bp, Glycine max
gcggccgccctttttttttttttttaaataacctgtttgattttcagcaagagttcattttaattttatatactcagacagattcatgaagctagcaaagaacattaaagcagagaatcagagagccatgaaggacttaacacgagccatcatttccttggctctgctcttagatacctgagacttgctcaaaatctgaaacgcatgtccaacacctctgaacaccccatactcaacccttttccctgctctcaccaaagcatcgcagaactccaaattcctatccttcaatatgtccatctccgagatgcacaccaaggtacgcatgagcttcaactcctccaacttcaccttcaccaaagggttgcaccatggatggtcacggttcgcaccacacggtaacgccaagcgccaataagtatcagaagctgccaagttcaaagcagaaccgggtgattgagccatgcatttctcagaacctgttctcacttcccctccaaaaaagggttgtatcaaaataagacccttcaaattcaagggtcttaaagcagcgccatcacatgcacatagcctcgtggcaacgttgtaggctatgttagcaccagcactgtccccacctaagaaaacacttgagaagttgcattttgaagtccaccattcactaccacccttgttgtgttgttgatgtagcatttgttgtttcacccacatgatggcctttaagccatcatcatagggtgctggaagagggttctctggggccaatcgatagttcactgacataatcacacactccactttggctgatagccttgcgaggaaatcatggtagcaactccacgctgctgatccaacacaaaatccctcgagccgaattc

SEQ ID NO: 354 - DNA, 955 bp, Glycine max
gcggccgccctttttttttttttttagataatggtttgttttattcatctaaacgacattaataatgcaagaaattaaaggtaacatctctttttaaaaagtactgggattcataacaatagaaagtaaagaaatttattcaaggaaactgggatttatacaatattgatattgtatatgcaagtccacacccagtactacatttggccttgtggacatacgacaaatattattaattttaacatgcatagacttacacaccgaaattatgagtattagatcctcacccaaatataccaaataaaatattgttaataacttccaactttgctggcgagtgggcgggctttacacatagcctccaatggaattaaccttgacaaggtgatccaattattctctgtcatatcaagcttcttctcacttactcgtttccagtcaaaacattgaatcattaatcccaaagtatagctaacactttgcatagccatgggttctcctgggcaagcccttcttcccataccaaatgctaccaacttcttctcctctccttcttcatcaaacctctcaggtttaaagcttgtcgcatctttccatatcttaggatctctttgcatggcccaaccattaataatcacaattgtgtctcgtggaacattgaatccttcgatattgatgtcttctgaagccacgtgtggtattagaattggagccggagggtacaacctaagtgtttcaaggactatcttcctgagataaggaagttttggaaggtctgactcatttaacagccgatctggtcctacttgagcgtccaactcatctcttgccttctgcagcacctctgggtcattcactaaattagataatgcccactctaaagttccagttgacgagtctgttccgccaaagagcatagcctgtaatccaaaaagttcatcctcgagccgaattc

SEQ ID NO: 355 - DNA, 722 bp, Glycine max
gcggccgccctttttttttttttttttttttttttttaattgaaagtaaagaaatttatttgagaaaactgggcggtatacaatattgatatatgttaatgctcacccaattctacaatgggccttgacacataagataaagaagagtaataaaatataaatattcttatatctatatttctctctagatgtcaattgacatatagttgtccatggatgatttttggacaaagattattaattttgaaatgtatatatgatcaccactcttacacactaaaattataagtattagattctgaatcacccaagtttaccaaataaaaatactattaataattaaattccaattttagtggcaagtgggcgagccttgcacatggcctccaatggaattaaccttgacaaggtgatccaattgttctctgtcatatcaagcttttcctcacttactcgtttccagtcaaaacattgaatcaacaatcccaaagtaaagctgacactttgcatagccatgggttctcctgggcaagcccttcttccatgccaaatgctaccaactttttctcctctccttccacatcaaacctctcaggtttaaagcatgtggcatcattccacaactgaggatctctctgcatgccccaaccattaatgatcacaattgtgtctcgtgggatattgaatccttcaattgtaatatcttctctcgagccgaattc

SEQ ID NO: 356 - DNA, 1309 bp, Glycine max
caacttcttctcctctccttcttcatcaaacctctcaggtttaaagcttgtcgcatctttccatatcttaggatctctttgcatggcccaaccattaataatcacaattgtgtctcgtggaacattgaatccttcgatattgatgtcttctgaagccacgtgtggtattagaattggagccggagggtacaacctaagtgtttcaaggactatcttcctgagataaggaagttttggaaggtctgactcatttaacagccgatctggtcctacttgagcgtccaactcatctcttgccttctgcagcacctctgggtcattcactaaattagataatgcccactctaaagttccagttgacgagtctgttccgccaaagagcatagccaaagcaaggcctttgatgatttggtcggtataatagtcaggctgtgtctcttgcagtttgaggagatgaccaatcatggaattctcgcggtccttgttgttacggttctcatcaaggatcttattcaagatggtatcatacctcttactgatattcttcaacctcttctccacgttctgaaaatcgaaccaccttaggaaaggtaagtgatctcccttgttagccaaccccatgagttgcagcatctcattcacagtgtctctgaactccttcgcttcctcaacgttgttaagttcactctcttctccgtaaaaccgcttccccgaaatcatcctcatgatgttgttgtacgtcaagtcagcaaacttggaggtcatctccgcgcgcgcaaaatctttcccggagtccctggccagcctgtgtatcaacctcttcgtctcgtcgctccggattccggagaaggagtggacgcgctgcgtcgatagaacgtcgagagaggttatgcggcggaggttgcgccagtgctcgccgtgggagcaagaccctacggtggtgttgtcgtagaatatgtattttcccgagagggagcgtaccctgttggccaaggtaacatcatgtttagtgaaacattcttggtacgctgtgggtgatgaaacaaccacaacaagacgtgacccaaaccaaagggatatgatgtttccatatttttgggacatgcggtggaagaaacggtgtataggttgttcaacgaggttaaggttgccgattataggaagaggagtcggaccaggtggcaggtttcgtacttttctgcttctttggaaaaggtacttgagagtgaagaagaacgcgagggaaagaagagagtaagataagaaaggaggcattgttattactgtcatggcaggttttctcgacccg

SEQ ID NO: 357 - DNA, 1211 bp, Glycine max
gcggccgcccttttttttttttttttttagccataaataataataataataataatagtaataataattcaaaacaacaaccaccaccacctcatgcatgggaatagtgttgggagggctgcatttggaaaaccatgtttggtgtctgaggtcctaagtaagaagactcatgaagagaacttctgtgcagattttggccctgcatcttaaacccgtatgagttaaggccataaggggacatgaagacttgttcatgtgcagggttgagtgccatagctacccctgcatttggctgatcgctccactggaaattcaatccggatgaggcagcattagaattcagctgctggtggcgtgagagcattgcggaattttgtggcgaagcagatctcttgctttcatcagaagaagttctggtggtttctgtgagattaaccgttgttatgtcatggatgctagccctcctcttgtccttgcctcctgatagttgcctgatgaagtacttctgagcatggctagcaacttgagttggcgtcctagtgatcacataatttcgcgatatgtttctccaatcacctttgccatacttcttcagccccagtagaaacaacttatgttcctcttcagtccatggcacacctttcttcctttcctgctcaaggggtcttccagaggaggatctcttagcagtgattcctttgaagccatcatcataagcaggactagtgttcacccaatccaaggtgaagggtgaggttgtggtggtaccactactgtaccccggaattgggatcaaccctgcttctactcgagccgaattcgcttccaattccttgtactgcttcactacatccataaccgtctttcctggtatcatctcggccaccttgtgccaccgatcgggagtgtccctatcatacacggcaagagcattctcaaacagcttattctctgcaggggtccatttggtgttgttggtcctgttatcatcaagaagccaattggaattgtacatgtaaggtgatgcaggagggaggatctccatttcccacttcatcacaccaaattcacaacacaattcaacacacgaactatgagagcatgtagaacaaggttttcagccaattgaggattggtttggtttggtgtgtatgtttgtggattttattttacttgaaagattgcacaaacttttatgggaagcagggttg

SEQ ID NO: 358 - DNA, 1535 bp, Glycine max
ggggccgccctttttttgcggccgcccttttttttttttttttttttttataactgatgctaaataatttattgaaacactgaggtgtggtctaactacaaaaatcaacggattcaatttgtaaaccataagacatgaataacaaaaacaaattacctgggagaacctacaggtatgaactatacacataccccaccaccagcaataaccaccatatcaaaactatcatcatattcaagaatagaattgtatgctcctcctctctatacaccaaagttaaaattagaaaatataaaccccaggtagtgaaactaaatcaaggatgaatggaagttatggaaccctcttaaaatgatgaagcagaagtttctgtctggcttcctctgctgcgacggtgtcgttttccatggtgacggcggccaccaccgaacgtgacgggatcaaacctcctcagcctctcagcttcttgggaattgatgacacactctgaaggagggactttgtatctgactttgtcatagcagtaggagtatgtcatgtgcttcttcctgaaattctccattttgattctttgtgctggtgtaacaccagaaggaggaattgttgcctcagagctttgagcattgtcacacgtggccacgtgctgctcaattggatccactgcacaaccgtgcaggacaaggtcagagaattcagcaacatagggtgcatacttgtagttaaccctgtatttgcctccattggtagcccaatcagatgcatcccatattgttgcatacaaagtcattggcttagaagggaaatctcctcccatagattctgttcgcgtcacttctctaataggaacattgtccacataaaatatgatctgagagtctgtccagacaatactgtactgatggaaatcctcagcaggatcaaaccataagccatatctttcctctctgccaatgctggtgctaccattgccataaacattggtctgaatcctccagtctttgcctctaatgttccccaaaaactcaaagtctatttcatcatggttgttctggaacatgtcaccatttgacatataaaatgcaaccacaactccagcagtgtaatcagcaggcaacttgatcgaggcactgaaatacccgtgaaggtaaaggtcatgagacacaaatccagaacctgttctttcatcaagtgaaaggtgaactgatttgccatctctatggatggccaaattatggtccccaaacaagggggtgtagccatcctcaaaggctatgatgggcaagtttcttctgggtgacccagaagaatgaaaaaaaagtagagaaaaacaacaacagaagaggaaccaccccatgtgacccccttccatgtttgtttccttaaaggaagtgatcaatgtgtcaaaggattttcttgttctggctacttgtctgctgagtgttgttgtgttggaaatattattataggggagaaaagagaacagaagagtgatgaacaagaataccaggggatgagagagagagcgaacgcgtgga

SEQ ID NO: 359 - DNA, 595 bp, Glycine max
aacccaggtaaatcaaactgattcatatatgaaaatattttctttatgacaaaatctgcatatggagccatacattaaaatgaagaagcagtaatctcttcctggcttcctttactactatggtggtgtcgtttcccacggtggcgctggccgttgccgaaagtgacgggatcaaattttctaagcctttcagcttcttggtggttgatgacacactctggtggagggactttgtatctaactgtgtcatagcagtaagagtaagccatgtgcttcaacctgaagtttctcattttggttatttgtactggggtgacaccagagggaactttctcagaaccttgggcactttcacacttggccacatgctctatgggatcaactgcacaaccatgcaggaccaggtcagagaactcagcaacatagggtgcatacttgtaatttaccctgtatttgcctccattggttgcccaatcagatgcatcccatatggtagcatacatggtcattggctttgaggggaaatctccacccatagattctgtacttttaacttccctaataggaacattatccacataaaatatgatcttag

SEQ ID NO: 360 - DNA, 539 bp, Glycine max
agtctttgcctctaatgttccccaaaaactcaaagtcgatttcatcatggttattgtggaacatgtcaccatttgacatatagaaggcaaccacgactcgtgcagtgtagtcagaaggcaacttaatagaagcgctgaaatatccgtgaaggtaaagatcatgcgacacaaatcctgaacctgttctctcatcgagtgaaagatgaaccgatttgccatccctatggatgaccaagttgctgtccccaaacaagggcgcgtagccttcatcaaagggtattatgggcaagtttctggaggaggcagcagcgaaggcagcaaaaagcatggaagaacaaaagaagagcaacaaccccatgtgagacccctccatgattatgtgtttcctcagaaaaagataatatgaggagtggagcaaggaagagtaatgaagaagaagaagaagaagaagaagaagaaggagcaaaaaggggatgagagaaagagagaggtttggaataatctgtattctctacagctagaagcgatagagagagcga

SEQ ID NO: 361 - DNA, 484 bp, Glycine max
aaatacccgtgaaggtaaagatcatgcgacacaaatcctgaacctgttctctcatcgagtgaaagatggcccgatttgcccatccctatggatgaccaagttgctgtccccaaacaagggcgcgtagccttcatcaaagggtatgacgggcaagtttctggaggaggcagaagggaaggcagcaaaaagcatggaagaaaagaagagcaacaaccccatgtgagacccctccatgattgattatagtgtttctcctcagagtgatttttatgagataatataaggagtggtgcaaggaggaggaagaagaagaagaagaaaaagaaggaaaagggggatgatgagagaaagagagagggttggaaaaatagtaatctctacagctagaagcgatagagagaggcgaaaggggcttggttagagagaaagacacagccatacgaagcttatttgtattcgtgctcgagccgattcggctcgataa

SEQ ID NO: 362 - DNA, 392 bp, Glycine max
atgagacacaaatccagaacctgttctttcatcaagtgaaaggtgaactgatttgccatctctatggatggccaaattatggtcaccaaacaagggtgtgtagccatcctcaaaggctatgatgggcaagtttcttctgggtgacacagaagaagaagaagcaacaaaaaaaaaggagagaagaagaacaacaacagaagaggaaccaccccatgtgaccccttcctcccatgttaattagtttccttaaagaaagtgattaatgtgtcaaaggatttcttgttctggctacttgtctgctgtttttgtgagtgttgtgttgtgttggtaatattattatattattataggggagaagagagaagagaagagtgatgaagaagctcgagccg

SEQ ID NO: 363 - DNA, 1156 bp, Glycine max
gcggccgccctttttttttttttttaattaccaataggaacagtgaattttggaaatgcagtgtagaacgaactttatatgtttttgtaaaacagtagtaggctatctttatttttgtaaattacacttccaatttgaatagacatctaaaatagtaaaatactaattaaagcttaatataattgttttcaatcatccacttgatgctccagaagttagagtcacatttgtaggcccaataagcccatccaaatttggcacgagagtatacatccacttggacttgcgtaaatttttgttggtcaatctttgatgcactctgaactttccaatcactactccattccccaacaaaaatgaggggtccattagatgtggtgagagagctaagatctgagactctttgctttttaataaaatcgatgttctgctgcacattcatgttggagaacctatccgaaaagagattgtagtagtgcacatcaatgaccactccgctgaaagctccagcaaaggacaaaagcacttttgaatctctatcaagagggttagacattatcacataggcactagaagtgtgtttcctcacagcatcataacctgcttgataatagcttttaaggctttccaaattaactccctgaggctcattcattagctctattgcaactagacctgaactgttagcatatctttcagctagaaagtctatggctgccacagtgtcagatatgtatgaatcatcccattctagatatccatctcttgaggcactgtgaggtcttccattttgtgagcctggagcagcatgcaggtccacaattaccttgattccatacttttctgcccatgtgaaggcattatccaacacttccaaggatcccccaacaaatggctttggtggtgttgggtctagggttgtccaccatcccacgggaattctcacagcatttaagccattttctgacatgaacttgaaatcatcttcagtgatatacgtgttccagtgatccctcatgattttggaagctttatctgggccatatccatttgtaatttggtattcacctcttataatgctcgagccgaattcattcattttgaagattgaaggatcactatcatcccaactggatccttcataatttgcaagcac

SEQ ID NO: 364 - DNA, 1076 bp, Glycine max
  unsure (1)..(1076): unsure at all n locations
tcacaccttgtggctcattcatcagctctattcctcctaagtttggcctgttaccatatctttcggctaagaagtctatgacttggactgtgtttggtatgtatgaatctccccattctgtatatccatctcttgtgccactgtggtcattgccattttgtgaaccttcagctgcatgcaagtctatgatcactttcatcccatggttttgtgcccaaatgaaagcattgtccaatgctgccaatgatcctccaacaaaaggcttaggagggtttggacctttagctatccaccatcccacaggtattctcactgcatttaagccattttctgacatgaatctgaaatcatcttcagttatgtatgtactccagtgatccctcatgatttgaggagctctattaggaccataaccattagtaagttggtactctccttgcaaggtggtgcctggtacaatagtcatacgaaagactgatgggtcactttcatcccaatntgtgccgtgataatctgcagtcactgatgtctccgatccaacctgtaaaaactggccatttgatgctttgattctaattttgaaggggtcgttgtcatcccttataatctcaaaagtttccgggttgtttggtgagtctgaaactgcttcaattttgtttccacccccatgattttccagcccaacaaatttcttgttgaacactctcaagttgaaggatgagtcactgatcctccacagcttgaatgtttcccaaccagaagctgagtcacggttggctacaacatcagctccacccccattttcagaagtgagatacttgttaaactttgtagacttaagttgcacttgagttccatccaagagatctttgctgacaattccatcaaagagagatggttcttgcatccacccttcgacaaccagccagtttcctagattcacaactttgtatggtaaattttgagcaaacaaaacattgtgaggagatgagaggcataaagcaaacaggaaactcaagaagtatagataacccattttaaaatgaaagtgacggacgcgtgggcggacgcgtggg

SEQ ID NO: 365 - DNA, 1637 bp, Glycine max
gcggccgccctttttttttttttttatgcaaaacatatatatgcttgagcaggtttaattttgaataaactgtttgctatgaatacacaaggacaaggaattaaatgtctgagaacatagccacacaattcaataccattcatgtggtaaaattcaccattttgacttaaatctgtagtaaaggaaaaagtgagacgccacgctacttccagtgtggatttgcaataccctataaaatgtatcttgtacgtacaaaaatctcctgagacagccctctataaggcgtacttaaacaaaagctttcactatgaatggactttacaattctgccgcttgttaccacagtgtcataagctggaacgagcataccaatgatacaaattgttcaatcaatgcccaaacttgaataaggttcaattccacctgagcaatcatcatgaacacgccaaacagtctcgcccagaaggtttgccaccgacaagacagttaattgagggaaatagttctgttctgccactggaattgtattagttatgataacttcttggaacaaaccacttgacaacctctcaatagcaggaggactgaaaacagcatgtgtagtgcatgcatagacttctcttgccccttcttgatgcaacagagctgcacctttggcaatagtcccagcagtatcaatcatgtcatcaaccataactgctacctttccccttacatcaccaatcaaattcatcacctcagcaacattatgcccatggcgccttttatcaacaatagctaaaggagcatcagataattttttggcaaaagcacgtgctctggcaacaccaccaacatctggcgagacaactaccaaatcatctgaacaaatagtcttgctggcaaggtaatcaagtataacaggctggccatacacatgatcaactggaatatcaaaatagcccatggactgcccagaatggaggtcacaagcaagtacacgatttgcacctgcttctgtaattaaatttgctacaagcttggcagcaatggattcacgtccttgggtctttctatcagctctggcatatccaaaatatggaatgacagcagtaatatttttggctgaagccctcctgcaggcatcaatcattatgagaagctccataagattctcatttgcaggaggacatgtgggctgcacaagaaacacatcacaccccctgacactctcttgcagctggacatatatctcaccatcagcaaaacgctttatcttaatttttcctagctccaggcccaggtagcatgcaatttcctgagcaagagccggattggcagtgccggagaatatccggaggcgagtgtcgtttcggttaaccaaatcctgaacacgcgcgtttggcgccacgacgtaactcggaattgcgtttccgcttccgctgactacgaactcgctcgcgctcggccttccattctccaacttcactgcttcgatcgccttgctacggacgccgtttcggagagagatgcgagtgattggagcgaaagcgaaacgaggagtgatgatccgagagaaggaaggagaagaagtgggagcggagtgaagcagagtggacattgcgtttcgaacctttggactcccccttctgtcgtct

SEQ ID NO: 366 - DNA, 817 bp, Glycine max
gcggccgccctttttttttttttttaatttattaatccttttgcttcattgaatcagtctcactaaaaccacatgattctttaatcatatgtaatatataatgccctaaatcaagggtacattgattattaattaatagttacgtaattaattacatatattctggagagtcccataaagattcatgctgtatttcttcccatccactcaactccaaagcataatcatcatcatcagaaggcagcatcatcatagagtgatcatcgaaaccaaacctgagtgcctctgccatttgcaccatccacatctttggtgagtccaatggggactcattgatggcctgaatttgtgtgggtgagagtcccactctcacaggaaccacactacccttaataatgttattgtcattgacacatccttgatgattgttaataggtgacattgttggtgatattctgaacatcaccgccgcttgttgtgctgccacttggacatcttcgggtttcgaactcgttggacgtggcagcgtctcaactaattcggggaaattgagtcttgcagctcgtccccgaaggtgtaacgctgccacgtcatatgctgctgcagccatctctggtgactcatagctccctaaccatattctgctcttctttccaggctcacggatttcggacacccatttgccccattttcgctgacgaactccacgatacgatgatgttgccgttgttgttgttggggctatcacatgacattcttgcatggtgtttcttcttgttgtttcttgatccataaagaatgaactcgagccgaattc

SEQ ID NO: 367 - DNA, 842 bp, Glycine max
gcggccgccctttttttttttttttaagtgtaatagataatagaatattgatagttgtacatttttcaaatgtacatcccatgtccaaatatataaatatgattaattttgattcacaagtaattaacttttattagacattttaattacttcttaacatggttaactacttgtgaaataaatatagataaaggagagagagagaagaagatcataactcagtctcatacaaatgcccttaaagatgaatttagtcatccaagaccagggtactccggtagtttacttgaaaagaatgcttcaagacactctgctacacgttcacaaacatcatatatacgatgtgaagtcaatgaagcagcatgaggtgaaaggacaacattatccaaaggaaagagctctttgggaacattaggctcattctcaaacacatccaagccagcaccctttatctccccttccatcaaacatctcaccaattccttttcatcaattagatctccacgtccaatattcacaataactccttctttccccaatgccaacatcacttcccttttgactatgtgccttgtttgctcatttaatgagcaagaaagcacaaggacatcactattaccagcaagctcaacaacattagagtaaaaagggtacgagacaaatggcttctggtttcttgaattgtacataattctgcagccgaaggcctccagccttttagcaacttctctgccaatttttcccaatccaacaatgcctactcgcttgccttctagctgaaactcaaagcttggaaccagaagaaagattgcagggcttagaaggaccctcgagccgaattc

SEQ ID NO: 368 - DNA, 1035 bp, Glycine max
ggcggccgccctttttttttttttttaacatatatataataactactttcaagcttcattgatttcaactgatagagatttcagagtacagaattcatatttacaacagccaaaaactcagaaaacgaaaaacaagttaaaaccatatatacaaatatacagaagctgtctctactcctttacatccgcagaatcccatgaagcattggctcaatctgctgaaaaaagaccctgcatcatccgagccattttattggtaggtactcatatttacataatatgatagtactatgtactatatactatatactatataatactatacattataataagttgccatacatattatgatatgattgatgattcccttttggaatttggaatctgtgttgccgtgtgtacagaaattaaacgtaatccctctgtctctgccgaatgctattcaaatttcaaagccaaaacatctcatttcccctctcaacaacgatccaaagcactcataatcacccaatcgtaaatagtcggacttctattatgtattatcggcactctccactgttgacgattttctcctcgtgaacttcttgaaatcaccgcctggtgcctccggagttaagggggagcgaggggtggtagatccagaaggagaagaagaagcagaggtggtggtgcttccgaaaccagactgggaccgaacaatggtgatgctgcgacttatcggaactgcctccgccaccgttgaccggacggagattccgccggagaacgaattgtactttcggagcttccccagacccgtttccggtgccggacccgccagcgtttcgtcccaaagcttgtgaagaaaacccatgatcatatatatatatatatatatcttacaaatatttatatatgtgtgtgttgtttacttcttttgctacaacatataacacagagatcaaagatcaagagaacaaacgacagagagaagaagaagaacaagaaacaaattaagactttttctcgagccgaattctgagtttacgtacg

SEQ ID NO: 369 - DNA, 485 bp, Glycine max
caagcttcattgatttcaactgatgggagagaggtcagagtacagaattcggatttacaacagccaaaaaattcaaaaggaaaaacaagttaaaaccatatatactaatatacagaagctggatttctactcctttacatcctcagaattccatgaagcattggttcaatctgctgaaaagaccctgcatcatccgagccattttattggtagggactcatatttacatatactatataataataataaggtgccatgcatattatgatatgattgatgattcccttttggaatctggaatctgtgttcccgtgtgtacagaaattaaacgtaatccctctgcctctgccgcatgctatccaaatttcaaagcgcaaaacatctcatttcccctctcaacaacgatccaaagcactcataatcaccctgcaaaccatatataaaacatgaaaacaagttagacacaaaaaaaaatgggcatgtaa

SEQ ID NO: 370 - DNA, 435 bp, Glycine max
ttttctcctcgtgagcttcttgaaatcaccgcctggtgcctccggagtcaagggggtgcgaggggtggtaggcgcagaaggagcagaggtggtggtggtggttccgaaaccagattgggagcgaacaatggtgatgctgcgacttatcggaacatgctccgccaccgttgaccggacggagcttccgccggagaacgagttgtactttcggagcttccccagacccgtttccggtgctggacccgccaacgtttcgtcccatagtttgtgaagaaaacccatgatcatatatatattttcttacaaatatttatatgtgttgtttatttcttttgttataacttgtaactcagagatcaaagattaagggaacgaaacgacagagaaaacaagaaacaaattaagactttttttttcttttttttttagtgtccc

SEQ ID NO: 371 - DNA, 475 bp, Glycine max
gcggccgccctttttttttttttttaaaattattggactctttattcacaaggaaagctatccataaaatgtttttattagacaagtcacggagacaatcttgaaaatccgacaaaaaatttgataaaacctacatataatacatattagagtaacatataaagctaagctgtatacattaactgccacatcccccacccccaaggaacttgtaataggatgggtggggataataatactaaagatacaacaattctctgctatgttatacgcgattgggccattacaaaatatataaatttcagacacaaaatactttggcccgtaaaggaaatcagcatactgtgcgcccatagcacaaacaagcaaggtaaaggttttttgaccatttttccttaacatgtgtgcttggaaattgagatgtacgcagagtttcctgggtctcatctcctggcctgcgcctaggaatgctaag

SEQ ID NO: 372 - DNA, 770 bp, Glycine max
cggctcggcgcctctattgatgtgcagcatcagtgagaaagccaaaaggaagcgccaatctgcattccgcggagtgcgcaaacgcagctggggacgctacgtctctgagataaggctcccgggccagaaaacacgcatatggctcggctccttcggctcgcctgagatggcggctcgcgcttatgactccgctgctttcttcctcaaaggaacatctgccactcttaatttccccgacctcgtacactccctgcctcgacctctctcatcttcccggagggacatacagtccgccgcagctgaagccgctctccactctccgcctcccaaagaagaacaagaatctattttcacttccaccaccacctcgtcctttcacgatgtcatggaagctcctcttatgagtccccttagggtggactccactttcggagatttctcatgggaccaactcttcgatttcaacgatgacattctcatcgtgggatcaacttctgccactcttgtcccttaacgctgcttttgcaattcgccacccactgcttctagaaactagctggattttctttcactttctgttaataactcttctctgcttttctaagacttgcttctgaactcttgtacaaaggagctctccaagacaaatatatatatatatatatatatatatatatatatatatatatatatatatatatatatatgtttactgagagactgatttcactaagcaccttaattaaaaaaaaaaaaaaagggcggccgcc

SEQ ID NO: 373 - DNA, 1219 bp, Glycine max
ctagagtgagaaagaaaaatggagggaaaagaggaagatgtttccttgggaacctaccaattcttaaaaaagccacccgattggaactgcggttaaaagccaagacgatggaaaggactacccaaagccacccccggttccacttttcgagccctccgaactcacttcttggtccttataccgagccggaataaccgaatttgtagccacttttctctttctctacataaccatcttaaccgtcatgggtgtcaataggtccagctccacgtgtgctactgttggcattcaaggcattgcttgggccttcggtggcatgaactttgctctcgtttactgcactgctggcatctctgggggacaccataaaccccggctgtgacattcggattgttcttggcgaggaaattgtcgttgaccagggcgctgttctacatggtgatgcaggttctgggtgctatcgttggtgctggcgtggtgaaaggtttcgagggaaaaaccttctacggccaacacaacggtggtgccaactttgttgcccctggttacaccaaaggtgatggacttggtgctgagattgttggcactttcattcttgtctacaccgttttctctgccaccgatgccaagcgtagcgctagagactcacacgtccctattttggcacccttgccaattgggttcgctgtgttcttggtgcacttggccacaatcccaatcactggaactggtatcaaccctgcacgaagtctcggtgctgccatcatcttcaacaaagaccttggctgggatgatcactggatcttctgggttggacctttcgttggtgcagctcttgcggctctttaccaccaagttgtaatcagagccattcccttcaaatccagttaattaattggattacaacgattcgtggtcaatcaaagttgggtaaataaaaagacccaaaccaagcaagtttctggttttattttatgatatatcgtcatctgttttcttttctccttatttttctttctttttttattattaaaccttctattttgtatgtaaattatgtaatgtaatgtaatattatgagtatgattatggtggtgcgcgtgtgttgttgcctaaggggccaggtttcctctacttttaagttggaagatggccatgcgtgtgatgtaattgtgatcaatctatcccataaaaaagaacgtcctctttttttgggcat

SEQ ID NO: 374 - DNA, 1076 bp, Glycine max
gaaaccacaagtaaaagaaagaagctttcttgagttgagttaacagcatggagagggaggaagatgttaaggttggagcacagaaattctcagagaggcaagcattggggacaggagctcagggtgacaaggactacaaggaggcaccaccagcacccttgtttgagccaggggagttaaagtcatggtctttttacagagctgggattgcagagtttgtggccacattcttgttcctctacatcactgtcttgactgtcatgggtgtcaacagggcacccaacaagtgctcctctgttggcattcaaggaattgcatgggctttcggtggcatgatctttgccctcgtcgactgcactgctggaatatcaggtgggcacataaatccggcagtgacgttcggtttgtttctggctaagaagctgtccctgacgagagcggtgttctacattgtgatgcaatgtcttggagctatctgtggtgctggtgtggtcaaggggtttgaggggaatgccaggtatgagttattcaaaggtggcgccaattttgtgagtcatggatacaccaagggtgatggccttgccgccgatattgtgggcactattattcttgtttacaccgtcttctccgccactgatgccaagagaaacgctagagactctcacgtcccgattttggctcctcttccaatcgggtttgctgtgtttttggtccacttggcaaccattccaatcacaggaactggcattaacccagctaggagtcttggtgctgctataatatacaacagagaccatgcttgggatgaccattggattttttgggttggccctttcattgaagctgcccttgcagctttatatccccaaatagtgatccgagcaattccattcaaaacaaggggttaatcaatacttcacccatctgtgtgtttgaattatctacctagtgggggtctttttgtatgtttgcccaattaatatggaaatatctatttgtttaaaatccatcatgtgtgtacaattatgaccttaattactacctacttgttctgtgaactcgatagattgtggtta

SEQ ID NO: 375 - DNA, 978 bp, Glycine max
catcaatacaagtcatgatatcactgcagatattggacaactcagactccaccttctgcctatactcttttatcctcttcacactcacatcgttccctttagcttcttctttctgttcaattgacgatagaatcctcctcttttttaaagtaagaattacatacgattacttcaatgatcaattacggactcacaatcaatttattacataaaaccaaagttgaaaaccattacacacatacatatattcttttagtaaacacatgcatcaggtactttgttacactcttcccaagtcaagcatgtcgtagactatagtacaaaatatttaaacagttgcaattggaccaaaatttgatgctttaaaggcttcaaatcttggctccttggcctggaacttcaacttagcatatagcttcatgtagtcttcaaacacaaattttgggtagagctggtttttctcttctgcctctttctccaacaattctggagcagggtagatgacagcatcactgccagggttatagaatgaggcaatggacattctggtcccatctgtttgtgctatcacacggtgctccacactcttgtacttaccattggtgataacgctcaagctgatcagcaatgttatcagcaatccagtggtgcatagaaggcacgtcagtctgtctggccatctctgagaagctgcagtccactgaccttgtcatcctggaagagaaggataattccaccggcatcagtgtggggacgaagacccttcaccagctctgggttggggcatggagggtagttggcaaccttggtgccaaaagttggtcctcttgaccatagaaagccttcttgaggtaccctttctctaggccaagattctcacacaacaagtccagcagctgctctgctagtttctctaacctcaaagcaaaatccttcatcaccttcctgtactcatcaatgagatcagggatctctgag

SEQ ID NO: 376 - DNA, 1200 bp, Glycine max
attgtgttgcagttttgagtttcctctttccactgtatatataataagaccattctctcagcctagctaataagatttgtgagagaaagggagaaagggtgtgagaatggagagcaaagaggaagatgtaaggggttgaaccactaaattcctcagaaaggcaaccaattggtacagcagctcagggtggtggtgacaaggactacaaagaaccactgcacagcacctttgtttgaacctggttgagcccaaatcaaggtccttccaacaagctggaattgctgagtttgtggcaacgttcttgttcctctacattaccatcttaagctgtcatgggtgtcaacacgtcacccttccaagtgtgcctctgtgggcattcaagagcattgcttgggcctttggtggcatgatctttgcccttgtctactgcactgctggaatttcagggggacccatcaacccagctgtgaccttttgtcttctttttggcaaggaagctgtccctcacaagggcgctgttctacattatcatgcaggtgcttggagccatctgtggggctggtgtggtgaagggatttgagggcaatgctaggtatgagatgttcaaaggtggagccaattttgtgaattctggatacaccaagggtgatggacttggagctgagattgttggcacttttgttcttgtctacaccgttttctctgccactgatgccaagagaaacgctagagactcacacgttcctattttggctccacttcccatcggatttgctgtgttcttggtccacttggctaccattcccatcacaggaactggcattaacccagctaggagtctcggagctgccatcatctacaacagagaccatgcatgggatgaccaatggattttctgggttggacctttcattggagctgcccttgctgctgtgtatcaccagatagtcatccgagccatccctttcaagacaaggggcttaggctccttgtttttgtatgtgcttgcttgtattagttgtaatttatgtatctggagtccttcttcattttgaaaattcatgtcaatctttttgccttttgtgttaatccattgtatggatgtaaattatgacatgattacttccttgattgtatttgtggcactctgaatggatttcttcttttattttattttttttataatggatttcttctttt

SEQ ID NO: 377 - DNA, 790 bp, Glycine max
agaaacaatgattcgcataatttgaaataaatattatctatgtaaactgataaaagaatgcaaggtagcatcctcttagaaagaaagtttaattgaagaaattcactaaattacagtcaaacaccatgcaaatctcaactccagtctccatccagtaacagaaagcacacgcatagaataaaaggcgcacaaagccctatggtgattgtgctagagaccaattccatgttctattacaacatcctaatggtcaactatcaagagagagactagccttttcgtatgcactccacaaaatccttggccaatacctgcttcactatgcattgtcacctccagcagctctggcagaatccaccttttgttcctcagctccttcttcagggatgtcagaagtccacagggtgagattgtccctcagaagctgcataattagggtgctgtctttgtaagactcctcgctcagagtatccaactcagagattgcttcatcaaatgcctgcttagcaaggtgacaggccctttcaggagagttcaaaatttcataataaaagacagagaagttcaaagccaggcccaaacggatgggatgtgtggatgctaactcagcctcggcagtagtggaagccaactgatacgctttcatggaatgatcagcagcctcttttctctcatcaccggacttgaactctgcgaggtaccggtaatagtcccccttcattttgtagaaaacccacactaggttcaccagatgcgctagagggaataaggtattcatcaaaaacagtca

SEQ ID NO: 378 - DNA, 1569 bp, Glycine max
ttcacgcgtccgcccacgcgtccgcccacgcgtccgctcactcactcactcactcactcactcactcactcgcaagcaccaaagaaacaatcccagcgcgaggagaaagatggagcgggaaggagacacgatgtgtcgtatgggagcgaacagagttccccgagaggacagccaattgggacggcggcggcagagccaaaaacgacggcaagggactacccaggacgccggcgccggcgcgttactgcgttgacaccgacggagtttaacgtcatggtcgtttttacaagagcagggatgagcagagtttgttggccacttttcctgtttctcatacatcactagtcttaaccgtcatgggagtcgccggggcttaattttaagtgcagtaccgttggggattcaaggaaatcgcttgggcccttcggtggcatgatcttcgccctacgtttactgcaccgctggcatctcagcggggacacatggacccggcggtgacatttgggctgttttaggcgaggaagttgtcgttgcccaaggcgattttctaaatataaaatgcaatgcttacggtgctatttgtggcgctggcgtggtgaagggtttcgaggggaaaacaaaatacggtacgttgaatggctggtgccaacttgtgttgcccctggttacaccaagggtgatggtcttggtgctgagattgttggcactttcatccttgtttacaccgttttctccgccaccgatgccaaacgtagcgccagagactcccacgtccccattttggcacccttgccaattgggttcgctgtgttcttggttcacttggcaaccatcccccatcaccggaactggtatcaacccttgctcgtagtcttggtgctgctatcatcttacaacaaggacccttggttgggatgaacactggatcttctgggtgggaccattcatcggtgcacctccttgcagcactctaccaccaggtcgtaatcagggccattcccttcaagtccaagtgattcaatcaaacggttcatgcttaatcaagttgggaacaacaacaacaacaaaaatcaagccaatgtttgtacggttttggattcatttcatcacgaatgatctgtcctatcttttttatttttaattttaatttaaagtctttgtattttgtatgtacaagatgtaaaattatgattcttaggtggggcatgtgttgcgtcatgggcccaatgttatcctcttgcttttaagttggaaaaggcccaactcatgtgtaatgtacggctgtgattgtgtaatttaattctgcaaaatcccaaataaccccagagtcatatatatgcatctctttattttctctggccccccccatgttttttatgtaaaatttgtggccctcttcccccaagtatatgacaaggttgggtttctttttatccacgcctgtgcccgttatcccttgctatggataattgaaatccggtgaaagtaaaaaatggggttggcttggtgggtgggtgggtgaataaaaaatgtctcttgcttaaaatgggacccctttttttcccccat

SEQ ID NO: 379 - DNA, 1039 bp, Glycine max
aagaaatcttcaaagtttctaccggtcattggttggtcaatgtggttttctgaatatcttttcctggagagaagttgggccaaggatgaacgcacattaaagtcgggcctacagcaactgagggatttccctcttcccttttggttggctctctttgtagaaggaactcgctttacccaggccaaactattagctgctcaggagtatgcagcctccgctggattgcctgttccaagaaatgttttgattccaagaactaagggttttgtttctgcagtaagtcatatgcgctcatttgttcctgccatttatgatgtaacagtagccatccctaagagttcccctgctcctacaatgctaagactcttcaagggacaaccttcagtggtgcatgttcatatcaagaggcatttgatgaaggaactgccagatacagatgaggctgttgctcaatggtgtcgagatatatttgtggccaaggatgctttgttagacaaacatatggctgagggtacttttagtgatcaagagctgcaggatactggtcgaccaataaagtctcttctggtagttatatcttgggcgtgtctggttgttgcggggtctgtaaagttcctgcaatggtcttcgttactctcttcctggaagggtgttgcattttcagcttttggtttggcagttgttactgcacttatgcaaattctgattcaattctcacagtcagagcgttcaaacccggccaagatcgtgcctgcaaagtcaaaaaacaaggggtcttgatttatttggcgaacttaaagttgcatttatgtgtgatgagtgactcatgtaatactcattattttgctttcaacatcttatcatagtatgcttctattctatatatgtactattatgaatgcttatcgattcattgtttttaatttaattaggatatccttttgtattgacagtctaggggatggcctagaaaaattcaaccacctattttattttaaaaaaaaaaaaaaaaaaaaaaaaaaaaaaaagggcggccgcc

SEQ ID NO: 380 - DNA, 531 bp, Glycine max
cttgggtttgtctggttgttgcggggtctgtaaagttcctacaacggtcttcgctactctcttcctggaagggtgttgcattttcagcttttggtttggcagttgttactgcacttatgcaaattctgattcaattctcacagtcagagcgttcaaaccctgccaagatcgcccgggcaaagtcaaaaaacaaggggggacaactagaggctaggaatgacaaacaacagtagattactcacttgattcccagaccccaaaagttttctatacaaagatagggtcttcatctacgatcatattttggcgaacttaaagttgcatttatgtgtgatgagtgactcatgtaatgctcattattttgctttcaaaatcttatcatggtatgtttctattctatatatgtagtattgtgaatgcttatcgattcattgtttttaaattaattaggatatcttttgtatcgacaatctcggatggcctagaaaaattcaaccgcctcttttattttaaaaaaaaaaaaaaaaaaaa

SEQ ID NO: 381 - DNA, 749 bp, Glycine max
tttttttttttttttttgaagccttttgaaaataatcgaattgatttgccacgcccacaagccatactcttttttgttatctcttagccaaactcgtaaacataaaattctgaaattacagcagatattaagatctgtaacacggacacaagccaagcaattatcattaacaaagaaactgactttatctttatggaaaatatcagagcaacaagtcaacacgaaaattaaaatctggaaaatgtaaagaaagaaagctctgaagtcatttgcgcttatgtacacagctatagctggtggggaatgggccggcttgcgtctacctgggctggtgaatagcccgtgggctcaccttgggcttcacaaacttgggggccttttccacatacctcggcgcctgggcccatcctcctccacagcttcgccatttcagcagccccaacgacaccacctccttcccttcctttcgttccctttcatcttcatcttggagatctaggtcaaagtcgaagtcgaaagcgtcgtcgttttggaactggggatcttggaagcactcgcggagccagtagtcgcggaaccagggggaggagtgaacgaggtcccaccactggtcggagaaatcctccaccgtccgataggcgagtggcacgaacatcggagcgttgggattcaagctagaagcagaaatgacttccattgaaagaaacaggataaggatatgagtgttgaataaggtttgtgcttctccc

SEQ ID NO: 382 - DNA, 746 bp, Glycine max
tttttttttttttttttttgaagccttgaaaataatcgaattaatttgccacgcccataaatcatactacgattatgttatatcggtattaaaatttggcgaaataaaatttagaacttacagcgtcgcaaatatcatcatcaaagaaacttgagtttatctttatggaacatcagagtaacaagaagatcaacacgaaaattaaaatctggaaaatgtaaagaaagctctaaagacgaagtcattgcgcttgacacttttttttttttatgtacatagctggtggtgctgggggaatgggccgggtggcgtctacctgggctggtgaatagcccgtgggctcaccttgggcttcacaaacttaggggccttttccacatacctcggcgcttcggcccatcctcctccacagcttcgccatttcagcacccccaacgacaccacctctttcccttccttcccttcattttcatctttatcttggagatctaggtcaaagtcgaagtcgaaagcgtcgtcgttttggtactggggatcttggaagcactcgcggagccagtagtcgcggaaccagggggaggagtggacgaggtcccaccactggtcggagaaatcctccaccgtccgataggcgagtggctcgaacatcggagcgttgggattcaagatagacgcagacatgacttccattgaaagcggacgagtgggcggacgcgtgggcggacgcgtgggcgcacgcgtgggtc

SEQ ID NO: 383 - DNA, 552 bp, Glycine max
gacgaagtcattgcgcttgacacttttttttttttatgtacatagctggtggtggtgggggaatgggccgggtggcgtctacctgggctggtgaatagcccgtgggctcaccttgggcttcacaaacttaggggccttttccacatacctcggcgcttcggcccatcctcctccacagcttcgccatttgagcacccccaacgacaccacctctttcccttccttcccttcattttcatctttatcttctgcatccatccgaataaaataaattaataagaaaagcatttgaatatgagagaaataaatggagataagcaagtaagtgagttacggagatctaggtcaaagtcgaagtcgaaaacgtcgtcgtattggtactggggatcttggaagcactcgcggagccagtagtcgcggaaccagggggaggagtggacgaggtcccaccattggtcggagaaatcctccaccgtccgataggcgagaggcacgaacatcggagcgttgggattcaagctcgaagcggaaatcacttccattgaagcaaac

SEQ ID NO: 384 - DNA, 395 bp, Glycine max
ccatttcagcagccccaacgacaccacctccttcccttcctttcgttccctttcatcttcatcttctgcatccatccaaataaaataaattaattaaccaaaaaaaagaagacataaagtagtaaatggagagaagttaagtaagtgagttacggagatctaggtcaaagtcgaagtcgaaagcgtcgtcgttttggaactggggatcttggaagcactcgcggagccagtagtcgcggaaccagggggaggagtgaacgaggtcccaccactggtcggagaaatcctccaccgtccgataggcgagtggcacgaacatcggagcgttgggattcaagctagaagcacaaatgacttccattgaaagaaacaggataaggatatgagtgttgaat

SEQ ID NO: 385 - DNA, 548 bp, Glycine max
ctattataaaagaaaaaaaaacatctttcctagtactattaaataggatgttccatttattatataagttgttcatatgaattaaataaggccattcattttcatatgcaactagaagggagaaaaaacgaaattgacatggcttgtcacacacatgttgaaatcaaatgagaatcgttgttctactcccacaaagatggaaggaaagtaatttcaggtaattctcatgctgggttgaaatccattcaccgttaatcctccatcaacacaaataacctgtccagtgatgtaagaagcagcaggcaagcaaaggaaagtcaccaacgatgacacttcttcgggttctgctatacgtttaatcggagttcgagacataatatcatccacaaacttttggtctctcaacaaatgttctacaagtggggttctggttgcccatggtacaacacagttgctccttatgttgtctttggcccattcacaagccaggttttttgtaagctgattaattgcagctttacttgctgcataaacctcgagccgaattc

SEQ ID NO: 386 - DNA, 600 bp, Glycine max
gcgagtggtatttttgtgatagttagtatgagtgatgtttttaattgaaacagtgtaatgttcaatgagagagagactagtctcgagtttttttttttttttttttttgcatgattcaaattttcattcaatcgctaatctcaaaatttgaaagaaagcgttatttggcaaaacctgaaaacagtgcataggagaaaaaacaaaagttccctcctaaacttatagcaagcaaatccaacggaaaatttaaacattaggggaagaaaacgaaatcatgctagcacttttgcattttgccaaaagattctatgacccccctttgatcagtttcagtgcagcctcctctttgggaagggccggaattgctcccttttgggtagttgtaatagctccacatgcatttgcaaactttagtacttctcttaaccttggttcatcttcaagtatggactgatcatcgacaatcttggccaataaagcaccaacaaaggaatcaccggcaccagttgtatcaactgtattgacatggaaagcatctaccgatcctttgaaactcttggtgtagtatctggaaccatctcgagccgaatcggctcgaga

SEQ ID NO: 387 - DNA, 1559 bp, Glycine max
tttccatccaatattattgggttacatataaaatctcattcaaaatgtgaaatgaaacggttgaagagaatgcagccatcagataaagtccatcacattgctaatggttcgatatttacaacttaagaaatatggtcactttctttagttgttgaaactaagcataagtaattcaaatataagtattgaacaagtcgcccaactgccaagatacagatatcatacaatatccagagaaattttccatatggccttgatgtgagatagctttttgacctttatgccaggcgtcaacttaaatttaacccgcgagcatcctttgaaggcattggatttggagctgaataagtggccttatgctgtgtgattacctaaatcctgaaggagccgcttgaggattgccaccaccttgtctcctcatagctcttgattgagcaagcatttcatcataattcctcttctcaaatgcaacatcccttgaactggaatcaattattttgtcagcaattccatagtctatagcatcctgtgcttgaagatacttaggcctctggacatctttagcaatttcttcctttgatttccctgtcccttttgccaacagctcaatgtaatactcagtatttgcctctagctcttttgccttaatccacatgtctataacagcaccacttgatctattgacttttgggagatataattttgtagatgaatttggctgtacagcacgataaccctttgttccaagcgacagaagcattgctgcttgaccaaatgccatgccacaattcacagtataaacatctgctttgacataagacatcatatcagctatggaatatgcctcagtttctgatcccacggtctcattcttctcattcagagttccagatgaattaatatacaggtaaataggtttgctagggttatcataatccaaccacataaattgagcaacaataagttctgtcacagctggtacgaatcggcatacccagatagcatattcgagcatccaagagcaaagaaggcagatctggtggagcagtttttggccttccagttcccctacctcctcgatacatactaacactcatgctgtattttgaagcatcactttttcccatgccagatagactccacattccaccattatccatataattcttggcagacgagatgctttcctctgtaactctttcagattgctgacggataggattatcttctgtcatgaacatgtccatttgtgaaggagaaaggccatatagagattgaggtgcattcttgtagttttccatcaatccatctttgagattttcctttctgaactgtttggggatgtggtcgagggagcacttggcagaggaagagttgaagcggcgtggtgccactcttcgagaaaagggaaagagctttgttccatggaggaaggaagaatcgtggagggagggcgcagagagtgataaggagagaaaagaggacatgggtgcacgcaattggaaaccaagttgcaaaatttgatgtgaatggttcggacgcgtgggcggacgagagag

SEQ ID NO: 388 - DNA, 917 bp, Glycine max
gaattcggctcgagtcttcacataccaacatttaaaaagggttgctgaaattgctaggaaacttggaatctttgtcatttctgatgaagtttatgcccatgtaacttatggaagcaatccatttgttcccatgggggtgttttcttcaatagttccggtcattacaattggatctttatcaaagagatggttagttcctggttggagaactggttggatagccacatgtgaccctcatggaatttttcagaaaactggggttgtgaaaagtatcatcagttatttggagatcacaactgaccctccaaccttcttgcaggcagcaatacctgaaatccttggcaaaacaaaagatgatttcctttcaaaaaatcttaatatactgagggagactgcaaacatattctatgatttatgtaaggagatcccttgcttaacatgccctcacaaaccagaaggagcaatgtgtgtcatggtggagattaacttctcacaaattaaggacattgttgatgatatggatttctgtgccaagctagctgaagaggaatctgtccttcttcttccaggtgtcacggttggactgaagaattggcttcgaattagttttgctgtcgacacttctaatcttgtagaaggccttagcaggataaaagcattttgccttcgatatgcaaagatgccatgaagtcatgtcacatggtagggtgtggaagatgttgatttcttagggatatcttatcaaagaccatttatttagcaaaatttataatgtatggagatatttcttcttctcacacggtagggtgagggaggtgttgatttagaggcatgttatatcttcttttaggcattttatatcttaacaagaccatttattgacagttaaaaaaaaaaaaaaaaaagggcggccgccg

SEQ ID NO: 389 - DNA, 750 bp, Glycine max
acacgccaaatagcagttgcattactcaagtttcaagaaaacttggtacattaaccaacttagtgggaaaaaaaaagtgactagcccttaattcattcatataaaaattttcaagccccgccagaaaatttctacttgatatatatatatatatatatatatatatatacatatatcctattttatacaccttgttatcaaaacatgggtttttaatttaagaactcatcatcataataaagtattgtgtgataaattgatggacaccctcttgatttcacagggaaaaactactacatccaaatttttaaaattaattaactctctctctctctctctccctttgatttgattcaattgaaatgctgctgctccaaccaaggccaaaacccagattgatcatccatgccacaaaacatgttgcttaggctttcttctttgaccatttggtcaatcttttggcatgatgcaagttctggtcttgaagaagtttggaaaagctgagcaactcctgcaggcctaacagaagaaggaggaaagaagggtctgcttggctgttgctgatgtgtagaatgaggactgtcaatagctggtgtccttgagatatccaacttgatgtctgagctgttctcacttctattgctgcaggatccttctgtttctttgttaaggtttatggattctgttggctctctacttttcagtgccaatatctcagcctgaagtttttggttctctcgagccgaattc

SEQ ID NO: 390 - DNA, 594 bp, Glycine max
aaattataactcattaaatatggaaatcatctagaggtgtctgtgtcaattgattaccatatttaatgagttataatttaaatatggtaatcaattgacacagacaccctctagatgatttcattttcattcggaaaaggaaaaattacattgcaatatgaaactctctcactcactctcacactctccttttgcatgatgatcaattgaaatgttgctgctccaaccaaggccaaaggccagattgatcatcaatggcacagaacatgttgcttaggctctcttctttgaccatgtgatcaatcttttggcactgaatctctggccttggagtggtttggaaaagctgagccactcctgttggtctagcagaagatggaaagagtgttctgttgctgttgttctgctgagtggatagaggactatcaatagctggtgttcttgagatatccaacttaatctctgagctgttctcacttctattgctgctggatccctcagtttctttgttgaggttgatggattcagttggttctctgcttttcagtgccaatatctcagtctgaagtttttggttctgaaattgaagtgcat

SEQ ID NO: 391 - DNA, 864 bp, Glycine max
gcggccgccctttttttttttttttcaatgaacacacgcctaatccaggaacattatcaatttatcatcactcaatacataccaactttccatcccgtgttgttcaaattaagcaacagcacagatagatatatatgagtatcatatcattgttgagcattagttaaggcgaatctcatccaagctacttttatcttgtaatcgtgacttctgctgaatttggaagtaatctcggtatttaatgcttctgaacaatggcttataattctgcagtagctccggcaaaggtccaatttccttatctagcgcaggtccattcgccagcacaacactgatcctagtgtctgcattgttgagtattgctcggtgcatcaccctagcgtacttcccattactcacaacctcgagttgatctgaaagcaaaacaattaggcagttgggaaggggattgacattgacccatttgccattgtgcttaacctgaagccctccaattccattctgcgtgagcaaggtcaataaacctacgtcagaatgagaaggcagccccagagcaaggtgcggttgtggacatggtggatacaggttcacaacaaacagctgatggccagagtcaaaatcagtggactcgattatggaattggattctaatcccaaactctctgatattccttcaagcaacttccttgtcacacctctgatttttttgctgtaatcataagcaacttccctgtaacctggtggcttgtaggggaagttgaattcaggaaacgtgatggccttgagataatctctccaataatgaacattctctgcttctggacagaagctggtgccatgcctgatcggttcaaagggtccttt

SEQ ID NO: 392 - DNA, 1195 bp, Glycine max
ggatcacagtgccgatgctcaacgcacggacttgatgaccatcacccgcttcgtgctgaaccaacaatccaaccaccctgagtctcgtggcgatttctcaatcttgctcagtcacattgttctcggttgcaagttcctctgctctgctgttaacaaggcgggtcttgctaagcttattggacttgcaggagagacaaatgttcagggcgaagagcaaaagaaactggatgtcctttccaatgatgtctttatcaaggctttggtcagcagtggacgaacatgcatcttggtgtctgaagaagatgaggaagcaacatttgtggaaccttctaagcgtggaaaatactgtgttgtttttgacccgctggatggttcctctaacattgattgtggtgtttcaattggcacaatctttgggatttatttgataaaagaagaccatgaaccaaccgtagaagatgttttgcaacctgggaagaacatgttggcagctggttattgcatgtatggaagctcttgcacgcttgtgttaagcactggaagtggtgttaatggtttcacccttgatccatctcttggggagttcattctaactcaccctgacatcaagatcccaaagaaaggcaagatctattcagtgaatgaaggaaatgctaaaaactgggatggccctactaccacgtatgtggagaaatgcaagtttccaaaagatggttcatcaccaaagtccctaagatatattggaagcatggtagctgatgttcaccgcacgttgctttatggaggcatctttttgtaccctgctgataaaaagagtccaaatggaaaacttcgtgtactctatgaagtcttcccaatgtcattcttgatggaacaagcaggaggacaggctttcaccggcaaccaaagggcacttgatttggttccaaagaagttgcacgagcgatctcccatattccttggtagctatgaagatgtagaggaaatcaaggctctttactctgctgatgaaaaataggaatgaagctggaagaaagctatctttgtctttcgctactcacaagcaattgttatctaattgttacacatgtcatgtatatgttaagaaaagttattaatgttttgtgatttagaaaaattattttattccttatatctaaatattttaaaatttaataataattataatttatgc

SEQ ID NO: 393 - DNA, 643 bp, Glycine max
tcgaggaaatgccaaaacctgggatcgccctactgctacttacgttgaaaaatgcaagtttcctgaagatggttcatcaccaaagtctctaagatatattggaagcatggtagctgatgttcatcgtacgttgctttatggaggcatctttttgtaccctgctgacaaaaaaagtccaaatggaaaacttcgtgtcctgtatgaagtcttcccaatgtcattcttgatggaacaggcaggaggacagtctttcacgggcaaggaacgggcacttgatttagttccaacgaagttgcacgagcgatctcccatattccttggtagctatgatgatgttgaggaaatcaaagctctttatgctgctgctgagggtgaacaagaatgaaattggaaaggtttcttgtatctttcgctacttacaagcgcttgttttctaattgttactagcaggtgcttataagaaaactagttatctggtcatgtatatgttaataaaattggttgatgtgcctgtcagggctatagaatttatttagataaaatacttagattaaagtatcattttgttgctgaagaagtataactgcttactttccctcaagatgcatttcaaagttaaatccgcagacctgttagttcctat

SEQ ID NO: 394 - DNA, 521 bp, Glycine max
ggaacaggcaggaggacagtccctctcgcgcaaggttcggggtttatgcgttgaaagatgtccatgaaccaaccatagaagatgtcctgcttcctgggaagaacatggtggcagctggttactgtatgtatggaagctcttgcacgcttgtgttaagcactggagcaggtgttaatggtttcacccttgacccatctcttggtgagttcatcctaactcaccctaacattaagatcccaaagaaaggtaaaatttattcagtgaatgaaggaaatgccaaaaactgggatcgtcctactgctacttacgttgaaaaatgcaagtttcctgaagatggttcatcaccaaagtctctaagatatattggaaggtaatgcaaacaactatgtgaaatagtggccagaccattgagttacgtttaaaaacaggagcaaaaagttacatttaaaaacaggtgcaaagagttacatttaaaaaaaaaaatagtaaataaataaaaagaagtcacctgaagactcttc

SEQ ID NO: 395 - DNA, 463 bp, Glycine max
ctcttggggagttcattctaactcaccctgacatcaagatcccaaagaaaggcaagatctattcagtgaatgaaggaaatgctaaaaactgggatggccctactaccatgtatgtataaatccaatagtgttaaaatgtttcaggcattataatgcagtttgtgacactatgatttcctttccttctttctgttcaggtatgtggaaaactgcaagtatccaaaagatggttcatcaccaaagtccctaagatatattggaagcatggttgctgatgttcaccgcacattgctttatggaggtatctttctgtacccggctgataaaaagagtccaaatgggaaacttcgtgtactctatgaagtcttcccaatgtcattcttgatggaacaagcaggaggacaggctttcaccggcaaccaaagggcacttgatttggttccaaagaagttgcacgagcgat

SEQ ID NO: 396 - DNA, 791 bp, Glycine max
gaattcggctcgaggctcctaccagaagaccaatctcatcttaccacaagatttgctgggacattgggatacacagcacctgagtatgcactccatggtcaattatcagaaaaggctgatatatacagctatggaattgtagtccttgagattataagtggtcaaaagagtattgattccaaggtcattgttgttgatgatggtgaggatgaataccttcttcgacaagcttggaagttatatgtgagaggcatgcacttggagttagtggacaaaagcttagaccctaatagttatgatgcagaagaagtgaagaaaatcataggcattgctttgatgtgcactcaatcatcagctgcaatgaggccatccatgtctgaagtagtagtcctactcagtggcaatcacttacttgagcatatgagaccttctatgcctctctttattcagttgacgaatttaaggccccacagagatatctctgcttcaactggttcctctacgactaatgctactatctcaaattctatagtacccacccaatgattaagtatatgatttaaaagaaaatttttatccagttcattattaaagatgggtataattatttgtaaatcttacttatttttaagagaaaaattacattaatatttttaaagttttgtttattagtgcagatatggagtacttgagtaagagggaaatgaggaggaaattgagcactacaaaaggcttattattcagcaataatgaaacatatttatgaaaaaaaaaaaaaaaagggcggccgc

SEQ ID NO: 397 - DNA, 697 bp, Glycine max
gttgtatgagagaggcatgcacttggagttggtggacgaaaccttgaatgataactatgatgcagaagaagtgaagaaaatcatagaaattgctttgttgtgtactcaagcatcggctgcgatgagaccagctatgtctgaagtagtagtgctactcagtagcaatgcacttgagcatatgagaccttcaatgcctatctttattgagtctaaattaaagccccacagagatatttttgcctcaactagttcctctacatctaatgctactgcctccagttctatagtacctgctcgatgattaattatgtatatgatgcacatgttagaggggcagaatgatgttgtagagcatacagatgcatgataagtaattaaagtttgttgtgatgattaattggtagttgtaattagttattcctggtagcactctttggtagtgttggatgtttgtataaatgccatacatagatttgttgcactgaatcaataattgatttcattcggtctttctgttctctcagttttcttttatagtattagagctctcaattcagagctcagccagggtttgttttccatggtgagaaaccacaattcttcttcctgtcatttgcataaccaaaatcagaatggttcaaaatggatctgttcttaatcctttgcaaaaagaagttcctttggaaagtggcatcaa

SEQ ID NO: 398 - DNA, 1172 bp, Glycine max
gcactttgttctatggagaacaaggttagagaacatgctcgaaaacttttggagaaacacttgaagaagcctttctttaatgaacgaattcggctcgaggttgaacggatgagtgtggaggaatttgaacagggcaagctctggttaagtgatactttctctctcataaggtgtgaagataactcccttccaaatataagttgggttcttgatcttgcaaaagctgctgtattaaggcatggggtgcgtggacttgtaattgatccttacaatgagctggatcatcaacgacccccaaaccagactgaaacagaatatgtgagccagatgcttaccttaatcaagcgttttgcccaacatcatggatgccatgtttggtttgtggcacatcctaggcagctgcataattgggttggggatcctcccaatctctatgatataagtggaagtgcacacttcataaataagtgtgacaatggaattgttattcaccgtaatcgggatcctgaatctgggcctattgatcaagtacaggtttgtgttcgaaaggtacggaataaggttgcagggacaataggtgaagccatgttgttgtataatagggttactggtgagtacacgccatctgataacaacagaccagctgatagaaagagatagcaatgagacaagtaatattttggtaggctgttatagtggtcactgatcagcaagaatgttgtataatcaagtaacatcggatactcggatcggatcgtgtctaaacatggctacgattttttcacttggggtgccaggtcgggatcaacaacaatgctggataacatcttaacatcggttgtgaaaattggctgtatcatatcattatttgacttggttatttgaagatcttgtttcctatatgcatccttttatacgtgttaggattacatcttaattttattttgaagtactgcattttaatccttgtataggtatagaaagatttctttgttgcaatcccttggatctcaattggacgagagctataattgcctttttagaggctgtttataattctgcaagtcctattttagtccatgcagttcttgactttagaaaacactcattttaatgattttataaaattgttatttgctttggtcaaaaaaaaaaaaaaagggcggccgccg

SEQ ID NO: 399 - DNA, 579 bp, Glycine max
gaattcggctcgaggttaagcacagcccgattccttagcttcgattcatcccatccaactatagttgctggaaccattgggtacatagccccagagcttgcatatagtatggttgtgagtgaaaggtgtgatgtgtacagctttggagtggtggcactcgaaactttggtgggatcgcatcctaaggaaatactctcatcacttcaatcagcatctactgagaatggcatcacattatgtgaaatattggaccaacgcctcccacagccaacaatgtcagttttaatggaaatagtatgtgttgccatagttgcatttgcgtgcttaaatgccaatccttgctctcgcccaacaatgaaatcggtctctcaatgttttcttactcagcttacaccattaaacattcctttgcgtgagatttcattgcagcagctcatgagtcaagaactcaggcattatttaaatttgtgaactcctgaaagtgaaacttctagttgaaattagatgatgtcggcattcaataaagcttttctagttgtttaaaaaaaaaaaaaaaaaaaaaaaaaaaaagggcggccg

SEQ ID NO: 400 - DNA, 536 bp, Glycine max
gttcatttctctttttacctgtgttctcttgttcgtgatttgatgcagagaatgactaaacaatacatttaataacaggcaaatggacttgtttcttacactgagtttataaaaattgtagattataatgttgttacttttcaactactttccttctctttgaatctgttcctgttaatgctataaatgtagagcttgcatatagggtgggtgtgagtgaaaggtgtgatgtgtacacctttggagtggtggcactcgaaactttggtgggatcgcatcctaaggaaatactctcatcacttcaatcagcatctactgagaatggcatcacattatgtgaaatattggaccaacgcctcccacagccaacaatgtcagttttaatggaaaatagttagtgttgccatagttgcatttgcgtgcttaaatgccaatccttgctctcgcccaacaatgaaatcggtctctcaatgttttcttactcagcttatgttggaagaagaagaagattttatttcatttgccacaccaaatac

SEQ ID NO: 401 - DNA, 1169 bp, Glycine max
cggcggccgccctttttttttttttttttgaacgaaaggaaaatttatatttgaccaaaataaaaagaaaggaagatttattgcaacaaaagaaaaagagaatgcgacactaaggcacactttaacatgtaacagaaacaagcttcaaacgaaaggcgatcctacgttcctcaacataacaccattacatgtaagaaaaagcacgtccaaaacacattactacaatgaaacaatagtatgttaaataccatacaccataataaactagctaaaagtttataccattcaacaaaggatgtattagatgagaatcgtcagcatcaaatatgcattttgcctgacggaagcacaagtatcagaaaaatcctccacggaaaaatcaagccgcacgtttaagggtccacacacatcaacacaaacatttactcaatacacatgtcagtatctcctccgggggctcctggaacgccgttcacgaggtggtctagcattctttcttctgactgactcgttaataggtccactgctgaaggcccagtcaacataaatggtttgggtaagaagctcagatccattcaaattctctattgcatttcgagcttcctcagcacgctcatattcaatcaacgcataacctttgacaaaaccagtgcggcgatcaagattcaaatgcaggttcttaatctctccatattcaccaaaggtgttttgcaaatcgtcttcttgcgcttcctcgtgcacgccggtgaccagaatgatccatccttcaatggatctttgagggccagggccgccctcggtggtgagagagtcgaagtcggagccggagaggcgagtgtcacggttggcgtcggtgtcctgccggaatccgcgacccttggtctttttgggggcggcggcggcggtgatggcggatttgagcttaggttgaggcggagaagcgtcggcgtcgggggcgccgtcctcgtccatcaagtcatcgtcctcaggctcgaaatccaaggcttcaccgtcagctgcgcttccttgcatctctgcctctctctgcttctcaacacacgaaactaacacagggtcagggtataattgaatttcgatattagttcacgcttagtgtgtgaaagagaacgtgagagagaacccttttatgttgtgatttatcgcttgcg

SEQ ID NO: 402 - DNA, 506 bp, Glycine max
accagtgcggcgatcgagattcaaatgcggttcttaatctctccatattcaccaaaggcattttgcaaatcgtcctcttgcgcttcctcgtgcacgccggtgaccagaatgatccatccctcaatggatctctgagggccagggccgccctcggcggtgagagagtcgaagtcggtgccggagaggcgagtgttgcggttggcgtcagtgtcctggcggaatccgcggcccttggtcttcttcggggcggagagagaggaagtggcggcgggggtgatggcggatttgagcttaggttgaggtggagaagcgtcggcgtcggcgtcgggggcgccgtcctcgtccatcaagtcatcgtcctcaggctcgaaatccaaggcttctccgtcggccgcgcttccttgcatctctgcttctcaacacacaacaaacacaacactaacacagagtcagggtataattgaatttcgatattagtgtgtgaaagagaacccttttatcttgtc

SEQ ID NO: 403 - DNA, 968 bp, Glycine max
gcggccgcccttttttttttttttttaaaaaatgggagggattggaatcgtaaaattaaagaaaacaattgtggattgccacactaaaaagtggatatcatacacaaccagaatcggaatggctctacaattaaagctatataaaatcgaaagcctataactaaaagagggcagagtataagcccttattcattaatttaattctaaagatacacctctctatccacaaaatttattagttaacatcatcaagctaaagcctctgttttcaggtgctcccaccagtgtaaatgcaagcattgtaacttggattttgggatgagagtgttgctgattgagagaaatcacagttccattgatttttgccagaagtttggtagtatagattcatggaatatgcagcatgggatgctactgtgttaggctcaaaacaagcgcctcctggttgaattggcccgcaatctataccttggctacaggcgtagtcaatattggcctgcaactgagcatcagaaactccagctttgggtatacaccatccagcagttttaggtgctggagttgttggactagttgatggagtctgctggctagacttggttaatccaacgtcgtacgacacggtgcgatcagttttgaacataccaaatgcacgctcagatcctgggccttgtttgagatcctcatcatagagtgcaaaaatgtaagtgtccacagacttcccaggcatcaaaggtgtcccaaccaatgatctaagatgagaaatcaggttcccgttataggcctttgcattttcaacactgggtcccaattcgttgctgtcaccacgtgagggccatccagtctcagcaaccacaatctccacgtcctggaatcccatggcactcaaagcagaatgtacagcatcaacctgctcaaacattcacgacccaaaatacaaaagatttacgccactattaaaggcctgc

SEQ ID NO: 404 - DNA, 1288 bp, Glycine max
gtgcatcagaaactccagctttcgctacacaccatccagcagtgtttggtgctggagttaccggagttgttggagtctgtcatatgttaccaaaaacatcattataaaatctcacgaacctcttaagacagacgacatcaacacttttctcacctgctggctagacttggttaatccaacatcgtacaacacggtgcgatcagttttgaacataccaaatgcacgttcagatcctgggcctggttttagatcctcatcatagagtgcaaaaatgtaagtgtccacagacttcccaggcatcaaaggtgtcccaaccaatgatctaagatgagaaatcaggttcccgttataggcctttgcattttcaacactgggtcccaattcgttgctgtcaccacgtgagggccatccagtctcagcaaccacaatctccacgtcctggaatcccatggcactcaaagcagaatgtacagcatcaacctgagcatcgaacatgttggtgtaaagcttcccgttgcccgagtcgacccggcccgagttgggctggaagaggcaaaacgccagcgtttcaggatctcgggtcgctctggtaagcgaaaaacgggtacgggttgatcgtgaacggcgatttgttgtccttgagtagcgccagcagctgtttgagcgtgtcttgcagcgccgggttgaacaacccggacgagggcgggtccgactgagtcaacacggccatcgagtgcaccgtcgagaccctgatcttgccgccgagcgaggccgcgccgagggcattttggacatttcgcatcgccgggacgagctgcgactgtagaccctggtcggctaaggtcaaaatctcgtttccgacggtgatgagagtgatgttgctcgccgggtagtagggcaagacgttcgcgttaacccactgggtggccgcgttgggatcgccggcgagactcgcaatgtcgccgttggaggcgccgatgacgattccgatgccggagttggcgagggccttgatgatggcgggatcggcgccgtagagacggacttttccgatggtggtggatttgaggaggctggccgtgtcctccggcgccggaaggttgtcggcgacctggccgtagtttactccgatgaaagattgggactcagcgagggagagggcgatggccaatagaaaaagggagaggagaattgaagaattcgaaggtgtattagccattgcttttggtctctgccggaattaatcttcgagtgtagaatagatgattccttgaaaatactttgtaat

SEQ ID NO: 405 - DNA, 735 bp, Glycine max
gctcgagccgattcggctcgagcctagctagggtttctgagtttatgtggttgcgcctctgcctgtaagagtgaaaaaaccttctcttttccttctctcaagtctcaagagatttcatcatggctccaaagaaggacaaggctccaccaccttcctccaagcccgccaaatctggcggtggcaagcagaagaagaagaagtggagcaagggaaagcaaaaggagaaggtgaataacatggtgctgtttgatcagggcacctatgataagctcctttctgaagctcccaaattcaagctcatcactccttccattctttctgatcgtttgaggattaatggatcacttgcaaggaaggctataagagaattgatggctaggggttcaatcaggatggtgtctgcccatgcaagccagcaaatttacaccagggcaacaaacacctaggtgtggaactgatcttagcttacggagtattggtaggaatagtaatgaagtattgttcttttgcactttgggaagcatctcatatggttctatcagttctagattgtcgctgaatccgatgctcagattgtatttttggtttccttcaatgttttatcttcttcaatattctggcagttgtcttatacttgttttgtttacttgaattgttaatgtggcggagattctttttgaaagccaaacctaattggaaaaaattcgtgtggtgttttgttatttgtaaaaaaaa

SEQ ID NO: 406 - DNA, 642 bp, Glycine max
ttttaagcgaatcgtttggcctttttattcctcctactctcaaataccctaattaggtttgtgatagtgattgcctccctctgctgccgtccctaatctgaaggctcccgccatctgcgatcggatttcatggctccaaagaaggacaaggctcccccaccttcatccaagcctgccaagtctggcggtggcaagcagaagaagaagaagtggagcaagggtaagcaaaaggaaaaggtgaataacatggtgctcttcgatcagggtacctatgacaagctcctctctgaggcacccaaatacaagctcattactccttccattctctctgaccgtttgaggattaatggatcacttgcaaggaaggctattagggaattgatggctagaggttcaatcaggatggtgtctgcccatgcaagtcagcagatttacactagagctacaaacacctagatgtactggttataatttatgtagtattgatgcacctctgaagtgaaattttgttttttctgtttgagacgtacctcatgctagattgcatcagttcgacagttgctaaattcatggtttatttccttttgcatccttggtaatatatttgacacaaggctttcatatttgttgtttttggcgttg

SEQ ID NO: 407 - DNA, 2184 bp, Glycine max
gttttccacgcattttctgttctgttttgttctcattctgtgactctgtgcttagttaacgttaacagtgacttaagatggcggattctgcagatgtcacccacgatgttgtgtccctcctctcttctcctcaaagggactttcttcttcgaaacaacggcgatcaggttaaaattgacagcttgaagggtaagaaacttggtttgtatttttcggcatcctggtgtggtccatgtcaaacatttacgccaactttggtggatgtgtacaatgaggttgcaaaaaaaggtgacttccagatcgttttcattacggctgatgaagatgatgagtcctttaacggttacttttccaagatgccatggcttgcaatcccattttctgattcagacacacgcagccgccttgatgaattgtttcatgtgagggggattccccatcttgcattacttgatgaagctggcaatgttgtcactgaagatggagttgatgttatacgcgaatacggtgttgaaggatacccgtttacatcagcaaggatccaagagttgagagatcaagaagaggaagctaggaggaaccagtccgtgagatctctcttggtctctccatctcgggacttcgtaatatcatctgatggaaagaaaacacttgtctctgagcttgagggcaagacagttggtctgtatttctgcgtgaagtcattcggatcatgcagtgactttaccccaaagcttgtggaggtttatgagaagctgaaggcccagggggagaactttgaggttgtgctgatacccctagatgatgatgaagagtcattcaaggaactattagaaagtgtgccttggttatccttgcctttcaaggacaaaatctgtgggaagctagctcggtacttcgagctttcaaccctccccactttggttattattggaccagatgggaaaactcttcattctaatgttgctgaggcaattgaggatcatggggttgctgcatacccattcacccctgaaaagtttgctgagcttgatgaaatactgaaggccaaagaggcagctcaaacccttgagtcaattttggtgtctgacgatcaagattttgtcattgggaaagatggggtgaagattccagtgtcagaattgaaggggaaggttgtcctcctctacttctcagctcactggtgtcctccatgccgtgcattccttccaaaacttattgatgcatataataagattaaggaaaagggcaatgcattagaagttgttttcatctcaagtgacagagatcaaacctcctttgatgaattctttgcgggaatgccatggttggcacttccctttggggactcgaggaagaaattcctgagtcgcaaattcagggtatctggcatccccatgcttgtggccattgcatcaagtggtcagacattgacaacaaaagctcgagatctggtttcactctatggagcagatgcatatcctttcaccgaggagagaataaaagaaatagagacagaacaagaagagactgcaaaggggtggccggagaagctgaagcatgaattacatgagcatgagcttgtgttgacgcgccgcagggtgtattactgtgatgcttgcaatgaagagggacatatatggtcctactactgtggagattgtgactttgatctccatccaaaatgtgcattggaaaaggaggacaaagaaggaagcaaagatgatgccaaggaagaaaagtccaaagatgaatgggtttgtgatggagaagtctgcaaaaaagcctaaaagctgcttgtcaagggttttggtgatgaataatctgaatatttggatgaagtattgtgaacgcccttcctagtatgttttatgagttgtgcagaataatctgaatatttggatgaggtattgtgaacgcccttcctagtatgttttgtgagttgtgcagaataatctgaatatttggatgaggtattttgatgttaattatggtctttaatatatatggtataatggtttactcttatttcttcttgtgtacttatgaattactacttactgggcaaaaatcgtgtctatatccctgcttgtcttttaaatttccttttctaatcttggattttgcttccaatgaattaaaaccttcaataaagcgttgctgctttaacagctttattgtttc

SEQ ID NO: 408 - DNA, 477 bp, Glycine max
gcaataataagagatatgtgatgtggtgaaatttgtgtttaacagaagtggagcaagggaaagcaaaaggagaaggtgaataacatggtgctgtttgatcagggcacctaggacaagctcctttctggggcgtcccaaattcaagctcatcactccttccattctctctgatcgtttgaggattaatggatcacttgcaaggaaggctataagagaattgatggctaggggttctatcaggatggtgtctgcccatgcaagtcagcaaatttataccagggcaacaaacacctaggtggtgaactgatcttagtttacggagtattggtatgaatagtgaattattgtacttttgaagtttgagatgcatctcaaatagcttctatcatatctagattgttgctgatatccgagctgatattgtatataagttttgctataatgttatatttattaagattttaatatgcaatattt

SEQ ID NO: 409 - DNA, 1517 bp, Glycine max
tttttgttctatcacttcgctgtctgagggtcgttccaaagaaaaacatcgtcaatcctcacgacagctctgctctgctctgcttcttttggtttcttatttttcttctgaaaccctaaattttgtctgctctaaactttgggatctttcacacttgaaaaaaactgcttcttgtgcccgacccagcacaattctcatactatagatctttgaatcaaatataatttctgatcattttttttgtttctcttttgttctagcacttcgctgtctgaggttctggattctcagtgtttgcggagcgcagcatcatcttttagggaagaatggatcatcaagggcatagccagaacccatctatgggggttgttggtagtggagctcaattagcatatggttctaacccatatcagccaggccaaataactgggccaccggggtctgttgtgacatcagttgggaccattcaatccaccggtcaacctgctggagctcagcttggacagcatcaacttgcttatcagcatattcatcagcaacaacagcaccagcttcagcaacagctccaacaattttggtcaagccagtaccaagaaattgagaaggttactgattttaagaaccacagtcttcccctggcaaggatcaagaagattatgaaggctgacgaggatgttaggatgatatcagctgaagcaccagtcatttttgcaagggcatgtgaaatgttcatattagagttaaccctgcgctcttggaatcacactgaagagaacaaaaggcgaacacttcagaaaaatgatattgctgctgctatcacaaggactgacatctttgatttcttggttgacattgtgcctcgtgaggacttgaaagatgaagtgcttgcatcaatcccaagaggaacaatgcctgttgcagggcctgctgatgcccttccatactgctacatgccgcctcagcatccgtcccaagttggagctgctggtgtcataatgggtaagcctgtgatggacccaaacatgtatgctcagcagtctcacccttacatggcaccacaaatgtggccacagccaccagaccaacgacagtcatctccagaacattagctgatgtgtcgtggaaattaagataaccaggcactggaatcagttgtgaatgtcaaactgaatggttgggaaggtcgatactacatagcgagcagaagctgtagctgatagtttacatgcaatgcagactataaacatatgtagataatgtgctagggaaaacttaaccttatctttgatttagctggaaaaaatggtatttttcattttaattcacaggtcatcagatgataatatttatttactggtgcatagcaggatttttacttgaaaaaaaaaaaaaaagggcggccgcccatatcccatctttttcattcatcatgcttccttgttatacctacctatctgtggttcgctttgtgggaaaattgagttatcacatgatttgcgcacaagttgtgcaagaac

SEQ ID NO: 410 - DNA, 1836 bp, Glycine max
agaaaaatcgaatcgtttgataaatgaagtcaaaacaggatgaccagcggccgcccttttttttttttttttttaaaaaagaaaaaagaaatactataagaacgtaaagtttacagtatattgtttacacaaagctccttgaccaaaattaaatgaagcatcttaatacccataattggtaccatatacggggccataatctgcagaaggcgcatggcctgtatgaccaccagcgctagtgggtggaggagcataaactggagcagttgttggataggcactgtaaccttggctgactgatccccccataggatcctgtgtcgcacttgcagcttcagccatgaaattctgaaccagctgctgggctgcctgtatttgagaagaagtcccacttatctcaacagtcatctcccctggcacaccccttgtttcctgaattgtaatacttgctccactagcacgacgtatatagctgatatttgtgcccgatgctcctataacagcatctgcatatgtaagaggaatctgcatgtgctgtgtgaccttagttacaacagattgttgtggttgtgcacttgatgaatgaattcccatagaagcatcccttgcataggcaggtggtggaccttgatgaaggtgtttgtccatgggaggcaactcagtaggtggataataactatcatagtgatgtgaaggtggcatatattgatgattaggtgcaaaagcaggtcctcctccaccaccaccaccagcaggagcaggaaacccttgaggaggaggaccccaattttgatgcggtggcaaattctggttaactctaacatctgacatttgcatctgcgtttcaaaaactcctactatgctgcggtcaaccaagaacttgcgtaaatgaactgcaataagttcaactgccttgtgaacaccagcagattccccttgtatttcaacaatactatcatctcgcaaagcaaatattggcaggttttctgatccaagaacacgtatagtgcaaccagagccatcttgaatggattttatggttgatccctgcttcccaatcaagcttcctgcttgagtatccgccactagaagcctggtaacaactgatcgcccagcagccaatgcactatctgcaaggtcacgatcaacattgataacttgcttatgaacccttaacaaaccatcaacagcaggtggtatgggacaatctggctcttcttttgcagaaaccattactgctctttctgagattccaggtggaccgtcaagaattttaattcgcgccttagtctcttctgtgattttctttataaactcgccctttcggccaataatactgccaaccttttgcactggaaccaacatcctgaagacattctctccaggccatcccggccacttttttatttcatttcccttcgaatcaatctcggatccctgtttcggcagagaatcaaaatcctcaggcacatctccagcaccatgaacttcctcaacatgctcctccggtggagaatccgcgtccccagccaaacctccaacatcatgttcatgcccaacaaaatcattttcaggaaaattggcgtcctccatcaaattgcctgcatcatcttcatcaggtagcaggtgaggaaatccggagctatcaatcacagtccctacatcatgttcatcagaatgattctgaggaaaattagggtcctcaggcacatatcctacatcatgtccatcaaaaccgtgctcggccatgagtatattttatggttggtgagataagtgacggatatggagccgctcagaatttaggttttgcctcgagccgaattccggctcgag

SEQ ID NO: 411 - DNA, 574 bp, Glycine max
aattataacttatgaaagaaatttaattccttttacataccttacatttttttttttcttattagtacttacagataagtttattaaaaaaaaatgtcatcacatgatattctatgctcatctttctaagtttataaatagctgaaagtgaaacttaacattctcaaaattctattgctagttaatagcattaattaaaatgcattttatagaggtcaagagtggaatcaaccaagaaagagttgtagtggagaacttgaaccattagctgggtcaacatatccagcaggtctacctccagcagcaaacatagtgaacaaagtgttgaagaacatgaagaatcaagtttatctacttgacataacacttctgtcacaactaagaaaagatgcacatccttctgtctatggagtggatcacaccggtaatgattgcagccattggtgcctaccaggactacctgatacttggaatgaactcctatatgcagctctgtactagctgttgggcagcctgtatttgtgaagcagtaccacttatctcaacagtcatctctcctggcacacccctggtc

SEQ ID NO: 412 - DNA, 1094 bp, Glycine max
ctgaaattgaactctcaatgtttacaaaacgtagggctcctcatttaaaattgaatgtaaagtaatgttctcaatagccataattggtgccgtaaacggaaccataatctgcagaaggtgcatggcccgcatgaccagcagcacttgagggcggagatgcatagacaggatttgtaggataggaattgtaaccttggttaattgaaccccccatatgatcctgtgccgcacttgcagctgcactagctgttgggcagcctgtatttgtgaagcagtaccacttatctcaacagtcatctctcctggcacacccctggtctcctgaattgtaatacttgctccactagctcgacggatgtagctgatgtttgcccctgatgctccaataacagcatcttagtcacaacagattgttgtgcctgtgcactggatgaatgaattcccatagaaacatctcttacataggcaggtggtggaccctgatgaaggtgcttgtccataggagataggtcagcaggtgggtagtaattatcataattatgtgaaggcggcatatactgaggattgggtggaaaagcaggtccaccaccactaccaggtccaggagcttgaaaaccttgaggaggaccccaaggttggtgtggtgggcctggtggcacattctggtttactcgaacatctggcctttgcatttgtgtttcaaatactacaactatgctgcgatcaaccaagaatttacgtagatgaattgcaacaagttcaaccgccttgtgaaccccagaagattccccttgtatttcaacaacactatcatctcgcagagcaaaaactggcaggtgttctgaaccaagaatgcgtatattgcaccctgtggcatcttgaaaggattttatagtggacccctgcttcccaatcaagcttcctgcttgagtatctgccactagaagccttgtaacaactgggcgtcctgcacctgatgcactatcggcaggatgagggtccacgttgacaacttgtttatgaacccttaacaaaccatcaacagcaggcggtatgctgcaatctggctcttctttcgcagaaaccattaccag

SEQ ID NO: 413 - DNA, 518 bp, Glycine max
aggttagaaaaatcgaatcgtttgataaatgaagtcaaaacaggatgaccaacagtatgataacctactagccaaaaataaaaaagaaaaaagaaatactataagaacgtaaagtttacagtatattgtttacacaaagctccttgaccaaaattaaatgaagcatcttaatacccataattggtaccatatacggggccataatctgcagaaggcgcatggcctgtatgaccaccagcgctagtgggtggaggagcataaactggagcagttgttggataggcactgtaaccttggctgactgatccccccataggatcctgtgtcgcacttgcagcttcagccatgaaattctgaaccagctgctgggctgcctgtatttgagaagaagtcccacttatctcaacagtcatctcccctggcacaccccttgtttcctgaattgtaatacttgaaccactagcacgacgtatatagctgatatttgtgcccgatgctcctataacagcatctgcata

SEQ ID NO: 414 - DNA, 1178 bp, Glycine max
ggcggccgccctttttttttttttttaagtgtaaaagattcaagaaaagtattattgaggcttctttccgtttcttgtaatacaatcgacaagtatcaaagaataaaagaatgaacatccatacaaatgaaaagcaattcaatcagcctaggaagaataaagaatagtgttgtggtatttgtttcgagtaggattagaaggagttcaagatgtttggcactctgggggaaggccttgtggaaatcttttggtgtcagtgcagtaattgtaaatcatgtaattcttctgcacccaactcagtctgtcctggcttgttgaatccaactgttgggagaaccaggcattggaggaagaagagttggcagtgcaagatgatgatgatgatgatgatccagaatggacgcaggcattggcattgaaatttctatatgatgctgtgaatggagcttgtgtccaatctgtcttcacaagtccacctcttgttgcccagtcatcagcattccatagactagagtatatcctcattggctgttcctttgggaatgcaactccttttgattccatgttcttgaattctcttattggggtcccatccactgagaagattatgcgctgaggattccaaagaatggaataggtatggaaatctgcagttgggtcgaaccacagatagaactgttgctctctgctgcctttgccctgactgaacacattggtgtgaagaatgtatgggtcaccgctcagattccccaagaattcaaagtcaatctcatcccaatttgatccttttgatgacaaataataggcggtgacagtgcctgcagaatttccgggtacaagcttgagttgcatatcaatcttgccaaagagatactcgtttttggactgaaaccccgagccagaggctttgtcaagggaaagagtgagaagatcgccgttgttgagtatcttggcacgaccatctccccaagttacgtcaaaatcctggtagaagttgccagcagaggctgcgatggaagaggccaatacaaatacataaaggacagtttttgttgaaaatgtaatggaatgaagagaagccatgattgttttgaatgaaatgtagaaagaggaagttaaaaatgtagtagcttggtagaagtaatgaaatgtgagagagaaggaaagcgtacgcgtgg

SEQ ID NO: 415 - DNA, 428 bp, Glycine max
tgaggcatgtataaacatgatacattaatcttgagtacaatacaattgtatactgttactatacttacctaataggcagtgacagtgcctgcagaatttccgggtacaagcttgagttgcatatcaatcttgccaaagagatactcgttcttggactgaaaccctgatccggaggctttgtcaagggaaagagtaagaagatcgccgttgttgagtatcttggcacgaccatctccccatgttatgtcaaaatcctggtagaagttgccatggaagaggccaacaataccaatgcataaaggacggtttttgttgaacatgtggaatgaagagatgccatgattgttttgaatgaaatgaaatgtagacagaggaaggaaaagatgtaatagcttgctagaagtaatgaaatgtgagagaggctcgag

SEQ ID NO: 416 - DNA, 652 bp, Glycine max
aactcagtctgtcttggcttgttgaatccaactgttggttgaaccaggcattggaggaggcagagttggaagtgcaagatgatgctccagaatggacacaggcattggcattgaagttcctatatgatgctgtgaatggagcttggctccaatcagtcttcacaatgccacctcttgttgcccagtcatcagcattccataggcttgagtatatcctcattggctgctcctttgggaatgaaactcttttcgattccatgttcttgaattctcttattggggtcccatccactgagaagctaataggcagtgacagtgcctgcagaatttccgggtacaagcttgagttgcatatcaatcttgccaaagagatactcgttcttggactgaaaccctgatccggaggctttgtcaagggaaagagtaagaagatcgccgttgttgagtatcttggcacgaccatctccccatgttatgtcaaaatcctggtagaagttgccatggaagaggccaacaataccaatgcataaaggacggtttttgttgaacatgtggaatgaagagatgccatgattgttttgaatgaaatgaaatgtagacagaggaaggaaaagatgtaatagcttgctagaagtaatgaaatgtgaaagag

SEQ ID NO: 417 - DNA, 632 bp, Glycine max
ataaatataaaacatttttgaggaatgcttgagggtacttaggccattgacaagtgcttacattatgcgctgaggattccaaagaatggaataggtatggaaatctgcagttgggtcgaaccacagatagaactgttgctctctgctgcctttgccctgactgaacacattggtgtgaagaatgtatgggtcaccgctcagattccccaagaattcaaagtcaatctcatcccaatttgatccttttgatgacaaataatagacggtgacagtgcctgcagaatttccgggtacaagcttgagttgcatatcaatcttgccaaagagatactcgtttttggactgaaaccccgagccagaggctttgtcaagggaaagagtgagaagatcgccgttgttgagtatcttggcacgaccatctccccaagttacgtcaaaatcctggtagaagttgccagcagaggctgcgatggaagaggccgattccaatacataaagggcagtttttgtttgaaacgtcatgggatgaagagaacccatgagtgttttggatggaatgtagaaagaagaaggttactccagacgcattaccagctgatggagggggggagaaggcgtcgtaattctttagg

SEQ ID NO: 418 - DNA, 351 bp, Glycine max
ctgtaaattaagtgtaaaagattcaagatatattagtgaggcttctttccgtttcttgtaatacaatcatgatgtaaattaagtgtaaaagtttcaagatatactaacttgcaagtatcaaagaataaaagaatgaacatccatacaaatgaaaaccaattcaatcatgatgcttggcactctgggggaaggccttgtggaaatctattggtgtcagtgcagtaattgtaaatcatgtaattcttctgcacccaactcagtctgtcttggcttgcacttccaactctgcctcctccaatgcctggttcaaccaacagttggattcaacaagccaactcagtctgtcttggc

SEQ ID NO: 419 - DNA, 2051 bp, Glycine max
gcggccgcccttttttttttttttttttttttgggtttaaattaaatgcctaatctaccctctcttattaaaagaattacaaatctgcaaaatttattttcagtgattaaatacttcaatcaaaaattggtcagggatacaataacaaaacccaaatgggccatatagaaataccaaggtgaacaaaatctcatcccctgcctacaacgtcttgaaaggaatttagtacgtcatgggagccttcaatttattcttacaacaacatggtctctggattttcaatatagcctttgaatgcttttaaccattcggcaccaattgcaccatctataacacgatgatcacagctgagggtcacagacatgaaggaagcaaacttgaactcttcagcacctgaacccggaacgaccctcctctcagaagatccaacggcaagaatgccagcctgaggaggattgatgattgcacagaattgtctgacaccaaatggccctcccaggttagacactgtaaatgtacctccctcataatcttggggtttcaagctgttttctttggctttctttgccaattgtttgacctcttcccctattgtagagaggcctttcttgtctgcatccctgatgactggaacaaagagcccgttatcagtctgcacagcaacattaatattcacattattatactggcgaatataatcatttgcccatgaactgttacattgaggaactttacggagagccaaagcagcagccttgattacaaggtcattaactgatatgcgggagccaccagaggcttcttgcaatgaattgagttgggtccgcaaactcgtgagtttgtcaacacatgtatctactgttaaatagtaatgaggaatagtttgttttgataatagtagccgtgaagctgtgaccttccgtatctgagagacaggaatgtcagtataatccaatgctgcatctgttgcaaccttggccttggaggatgctgaaacttctttagcaccagaagccaagtaatcatcaatgtcggccttcacaatgagcccttcaggtcctgttcctttaatgctagagagaggtacatttttctcttcgcccaattttctagcaagaggactagcaaatgtgcgatctccagatgagctcgagccgaattctttagaagcctttggctcaggttctcgggcaggctcctctaccacctcttctttctttggtggaggtggggcagatgtttctttggcagggggttcacttggttcagatgctgaaggttggtaatctttgaattttgcaatatccccttcatcttcaacagttacggcaattacctcaccaactttaatttcttttgccccatccccacggattatcttggccagaaaaccttcctccatacattccatttcaacagtggctttatcagtttcaacttcacagagcacttcaccaggagagattctatcaccttctttcttcaaccatcttgcaatgttaccctctgtcattgtaggtgagagagaaggcattccaatttcctggtgtggggggagatctgaggctgacgcatagcatctcctcgacagtacctgcaaacttcgtgaaatctctccattgaactcagacccgataatggaaccccttttaatggtagccatgaagatgtttctcttctgcatgccaaatgaatgtttattaaagcaggaggctggttcaaagacactgcttcttgctgaagactcgtggaattgagttttccacacatcgcggttccggttgagggatgaatgagcatcgccggaaaaccaacgaaccaaaagagcgcgctcgtggtgcagcaacttggaagcatttctcatcttggaggagtgattgagtaaatgagatgccatgttaatcgaacgagaaatgaagagagagagagggaagagtgtttagggttcgttcggtggcagatccgatcaagcagatgaaaatggcgtgctattgctatgatgctagcagcctaccgcagcataccaacccagatttttcccacgcgtccaa

SEQ ID NO: 420 - DNA, 1142 bp, Glycine max
gaattcggctcgaggctccaggggagacaatgttgaacttgggatcgaaaaccgacaagagactcactgccttccatcctgaaatcgaggagctcatctacagcgacgtcgagaactccgagcacaagttcgtgctgaaggacaagaagaagccgatcatcttctcgatggcgcgtctcgaccgcgtgaagaacatgacaggcctggtcgagatgtacggcaagaacgcgcgcctgagggagctggcgaacctcgtgatcgttgccggtgaccacggcaaggagtccaaggacagggaggagcaggcggagttcaagaagatgtacagcctcatcgacgagtacaagttgaagggccatatccggtggatctcggcgcagatgaaccgcgtccgcaacggggagctgtaccgctacatttgcgatacgaagggcgcattcgtgcagcctgcgttctacgaagcgttcggcctgactgtgatcgagtccatgacgtgcggtctgccaacgatcgcgacctgccatggtggccctgctgagatcatcgtggacggggtatctggcctgcacattgacccttaccacagcgacaaggccgcggatatcctggtcaacttctttgacaaatgcaaggcagatccgagctactgggacaagatctcacagggcggcctgcagagaatctatgagaagtacacctggaagctctactccgagaggctgatgaccctgaccggcgtgtacgggttctggaagtacgtgagcaacctggagaggcgcgagacccgccgctacatcgagatgttctacgccctgaagtaccgtagcctggcaagccaggttccgctgtccttcgattagtacggggaaagaagaagaagaagaagcccaggccggagaaccatcgcctgcatttcgatctgtttcaccgcaattcgcattgttagtcgtgtattggagttatgtgtacttggtttccaagaactttggttccttctcgttttttttccttgtttgagcgtttttgggcagcgctggcctggttcctagtatggtgggaattggctgcaccttttgcttcgaataaaaatgcctgctcgttcacctgtcaaaaaaaaaaaaaaaaaaaaaaaaggcggccgg

SEQ ID NO: 421 - DNA, 450 bp, Glycine max
gaattcggctcgagagggcgtgtggacgacaaacatccacgactgcattcacggcaagctatggccagtcatgggcgctgggtatcacaccatccaccatacgacttaccgccacaactatggccactacaccgtctggatggactggatgtttggtacgctccgtgagccagatgatatcctcaagaaggcctgagttcgtcgtagctgtggttttcctacggtgctggatgtgcttggtctgttctgtccccagtgcctctaatccgctgagcctgttcagcgctctgtttctgtaggctttggtgtgctatttagtttgctaggttttatatgttgtgcttattctgtaatttagtgatgtttgtctgatgacgcaacggagttcaggtcgaataaaaagaaagatttgctagacaaaaaaaaaaaaaaaaaaaaaagggcggccgc

SEQ ID NO: 422 - DNA, 1603 bp, Glycine max
agagctatgacgcctcatgcacgcgtgcgtctgctcgggaccccaattcttccccctccacccacccagcatatctctctattcctatttattagcacccctcacattaccttgtgtcaccaactactttgactcctttaccataccattacaataattatcaaacctaaccagtaaaaatggtgaccgtggaggaaatccgcaacgctcagcgttcccatggacccgccaccatcttggccttcggcaccgccacgccgtccaactgcgtctcccaagccgattaccctgactactacttccgcattaccaacagcgaacacatgactgatctcaaagaaaagttcaagcgcatgtgtgaaaagtccatgataaagaagcgatacatgcacctgacggaggagtttctgaaagagaacccgaacatgtgcgagtacatggcgccatcgctggacgtgagacaagacgtagtggtgatggaggtgccgaagctgggaaaacaagccgcaacgaaagcgattaaggagtggggtcaaccaaagtcaaagatcacacaccttgtgttctgcaccacttcaggcgtggacatgcccggagcagattaccagctcacgaagcttctcggcctgaggccctccgtgaagcgcctcatgatgtatcagcagggctgcttcgccggcggcaccgtactccgcctcgcgaaggacctcgccgagaacaacaagggtgcgagggtgctcgttgtctgctccgagataaccgccgtgacgttccgcggcccctcggacacgcacctcgactcgctcgtgggacaggcactgttcggagatggcgccgcagcgttgatcatcggatcagaccccgacccagcagtggagcggccgatattcgagatgatatcggccgcccagacaatcctgcccgactctgacggtgctatagatgggcaccttcgggaggtgggactcacgttccacctcttgaaagatgtgcccgggatcatctcgaagaacattgagaagagtcttgttgaagcttttgagcccatcgggatcagcgactggaactctatcttctggatcgcacatcccggtggtcccgcgatcctcgatcaagtcgaggagaagctccggctcaagccggagaaactccagtccacccggcatgtgctgagtgagtacggaaacatgtcaagcgcgtgtgttttgttcattctggatgaaatgaggaagaagtctaaggaggaagggaagagtaccactggagaagggttagagtggggggtgctattcggattcgggccgggtctaaccgttgagaccgttgttcttcacagtgttcccttggagggataaatcatgctgatgcggtgactagtgatttaagagtgatcaataaggaaccctcggaaataccagggaaagtttgttattattactagtttcacttgtggatttatcgtagcataatgttgtacaagaataatttaatatgaacaagatcgtgtgtttgttattgattttttcaaagttatatagtccgtacttattcggcattgcatttcgttttcgcaaaaaaaaaaaaaaaaaaaaagggcggccgc

SEQ ID NO: 423 - DNA, 1306 bp, Glycine max
gaattcggctcgaggatgtggatggctttcatcccttaaatattggaaatcttgcaataagaggaagaaagcccttctttgttccttgtgctcccaagggctgcattgagttgttacttaggcacggtgtggaaatcaaggggaaaagagcagtgataattggaagaagtaaaattgtggggttacccacttccttgctattgcagtagaggcaccacgcaacagtcagcgtgttacacgcgtatacaaagaacccagaacatataacttctgaagcagatattgtggtagtagatgttggagtccccaacatagttcgtggcaattggctaaagaaaggagctgtggtgattgacatgggaacaaatcaagttaaggatcccagcggccacggcttttgtgtctcgggagatgtttgctttgaagaggcggttaaggtggcatcagccattacccctgttcctggaggcgtgggaccggttacaatatcgatgctcctctccaacacccttgattctgcgaaacgtgcttttggaatggtttgattagatgatgtcttttctccaaagttctatagtggatcttccatctatatatgcacatgaaataggtttgccatttgtcatgctatttaagagaaagtgactctatttttaattttttatcggcaaatgttaattgctagtttgttagtttttgtaagcaagagggatcaaatccacgtcctttctctcctacccttatttcttaaccatccaaccaaccttatatctctgaaagtgactcaaaattattatcccaatgcttcatgagcatacaacattttctctgctggggcgactaactagagcatctgcatgttactttctatataaacagtatttgttgaggcgagcttgctatatgattgatttattgcattgcgaggatctaaatacaccacacaggatctgcaaattagtctttttcgcttcattgctttgcagtgcaaacacccctcttgcaaccaagaaagaaaaaggaagatgcattttctactgttttgctcattaagtagaaactgatgtagaattttgtgtacatggtttgtacagctatttgaaatgcactctttgcggcatctcttttatggatagttaattaacttttattaagattgagtgaggaggaatcaatggtgtgcatatgcacactcgtacacacactgatattacttcatttatttaattgatgcaattagatgcttcagaaaatgaacatataaagaatttcatttggtccaaaaaaaaaaaaaaagggcggccgc

SEQ ID NO: 424 - DNA, 1331 bp, Glycine max
gagcctctcttctgatccatcttcaaaagacactgagaagggaattcaacgctttactcaaagctttgtacctggagtgcacctcttcacatatgatgaacttgaagaggccacaaattactttgactcatctaaagaattcggctcgaggtcttctgatgtttcttgtctaggcaaactgcgggacgggcgttctgttgcagtgaagaggttgtatgagaacaacttcaagagagttgcacagttcatgaatgaaattaaaatcctagcaaagttagttcatccaaatcttgtgaagttatatggatgcacctctcgccacagccgcgaacttctgcttgtatacgagtacattcctaatggaaccgttgctgatcatcttcatggtcaacgatccaaacctggaaaactcccttggcatattagaatgaaaattgctgtggagactgcaagtgcattgaattttcttcatcacaaagacgtcatccaccgagatgtgaaaaccaacaatattcttcttgacagtgacttttgtgtcaaagtggcagattttggactctcgcgtcttttcccagaccatgtcacccatgtttcaacagctccacaagggactccaggttatgtggatcccgagtaccaccagtgctaccagcttactaaacaaagcgacgtatatagctttggagtggttctggttgagctgatatcatccttgcctgctgtagatatcacaaggcatagacatgaaatcaatttgtccaacatggccatcaacaagattcataatcaggcactgcatgagcttgtcgaccctaccctcgggtttgaatccgatttcaaagtcaggaaaatgataaatgctgtggctgagttagcatttcagtgcttgcagagttctaaagagatgagaccttctatggaagaagtggtggagactctcaaggatatacagagtgatggcaaacataaaagccagcctgaggtaatggacatcacaagcacagctgatgatgttgtgttgctcaaggatgaccctcctccaccatcacctgattctaatgcggtgagcaagtcgacaacgccaaatgctagcggataagtggaccttctttctcacttccatcaaggcatcaagttaaccttatccaaatttatgtaaaagcagagttagcatcacacttgtagcagcatccacccagttacagcatgcattttgtcatcttatgatgaggataacttttatgattgagatgtatatatagatggtaaagctgctttggttatgaaatttcatcttttcaataaaaaaaaaaaaaaaaaagggcggccgc

SEQ ID NO: 425 - DNA, 586 bp, Glycine max
gttgactgttgcagatccgcggaagttgagactcattataggtgttgtttctggtgtggtgggagcacttggtatgggcattatcggctttctctgttatcgtagaaagaagaatcgttatgcaatctcatatatacaatctcgtagcctctcttctgatccatcttcaaaagacactgagaagggaattcaacgctttactcaaagctttgtacctggagtgcacctcttcacatatgatgaacttgaagaggccacaaattactttgactcatctaaagaactaggagaagggggctttggaacagtgtattttggcaaactgcgggatgggcgttctgttgcagtgaagaggttgtatgagaacaactttaagagagttgcacagttcatgaatgaaattaaaatcctagcaaatatggatcatccaaatcttgtaacattatttggatgcacctctcgccacacccgtaaacttctgcatgtatacgagtacattcctaatggaaccattgccgatcatcttcatggtcaacgatccaaacctggaaaactctcttggcatattagcatgaactttgctgtg

SEQ ID NO: 426 - DNA, 317 bp, Glycine max
gaattcggctcgagccgaacattgatatcatgcctcgttcatggaatgcaaatttgcacgcaagcaatattatgatggctgcagttgactatcgtgtattttaatggaaaaatagtcgaatgtagtgtcaagagctccttgtgttagtttggatttaactctacccctacgttcgtcctgaaaattatcattattctgcgtgttattagttgtttgtattcacggataaagttggaataccagatgagttataccagtggtgccccctcccccttttttccaaaaaaaaaaaaaaaaaaaaaaaaaagggcggccgc

SEQ ID NO: 427 - DNA, 215 bp, Glycine max
ctcgagccgctcgagccgattcggctcgaggttattagttgtttgtattcacgcagaataatgataattttcaggacgaacgtaggggtagagttaaatccaaactaacacaaggagctcttgacactacattcgtcctgaaaattatcattattctgcgtgttattagttgtttgtattcacggataaagttggaataccagatgagttatacc

SEQ ID NO: 428 - DNA, 3291 bp, Glycine max
aggatatttgagacgaccacaccaaaatggagacaattaaataatacgacacaggtcgcagcaacattcccacctactcttctcctctctcttcttctgctgctcgatcgatcgatcgatctcgtcattctcttagctaccatggcgactgagaatcctttcaatagcattttgacgacgctcgaaaagcccggtggtgctggcgagtttggaaagtactttagcttgcctgctctcaacgatcctagaatcgatagacttccttactctgtgaggatacttttggaatctgcaatccggaactgtgatgagtttcaagttaagagtaacgacgttgaaaaaattattgattgggagaatacctctccgaagctggtggagattccattcaagccagctagagtgcttctgcaggactttactggggtgcctgctgtggtcgatcttgcttgcatgcgagatgccatgaacaaacttggtggtgattctaataaaattaaccccttggtaccagttgatcttgtcattgatcactctgttcaagttgatgtggcaagatcagaaaatgctgtccaggcaaatatggaacttgaattccaaagaaacaaggaaagatttggtttcctcaaatggggttctaatgcattcaataatatgcttgtcgttcctcctggatcagggatagttcaccaggttaatttagaataccttggtagagttgtgttcaacacaaatggtgtgctttatcctgacagcgttgttggaactgattcacacacaactatgattgatggcctgggtgttgctggatggggagttggtggaatagaagcagaagctgcaatgcttggccaacccatgagcatggtcctaccgggtgtcgttgggttcaaattattaggcaaactacgagatggtgtcacagctactgacttggtgttgactgttacacaaatgctaagaaagcatggggttgttggcaagtttgtagagttttatggggaaggcatgagtgaactgtctttggcagatcgtgccaccatagcaaacatgtctcctgagtatggtgcaaccatgggcttctttcctgtggatcatgtcactttgcaatatttgagactgactggcagaagtgatgagactgtttctatgatagaatcgtacttacgagcaaataagatgtttgtggattacagcgagccccaagtggagagagtgtactcatcgtatttggaactcaatcttgaggatgtagaaccctgtgtctcaggtccaaaaaggcctcatgaccgtgtccctttgagagaaatgaaggtagactggcatgcctgcctcaacaataaagttggattcaagggttttgctgtaccaaaagaatctcagaataaggttgcagagttcacattccaagggacaccagcacatcttaggcacggtgatgttgttatagctgctatcaccagttgtacaaatacttcaaatcctagcgtaatgcttggagctgcattggttgcaaagaaagcatgtgaattgggattgcaggtgaagccatggattaaaacaagccttgccccaggttctggtgttgtgactaagtatttgcagaggagtggcttgcagaagtatttgaatgagctagggtttaatatagttgggtatggatgcaccacatgcattggaaattcaggggatattaatgaagctgttgcatctgcaattactgaaaatgatatagtagctgcagctgtactgtctggaaataggaactttgagggccgagttcacccattaacaagagctaattatcttgcttctcctcctcttgttgttgcctatgcccttgctggcacagtggacattgactttgacactgaacccattgggatagggaaggatggcacagagatcttcttcaaggatatttggccatccagtgaagaaatagcaaatgttgtacaatcaagtgtgctgcctgatatgtttagggacacatataatgcaatcacccaagggaatcccatgtggaataatttatctgttccaactggcactctttatgcttgggaccctacatcaacttatattcatgagccaccttattttagagatatgagcatgtctcccccaggctctcatggagtgaaagatgcttactgtttgctcaactttggagacagtatcacaactgaccacatctctccagctggcagcatacataaggacagtcctgcagccagataccttatagaacgtggggttgatagacgggacttcaactcctatggaagtcgccgtggtaatgatgaggtgatggcccgaggaacttttgccaatattcgcattgtcaacaaatttttgaatggagaagttggacctaaaactattcatattccttctggggagaagttatcagtctttgatgctgcagagaaatacaagagtgaagggcatgatatgattatcttggctggtgctgagtatgggagtggaagctctcgtgattgggctgcaaaggggccaatgctactgggcgtgaaagctgtcatagcaaaaagttttgaaaggattcaccgaagtaatttggtgggaatgggtatcattcctttgtgttttaagcccggggatgatgctgattctcttggattaactggccaagaacgttacaccattgatctaccaagcaatgtgaatgaaatacgacccggtcaagatgtcacagtggtgacagacaccgggaaatcatttgtatctacattgagatttgatacagaggttgaactagcttacttcaaccatggaggcatcttacaatatgtcatcagaaacatggtcaatgctaaacattgaatcagatataaaccaagtttgcaggttgaattgatagcacccactggcgctgattcttaactttggtcttaataatctagtatggcctgctacaaggaaatccattgctattcagctattgtatcaataaaccaaggaactagatggctactacgaggaagagttatgactggcgtttgttgaagaaatgtgattttctttttcaaaaattctattggtcattgaggatgaaaagtccttattacttcttttttactggttttgcagttgagtttttaggaaacatttaccttctatttctacctcccgattcttgagaattaagagaatcaggaacatctattgaaattatgagcaatgtgccgtaaatttcttaaggtataaagaaatgaacgaaggttggacatttaaaaaaaaaaaaaaaaaaaaaaaaagggcggccgc

SEQ ID NO: 429 - DNA, 2364 bp, Glycine max
actacatcgcgggcgcaacacaccaaacagaaatagttacactcagagtagtgaacaacaacagcaacaacaacaacaacgttgcagtgtgttgtattgtttcttagtgcacttttttttggcatcaaagaggttaaatccatggattctgattatggtattcccagggaactctcagatcttcaaaagattcggtcgttgtaccagccagagcttcctccttgtctccagggaaccactgtgagggttgaatttggtgatgcaaccaccactgctgaccccactgatgcactcaccattagcagggcgtttcctaacacctatggacaccctttggctcactttctcagggcaactgccaaagtccctgatgctcagatcataactgagttccctcctattagggtggggattgtcttttgtgggagacaatctcctggagggcataatgtcatttggggtatccacaatgctctcaaaattcacaatcccaacagtgttttgcttggatttcttggtggttcagaaggtctatttgcccagaaaactctggagataactgacgatattctttcgacgtacaaaaatcaaggtggttatgatttgcttgggcggacgaaggatcaaattaggaccacagaacaagttaatgctgcacttgctgcatgcaacaatttgaaacttgatggccttgtaatcatcggaggggtgacatcaaacacagatgctgcacagcttgctgaaacatttgctgtagcaaaatgccccacaaaggtggttggtgttcctgtcactctaaatggagatcttaaaaaccagtttgtagaaactaatgttgggtttgacacaatttgtaaggttaattctcagctcatcagcaatgtctgcaccgatgctctctctgcagagaagtattattatttcatccgtcttatgggacgcaaggcatcacacgttgctttggaatgcaccctccagtcccatccaaatatggtaattcttggtgaggaggttgctgcatcaaagcttaccctttctgaaattgcaaaacagattactgatgcagttcaggctagagcagagcaagataaataccatggagtcattctccttccagaagggctgatagagagtattcctgaagtgtatgccctcttgaaggaaattcatggtttactcagacaaggtgttgaagttgacaagatatcttctcagcttacaccatgggcatctgccctatttgaatttctgccaccctttattaggagacagttactcctttaccctgaatccgacgactcagcacagttatcgcagattgaaactgagaaattactggcatatcttgtggaagtcgagattaacaagcgtctgaaagaaggcacatacaaggggaagaaattcaatgccatttgccacttttttggttatcaagctcgtggatctctgccatcaaaatttgactgtgattacgcatatgttcttggacacatctgctaccacatacttgccgctggtctaaatggatacatggcaactgtaactaacctgaagaatcctgtaaacaagtggcgatgtggggctgctccaatagcatctatgatgactgtgaagcgctggtctccaaatccaggagccacatcaattggaaaaccagctattcatccagctactgtggacttgagaggcaaagcatatgagctgttgagacaaaaggcacaaagctttcttatggatgatatctacagaaatccaggtccacttcagtttgatggtcctggtgcgggtgcgaaggttataactctttctgttgaagaccaggactacatgggccgcattaagaaacttcaggagtaccttgaacaggttcgaaccattgtgaagccaggatgcccccaggaggttttgaaagctgctctaagtgtcatggcgtcggttactgaagttctagctgcaatgtcaacatcttctactaacaccctgtcagccatgtgagagtaacaaatggatgttgtattctttccaaaattttctggcacgaggttttagtttctacattttattgccatggaagtagttgttgattggaaataaaagttatagctgacatggtgcatgtcaacgtgagatgagatttactgtaatcaaagttttggctctctatgttccctactgggtcatttttttttttacaaaacatgagggttccgtgtgacactgataatttagcttggggcttgagattattattgttgttctatttttaggacaaatctttttgtgatattccgaactttatattaaaggtgttttcttcctattcgtaactttatttgttatcccccgatgaaattcccccccttt

SEQ ID NO: 430 - DNA, 687 bp, Glycine max
acgagatccagctactgtggacttgagaggcaaagcatatgagctgttgagacaaaaggcacaaagctttcttatggatgacatctacagaaatccaggtccacttcagtttgatggtcccggcgcagatgccaaggttataactctttctgttgaagaccaggactacatgggccgcattaagaaacttcaggagtaccttgaacaggttcgaaccattgtcaagccaggatgccctcaggaggttttgaaagctgctctaagcgtcatggcgtcggttaccgaagttctagctgcaatgtcaacatcttataccaacaccctggcatccctgtgagagtagcagatggaagttgtattcttccataaaaattctacattttatagccatggaagtagtttttgattggaaataagagttatagctgacatggtgcacgtcaacgtgagatgagatttactgtaatcaaagttttggctctctatgttcccaactgggtaatttttttgttttttgttttttgttttttgttttcaaagacatgtgggatccatgtgaaattgtttgataacttagcttgctgcttgaaattattattgttctttttaggacatctcttttgatattccaaacattatatttgaggtgttttcttcctaaaaaaaaaaaaaaaaaaaggcggccgc

SEQ ID NO: 431 - DNA, 283 bp, Glycine max
aataatagttacactaacacacagtagtgaacaacaactccaacaacaacaatcaacaacaacaacaacgttgtagtgtgttgttttgttttttagtgcagtttatttttttggcatcaaagtggttgaatccatggattctgattatggtattcccagggaactctcagatcttcaaaagattcggtctttgtaccagccagagctccctccttgtctccagggaaccactgtgagggttgaatttggtgacgcaaccaccactgctgaccccactgatgca

SEQ ID NO: 432 - DNA, 921 bp, Glycine max
cagcacagagagagagagagagagataatagtagaaggtcggggatagtaaagagagaaatccgaatagaaaaagaagctagctagggtttcggcgcgaagaagaatggggaagaagaagctggagataaagcgaatcgagaacaaaagcactcggcagataacattctccaagaggcgcaatggattgatgaagaaagctcgcgagctatccattctctgcgatgcgaagttggcgctgctcatcttctccagcaccggaaagctctacgagctctgcaacggtgacagtttggccgaggtcgtgcagcaatattgggatcatttaggagcgagcggtactgacacaaagtcgcaggaactatgctttgaaattgcagatatctggtctggttcagcgttttctcaaatgatcaaaaggcacttcggtgtttctgaacttgagcatctgagtgtgtctgaccttatggaactagagaaactgactcatgctgctctttcgcgaatcagatcagcaaagatgcgattgatgatggaatctgtagtgaatcttaagaaaaagattgaggcactagaaaaaactaatgacgtcaataacgtggtgacacggtctattgactgtgatcaaacagatggggtgacgcataatctgttcccaggtctctaatggagctgaaagccactactctgggtctaacttgcacactcaacccttgaatttccaagtgtgtgtttaatacatgcatagggaaccatgccatggtctagctacttgccttttattatttctattttggttgaaacatggagcatcttgaagataatgtagcctggggaactttgcttcagctactactttgtgcctaattaatttataataagtgacattagatgccaaaaaaaaaaaaaaaaaggcggccgc

SEQ ID NO: 433 - DNA, 271 bp, Glycine max
gcgttttctcaattggtccaaagccactttggtgtttctgaacttgagcatctgagtgtgactgaccttatggaactagagaaactggttcattctgctctttcgcgaatcagatcagcaaagaggattgcgtggaaccgacgaccggagaagaaaaggatctctccatgtgacgtgacgaggaacctgcgggtagctcacaatagatgcgattgatgatggaatctgtagagaatcttaagaaaaagattgaggcacagaaaaaagctga

SEQ ID NO: 434 - DNA, 524 bp, Glycine max
gaattcggctcgagggctatgaaactgatgaatgaaattgaggctgatcagtcaggaacaatagctgaggtattagctgaggatgggaaaccagtcagtgtagacatgcctctttttgtaatagttccatgagtaccggaagggaccttacttcaaagttgatatgaaatctccctagcttgttggatagcagcatggtatttgatgtcagattttctgttcagaaatttcttgagtgataatgtttgtctcattttaagaaatccttgtcttctttagcccccacccctcctcttaatttatcgagatattttggacataaaagtccccagcatatcagaatgaatattggacatttcagttctaagcagatttgacatttgtagtagtatttatgttttctgtttatgttttctgattgccccctctttcttgtatgaacatgcttgctggatgttacattatcacagtaatatattatatacatctttgtggccaaaaaaaaaaaaaaaaagggcggccgc

SEQ ID NO: 435 - DNA, 1231 bp, Glycine max
ctttactaacttacaacaatatgataaaagcaatgcacacacacactagtactgccagataaccacatcacccgatggcaacggactttagttccatccccataattgatattagtccccttttggctaaggcagatgatccaaaaatggctgaggatcctggtgtgcttgaggttgttaaacaattggataaggcttgtacagaggcagggttcttctacgtgaaaggacatggttttcctgagactctccttaaagaagttagagatgtaacgcgcagattctttgaactttcatatgaagaaaaggcgaagatcaaaatgactccagctgctgggttcagaggttatcaaaggcttggagaaaatataactaaaggtgtacctgacatgcatgaagctattgattgctatagagaagtgaccaaggacatgtatggagatcttggcaaagttatggaaggaagcaatcaatggccacaaaatcctccaacattcaaagttcttatggaggagtatgttagtctctgcagagaccttgcaaggaaaattatgcgtggaatcgctttagcattaggtggatcgcccaatgaatttgaaggtcaaagagctggggatccattttgggtaatgcggctcattggttacccaggtgtatcatctgtaaatggaaccaatgttcataaaaatgacattggatgtggagctcacactgattacggtttattgacattacttaatcaagatgacgatgtaaacgcacttcaggtgagaaacctgtctggtgaatggataacagcacctccagttcctgggacatttgtatgcaacattggtgacatgctaaagatttactccaatggtttgtacgagtccactttgcatcgggtgataaacaacaactcaaaatatagagtcagtgtagtatacttttatgagacaaacttcgatactgcagtagagccattggacacacataaaacgagggcaaatggcaacaaggagttcaaaagagcagtctatggagagcatttaactggcaaggtcctcacaaattttgttgatttgtaaccttgtttttattgctctggtgtgtaaataaataaggcatcttgtcttgcaagctcatcgcatgcatgtctagacctacaagtgctgataatatttgaagtgcaattctcaatttatacaacttcaggacttaaaaaaaaaaaaaaaaaaagggcggccgc

SEQ ID NO: 436 - DNA, 504 bp, Glycine max
gaattcggctcgagggcatcttgtgttgaaggatatccatgccaccttgaagaaatttggaagcaatataattttctcaaatggcctcttggatccatggagtggtggcggcgttttgcagaatatatctgaaagtgtggtttcacttgtcactgaagaaggtgcacaccacatagatttacgttcttcaacaaaaaatgatcctgattggttggtagagcagagggagactgagataaagctgatagaaggttggatcagtgactaccaccagaaaaatgaagctatgtttgatatgtaacagaatctttctactgtttgcttcagcactgttctgtatatatagctcagtaaaacacgtttgttaggtttgacaaaccttatgttcttgtttggttttgtaattgctcgggacaatatttgcaagcaatttttctttgaatttgagtctaataaaaaaaaaaaaaaaaaaaaaaaaaaaaaaaaaaaggggcggccgccgac

SEQ ID NO: 437 - DNA, 257 bp, Glycine max
cttccgatagggacccaacctaaagttatgagtttgttatgggaaaacttcttgtagtagactaggcatagcttactcggaatataaatgcttgtcgtcaactcgtctgtaggtttcaattactgaggttaaatcccaaatgaataatagcaacttgttttatatgcggcgttttgcagaatatatctgaaaagtgtggtttcacttgtcactgaagaaggtgcacaccacataaatgggcggctcttcaacaaaaa

SEQ ID NO: 438 - DNA, 587 bp, Glycine max
tttttttgaagtaacccaacaaacttcttattcatataacaccaaaagtagtccatttataagcagagattgatgattcaaatttacatatttatgatagaccaaccaaacactaagcaaccatacttcaaacactcgcaacaaatatcctagaacatttgaatttgcaaattcgagccatgatcactttattaaacacaacacgtaattcttattatttgttgatacatatattacagttatctctgcttcaaggttataaatcttgacctcacttgcagttgcatgggtcgcaggtgcagcttgatccacagttgcagccaccgttctcagctgcaacacccatttcagcaccctccaattgggccttcacaggcccaacacccaaaactagagtctctgtggttgtcttctcaacgtaactcaagtcaaaagagtacttgttgcaaccgcagttgctgccacagttgcagctgcttccacacccacagctagacattctcaaaatcttagaatagaatcccacaataaattactgaagaactaaagatgattggttactacactcagtggaatcccttttgtgt

SEQ ID NO: 439 - DNA, 530 bp, Glycine max
ttttttttttttaatgaaataacccaacaaactttttattcatataacaccaaaagtattcatttataagcagagattgatgattcaaattacatatttataaaagaccaacaaaacacatagcaaacactttattctaaagctccaaacgcaacttctacttcttattatttgttgatacatatattacagctatctctgcttcaaggttatacatcttgaccttacttgcagttgcatgggtcacaggtgcagcttgatccacagttgcagccaccgttctcagatgcaacacccatttcagcaccctccaattgggccttcacaggcccaacacccaaaactagagtctctgtggttgtcttctcaacgtaactcaagtcaaaagagtacttgttgcaaccgcagttgctgccacagttgcagctgcttccacacccacagctagacattctcaaaatctttggatagaatttcacaaactaaagtaaaatgtataagaaagaaaagacgtttggttagtacactcc

SEQ ID NO: 440 - DNA, 422 bp, Glycine max
  unsure (1)..(422): unsure at all n locations
cagagattgatgattcaaattacatatttataaaagacaacaaaacaacatagccaaacactttatttctaaagctccaaacgcancttctncttcttattatttgttgatacatatattacagctatctctgcttcaaggnttatacatcttgaccttacttgcagttgcatgggtcacaggtgcagcttgatccacagttgcagccaccgttctcagatgcaacacccatttcagcaccctccaattgggccttcacaggcccaacacccaaaactagagtctctgtggttgtcttctcaacgtaactcaagtcaaaagagtacttgttgcaaccgcagttgctgccacagttgcagctgcttccacacccactgctagacattccccctcgtgccgctcgagccgattcggctcgagcg

SEQ ID NO: 441 - DNA, 928 bp, Glycine max
gagaattcggctcgagaataagacattgtttggtttggttacttgctcgaatttcctcgaatcgcttaatttgtatttgattagttaaaccgcaacgcggaatctcttttctcgaactggctaactctcaggcaagtggttcggacgctgattccagcaacaagcggctggtgctcgcactgtatgacgccctaaactccggcgactccgacgccgtcgtcaagatcgtcgccgccgacctcgagtggtggttccatggtccgccctcacaccagtttttgatgcgcatgctcaccggcgactccgctgccgacaactccttccgcttccttccgcagtccatcgccgccttcggctccaccgtcatcgtcgagggctgcgacaccgcccgcaacattgcctgggtccacgcctgcaccgtcacggatgggataattactcaaatcagagagtacttcaacaccgccctcaccgtcactcgcatccacgattccggcgagattgttccggccagatccggcgccggccgtttgccctgcgtctgggagagcagcgtctccggtcgggtcgggaaatccgtccccggtttggttctcgcaatataaaatataaaataagtaattagggaaggacgaggtcacgtgttgccgttgctataataattaaataagggacttgtgcacgtggcggtgactggatcgatcggtttcagggaacattgatactttgtgttagtattggaggttagggagatgtgagagctttgttgttattggtgtggtttgttttgtttgcttgtgtgtttttcaccactatgggcgtattcaggtggttgtatctttcttttgttatttggagtgttgatgatgatgcaataagaatatctatggactatgcttttaaaaaaaaaaaaaaaaagggcggccgc

SEQ ID NO: 442 - DNA, 947 bp, Glycine max
cctcgagccgaatcggctcgagcattgtttggtttggtttggttacttgaaaatctcgaatacgcttaattttgatttagtgctccaccgcagcgcggaacccctgtctcgaactggctaactctcacgcaagtggctcggacgctgattccagcaacacgcggctggtggttgcactgtatgacgccctaaactccggcgactccaacgccgacgtcgagatcgtcgccgtctacctcgaatgggggctccatggtccgccctctcaccagtgcttgatgcgcatgctcaccggcgactccgccgccgacaactccttccgcttccttccgcagtccatcgccgccttcggctccaccggcatcgtcgagggctgcgactccgcccgcaacattgcctgggtccacgcctgcaccgtcacggatgggataattactcagatcagagagtacttcaacaccgccctcaccgtcacccgcatccacgattccggcgagattgttccggctagctccggcgccggccgtttgccctgtgtctgggaaagcagcgtctccggtcgggtcgggaaatccgtacccggtttggttcttgcaatataaaataattattaacaagtaattagggaagaacgcggtcacgtgtgaataataattaaataaggaggttgtgcacgtggcggtgactgggtcgaacggtttcagggaacattgatatattttcgtagtattggtgtgttctagaggttagagagatgtgagaccctattggtggggtttcttatttctttaattttctcaggtttggtttgtttttgttttgtttgcttgtgtgttttgggaaccactatgggcctatccaggtggctgtatctttcttttgtaatgcggtttgttgatgatgatgatgatgcaataagaatatctatggattatggttttaaaaac

SEQ ID NO: 443 - DNA, 377 bp, Glycine max
ctcgagccgaatcggctcgagtcgagcgctcgagccgcaaaaataagacattgtttggtaccgttacttgctcgaacttcctcggatcgcttaatttgcatttgattagttaaaccgccacgccgaatctcttttctcgaactggctaactctcaggcaagtggctcggacgctgattccagccacaagcggctggggctcgcactgggtgacgccctaaactccggcgcctccgacgccgactacaagaaatgcgtgcgacgaaccaagcggatgtgatctggttccggcattcacccttttttgatacagcatgctcacccgctttttctttattcgcagattgtttctgtttcttactccatgtatagacgcct

SEQ ID NO: 444 - DNA, 985 bp, Glycine max
actagagcgcaagtcccggccaaaattgaactggccagaatctatagattaaagccgatttagtggccatgattcttgaacaagtataccaagtcattacctatattccataaactcccatgtcagaattgaaataaaagcaaacagaacttatttcagccagctgcaacaagctcgttcaattcagtaaaatctcaaacacaaactaaaatttacaaaatttagtttactaatcacgtacataaggcacttgatctagttaattctaacactctgccagacaaaatgcacgactattagcttgattcctccacagcctcgtctttttctttagatttcccttcatctgcaatttgaaaaccctcaatcttatgcgaaacctcatctgcagtaaccttcaccttatcaactgaaccatttgcagacacagtctccgagccatccagggtcaaggggccagtctgccatattctgatggttccatcctcagatcctgaggcataggattctccaccaggagaaaaacgaacacagtggacaggaccatggtgccccttgttgcatgcaatctcattccctgtatggaaatcaaacacgtgaacccacatatcttctcccccggcaacaaacttgttcccatacttaggttccagagaaactgattcgatagtgcagggcatatcatagctcttcaccaatccatagtagttcgcatcccaaaactttacagtagaaccatcagcagtggttatataacggccatcctgactcacttcagcacttgtcacagatgacttagtttcaagtgtctggactattttaccacttcttacatcccataacctgacacctcccatatcagtacatgaactcaatattgtctggtcactatgaagccaggcaacagttctgacagaaccaggggacttatccacttctctgggtggcgcatcaggcctattcatatcatagatccggagaaatt

SEQ ID NO: 445 - DNA, 620 bp, Glycine max
gcggccgcccttttttttttttttttttccaataacactattattattatttacaaaaaagtggagaatatagctaaatatgcctaaatattctctgaccaaaaaacagaggaaaacagaacaggagcaggggaagcacacaaatcctccctcttccacctgtgtacatcaacacactaatccaaaacccttaaccatgttcttaacctatgactcaccaacggaaatcggtctgccggagatccccaacggcgaccgggaaatctgccggcttatttcacggagaacgggtcttatctctggcttgcccggggaccaatcaacaattttctctgactcttgcctgatcttcataacctggctatgtattgggacacccttttgtgcaaacctttcatctttgttcatcttcatgttctccatgctctcaatcactcaatgaaaaaaaaggcttcaattcagaaagtctcctagctacccttctttctaattctgcttctctatatatgacaatctacaatggacaaaaaacacttctcatgtaccataaattataagcgtgtgtgtgcctatatatatttgtgcgtgagagcacaaatggaattcaaaatcggctcgag

SEQ ID NO: 446 - DNA, 498 bp, Glycine max
  unsure (1)..(498): unsure at all n locations
aacatatcaaaccagaaaactaaagctaaccaaacaaaaaaataaaaaaataaaacacatatgatatatccaataacactattattattattatatacaacaaaaagaaaaaagaaaaaaagtggagaatatagctaaatgcctaaatattctctgaccaaaaaacagaggaaaaccagaacaggagcaggggaagcaaacagaacctccctcttccacctgtgtacatcaacacactaatccaaaaacccttaaccatatactgaacctatgactcaccaactgaaatcggttggccggagatccccaacggcgatcgggaaatttgccggcttatttcgcgaagaacagatcttatctctggcttgccaggggaccaatcaacaattttctctgactcttgcttgatcttcataacctggctatgaactgggacacccttttgtgcaaacctttcatcgntgttcatcttcatgttctccatgctctctatcactc

SEQ ID NO: 447 - DNA, 1402 bp, Glycine max
gcggccgccctttttttttttttttttttttttttttttttacaaaaatctgtttaattctttgaaataaccatgcatacagacatattatacatgaactaatttaatttcttacgaaagaaaaatcataacaaagaaagtaaagaaaaatatataaaaaaaaaaaaattgcaaatacgagcttccttatttacattgaaatgggtttcgaatatttaatttgtatacagggaatttgccaatttggcagcatccccgtaactgtgaattgtagtagtttggctgtttatagattttgttgggtcccaatcccatcacaaggttcgtaatggcggctgggaacttgtttagaccactgaatagggctcaacgtaagcggtggaaagcaacattggcattcttcttggcatggctgtggaattgccaacccctcctcctggaccccacctgtgggtgctgacgcttccttcagtgggccccaacattccaccttgttgaattctggaatgtttgagtgaaagtagacccaaaccaaggcatcttgcaattctgggtagctgttgaataggttttcatcgccgtgaacgacggccttcaacaccactggtagctccttgcagaagatgaagtatcttaaccttgctaatatatccaagagaaaatgacctccactaatgtggcagtgaacgtgcagagacatccttcccttcacctttttccactgtgccaccacttcgtccctttgaaatctgttgtaccacccctgcagctgagaattatttatggtttgagagattgccaaggtgagcttagcggttatatcactatgggttagcgtataagtccttgggagatttcctgggtgtttattttcgtccactcctaagaacaaaaccttcagttttgaggcttcaaatatggctggcccgaacaaccttgcaacaggaaccattgctttgttcttcttcccgacccgtcttccacagtagggaaaaagagaattgtggtgcggagaaagcgaaggcttgttaagcttagaagggagcacaggaacagttgtgagagtacacatgttcctgttgttccaatctttgaggactgaaattcaaagatcaaacagtaccttgatgaaggaaaggctttaatatttatttagcttttattcaagtactggaggagtgtgggggagctataggttttgcttgaggagaatagaatctactttagcctttgcttgtgagcttcaacaatgaaaataagaaaactgtattatagttcggaggagtgtttagatgcgtgtagtaatgtgtgtgtgacttttggccaaaagattgcggttgctttaagtcgtagccttggttgtgttgtgattgctacaattttatttatttatttttggact

SEQ ID NO: 448 - DNA, 773 bp, Glycine max
ttttttttttttttttcttaaaaaaaaaattctgtttaattcttagatataatcatgcacacagaaatattatacatgaactaatttaatttcttacgaaagaaaaatcataacaaagaaagttaattttttttttttgcaaatacgagcttccttatttacattgaaaggggttttgaatatttgatttgtcctaatgatgtatacagggaaatggcatatgaatttgccagcatccctgtaactgtgatgggattttattttttttcttttctgtgtatgatagttgggaagtttatagactttgttgggtctcaatcccatcacaaggttcgtaatggtggctgggaacttgctgagaccactgaattgggcttaacgtcagcggtggaaagcaacattcgcattcctcttggcatggctgtggaattgccaagccctccttacttagaagagtttcttgctcactctcttccttggccccacctattggtgctgacgcttccttcagtgggccccaacattccaccttgttgaattctggaatgtttgagtgaaagtaaacccaaaccaaggcatcttgcaattctgggtagttgttgaataggttttcgtcgccgtgaaccaccgccttcaacaccactggtagctccttgcagaagatgaagtatcgtaaccttgctaatatatctaagagaaaatgaccaccactgatgtggcagtgtacgtgcagagacatctttcccttcaccttcttccactgtgcaaccaat

SEQ ID NO: 449 - DNA, 482 bp, Glycine max
gagcttagcggttatatcactatgggttagagtataagtccttgggagatttcctgggtgtttattttcgtccactcctaagaataaaaccttaagctttgaggcttcaaatatggctggcccgaacaacctagcaacaggaaccattgctttgttcttcttcccgacgcgtcttccgtagtagggaaaaagagaattgtgacgcggagaaagcgaaggcttgttaagcttagaagggagcacaggaacagttgttagagtacccatgttcctgttgttgttccaatctttgagggaagatgaaacagtagtaccttgatgaaggaaggggcttttaatattctaagtagtggaggagtgtgggagctctaggttttgcttgaggagaatctaatctactttagcctttgcttgtgagcttcaacaatgaaaatagaaaagggtattataggtcggaggagtgtttagaatttagatgcgtg

SEQ ID NO: 450 - DNA, 797 bp, Glycine max
gcggccgccctttttttttttttttttttttttttttcaattcacgttccactcacagtcggagctctcgggttcgggcatcttattcaggtcaacaacccgcactgcaaaatcaccggacccaccgccacagctggcagagagaagctgccgtggtggcacaacatggtggtgatggtggtgaagggttgcctgaagagcatcgactctagcaccgacctcggaggccttcttcctaatagaagctgctgacatgtcacagccgccggtgagggcggcggcgccttctccgatgagaagctccgggaagttaagacgcgcggagggtcctcgaaggtaaaagacggcggtgtcgtaggcacgtgcggctgcgacaggggtagaataggaaccgagccaaatccttgaacgcttattgggttctctaatttcagcgacccacttgccccacttcctcatccttattcctttgtatcttctctgatcagcaccctccaccaccttcctcgttgctgctgctgttgctgtttctctctctcctccttctcttcttccttcactctccatctctctctctctctctctctctctctctctctctctaaagtagttaactttggttcgttgtgtttgtcaatcaaatcgaaaaaatcactaaagagagagagagtgaatgtgttgttccatgacgaatgagaaatctaactcgtaaaagacacggaagtggaagaagggttataagggagagagactcgcgcactaagcttgtcatctgcgtaagcctccaccttggtatc

SEQ ID NO: 451 - DNA, 778 bp, Glycine max
gaacgtcgaatggggtatgagagtggattggttggttggttgattaatgattatagtgttatatataccgtcccttgttttctgagtttccgtgcagcaaaaaaaagtgtgaagtgcagagggatcattgacctgctgcgacgaacacgacgtcgtttttgtttccctctgtgagtgatgggattcttcaaaagggtagctggatttcttgggtttggaaaccacaaacacgattccaaggatgagaccgacgacggtcaacctcgagtgagagaaaccgtcgtcgatcgcccccacctcgctcccgttctcactccctctacttccggcgacggcggaattcagggtctggattggtatgtaaatcatcttaggatggatgaagatggtgatttagcagatcagttccttgatgaggtttcatcagagaagccagaaggagttgcagtagatcatcataaaacacaagcaaggtttaaactgaagaatgggaccaagtcagtcagagtgaagaaaccgatcctattaggtgggaaaattattccacagattgtggaatcccaccagggcagattgtagaaaaatttgatctggctattgattatggtggtctcatgtaagtattgaactgttgggcgtatgattctgctaattatttgtgacagtttgtacttccttatcctttctaactagctaatgcttaaactgtttgctatgcttattaaattaataaagttaattttggatttaaaaaaaaatatttaaaattaaatattta

SEQ ID NO: 452 - DNA, 528 bp, Glycine max
gtatgagagtggattagttgattatagtgttatatatagcgtccctcctttgctttccgagtttccgtgcagagggatccttctcagtgctgcgacgaacacgacgtcgtgatgggatttttcaaaaggatagccggatatctagggtttggaaaccacgaacacgattccaaggatgaggcccgcgatggtcaacctcgtaccacacaacctcgtaaaggcttcagtgtccctgcccaggtcgtcgtcgatcgcccccacctcgctcccgttctcactccttctacttccggcgacggtggaattcagggtctggattggtatgtaaagcgtcttaagatggatgaagatggtgatttagcagatgaattccttgatgaggtttcatcagagaagccagaaggacatgcagtagatcatcataaaacacaggcaaggtttaaaccaaacaatgcgaccaagtcagtcagagtgaagaaacagatcctattagatgggaaaattattccacagattgtggaatcccac

SEQ ID NO: 453 - DNA, 1492 bp, Glycine max
cacacatacatacatacactagtagtctggtgtgaccttcttttatccttttgcttttttcgtgtgcaattaacacacacacacacaaaaatgatggcatgccaagattggccagagccagtgattcgagtccaagccttggctgaaagtggcttaaccacaatccctgaacgtttcataaagcccaagtcccaaagacccactaataataacaactatgctccaaaggtcaatttctctcaaattggtcatcatgagaacaccaccacgaccaacaacaacaacaccaacatcccggtgattgacatgaagcacatctatggcggggatgagaggcggagggcggagacgctccggctcgtgtcggaggcatgccgggaatggggtttttttcaggtggtgaaccatggggtgagccatgagttgatgaagggggcgagggaggtgtggagggagttcttcaaccagccacttgaggtgaaggaggagtatgccaactcccccaccacttatgagggctatggaagtcgcttgggagtgcagaaaggtgccaccttggactggagtgactacttctttctccattacaggcctccctcacttaggaaccaagctaagtggcttgcatttccacaatcctttaggaaagtgattgctgaatatggggaggaagtggttaagctaggaggaaggatactcaaaatgatgtcaataaaccttggcttgaaagaagatttccttctcaatgcatttgggggagagagtgaggttggtgcatgcctaagggtgaatttctacccaaagtgccctcaacctgacctcacttttggactctcccctcactcagaccctggtggcatgaccattcttctccctgatgattttgtgtctggccttcaagtaagaagaggagatgaatgggtcacagttaagcctgtcccaaatgcattcatcatcaacattggtgaccaaattcaggtgctgagcaatgcaatatacaagagtgtagagcacagggtgattgtgaactcaaacaaagatcgtgtgtccttggcattgttctataatccgagaagtgatttactcattcaacctgccaaggagcttgtgacagaggagaggccagccttgtactcaccaatgacctatgatgaatacagactttacattaggctaaatggaccttgtggaaaggcccaagttgaatcattggcctcccaaacatgagttaatagtgtgaattaatagcaagtttggtttctcaatgtgattttctatgtttcagatgtcattttaagaagttaataaaaagttaattgttataacttctatattctcaacatgattttgtacttcgcaggtagtttccatgctattatctttcttctaaaactattgatgctttttttttgtgatatctcaagaaataagtatttaataatatccacaaattagtatatttaaaaaaaaaaaaaaaaaaagggcgggccgc

SEQ ID NO: 454 - DNA, 1058 bp, Glycine max
cggtgattgacatgaagcacatctatggcggggatgagaggcggagggcggagacgctccggctcgtgtcggaggcatgccgggaatggggtttttttcaggtggtgaaccatggggtgagccatgagttgatgaagggggcgagggaggtgtggagggagttctttcaccagccacttgaagtgatgggggtgtatgctaatacacccctcacttatgaagggtatggaagcaggttgggagtgaacaaaggggccattttggattggagtgattacttctttctccattacatgccttgttccctcaagggaccaagccaagtggcctgccctcccaacatccttaaggagcatcatctctgaatatggtgaacaaattgttaagctaggaggaaggatacttgagataatgtcaataaatcttggccttagagaggattttctcctaaatgcatttggtggggaaaatgaccttggtgcttgcctgagggtgaatttctaccctaagtgccctcagcctgacctcacttttggactctcccctcactcagaccctggtggcatgaccattcttctctctgatgattttgtgtctggccttcaagtaagaagaggagatgaatgggtcatagttaagcctgtcccaaatgcattcgtcatcaacattggtgaccaaattcaggtgctgagcaatgcaatatacaagagtgtagagcacagggtgattgtgaactcaaacaaagatcgtgtgtccttggcattgttctataatccgagaagtgatttactcattcaacctgccaaggagcttgtgacagaggagaggccagccttgtactcaccaatgacctatgatgaatacagactttacattaggctaaatggaccttgtggaaaggcccaagttgaatcactggctttccaaccatgacttaataatgtcaattaataacgtgtttggtttcacaatgtaattttctatgtttcatgtgtaattttaagttgatagttataacttatatttcccacataattttgtacttcttaagagttttc

SEQ ID NO: 455 - DNA, 621 bp, Glycine max
gacactacaactaaacacactagctattagctatagctagaagtccctccaatccctctttgtctttgtgcttttctagttccttccaaaataccaacaaaagcaaagacaatgagttgccaagcatggcccgaacccatagttcgagtccaatccttagctgaaagtggcctaagttcaatcccttcacgctacattaggcctcactcccaaagaccctccaataccacttcttttccaactcctaaaccttttcaaactgatcatcatcatggtcatgatcagaaaacttccgatcatgaccatgatcatgatcatgttaacattcccgtcattgacctgaaacatgttttctcggaggatccgatcctccgagaacaagtgtttgggcaggtggaccaggcatgtcgggagtgggggttcttccaggtggtgaaccatggtgttagccatgagttgatgaagagttctagggaactgtggcgcgagttcttcaaccagccacttgaggtgaaggaggagtatgccaactcccccaccacttatgagggctatggaagtcgcttgggagtgcagaaaggtgccaccttggactggagtgactacttctttctccattac

SEQ ID NO: 456 - DNA, 566 bp, Glycine max
gacactacaactaaacacactagctatagctagaatcccctccaatccctctttgtctttgtgcttttctttagttctttccaaaacagcaacaatgatgagttgccaagcatggcctgaacccatagttcgagtccaatccttagctgacagtggcctaagctcaatcccttcacgctatattaggccacactcccaaagaccctccaacaccacttcttttaaactttcacaaaccgaacatgatcatggtcacggtcgagagactcgtgaccatgatcatgttaacatccccgttattgacctggaacatcttttctcggaggatgaaatcctccgagaaaagatattccgacacgtgtgacgaggcgtgtcgggagtgggggttcttccaggtggtgaaccatgggcttagccatgagttgatgaaaagttctagggaactgtggcgcgaattccttaagcaaccaatttagcttcaagaaggataatccaaattccccaacaactattgggggcaatgcaatcggtttggaattgaaaaatgttgcaactttgaattggat

SEQ ID NO: 457 - DNA, 349 bp, Glycine max
gacactacaactaaacacactagctatagctagaatcccctccaatccctctttgtctttgtgcttttctttagttctttccaaaacagcaacaatgatgagttgccaagcatggcctgaacccatagttcgagtccaatccttagctgacagtggcctaagctcaatcccttcacgctatattaggccacactcccaaagaccctccaacaccatgatcatgttaacatccccgttattgacctggaacatcttttctcggaggatgaaatcctccgagaaaagatattccgacacgtggacgaggcgtgtcgggagtgggggttcttccaggtggtgaaccatgggg

SEQ ID NO: 458 - DNA, 841 bp, Glycine max
atttccaatgctcataccttttgtgggactggttggtccatttcagaattcatctgggatgtttagtatcgtggccttcaactcatggtctctaagttattaagcgaagaaaaacacaaggaagcatagggatatacttgaacaatactaatcaaaagcagagtactatatttgttcatgtctcaacaaaaacaatgatagcaataacgtggaacgtaccccagctggattaatctatgtccggcagtggaacaacatgcagtacgtttcaacagcagcatttttgctctcaatatactctgatttccttcaaagcacaaatcaaaagctcaattgccatgggggcacagtggaccatgaagaaattcttaattttgctaagtcacaggctgattacattttggggtccaacccaatgaacatgagctatttagttgggtatggccctaactaccctaaaagggtgcaccatagaggggcatccattgtgtcatacaaaaagaataaagggttcatagggtgcactcaagggtatgataattggtatggtagccaggcacctaatcctaatgttctggttggggctttggttggagggcctgatgggaaaagacaattttgaggacagaaggaacaattttatgcagactgaggcgtgcacatataatactgccccattagttggtgtttttgcaaagttcttgcatatagaaaaccaaaaactggttcatgattgtaattcacatttggttgcctccttcaaatgatatagtccttcaaataatatagtgaattaatacagtatatgtttctcataaaaaaaaaaaaaaagggcggccgc

SEQ ID NO: 459 - DNA, 2314 bp, Glycine max
ctcgagccgtccgtttctctatataaatttctcacgcgtcttcattcctctcattccctctgaattgttctcacccttcagatctctctcttcagatctctctcccttccttccatcccaaccacaaggttgctgagaagacataaaaaatggtgaagatttgctgcattggagctggctatgttggtggcccaaccatggctgtaattgccttgaagtgtcctgagatcgaggtggtcgtggtggacattgctgcaccgcgaatcaacgcgtggaacagcgaccacctcccgatatatgagcctggccttgatgatgtggtgaagcagtgcagggggaagaatctcttcttcagcactgatgtagagaagcatgttgccgaggctgacattgtctttgtctcggtgaacaccccaacgaagactcagggtcttggagccggcaaggcagctgatctcacatattgggagagtgctgccaggatgattgctgatgtatcgaaatcagacaagatcgtggtcgagaaatcgactgtgcctgtgaaaacagctgaggcaattgagaggattctgactcacaataggaaaggcatcaatttcacaattctgtcaaaccctgagtttcttgctgagggtacagcaattgcagacctgtttaagccggatcgagtcctcatcggaggcagggaaaccccagagggtcaaaaggctattcattctctgaagagtgtttatgcccattgggttcctgaggacagaatcctttgcaccaatttgtggtctgctgaactctcaaagcttgcagccaatgctttcctggcccagaggatctcctcggtgaatgccatgtcggcactttgtgaggcaactggtgctgatgtctcccaggtgtcacattcaatcggcacagactcaagaattggaccaaagttcctgaatgccagtgttggttttggaggatcatgcttccagaaggacatattgaacttggtctatatctgtgagtgcaatggccttcctgaggtggccaattactggaaacaggtcatcaaggtgaatgactaccaaaaaatgcggtttgtgaaccgcgtggtgtcgtcaatgttcaacacagtctcagggaagaagattgctattttgggatttgctttcaagaaggacactggtgacactagggagaccccagccattgatgtgtgcaagggccttttgggagacaaggccaagttgagcatatatgatcctcaggtcactgaggatcaaatcatgagggatttagcaatgaagaagtttgattgggaccaccctgctcatcttcaaccactgagtccaacttccaacaaacaagtatctgtggtttgggatgcctatgaggcaatcaaggatgcacatggcatctgcgttatgactgagtgggatgagttcaagaaccttgattaccagaaggtttatgacagcatgcagaagcctgcattcattttcgatggccgcaacgtcgtgaatgttaacaagctgagggaaattggtttcattgtttactccattggcaaacctctagattcatggctcaaggacatgcctgcagtggcttaaagggaaaaagcacaatctggagcttcctttagggatgttgaatttgttgttggtctttcagagagaatgcccccatcctcctcttatatatgatgattatcatgctattcttatagtttagttttctgttgctgtttttgtctttgatgttacttttatttgatcaggttttaccccaaggtagagagagcttaattgccaaagtatattattgtctttagctcgctaaaaatccttatttgttgacctggtttattgtaataaatgagtactgagggattttttatacaacggatatcatttgttttaaaaaaaaaaaaaaaaaaaagggcggccgccctttttttttttttttttttgaattccaaaatgacacgttattaatgtaaactcgaaatctcccttgacacatctcaagtccaaaattataaacacatcgtagattattacaataatcataaagataggctcatttttgcattaagcaagagggggggatgtggccaatatggaaactgtccattactcatcccagagttcttcaattgttttgtacccgggagatgtcttgctaaaaaaaccatctccagtaactattctctcctgcttaatgtcagagaagttggcaagcaaatctgcaggtatggaccaatcaaagagatcaaagttttccttgagccttgcatcatttgtgctcttgggaagcacactgtggcccattt

SEQ ID NO: 460 - DNA, 864 bp, Glycine max
gcacactgtggcccatttgtagtccccatctaagagctatttgtgctgcagtcttccctaacttctctgcagttgtgtgcagaaatggattttgaagaatattactttcactgtatccttttcccagtggtgaatagcctgataagtgcactcccttggatttacagaaagcatgcaattctggctgctgtaatgaagggtgcaattccacttggttaacagctggaggcacacttgccacatccaacaaatcctgaagcttctttacagagaaattgctgacccctatagcttgagccttgccagaattgtagagtgcctccattgctctccatgtgctaggtatgtcaggtttggtaagcttcccgtttttcgcactgactggccaatggataaggtagagatccaaatagtccagttgcaaatcttgtaaagttttatcaaatgcctctgggacattttccggcaagtgatcattacaccatagcttggaggtgataaacatatcttcacgcttaactacaccatcagcaaataacttcttcaaggcagcaccaatctccttttcattgccataaatttgcgcacaatctatatgccgatatccaacgtttattgcagtggccaaggcgcgagcaacaacgccaggttcagcgagccacgttcccaaaccaacggaaggtatcttagcgcctgtgttcaactcgaagaatcgaagatcgtggctggccatactctatgatgcagaacggaactgagagaaatcaaggggtcaggggtgtacgcaaatgcgaatcgatatggaatcaacgaattcgtttgatttacaaattccgtgacaaactagaatacattcttacgtcg

SEQ ID NO: 461 - DNA, 636 bp, Glycine max
taaaagtgttggtgttgaggctcctgcagtgcagatcaaaaggccaagctgccccagctccttaaaaggcatgggaggctggtccttcagttgatgaatttttgccggccttgggtctcgaaaaggatctcataacttttcaggctgaagaagttgatatgacagctctcaatcatatgactgatgaagatctcaaggctatgggcataccaatgggaccaagaaagaagatacttttagcactggagtcgaaagtctaacatttagttatggaattgattttctaagctggatggtggtgggaggagatcaggatctaaaaaccaagtgtaatagcatagttctttgattattttcgtttttaatattttcccttactttttagacattaatcaagttaattttggtgtttattttgctaaaccccgtcaatctcctgaaactctcttataatgcaattaatggatttgagagtttaccttttgaatcaatctgttggatgcctcaagcgcaaatgatgtaatgctaggaacagaatggatgatacttttcaacaccgaggttgatatcaaaatgcaaagtcaaacatggatgaactaatttgtttcaagtgatttaaattgaaatgcttgcggc

SEQ ID NO: 462 - DNA, 549 bp, Glycine max
gttaggtcagctggccttttgatctgcactgcaggggcctcaacaccaacacttttactgcttgatttaactcctaaaaagtcacaaaaggctggttcttcagttgatgaatttttgcggtccttgtgtctcgaaaagtatctcataacttttcaggctgaagaagttgatatgacagctctcaatcatatgactgatgaggatctcaaggccatgggtataccaatgggaccaagaaagaagattccttttgcctctggagtcgaaaggatgatattttggtcttgtattactataatacccaacacatattggtagaggcttatgtttatactttgcacttggtcaagctttgcctgtaattttctaaaaatccttttggtgcttttattaccatttttaatcttgtctcctcccttgcattgctggaagtggcctaacaagctgttaatatttaaaagacaaaaaagaagcatgaaagctggtttgatgaagatgcatcttaaaatagagtgattgctcctgtgaatataatcataattccttttg

SEQ ID NO: 463 - DNA, 1067 bp, Glycine max
  unsure (1)..(1067): unsure at all n locations
accagcacaacgctaaatttcctctctctatttctcttctgttcttttcgttttccttttcgggtagaattggcgatcttccagaaaccctacctactgattctcttcccatcagattcgatactcaattcgatcaaacggagttagggttttgattctcttcaacctttcgcacaatttaggttcccgcaccttcaatcctctctcctctgcaatcgaataagtgttcgtgtttaggttttgatttgggttttggtttcatttgggactaacgcaaaggatgtatgctgatcgggtggatggtggaactcggagatcagtgaaggaacgccttgatgggaattttagcactggttctactcgccaacacagaatcaccggaaagaggcagagggaagatgacaagtggaaacatgatctctatgaggatgatgaaccccagctctctaatcgcaaggtcactgctcaagatcttcgtctgaagcttcaaaagaaaggtcttcatcctggaggtcaaactggaaaaagttctgttctggtgagcgggatctccgtgaaaggctatcagggacaatgactcgacaacctagaaactatggcccaccaaagcctaaagtggccgctaaacctagcagtaaaagtattcatgtgagactcctgcagtacatatcaacagatcagctaacccaactcctaaaaagttgtcccggaaggctgacgcttcactggatgattttttgcagtcattgggtctcgaaaagtatctcttaagttttcaggctaaagaagttgatatgactgctctcaatcatatgactgatgaggatctcaaggccatgggtataccaatgggaccaagaaagaagatacttttagccttagagtcaaaaggagtgacattttggtcttgatttcactgtaccctttttataacttatataatctcattagtaggcttatgttttaattgtttaattgtttatacgtttggtcttggtcaagcttggcccgtaatttttaaaaaatccttttggtgctttttttaccattttcnnnnnnnnnnnnnn

SEQ ID NO: 464 - DNA, 453 bp, Glycine max
aacatattaataactaacattttccgatctaaacgatattagacttctaacaatagttttgtcaaacacacaataaggtcaagactcaaacaactgaattccaaaatgacacgttattaatgtaaactcgaaatctcccttgacacatctcaagtccaaaattataaacacatcgtagattattacaataatcataaagataggctcatttttgcattaagcaagagggggggatgtggccaatatggaaactgtccattactcatcccagagttcttcaattgttttgtacccgggagatgtcttgctaaaaaaaccatctccagtaactattctctcctgcttaatgtcagagaagttggcaagcaaatctgcaggtatggaccaatcaaagagatcaaagttttccttgagccttgcatcatttgtgctcttgggaagcacactgtggcc

SEQ ID NO: 465 - DNA, 532 bp, Glycine max
cgctacctagttggttcctgtcctgggacgaacaccagcactcgctcactcttttcttctaactgcgaccacatgcagacctgataagcactctcgcatttcccaactctctcacaccgccaaatttcctctctctctctctctctctctctctccatttgttttcgttttctttttcgtgtggaatttgcaatctcccagaaaccctatccactgattcttttcccatcaaactcgatactcaattcgattaaacggagttagggttttgattctccgcaaccgttgtcataatttgggttcctgcaccttcaatatcctctcctctgcaaccgaataagtgttcctgtttaggttttgatttgggactaacgcaaaggatgtatgctgatcgggtggagagtggaactcggagatcagtgaaggaacgccttgatgggaattttagcactgattctactcgccaacacagaattacgggaaagaggctctgggttgttgactggtgggatactattattgcatgtgaacc

SEQ ID NO: 466 - DNA, 954 bp, Glycine max
tttttcgcgtggggccttccgtaccaaacaaagtggaatctttcttccgcacaaacaacctttcacgccccaaagccacacacaaaacattttccttttccaacccttcaattccctaaacatttttcttttccttcgaactccaattccctcaccagaacacggtcaccattgttttccctttcaacaacattcgccatcctttcgcgacgaagagaaaaaaaaatggggtgttagggtttcgattctctgcgacgctctccgcattgcgctaccctgcaccttcctcgcggtattgcgcgcctgtctcactcccattccgtttttccgctcccctctctgtgttgcgaaaataagggttcattggtttggggctaattcttcttccgatttcgagccgagtgaaatcgttaagagagaaaatgtacgctgatcgtatggagggtggagccaggaggcccgtgaaggaacgccttaataatgggaatggcgtcagtggctctactcgccagcagcagcagcgtcaaatcactggcaagaggtcgaggcaagatgacaagtgggaacatgatctcttcgacaatgacaaacctcagatcactaattgcaaagttagtgctccagatcttcgcctcaagcttcaaaggaagggtcttcaacttgcagctcagagtggaaagagttctgctccaaacatgcgggatctccatgaaaggctatcagggacaatgtcaccacaacttacaaatgctgatcagccaaagacaaaagttgttaaatcaagcagtaaaagtgttggtgttgaggcccctgcagtgcagatcaaaaggccagctgacctaactcctaaaaagtcacaaaaggctggttcttcagttgatgaatttttgcggtccttgtgtctcgaaaagtatctcataacttttcaggctgaagaagttgatatgacagctc

SEQ ID NO: 467 - DNA, 392 bp, Glycine max
ctctctcacaacgctaaatttcctctctctatttctcttcatttcttttcgttttccttttcgggtagaatttgcaatcttccagaaaccctacctactgattctcttcccatcagattcgatactcatcattcgatcaaacggagttagggttttgattctcttcaacctttcgcacaatttaggatgtatgctgatcgggtggatggtggaactcggagatcagtgaaggaacgccttgatgggaattttagcactggttctactcgccaacacagaatcaccggaaagaggcagagggaagatgacaagtggaaacatgatctctatgaggatgatgaaccccagctctctaatcgcaaggtcactgctcaagatcttcgtctgaagct

SEQ ID NO: 468 - DNA, 2155 bp, Glycine max
aatcacccatataataatcaagtttcattatgtttcagacagggtaatcaaaatggagggtttctaagtcatgcaaatgactgcaacagcggccgccctttttttttttttttagtcttcattgataactcagaaaagctttgaaataaaaacaaatttaggcttgtcaatacattaagtcctgctttattctcgttggctacattccgcaaaaggtgtctagtcactcaagatgaagtttatatctttgatattattccttaacgaaggagaaacaaacactgaaaccaaaataatgaatgcccccccagtcaccagctgcaaggcaccattgcttcaatgtgttgatctaccacctatgcaaaaaatgaaactagtattacacgtctttcccttgtttggcaataaaatttaagactcctccactcccaaatattgggagtgagaagctgccaggagggctgcaccaatgccagagccatcattagcatgctcaatgacaatggtctcagcagcctcatctcccagcaattccttcagtgcactctccaagcattctctaaatttggtgtagtgttcaaacaaccccccatccaacgctatcactgacttttgcttctccccaaccttaactgtgtctcttcctattttcttaaggatgcccaaaataccagcagcagcaagccgagctccgcgagtagcaacaatgtcacacagttcaacaacgatcttcctcattttaagggatgtgtttgagatctctaatatatcctttaacttgtttccaaccactttcagatcagaacttgtgtcatggtgcatggctgacatgtcaggcgtcctaagtatgaaaggaactttcaatttggggggaacagtatcgccaaaaaagtcagcttcttcggccatcttcaataaagctctccttacaacttcccccaaatacatgccagaaatcaatttctcaaaaatctgttctccagggtttaagctctgagcatccagagctagatcatattctgttagaggaagatgtgatgatcggaaattaccccactccatgtttataaccatatctcctgattttggtataagcccatgccattttggaatagcatgtgctcgttctacatatgctgcatttgtcccagtaccaagaatcacagcagcaatgacatcctgattgttgaatctggctccagccaatgttccaatggtatcattaactagagctgcaacacgcatatccagaccaattttttctaaggacttggttagttcacccaccacatcttctccaaccgcatcctcaatattgaaacctttagtccactttattagagtcccagatgcaattgatgtttgcctcactggaaatgagaatgtaaaacccagttccctttgtctgccagggggagggtgaaacccttcaggttctgaaccaacaaactttgcaagagctgctgctataaaatcaaacaatgcttctgaagagccagtcatcaaatttggaggaattgaaacttcttcaaactcctggccgataacacctttgtctttcccccctaaatgtacacgaaggacacggaagtttgtgcctccaagatccaatgcataatagagtccttcctcatccccagttgggagattatcgacaaaactgatcaacatattgagcttgctaccaccttcagatgcgagacccgcgtgcatctcaacatccatggcatcagccacttgtctaagcttcacaattggggtcccacacttgtcctcaaactccttcagtatcgccatggcgcgactccacttccgggaactaatcatgcggtggcgcaccaccagtgccgccgtagcgcagacggcggcggcgcagacaaccgcagctcccaccgcgaccttccccatcacagcactgaaacaacaaatacgaatcccgcaaagttggaagctttgtcctctgatgggagaaagggaaacccagattagattggattttaattttaatggagaagtgagagatgattcttattattgctattggtgcacattggtggagaaagtgacagtggcgtggcgttgggggttaggaaagagaggtgaaatgaaatgggacagacagacacagcagatacaggaaatatccaaaaaaata

SEQ ID NO: 469 - DNA, 987 bp, Glycine max
tttttttttttttttaataaataaactcaactcttcattgataactcgcaaaagccttgaattgaaatcattcacctttgtcaataaattaatcctgacttattctcattgaaaacatgttacattgggaaaacgagacaactcaaaagtttacatctctcctattattctttgatgtgggagagacaaacactgtaaccaaaacaatgcaccagtaattagccgagaagcagcaatgttgcatttgcagcaagaagaacacagccctacaaataactccactgtggacttggtccaccttcctggttaaaagctctctaggactagtaacgaagacttttctgcttcaatctgttgatctagtaggtatacaaaaaaatgaaactagtgttacactgatttaccttgacattaaaccacatcttcaggactcctgcacttccaaatactgggagtgagaagctgccaggagggctgctccaattccagagccatcattagactgctcaatgccaattgtctcagctgcctcatctcccaacaactcctttagtgtactctccaaggaacttctgaatttagtatagtgttcaaacaatcctccatccagtgctactactgatttcttcccgtcctttactgtgtctcttcctattttcttgaggatgccaaaaataccagcagcagaaaggcgggctccccgattagcaacaatatcacagagttccacaacaatcttcctcattttcagggatgtgttattgatctctaatatatccttcaatttgtttccaaccaccttcagatctgaagatgtatcttgatgtattgcagacatgtcaggtgtcctaagtacgaaaggaattctcaattttggaggaacagtatctccaaagaagtcaacttcttcagccaacttcaacaaaactctccttacaatttcacccaaatacataccagaaattatcttctcaaaaatctgttctc

SEQ ID NO: 470 - DNA, 497 bp, Glycine max
tcatccccagttgggagattatcgacaaaactgatcaacatattgagcttgctaccaccttcagatgcgagacccgcgtgcatctcaacatccatggcatcagccacttgtcttagcttcacaattggggtgccacacttctcctcaaactccttcagtatcgccatggcgcgactccacttccgggaactaatcatgcggtggcgcaccaccagcgccgccgcagcgcatacggcggcggcgcagacaacggcagctcccaccgcgaccttccccatcacagcactgaaacaaatacgaacgaatcccgcaaagtcggaagctttgtcctctgatgggagaaacccagattagattttgattttgattttaattaatggggaattgagagattgtagttatcggagcacattgtgatttgtgagagaaagaaagtgacagtggcgtggcgttgggggttaggaaagagaggtgaaatgaaatgggactgacagaca

SEQ ID NO: 471 - DNA, 1158 bp, Glycine max
atgtaataatagttgtacctatattatttacatgtaaaaagcggccgccctttttttttttttttgtataggtagtggcacctatattttttctttgttaacctaagaataaatcttagatgcttagtggactacattaaccagcccaacgtaagagtttcatcattatgtaccaaaaaagtgatccatcattgaagatggaaaatgcaaaagacactcattttggggggagaagatcactattgttgtccctcaaactcaattacaatctcaccagtgatcctgtaagaaatattttagaagaataataaaagaaattgtgaaaatgaatgtgaaaaacacaaactcagctcagctttttcttctccaggatccaattatggactttgttgacatattgctcatttattttcaaatgtaataggcataattttctgtaacccttcaagatatacttatctatgtaatcttcatatctttcatagattgctggtactgtaagaacaataaaaagactggtgtatgccagggtaaggaaatcagttaagccaccgatgatagaaattatccagaggtatgcagctactttcaggaacagccttgagtctttaccaagggcaatatcttgagaaactgataacagatcattaactcttgtgcggataaaagtcttcacttcgtttgccatttcctctgagagatgcaactgtggtagaggtggagcaggtctgttgagaattgcagctgatttggcccagagaaaaagaatgacaatgaggaggaggagaacattagaaacaagagacagaagagtataaccagatctttcaaacacaacccaaacagctagtgtgaccaacaatatccccacagtaaggttcttccgcctccacagtattaaatctgcaacttgaccaccaccaaggatctcatgaagacttctttgccggttaaacaatcgatcagaggaacccattagggagagaatccaaagtgaggaacttgaacccagcaagggatctgtgtcacaaaaaagcagagagctttgagatgatccacgctcgagccgaattcaagcagtgaacaccaactatgtcgaacttttatggtcttattcaatttttcaccttacctatctatctcactttttataatttt

SEQ ID NO: 472 - DNA, 1347 bp, Glycine max
gcggccgccctttttttttttttttttttatgccaaagtgatgacaattttagtcaatactaacaagtcatagtttgcaactctagcacatggtcaaggtatccatctcatttcgtacaagaagcaattattcaggcctcaactctgaagaaccttgtgaaactgaatgcactgttagtccaatgtttcacaaattcatagccaggaaaaaaagaaacaaaaagttgctatatgtttttcaatggccaaggccatgaaatgcatgcaatgttaagcacccccgatgaagagaatcagaactggaactgcatctcagaagcatatccaagggcttcaaggtgtgcagccatggccttgttcataggtggtgggccacatctcaatatcttaatatcttgtgctggagcagggcaatgggtttgaatcatctcctttgacacaaatccttcaccaccatcccatacctcaggaggctgatttaacacatagtatattttgaatcgatctggatagttagaagcaagaccgtccagctcttccttcaaaagaatgtcctcatacgtaacattggcatagataagatgtactttggtcctgtcattagggttttctaatatagctctggcaacttggaacattggggtgattccagaccctccagcaagcatcccaaaagccctaacctcgccaggttggtacttgaaacgtcccttaggtcctttcacggaaaggtagtcaccaacacgcatctcacggaaatggtgtgacatccttccttgtgggtacatcttaataactagttcaaaatgtccaacatcggaatccaaagtagtaggagtatatggtttgataacctcttcaccttgagcatctttacccctgcaacttatgtgttgcccaattggaagacccaaaacagatgtaggtgttgggagtgcaaatgtgaactttgcaacattatggctcagctgtgcacgcttaacaagtttgaatgccttaaagttctctgggtccaagcaacctttggtcttcttggatgaatagagatatactgcaccaagcccaatggctacaacggccacggccacacccacaagtatctgattttcttgtgcttgcaagaaatccatgatttgagtgaaaagaaaaatgagtgtgtgaagggaaaagtaaggaacttgtaaattaaataagaaaggaactggggaattaaaaaaggaaaaaatgtaagagaaagggtattgccgtattggtaggtaaagatagttaagtggtggactttggttctgaaggaatgaatggttgtgactgctgagggatctggtgcaacaactaccagcccctctc

SEQ ID NO: 473 - DNA, 468 bp, Glycine max
acgagtcctctcatcatcatcacccttctccgtgaggatctccaactactcatctgaggatgaagaaaatgaagaacaagagggtggaaatggaaatggccatgttgatgatcaggctgaggatttcatcagaaggttctatgaacagctgagaatgcaaagccgcatgcagttgctggagtatcaagagatgtgattgtagagaaaaaaatgacttttgtgcttgtgctcctcaacttgatgatgatcaacaagtttagctagccattcctgggattaatatttaatttgcttttgttgatctttcaagtttcaacttcattgttttttcccagggaaatttggctgtcctgtttgtggtccttgaaatatatttgatacatgctgtaaggattttgagcaatggatatacttccattgtgattctattggttttcataatataaaattcaatctttatgttttcct

SEQ ID NO: 474 - DNA, 902 bp, Glycine max
gcggccgccctttttttttttttttgttcataaaaactagtatgtagaataactgaaagtttataaaaagtacagaaagaaagggatggatatagataaagaaaaaacttgtgttttcttctttgttattattgatattaaaaccataaaaaaaaaaaaaaaaacttatgttacgtatttctttcttgactacttttaaggagaacgcgaaaaacatgacttgtaaaattaactagaatgaagggtatatgtttgatctttattcaaggtttaagattgcagtgcccgttggtcatattcttgatagattcaaatctgggacccttttcaccgaacttggtgttgccatatagctccaaatagtctccataacgataattacttggatataagagtttgttagcaggggaaataatggcttcaccaactgggttataaaagctggctatggagagtctacttccgtttttgtcaggcatgaccctgtgcacaacacttttataaaagccattgctcaacacttctacttggtcacctgtgttcacaaaaatggcattgttcttggagggtggaatctccacccacttgccatctttgaagaattctaggccaggcacttggtcatcttggagcaataggatgatgccaccagcatctgtgtgttctctaagtcctctaaccagttcagggtgtggacattgagggtacttggccacttttgttcccatagcaggtccatttgttccagaaaatgcctccttaatgtagtttttctccaaaccaagattttcactcataagctcagataacttctctgccagcgtaacgagttggtcaatatactgatccattgtttggctgcatttacatataaaattggtatcagattgtgcatttttaag

SEQ ID NO: 475 - DNA, 1854 bp, Glycine max
atatacagagccaatagcatcatcaggaaccacaatttgcacagttgtatttagtaccaatggcagttttactcccattgataagttgtaagccaccttttcgagaaatcaatccccgactaacaccgcggccgccctttttttttgttgatttttagttattgccaagcagaaaccaaaaacgcagaaaacttcctgctgcctttgtgtcattgttgtacaagttatttaacattaacttcctcccagatatgctgagaaggggaaaaaatgtatagcatctgtgagtcctgaaaattaggacagtattatgcatacaacagaatcttttaaaccaaagcctaacataataaatgagttaaaatcagcattctttggttgcaatttcttcctgctgttttgtggcggaaaatagggaaaattttgtttctgcaaagaactaaccaggacatgaaaattttccagaacattcaagcagatgcagccaaaggcacagatctgtagcatgctctctttgcagcacgaacaatatcttcaacctgtgggacagccattctttccagatttgctgcataaggcatgggaacatcagcccagcaattctctcaacgggtgcatcaagataaccaaaactttcttcaatgacagatgtgcagatttcagcgccaacgccatgctgaggaaacccttcttcaactgtcaccagcctgttggttttcctgacagaagcattgattgtggatcgatcaagcggccggattgaacgcaaattaatgacctcagcactgattccttcctttgccagtgtctcagcagccttgagagcatagccaaccatttttgaataggctgtaatagtcacatcttttccttccctctcaatctttgcttttcctatgggaaggcaaaaactggaatcaagaacttcggccgaaacagggaatgactcaccatataacaattcattttcaaggaaaacaacaggatcagggtccctaatagcagctttaagcaaaccacgggcatcttcagatgaatatggtgacaagactttcaacccagggcatgaaccatacaaagatgcataacattgagaatgctgagcaccaaccccagcagcagcaccattgggtcctctaaagacaataggtacagatatttgcccagcagacatgtagtttgattttgcggcagagttaataatatgatctattgcctgcatggagaagttaaaagtcatgaactccacaacaggccttagaccatagtaagcagcgccaactccaatcccagtaaacccagcctcagtgattggagtatcgagaaccctctcggggccatacttgtcgagcagccccttggatatcttgtatgcaccctgatattccccaacctcttcacccatcaagaacactttaggatcagctgacatttcctcatcgagtgcggagttcagagcctccctgacagtaatctctttagctgcagaagacaagtgtctgattgcggagaaggcagggcgaatactcttgtgccttataacacccaacatcttccttccttccttccttgatctctatgctgtagctggatccgatcgccactagcttaacgatggatgcacaacaatcaaatcaaccaaacctacaccctcctcctccacttttatttattctttttctctttttattatttatatctaaagacagaaattgttgacaatatcctacaacggtaaaaaaaataccttcaatatagtattttacaaattttattaaataataattgacacttataaaatacagtaatttattaataataattttcttttaattataagtccggacgagtggg

SEQ ID NO: 476 - DNA, 458 bp, Glycine max
taatatgatctattgcctgcatggagaagttaaaagtcataaactccacaacaggccttagaccatagtaagcagcgccaactccaatcccagcaaacccagcctcagtgattggagtatcgagaaccctctcggggccatacttgtcgagcagccccttggatatcttgtatgcaccctgatattccccaacctcttcacccatcaagaagactttaggatcagctgacatttcctcatcgagtgcggagttgagagcatccctgacagtaatctctttagctgcagaagagaagtgtctgattgcggagaaggcggggcgaatactcttgtgccttataacacccaacatcttccttccttgatctgtaggttgtaggctgtagctggatccgatcgccactagcttaacatggatgcacaccaatcaaataaccaccaaaccaaaccgtaacagc

SEQ ID NO: 477 - DNA, 500 bp, Glycine max
gcatggagaagttaaaagtcataaactccacaacaggccttagaccatagtaagcagcgccaactccaatcccagcaaacccagcctacagtgattggagtatcgagaaccctctcggggccatacttgtcgagcagccccttggatatcttgtatgcaccctgatattccccaacctcttcacccatcaagaagactttaggatcagctgacatttcctcatcgagtgcggagttgagagcatccctgacagtaatctctttagctgcagaagagaagtgtctgattgcggagaaggcggggcgaatactcttgtgccttataacacccaacatcttccttccttgatcttcaatcaagcaaaccaaaccaaaactgtaggttgtaggctgtagctggatccgatcgccactagcttaacatggatgcacaccaatcaaataaccaccaaaccaaaccgtaacagcctaccctctcttccgcttttatttattcttttg

SEQ ID NO: 478 - DNA, 292 bp, Glycine max
tatcttgtatgcaccctgatattccccaacctcttcacccatcaagaacactttaggatcagctgacatttcctcatcgagtgcggagttcagagcctccctgacagtaatctctttagctgcagaagacaagtgtcttattgcggagaaggcatggcgaatactcttgtgccttataacacccaacatcttgcttccttccttccttgatcttttagagagttactagggttgttgcaactgaaaatacaaaaacagggaaaggtatgaaacagctattataatgagagtc

SEQ ID NO: 479 - DNA, 572 bp, Glycine max
gccgccctttttttttttttttaaaaaattacgagtaaaattcattaaataacaaattagatttacaaaacttcgtgatatttcttttttaaggcaaaaacattgtgatgtagattaccagcatttctccttatgaaactagtaaaaatggaaaaaaaaatcatttttttatttactgataatattctgaagacattagtcatcattaattataaaagaaggaagcaccgacaaaggacacgtcagcaaactttgaaatcgtggtggttgtgagtgtgacggtggcattgctcttgttgtaattgttgttgttgttggtggcggagcagctccttctggcgacggagctccatgaccttgcggtgcgagttcgaatgctgagtcagcacgaacgtggggctcgccgcgggtcggtattcgggtacgagccgacccgacttgaaccgaaccccgcacgcgttgcacagcgtcttcggtcccagcggtcccgcgcgccactgcggcgtcttctccgaggcacagtggctgcaccgccgcacgccgccgtcgccggtaaccctcgagccgaattc

SEQ ID NO: 480 - DNA, 1005 bp, Glycine max
gcggccgccctttttttttttttttttttttttttaactgaaaacttatcataaatagtttttgcatacacccaatctaacaaaaatataatttaatacaatcacgcaaggcagaaaaataactctatacacgtgatacgagtttcctctccaatctgataacctctttattccttacgggcgatatgtgactagcaaaaccaaggttgtagagtctataatgaccttgctattttgtatgttttaggtgctgaacttctgctcagtggtgcttgctgtggccccaactgatgttacaaaattgcaaactgcacatttcacggatcttgctccatattggtacgccagtagcatcctgcagttcccacagttgacatgtgccacctgatttgcttccaaagctagattgacagtgtgacaacatgaacattgcacacttgtcgcgccccggatgtacatgagtaaagtatggcaacctccacatactaactgggccatttctgtgccaggaggtggcactgctgtgacagcattgcaaacagcacagcacacggaggtggctccaactgggaacactagaaggtttctgcacccagaacagacaagttgactctgtacaccattagctggtggtgtataaggagctggcggtgttgggtagggggcaagtggaactggcattataaaggactaaaaaatgttgttatctttctctgccaaactctacacagagaacaaagcactttctcccattttttttcagctcccgtgaagaagagggtgccggcaaatcaaataataaagtaagagtcaaatgaattgcttcttccccttgcgcatgaaactaaagggaaggattccagaaggaataagaaagactataagagttaagttaaggcctttcagtggaagttgtatttatgtactgtgggaagtgggaaaatacattacagtataacatgtcctgtggcagcttgccagttgctgctgactaagtagagagag

SEQ ID NO: 481 - DNA, 2916 bp, Glycine max
  unsure (1)..(2916): unsure at all n locations
cgcgcgcactcgagccgaatcggctcgagaaaaagatcatacatagtagtgttggtgggttgcaaagatgcttgggggtcttctccataggggtcataagataaaagggacagtggtgttgatgcgcaagaatgtgttggacgtgaatagcgtaaccagcgttgggggaattattggtcaaggtctcgacttagttggctcaacactcgatactcttactgccttcttgggccgatccgtgtctctccagcttattagtgctaccaaagctgatgccaacggaaaagggaaacttggaaaggctacctttttggaaggtatcattacttcattgccaactttgggagcaggccaatctgcattcaaaattaattttgaatgggatgatgggagtggaattcctggagcattttatatcaagaattttatgcaaactgagtttttccttgtgagtttgactcttgaagacattccaaaccatggaagcatccactttgtttgcaattcgtggatttacaatgccaaactcttcaaaagtgaccgcattttctttgccaaccagacatatcttccaagtgagacaccagctccactagtcaaatatagagaagaagagttgcataatttaagaggagatggaactggagaacgcaaagagtgggaaaggatctatgattatgatgtctacaatgatttaggtgatccggataaaggtgaaaatcatgcccgtcctgttcttggaggaaatgacacctttccttatcctcgtagggggagaactggtagaaaaccaacaaggaaagatcctaatagtgagagtaggagcaatgatgtttatcttccaagagatgaggcttttggacacttgaagtcatctgactttcttacttatggactaaaatccgtatctcaaaatgttcttccattattgcaatctgcttttgatttgaatttcacaccccgtgagtttgatagctttgatgaagttcatggactctattcaggcggaattaagctgccaacagatataatcagcaagattagtccactacccgtgcttaaggaaatcttccgaactgatggtgaacaggcccttaagtttcctcctcctaaagtaattcaagtgagtaagtctgcatggatgactgatgaagaatttgcaagagaaatgcttgctggtgtaaatccaaacttgattcgttgtcttaaggatttccctccacgaagcaagctagatagccaagtctatggtgatcatactagtcaaataaccaaagaacacctagagcccaacttagaagggctcactgtagatgaggcaattcaaaacaagagattgttcctactagatcatcatgacccaatcatgccatatttgaggcgaataaatgcaacctccacaaaggcttatgctaccagaaccatccttttcctgaaaaatgacggaactttaaggccacttgccatagagttgagtttgccacatcctcagggagatcaatctggtgcttttagtcaagtttttctgcctgcagatgaaggtgttgaaagttctatttggctgctagcaaaggcttatgtagttgtgaatgactcgtgctatcatcaacttgtcagccattggttaaacactcatgcagttgttgagccattcatcatagcaacaaacaggcatctcagtgttgttcaccctatttataaactccttcaccctcactatcgtgacaccatgaacataaatggccttgctcggttatcactggtcaacgacggtggcgttatagaacaaacatttttgtggggaaggtattctgtggaaatgtctgctgtagtttacaaggattgggtttttacagatcaagcattgcctgctgatcttataaaaagaggaatggcaattgaggatccatcgtgccctcatggcattcgccttgtgatagaggactacccttatgctgttgatggacttgagatatgggatgctatcaagacatgggtccatgaatacgttttcttgtactacaaatcagatgacacacttagagaagatcctgaactccaagcctgctggaaagaactcgtagaggtgggtcatggagacaagaaaaatgagccatggtggcctaagatgcaaactcgtgaagagctagttgaagcttgcgctatcatcatatggactgcttcagcacttcatgcagctgttaattttggacagtatccctatggaggtttaatcttaaaccgtccaactcttagtaggcgattcatgcctgagaaaggttctgctgagtatgaggagctgaggaagaatccccagaaggcttacttgaagactattacaccaaagtttcagacccttattgacctttctgttatagaaatcttgtcaaggcatgcatctgatgaggtgtaccttggggagagggacaatccaaattggacatctgatacaagagcattagaggcttttaaaaggtttggaaataaactggcacaaattgagaataaactctcagagagaaacaacgatgagaaactgagaaaccgttgtggaccagttcaaatgccttatactctgcttttgccttctagtaaggaaggattaactttcagaggaattcccaacagtatctctatctgaagaggtttgtggttccttaagttttgtggctttgaataaaagatagaagagaaggaatctgaatttcttcatccaacctgcacatggtaatctagtgtgtttgagtgctttcatgtttggctttaataaaataaaagcagttgttttgtaaaatgttcagaatcaataaaagcatttactgctttgctttgtgcgctaaaaaaaaaaaaaaaaaaaaaaaaagggcggcctccgacatatgatnnnnnnnnnnnnnnnnnnnnnnnnnnnnnnnn

SEQ ID NO: 482 - DNA, 728 bp, Glycine max
  unsure (1)..(728): unsure at all n locations
ggataatgaaactttattactggtcagacctcacaataaagggagccaatggattacatctggtttgaaaatccaataagcgaatagtaatattaaactcataaatgagcctataataaaagtagaaagctaaattgacatgtacatgtaactaccatgataagaggcaatagaggtgccattcctgtgaggtaacttttgtgaagggtgttctttgttcactataagatcaaaaatatcttggcgaggtcaacaatacaataccatgaacctcatttaagtgagcacctaaaatcaagccatgagatgatgtcattgtgcacagcaaaaattctgtcatcaggttccccttccaaaatgccgtggtaacttccttcatagatctttagtgtcttatctttactagaagctttctcataaagaaattggctcactaatggatctgtcacctgatctgctgctccatggagaatcaataatggagcagaaaccttgtgtaattgtgactcgatttcttgagtagcacttaaaagctccatgccagttttcaatagtgttggatgatcataagaaataacattgtaaccagctntacacattggtgcaacaaggattactccatcccaagtgttttgttccttcaaatgaaccttaagagcaattgctccacccattgactgccccaatatgaatcgtggcaaccctctcacctcaggccttgctttgat

SEQ ID NO: 483 - DNA, 541 bp, Glycine max
aagacgacagaaggggagtgttagaagctgaacccgtttcgccttccatcagagggaagaacaaacattcaattcatggcggctgcaaagcttcaagctttatggaatcacccagctgggcctaaaaccattcacttttgggcacctacctttaagtggggcatcaacattgccaacattgctgatcttctcaaaaccacctgagaaactttcctatcctcagcaaatagcggtcacagctactggaattatctggtctcgttacagcactgtaatcaccccaaaaaatttggaacctggttattgtaaacactgttatggtctgggacaggcttataccaacttatacgcataatggctgcatgattattcctcagaggcggaggcggaggtggctgtcacaaaagaatgatattaaatattttaaaagtccaagttattgtgtagttggaggcagatgcccaggctgtaatttccgttatataattgtattcttacttggtagttcatttgtactttcccaaaaaaaaaaaaaaaaaaa

SEQ ID NO: 484 - DNA, 719 bp, Glycine max
ctcacaatcagattgacccgcgaacttgtttattcatctaccgtcgggagggaggggatgaccacggcgccccgtgcgcccggcctcctcgtcctcgcgacaaacacaaaccccggcgcttcgtgcgccaaggaactcaaatctgttaagtgcgactcccgggggcccggagacggtgtcccgcgggagtcgtcacgacacaacatttacatacaatgactctcggcaacggatatctcggctcttgcatcgatgaagaacgtagcgaaatgcgatacttggtgtgaattgcagaatcccgtgaaccatcgagtctttgaatcgcaagttgcgcccgaagccatttggccgagggcacgcctgcctgggtgtcacacatcgtttccccaacgcaaacatgtaacaatgttgctgcgcgggggtgtatgctgacctcccgcgagcacccgcctcgtggttggttgaaatctgggttcatggccgacttcgccgtgataaaatggtggatgagccacgctcgagaccaatcacgtgcgagccggtcagttctggacccatcgacgaccctttgcgtgcacgcacgctcccaacgaaacctcaagtcacgcagagctacccgctgagtttaagcatatcaataatctgaggacatgaaactgacaaggattcccttagtaacggctagcgaaccgggaaaagcccaccatgaaaatcggtct

SEQ ID NO: 485 - DNA, 1763 bp, Glycine max
atctctttattataatgatttaattagtttttaaaaatataaatatatacaaatttttagttagttgggtttttataaaaaaatactataatgtttattttaagacggaagtaggtattcccgtaatttaaaaacacactcttgtaactcgctgatgcgcaccactctctctttgttctttctcggttcagtgtctctttcaaagtgctgctcgtgccagcattgaccttagctagagcagtaaccgtcatcaccactgccagtacggtaccatggctgtgcttcaatctttcgtttcggtccacccagattctcacttccccatacagaacctcccctacggagtgttcaagccccaatccgcttctcctcctcgtcccggcgtacgccatcggagacttcgtcctcgatctctccgaaatctcttccgctggtctcttcgacggccctctcctaaaaaactccgatgctgttgtacagcctaatctaaataagttcgtatcacttggaagaccagcctggaaggaagctcgtgctactcttcaaaagcttttatcagcaactgagccaaccttgagggacaatgcggttttgaggcagaaagcacttgtgcctatgagtagtgtggagttgcttctccctgttgctgttggggactacaccgatttctttacgtctctgcatcacactaaaaactgtgggatcatatttcgtgggccgcagactcctgttctagataattggtatcgcctgcctgttgcctaccatggacgggcatcttctgttgttatttccggaacagatattgtccggccaagaggtcaggctcatccagttggcagctctaccccctactttggcccttcattaaagctagactttgagttggaaatggctactattgttggacctggaaatgaattgggaaaacctgtggatattaacaatgctaaagatcacatctttggacttgttctgatgaatgactggagtgctcgagatattcaggcatgggaatatattcctcttggtccatttcttggacaagagttttggcacaacaatatcaccttggattgtgaccttggaagcattagaaccttttgccagtgaagccccaaaacaggatccttctccagttccatacttgactgagaaagaacccaaaatctatgatatttccctagaggctcacataaaacctgctgggcatgaagattcggatgtggtgtcacggactaatctaaagcacttatattggacattgacccaacaacttgctcaccatacaatcaacggttgcaacctaaggccaggcgatctccttggaactgggacagttagtggtcctgagccagagtcccgtgcatgcttgctagaattaacatggaatggacaaaacacagtgtcagtgaatgagttaaatcggaaatttcttgaagatggagacgaagtcatcttaactgggatattgcaaggggaaatgggttactctgcttgggttttggttactttgctcaggcaagattgtacccgcagctccatgaggctagtatcattccatagtcttttccagttgtggtgggaggagttgtagaatcaagtatctggctcctttccacatagcgtgttttatttactcggctcataatttgactttaataaagctggtgttttatatttttcttttttatgctatagtgtggatccaaccattggaataaaccaataccttataaaaaaaatagttatcaatatactcc

SEQ ID NO: 486 - DNA, 1127 bp, Glycine max
ggtgcttgcatccatctttcatcatccaacatcacacacaactacaagaaagaacttccttataaccaaagcgcaacaacaactatggcgaagttatcagagagcactacgatgatcagggtcgcaaggtcgacgagtatggcaatgttgagaggcaaactgacgaatatggcaacccggttacatgccagtagtgtcacttatgtagccaccaaaagtggttgttgcttccatgattacccttattaaccaccatgatataactggtgccaatccagagaaaagacaccggtagacatcattttggtcgtggttacgacggtgacactaacaagcaacaacatgatgctattggtgtttatccacgtaatagacattggtagagatcatgggaactaccggtgtttatggcctaaacaccgacagacatcatggaacttctggggtgaatcccggtatatgacacccataaccaacaacatgggactaccggtggttatgcaggcgacactggaaggtagcatgggaatacaggtggcctttactatggaaccgactaccgcggacacaggaaccggtcctagaagtggaaacaccggtggcaccggttatggaggcactggtggtactgattatggaacagctggtggaactggttatggaagtggaactggctatggaattaacactggggttgcgcacactgaaccagggtttgggaaggagcatggtcagcttgagcaatctcatggtggtcagcacgagaagaaagggatactggacaagattaaggagaagcttcctggaggacacagtgacaagtagatgcatcgtgcatgcatgcatatagtatatatataatattgttgtctttgaataaatttgctgcatatgtacttggaggatatagcatatggttatagtatattatatagaggaataaaaaatgtatgcctgtaatgtaagggttctcatatacatggctgaaatataaagcataataaaggcattgatgttgtgccaatacatatgttgagagttattgggcttaagcctacgcggttgtggagcaggtttcttcacttttggatttagaaatgaagccagcttttataaaaacgctcgag

SEQ ID NO: 487 - DNA, 1130 bp, Glycine max
gaatttcatcatccaacatcacacacaacttactacattgctacttcctatacacatcataaacctaccaacaactatcggcaagttatcaaaaagcactaacgcatgatgcaggggtcgcaagggttgacgagtatggcaacgtgtgagaagcaaaccgacgaatacggcaaccctgtatcatagctgctaatgtcacctaatgtggccaccagaactgtctgctggtggttacagtgatgacattaataagccaccatgttacgaaccaatgcactacggcgtagacaactggtagacagcattctagtggtgactacgatgggtgacatctaataaacatcatggaactactggtggctataatgatgacaccaataatcatcgttgatctattcgaagtctatggtaacgactacgataggcaacaccatgggactactggtgggcttttcctgagacactggtaggctgccatgggaacatcggtggcccattactatggaaccaacaccgcagacaccggtactggtcccagaagtggaacacacgggcggcaccggttctggaggccatggtgccactggttatggaccaactggtggcactggctatgggagtggaactgggtatggagtcaccactgggggtgcgcacactgaagcaggatatacgaaggaacatcgtcagcatgaccaatctcatggtgatcagaacgagaagacagggattatggacaagattaaggacaagcttcctggaggacacagtgacaagtagatgcatcgtgcatccattcatgcatgcatatatataatattgttgtctttgaataaatttgctgcatatgtacttacgtacgtacagtgtcttgtcatgtatgtggaggatatagtatatggttatagtttatgtagaagaataaaaaatgtatgcatgtagtaatgtaagggtcttatatatgtggctgaaatataaaccataataaaggcagagatgttgtgccaatacatcatatgttgagagttgttgggacatgtaaagcctacgtggtggtggagcagggttgttcacttctggactctagaaattatttattaatttctttctaaaaaaaaaaaaaagggggg

SEQ ID NO: 488 - DNA, 1119 bp, Glycine max
ggaagaacatgtggctatgtggcacctatatgttgattagtgccttatccagcaactgttctgttgacagttgtggtggtcgttcaagatttttaacctgaaatcttcacttcacatctctctatcctctcattctcatcaccaacaagtgtttctgtaaccatggcatccaccactctatcccctacaaccccttctcagctatgctcaggaaagagtgggattttcagtccctcacaggcacttcttgtgaagccagtgaagaggcagatgatggggaagagcaagggaatgagaattgcatgccaagccaccagcattcctgctgatagagtccctgacatgggcaaaagacagctcatgaatctgcttcttcttggtgccatttcactcccctctgctggaatgcttattccctacacctacttttttgtccctccaggttcaggttcttcagctggtggtactgttgccaaggatgctgttggaaatgatgtaattgcagagaattggctcaaggcacatggacctggtgaccgaacccttgcacaaggattgaagggagatcctacctatcttgttgtggagaaagacagaacccttgcaacatatgcaattaatgccgtgtgcactcaccttggatgtgtcgtgccatggaatcaagcagagaacaagttcatctgcccttgccatggatctcagtacaatgaccaaggaagagttgtgagaggacctgctcccttgtctctggcattagcacattgtgatatagatgatgggaaggtggtgtttgttccttgggttgaaacagatttcagaacaggtgatgctccatggtgggcttagactccttaaaaccgttctgttgtcataatatatatttaaacatgaaattcaaacattctgttttgtattaatgcataaatatattttgtaatcaaattgatattttgtgaactgaagctaagatggaaaggaacctgaacgggtcactttttaccgtgtaaaaaaaaaaaaaaaaaaaaaaaaaaaagggcggccgcaaaaaaaaaaaaaaaaataggtgtaaatttttaaagggttgggttgtgatatgggggtatgtttagtggtggggtc

SEQ ID NO: 489 - DNA, 1397 bp, Glycine max
gcggccgccctttttttttttttttttttttttcaagtaaacagttcaaatcacttcattaaaagcaaacacaggaaatcacaggattatggacatacaaccaattagcagatggtcctttttggtcaagacatcaagaaacctaaaaacaccaattcccaaaacccagaatacaaggtcaaataatataataacacaaccccactaaaaattaattaaaacaaaacaagacggtatgaagatgagttagaccctaataaattataccaaggcaatgctgctctcgccaccaggtggcttccgtacaccacctaggtagtctctagcttctaccttcccatcagcaaagatgttactgccactcatctctcgtagtttggccccgctcaacgatttgtcagcagatgaaggtggtgcatcccctttgaatatgtcattccctgaaagttctgcaaatttcttgtcatagatcttctttgctgtcttcccagcagagttggtatcgccttgatctccatcagcatgacgttctccaatgtctatgcttcctttcaactccagtatgcgaggagttattggcctgggtttgatttctggtggcggagcaaatatgtcatgaccgctaagctccttgcactttgcatcagagagttgctttttcaatatagagtcttcactttccaaagttccacttagctcacgctgcttggccacctctggcaaagaagtgggcttttttggagaaacattctcctcctcaccaaatgagatatggctgattccagaaatcgcttgctgatacatacgtactccagtcttatttgggttggcactgccatcttctaaggcatcatcttctccattggctacaaatattccactaccagttatctccttcatcttataatccgaacaaggctttcgtttatttaagctctcgacctcttcatcggtgacctgacccccaaataccaccttcctgatcccatccgacggctggtgagaacgaacggcggaggaaggatgagttggggaatgagaaattggtgtttcaggccacgtaagcagatctgcagttgaagtgtgtggcttcctcaccggagtgcttctctccatatcgttcagctacaataccctgctcactgttgttccttatgttaatctcgagcgcagaaatgacgacgatgacctctccgatctcccaaagattctttttgtttgctcaatggtagagagaacaaaaacacgggagagaaagttaattttatttatatataaggatataaggacaagaaaaatgttatgctggtagtagtaagtagaaagaagagagagtagtacaaagtagaagctactcttcttctgtttcaaaaccggctcgagctcgagccgaattc

SEQ ID NO: 490 - DNA, 489 bp, Glycine max
tcatcttctccattggctacaaatattccactaccagttatctccttcatcttataatccgaacaaggctttcttttatttaagctctccacctcttcatcggtgacctgaccaccaaacaccaccttcctgatcccatccgacggctggtgagaacgaacggcggaggaaggaggagctggggaatcagaaatgggagtttcaggccacgtaagcagatctgcagttgaagtgtgtggcttcctcaccggattgcttctctccatgtccttcagctacacaacacaataccctgctcaaccaattaacacttattagctatttctcattcctcttcattcttcactttcgcctctccctctttcaattaaaaagaacaaaaaaatggaaggggggggaccgtgcctgttcctgggtgcgcgaggtcgttatgttaatcttgagcgcagaaatgacgacgatgacctccctgatctcccaagattcttt

SEQ ID NO: 491 - DNA, 374 bp, Glycine max
tcggtgacctgaccaccaaacaccaccttcctgatcccatccgacggctggtgagaacgaacggcggaggaaggaggagctggggaatcagaaatgggagtttcaggccacgtaagcagatctgcagttgaagtgtgtggcttcctcaccggattgcttctctccatgtccttcagctacacaacacaataccctgttcctgggtgcgcgaggtcgttatgttaatcttgagcgcagaaatgacgacgatgacctccctgatctcccaagattctttttgattgctcaatggtagagagaacaacacatgagaaagttaattttatttatttatatatataaggacaagaaaaaaaaatgtaataatggggttt

SEQ ID NO: 492 - DNA, 1269 bp, Glycine max
gaattcggctcgagcgtttaaggatcttgtgggaagtgcatattatgttgctcctgaggtactgaaacggaaatatggggcagaggctgacatatggagtgctggggtcattctttacatccttctgtctggtgttcctcctttttgggcagagaatgaggatggcatatttgatgctgtcttgcgcggtcacatcgatttctcttctgacccttggccttcaatatccaatggtgcaaaggatttggttaagaagatgctgcgacaagacccaaaagaacgcctgactgctgctgaaattttgaaccacccatggattagagaggatggagaggccccagataagccacttgacattactgtcattggtagaatgaaacagttcagggcaatgaacaagctcaagaaagttgcattgaaggttgtggctgagaacttatcagatgaagagattatgggcctaaaagaaatgttcagatccctggatacagataacagtgggacaattactcttgaagagctaagatctggtttaccaaaacttggtacaaaaatttctgaatcagaaattaaacaattgatggaggcggctgatgttgatggaaatggtaccattgattatgcggagtttatatcagccacaatgcatttgaatagattggagaaggaagaccacatactcaaagcttttgaatatttcgataaggatcacagcggatacataaccgtagatgagttggaagaagctttgaagaagtatgatatgggagatgacaaaactataaaagaaatcattgctgaagtagatacagatcatgatggaagaattaattaccaggagtttgttgccatgatgaggaacaacagccctgagattgttccaaatcggaggcgcatgttctaactgtcatggacaatcacattgaatactttcaagaacaatctgcccttagacataatctttgtcccattttctttttggaacagccgttaagaagactccttaatttgagatccatgtctctgctgcccggacctgtttgtcccaaaatagggtggtgttatagtgattcgtacttgatgctttgagcttcatggactcttgcgtggcaatgtttatccccattgtacgtctggttgttctgctgcttcgatctgaggctttctttaggtgtaaacggatatctgaattattaggataaatttaatattttaaaatagatatgtatgaaatttgatgttaaaaaaaaaaaaaaaaagggcggccgc

SEQ ID NO: 493 - DNA, 854 bp, Glycine max
gcggccgccctttttttttttttttttaaagagaaaaggctaaattgattggatgaggaaatccattacaaaattaacaatatttgagtggctagctaactaattgactcagcaaaactagttcaaatctattatgaaactaacatggtaatactttttcattttcatattgctatgtacactatttatacatgtattttcacttttcagttcgcattatacccaagtctgttatggggcaaagcctacatatattaaactcacatactagacaatctaataagcaagggtgaataatagttatttagcatcaacagtgttaggaacatcgtctactacacgaataggaacaattggtattgaatcccaccattccctcaatcgtctattccctgttccacttccagaagactttcctaatgtcatagtgaagctttggagaatgagagccataaggaagaatttgaatggaattactgccaataagatagccaatccactcattgccaccatcactagatttgcatgcttatcagcctttgaaataagtattgaccatatctttagcattgctatgtttgctatctgcatcatgtcatgaattgtgtacaatccatgctgggccgagacaatgctctccatcgtagattgatcagaagccatactggatctactgattactatctcgtagcatttctcacgaatcttcttttttcttgcatcaagcatctttattattgcccaaatcaagaaagctgcaaatgtcttgccaacccattccatataggtgatcatcaaggatgcagcaagaacagcaagagttattattggcctttcccatgtgaagatttctt

SEQ ID NO: 494 - DNA, 333 bp, Glycine max
accacgcgtccgggactataaagagtttaaaggctaagtaggaaatcctaacactacagggtgtcaagaattgaggcaagaacatttatgatactgtacagatacggtagagacacactattcaaagatgaaaaagtaggtatgcctaatcttaattattaatatactttggaattgtggttgatttccattatgtgatttatttacttgtgttagtagatgtgaggtgacaagggcaaataaaggggggctttataaggaaaggatacttatcagcagcagcatcaatctttcaaacttgcatagtgctcctctttgtattcaaggattgaa

SEQ ID NO: 495 - DNA, 440 bp, Glycine max
ttttgttaatttacccaggaatcctgaaaactttataaatatttttcatactctagttccacagttgatcttccagaactcctaaaaaaaagttgatcttccagaagtgctaatttgaatccacaagtgcgtagaatgaagcatattaaatctggtgccgaattcggcacgagtccataaatttcttgctgtcaattgatcacaaattcagtagagccacatggtatcaataatatgtttgccacagttattctttagaatagccactgatgttgaggtgcaggtttgcaactttctcagagacacaattagaaactcctattttgtctacaatttataggttattgatttcaaacatcgctgattttgatggccaaaatatcgattagaagatttagcttgtataaattgatattcatttcattcattgttttggaatt

SEQ ID NO: 496 - DNA, 544 bp, Glycine max
gtaagaacatcgagttatgatgagacttagcagctggtacctggtatggagtagatgtaacagttgaggaaaggacagttatgatgctctcaacaagttttggtggatgatcaagacacactaggaaaagttgaaaaagtttgcatacccaatttcaatatagtttgaattttgaagtataagaccaaatgaatttgtcttccactgtaagagcctgtggacagtggcaatgattgaacaaataaaagtgacctgtcctgggatattgactggtgacgattatcagcattgtctatgactccagcctgcatacatttccctctttattggaggattgaaagtgattttcccttgaaagtaaactctcctaaaccttgataatgtttttttgccagttttttgcttttgtattcaaggcagatgtaagtttgtatcaatgccggaggtttgtaacttgtaagaatatctcttgtttctattcttttgacattttgtatcacaccttcattaatgaaatttggaatagtcaagttttatacaagct

SEQ ID NO: 497 - DNA, 608 bp, Glycine max
  unsure (1)..(608): unsure at all n locations
tttttctataataaattattaanatttcataccctcaaatggagaattaaatttgtgagcacaaagctacaattttcaccacaacattagcatttttttcttctgtactttgaattcggatcaattcaaaaattcctaaatgaggatttttcagcaggagtgaagacagctgcaggaaaaaccagccatcacccaggtgagttcatttgcccacatcttctaaagttaatcccttaggaaggtcaacgatgatgcagcagcttagaaagtgaattatcttctaaattgatctctcataaagaaggaatgtctaagagcttccttggctgtaagtctttcagaggggtcatatctaagtaacccctgcaagagatgtatgagatcgccagctgaatgccctacatgctgcattacaaggttctgaagcctaggaagcttcattacagctttgatactctcccttgaggttgcaccctcaggccagtccaatctaccccttctaacatacttctcagcatgtcggtcgactctcttcaacatgggctgtggtaatggaccaagtaccctttccatcatggcaagatgctcccaattttcgtgagtctgaa

SEQ ID NO: 498 - DNA, 740 bp, Glycine max
tgagaccctgaatttacatcggtatcataaattatcttatcttagataccacccatctatatgatctatatgattagatatcatatgattagatatcatatgaataggcccggcaagatcctcgtatagcttcttcgatttctcgataaaaagcaatatgaccaacattggttcgaatgtatatagaacgaatttctttttttgtacttcttactactagataatgctcataaatttcatgataggtacctaaagattcatagtgaacttcgataggaacttctcttgacgaaataatgcgttgatctagtcgccaccggagccacaaaggactatcgaagtttattcttttttgttgataagctccaattgcatcataggaattacaaaaaaagggttctttttttttcgtatacttatagttattatctcgaattctttcatttttaagatttatacaatttccgcaattccgtggattataccgatttgaataaatacctcgacgattcccgctcgttaatatgtaaagtccaataagcatatcttgagttggtacggaaataggatccccaatagccggagacaggaggttcgtatgagaaaacataagtaaaaaggattctacccgccgctcgatgggaattgcgcttcaaggcgtctcgtagggctaatccgcctcacgagggtcaccaacggcacgtgcctttggggggccgaggccccctactgctggtcgg

SEQ ID NO: 499 - DNA, 966 bp, Glycine max
atttgctcaccttacatggttataattctgaagcggtaaagttgtgccttggtgacttgttggtcatgggttcgaatccggaaacagtctctttgcatatgcaagggtaaggctgcgtacaatatccctcccccataccttcgcatagcgaagagcctctgggcaatggggtacgaagtttttattgaagtcagtcatccatccacctggtcttttaggtagttccttattataagactgaggttcttcccctcctaaagcagcacaaagtgatgtatttcactcataccgattccaggcttgataacaatgacattccacgttccatacagaaactaagatgccgtgcaaattacagagcattgaaatattcagctccagttgaagaacttggaaacacactggtatctagaatgcaacagaatggaaatccttatcttgcccttcatttgagatatgagaaggatatgcttgcatttacaggctgcagtcacaatttgactgcagaagaagatgaagaactgagacagatgcgatatgaagtgggtcactggaaggaaaaggagattaatgggaccgagaggagattgcttggaggttgtccattaactccaaaggaaacgtccctattacttaaagcactgggttttccatcacacaccacgatttttctggtagctggaaaagcatattgaagaagaagtatgaaatatcttgaggatgatttccccaacattttctctcattcctctctgtcctcttgaaaaaaattgaatcctttcaagaatcatcagaacatgttggctggtttaaactatgttgttgcccttaaaaatgatgtatttctctacacttatgatggaaatatggcaaaggccgtacaatgtcataagcgctttgaagacttcaagaaaaccatcaatccagacaagatgaattttgttaaacttgttgatcagttggatg

SEQ ID NO: 500 - DNA, 657 bp, Glycine max
gcgtgagcgtgaattccggtgtgacattgcactctcttacactgcgccacctcgttctctccgtctaaatagctgtcacttactcattcttcttcttcgtgcgtgcgtgtttctgtaaaatcgaatctcaagtctctgaatctgaatctcaacacaaccttcgttgttctcaacactgtgttcgtttttgctgccaaggttacaacactgaaagagacaccggagtaacataaataagatggaccaacaaaaccaaaataacactccagatggttcaggagaggtgcctttgaagcgcaaacgtggtcgtccacggaaatacccaaagccagattcagaggagagttcctatatcctagttagtcaaaataaaaggcagaatcctgttcgtgcggaacaagctccagtacctcctggatttgaaggggttaatggaaatcaacagcttcaaaggggtcaagagaatcattcaaataatgcaatggtgggccagctagtttccggcgtaattgaggctgcatttgatgcatgatatttgcttagtgttagagttggtgattctaatactactttgagggggctaatcttcaagcctggacgatacgtttctatatcacctgataatgatgttgctccgagtgttccaatgatccaaag

SEQ ID NO: 501 - DNA, 1327 bp, Glycine max
ggatgagagagagaagagaaccgttggcgttgggtgcatcgtgcatgtgacaaacaaaccatcaaataaaaaaaaaggtgatgggttaagcaagagcgttgaatccggtagctttatccaaaattgtaggtaaagtgggggcgaaattacatttgggatgcatttggtttgcattttggtttgcgtgtgttttgtcctatctgggtgcgtcaaccccacaagtgtaaagtcacccagcttcagcatttctataaatgccctattccttacacttctctcttgtttaattttagctttaggttcttcggtgagagttagagagagagaagaaggcttttttcttctttttttttttctgtttttttggattctcttgttctgttgtggagggtactgaggaagaaagaccaagactattatccgtgtgcttcacttagctcaagagcgtacaattcaggcaaaggcccttgaagtcggagtgtgttaaaggtttcttaggagttgctgctgtcctgactgaagaaatggaggtataagcttagctgctcaggctctaatatacccctgccgaagtttatacaacaatgatgggcctgtaagtaacgagtcatgatgagactaagcagctgggacctggcacggcatttatttaactattttatgaaaggacagttatgatgctcccaacaagttttggtggatgatcaagacactatgaaaagttgaaaaagtctgcatacttaatttcaacatagtttgaattttgaagtacaagaccaaatgaatttgtctttcactatcatttcttgccttggtgacttgttggtcatgggttcgaatccagaaacagcctctttgcatatgcaagggtaaggctgtgtacaacatccctcccccataccttcgcatagcgaagagcctctgggcaatggggtacgaagttttttatcatttcttgcctgtggactgtagtgattgaacaaataaaagtgacctgtcctgggatactgacaggtgacaattatcagcactgtttatcactccagcctgcctatattggaggattgaaagtgattttccctttatttgaatcgggaaagtaaactctccccagccttgatgatgttttttgcttctgtattccaggcaaatgtaagtttgtatcctgatatttaaatgccggaggtttgtaatttgtaagcatatcttagtttctattcttttgacattttgtatcacaccttatagatcattaatgaaatttggaatattcaagttttatgcagttaaaaaaaaaaaaaaaaaaaaaaaaaaaaagggcggccgc

SEQ ID NO: 502 - DNA, 516 bp, Glycine max
ggcttattttaatttttctagcttttgctttgcttaggttctgttttgcagacagagagagatacagagacgtgtgtgtcagaatttacgagagagaattttattttgttttttcggttatctttattggtttctcttacatcgtttttgtaggcgctgaggaagaaagttttggcagacaaactttgttggagagaataaaattcaggcaaggcgttgaagttggagagtattagattggaagcttagaagtttctctttggaccaaagaaatggaggtatatggcaattctatggttgcagctccttcaaatgttatttatctgtccagtattttgggccaaggcggtccaattcccggtcacagatgcaactggaaatgtgaaaatgaacatgtttgtggaaacatgttacccctgaggctaacagggctgactcacatttgtgataaaaactgtaaccagagaattctgtatgataaccatagctcactttgcctagcatgtggtcaaattt

SEQ ID NO: 503 - DNA, 506 bp, Glycine max
gaaacaagtagtgggtgctgggcatgattctagagtaaagtattgctccttgcaggtttcaaaagaaacacttgttccctggctgctgctatcatggcatagattgctttgcaacatttggtaaatgcccttgcacaggctggtgatagaaatggacaccagctgaacttgggtgtttctgagacgtttgcatctacaaaataactattaactccaccaatgagaataacaagtagtcaatctttgtaattcggaaggttctttccaaccgcaccggatcacttgatggtcattcagagacacagagtatagcattaaaattttgcagattactcatagtcaccgtctttatgggttgttagatgcaataattatctgccaagtgccaacaacagttcatagatattttaaagacacacaacctgtgtctgtgactgctcagtttgagttgtggggtgcagtgcagagaggagagagaaaccagattgcttgccaatgccagcaac

SEQ ID NO: 504 - DNA, 1216 bp, Glycine max
gctgaatctcagtggatcgtggcagcaaggccactctgccacttacaataccccgtgtttattaattgctgacgattatcactaaaacaaacactaggtatgagttgattcataagaaaccctagcctctgccaccaaaacctttctttgaaactttttaagtcagagagtctttgttgagacgaaaaacaaaaaccatgtcatacatcaacaatacggagagatctagaaagtggaggggcgaacaagaacatcaacaacataagctacagtgccgctcccacttcctatgtctacgatccggaagttcattggacatcgtggctcgtgccgctgtttgtggcggttaacgttgtggtgttctttgtggtcatgtatgtcaacgattgccccaggaaaaatctcggctttgaaggggattgtgtcgccaggtttctgggtcggttctccttttcagccccttagggaaaatccgttatttgggccctcttcatccaccttaacaaagatgggagcacttcggtgggatgatgttgtgaatcatcatcaagcatggagactcgtcacttgcatttggttgcatgctggagttgttcatttagctgccaacatgttgagtctggtcttcattggcattcgccttgaacaacaatttgggtttgtgaggataggaatcatttacttgttgtctggattcggcgggagtgtactatcttccttattcattagaaacaacatttctgttggtgcttctggtgctctttttggacttcttggagcaatgctttcagaacttatcacaaattggagtatttatactaataaggcagctgctttgttcacacttctgtttattattgtcatcaatcttgccattggaatgttaccacatgttgataactttgctcatattgggggattcctcacaggatttctccttgggtttattttgctgctccgccctcagtttgggtggttagaacaacgacgtccccctgctggtgttcgcctcaagtcaaaatacaaggctttaaaccaatatgttctatggattgtctcggccattttactaattgttgggttatctattgctctagtgatgctattccggggtgagagtggatatgatcactgccattggtgtcactatctaacatgtgttccaacttctaaatggaaatgcaatgacaattaaacaaaagggcatgagctatcg

SEQ ID NO: 505 - DNA, 824 bp, Glycine max
agtaacatctacaattattattttttaataaaacgtttgaaacacaggctttgaggttgaggtgtaaatgctgctgaataaccatcctcacttgctttagtttagcccaagatattcaaatatttatttacattggcacataggcttccttacagccatatttgcccccgaatgatctttaaacttaaaaacagaccaatcgtttacaaatacatgaaaatcatctcctaagttgatctctagtaaagaaggaatgcctcaaagcatccctagctgtaagtctttcaaaggggtcatatctaagtagcccctgcaaaagaagaataaagatctcaagctaaatgataaacatactgcataaaaatgttgtgaagtagggaaagaataattacagttttaatactctctagtgaggatgcaccctatggccagtacaataaacccattcggacataaatatatgcatgtcggtcaactctctttaacatctgctgtggtataggaccaagcaccctctccataatggccagatgctataaattttcatgagtatgaaacaaagattcaccagtgcataattaaaccagtacacaacgcacactccatatatcacatggatagctccacccaagtccaaggataacttcaggtgccctataatgacgagttgacacaatgtaagtctgatcttctcgttcatatgtagtgctgccaaaatcaataacttttatagcacttgacttgggcactctcttgaaaaaggagcttggtgatctggttgtactcttgtagtcaggaatcataagatactctggtgaaactag

SEQ ID NO: 506 - DNA, 989 bp, Glycine max
gagagaaatttcattcattttacccttttaattcatttaattttcttcttctataacaatttattaaaaagtttattcaaacttacctcttagtcaatatcaatttgagaaaatctagtttctattctatccttctcctttgtcaatacttaaatccccataacctaaacaagtttatcaattatccagttttattcattcccattttgagggcgagccctggtgcagcgataaagttgtgccttggtgacttgttggtcatgggttcgaatccgaaaacagcctctttgcatatgcaagggtaaggctgcgtacaatatctctcccctataccttcgcatagcgaagagcctccgggcaatggggtacgaaatttttttattcattcccattttgatggttcggttcagaggtaaacttccatgacatgttacaaggccctggaaaaaactgaagccaagcaagacaaactgcctttcaggttcacagttcactagacatggagaagccatctacgggattaaaccatttgatgcaattcaaaattggtgcaatcattgtctaacatgagtgcatttctctactctttaactataatgcatttacaattggtttttatatcatctgtgtagctatccacctgagcaaaaaaacagaaaatagcctacacataatgtggcttctaatttgctgctgatctcactagcccttgcttggggggaacacccaaatcattcaataatttcttgcataactgtttatacacagaaccatctccatacgacttccttaattctactacatacaatgatggacttatttcaaacacctgttatatttgaaatgaagttagtttcttagcatcagcaaattatgcagacattgagattagtttacgatcgattagctcattctaaacatacattacctctactaccactgagaggcagccgagagttttgtgcaccttgttctctcgcatcactttc

SEQ ID NO: 507 - DNA, 1423 bp, Glycine max
tttaggttcttcttcttcttcggtgagagttagagagagagagagagagagagaaggctcactctttttcttttttgttggtttctcttgtttttttggttgggtaggtactgaggaagaaagaccaaaactttatccgcttgcttcacttagctcaagagcgctcaatttcaagcgaaaggccctggaagtcggagtgtgtgttaaggaatttcttaggagttgcttctgtcttgactgaagaaatggaggtatatggcaaatctatggttgcaggtcctgcaaatgttatttttctgtcaagtattttgggccaagaaggtccagttcccggtcacaaatgcgactggaaatgtcaaaatgaacatgtttgtggaaacatgtatcgctgcaagctaactgggctgactcacatctgtgataaaaactgtaaccagagaattctgtatgacaaccatagctccctttgtcgagctagtggtcaaattttccccctttcacctgcagaggaacaggcagtgagaggcgtacgaaggaagcttgatgcagagaattcgccttccgaaagctgtggttttaagcgtagacggggggatgcccaaatccatccttctccttttgagagatctttctctgctgtcagccctatctgcagccaagttggagatggcatggatatgagctagatatatatatatatattatttaactgaaaaaactctatcatatcacttgtcctttctttctccctttttctatcagatgagtatgaataaacggtacttgaacaattatggttacttatcgatggacatgtatgttcatctattgtaggaactccttatatttctagaatcaatggaatgtagtgcttaatgcagctagactgtaaaatggggaattgagtaggctttatttggcattcagatagttattaaaatctgaattgacttcagtttcttgctaaccttggtgagaagcagactttgtagctggatctgaatggtgcactatgaatcgaccatgtactttaactgttttaacattttctagccagttgttaggtttctagtgtttctgtaatcacagggcagcgttattcaactattagtgtactcattgccaagagtagtgctgttaagttgtattattttaccccttttatatccctcaattccactggaaactgctcaccattatcgatcttatcacttattaggctttcagggtcaggttgattgccttgacttctgtaagctcaggttctctccagttcctcacatggacaaagttgtgcatgtgaaaactaatttttaattttgctgcctaatttcttgatcttttgcaggctcaagagagatgttcacattttcataatattcatgttttgattatcttatttgttccatgagttaactgatgt

SEQ ID NO: 508 - DNA, 689 bp, Glycine max
  unsure (1)..(689): unsure at all n locations
cccccgtttttgtcaaaaattaatttattttagcgaaaggcaacaggccccccgagaaccattattttggttgattcaaccatttttagctatagtttttttttttcccatttttgcttttatttttttttttttgacaaaagctaaactttattaattggatggtaattcatcaatacaatcacgcgaaatcacgtgatttattattcatanctcatataacctatgagtgggtaatagtatttgtgtattcacttattttaaacggagggatatataaccaattaagtcgatctctccactggtgagcacttcaagggcagaatgtgatggcataatcaggcctgttggagcaagtgaaagtgctgctcttatcatcgtaagcgtaggaataagcatcgggacactgctcctcgaaaatctgagagtagttcgtaggtggacatgtttctgcggtgttgttaggtccagtgcagcaatatctatcttccttaaaagcctcgcaagcactcttgcaagcgatgacgttgccatcggaccctttgacttgaagctccgcagggcacacagagttaatgttcttagggcaacttgaggttttgcaatcgcgactcccaccttgtggggttacggacatgggcacgttgaagccatccacgtggctcacgtcgtagaaatcttgccctccg

SEQ ID NO: 509 - DNA, 1545 bp, Glycine max
ataaaagctaaactgtattaattggatggtaattcatcaatacaatcaccgaaatcacgtgatttattattcatactatataacctatgagtgggtaatcaagagtccatggacttgtctcatcaaagtaccactgggaaagagggagggagtgagtcaaagccagccagttgcggtgcacttcaaaatctgtactacgataggatgggaaaaggagaacttttatgcaggtagctacaagaaagaaccaccatagagtagttttgggactatgagaatggtgaacttctttgaagcttagtttctcttttcccatgccagaatttgggagtgatagaagaaataaaaggaatgtagatgctgtatttaatgctgaaacccaacaaggctgggttttgtacactcaaacagaatttgctcaattttcaacccaatatggaggctgtattgatggaaatcatgtccttttgaacttcctgcataaaagttagcaagaaagtttatctgagtatccttgatagccaatatgtgaaagcaatgaaattgaatgctcgaacacagagccgcaacgacgtcgacgtccgacggttgtagatcgacggtgtccggcggttgcagacttcaagatcgatgcagacgaatcaaagcgacaagggctgaatctcagtgcatcgtggcagcaaggccactctgccacttacaataccccgtcgcgtatttaagtcgtctgcaaaggattctacccgccgctcgatgggaattgcgcttcaaggcgtctcgtagggctaatccgcctcacgagggtcaccaacggcacgtgtcctttggtggggccgagcgccccctactgcttggttcgggcaaacggaacggcgggcggcacgcgttcgcttctagccccggattctgaccacaaaacgctactctagactctagtagtagcagagtagcatcatcgtcatcatcaaaccttggtgaatcaaaaagaaaattagaaggaaaagatgttgttggggaagagacctcgtcctccaattatgaagagaacaacaagcatgtcggaaataaccttcgatctgaacacgtccttggacgatgatccgaacaactccgtgaagggaccaggaggagatgggcctcctgttgggctcaacggtttagatcagaacagggtttgggccatggtttcacccagaaaccaccatagaaggcaatattccgaggatacccctggcttcttgcgcgtttgctttctctgcaaacgccgtttagtacccggccgtgacatcttcatgtacaaaggtgatagtgctttctgcagttcagaatgccgtgaacagcagatgaagcatgatgagagaaaagataagtgtcgtgtggcatcatcaaagaaacaagttgcggcaaagcctaattctgggtctcaagttactactaatactaaaggcgaaaccgtggttgccttgtagttaattgtggcatccaaacaaggattgatgatgcaatatcattattattattcctatatgctcatgcccttagctt

SEQ ID NO: 510 - DNA, 928 bp, Glycine max
aacattacatccacgcgtccgtaaactcggaaatcggctcgagcgcgtcgctgctccgtaccagtttcactgcataaatttgagagaaaactctgcaaacatgttgggttaaccaggacttcctaacaggtgataaccttctctcggactccttccggtagaattgaaattgagaatggaatgctgtgggaagttgaggggaagtgggttgttaagggagccagttgatgttgacattggtgcaaacccttctgctgaggggtggaaaagttgagggagtcgatgacgcagctgttaaggttgttgacattgttgatacattcagacttcaggagcaacccgcttttgataagaaacagtttgttaccttcatgaagaggtttatcaagaatttgactcccaagctcgatgcagagaaacaagaattttgttaataagcacatttgagggagcaactaaatacccgctctctaagattaaggatttccagtttttttgttggggagagcatgaatgatgatgcttgcttggtctttgcatactacaaggatggttgctgttgatccaacattcttatactctgcatatgccttaaaggaggttcagtgctaagggacataatgtaccaagttatctactctcattttaccctagttttttttttttaagttctgtcctaagttacttaaaacttcgacttgttattttgattttaatggtgagacattttgtgctacatcataattcccatcaaatttaattatcgatgggttagaatttcattaatttatgattttggttgtgctggaagggcttccaggattctttttttgaagaatgcctcgatgtctactagaaatattttaacttaatagttttatcaataagaattgaatacgagttgggaatttaaaaaaaaaaaaaaaaa

SEQ ID NO: 511 - DNA, 472 bp, Glycine max
gtttccagaattaacctgaaaatgcaactgtccttgtggaaaaaccataatatctccaggtttcagtgtcttggtataaagtgcagttggggtcataaaaccagcagtgatttgaccttccaccattattagaagttcagtggcagcagggtgtgtgtgcattgggattgatccacctttggctatgtctaaccgtgccgcagatacaccaagaccattcacacctggaaaatcagtaacaaatgcggaggttaatgcagcattgaaagtgtttgtggtgtttccagctacaaagccagagaacacatagtcatccactgtgactgtgttaggtggcttgcactgatagcctgaagggctatctggaccttttaggtctgctacacagaaatcattgacagaagcatgggaagtgaacgagacaagagcaaagcaggaaaagaaagtgaatcatcttcatcttggaacttgg

SEQ ID NO: 512 - DNA, 1062 bp, Glycine max
atagaaaaatattattttttattatataaaacactaaaatcattaaccccccttcaaaaaggggcaaagctcgcgttccaaagtcaagaagagacgcggatagaaagaacgtttcaaacctcgaatggagacttatactcgtgcacacaaagctcaggatgccatatgaatcatgcccgtaaaatctacaattttcaccataacattagcattttttttttcttctgtacatcgaatccagatccattcaaaaattcctacataaggatttttcagcatagcattggggagaggacagctgcagaaaaactagccatcacacaggtgagttcatttgcccacatcttcaaatccttaggaaggtcaatgatgcagcagttaagaaagtgaatcatcttctaaaggtgttctctcataaagaaggaatgtctaagagcttccttggctgtaagtctttcagaggggtcatatctaagtaacccctgcaagagatgtatgagatcgccagctgaatgatctacatgctgcattacaaggttctgaagcctaggaagcttcattacagctttgatactctccctcgaggttgcaccctcaggccagtctaatctaccccttctaacatacttctcagcatgtcggtcgactctcttcatcatggtctgtggtaatgaaccaagtaccctttccatcattgcaagatgctctaaattttcatgagtctgaaacaaagcttcacctgtgcataattcaaccaatatacatcccacactccatatatcacatggatagctccagccaagtccaaggataacttcaggagccctataatgacgagttgatacaatgtagttctgaacttctcgctcataagtggtgctgccaaaatcaataacctttatagcacttgatttgggaactctcttgaaataggaacatgatgatctagatgaactcttgtagtcaggaactttgacatactcgggtgaaactagtagtatgttttcaggcttcaggtcagtatgaatcatgcgcaaatcatgcatgacgattgcctccttt

SEQ ID NO: 513 - DNA, 2758 bp, Glycine max
gaggggactgacaagatgcatgatcgagaactctaatcctaaatctaaggagagaaaaaatttcacaagataatcagcaaataaaatttgtaatgaattttgagtaattcttagtttagaaaaaagtgaaggacacttgagtctagaattacttatattaatttgattctgtcgagaagcttgagcgagtagagttgaggattgagtaacggagatgtagcagagtcacccggctattcaacaggactttccgttttattcatttcacttttgaatcttcgaatcacatccgatgggtagcagtagaggacacacgctcatggaggttggacccgacgacggtgttgccgtcatcaccatcgtcaaccctcccgttaattcactctcatttgacgtattgcgcagtttaaaggagagttttgatcaggcgatacatagagatgatgtcaatgcaattgttgttacaggtgcaaagggaaaattttactggaggttttgatatttctgcatttggtggtattcaagaggcaaaagagcgtccaaaacctggttggatatcagtagaaatcatcactgatactattgaagcggctaggaaaccatcagtcgctgccattgatggccttgccttgggtggaggattagaagttgcaatggcatgcaatgctcggttatcaactccaactgctcagctaggcttgcctgaacttcagcttggaataattcctggatttggaggaacacagcgacttcctcgtcttgttggtttgacaaagggacttgagatgatactggcttcaaaaccagttaaagggaaggaagcttttagtttggggcttgttgatggtttggtgtcacctaatgatttggtgaacactgcacgccaatgggcactggatatgttgggccaccgacgaccatggattgctagtctttataagaccgaaaaattagaaccccttggtgaagcaagagagattttgaaatttgcacgagctcaggttcaaaaacgggctcctaatctccaacatcctttggtttgcattgatgttattgaagcaggagtagttgctggtccccgtgcaggactctggaaggaagttgaagcatctgaaggacttataaagtcagatactagcaaaagcttaattcacgtatttttttctcagagaggaacatccaaggtacctggggttacaggattgtggtttggttccaagacacgtcaagaaggttgccatcattggcggaggactaatgggctctggaatagcaacagctttaattcttagcagctatcctatcatattgaaagaagtaaatgagaagttcttagaagctggtatcaataggattaaagcaaacttacagagccgtgttaagaaaggtaaattgacccaggaaaattttgaaaacacagtctctcttctcaaaggttcccttgactatgaaagcttcagggatgtggacttggtgatagaggctgttattgagaatatttccttaaagcaacagatattttctgatcttgaaaagtattgtccacctcattgtatacttgcaagtaacacttccacaattgacttgaatctgattggagagaagacaaagtctcaagatcgaattgttggagcccatttcttcagtcctgcacatgttatgccgcttctggaaattgtacgtaccaagcagacctctccccaagtgatagttgacgtgttagatatttcaaagaagataaagaaaactccagtggtggttggaaactgcacaggatttgctgttaataggatgttcttcccatatacccaagcaggtctcttgcttgttgaacgtggtgcagatgtttatcaaattgatagagtaataaccaaatttggaatgcccatggggcctttcagattgatggacctccgtgggtttggtgtggcaattgctactggcatgcaatttattcagaattttcctgagcgaacatataaatcaatgcttattccacttctgcaagaagataatagagctggcgaaacaactcgcaaagggttttatttgtatgatgataaacgcaaggctagtcctgatcctgaattgaagaactatattgagaaaggctaaggaagatattctcgggggtcttccggttgaaatccaaagcttgccaaattacaagaaaaggatatcatagagatgatattctttcctgtggtgaatgaggcttgtcgggtccttgatgaaggtatcgcagtcaaagcagcaggaccttgatatttcttctatcatgtggcaatgggttttttcccccttacaggggaggcatcatattctgggctgattctcttggatccaagttcatatattcaagattggagaaatggtcagagttgtatggggaattcttcaagccctgtgcccccttggctgcaaaagctgccaaaggaattcctctgtctctttgcatatgcaagggtaaggctgcgcacaacatccctcccccataccttagcataacgaagagcctctgggcaatggggtacgaagttttaaagtgcctctgtggagcaggggaagtctcgcatgtaagaaaaaaatagctcattacgtgtttactggattgaattttcctttccccgttatatctcctttcagatggtaggaaatattggtgactgacttgagaatagcttaataatgtacgatgagaaaacatttgaacagcataattctttggtaaaaagtaaaagtatttttagttaaaaaa

SEQ ID NO: 514 - DNA, 2143 bp, Glycine max
atttggtttgtttgaggtcttgtatgtggctgcagatatgcaaaccttaaattcggtcctcgaatcatttctgatcattggttgttcttttattctttcaaaaattctcacacaacccaaaatctcttgggaattgctagattcactgcttctcctagcagcatatttctgggttcttctgacccaattatcacattttctccaacttggtcttgtggatttttctgttggggttttaaatttcgtgttgctgggttttgaaagttatttcctttcttccccgtctggattcaactcccaagtatttgctttaattggggtattttttttatttatcagaattgttaggttgctttgaggttttccaaggcttgaaagctgaaaatgacgattagtagtcttgcacctaaggcagagaggaagaaatcaaggaagaacaagactgttgttgttaatgagaatgcacccttgttgccaaaaagtcatgttcaggagagtgatgctggttttgatgatttcaatggagcttcattttctggggctgtttttaacttatccaccacaattattggtgctggtatcatggccttgcctgcaaccttgaaacagttgggaatgatacctggtcttcttgccatcatcatcatggctttgttgacagagaagtcaattgagcttttgattcggtttacccgggctgggaagtctgcttcttatgctggtctcatgggggattcctttgggaattatggaaaagctctggtgcagatatgtgttataatcaataacatcggtgttctgattgtttacatgattataattggtgatgtgctctctggaacatcttcaagtggagatcatcactatggactccttgactgactgtttggtgtagcaatggcggacaggccggacatttgttgtactttttactacactcgtcatatctgtacctatagcaagcagtaatctaattcattcatcgagattcacgtccgccctttcagtcgcacttgcagttgtttttctagtcattgccgtgggaattgctgttgtcaagatatttagtggaggcattgtgatgcccagactcttccctgtcacgactgatgtggcatcattcttcagactattcactgtagttcctgtgtttgtgactgcgtatatctgccactacaatgttcacagcatagacaatgaacttgaggactcctcacagatgcaaggggttgtacaaaccgcccttgttctatgctcttcagtgtatgtaatgataagcttctgtgggatcgtcctattctggcgtaggaactcttgatgatgtgctggccaatttcgataccaatcttggaattcctttcggatgtgagatctatgatgctgttcgtataagctacgccgcatacctgatgcttgtatttctagttgtcttctttccattgcgtctcaacatagatggcctcctcttctctaaatcaaggcctctggtttctggataacttcagatttgcatcactcactattgcccttaactggtgttatcttcctgggagcaaatttcatacctagcatttgggatgctttccagtttactggagcaactgccgcagtctgtataggattcatttttccagctgccatcactcttagggaccgctacaacattgcaactaaatcagacaagattttgtgtgtcattatgatagtcctcgcagtcttctcaaacgttgtggctatatacagtgatgcatatgccttgatcaagcagaacaaaacttcacgcgaatgatggtcaagaatttaagatgagaggaattgaattgacagggttatttggtcaattagaaaatcggggttttctgagaggatctgatgggttgatttgaataaacagagaagctaccctgtgtacaaatgtgcttcagaagtgttgaggccagcaacatgcgttcagcctcctttgtaattttttgccattctgttgttaaagttaaagtttttattgaatattactctactttccctgatttattcttccccaaatgtaataatagaaacctttgttggcatttgtatgtatttattgtattgagtgaaaagaatgaattacttaaagaatgatatatagttcaagaattgggcg

SEQ ID NO: 515 - DNA, 945 bp, Glycine max
tccgtcgctccgcaccagtttcatcgcacgaatatcttgttgtgtggagcgatcgcgagaaaaaactacgtaaacatgttgcgtattatcatgacctccttacacgtgatgagctctctctctgagtccttccgttacaagggaaattgagaatgggattgctgtggggaatttaaggggaagtgggttgttaaaggaccagttgatgtagacattggtgcaaaccccttctgctgaggggtggaggagagaatggagggatgtgatgatgcagctggttaaggttgttggacattgttgacacattcagacttcaggagcaacccgcattcgataagaaacaagtttgttacctttcatgaataggtttatcaagaattttgactcccaagctcgatgcagagcaacaggagttgtttaagaagcacatcgagggagcaactaaattacctgggccttctttaagattaaagatttccaattttcttgttggtgagaagcatgggtgatgatgcttgcttggtctttgcctactacaaggacgggcgctgctgatccaacattcctgtactttgcatatgccttaaaggaggtcaagtgctaagtgacttaatgtaccgagctatctactcattttatctagtttttttttacgttctgtcctaagttacttgaaactttgacctggtattttgattttaatggtgagacgtgtgctactgctacatcataattcccatcaaatttaattatcgatgggttagaatttcattaaatttatgatttttggtcgtgctagattcccggaagttttttttgaccgactttttgggtgtgtactagaaatattttcatttggcttcatggttttattgataagagatttcaacacgacttgggaatttaatatgcgatcagaatttttaattcaaaaaaaaaaaaaaa

SEQ ID NO: 516 - DNA, 2505 bp, Glycine max
gacagctgaactcatttttctgcttggtccactttagaattaaacgttaacattcaattaaagcacaggttacaagaacattccacttgtttggcttttagacgcgcttggtggtcttaggaacttggcctgtcgctccaccaagaaaaataacataactgacgaaagtaaaatccaattttttgataaattttacaaaccaagggccttcacgcattgataacatatttgaacaggaacttgaaggtatcgtgcaaaaggtctaaatacagcgtgggaaaaaggtttgccccacataccctccagccattgccctcctcacattagattcaaacatcttagggttctctctcaacacagcagcagcatcatgattcagtggatcctcgtaatttggttccgtgaagagatgatacaagccatagatgacagtgttcacaccaaggacaggtttccaatcttctcgtaagatgttgagacaaacatttccttccaagtcaacatttggatgtatagaccttttgtcttacaatttaacctttggtgcttcatgtgggatagatgggagacacttgaaaggaaaacaaaaaatgtgccacctctgtaacaacaaaaatacatagtggagactagtgagctttttcataatttttttcttcatcttgcggtaaagttgtgccttggtgacttgttggtcatgggttcgaatctggaatcagcctcttagcatatgtaagggtaaggctgcttacaacatccctcccccataccttcgcatagcgaagagcctccgggcaatgtgggtttttgaattgcgatgggtctgggaaacgatgacgatgacggagacacgcacaagtccttcggttcagtgccttgttcgatttgcctcgaggctgttaccgataacggtgatcgatcctgggccaagcttcaatgcggacatcaatttcatctcgattgcattggctcagccttcaatataaagggggcaatgcagtgccccaattgtcgtaagattgaaaaaggtcagtggctttatgctaatggttgccgatcatatccagaatttagcatggatgaatggacacatgatgaggatctatatgatgttagctactctgaaatgtcctttggagttcactggtgcccttttggtaacttgacccgacttccttcatctttcgaggaaggggatttttcttcaactgcgtatcatgatgtactgggacaacatgctatatttgctgaacatacggctgtatcatctgctagtcatccttgcccatatattgcctactttggaccaatacatccctccaccttcaattctggtggaactgtttccgaagcttctaatttcaaccactggaatggtccacctgtacctggtgacatgccaacctcctacacatttcctgcagtggatcttcattatcacagttgggaacacaattcctctcatttctcttctgccaacagccgtctaggcacctcagaacagacctcggtatcacctggtagtcaaaggcctgcccggggtggttcagatgtccctagatccgggtcttttatgcatcccttccttgttgtcacagttctgctgctagggctgggaactctgttgcatcttcaatgatccctccttatccaggcagctatgctcgggcccgtgatagagtccaagctcttcaagcatattatcaacctcagctacctcataattctgccacaatacggacacctgttgcttctagcactcgaagatccagtagtcatagtgggtcagttcaattagcaccagtggcctcgtcaccagaccgaagtgctggcttcgtatatattccatcaggttcttcaggacacaattttcaggaagaaacccatctgccaagtcgattccatgctagggaaagagagcacttgccttcattgccattaaaccatgttggtagagaatcaagttggcgagcataccaccagactgccagtgtgtcagacccaagtatcagatccagcagctttcgattaaggcacgaatccgacagaatgccttcacaaaatcggtgatatacttgtttttatgtcaaactacagctattgtggaaaatcaaaatttatgtatgattgagaaacgttacataatgcttttagcctggctggcgtgttatgacagactttatactctggctggccttggaattcatctttctggcagccgtgtggcagtgtgatggacattggtcttctcttgtttctttgccttggagggcataaaataagatcgtatctagttgggaaaatcaggttttggaagaaatactggtgcattgtcatctcaagtgattaaataagtgaatgagagcatgtgtcgttgttggatttattgtagtgggtaaattatttactttgacatcgatgctcatgcaaatgctgtgtatcgagaatatgcttaatcttaccactgctcagtggcaatgtgattatagactactattattgtgc

SEQ ID NO: 517 - DNA, 1902 bp, Glycine max
  unsure (1)..(1902): unsure at all n locations
ctgtgttcttgggaagtgcaattttagattgagagatattaagatccaacatggaccctttagaagtttcaacatcatcaagagacaatttaaacaatttgtttccatctgagcttgaacctcattgattgaggatctattctatgtctcaatctggcatcaatctttttgggtttttcttgatcttccttttcaggaaattcttctgaagaatgtgancccagcaccaattatatcatatatgaaggtttttccactaacaaattgtgcttttgtagaggaaactttttccaatctagagcgagatttaatatcaaaggaaaaatttccctccaacaaatctttctcttgaggctgattaacattatgagcaacgtaagacatccttccaaaatactccacaattaaccctctgtctttttgcaaaccagattccaacaatggagttggagtgtaacttgatgtcaagccaacagcagaacaaactacattaactttaaccattgcgagatgctttcccttgaacaaaatcaccattggtagtggtactcaaaagctgaaaccttgaattcatgtctggttcaatctgcacaatggtattcggaaatgtaaccacccgaatgggcccttccgcctctgaaaggcggcatcaaaaatactacgcactgcatggatcaggattggtatgataagtatcaacgcaaaagcattgcaccaactatgttgtagtcaggtacttgcgaaactatcaatgataatttctatagctcccacatgcattgcagtagcttgaggcttgctatttttactcaccattgcagttctgaagttcacttgcactagaagacagaatttcctcctgtgccattaagggtatttgaactacatgattttcccctgcactaatattagatacaggaatatgcttaccctcatacaacttcccatcagtaagaagtttaagatcaccaacaacactttgtctaaggttcataatttttgcaaacttattaaccttagtagaatacaacttgtcaacagcaggaatttgatccttgaggcttttatgaagcaacatgtttttccaattcatgagccccctttgcaagaacatcagcaggaatgcctctatttctaatgcacttccatcttttcctcttctgtacaaagcaagattggaaatcgtgtgtagtccagaatttgtatctgcggtcgtaaaataagccggaaatctgaatattactgtgattccgcttatatttaatttcagcagtgagaaaaagatgggagaatgtcaaatcaacaaggtatacagatgaccacctaatgtaatgcggtagaaattttctaaatcgattttctattgctataataaacaaccaagatgtccaaatctctgcaaggtaaaaattgttttctcagtgagcttgttgtctccaaaaaaaatgaatgaagcaaccatttgcaccaacgcacaagtgtttttcaaatacgaccactttgaacgggcaatgcggatcagtgagaagaagagagtgaaagaaaggagagaagtagaaaagtctacccacgaagtcctataccagataggagagtgggagcactaaatccaaaatttcaccagcttgaacttgaaattaaacagagaactgagaaagaaacagaaaaagtttaaaatctgacacgaagtcctatatcaaataggagagtgttcagttaaataaactaggagtggaaaagaaaatgattcacgaagtctgtgaccagcacagagagtgattttctttcccttaagaaatcgtacacaaagaagtaggaagaaattgagaaattcttgaaatcaagtaacgattgcttttgtttccggttttaaggtgcggcaacctgtgatcgcggtttatt

SEQ ID NO: 518 - DNA, 813 bp, Glycine max
gcggccgccctttttttttttttttttacattttcatcaccgttttttattttcagtgaaaatgaaaacagaaaacaaccgaaccaaacatctcctaagagtctgaaagttaaatacatgcaaattgaaattgctgattgtacatatcatattttaagaacagaattggagaattaatgatagaagaaacgatgtgacagaaatcagagaggtggagaggtgtcaggaaaggcccacaaatccccaacgacgttttccggaatctgataaaacctcattaaattctcgtacgccataagctcctcggaaagcttctctactttgttgttggcttccgtaacggagtaagccacgtgggacccgcaattctcatcagcgttagaagaagggaaaagccctgtttggttgagatcgtaaccgaactccaagttgaggctcttgcaagatccgtattgcggcagagggtcgtcctcgttggggaaattgactttggctttcttgccgcggatttttcgggcttctttgtcgtaggctctggcggcttcttcggcggtgttgaaggtgccaagccagacacgaactcctttacgtggatcgcgaatctccgcggcccatttgccccagggccgctgcctgatccctctgtagaggtttttcctctgcctcttaactggaggaggaggaggttgaggttgaggttcgctgcgcttgggccagagttcggaggctgtgagggtgcggggacgctgccgaggtatgaaatctgcgatgattgctccgccacacatgcttgcttcttctcgagccgaattc

SEQ ID NO: 519 - DNA, 1510 bp, Glycine max
gcggccgcccttttttttttttttttttttagtaaaggaagaacagtaatgaaatcattatgccatatatcttgcttttacattatactagtaaaacaaggaagctcacatgcagcacaggaataattttcaaataagcttgacctcccacacaaacatgaattccttccttgaaacccttgtcttgtcgtgcacgtgcacgcagatgcctatgccctcacttcttttcctttctctctttcaactttctcactaaaacgttatattacacttacaccacttaacaacaaaataaaataaaattattacaccacaccttgtaaacaaatcgggtatctatccgggtacgtattcggatcccgggtcacccactataactagcaagtcttcaaggggttcccacacaagcaatcattgctagtaaacgacgacgcttcgaggtgatcgaagggtgctccgagaggaatggatccacacaaatggttatggctaagatccaaatgcccgataaacttagccgaagccaacgaagagggtacccgaccctttaaattattgaaagacaaatccaaagccatgaaatacgagtgtgacccgaacacatcgggtatggagccttcaaacccgtttcgactaaggttcaaaatgcccatacccccattactcaacaaactcgaaggaattaagccctctaaagagttactatccaaattcagtgtggatagaaccggcattgtcccgagttcgaacgggacagaaccggataaccggtttgcggataagtctaagtccgcaagccggtaaatcttggagacagaaactggtattttaccggttagctggttccggctcagcaacatgcggctcagcatgcccagattcccgaagtcttccggaatctcgccgcagagctgattattgctgaggtccaggtgtttgagtgagcccagctgggtgatggacgctggaattttgccgcttagggcgttgtcggcgaggttcagtacggttagacgtgagagtttccccgcgtcggccgggatctcgccggagagcttgttccctatgaggtcgaggatgcggagggagggaagcgcggtgacgcaggtggggatctccccggcaatgtctttccaatcagcgacgacgagggtggtgagggtgtagatgccgcagatcgcctctgagagttttccggtcatgtagccggagcgaccggctttctcgaagatggggtcttcggactccccgcggaggttgatgtcggtgacgcggccggtggtggcgtcgcagctgatgccgtaccagtcgaggcagcagttggagcccgtccacgagttgaagaggccaaggtagggctcgctcagcgccttccggaaggccagcagcgccgccctatccgatggcgagcaaccgctcacggcggagcacacaacggcgagaatggccgtcgctaataagaggaacgagtgccaagccattgagtgagagcggcgagagtgctcgagcc

SEQ ID NO: 520 - DNA, 802 bp, Glycine max
gaattcggctcgagcagaggtatcagatatagcaattgcagttcgtgaaggttctgatggaataatgttgtctggagaaacagctcatggaaagttcccactaaaagctgtgcaagtaatgcacacagtagcattgcggaccgaagccactataccaggtggtaaaatgccacctaacattggtcaagtgttgaagaaccacatgagtgagatgtttgcataccatgcaaccatgatgtctaacacccttggaacctcaactgttgtcttcactagaacgggtttcatggctgtccttctgagtcactatcgtccttctggaaccatatttgcttttacagatgagaagagggtacaacagaggctggctttgtatcaaggagtttgtcccatatacatggaattctgtgatgattctgaggcaactttcagaagagccttggacttgctgcagaagcaagcaatggtgaaggaaggagaagaagtagcacttgtacaaagtggtaggcaacccatatggaggttccaatccacgcacaatatccaggttaggaaagtgtaaaccagaagaatggagagtggccacgaataatgtttcaagacacagtacgtttagcttcacaagagcatcatcttagtgttgcctcttagttggttgatgctagtcttttttttcttggcttgtttaggttccttgttctcttctaaatattttgtcacgtaaatgttattgaaattttggttaagaaattgagatcagaaatatgctttcagcatcgaggaataaaaaaagggcggccgc

SEQ ID NO: 521 - DNA, 834 bp, Glycine max
cccacgcgtccgcccacgcgtgcgtccacgcgtccgcccacggcatcagaaaaagaaaagccttcaatcatatagcattctaagaaatgaagagccctaccattttcattctctttctactttctgccttctacacctcactcctaccttcagccaccgctcaagtcgtggttgacatggaaggtaatgatcttcaaaatggtgggaaatattatgtgttgccagtaatagagtcatcatatggtggaataagagtagccgcaactggaaaagaaagatgccctctcactgttgtacaatctgccgatccgtatgataaggggattgcaacaattatttcaaccccatatcgagttcctgttatccgcgaaggctttcctttgaacattacgttcggtaattttgcagttatactgccttgtgtcccccttcgttctgagtggaccgtcgttaatggccaaccagaaggacccgcagttaaaattggttcgcccccaaatgcagaaaatggttggtttgaaattgagaaattgttaacttcgggctataagcttgtgttctgtacgcggcctgagcgtagctattgtcaggatattgggattcatgtcgatgatgaaaatcacgcgcgtttggtgttgacaaatgatgatccactagtggttgagtttctgaaatatgatcccttctggccccagaataatctagtgcttcctacaagtcaatgagagactatataaatgctttggttgtaataaattattgtcagactaaataaaataatcaaagcttatcccttcaaaaaaaaaaaaaaaaaaaaaaaaaaagggcggccgc

SEQ ID NO: 522 - DNA, 1510 bp, Glycine max
cggcggccgcccttttttttttttttttttttcggcctaatctgtcttcattacacattgatgttattattttctctttcttcccttttccttgttctaacccgaaagagaaatgtaacaaagcagaaaaatccacacaatcttaccaaatttcttctgtcaaggaggacccttggactctcaatccgtacacttgcatcaatgttgttgtcaaggaagggccccatctcatgtcatccccatataaaaaaaaaaaaaattaactttctaaaagatcacacaacatatgtaacaaatcacacagagtagtgattagagagagcttggttcttctacactcaaattatgcaacatgataaatcacttatagttccatatgggtataaaaaaatcatgcaccttgttacaccaaatccgatctgactttcaaatttactttaccacatcaaacacattagaattactcggatttagtgcaacaaaatacataattattctattcatatgaaccgatataccaaatattgcacaactttatagtagaagaatcaatttattcacttttgaaagtgttacccccagcactcaggtgttagtttgtggtctcttttgtggtcttggcaatagttatagaccatgtggtatttttgcacccatctcatggcccaatattggcgtctggtcaagccaccggagcgatatggcgaggctgagactgggcggcaccgacgagaggtataggctgagcaaccaccagccctgaagtttgtgtactttgcaacaaaaggttggtatctgtaatcagccttgtacttcccatcttctgttgcccatgatgaggcatcccatattgaaccataaagccacattggcctcagtggaaatgtttcagcactcttccttgggtatctccttatgggaatatcatccacaaggaatattatttccttaggactccaaagtatagcatagtgatgaaagttttgggtaggatcaaaccaaaggtggaacttcatttctctgccaataattgttccatccccactccctcttatataaacattggtctgtaaagtataaggctttccaaatgttgtcccaagaaactcaatgtccacttcatcatggaagcccggatgtgcctcattgttagaaagatagaaagctgttataactcctgcagtatagccaggatggagcttaatggaagcaccaaagtacccggatcgaaatggtcgatttgacttgaagccacttcctgaggagctatcaagccatattgttaatgcattttggtctatgctttggtgctgagggccccaaagatttctaaaccctctatagaagttcacaggcctgaatttggaacttggcctgtaaccaggtgaaggtggccagtaggcattgcttgaagaggccataagcataaagaataaaatagcaaagggagttatcaaagccatgaagaaaaaatctcgagccgaattcgtaagcaggaagcagaatgatg

SEQ ID NO: 523 - DNA, 948 bp, Glycine max
ttctcgttgataaatattcgtatgcagttcacaaatttgttcttcacttccacaataatgtttttcagccagcattaaaatgacaataccattattaaatgaagagtgtgctttttagtattcgcactcaatggtgccacattcaccgtcccatacacattggccactttgctatccactggacatagatattattattcctttccctcgctcttccctttgttctcttttttacctttgtcttaaaagaaacagacacacacacacacaatcttccaaatattctcgtgtcttgatagccttggatgcacaaccccgtacaatgtagctgtcaagctggggggccatctcaagtgacccccataaagtaaaagaaattttctgaaagaaaaagacaaaacaaatcacaggagaacagtgttttggttttggggaccaaaaatcagcataataccgaattggccaagtgttccaatttccaaatgttcaatacttgaattcaaccccaacactcaggtgttaggcgtgatctctcttggggtcttgacaatagttataaaccatgtggtatctttgcacccatctcatggccctatattgttgcctagtcaacccaccagacctatatggtgaggctgaaactagatggcaccaacgaggggcataggctgagcaaccaccagctttgaagttggtatactttgccagaaaaggttggtatctgtaatcagctttgtactttccatcctcagttgcccatgatgatgcatcccatattgaaccatatagccacattggcctcagaggaaatgttgcaccactcttcctcgggtacctccttattggcacatcatccactaggaatattatttccttgggactcatcactatgctatactgtggagtcccaaggaaataatattcctcgggtacctccttattggcacc

SEQ ID NO: 524 - DNA, 341 bp, Glycine max
aagcaccaaagtacccggatcgaaatggccttactgacttgaagccacttcctgaggttctatcaagccagattgttaatgcattttggtctaggctttggtgctgagggccccagaggtttctaaaccctttgtaaaaactcatggacctgaatttggaacttggccagtagccaggtgaaggtggccaataggcattactagaagggaccatcaagattaaaatagcaaagagaaagagagccatgaagaaaaagtaaaagtgttagcagaaaggagaatgattccgttgtgtgtaaatgaagggtgtgagagagaaaaagctagggaaagtgctcgag

SEQ ID NO: 525 - DNA, 1710 bp, Glycine max
gcggccgccctttttttttttttttttttttttgaataagaactcaaaagaacaaattacacttttcttttcttagttgaatgcttcttctagactaggtaagacttaattataggaagaaaatcaaatcaagacattttatgtaaaatgtaaccatacaatatcatgatcctagcctgtcaaaaacaaaattaataacaattattaactaaaagcttgctctctttagggaagtaatagtaacggaagaacccaatggagaagttcccacttgaatctcgaacgagtcgtagcggagaaaaaactccacgacgagaagcctcgaaaccaaggtgacgaagtcttttccggcgcattgcttgttcccaattgtcggagattcggtctcagggccattggaccacagcacgtgtttcagaagcttttccccttcctccccgacgaacctgtcccccacaaactcctcggccctctcgaagatcctaggatccttcgtcgcaaacggttggtatccgaacagcatttccccttccttcacctgaaatgcgtggtcgtggctctcgatgatcaagtccctcttcgccctcccgaactgcaacggcaccggcgggtcgatgcggaacgcctcgtacaccaccgacttcatcagcggcatgttctccatcgccgccatggtgatctccccgccggcgcctctcacggcggagcgaatctcctccgccaggcgcgcgtggagcttcaccccggcgcgtccgatccacttcaacacgttcgggaagaacagcttcatcccgccgaaggagttgaagcacgtggcgaataacaaattatggcaagcctcatcgcgcgtgatccccaatcgctccgcttcgtctagcacagaaccagaagactggtagaagaaatcgtagagtctctggtaatctttttggatcagagagaacggtaggcggaagctccggattgttgattcttccaagaattgagggaggcccaagcggaggattgggccgagctgaaataggacccatttctgaacgattttagggccgtcgcggccaagtttggtgtcggcggggttggagttgaagagggagcgtgccaagaagttgaaggcggcttggtcgttggcgtcgccgaagctggctttgccagcttcggcgaggttggcttcgagctcgtggaagagttctttgtaggacgcgtggaactcagagatgacgtgggcgcgacgtgatttgaggaggaagaacatgagttgtttgaggagggcgtgtttgggttcgcaggggtcgaggtaagaaaggactcggtatccgccggtgagttcggtggaaggcatgaaggttccagtgaagacgtcttttttctcgaccttagagttgtcgaagaggacggggaaacttttggcatcgaggagaacgacgactgtttgggtcgggggcgaggaaggggccagggggcatgttggtgcggaagaccgttgactggtacttttggatgcgggacttgaagaactcgtcgcgcccttgcttgtagaaatagtcttggcggtccttgaagggaccgatcaccgggaacccgcagtcgccggggattttgcggatcggaagcttgcttgaggctggggaattctagtcgcaggaagggagaagacagcgtggtcgaggctgaggatgccattttgggtgtttctttcgaacgcgtaag

SEQ ID NO: 526 - DNA, 557 bp, Glycine max
agcaaatcaaatcaagacattttatgtaaaatgtaaccatacaataaacttataaattatcacatactatcattctcgatgataaaaaaataataataataataatactatcatcatcctaaccggtcaaaaacaaaattaataacaaatattaattaattaattaattaattaattaactaactaactaaaagcttgctctctttagggaagtaatagtaacggaagaacccaagggagaagttcccacttgaatctcgaaggaatcatagcgaagaaagaactccacaacgaaaagcctcgaaaccaaggtgacgaagtcttttccggcgcattgcttgttcccaagtgttggagactcagtctcaggcccattggaccacagcacgtgcttgaggagcttctccccttcctccccgacgaacctgtccccgacaaactcctcggccctctcgaagatcctaggatccttcgtcgcgaatggttggtacccgaacagcatctccccttccttcacctgaaacgcgtggtcgtggctctcaatgatcaagtctctc

SEQ ID NO: 527 - DNA, 493 bp, Glycine max
gcatgaaggttccagtgaagacgtcttttttctcgaccttagagttgtcgaagaggacggggaaacttttggcatcgaggagaacgacgacgtttgggtcgggggcgaggaaggggccagggggcatgttggtgcggaagaccgttgactggtacttttggatgcgggacttgaagaactcgtcgcgcccttgcttgtagaaatagtcttggcggtccttgaagggaccgatcaccgggaacccgcagtcgccggggattttgcggatcggaagcttgctgggctccggggaggtcaccgacacagccggtagcgggggtttctcggagaccgaggctctgatggagattgaagagcgttgtttggttgaggaggggaattctagtcgcaggaagggagaagacagcgtggtcgaggctgaggatgccattttgggtgtttccttgttgaatgacgatggaatgggaggcgtgaaggggtgctagtatcatgt

SEQ ID NO: 528 - DNA, 446 bp, Glycine max
aaggatgggaaaggtttttgggccaagaaaaccccccacttttggtttggggccaagaaagggccaaggtgccatgttggtacgaaaccaagttgactggactttttgaatgcggaccttaaagaactcgtcgcggcggccctgcttgtagaaatagtcttgccggtccttcaagggaccgatcaccgggaacccgcagtcgccggggattttgcggatggggagcttgcttggctcaggggaggtaaccgacacagccggtagcggtggtttctcggagacagaggctcggatggagggaacaggaataattgatgaagatcgtttctttgttctggagggtaattccagtcgaaggaagggagaggagagcgtggtggaggctgaggatgccattttttatgggaagggagagggctattgctactatatatatagagagagat

SEQ ID NO: 529 - DNA, 432 bp, Glycine max
gcggccgcccttttttttttttttttttttttaagccgccaaaaaaggctggtaaaattatatcatattgacatatttctctgcagccgtctcatttatactaatgttgcccactaattcccattaaaaaaaataaaaacaaaataaattaaagtatagcagcaataatacagaatcctgcacttgaaatttatgaagaatatgaaccgagcttcttgtcggtggattccgatccccttcaatttggccgttcactttgctcttatattgctgttctgactcaaggaccaacaatccctgaaataatcatagttttatcttgggtggttcttcccatggtcaatccaacaatgttttccttttgcttgatttatggttgtggttatctttactccgctttttgtcactcttatggcttctcgagccgaattc

SEQ ID NO: 530 - DNA, 768 bp, Glycine max
gcggccgccctttttttttttttttaaacaaaactagaaactttagtagaactaataattaaaactccgcaccacgtgcaaatcattacattcattcattaaaaactagccaacctaattttgtccaataattaactatgtcaaatgacgtcatgtgatccatgtaattgatctcacttagttggataagactttattgttgtaatgagaaaaaaaaacatgtattaatcttcttctgattctgaaacctgcctcttttggggttcaatgccatttgactccctcccaactggatgaatgagattcctaaccatctgagtggcattgcaccatacacaaattcaacaatcagatccattctagcttgatgcttcaacaggaatggacgcaagtgactagaatacagttgtcttgcaccatcaagagtgggcagctgtagccaaacaagaaatgcaaacttcatgtgatgatagagtggaatccaggaaaataatttttcagcaaacatttctgcagcactaaaagaaccataagctgcccaatacaataggcacctttgttgctcatatgggtcattgttctcaatagctttaaacgtggaatacacgggaagcgcaagccctattgaacagcatgctgtgcggagaagaaggttggaagtaacgggtgaaaggagcagtctcaacccaacctctggtaaagccatcagggaggggaattttaggttagggatttcagcatcatccctaaagacacaatccaagcgga

SEQ ID NO: 531 - DNA, 373 bp, Glycine max
gcggccgccctttttttttttttttttttttttttaaggtaagcaactatagagattaattatattgtacaattacaaaaacacataagaaagcgtgtgtgtacgtacaatcgtacatacataattaaaagggggatgaatcagggttcacgaagaaacctttgtaggcagcgaaatccgagattctgagcgcaaaaccgttccatttcatcgccaccgttctccagacaaatactttcttccatgtcggccaagacttcgtcccaattcttcatgggccaccaactggactcatcgatttgggcctcggagacagagtccagtatctcctggaggcccacgatccgacgggtgactttctcgagccgaattc

SEQ ID NO: 532 - DNA, 636 bp, Glycine max
gaattcggctcgagctgactccaaaataactatcttcattctgcacccttcttgttcttctgtttagccaaaaaattctgagtgttaaattagtgactcatgactgctactatgatcaagttatattttttttcccttgccattttggttatcttccttgccaatccaaagggtgtgacttcaagttcaagtaccagtgagcctacaatttcagcatctcctggtgttttgccttatgtgactaccccagagatttcctcattttttcccactccaagtgcaattcaaccaatgagttctggttttgaggccgaggcaccggcaccggcacccagttcaggggagtttgagggcaagaggtcttctggttcagctaggttggattgtgcaggtgccattgttggtgttctgctctgttgtgccttgttaagtagcatagttgttgtttgagaatttaccattgtacttgtcttaaaggggttgtgaatttcatccactagagcatagagcatagtgttcttctttttctattagtccctgttctatgatttctttgttgcttgcttagttaatatacgtgatcgattacttatgccgaaaaaaaaaaaaaaaaaaaaaaaaaaaaagggcggccgc

SEQ ID NO: 533 - DNA, 297 bp, Glycine max
gaattcggctcgaggcccttcagtggttgcccttggtacgactcatcggtttgtagccaaatatgtgactgtggtgctgtacaagtctttgcagaggtaaacaacataaattacatggactgtgtagtcttttaaacttgaagttaatatagcttcgagcagtacggttatgagtgagaaattctgagcatcataaggatcattacatgaaagtgaagattgtggtacatataatgcaattgcttgatggccattcatcatgcaaaaaaaaaaaaaaaaaaaaaagggcggccgccg

SEQ ID NO: 534 - DNA, 393 bp, Glycine max
gaattcggctcgagcatgtccctgtccctcatgcttctcggggcggtcacgttcctcgttgggttgctgctgctgccttgggttactcttctggtgctggttttctatgttgctgcacttgtctccaatttgtctgtgttgggccgtttcattcttgggtccatcacgttgcagagggatcttccacatgaggctaatatataccgctgaagctttaggagggaaaagaaattgtccgagacattgaggttaggtagcagatcacaaatacatatgtcatgataaataataagtgaatctggttgagattttgatgacttcatttgcttgcaataaaatgaacgatttcatctttttgctcgtttcaaaaaaaaaaaaaaaaagggcggccgc

SEQ ID NO: 535 - DNA, 1397 bp, Glycine max
caagtattttccggcggccgcccttttttttttttttttttggataccaaagtaaatgcttagtctcaaatcagtaaaaagcagagttcaacatgtcatcgcggcatggcatttctttacattgaagaaaattagtagagtggcaaatagtaaaagctctggaaccaagcaattcaattactacttgtagctatagtcctactagtttgtcaaccatatggtgaaatcaagaagatttgcagttgatttggtctacctagcaatgcaatgcgatgcattcagctaccgcagaagaaaggggatatggtgccggagttagtgattgatggtggaaaatgtgagtggaggaatgtcatgtttggaaaacgaatttgagtatccgcagctgatggtaatattgttgaagggaatcctgatgatgctgcagtagagaggggtggagtaagagttgccccgccataaggacctttgacttgccatgcccaatttggcactggagcagcttccatcctcttctctattgctgtttcctcgtagataggaaagaaattgctaccattccagacggaaggatgttgcccagatgctacggagaagccatgatgagatggctgaacggtcagtgatcttgatgcagagtgctcaaacattactctcttgtcgagagggatattatcccagctgtgcggagttatcataccactcccattgctgggtgtgttcttgatttgaccatcagagtaagaagggggagctaatcccaagttcagatcaagactttgcttgttatcttcattatcagactgggaaattacctccccttcatagaagctgggctcgaagtttgtaactgcttcccttccattgcattttatagcagccttatcatacgctcttgcagcctctaattcactgtcgaatagcccaagatatatatactttttaccaagaaactgccccatacgagcctcccatcgcccgcacttgtgcagagtaactcccctgtatttggagcttccccttgaaaaaccagtgctctgtcgccgcaaaatatgcacaaactcctccttcgtgaagttactcatctgctttatatcttcatcgtaatcgctaacgttgaaattgatatccgcatcaacgccacggaacttgatcgcagctcgatcataagcccttgccgcagcatgcgctgtgtcaaatccacccaagtacacttgtttcccacagtcccaaatgtgcgattcccatcttccggttctgcgatagaatgtaacgccgcgatattgcgagcggctcgagctcgagccgaattcgctcttcttcacctgctgttgccggggagtgatcctctgctccggcggagcaccgtgctgatccaccttcgacgagaaatcaag

SEQ ID NO: 536 - DNA, 1141 bp, Glycine max
gcggccgccctttttttttttttttttttttttttttttttttttaacaaagcagaatttcatttgattgaatgcacaatttcttcacattacaaaactctctaatttgtacaaaaagtcaatgaatcctgatttctgacaaatttagaacattgcagcttttaatcttcttcccaactcctttctcatcaattgcctatcaaaacctgatgcagccaaaagccctctattttcttcagcccttctcagaaggtaaggcataaccatatctaccggcccaaatggcatatacttgctaacttgaaaccctgcattgctcaaaccaaaggaaagtgcctctgacattccatacagttgtgcaaattctagcttgtggtttacctttccaacccccaattcatatgcttttgctgcagccaatttccctgattcaatattgtgagttgcaagaacaactgaaattgaaccgggtccattagcaatcttctcaagaagaaatgatgagcagccattgaagcaattgtgtgtttcttgaatggtattgtgaattggggatgcatacccaaatgactcagccaatttactctctgtggacatgtaggcacctctaaccaatttgaaccccaatggaactcccattttttctgctgcctttgttgtgagcaacaacctctccttggcatctttcaaataagtctgaatggttccaaacacaatggggttgtcatccttattgtgccttatggaagaagagtatgtgaagtaatcgatagccggttgaactgtggtgtgttctgccccatcaaccaacaaaggcatattggcttcctcacatctttggcaaagttcaaggagtctctggttggcaagttgaagatcactctcttcttctggggttagaggctccggtctcttctgtgtgtggtacaaaggactagactcagcgaaaattggaagggaatcttgcttccatggcaaaacgaatgaagggtctttttgttgccatctaagaaggtcactcattctttctaacaatgccatggggcatattgcagtgattttcacaatgacaaaactcacagaggatggtggaagcgatttgctaacatccacagtgtgaaggaacccattgaggtttctg

SEQ ID NO: 537 - DNA, 425 bp, Glycine max
ttttagcataagtttattgctcaacgcggaagatccgttgcatttccaacaaaacctacataacaaagcagaatttcatttgattgaatgcacaatttcttcacattacaaaactctctaatttgtacaaaaagtcaatgaatcctgatttctgacaaatttagaacattgcagcttttaatcttcttcccaactcctttctcatcaattgcctatcaaaacctgatgcagccaaaagccctctattttcttcagcccttctcagaaggtaaggcataaccatatctaccggcccaaatggcatatacttgctaacttgaaaccctgcattgctcaaaccaaaggaaagtgcctctgacattccatacagttgtgcaaattctagcttgtggtttacctttccaacccccaattcatatgctttt

SEQ ID NO: 538 - DNA, 537 bp, Glycine max
ggattaagaaatctacgtttagaggtggcaacagagaaaccctaaattgaagagaagagtgaagattgagagttagggtttaagcgaagcgagatcagagaagaaggcatcatgtttccgggaatgttcatgcgcaagcctgacaaagctgcagcactgaagcagctgaaatctcacgcggccatgttcgggacatgggttgttgttattcgagtcaccccttacgttcttcactttctctgcgccgagaaagaggaacttaagctcgagctttagcttctcaatcttccccgccagtggatcttcaggagtaggatgtgtccttgggtttgggacaataatggagtaatgtttttatgtaaccttgaaattgtgaggccatgatgatatattgagtttaatcatatttccttttgcatttggaatataaatgtgtttggactagttgtgaaaagataaacaacttcaatagtgaattatagatatactcaaaaaaaaaaaaaaaaaaaaaaaaaaaaaaaaaaaaagggcggccgc

SEQ ID NO: 539 - DNA, 1894 bp, Glycine max
gcggccgccctttttttttttttttttttttttttttcaaatatatacaaccaccatacataaggtatgctccacaattcaattgatagctgtaataaataacatatttgcgcttttattaaattgacattggaaggaggcaattgaatgcagtgtaaaatctaactgaaatcaactttattctctgttcctgtcatgggagtcaacattcaattagaacggaagaaacagaactacaagagtcatgcattcattgacgaggaaagattcaaactccaagtacataacaattctccagccttctttcctacaagataaattattagctcaaagcccctcaaaaaaccgaatgtggtcttcaaaagtctctccatgtcttattttgctcactgatccatcatcttcaacccaatactcaggaggccgcatctttagattgtaggttgatgccatgctcatgcaataagcaccagcatcatgaacaaccaaaccagtacccttggctggagtaggaagttctcttccttttcctaagaaatctgcagactcacagacagggccaaccacatcaaaagtttctgtttcagcatttgacggggcaggggaaaccagctctatatgctggtaagcatcataaagactagggcggataagttcagccatacttccatcaattacaatgaagtttttagatccattacttttaacacctgtcacccggttaactaagcagcatgtgtttgcgatcagagatctccctggttcaatgatgagattaagaccacgcgaaataacaagatctcgtacagtgtcaatgagatctctaggtgtaggaagaatggcaccagaatgataataatctatcccaagtcctccaccaatatttaagtaatcaacttcaaaaccctgatctcggatttggtcaatgtagttgatcataatggtggctgcatccctgaaaatgtctaccttggtaattgttgaaccaagatgacagtgggcccctacaagtttgagctcattaggatgttccttcactgcatctaaaaagcactgcagcttctcatttctaatgccaaatttagagttcttattcccagtggcaacataaggatgaacctgtggatccacatcaggattaatccgaagtaaaacattgaccttcttcccagccctttttgcagcctctacaatgttttccaagtcaaactcactatcaatgttgacaaacacaccttcctgagcagccaagaccaaatcctccaagattttcccattcccattaaagatacaccttgtgggatcaaagccagctcgaagagccaacttcagctcattcccactaacaagcacagcaccacaacccaagtgcctcaaatgttccaaaatcttcaaattgttgttagccttaatggcataaccaattatagaactcaacccttccaatgcatccttataggcttcaacgttcctagttatctggggcttgctgtacaaatagaaaggtcttctctcaacagattccatgatgtcatgcaccttgaggccctcacagtacagatacccatcttcggatttggtgaaacaatgctgaaaatgagcgttctttgtgtcctctaccgcggttttgacagcgttctgcgagagaaccgctctgagagcacgtggttttgtggtggctttgaatttgaggggcagaaaaaaaagcttttgggataacgcgttttggtttaaggagtggctgtaggttttgggaagggaaggagagtgagaaagaatgtttgagcctgccatggctgtgtgttgttggtggaagattttgccgacaagacaatgtgtgttgcaaggataatcacaagacaaaaccctcgccccccgttctgtcgtctttcgc

SEQ ID NO: 540 - DNA, 1204 bp, Glycine max
tccactgaattcggctcgagctggtgtgtatttgcggcaaggtttggctccaacaagagaaacgagcaatcatatggtatttgatttttagggtggaagaaaaatcagagtgagagaaaaaatcgatggagatggaagtagacatcgagaagaagcaacaagacgtggtgaaagagaaagacttgttcaaagctgcagaagagggcgaggcatcaacgttcgaagctctctcttctgaaatcctctccaaagccctctctctcagaaacgaagacgctcgttcccttctccacgtcgcagcttcttccggtcactcccaggtagtgaagatagtgttgtcttgtgatgcatctgctggtgtggtgaattgtgctgatgaggaagggtgggcgccgcttcactctgcagccagcattgggagtgtggagatagtggagactctattgagcaaaggagctgatgttaatctgaaaaataatgggggtcgtgctgctctacactatgcggccagcaaaggttgggtgaagattgctgaaatgctcatctcccatgatgccaagattaatataaaggataaggttggttgcactccattgcatcgggcagctagcactgggaaatctgagctgtgtgaacttttgattgaagaaggagcagaggttgatgctgttgatagagctggtcaaactcctctaatgaatgctgtgatttgctataacaaagaggtagcccttcttctgataagacatggagcagatgtggatgtggaggacaaggaagggtacacggtgcttggtcgagccacgcatgagtttagaccaatattaattgatgctgccaaggccatgcttgagtgatcatacaattataagaaaatgagaaaattgtcaggacaggaatgtcgaaagagagcagaattgtggtagttatttcgcaatgccataatggtggttacgttcttgacaaattatgttgctcaggcaaaaagttcatctatacccttatgttcttagttgtcaaaccagtttgttttgggtatttttgtgccagctttaaattaaatcaggaagattagaatttttgttttgataatcccctaaattagcaattcagattgtataagtcaaaacattttaattctagagattttaagaactctccgttagttgattttataaaaaaaaaaaaaaaaaagggcggccgc

SEQ ID NO: 541 - DNA, 1379 bp, Glycine max
  unsure (1)..(1379): unsure at all n locations
gtcaaagaatttagtgtttcagttccattatttttcaggtgaagtaacatatactatcattctgtaaattagtgaagtctagggaaggggtatctgtattctcttcttcaggctggatattgacatggtactagacaaagaaaaccattggcccaaattgggaaattgatatgaccttagcattgtttgattaactgacgaagcttcttatgaaaaaaaccctattatggactattcttgtcactcatattttctacatttttatgaattttgcagtagaatgttgaacagaattgacaataataatctacaagtagaaagcagttaacggattctttttgaacttctaacctttgcatattttaactattcttgtgaatgataccaaccacatactcttactttagctccttcgaggtcttaaataccttcattcagcaaacattcttcaccgggacttgaagcctgggaatctgctcgtcaatgccaattgcgatttgaaaatatgcgactttgggcttgcacgaactaatggagttgatggccagtttatgacagagtatgttgtcactcgctggtatcgtgcaccggagctcttgttatgctgtgacaattacggaacctctattgatgtctggtcagtagggtgcatttttgctgagattcttggtagaaagccaatcttccctgggactgagtgtctcaaccagctgaaactaattataaagcgttcttggaagccagcatgaatctcatcttgagtttattgataatgcaaaagcaaggaggtttatcaaatcactgccctatactaggggcagacacttctctcagctatacccacaagcagatccattagccatagatttgttgcaaaaaatgcttgtgttcgatccaaccaagagaattactgtcttggaagctctccaacacccgtatatggctagcctatatgatccaaggtgcgaccctcctgctcaggttcccatcagtctcgacatagatgaacattggggagaaccgatgattagggaaatgttttggaatgagatgctacattatcatcctgaagctgcttccgccaatgcataaatgattaattcttccaaggctttcaggtcttgttgcttgtctctaggagtagttctgttttttcctagacaaactgtaatcttaaaaggatttaactaccgaattttgtactttgtatgagattgctttagtacttttttaatttggcgtctccacaaggataatggcctcttgtaacttgtatatagccatgcatactgtttttggtgtttcggttnnnnnnnnnnnnnnnnnnnnnnnnnnnnnnnnnnnnnnnnnnnnnnnnnnnnnnnnnnnnnnnnnnnnnn

SEQ ID NO: 542 - DNA, 893 bp, Glycine max
cagtaaaccttagccacttaggatgttccgcagccaagtggcgggcaagtcctatattatagccatcgtcctctcaatcgtcattaccaaacgggactcacagaagataataataataataattgagcagaactgagcgcgctcaaacaaagcacgctttccgtttccgcagcatcaaaatgtatcttaaggaaatctaagcagtcatcaataaagctcctaacaagagccagctaataaaaacacaatcacttggaaaaaagatcaggctcccccattaatcaagacaaatagcgacttgtctcccaacctttcccgcccctttaactctggcaattcaatcacacaagcacactccacaacatgcaccccaacacgttctgttacatactccaaagaatactcttctgagataacctccccaggcaatttattgggtttcctcatggggacaaattttgctccaatagctaatgcaatgggtggaccaaatataaagcctctagcttcaactcctgcgacaacattgatgttttgatctctgtacctctcaacaaacaagtcaatggtgtctttgaaagcctttgtatcaagaagcagcgtggttatgtcctgaaacaaaattcctggcttaggaaagtcggggatgactcggatcgcagaggcgattctggctaagcgcgtgtcttgttgagcattcttcgaagccattcttgtaacttgtcgcggcgaagcagtggaacggaggggtgtggaatttagaaagcggatcgaagaaattgcaatgagtggagggaatctgggacaagggaaagatggaagagtggcactcacgcctgaattggagcaacaaacaacccgcattctcttcacttctcacttttccattggaa

SEQ ID NO: 543 - DNA, 934 bp, Glycine max
  unsure (1)..(934): unsure at all n locations
aggtttccgtgcaagggcaagcaagtctatattatagccgcgtctctcattcgtcaatcgcacagataatgataataacataattgagcaaactgagctttccgttccgcagcatcaaaatatatatcttgaggaaatctaagcagccanaataaagctctaacaagagccagctaaaataataaaaaccccaatcaggctccccctttaataagacaaacagcgacttgctcccagcctatcccgccccttaactctggtaattcaatcacacaagcacactccacaacatgcaccccaacacgttctagaagcttaattgctgcacctaacgttcccccagtggcaataagatcatctatgattaaggctcgttctccaggttgtacagcccctacatgcatctccattttgtctgttccatactccaaagaatactcttctgagataacctccccaggcaatttattgggtttcctcatggggacaaattttgctccaatagctaatgcaatgggtggaccaaatataaagcctctagcttcaactcctgcgacaacattgatgttttgatctctgtacctctcaacaaacaagtcaatggtgtctttgaaagcctttgtatcaagaagcagcgtggttatgtcctgaaacaaaattcctggcttaggaaagtcggggatgactcggattgcagaggcgattctcgctaagcgcgtgtcttgttgagaattcttcgaagccattattgtaacgtgttgcgacgaagcagtggaacggaggggtggagaatttagaaagcggatcgaagagggtgttgttgaaattgcgatcagtggagggaatctaagacaactagggaaagcactcacgcctgaattggaacaacaaacaacccgcattctcttcacttcttgtcacttttttcatttcc

SEQ ID NO: 544 - DNA, 480 bp, Glycine max
cacattgattgttttgattctggacctcccaacatacaaagtcaatggtgtctttgaaagcctttgtatcaagaagcagcgtggttatgtcctgtcacaaattccctggcttgcgaaagtcggggatgactcggattgcagaggcgattctcgctaagcgcgtgtcttgttgagaattcttcgaagccattattgtaacgtgttgcgtgcgcaaccaaacacaaacgaagaaatcgtattatgttagaatagtcgcgattgaagattgaagattgaagattggagagagagatgttgaatggaaattacacgaagcagtggaacggaggggtggagaatttagaaagcggatcgaagagggtgttgttgaaattgcgatcagtggagggaatctaagacaactagggaaagcactcacgcctgaattggaacaacaaacaacccgcattctcttcacttcttgtcacttttttcatttcc

SEQ ID NO: 545 - DNA, 951 bp, Glycine max
  unsure (1)..(951): unsure at all n locations
cgcgtccacgcgtacgtaagatcggaattcggctccgagagaataatccggttgattacttgtcaagggaacattaaaaataggggatttcattgtcagaattcggctcgaggccaggcatttgaggatggcaatgatgaactccgtcgatcacctggcactccagttttcactgcaccagaatgttgtttaggtcttacttatcatggtaaagcttctgacacgtgggcagtaggagttactttgtactgtatgatattgggtgaatacccatttcttggagacacacttcaagacacatatgacaaaatagtcaatgatcctttagttctgccagatgacattaacccccagttgaagaatttaatagaaggattactatgcaaagacccagaactgaggatgacattgggcgatgttgctgagcatatctgggttattggagaagatgggcctattcctgggtacttatgttggtgcaaacgcaagagcatggtgactgaagactctgatgggagcgatatacttgcttgatccacgctgattctaagttggatttcttatgtacagtgacaaggcccattaatttttcccccactttggccccacggagagatgttatgattattatagagggagtctccaaagaataattgggaattaagaaaatacagttcatgttaccgacgatatgtagtcaactaagtcatgtttatttttgtgttgtgaagcatttggtgtcctctacggacttagaggtcttgtaatacggctctttcgcatagaacgagtttttttctttctttctcaaacacgtgccgaattctgttcagttcatactctttatacattccttggagtgttttgtttttacatttgctttggtttaacattcnnnnnnnnnnnnnnnnnnnnnnnnnnnnnnnnnnnnnnnnnnnnnnnnnnnnnnnn

SEQ ID NO: 546 - DNA, 1101 bp, Glycine max
gacatctcgagtgtgaagtttgtatgactaaacatttgcaggtggtccgataacggcccaataattggtggctcgataggcccaacaacaattgctaactcaggttctcattatgaaaatgctggaacatcctaatatagtcaatctcattgaggtgattgatgatccagagtcggataacttctacatggtacttgaatatgtggaaggaaaatggatatgcgagggttcaggtaccacttgtggcttaggtgaagagactgctaggagatacttgcgtgatatagtttctggattaacatatctccatgctcataatattgttcatctggatattaagccagataatctgttgattactcgtcatggtacagtaaagataggggatttcagtgtcagccaggcttttgaggatgataaagatgagcttcgtcgatcacctggcactcctgttttcactgcaccagagtgtattttaggtgtgaaatatggtggtaaagctgcagacacgtgggcagtaggagttactttatactgtatgatattgggtgaatacccttttcttggagacacacttcaagatacatatgacaaaatagtcaataatcctttagtactccccaacgatatgaatcccccattgaagaacttaatagaagggctactttccaaagacccaggactaaggatgtctttgggcgatgttgctgagcatatctgggttattggagacgatgggccaattcccgggtacttatgttggtgcaaacgtaagagcatggttactgaagattctgatgggagcgatatacttgattgacccacactgattctaagttggatttcttatgtacagtgaaaaggcccattaatttttccccacggagacatgttatgattgtagagggagtcttaaaggaatctcaaaatttaagaaaacattcttctgcctctgctacttatcatgcctacatgaactatatgtttttttatttgttttgtgaaagaatttggtgtctagaagtagaaactgagagaaaggccttgtataaggatccttacacgcatgaaatgaattttgagctctagcttctaggcaaa

SEQ ID NO: 547 - DNA, 793 bp, Glycine max
tcttgacatttacatgtgtcctaagattatcttcacaactaataggaatcaatctttcgtttcattttgcaggcggcaatgacgaacttcgtagatcacctggcactacagttttcactgcaccagaatgtcgagaaggtcttacttatcatggaaaagcttctgacacgtgggcagaaggagttactttgcactgtatgactgtgggcgaatacccatttcttggagacacacttcaagatacatatgacaaaatagtcaataatcctttagtactccccaacgatatgaatcccccattgaagaacttaatagaaggcctactttccaaagacccaagattaaggatgtctttaagtgatgttgcggaagatagctgggttattggagatgatgggccaattcctgattacctttgttggtgcaaaatgaagagcttgggaattgaggacaatgatgagagcaatactgactaaatttttttagtttgcatttatgtacagtggaaaagctgtgattttttttctttgttagactctttgctggtattttatgattagaggcagtcttaaaggaatctcaaaatttaagaaaatatagttcatgtaggcatgataagtagcagaggcagaagaatgtttttttatttgttttgtgaaagaatttggtgtctagaagtagaaactgagagaaaggccttgtataaggatccttacacgcatgaaatgaattttgagctctagcttctaggcatagatattcttaattcttagtttaaactttgtatgtatca

SEQ ID NO: 548 - DNA, 1357 bp, Glycine max
cccacgcgtccgggcttctggaatcgcatagtcacatcacattcgcagcagccaaaccaaaccacaccgaaacctccaaaaccctagcacgccaccgtccatggcgacgacacgatccgcgccgctcctcaagcacctcctcacccgtctcaacccttctcgctccgtcacgtacatgccccgtcccggcgacggcacccctcgcggcgtgacgctgatcccgggcgacggaatcgggcctctagtaaccggcgcggtggagcaggtgatggaggcgatgcacgcgccgctgtacttcgagaagtacgaggtgcacggcgacatgaaggcggtgccggcggaggtgctggaatcgatcaggaagaacaaggtatgtctgaagggaggactcgtcacccccatgggcggtggcgtgaactcgctgaacgtgcagctgaggaaggagctcgatctctatgcttctcttgttaattgtttcaacctccctggccttcccacgcgccatgataatgttgatatcgttgtcatcagggagaacaccgaaggcgagtactccggcctcgaacacgaggtcgtccccggcgtggtcgaaagcctcaaggtaataacaaagttctgctcagagcgcattgctaaatatgcttttgagtatgcttacctaaataacagaaagaaggtgactgctgtgcacaaagcaaacattatgaaacttgcagatggtttattcttggaatcttgtcgagaggttgccacaaggtatcctggaatcaagtacaatgaaattattgtagacaactgctgcatgcagcttgtttcaaaaccggagcagtttgatgtcatggtaacccccaatctttatggaaatcttgttgcaaatacagcggcaggtattgctggaggcactggagtcatgccgggaggtaatgttggggctgatcacgctgtgtttgaacaaggtgcttcagcaggaaatgttggcaatgataaagtagtagaacaacagaaagcgaacccagtggcactccttctctcgtcggccatgatgcttagacatctccagtttcctgcatttgctgaccgattggaaactgccgttaaaaaagtgattctggaaggcaaatatcggacaaaggaccttggagggacaagcaccacccaagaggttgttgatgcagtgatagatgctttagactgattcatttattttctcatcttccaaacgaaatcagcctcgtgtatttttggctaactaattttatcaacattatttttgcaccctttatctgcgaaattgccatttttttggtccataataaatgttaaatattcaacacaaaaaaaaaaaaagggcggccgc

SEQ ID NO: 549 - DNA, 408 bp, Glycine max
ggtccttccaatcatcccgtgttctggtcgacttttctcccttctccccatttgctcattctcctccccattctgctcagacaccgcacagcgaacaaatccaccattcattttcctttttcgcaacagcgcaatggctcgaagatccctcccgctcctgaagcacctcctctcgcggcggatcccggcccgatccgtgacgtacatgcaccggccgggcgatgggtcgccgcggccggtgacactgatcccgggcgacgggatcgggccgatggtgactggcgcggtggagcaggtcatggaggccatgcacgcgcccgtctacttcgagaagttcgaggtccacggcaacatgaaggccgtgccgccggaggtcctcgattcgattcggaagaacaaagtctgtct

SEQ ID NO: 550 - DNA, 356 bp, Glycine max
tttgctgaccgtttggaaactgctgtggaaaaagtcattttggagggcaaatgccgaccaaaggttcttggagggccaagccccccccaagaggttgtggatccagtgatagatgctttagattgagtcattttattagttgctgatttcccaaatgaagccagtctcgtatattcttttctacccagttttcccaattgttttgccccccccaaatgcaaaatagcaatttttggaataaagtttatgcaccccagaaaccgatgtatcttttattttgtgtgaagaatttgtagagaatgtgataattgtttctcccctatttaaaacccgtgatttggcgtttttcccccccc

SEQ ID NO: 551 - DNA, 1680 bp, Glycine max
gcggccgccctttttttttttttttgaatgaggaaaaatcatgggtacaattgtgcacgattgcaaatggaaatggaaaatagtaattcggataggaagcctaaaagcataccccttttcgggaaaccagaaaataaacataataatgcttgcttaaatgagacagttccctgaaagaacatccaaggaaaagctagtgccaaaagtgactgaattgcatataagaattatgcctattctgctgacatgaccataaaaaccaaaatggtacaagatgctggacacattgcatttcatcagtaagcaattcagagctagtgccaaaagtgactgaattgcatttcaactaatattctacgataaatcacagggtaaaactagcttaaacaaaactcagcaaagaacaaactatcaccgtacagaagtagtttaaaagtgcaaaagctcatgttgcaaggtaaaaggattgctaatttacatcaccatacctccatcaatggtgaaaacctgcccagtgatgtaactggcagcttgattaagagccaagaattcaaccagtccagcaacttcctctggctggccatatcttcctaatgggattgtctccaaaatctttttctcaatgtcttgtcctagcttggcagtcatgtcagatgcaataaaccctggagcaactgcattaacagtgatgtttctactagcatattccttcgcaacagtttttgtcaggccaattactcctgcttttgcagcactataattggcttgtccaacattgccaaccaaaccaacaactgatgcaatattgacgatccttcccctcgagccgaattccataatcttagcagcagcctgggtgcaaagaaaaacaccagtgagatttagagcgatggcggccggccagtgagatttgttcattctcattaataaaccatctcttgttattcctgcattgtttattaatacatcaactgttccccaagcatcaactgcagttttaatcatagactccacatcagcctcgttagaaacatctccaccaaatgtaagagcttgaccaccaaactcctcaatctccttggaaacctcctcagcttccttggatgaccttgcatagttgaccagaaccttgcaacctgctttacctaatgacagtgcaatcgctttgccaatgcctctggaagctccggtcaccactgcaaccggcgcttccactttctgagttgctccggttcctgcttcctccagagtagcaacctgtgctctcacaccggaggagctaaacggagtattcgatcggtgacgaagaccggaaacgggacggagattcgtgagaatcggagaccattggcggatctggccgattttccggttaccggaggcgccgaagttggcggttcggagagcgacgcagttggatccggcaatggaagccataactgttccgaaaacgctacgagaagcgaaaatggaagaagaagccagagaataagtgtgaacgcaagagagaaagtttgttgcggtttttaaattgcgtttgttagattagtgcttgctttgggagctccgcagagtgtgaatgttgttagtgagagggcgatggtaacgaagatgggagtgtggtctggggaggatgtgcatttaccgtgtgaccccttatattttgccagaatatataag

SEQ ID NO: 552 - DNA, 944 bp, Glycine max
gtcttcaaaaaccctaatgtgctcttccttgagcatccagcagcaacaaacaagaggggtttgccttgtgccgtttgtgttgttttcgggacgaagaagaagatggtgtcaggttctggaatctgcgcaaagcgggtggtggtggacgcgcgccaccacatgctgggtcgtctagcctccatcgtggcgaaggagcttctgaacggccagaaagtggtggtcgttcgctgtgaagagatttgcatctcgggcgggctggtgaggcagaagatgaaatacttgaggttccttcgcaaacgcatgaacaccaaaccctcccatggccccatccacttccgtgccccctccaagatcttctggcgcaccgttcgtggaatgataccacacaagacaaagcgtggggaagctgctcttgctcgtttgaaggtttatgaaggaatccctcctccatatgacaagaccaagagaatggttgttcctgatgcactcaaggtgttgaggcttcagaagggacacaagtattgtgtgctgggcaggttgtcatctgaagttggatggagctactatgataccattagggagctggagaagaagagaaaggagaaggcagcggtggtttacgagagaaagaagcaactcaacaaattaagggtgaaagctgagaaggttgctgaagagaagctcggttcccaacttgatgttcttgctcctgttaagtattgagtagtttttgttagtgtttgaaattttttatgccacttataccaaattgaactacctttcaattttgcttgaggttgctttgttattggatcatagatttgatatctgatcatcttggaagctgttttttatttaattgtgtgttttgtgtaatttttgtcacccagaaccgttttccattgccttgggaaaaaaggaaaactcaaagctgttcactgtgc

SEQ ID NO: 553 - DNA, 645 bp, Glycine max
acccaacccacattcacccgcgtcataaaaatcctattctccctcattgcctccctttttatactcaaaaccctaagacacagaggagaacacaaacagcagcgtcttggtttgtgagagagacagaggcacagagagaaaatggtttcggggtcaggaatctgcgcgaagagggtagttgtggacgcgcggcaccacatgctggggaggctggcatcgatcgtggcgaaggaacttctgaatgggcagaaggtggtggtggtgcgctgcgaggagatttgcatctccggtgggctcgtcaggcagaagatgaagtacttgcgtttcctccgcaagcgcatgaacaccaagccctctcacggccccatccatttccgtgcacccggcaagatcttctggcgcaccgttcgtgggatgataccacacaagacaaagcgcggggaagctgctcttgcacgactgaaggtgtatgagggcattcctcctccttatgacaagaccaagaggatggttgtccctgatgctctcaaggtgttgaggcttcataaggaacacaaatactgtcatctgggccaatagtcatctgaggtcgtatgtatcgactatgataccctccagctacttgtcagtaaggccaggctacgg

SEQ ID NO: 554 - DNA, 1177 bp, Glycine max
cccaaaatatcatacttctcgtatccccaaccctcaaccccaacaaagcaagagaagtagggtttttgtgcttggcaaaagaaagagaagagaagatggtgtcaggttcggggatctgcgcgaagcgctggtggtggacgcccggcaccacatgctgggtcggctcgcctcgattgtggcaaaggagctgctgaacggacaaaaagtggtggtcgtgcgatgcgaagagatttgcatctccggtggtctggtgaggcagaaaatgaagtacttgaggttcctccgcaaacgcatgaacaccaagccttcccacggccccatccacttccgcgcaccctccaagatcttctggcgcaccgttcgtggaatgataccacacaagacaaagcgtggggaagccgctctcgctcgtttgaaggtttatgagggaattcctccttcatatgacaagataaagagaatggttgttccagatgctctgaaggtgttgagacttcagaaaggacacaagtactgcatactgggcaggttgtcatctgaagttggatggagctactatgataccatcagggagctagaaaagaagagaaaggaaaaggcacaattggtttatgagagaaagaagcagctcaacaaattaagggtgaaagccgagaaggttgctgaagacaagctcggttcccaacttgatattcttgctccagtcaagtactgagtagtctatgtttttaaatttttttatgcaacttatacccaattgaaactacctttcagttttgcttgttattggctatgaagtattgacaccgatacggacaccggacacggacacgttgacacctgtaatgtccaaaatatagaacgtagtatgggtgttgtgtccgtgttggacactgacacggacgtgggtcgaacatcggacacgacaaagggctggggtgtccgtgcttcataggttattggatcatcatatcatagatttgatatctgataactttggaagctatttttatttaactgggctttgtagaaattttatttatgtcatttcatcaagaaaacttccattgccttgaagtcaatgatgttcacattcacagttgacgtcacatgcaacacatccccctttcgccaactagagctgccgctcaagaggatccaagctttcgtacgcctg

SEQ ID NO: 555 - DNA, 446 bp, Glycine max
cccacgcgtccgcccacgcgtccgattaaaaccctatagcatcagcccatcaactagcaaaaaggagtttgtgtaagggaagaagatggtgtcaggttctggaatctgcgcaaagcgagtggtggtggacgctcgccaccacatgttgggtcggctagcgtccatcgtggcgaaagagcttctgaatgggcagaaggttgcggtggtgcgctgcgaagagatttgcatctccggcggtctggtgaggcagaagatgaaatacttgagattcctccgcaaacgcatgaacaccaaaccctcccatggccctatccacttccgcgccccagccaagatcttctggcgcaccgttcgtggaatgataccacacaagacaaagcgtggggaagctgctcttgctcgtttgaaggtttatgaaggaatccctcctccatatgacaagacca

SEQ ID NO: 556 - DNA, 1417 bp, Glycine max
gcggccgccctttttttttttttttttcactgcaaaaccaatacaggcttcattcatttttaataatattacaaaatttgcattacaaaattaacattcaacgaatcagattctgtacatttgaaattaaacattacccaaaccttttttttttcagctttggtagatctctatcatacaacattataatcatcttcaagggatttgtaacaaagattcaactatcatgcatatgctgttgaatttcatatgctttcttttaaaaacctttaaaacaaaaatataaaaatgtaccactagacaattaattcacctgggtcctgagagctccatggcttggactaacaacaaagagtcatcagtgagatcagaatacctatctgatgaagaggactcttgtggtttgcactttgttgtgtcaactctttgagaagcttcccatctttctgctagtccatcaccttcaagcatgcgtaccacttccgacattttaggcctatgaccgggaagatattgagtacacaatagagccacttgaaccatttcctcaagctcaattctgtcatagttgttcttgagatccttgtctactagcatatcaagctttttcttctgatgaattttcttttacccaatcaagcatggctcctttgttgttagcttgattttccaaactctagagccctttggcctgtgatcaattcaaggaggagaatgccaaatccaaaaacatcagtcttctcagaggattgtcctgtggataagtactctggggcaatatgccccacagtgcccctcactgcagttgtgacatgtgaatcttggtgatccaaaagctttgccaacccaaaatctccaactacagcttcataatagtcatcaagcaatatgttggcagctttcacatccctatggattatctttggatcacactgctcatgaaggtaaagtagtcctcttcctgctcctaaagcaatgtgcttccttgtgccccagtccagcactggcttacccttgagacgggaagcaacactgccattggacatgtatggataaaccaagagcctttccgttggtgtcatgcaaaatccatacagtctgaggaggtttcggtgcactgctaggctgatcatttcaacttcggtctgaaattgaatctctcctccaatggcattgccatctttaagcctcttgacagctacaagagtgccatcagggagaattcctttgtagacatttccaaaaccaccttttcccagtatgtttttgctgctgaagtttttagtagcaatctggagttctctgaattggaacctcttcaagtttccaaggtagacttcttcatgatgccggtctttaacatcaaagaatgcttgttgattatgtttgtgcctccaccaaagaacaagtccaaaac

SEQ ID NO: 557 - DNA, 677 bp, Glycine max
gaattcggctcgagaatcgaaacgcttcaaatcaatagttgtcttcgcaaagttccccattatactgaaaaccaaactttttttgttcaattttttcttcagttccgtggactgcagcacccttagatttcgttaccaaggagaaggagaagcgcccgaagcgcaataaaatggatatgtacattcgtgttaaacgtagtaagacaacctacttcatcaggtgcaagccatctgataaaattcttgacataaaacagaagttgcaagaacttgttgatcagccagctaataatcaacggttaattctacctgttactggagaagtattagaagactctaagactctggcagatcaaaaggttgaaaatgatgctgtcgttgcactgaccttgagaaaagatgataatgagtttgaggaggtcaacattgtccggccaaatgatttctaccaagctcgggatgcggatggtgccaattggtaaagccatactccaacaatggctggctcacaattaatggtggtatgatgaaatccatagtggctcagaaaacattttcaaacgattgatgaaatgacatgcttgtttgtataatactgaatttattgccttaagagaatatgacactttcttttctttggtaaaaaaaaaaaaaaaaaaaaaaaaaagggcggccgc

SEQ ID NO: 558 - DNA, 535 bp, Glycine max
  unsure (1)..(535): unsure at all n locations
gtaaacaccaattaatcacgattagtgagggagtgagaatccctcttccaaatctgacactacaaaatattcaccaattcccagttccgtggactgcagcacccttagatttcgttaccaaggagaaggagaagcgcccgaagcgcaataaaatggatatgtacattcgtgttaaacgtagtaagacaacctacttcatcaggtgcaagccatctgataaaattcttgacataaaacagaagttgcaagaacttgttgatcagccagctattaatcaacggttaattttacctgatacaggagaagtattagaagactctaagactctggcagatcaaagggttgaaaatgatgctgttgttgcactgaccttgagaaaagatgagaatgagtttgaggaggtcaacattgtccggccaaatgatttctaccaagctcgggatgcggatggtgcgaattggtaaagccatactccaataattactggtggtatgatgaaatccacaattgctcaggaaacattntcaaacgattg

SEQ ID NO: 559 - DNA, 1208 bp, Glycine max
gcggccgccctttttttttttttttttagaaactcgattctttcctttgaaaaaatacctaatgaaacaaagttacttttgtccatttttcagaacatatcagatgtaagacatactaggcttctaactagtacttaaagagggtgaaagatggagctttcgaaattatacttatttgcatgtgctgtgacaagcctttttttttcctctccattttgttgaagctatgacaacgtagctcaaagtggacatgaaagcatatagctgagggaaaacatggagatggattttcaaataaaaaacagcatagacatgtgctcttaggttgttgtagatggacatttcctgacccttcccaagcaattgtccattggccttgtatgtggcaagtatctcacagggcaattaggattatgctgttcaaatcggtaattcagaaggaaatggtgaagaaaaactgctatttccatcttggcaagatcattcccaggacacaatctacttcctcctccaaagggaaggaattctccagccttgtgctctttattccatctattagggttaaattcctttggatcaggatatatttcaggatcaaggtgaactgatctgaaccacacaagcgctttccaaccttttggaattgtgtatccattgatattgacatcagattttgcctcccgaaagaccactagtgagaatgtaatcacacgcaatgtttcatcaatcaccttgtaaagaaaatccatctcccggacttccttaagtgtcaaccctttctgtgttggaggccttctccttattatttcttcttgttctgccttagccttttggagatattctgggtgcttctgcaggaagaaggttgcccacatggtaatatgtcctgaagactcgtggcccgcattcaagtacatcaacatgatgtcaatgatgtcctcatcactcaactttctttcatcatcttcaagatctatcagagcatccatcatatctttggcttttccaggcagatagcccttccttaagtttcttctctcgtccacaatagattgaaatatggccactagatttttccttgccttgaatgctttgtggtatgcaaatccgggaatattaatacacatggctctaactccatgattaagtgctgtgtattcaatctacaaagcctccataacatgttcactctctgagattatgaaaat

SEQ ID NO: 560 - DNA, 1413 bp, Glycine max
gcggccgccctttttttttttttttttgctgtaccaaatactgcttcatttaactgctgcggatatgcactgtaacatttagtttacacaggacaaatacattgtgcataatgataggcaactacaatggaatctttattgcaaccttcacattttagtcaacattgaagtggacagctaatatcatgatataaacataggaaatgcatatgtgccttacaatttaaaagggtaactacgctatactatctcactcgactaaaaaagacatctagagcttgaaggtgtatgcaataaaataaagaacttcaaggccataatattaactctcccaaacttcagtagcgtcctataaattaaaatgacagaacgacaaaattcattcgtgtagtctctgcccattttagtcctctagcagcatcccaggttttgaacaaacggctatgttggctttcagaagaaatgaacatgttctcaaggaacattcatcacttgtattgactgcaacatgtcagagacggcaacgacaaggtcacctgatttgatcagatttctggccttgagcaatgaaaaggttctgttgagattgctctccatatcatctgtgaagctcaagcggaaaggtatcaagccccactgaagattcagacgcctacgcacagatgaagtggtagtaaaagcaaagattgggcagtcaggacggcagcgtgacaatagagatgccatgtgccctgtctttgtgtacacaaaaagtgcatccacctcgaaattattggccatcttagcagctgaattgcagatttcttcagatatcttctctgaaaaataagacccaaccgatgggagcaacatagcttcatagcgtttctcttccctccaccatttctcaattctcaaactgacactccttaaaacagttaaggccttctcagggtactggcccatggctgattcaccagaaagcatcaaagcatcagctcgttgcctgactgcttcagaaacatctgcaacttcagctctggtaggtgtagggtactcaatcatggattcaagtagctgagaggcaacaatgacaggcttattcaattgcctgcaaacctcaacaatcctttgttgagcagatggaacctgttctaaaggtatttgagctcccaagtctcctcgtgccaccatagctccgtctgccgctagaacgatctcttctaagttcttcaatgagtcaatactttctatctttgcaatgacagaaatatcactatcacgagatcgtgcagcaatatagcttttaagatgagtaataacttcagcagacttgacaaatgaaatagcaataaaatcaacaccctcagaaataccaaaatcaatgtctaaccaatccttggaagaaatagtagggagcatggcattcctttc

SEQ ID NO: 561 - DNA, 1709 bp, Glycine max
cccacgcgtccgcccacgcgtccggctgaaatcattacttatactagttttctacgattattcatagtgaggcaatagtagcagcaattcacactggtctttgcttctcgttactcatttctcacctaactttctattcttctcagtctcagatcagaaccttagccatggcagcgttccagaagatcaaggtcgccaaccccatcgtcgagatggacggagatgaaatgactagggttatctggaagtcaatcaaggacaagctcattttgcccttcttggagttggacatcaagtattatgacttaggccttccttaccgtgatgagaccgatgataaagttacaattgaaagtgcggaagcaactctcaagtataatgtggcaattaagtgcgcaactattactccagatgaagctcgtgtgaaggagtttggtctgaagtcaatgtggaagagtccaaatgggacaattaggaacattttgaatggaactgtcttcagagaaccaattctttgcaaaaacattccccgccttgttcctggttggacaaaggcaatatgcattggaagacatgcgtttggtgatcaatatcgggcgactgacacagtaattaaaggagctggaaagctgaagctggtgtttgttccagaaggccagggtgaggagactgaattcgaggtttttaacttcactggtgaagggggtgtttcattggctatgtacaatactgatgagtctattcgttcttttgctgaggcctctatggcaactgctttagagaaaaagtggccactttatcttagcaccaaaaatacaattctgaagaaatatgatggaagattcaaggacatatttcaagaagtttatgaggcaagctggaaatcaaagtttgaggctgctggtatatggtatgagcatcgactcattgatgatatggtggcgtatgcacttaagagtgaaggaggttatgtatgggcatgcaaaaactatgatggagatgtccagagtgatttcttagctcaaggttttggatcactgggtttgatgacatctgtattggtttgccctgatggaaagactattgaagcagaagcagcccacggcacagttacccgccattttagggttcatcagaagggaggcgaaaccagcacaaatagcatagcatccatctttgcctggacaagagggctagcccacagggcaaaactggatgacaatgctaaactcttggatttcactgaaaagctagaggcagcttgcattggagtagtagaggctgggaagatgaccaaggatttggcacttattcttcatggatccaagctttcaagggagcattatttgaacacagaggaattcattgatgccgtggcagccgagcttagtgctaagctttctacatagacttgatttaagacaggcggaaaagaagacgatagcaacaaggagcgtgcgtgcgtgcgtatgctgctctctatattcagaagaaataagaaagggaaaaagaagcattggtccttaccttagccccttttccttcatttgtttgttggttgggagagcaagggttgactgtttcttctccatattggttgtgaactgatttgtcctttgtattttctaactgatcccttccaacttccaatttttataattggattttctgctgaaaaaaaaaaaaaaaaaaaaaaagggcggccgccg

SEQ ID NO: 562 - DNA, 1696 bp, Glycine max
aagtaggcctttgccccttgtacttcaccatcaatatatttcatatgaaccaattgagatagcaacataagatctattgtaggacaatatgattcttgctcactaaaaatgtgggaaatgaaaagtcttatatcaaaatgcttgttgttgaggacagtaccaaatattgcaacaaaaaaaattatcaatgaatattccacttaaaaagtatgagtctttaaatggatacgctatatggaattccttttccagtgattccaggtcctgaaaatggcttcatctgctcataaggcaccaccccaacaccatgtctatttttcatattacaatctgcattccttgagtctataataccttcaatttccttgagtctcccattgaacctttcaaaggatgcctttatagttggatcctcagcccatgatggcttcaagtattgcccaatatactcttcatctggggaatgatatgatagtatgttaaaaactaacatcattgtagttgcttggatttgtgatgggaaagactccaaaagagtttgctcaggattgtttagaaaagtttcccactcttccttagaaggatcttctgtaggtattttggttctaacaatgttcggtcgattaggaaaatagcctccataagtatattgggtaaagttaacagctgcatgatgagcagatgctgcccaagctatggtggtgatgatgtcaataaggtcttttggtgttttaagatttggccaccatggttcttcagatttgtctccatgacccactgttctaatttctgtccaccatgcttggagctcttggtcagattctatgatgcttggggttggatagtaatggttgacatactcagttacccattgtttgatggcatcccatatgagaagaccatcattggcaaaagggtaatcttcaattgttagctttaggccatgtggtgcatttggatctgccacagccattcctctggaaataagatcattgggaagtgcttgcaaatcaaattgccaaagttgatcgtatgccacagagcttaattccattgaatatttattaggagagaatgaattttcaatgaccccatttccactgataagaatttcacgagctagtgaattaatagccagagtgtatgtcaaatgtggatgcagtagtttgtagattggatgcatgacacttagttgcctatttgttgcaacgacaaagggttccatgacagcatgagttcttaaccaatgatttataagttcatgaacaccagcatcatgggcaagaacatgagctttggcaagcctccaaagccaaagattggttgaatgagaaattgaataagaagcaggagtgaagacttgcttccattgtggcttgccatcaataggtggcctagtgagctcaatagctagtggcttcaatgttccttgtttagtgagaaagaatagtgttcgtgatccatatagtgtggttccttcaatctctctcactttgcttacatatggtaacaatagatcatgatagtctaacatgtacaacttcttctctttaaaaacatctcattgtgatgttcattctcaaccaaaacagcaccaactttcccgaactctgttggtaactcaaatgtggcctcataatacacctcatcctctttttcctcagtcttgtgtgcatcacctttaattgtctttttc

SEQ ID NO: 563 - DNA, 489 bp, Glycine max
acctgtgtccataacataatccggtgtacataaaatgtaaaatatgaagaatacattgtgccattatattttattatttaggaccctatgaggcacataacaataaaaataaattgttctaatttggccttaattaaattaccaaactttaaatagatatgctatatggaaccccttttccagtgactccaggccctgaaaatggcttcaataactcataaggcattattccagctccatgtctgttcttcaaattactatttccattccttgagtctataataccttcaatctccttcaatctcctattaaacctttcaaaggctacctttatagttggattctcagcccatgatggctccatgtatttcccaatgtactgttcatcaagtgaatgatctgacaataagttcaagactaccatcactaatgttgcttgaatttgtgatgggaacactccaaaagagtttgctcaggtttgtttagaaa

SEQ ID NO: 564 - DNA, 659 bp, Glycine max
gcggccgccctttttttttttttttccattaaacactctcttttatgtcatggtcatggtgtctcttcacagcaatagaacacagacaaaaataagccctaattccaatgccctgctcctcctcagactgtgggaacgagagtctgagacagctcagaccaggtgtcccccgcttgtcattaaagccagccattgttgctgaaatccaagcgaagcgcctcttcctctgaggggctcaactcctgcaagggggcacggcagggacctccatagtagccaaaccagtccatggttttcttcagccctggtattccgaagcgccgggtcaccgcagtgttgggctcgatgaggcggtgctgcagtctctgggcagcttccccctgccctgtgaggcagagtctctccagctggcacacctgggcccccaagacattggccaggccacatatgcccccaacagctcccacagcatagctggccaggaggaagccaactgacccagccaacacctggaaatcctgcttgctggtcttgtgaacaatcagcccagtcctggtcacatctccaccactgtccttcaagccaatgatatttgggtgctgagacaatgtgaccacggcatccacaggcagctctagacccgtgctcgagccgaattc

SEQ ID NO: 565 - DNA, 1647 bp, Glycine max
gaattcggctcgagaggagaagtacctgcaagtttacaaaacctcactcagttaaccgttcttaatttgcaagataattctttctctggatccatccctgacctcaagcttcacagtctgaaactattaaatctgagcaacaatgaactgaaaggctcaattcctcgatctctccagaaatttccaaagggttcattttcagggaatcatggactgtgtgggctacctctagctgaatgctcacatccttcactagcacgctcacctgaatcatctccatcgcctcaatctccacctttgacacatcatgataagaaactaggcacgggtttcatagttgcagttgctgttggtgggtttgcattgctgatgctagtcgtggttgtgtgcttttcaaagaggaaaggcaaggacgagattgatgtggaatccaaaggtaagggtactgccaccaggagcgagaagccgaagcaagaattcagtagcggcggccaaattgctgagaagaataagttagtgttcttggagggttgcacctatagctttgacctggaggatctactgagggcttctgcagaagtccttggcaagggtagttatggaactgcttacaaagctatactcgaagatggtactgtcgtggtagtgaaaagattaaaagatgttgtggcagggaaaagagagtttgagcagcagatggagctcatcgagaggttgggcaaacatgcaaacctactcccactacgcgcctactactattccaaagacgagaagctcatcgtgtatgattatattgacactggaagtgtctcggccatgttgcatggtatccggggtgttaccgcgaagacaccgttagactggaactccagaatgaaggtcatccttggaacagcatatggaattgcacatatacattcagaagggggcgcaaagctcacccatggcaatgtcaagtcaaccaacgtactcgtagaccaagatcacaatccttccgtctcggactatggcctcagcgctctgacgagtgtgccggtcaacgcatctcgcgtcgtggtcggctaccgtgctccagagatagtcgagaaccgcaagatcacccagaagtccgacgtctacagcttcggcgtcctcctcatggagatgctcacagggaaggccccgctccagacccaggggaacgacgacgtcgtcgacctgccgagatgggtgcactcggtggtccgggaggagtggacggccgaggtgtttgacgtggagctgatgaagcaccagaacatcgaggaggagctggtacaaatgctgcagatagccatggtgtgcacggccaagtcgccagaccggcgcccgacgatggaggaggtgatcaggatgattgaggggctccgccagtccacctcggagagccgcgcgtcttctgatgagaaatccaaggagtcgaaccctccatcggtgtaaatcctgcgcagctcccttcgtccgcttgatcggttgttgttgccagttgcacctcatttgatttgttagctaatttatttatgattgagtttcttgtaaaccgtggttagcatctgctgcatttagcctcagatagaaagaactgagctttcttattgataaaaaaaaaaaaaaaaaaagggcggccgc

SEQ ID NO: 566 - DNA, 770 bp, Glycine max
gaattcggctcgagtgcaaggctgtgttgcagggcccggaaggctcactgttccgaaatggccgagcagtcagacaaggatgtgaagtactacactctggaggagattcagaagcacaaagacagcaagagcacctgggtgatcctacatcataaggtgtacgatctgaccaagtttctcgaagagcatcctggtggggaagaagtcctaagagagcaagctgggggtgatgctactgagaactttgaggacgtcgggcactctacggatgcacgagaactgtccaaaacatacatcatcggggagctccatccagatgacagatcaaagatagccaagccttcggaaacccttatcactactgtcgagtctaattccagttggtggaccaactgggtgatcccagccatctcagccctggtggtagctctgatgtatcgcctctacatggcagaagattaacctgtctgtccgaagccaaggaaggaaaagactgccccagagaggggagaaaagaagccagtgttaatcacttccactgacagaaaccctccccctgagaatgtaattgtaatatatctgtctccctctcctcctatgctaggagaacaaacatgggactctttgtactcttaaactttcaaatgtgcctttttactcaacttcattttgacatttcttcactacgtaatttacttattgtaaacatgatctttttaaaatatatctggcttgtaaagtaaaaaaaaaaaaaaaaaaagggcggccgc

SEQ ID NO: 567 - DNA, 743 bp, Glycine max
gaattcggctcgaggcagagtatagatttgatgtctcaaaattggagccagtggtggccaagcctcattctccggataatcgtgctttggcaagagagtgcaaggatgtgaaaattgacagagtatacataggatcttgtacaggtggcaaaacagaggatttcatggctgcagcaaaagtttttctggcatcaggtaaacaggtcaaagttcctacatttcttgtgcctgcaacacaaaaggtttggatggacttgtactccctccctgtccctggatctggtggtaagacatgctcacagatatttgaagaagttgggtgtgacacaccagctagtcctagttgtggtgcttgtttgggtggcccaaaagatacttacgcacgcatgaatgaacctaaggtttgtgtttcaactacgaacaggaacttcccgggccgaatgggacacaaggaaggtcaaatctatttggcttccccttatacagctgctgcatctgcattgaccggttatgttactgatcctagagagttcttgtagtagaatgttgttacaatcatctcattgtgttgtactcgttgttggttatttgtgtattctctactctctactagtcataagttaaaactgacaactatttaagcttaaccaatcttttagtatttctaagttgatctttagaatcattcatatatgtgggttaggtcaattcagatcaaaaaaaaaaaaaaaaagggcggccgc

SEQ ID NO: 568 - DNA, 1061 bp, Glycine max
caggagtgagaaatggacctcccatggcgcccccatttaatcccctcacctggcactctcgttaccctcaacccgcgcgctcgagtccttctccttctcttctctgcttctcttttcatctccgaaaacaatgaagctcattagcagcattaaccccaaaaatctcaaactcagtcccaaacgcttctttcgcaaaaaggaacgatctttagtctcacgctccgacccaccttcattcggatccggatcttcctccgacgactccaccacaaatcacaagccttccgccggtaaccaaactccgaccagcgtcctcccgggcgtctccggagactggtccgacgtcgccgccgtcgacgtgcggtgggacctcgcccaggccttccgcctcatcgaccgcgacaacgacggcgtcgtcacgcgccaggacctcgaggccctcctcacgtgcctcggcgcgtcgccgtgccccgacgacgtggcggtcatgctcggcgaggtcgacggcgacggcatcaccgtagaaaggctcatgagctacgtcgggtcgggtctgaaacccgggtcggatccggacgagctcaaggaggcgttcgaggtgttcgacacggatcgcgacgggaggatctcggcggaggagctgcttagggttttcaaggccatcggcgacgagcggtgcacgttagaggagtgccggcgcatgatagagggtgtggacagaaatggggacgggttcgtctgcttcgaggacttttctcgtatgatggagctgcagcagcagcgatgatgatgacgtggttgtgattgtgatgatgtcagatgatgatcatgatcatgttatgacttatgatgtgaaaatatatataagaaggaaggcaacttcataattttttttaatccccttctgtcatttgcgtttgttattattattattattattttttattttaatttggttgtataattttgaaggcgaaagtgcaatccactgagaaaatgaaagaaaaacgtatataagtggtgaaaaaaaaaaaaaaaaaaaaaaaaaaaagggcggccgc

SEQ ID NO: 569 - DNA, 852 bp, Glycine max
gcggccgcccttttttttttttttttttattccactaagttaccgattaacataattaagagcagacagttacgtctagttacataatgcagctttataaatagtaaaagtaaacaaggcactgacaaaaaaaaaaaaatacaacaaattccctcccttcttacttgagaactttacaaaattttctacacttgaaattgggcaccattgattaacagtgaaacgaattaaactacaatccaaaaatcacattttatcgacacaaccgacatatatatgcatatcaaaactcttgtggtagtggtcctccttctaagaaggacttgaacagcacaagtgatctctcaggctgtgaaaatggagcttcatgtgatgctcctctgatggtggcaaatgaaaggatgttaccataaacttgagtccacccacccacctgctgcttctcaaaccacaccctgtatggcacagtggtgttcaatccaagttcttttgccaatttatgtactagtgttctacttccagtcagtgggataactgagtcctgatcaccactgtaaaccaatactggtattccctccttgactagcttccccacaaccgtgattgttggtatctccaagtcacgcagctcataatccaggacattgctgcaagcagaccatctttgaactccaacaagatgtgcatgcatagctgactgcacatctttcctgttcagataattgactgtttcatcttccacacatacatctatggtttcagttacttgctggggattgaggactttggtttgtgagaacactgaagataaacaaacatcaagggtcacatcatatttgtcaacaaatctac

SEQ ID NO: 570 - DNA, 1744 bp, Glycine max
aaatgcaatatgctggtcattcttatattaagtacatgaattagttgttaaaaaccaatgcacgctaccacgaagccatgtctcacttcctatggcaaggtttattgagccagccatcggcatgacatgagatgaatgaaactaagatttcataatacaaagcattatatgttttattacagccaaagctaacagtgatttgccccataacaaaaagcatacttcacctgcagttttggtgatttcataataaatagcataaaaccactcacttatgcataagttacataaaacaactcacacatgccaccaagacatgtgtttattacagccaaagtcaagtgacttgccccataattcacctatagtttctgtagacaggagaatacatgcagctctcagcatacttgacaagattctgaggacgagggagacgagtagccaagcctagctcatatgccttgccagctacacttgctgctatgttagctgaaatttctctgatgttagagaatggtggataaatcaagcccttttcgtagttctcgttggacactagtttagccaaggcttccgaagctgctagaagcatatcgtcatgcactctgattgctcctgagattaccaaccccagaccaaagcccggggaaagatgtatgcattgttggcctggccagaatagtacactttgcccttgtattctacaggatcaaatggacttccactagcgaaaattcgcacgaccctcactccattggtaagcctcttcagctgtacactcagactgtgaagttggattggagagagccaggacaagaggtttttcattgatagaagtcacagcctcaattacttcctttgtaaatgtttttcccactcctgatgacccaatcaaaactgtaggcttgattaccttaacagcttctaagagactgcctacaggctcatgctcatgagcccaaggctgcttgaagtgttgaagtgaagcctttcttgaaccaacaatcaaaccctttgagtctacaagccatatcttcttgcgagtctcctctataggtgtctttgtctgctttgacatctcaagagctattagttctgctattccagttcctgcctctccagcaccaagaaacaagaatgtgtggtcagccagagtacctccaatgagcttcaaggctgccacaaccccagcaagaacaacagatgcagtcccctgaatatcatcgttgaaaacaagatgagttgtgccatattttgcaagcaactcaaaagcattgtggtttgcaaaatcttcaaactgaacaagaactttttctccgtagttttgcttgacagcagtcatgaactcgtgcaaaagttcagaatattcctgcccagttgccctcttttgtctaagcccaatgtaaaactcatcatttagtaatttctcattgtttgtccccacatcaatcgtaataggcaaacatgctgatggtctaactcctcctagtgctgtgtacaaggccaatttaccaacaggaattcccatcccctgacatccaagatccccaagtcccaaaattcgttcaccatctgttacaacaataacttgaatacttttctcaggccagtttttcaatacttcaagaaccttccccttctctttcaaacttatgaaaagaccctgaggacgcttgaagatgctcccatatttctggcaagcctcaccaacaacaggagtatacacaattggaagcagttccac

SEQ ID NO: 571 - DNA, 708 bp, Glycine max
  unsure (1)..(708): unsure at all n locations
ggggaccacaagccatactgttcctatggcaaggtttattgagccagtcattggcatgacatgggatgaattgaactaaaattttataatacaaagcattttttgcttattacaaccaaagctaacagggatttgccccataacaaaaagcatgattcacctgcagttttggggatttcgtaataaaaagcttaagacccctctcacttatgcgtaagttacataaaacaactcacatatgccaccaaaacatatttttattacagccaaagttaaatgacttgccccataattaacctatatttttggggaagaaggggtttacttgcggttttaaaaatactttaaaagattttggggccgagggagacttttttccaaacctaactcatatgccttggcagctacacttgcagcttttttagctgaaaattttttgatgttagaaaatgggggttaaatcaagcccttttcgtaattctcgttagacactagtttagccaaggctccacannaacgctaatagcatatcatcatgcactctgattgctcctgagattaccancccnngaccaaagcccggganaatgtaagcattgttgtcctatctcgtatagaatcacgtacctatcgtacactttctgaaaatttataacttctactatcatcactatcactcgccccactccattaagaatcatctgaagc

SEQ ID NO: 572 - DNA, 528 bp, Glycine max
gaattcggctcgagggatttattaatttcaaaaaatgcaacaacatctgaaaatggaaccgaagtgtcaacactcccactccctattatggtaacatgcaagcaagaagatgccaattcagccaaaagtgatgtgcttgattcggatagcccacattgcactgattatgggaaccacccttcctcattcgtggagcctgctgattcctctcatgcctttgaaccagaagaccactcagaagacttctcacaagatgaagaggataaccttagtgaaaactttttgaccctcccttcttcttgttgcttacctaaggttgaagaaccctgctatgatgaccctccagaaaactcttgtaattttggcttccatgttgaggatcaaaccttctgtttctggccctactgaaccaaccaaccaaccaaccgcttccaatgttataaaaacttcgcagttgtaaccatgtactagaaatcaataaaaatggtattgttacttctactaaaaaaaaaaaaaaagggcggccgc

SEQ ID NO: 573 - DNA, 451 bp, Glycine max
ctcgagccgatttattaattatgtcaaaaaatgcaacaacaacaacaacatctgaaaatgggaccaaagtgttgtcaccactcccactccctattatggtaacatgctgcaagcaagaagatgccaactcagccaaaagtgatgtccttgattcggatagcccacattgcacttcattcgtggagcctgctgattcctctcatgcctttgaaccagaagaccactcagtagacttctcccaagatgaagaggataaccttagtgaaaaccttttgatgaccttcccttcttcttgttgcttacaagagttttcaggttggccgtcatagcagtgttcttcaaccttatgtaagcaacaagaagaagggaaggtcatcaaaggttgaagaacactgctatgacggccctcctgaaaactcttgtaattttggcttccacgttgaggatcaaa

SEQ ID NO: 574 - DNA, 582 bp, Glycine max
ctgctgttttggtcactccatacatagccatagtaggtggtggattataagcaacaagtgaggcaatgagaacaacagaagaacccttcttcaagtgaggagctgcatccttgagaagaagtatagtggatttgacatttatctcccacaacttgtcaaggatcgattcttgtgtttgcaaaatgggatctacagaaggatgtacggcagcattggacacaacaacatctatctttccatacttctgtaaagttttgtctatcaaatttttcctttgttgcgcatttgaaacgtggcaaacaaccgccaatacttcgattcctttagctctcagtttaccagcagcctcatcaacattttgctgtttgcgagaagagatgacaacagatgcaccctccaagccaagcctctctgctatgctaaagccaattccaagggtggaagctgtcacaatagctaccttaccttgaaatctcttgccaagtttggttatctccattaaaacagaaacagaaacacttgactaatgttgtaaattgtgaatttgaactaagctatcatgtctttatagttgtaggaaac

SEQ ID NO: 575 - DNA, 363 bp, Glycine max
gcggccgcccttttttttttttttttactcattaaaaagtgttggtgttttaaataagaaatcaatgctcatacactgtcggtataaattgcatagcttatcagaataaatctctcctgaactgttttgtctatcaaattcttcctttgttgagcatttgaaacatggcaaacaacttccaacacttcaattccttcagcccggagattttcagccgccacatcaacattttgctgtttgcgagaagagatgacaacagatgcaccctccaagccaagcctatgtgctatggcaaagccaattccctgagtggaagctgtcacaattgccactttcccttcaaatctctctcgagccgaattc

SEQ ID NO: 576 - DNA, 285 bp, Glycine max
acaacacaattcacccgagtattagggcccatttcactagccatagctttggtaagtccaagaactgctgttttggtcactccatacatagccatagtaggtggtggattataagcaacaagtgaggcaatgagaacaacagaagaacccttcttcaagtgaggagctgcatcctgtaaagttttgtctatcaaatttttcctttgttgggcatttgaaacgtggcaaacaaccgccaatacttcgattcctttagctctcagtttaccagcagcctcatcaaca

SEQ ID NO: 577 - DNA, 1470 bp, Glycine max
agagtccaatacgctccccaacaataattgtacggcaacaaatgtaatactcatcttttaatccaaaataaatattggcggccgcccttttttttttttttttttttttttttttttattcccaagagaagaaaactaatatctgtgtgatccacaaattcgtacaaggtaccattaaataccaaattaattccagaaaataccacaatcaacagccagtagcctagtaacttcttccccagtatgtccactttgttgcaggctttcctgatgcaaagcacttggtgccttctgggagttctggctgatcaaagggactgcaaagagtcttagctgctcccatctcaccctttgtcctcgctttgacatcagcctcaacctcctcctcgtcacaccaaggagctaagatcatttttctttggttcaaagcttgcacaaattcatcccaagtgtgtatgatctgaatgcattcatctcgtttttgttttgcaacatcaaacaggttctgttgaatagtatcgagcaacttttttatttccacaaccaaatcagcactagcaatgtctatctttgcaccattatcacgtcgaacagcgcgaacctgcttatttgctaaatcctttggcccaatttcaattcttagaggaacccctttcatttcccagttggaatacttccatccaggagaataattatctctagaatctgactcagcgcgaatacctgcttcattcaatgtattcacagttgcagaacaggcatcaaagattccttgagtatcggcatctttgtaaggcacaggaatcacaataacttgtactgatgctactttaggaggtagtaccaatcccttgtcatcaccatgaaccatcaccatgaccccaatagttcgagtactataggcccatgaattctgccagaccattgctttcctcgagccgtattcttcaaagtttatctcaaacattttagcaaaattttggcccaaacaatgagaagttgcaccttggataccacgaccagtgtttggaataaatgcctcaacactggtagtgtagagtccaccagcaaacttctcaagctcacttttcttaccctttatgacaggaactgccaaatactcttcgtatatacgcctatataattccagaatctcaagaacctctgcatctgcttcatcctttgttgcaaaagcagtgtgcccttcttgccaaagaaactcgcgactcctgatgaatggagtggggttgctgaactcccatcttacaacattgcaccactgattaagtttcaaaggcaagtcacgatgtccccttatccacttagagtagtagggatacatcactgtttcactagtaggacgaatagctataggaatttctaattcggattccccagactttgtcacccaagcaacctcaggagcaaaaccctcaacgtggtccttctccttttgcagaactccaggag

SEQ ID NO: 578 - DNA, 418 bp, Glycine max
ggacaacaaatgtatgatactaatcttctaatttaatccaaaataaatattgcaccatataaaaatcaaagtaaaactatcagttgaaaaagattcccaagagaagaaaactaatgtctgtgtgatccacaaattcgtacaaggtaccattaaataccaaattaattccagaaaataccacaatcaacagccagtagcctagtaacttcttccccagtatgtccactttgttgcaggctttcctgatgcaaagcacttggtgccttctgggagttctggctgatcaaaggggctgcaaagagtcttagctgctcccatctcaccctttgtcctggctttgacatcagcctccacctcctcctggtcacaccaaggagcaaagatcatttttctttggttcaaagcttgcacaaattca

SEQ ID NO: 579 - DNA, 699 bp, Glycine max
gcggccgccctttttttttttttttttttcttttaaacctgtggcactgattccctttataaaagcacaaaatacggtgcaagccaccatattgtatgttcctttacattcaaaaagaatgaatccattacactatcaaccacacatttatccaatacaagtcttctatgaagccaaagaaagctagcaagggaccagcctaagcttggtaggtgaagttgcatcacctgtagttgacttgtggggatgggaaaaaacgttttgccagccgttggaagggtctcaatagttgggctcttttcttgcgccagaaccaaatggcagcgttgtattgttcgttgcgaatctttcgcgtggctgccttccaatcatacttttccatctcttcacgtgcagctttacccatggtttctctcaactctttgttgtgcaaaaggggccttagtttgctcaagcagtcttcaagatctcgtggatcatacagatagctagttttaccatcttgatctgcagggattatatcaggaatacctccagcacgtgccgccaccacaggtatccctgaagacatcgcctccaaaactacaaaaccaagcgtctctgactctgaaggcatgacaaatacatctccactggcatatgcttgggacagttcttctcctcctaacattccagtgaatactgcctcgagccgaattc

SEQ ID NO: 580 - DNA, 1309 bp, Glycine max
  unsure (1)..(1309): unsure at all n locations
aaaaaacctagctaaacgaagaaaatcattccaatacacatggcttccgaaaggcaagcgttgatgcttattctcttaacaacattcttcttcaccataaagccttcacaggccagtactactggtggcataacaatctactggggccaaaacattgacgacggcaccttgacttccacatgcgacactggaaacttcgagattgtcaacctagctttcctcaatgcgtttggttgcggcataactccatcatggaacttcgctggccactgtggggactggaacccttgttccatactagaaccccaaatacaatactgccagcagaaaggtgtcaaagtcttcctttccctcggtggtgctaaaggaacctactccctctgctcacccgaggacgcaaaagaagttgccaattacctttatcaaaacttcctcagtggcaaacccggtccacttggaagtgtaacattggaaggcatcgatttcgacattgaacttggttccaacctctattggggcgaccttgccaaggaactagatgctctcaggcaccaaaacgaccactacttctacttgtccgcagccccacaatgttttatgcctgattaccacctcgacaatgccatcaaaactggtcttttcgatcatgtaaacgttcagttctacaataaccctccatgccaatactcacctggcaatactcaattgctttttaattcatgggatgattggacttcaaatgttcttcccaataactctgttttctttggactaccagcatctcccgacgctgctccaagtggtggttatataccaccacaggtgctcatttctgaggtgcttccctatgtaaagcaagcttccaactatggaggagttatgctgtgggacaggtaccatgatgttttaaattatcacagcgatcagataaaggattatgttccaaaatatgcaatgcggtttgtgaccgcagtttccgacgctatttatgagagtgtctctgcagctacgcaccgcatcttacagaagaaaccatattagaaatatggggagccgtacgtgcaaactatttatcagctatctatgcatgtgtccgtctctgtaacgtttgtatggaaaaatggaaataagtaacaaattgttattagttgttacctttgtggcatctactccagctttgatttcctagctagttgttatgtaatgtaaccaatataatcgaagcatgttgagaataaaatactccctacttattcccacttcnnnnnnnnnnnnnnnnnnnnnnnnnnnnnnnnnnnnnnnnnnnnnn

SEQ ID NO: 581 - DNA, 2194 bp, Glycine max
cctttgtgtccggggcgcgcaacgaagataccttctttcagcctcccttcaacacccttttggccctttattcttcaaagtctcaaagcaaagctcgaagacctgagaagaacaaagggttgattaaattctgtgtggttgttgttggaggttgaaacacaagttgccaccccaagtgtgtgttaatcttaaatttcacaagcaagttgcttttttggagtattatattgtatgaccaaatatttttgtgttttaggactagatattttgcttctggtggcaatttttctcttctccttctggttctcatcctttgtgttcttctttgtctctcatctgtctgaggatttttccatcttagttcctggaggcaccaggaacctgacccaataaacaaacccttttttttctttctaatttttctaaagtttcattttttaatccaatggcaacttgggtattatcagaatgtggcttgaagcctcttgctccagtaatccctagacctagaactggggcagttttgtccagcacctcaagggttgaatttttggacacaaacaaggtagtggcaggtcctaagtttcaacctttgaggtgtaaccttagggagaggaattgggggctaaaagtgagtgtccctttgaggattgcttccattgaagaggaggagcaaaagagtgttgatgtaatcaatgggagtaatggggttgagcatgagaagcttccagaatttgaccctggtgctccaccaccattcaacttggctgatattagagcagccattccaaagcattgctgggtgaaggacccttggaagtccatgagctatgtggtgagggatgtcattgctgtctttggtttggcttctgctgctgcttatctcaataattggttggtttggcctctctattgggctgctcaaggcactatgttctgggctctgtttgttcttggtcatgattgtggtcatgggagcttttcaaacaaccccaaattgaacagtgttgttgggcatctgctgcattcttcaattctagtgccatatcatggatggagaatcagtcataggactcatcaccaacatcatggtcatgttgaaaatgatgaatcatggcatccgttgcctgaaaaattgttcagaagcttggacactgtaacacgtatgttaagattcacagcaccttttccacttcttgcatatcctgtgtacctttggagtaggagtcctgggaagactggttctcactttgaccctagcagtgacttgttcgttcccaatgaaagaaaagatgttattacttccacagcttgttgggctgctatgttgggattgcttgttggattggggtttgtaatgggtccaattcaacttcttaagctttatggtgttccctatgttatattcgttatgtggttggatttggtgacttatttgcaccatcatggccatgaagacaaattaccttggtaccgtggaaaggaatggagctacctcaggggtggtctaactactcttgatcgtgattatggatggatcaataacattcaccatgacattggaactcatgtcattcatcacctatttcctcaaattccacactatcacttagttgaggctactgaggctgctaagccagtgtttggaaaatattatagagaaccaaagaaatcatcagcacctcttccttttcaccttattggggaattaataaggagcttcaagactgaccattttgttagtgacaagggggatgttgtgtactatcaaactgactctgagattaatggctcgtccaaatcagagtgaagattaaaattcttttttatatagacaagagagacttatacacaattcttattgctctaaagattgtcttgagtttcttacttagagttgaatccgtcattaataaagggatagatggacggatcatataatttcaattgtaactacatgatataatgtttaggttatatgtagtttatcattcttgaacagtgaatcctctgtataaattgattatattgaagtggtaccttgagtcatgatcaaattgttaatgtatttgatcagaactgaaagacctcgattaaatagtaatttaaaataaattgttttatagaatgttgcggtgttttcttaccagttaccatcccctatttaatttatatactccctattttattcttc

SEQ ID NO: 582 - DNA, 1039 bp, Glycine max
agttgatatttgaatctagtttagtaggagtcttgggaagactggttctcactttgaccccagcagtgacttgttcgttcccaatgaattaaaagatgttattacttccacagcttgttgggctgctatgttgggattgcttgttggattggggtttgtaatgggtccaattcaacttcttaagctttatggtgttccctatgttgtaagtatcttcctcttttccatcatttccatggttcttctttttgaatcaagaatgaatgaagttctcttttgaatttcttggaattgaagacgattctcgtcatgtggctggatttggtgacttatttgcaccatcatggccatgaagacaaattaccttggtatcgtggaaaggaatggagctaccttaggggtggccttacaactattgatcgtgactacggatggatcaataacatccaccacgacattggaacccatgtcattcatcacctctttcctcaaataccacactatcacttaatagaagcaactgaagcagctaagccagttcttggtcaatactaccgcgaaccaaagaagtctagtcctcttccaatttacctcattggagaattgttaagaagcatgaagaaagaccattttgtcagtgacagtggcgatattgtatactatcaaacagaccctacacttagtagctcttccacatcacagtaaatcatccattttttcctcttgaagacaacagagaggcctcagaattatgctgcatatgacacaatttctgaactttgaagattgtgtactctcattgagtctactagttgaattgctcatgagcgaatgaatgcatgacaaatttgatattgtaaccgcgtgcattttaaagcatgatcagggtgtatatgtaatgtgctctcattgaaaaacaaggaatctgtaaattgttcattcttgatgaagggtgtgctgtcttcatcgatttaattacaattttttgctcaaactcaaacaccaatgttgaatgatagtaattgaatagaattgtagc

SEQ ID NO: 583 - DNA, 917 bp, Glycine max
cagatcacagcgatcagataaaggattatgttccaaaatatgcaatgcggtttgtgaccgcagtttccgacgctatttatgagagtgtctctgcagctacgcaccgcatcttacagaagaaaccatattagaaatatggggagccgtacgtgcaaactatttatcagctatctatgcatttttccatacaaacgtttggtataatgtcaatgcatacaatttagtttacatctttatccttcttcgtgttgaacaggaatggagctaccttaggggtggtctaactactcttgatcgtgattatggattgatcaataacattcaccatgacattggaactcatgtcattcatcacctatttcctcaaattccacactatcacttagttgaggctactgaggcagctaagccagtgtttggaaaatattatagagaaccaaagaaatcagcagcacctcttccttttcaccttattggggaaataataaggagcttcaagactgaccattttgttagtgacacgggggatgttgtgtactatcaaaccgactctaagattaatggctcttccaaattagagtgaatattaaaattcttttctatatagacaagagaggcttatacacaattcttattgctttaaagattgtcttgagtttctccgaaagttactgcacttacttggagttgaatccttcattaataaagggatggatggatcatataatttcaattgtaactgcatgatagaatgtttaggttatatgtagttttatctttcttgaatagtgaattcctcaatataaattgattatattgaagtgataccttgaggcatgatcaaattgtcaatgtgtttgatcaaaactgaaagatctcgattaaatagaaatttaaaatagattttgtttagtagg

SEQ ID NO: 584 - DNA, 558 bp, Glycine max
caataaatgcatttttttgatatgtttagaacactcaacaagacggtcatggttaaaattctcaaaggaatgggccaaaacctgaaaagaacaaagggttgattaaattctgtgtggttgttgctgcaggctgaaacacaagttgccaccccaagtgtgtgttaatcttaaatttcacaagcaagttgcttttttggagtattatattgtatgaccaaatatttttgcgtattaggactagatatttcgcttctggcggcaatttttctcttctccttctggttctcatcctttgtgttcttctttgtctctcacccttctcgggattttttccatcttagttcctggtggcaccaggaacctgacccaattaacaaaccccctttttcttctaatttttctgaagtttcattttatagtccaatggcagcttggatattatcagaatgtggcttgaagcctcttgctccagtaattcctagacctagaactggggctgctatgaggtgcaacctgatggagaggaattgggggctgaaagggagtgcccctttgagg

SEQ ID NO: 585 - DNA, 349 bp, Glycine max
cagtcataggactcatcaccaacatcatggtcatgctgaaaatgatgaatcatggcatccggtgagatgactatcaatgttcttgtttttaaaacatgctctttttatctaagttttttccttttaagtgatcaaagtttctcacataagaggtgtattggtaatccctgcagttgcctgaaaaattgttcagaagcttggacactgtaactcgtatgttaagattcacagcaccttttccacttcttgcatttcctgtgtaccttgtaagttattctgctttgaccataatttgaacattaattactctttagtcttggtagaagaattgacatggtggctgttgata

SEQ ID NO: 586 - DNA, 637 bp, Glycine max
  unsure (1)..(637): unsure at all n locations
ccctctcgtccgcccacgcgtccggcaaaaggccatataatttttttttatttgaaataatgtccgggatcatccacaagattgaggagaccctccatgtgggagggcacaagaaagaggagcacaaaggagaacaccatggtgagcacaaaggtgaacacaaaggagaacaccatggtgagcacaaaggtgaacacaaaggagaacaacaccatggggagcacaaggagggacttgtggataagatcaaggacaagatccatggtgatggccatgacaagggtgagaaaaagaagaagaaggacaagaagaagaaggagcatggacatgaccatcatggtcatagcagcagcagtgacagtgattagatcttatatgttaagcaggtgtacggtacgatggtagtgaggagccagaatccctcttcctgctttatgatataatacaaataaaatagcgattccggaaatcatgtctgtagctgctctttttatttatgtgataaatgtaaaacgctttggtttggcttggccgttgtgcattaggttgaaaaaataaatgttataattactcagaatctaagatcttaggaagtgtactaaagcggcctcgctataggattgatgcttacnnnnnn

SEQ ID NO: 587 - DNA, 679 bp, Glycine max
  unsure (1)..(679): unsure at all n locations
gggcggacgcgtgggcggacgcgtggggccatataatttttttttatttgaaataatgtccgggatcatccacaagattgaggagaccctccatgtgggagggcacaagaaagaggagcacaaaggagaacaccatggtgagcacaaaggtgaacacaaaggagaacaacaccatggggagcacaaggagggacttgtggataagatcaaggacaagatccatggtgatggccatgacaagggtgagaaaaagaagaagaaggacaagaagaagaaggagcatggacatgaccatcatggtcatagcagcagcagtgacagtgattagatcttatatgttaagcaggtgtacggtacgatggtagtgaggagccagaatccctcttcctgctttatgatataataaaaataaaatagcgattccggaaatcatgtctgtaactgctctttttatttatgtgataaatgtaaaacgctttggtttggcttggccgttgtgcattaggttgaaaaaataaatgttataattactcnnaaaaaaaaaaaaaaaannaaaaaaaaaaaaaaaaaaaaaaaataaaaaaaaaaaaaaaataatttatttataaatataatttaatattttattttaataatttttataatttatttttttggggggggccgttttaaaggatca

SEQ ID NO: 588 - DNA, 1395 bp, Glycine max
gcgcggacgcgtgggcatacgcgtgcgtcaagtttcagttccaaacaaaacccatcaaagtctttctccctcagtgatcatatattcattcagttctatacaaaatcctcaaaaactcttcctctctgccatgaccatggaatacagaaccttagaactcaacatcatatccgcaaaggacatcaagaatgttaatctcttctccaagatggacgtatacgccgccgtttcgctctccggtgaccctctccaccctcagggcgccaccacccacgtccacaaagacgccggcagcaaccccacgtggaactaccccgtgaaattctctgtcaacgaatcgctggcgaaggaaaatcgtttatctcttgagatcaagctcatctccgaccgcaccctcggcgacaccgtcatcggcaccgtccatgttcctctcagggaactcctggataaccccggcgatgacagctccttccgccaagtcagttatcaggtgatgaagcaatcaagaaaatccaagggatccttgaatttctcctacaaattcggcgaacatgttcccgccccggccgccaagacacccaaagcggccaaggcgggacaagagccggtgatggcttatcctcctgctggggcgggatccagttcgatgccctatggtacgccacaccctcccccgccgcagcaatatgcggcgacgggatatgggtatccacctcagcaggtgcatggtggatacccacctcaagcagcatatgggtacccacctcagaccggttatggatacccacaacagtcgggttatggatatccacaacaatccggatatgggtacccacctcaggctcagaaaccaaagaagaacaaatttggaatgggattgggagcaggattgcttggtggtgccttgggtggaatgttgatcggagacatggtatctgatgctgctgaatatgatgcgggctatgatgctggctttgatgatgctggtggatttgatttttaattttcagtttttcaattaaccctgtatttttttttttcttttatatttctggatttcactttttgcctttttcggttgcgtaatgatgttctatgagattgcttattagtatttgtttcagatacctctcattacctgactctgtatttaactgctatgatataaagtataacatacagcctgtgatttcctcaccattcgattctattccattgattgataaacgagagaaaaaaaagaaaagttttcatgctattggggatatgatgatgataaagctggatcaattttttctgttgtgcgactgatattttggttgattggtaggtataataaaaaatgatggttcggttgaattgattatagaaagaaatgacatggcaatttgcaaa

SEQ ID NO: 589 - DNA, 527 bp, Glycine max
ttgttcagttcttcagaatacataaacatcaagatttcagttccaaacaaaacttatcaaaatctcatatactgattcagttctatacataaccatcgagatttactatcaaaccaaaaattctcaaaatctcttcacctctgtgatgaccatggaatacagaaccttagaactcaacatcatatccgcaaaggacatcaagaacgttaacctcttctccaagatggacgtatacgccgtcgttacgctctccggcgaccctctccaccctcagggcgccaccacccacgtccacaaagacgccggcagcaaccccacgtggaactaccccgtgaaattctccgtcaacgaatcgctggccaaggagaatcgtttgtctcttgagatcaagctcgtctccgaccgcaccctcggcgacaccgttatcggcaccgtccatgttcctctcagggaactcatggacaatcccggcgacgacggttccttccgccaagtcagttaccaggtgatgaaacagtcagggaaat

SEQ ID NO: 590 - DNA, 806 bp, Glycine max
  unsure (1)..(806): unsure at all n locations
agattattcaaggatcccttggatntgcttgattgcttcatcacctgataactgacttggcggaaggagctgtcatcgccggggttaatcaggagttccctgagaggaacatggacggtgccgatgacggtgtcgccgagggtgcggtcggagatgagcttgatctcaagaaaatccaagggatccttgaatttctcctacaaattcggcgaacatgttcccgccccggccgccaagacacccaaagcggccaaggcgggactagagccggtgatggcttatcctccgaccggggcgggatccagttcgatgccttatgggacaccacatcctcccccgccgccgcctgtggcaggatcaggaggatatggatatccacctcagcaggcgtatggtggatacccaccccaacagggatacgggtacccacctcaggcggctggttacggatatccacaacatcaatcaggttatggatatccgcaacagcctggatatgggtacccacctcaggctcagaaaccaaagaagaacaaatttggaatgggattgggagctggattgcttggtggtgccttgggtggcatgttgattggagatatggtatctgatgctgctgattatgatgcgggctacgatgctggctttgatgatgctggtggatttgatttttaattttcagtttttcaattaaccatgttcttttttttttttttaatttctggattccattttgctttttttttccgggggttgcgaaatgatgtcctatgagattgtttataagtattggtttcatatccccc

SEQ ID NO: 591 - DNA, 414 bp, Glycine max
gtgcgaaagtatagagccgagttgtctgaagacgatatatttgtaatcccagcagcttatccatttgtggtcaacgctacctcaaacctcaatttcgttgcttttggtatcaatgctgagaacaaccagaggaacttccttgcaggttcgaaagacaatgtgataagacagatacaaaaacaggtgaaggagcttgcgttccctgctgggtctgcacaagatatcgagaatctaataaagaaccagagggaatcctattttgctgatgctcagcctttgcaaaaggaggaagggaagaaagggtcctttgtcttttgaatatgtatgcttaggagactaggagttcacagcgagcgaggaaagtatagggatatgtaactagaataacttgagatccacctttctactactagt

SEQ ID NO: 592 - DNA, 1389 bp, Glycine max
  unsure (1)..(1389): unsure at all n locations
gataacagtcacgtgttcaaatttactgctgcgtcacctggggcctcatttgccctattcagattcagttccccttcgcgtctctcttcaaacaaaacagaactgaactcgctgactgaaactcgccaacactaggcactttgcattgatggcactgtgcaaccgcgtcagatcgggaatctctctcttcaccaaatccacgttccttacttcccagcgatgccagtctccaacgatccctcgtctgcccctttcatttccctcgcctccagaaattacgccaacgtgccggggcaaaaggaaaccaaagttaaggtccctctggctttgtttggaggttcaggaaactatgcctctgctttgtatattgcatctgtgaaagccaattgcattggaaaaggttaagactgagctttcgcaatttgttgaggcagtaaactactagtcccatattttcacagtttataagggacttgtactcgtggctagaggggatgttagagtaacaagtcatcacaggatatttgtggtgaagctaagttttcagacgttacaaagaacttcccttgttattgttgctgagaatggaaggcttaaaaacatagacaccattgcaaagaggtttgcgcagttgtcaatggcatataaaggagaagtgcaagcaactgtgaccactgttgttcctcttccccctgaagaggaaagggcattgaaggagactcttcaggaaataataggttctggagcaaaggttcatcttgaacagaagattgatccaagcatacttggtggtcttgtgcttgaatttagccagaaggtctttgacatgtcaattaagaccagggcacaacagatggagaggatcctccgtgagcctgtatcgattgccaacatctagaagacaacagttgctcctgacaatctgtgttatcatggtttaaagaaagaagtattacattcttgttcattacaaattgtgtggatctatatttttatgggatggaatgccatccttttgcaaataaaagctacctcttcccaacttcttgttaaaaaaaaaaaaaaaaaaactcggaaatctcgaaggaacagattcgggcactgagcaaacgtgccaaatctagttcaaggaaaaccatntcttctgaagataaaccttttaacttgagaagccgcgaccccatctactccaacaagcttgggcagttctttgagatcaccccagagaaaaacccccagcttcgggacttggatatcttnctcagtattgtggatatgaacgagggagctcttcttctaccacacttcatttcanaggcgatagtgatactggtnattaaatgaagagatgcnaacatttgacttgntggcctannagaacanncacag

SEQ ID NO: 593 - DNA, 1960 bp, Glycine max
cggctcgagtatatatactatgatgagagtgcggtttccctttgttggtgttgctgcgaaactgttttcctggcgatcagtttgtgtctcattaaaggtgagagaggatgagaataaccctttcctacttgagaagctctaacagcttccaaactctctttgagaaacaaaacgggtcgcattcgtctcctccagagattcagacaaacgctccccacaacttgagaaccttcgagactaccggattgtccagtttcaggcaaaaacccaacaccattccttgttcccccaccatgctgacgcgcgatttcctcctctttgtccttagcgggagagccatacttaccttggtgaacaacgacgacagagactcctacaaccttcaccctggcgatgcccagagaatcccagctggaaccacttactattgggttaacccctcacgaccacgagattctccaaaatagtcaaacttgccatacccgtcaacaaacctggcagatatgatgatttcttcttatctagcactcaagcccaacagtcctacttgcaaggcttcagccataatattctagagacctaccttccatacgcgaatgtcgaggaggataaacagggttttgttgggagaggaagaggagcagaggcagcaagagggagtgatcgtggagcgtctgaaaggaacaaattcgggaactgagcagacgtgcccaaatctagttcaagggaaaccatttcctccgaagatgaaccattcaacttgagaagcctgcaaccccatctattccaacaactttggaaagttctttgagatcacccctgagaaaaacccacagctgtcgggacttggatatctgtcctcagttctgtggatatcaacgaaggagctcttcttctaccacacttcaattcaaaggccatagtgatactagtgattaatgaaggagatgcaaacattgaaccttgttggcattaaagaacaacaacagaagcagaaacaggaagaggaacctttggaagtgcaaaggtacagagctgaattgtactgaagacgatgtatttgtaattccagtcagcttatccatttgtcgtcaacgctacctcaaacctcaatttccttgacttttggtatcaatgctgagaacaaccagaggaacttccttgcaggcgagaaagacaatgtggtaaggcagatagaaagacaagtgcaggagcttgcgttccctgggtctgcacaagatgttgagaggctattaaagaagcagagggaatcctactttgttgatgctcagcctcagcagaaggaggaggggagtaagggaagaaagggtccttttccttcaatcttaggtgctctctactgaataactacgtaaatgtatgctgtaagagctcatcgtgagcgtggaatgtatctgcccatgtaactataaaaacttgagctccacctatcttctatctactacgaataaataaatccagcatatgatgcttgtgttttggtcaattcccattcccacgcccacctcatcagaaggaagagcgaaagcaagaggaagatgaggatgaggagcagcagcgagagagcgaagaaagtgaagattctgagttacgaagacataagaataagaacccttttctcttcggctctaacaggttcgaaactctcttcaaaaaccaatatggtcgcattcgcgtcctccagaggttcaaccaacgctccccacaacttcagaatctccgagactaccgcattgtggagttcaactccaaacgcaacaccctccttctgcccaaccatgctgacgctgattacctcatcgttatccttaacgagactgccattctatccttggtgaacaacgacgacagagactgctacagactgcaatcttgtgatgccctgagagttccctcatgaaccacatactatgtggtcaaccctgactacaacgaagat

SEQ ID NO: 594 - DNA, 1922 bp, Glycine max
ctccacggagaacacggcgacaatgaaagaggggctccgaacatcaccatggaggcctcgcctttccttagttcaatatggtggaagcccttcttcactctctctcttgcttccctttgcttgctactcttgtcgagtgcatgctttgctcattacctccagcgagttcaacgagtgccaactcaacaatcctcaacgcgttgggaacccgaccaccgcgttgagtccgaaggtggatcttattgaaacatggaacatctcaacaccctgtagctgccttgcgccggtgtcactgtttcacaaacgcaccctacaaccgcaaacgccctccacttgccattcttactcaccttatccccaaatggatcattgtcgttcaagggaagggagcaattggatttgcatttccgggatgtcctgagacgtttgagaagccacaacagcaatcaagcagaagaggctcaaggaccgcagcagcaactacaagacagtcaccagaagactcgtcacttcaatgaaggacgacgtactagatgattcctgcctcgtgattccttactgagacctataagtcactggcgcatgaaccagtgtattgccatccagtacttctatgacacctccaacttcaaaaatcagcttgatcaaaaccccagagtattttaccttgctgggaacccagatatagagcacccagagaccatgcaacaacagcagcagcagaagagtcatggtggacgcaagcaggggcaacaccagcagcaggaggaagaaggtggcagtgtgctcagtggcttcagcaaacatttcttagcacaatccttcaacaccaacgaggacacagcctgagaaacttcggcctccagatgacgaaaggaagcagatcgtgacagtggagggaggcctcagcgttatcagccccaagtggcacgaacaagaagacgaatacgaagatgaagacgaagaatatgaacaaactccctcttatcctccacgacgaccaagccatggaaagcatgaagatgacgaggacgaggacgaagaagaagatcaacctcgtcctgatcaccctccacagcgaccaagcaggcccgaacaacaagaaccacgtggaagaggatgagcagactagaaatggggttagaggaaaatatttgcacgctggaggctcacgagatcattgctcgcccttcacgtgctgacttctacaacccacaatctggtacgcattagcagcctcaacagtctcaccctcccagccctccgccaattcggactcagtgcccaatatgttgtcctctacaggaatggaatttactctccacattggtaactcgaacgcgaacagtgtgatctatgtgactcgagggaaaggaagagttagagtggtgaactgccaagggaaatgcagtgttcgacggtgagctaaggaagtgacatattgctagtggtgccgcagaactttgtgttggctgagcaagggggagaacaaggattggaatacgtagtggtcaagacaccaccacaaccgccgtgagcagctacattaatggatgtgtttagggcaatcccttcggaggttctttccaattcttacaaccttggccagagtcaagtgcgtcagctcaagtatccaaggaaactccggccctttggtcaacccattacataaccaccaagcatattttgaaggtgtggtgaggccatcttatatgaaataatatcaaaatatattttgtgtaataataaaactatggcctatgtatttaccaccctccgacccagcctatgttaatatctgagtggcgttgtacctttgaatcgccttaataaaaggtcagtcgttcaagttttgtctttaaaaaaaaaaaaaaaaaaaaaaggggggcccccgattagtgagcccttggtcccgggattta

SEQ ID NO: 595 - DNA, 1979 bp, Glycine max
acccacgcgtccgcttaattattaacactggctgagttcaatatggctcaagcccttcactctctctctttcttcccttatgattgctactcttgctcgagtgcatgctttgctattagctccagcaagctcaacgagtgtcaactcaacaactctctacgcgttgcgaacccgaacaaccgcgttgagtcccgaaggtggatttgagtcaaacatggaacactcaacacccatgagctgaaatgcgccggtgttcccaactgtttccaaactcaccctcaaccgcaatggcctccacttgccatcttactcaccttatccccggatgatcatcatcgcccaagggaaaggagcacttggagttgcaattccaggatcgtcctgagacgtttgaggagccacaagaacaatcaaacagaagaggctcaaggtcgcagaagcagacagctacaggacagtcaccagaagattcgtcacttcaatgaaggagacgtactcgtgattctctcctggtgttccttactggacctacgaacactggcgatgaaccagttgttgcccatcagtcttcttgacacctctaactttcaataaccagccttgatcaaaaccccttagggtattttacctttgctgggaacccagatatagagtacccagagaccatgcaacaacaacaacagcagaaaagtcatggtggacgcaagcaggggcaacaccagcaggaggaagaggaagaaggtggcagcgtgctcagtggcttcagcaaacacttcttggcacaatccttcagcaccaatcgagggcatagctgataaacttcagtctccagacgacgaaaggacggcgatcgtgacagtggaaggaggtctcagcgttatcagtccccaagtggcaagaacaacaagatgaagatgaagatgaagacgaagatgatgaagatgaacaaattccctctcaccctcctcgccgaccaagccatgcgaaagcgtgaacaagacgaggacgaggacgaagatgaagataaacctgcgtcctagtcgaccaagccaaggaaagcgtgaacaagaccaggaccaggacgaggacgaagagaaagatgaagatcaacctcgcaagagccgcgaatggagatccgaaaaagacacaacccagaagacctagacaagaagaaccacgtgaaagaggatgcgagccaagaaacggggttgagcgaaaatatctgcaccttgaagcttcacgagaacattgctacgcgccttacacgcgctagacttctgacaaccctaagagctggtcgcaattagtagccctcaactagcctcaccactcccagtccctccgtcaattccattcttgtagaggacaacatattgggcactacaagaatggaatttactctccacattggaatctgtaatgcaaacagtgtgatctatgtgactcgaggacaaggaaaggttagagttgtgaactgccaagggaatgcagtgttcgacggtgagcttaggaggggacaattgctggtggtaccacagaacttcgtggtggcggagcaagccggagaacaaggattcgaatacatagtattcaagacacaccacatcgcatacactaactacactgaaggatgcgtgtagggcaatttcctcagaggttcttgcccattcttacaaccttcgacagagtcaagtgtctgagcttaagtatgaaagaaattggggtcctttggtcaaccctgagtctcaacaaggctcaccccgtgttaaagtcgcataaatgacaagcatgatggtgtgaggatgaggcccatcttatgaaatggtgacaaatgagtggattttgtatgataataaaaagtatggcccatgtaccatcccagcgagcctatgtttatatctgagtggcgttgtacctttcaatcgccttaataaaatgtcagtcttcacgttttgtctttaaaaaaaaaaaaaaaaaaa

SEQ ID NO: 596 - DNA, 2206 bp, Glycine max
  unsure (1)..(2206): unsure at all n locations
ctctcgagccgaatcggctcgagccagttcaatatcctagtacaccgtattaaagaatttaagatattactatggtgaagagccgcggttccaataactgtttgctgggaattagtttccctggaatcaattcctgtctcattgggaatggcgttttgggaaaagaagatccccagtaacaacaagtggcctccgaaagttgcaatagcggagaaaggactcctacaggaaccaagcatgccacgctcgttgcaacctccttcaaggtggagggaagaagaagaatgcgaagtaaggtcaaattccacgaccacgaccacaacacccggagagggaacgtcagcaacacggtgagaaggaggaagacgaaggtgagcagccacgtccattcccattcccacgcccacgccaacctcatcaagaggaagagcacgagcagaaggaggaacacgaatggcatcgcaaggaggaaaaacacggaggaaagggaagtgaagaggaacaagatgaacgtgaacacccacgcccacaccaacctcatctgaaggaagaggaatagcaccgattgttacacaatgcaggataagcaccaaggaaaaggaaagtgaagaacatgaagaagaccaagacgaggatgagggagcatgacatagagagccaagacagtgatggatctgagtctcatagagtaccacgaagacataagaataagaacccttttcacttcaactctaaaaggttccaaactctcttcaaaaaccaatatggccacgttcgcgtcctccagaggttcaacaaacgctcccaacagcttcagaatctccgagactaccgcattttggagttcaactccaaacccaaacacccttcttctcccccaccatgctgacgctgnanttttacctcatcgttatccttaacgggactgccattcttaccttggtgaacaacgacgaccgagactcttacaaccttcaatctggcgatgccctaagagtccctgcaggaaccacatactaatgtggttaaccctgacaacgacgagaatctcagaatgataacactcgccaatacccgttaacaaacccggtagatttgagagtttcttcctatctagcactcaagctcaacagtgcctacttgcaagggttcagcaagaatattctagaggcctcatacgaccaccaaattcgaggagataaacaaggttctgtttggtagagaggaggggcagcaacaaggggagcgagaggctgcaagagagtgtgattgtggaaatgtggagagaaacatattcgggaactgagcaaacatgccaaatctagttcaaggaaaaccatttcttctgaagataaacctttcaacttgagaagccgcgaccccatctattccaacaagcttggcaagttgtttgagattaccccagagaaaaacccttcagcttcgggacttggattgtcttcctcagtgttgtggatatgaacgagggagctctttttctgccacacttcaattcaaaggccatagtggtcttccatgattaatgaaggagacagcaaacattgaacttgttggcattaaagaacaacaacagaggcagcaacaggaagagcaaccttttggaagtggcggaaatatacgtactgaattgtctgaacaagatatatttgtctactcccagcaggttatccagttgtggtcaacgctacctcagatctgaatttctttgcttatggtatcaatgccgagaacaaccagaggaatttccttgccaggttcgaaagacaatgtgataccgccagctccctagtcaagtgcaggagcttacgctccctggggtctgcaaaaggatattgagaacctaattaaagagcaaaagtgagttcctactttgtggatgctcagcctcagcagaaagaggaggggaacaagggaagaaagggtcctattgtcttcaattttgagggctttttactgaataagtatgtagtactaaaatgtatgctgtangattgtcgatagtgagtcgaggaaacgtatcgggctcatttaactatgacttgagctccatgctatgaataaataaatcagcatatgatgcttatgttttacacaaaacaaaagcatcatatgctgatttatttattcatagatggagctcaagtcatagttaaataaatcagcatatgatgcttttgttttgtgt

SEQ ID NO: 597 - DNA, 2169 bp, Glycine max
ctcgagccgctcgagccgattcggctcgaggaactagttcaatatcctagtataccttaataaataatcttaagatacctatgatgatgagcacgcgttcccattaactgttgctgggacttgttttcctggcttcagtttctgtgctcatttggccattgcttactggggaaaatcagaaccccattacacaacaagtgtctccagagttgcaatagcgagagatgctcggtacaggaaccaagcatgccacgcttcggaattgcaaccttcttaagggtggagaataatagatcaatgtgatgaaagtgaaactccatgaccacatatcacgaccacatacatctgtacagggaaccttaacaaacccgttgagaaggaggaagacgaagatgagcaaccacgtccaaatcccattcccacgcccgcaacctcgtcaagaagaagagcacgagcagagagaggaacagggattggcctcgcaaggaggaaaaacgcggagaaaagggaagtgaagaggaagatgatgatgaggatgaggaactaagattaacgcaagttcacattcccacgcccacctcataagagacgaagcagtgatggcgtgaggatgatgacgttgtatagcatcatcgcgagagcgaagatagtgaatattctgagttactgaagacataaggaatcaagaagcccttgttcttcttctggcttctaacaaggttccgaaaactctcttcacaaaaccattatggtcgcattcgcgtcctccagaggttcaaccaacgctccccacaacttcagaattttccgagactaccggattttgggagtcaaactccaaacccaacaccctccttctccccaaccatgctgacgctgattacctcatcgttatccttaacgggactgccattactttccttggtgaacaacgacgacagagactcctacagactcaaatctggtgatgccctgagagtcccctcaagaaaccacatactatgtggtcaaccctgaccaacaaccgaaaatctcagattagataacactcgccatacccgttaacaaacctggtcagattgtgagagtttcttccagatctagcactgcaagctcaacaatacctacttgccaaggagttcagcagggaacatttgtaagaggcctcctaacgaataccaaattacgaaggagatgaaacaagggttctgtttagttcagagaacgcaagggcagcagcataggggagcagagggctgcaagagagcgtgattgtggaaatctcgaaggaacagattcgggcactgagcaaacgtgcaaaatccaatttcaaggaaaaccatttcttctagaagataaaccttttaacttgagaaaccgcgaccccatctactccaacaagctttttaagttcttgtgagatcaccccagagaaaaacccccagctttcgggacttggatatccttcctcagtattgtggatatgaacgagggagctcttcttctaccacacttgcaattcaatccgcgatagtggatacacggtaattaatgaaggaagatgcaaacattgaacttgttggcctaaaagaacaacaacaggagcagcaacaggaagagcaacctttggaagtgcggaaaatatagagccgaattgtctgaacaagatatatttgtaatcccagcaggttatccagttgtggtcaaacgctacctcaaatctgaatttctttgctattggtattaatggccgagaacaaccagaggaacttcactcgcaggttcgcaagacaatgtgataagccagatacctagagcaagtggcaggagcttgaataccctggggtctgcacaagctgttgagaagctattaaagaacccaaagagaatcctactttgtggatgctcagcctaagaagaaagaggaggggaataagggaagaaagggtcctttgtcttcaattttgagggcttttttactgaataagtatgtactaaaatgtatgctgtaatagctcatagtgagcgaggaaagtatcgggctatgtaactatgactagagcttcaactatgaataaataaatcgacagcatatgatgcttttgttttgtgtccaaaaaaaaaaataaaaaataaaggggggccgaccaattggtgaattgtaccccc

SEQ ID NO: 598 - DNA, 1422 bp, Glycine max
gtcctcacacgagacacgcacacgtataaatagggcgaaaactcaaaagagttaaatcactcacacactctttctccggttctcagaaaccttaaaaacaacaacgtaggagtgttcggaaaagatggctaagcaggaagtggtggaagggttcaagttcgagcagaggcacgggaaagaacgcgtgagagtggcgcgcgtgtggaagacgaggcaggggcagcacttcattgtggagtggcgcgtggggatcactctcttttcggattgcgtcaactcgtacctccgcgatgacaactctgacatcgttgctactgataccatgaaaaacaccgtgtatgcaaaagcaaaggaatgctctgacatactttctgccgaggagtttgctattctgcttgctaagcactttgtatcattttaccagaaggttactggtgctattgtgaatattgtggaaaaaccatgggagcgtgtcactgtggatggtcaacctcatgaacatggtttcaaacttgggtctgagaagcatacaacagaggcgatagtacaaaagtctggttcacttcagttgacttctggtattgaaggattgtcagtgttgaagacaacccagtctggttttgtgaatttcataagagacaagtacacagcacttcctgatacccgtgaaaggatggtagcaacagaagtaaccgcactgtggaggtattcgtatgaatcgctgtatagcctccctcagaagccgctttactttacagaaaagtatcaggaagtgaaaaaagttctggctgacactttttttggcccaccaaaagggggagtctatagcccatctgttcaaaacacactctacctgatggcaaaggccacactgaacagatttcctgacatagcttatgtcagtctaaagttgccaaatcttcatttcatacctgtcaatatctcaaaccaggatggccctattgtgaagtttgaggatgatgtgtacttgccaacggatgagccacatgggtcaattcaagctagtttgagccgcctttggtcaaagctgtagaaactgcagaaactatggtgctcatcccttctggtggattgctagtgcagcctaaactagcaaacctggcctcagataatgctttccattaatgtgtcttgtaattctggtttttgttatctttatcttttgttttgtttcatgaagaactattatgcatgaataacttccaggagggatattctgtgggttgcaccaatgttaagctttttgtttctactattccaataaattcctagtgtccttgtggaatctgaaataagtcttactatgacgttgatgcaatgcttttttatggtcatataaagatggtcatactcgtacattatagtcaagatttttaaaacgagagttgtcaccaaattggt

SEQ ID NO: 599 - DNA, 1847 bp, Glycine max
acgacagaaaagcatcagcttctaccgttctacatagcatctcctttaccaccattctagatatcagagaactttgcagctctcttaggtttttaaaaaacaccacgcaaacagcaagatggccacttccgacagtaacatgctactaaattatgttccagtttatgtgatgctcccactcggagttgtcaatgttgacaatgtttttgaagacccagatggccttaaagaacagctcttgcagcttcgagctgcgggtgttgacggggttatggttgatgtgtggtgggggatcatagaactgaaggggcctaagcagtatgattggagagcctacaggagtttgtttcagctggttcaagaatgtggcttgacactgcaagctattatgtcattccatcaatgtggagggaacgtaggagatatagttaacatcccaattccccagtgggtgcttgacattggagaatcaaatcatgatatcttctacaccaaccgctcaggaacccggaacaaggaatatctaactgttggtgtggacaacgagcctatattccatggaagaacagccattgagatatacagtgactacatgaagagtttcagagaaaacatgtcagattttttagaatctggacttattatagacattgaagttgggcttggcccagcaggagagctcagatacccctcttatccacaaagccaaggatgggaatttcctggtattggcgaatttcagtgctatgacaaatatttgaaggcagatttcaaagcagctgtagcaagggctggccatcctgaatgggaactgccagatgacgcaggcaagtacaatgatgtcccagaatctactggattcttcaaatcaaatggcacgtatgtcactgagaaagggaagttcttcttgacctggtattctaacaaattgctgaatcatggtgatcaaatactagatgaagccaacaaagctttcctgggctgtaaagtcaaattagcaatcaaagtatctggaattcactggtggtacaaagttgaaaatcatgctgcagagcttactgctggatattacaaccttaatgatagagacggataccgccccattgcaaggatgctgtctcgccatcatgccattttgaactttacatgtcttgagatgagggactcagagcaaccctcagatgccaaaagtggaccacaggagcttgttcagcaggtattgagtggaggttggagagaagacatcagagttgctggagaaaatgcacttccaaggtatgatgccacagcttacaaccaaatcatactgaatgcaagaccgcaaggtgtcaacaacaatggccctccaaaactaagcatgtttggagtaacataccttcgtctatcagatgatctactgcaaaaatcaaattttaatatattcaaaaaatttgtgctaaagatgcatgcagatcaggattactgtgcaaaccctcaaaagtataatcacgccataacaccattgaagccatctgcaccaaagattcccattgaggttcttctggaagcaactaaaccaacactgccattcccctggcttccagagacagacatgaaagttgatggttgatttcccaatttggtgccatgagtaattaaataatctgctggaaataatatctaccaatataaataaagcatccagccactgtaatctgcaatgctgataataatgccatgaagtagcactgcctaaacatctacaaagtactctcgtgtactttttatgtgtgtattcctatctacgatgttaataaactattttatcaaatgaaaaaaaaaaaacaaaggacgaccaaaaaaaagga

SEQ ID NO: 600 - DNA, 2492 bp, Glycine max
cccccctttttttgcttatgtttttttttaggcaccacgaagaacttagcttgcatttattcatcactgcttttaatttcactatttagttaatacaaatggacttcgaaccatatatttgccgttactccaagtaatagatccaaacagatcttccttcaaagaggtcaaagttgaggaaaaaataacttggtagccaagttttttactactctttgtaaactgaagtttatctggagtcactgtgacttttactccactgggagcttccacaacgggagagtacgctgtttcatcttcttcaccaacgtttgtgacagttctactcacgttcacggctgctttgccggtgaagtttactgctatggaagggtagttgatgttggagatgagatcagaacttgaatccttagggcaactgaaattagcagggacagttctggagatgactttaaccgtggttatgttaagtccaatgtaacacaagtagttcaagtagtcaatggtgttggtttcgtaaactaggcccggttgcaatggttcagatgttgtaattgcccctgctccatagtcataaggtgtggctatcaaccctgaatccgttgttatgggacccttcaaattgtcattttgaattgctgaagtcatgatggcagatttgattgcggaggcactccaagtggggttttttcttttgacactgcatgcaagccctgaaacatgtggagtagccatggaagttcctgagagtatgcgatatagtgagggctttcttccttttggaacctctgatgtgtcatttccaatccatgcagcgagaatgttaactcccggggctgcaatatcaggcttgagaacattgcttgtaatcaatgaaggccctcttgatgaaaaataacccacccggggagcaggcttataatcaggaattgtaactgttgctagtattgttcccactggatggctagttgagttgatgtactggaggattgcgtcgccatgttttgattttacctctgttactgggaagtccacataataaaatgctactgatccagattgatcagtaatatgaaccagacctattcctcccaacgccttcactatgacaattttctcatcagttgaataataaatgtcattttttccatcacaaaccacaatcttccctatgactttttttggatctaatgaatctgggtggcattgtcttgcatcagttatgttggagatatttgccctggcagcagactcagcatatatcattggataatcgggagaatttaaaagaggggagaaatttatggctcttcccttgacgacttggttattacccaagaccacgtcggattgaagatcacggtcgatggtggaagctgcaacggttaaaatccaaggtgcgtcgttgagaacggtgaatggttctccgtcgttcccggcggcgcagaccaccaggatgccgcgctggacggagtggaatgctccaatcgcaatcgggtcggtggtcaaatcggttttggttccaccgaatccaccgagcgacagcgacaagatatccactccgtcgtgaatggcatcgtcaaaccccgcaagaatggccgacccaggacatgacccaaaagccccacacactttgtaaaccgccaaccttgactcaggggacccaccccttgccgtccccgccgccagaccatagaacgatgcgccactcaccggcacgcccactgccgtcgacgaaacgtgagtcccatgtccgttgaaatcccttgccgttttctcctctgggttagggtaaaacctcgcgccaattatcttcctgttacaacaagaggaattgaagtcttttgatgtcatgcaggtgcctttccatcgggatggaacaggaccgaaacccttgtcgctaaaactcgccgcctctggccatatgcctgtgtctaagacgccaagaatgacgtctgatgaagaaaaagaagaaccggacagcgtatttggtttggtgtcgatattgacacgagtttggcttttgaggaaatcccatgaacgtgtagtgtggagcttcagaatggggtcagggaaaacagacaccacaccaggtttctgagcaattgagtttgcctcctcttttgatagacgagctgcgaacccagagaaaccatgcttgtagttccgtactagggcattctcattccttcttagcactgaattcagaatctgagcgtgctcatttttaagagaagcttttgttgaatctgcagctcccatgtacacgatataaacttctttactgttagtgtcatcgttactttcattccctgttgaagatgaacttgacactacaagaaacaggaagagagtagtgtagaataaatgcaacaaaagtgtattattgcctttcatgttaaaactttgttgcactcagtgtgtgttttgctgcaccctcacatgctgttatttatactcaaaattagaatatatatttgcaattatataat

SEQ ID NO: 601 - DNA, 662 bp, Glycine max
tattagaggacaagaaacatctacaggatgaggacgagccgggagccagaaaagaagatttactttttttattttttagcttgcatttattcatcgctactttctaatttcactatttagttaatacaaaaggaattcgaaccatatatttgtcgttactccaagtgatagatccaaacaaatctttcttcaaggaggtcttcggtctgaaagtaatattgtagctttgttttttaatacttgtcgtaaactcaagattatatggaaagagtgtgacaattacttcactaggagcttcaacaacggggaagtacactgtttcatcttcttcgtcaacgtttgtgacagttctactcacgaccgcgtctgctttgccagtgaagtttactgctatggaagggtagttgatgctggagatgagatcagagctcgaatccttggggcaatggaaattctcgggggcagttccggagatgacctttatcgtggttgtgttaagtccattgtaacacaagtagttcaagtagtcaacggtgtccgtttcgtaaactagttgccccggttgcaatggttcagatgttgtaattgcccctgctccatagtcataaggtgtggctatcaaccctgaatccgttgttatgggacccttcaaattgtcattt

SEQ ID NO: 602 - DNA, 1108 bp, Glycine max
ttatggctctgcccttgacggttttgtcgacaccccaagacgacgtcggactgaaaatcccgatcgatagtggaagctgcaacagttaaaatccaaggtgcgtcgttgacaaccgtggaggagctgggtccggaattgccggcagagcagaccaccaggatgcctcgctccacagcgtggaatgctccgagggcaattggatcagtggtcaaatcgggttggaacccaggagatgcacccagcgacagcgacaacacatccactccatccgaaatggcatcgtcaaacgccccaagaatggccgacccacgacacccaaagttagaacacactctgtaaactgccaatcttgattctgaggacccacccgttgcgctccccgccgccagaccatagtacgatgcattagtcacggtggcacccaccgccgtcgatgccacgtgggtcccgtgccccaccgaatcccttggcgtgttgtccccttcgtcgtcatcgtttccagtagggtcggtgtaaaatcttgcgccaattaatttcctgttacaattggaggaattgaagtcttgtgatttcatgcaggtgcccttccaacgagatggaacaggacccatacccttgtcgctaaaactcgccgcctctggccatatacctgtgtctaagataccaatgacggaagaagatttggagaccgcatttggtttggtgtcaattttgacttgagtttggtatttgaggaaatcccatgaccgtgtagtgtggagtttcagaactgggtcagggaaaacagacaccacaccaggtttctgagcaattgaggttgcctccttttttgatagacgagctgcgaatcctgagaaaccatgcttgtagttccgtactagggcattctcatttctttttagcactgaattcagaatctgaacgtggtcattccgaagataagcatttgttgaatccgcggctcccatatagacgatataaacttctttacggttagtgtcatcgttacttccattccctgctgacactccaagaaacagcaagagagtgtagaataaaggcaacaaaagtgtattaatgccattcatgttagttcgtattattatct

SEQ ID NO: 603 - DNA, 345 bp, Glycine max
gtggggtggggtgttttgacactgcttgcaagccttgaaacatgcggccaagccatggaagtccctgagataatcttgtatagtgagggcttttttcctttgggaaccacttctgtgccatttccaatccatgcagcgagaatgttaactcccggagctgcaatatcaggcttgagaatattgcttgaaagcgatgaaggccctcttgatgagaagtttggcaccaggggagcaggcttataatcaagaactgatgttgttgctagaatagttgaatatttctcctttttgtcatcacagaccacgatctttcctttgactttattcccatctaatgaatttggg

SEQ ID NO: 604 - DNA, 413 bp, Glycine max
gtggggtttcgtgttttgacactgcttgcaagccatgaaacatgtgggcaagccatgcaagtccctgagattatgttgtatagtgagggttttcttccttttggaacatcatatacgttatttccaatccatgcagcgagaatgttcactcctggtgctgcaatatcaggcttgagaatattgcttgaaagcgatgaaggccctcttgatgaaaagtttggcaccacgggcgctcgcttatgatctggcgactgcagctgttgctagaactgttcccactggattgctggcccaacccatatactcgaggattgtgacgccatcttttgagcttatcacggttgctgggaaatctccataacatgacgctattgctccattttggtcagtaatatgaaccagacctattcctc

SEQ ID NO: 605 - DNA, 1133 bp, Glycine max
gacgcaaaccaaaccaagaagctaagattaacacaccaaccaaaacccaacatgaaaacccttaacaaagcctcacttattttattccctctcttgttcctttccctattcaagcattcccatgctgcaggaatcgctatctactggggccaaaacggtggagaaggcaccttagcagaagcttgcaacactagaaactaccaatatgtgaacatagccttcttgtccacttttggcaacggccaaactccacaactcaaccttgcaggtcattgtgaccccaacaacaatggctgcactgggttgagcagtgacatcaaaacttgccaagaccttggcatcaaagtgttgctctcccttggtggtggtgctggaagctactccctcagttcagctgatgatgccactcaacttgcaaactacctctggcagaatttccttggaggtcaaaccggatcagggccattaggtaatgttatattggatggcattgactttgacattgaatctggtgggagtgaccattatgatgacctagccagggcactaaatagcttcagctcacagaggaaggtgtacttgtccgcagccccacagtgcataatccctgatgcacacttggatgctgccatccaaactgggctctttgactatgtgtgggttcagttctacaacaacccttcatgccaatactccagtggaaacaccaacgatttgatcaattcatggaaccagtggatcacagtgccagcttctctagtcttcatggggcttcctgcatctgaagcagctgctccaagtggtggctttgtgcctgctgatgtgttaacctctcagattcttcctgtgattaaacagtcttcaaattatggtggagtcatgctttgggacagattcaatgatgtccaaaatggttatagtaatgctattattggaagtgttaattaattagctatagacaaactatgcatgttattattcagttatttaaataataatcaccactacttgtgattggttttgttactatgtattgaatgtgctgtgaacgctacatatgtttattgtcatatgtgacttacaagttacatgtaataattatcaaaataataaaaatctcattgagaagtgtc

SEQ ID NO: 606 - DNA, 2081 bp, Glycine max
gctcgggaaactcgttgccatatgcatggggggatcattcccggtggagcaaggagatctacacaagaggtggaagttggtgagtaagaggttgagaaactttcaccaatgtgttgtgcttcctgtaggtagcttatctagtggactctgtaggcatcgcgcaattctcttcaagagattggcggattacataggtttgccatgtcgaattgctcggggttgtaggtactgtgtttcagatcatagatcgtcttgccttgtcaagattaaagatgatagacagctctcaagggaatatgtagttgatctggttggggaaccaggaaatatccatgggccggattcctctattaatggagcatatgtgtcttcaataccttccccatttcaaatttctcatttgaaagaatcccaatcaccatatgtggatgttgcagcatgttctcaatctcttggctgtgtacaggaagatcaacaagctgaagaaactgatctgcagaaaaataataatggctctatttatcctgcaatagatcaaactcgtggaggtgcagaaccacctctaattccttttggcttgaaagggaatcacaaggaatgtgcaatccttggtttattaaattttcctccagtatatgaaggtgtttctgaggatcttcacccagccactgaagcatcgttacatgaataccccaggctcagtaaagattcagttgtagtactagaagcttccaacaaagagatagagatcattgtaaaaggaagttctggggtaaaaagtaactataagcaatctacggtgagcttatccagcgaatcaaaacaggaacaagaacatgtaaaaaataaagttgaaaatcagggtgctggtaatattccaagatacttgaatcttgaaccatcacttgcaatggattggcttgagataccatgggatgatttgcgaatcaaagagcgtgttggtgccggatcatttgggactgtgtatcgtgctgaatggcatggatcagatgttgctgtcaaagttttaacagttcaggatttccaagatgatcaattgaaagagtttctaagagaggttgcaataatgaaacgagtacgtcatccaaatgtggtgttgttcatgggtgcagttactaaacgtccccatctatctatagtaacagaatatttgcctaggggcagtttatttcgcctaatacataagccagcatctggtgagattctagatccaaggagaagattacggatggctttagatgtggctaaagggatcaattatctccactgtctaaagcctccaattgtgcactgggatctcaaaaccccaaatctgttagtggacagaaattggaccgtgaaggtctgtgattttggattgtccagatttaaggcaaatactttcttatcatcaaaatccgttgctggaacacctgagtggatggctccagaatttcttcgaggagaaccttcaaatgagaagtctgatgtttacagttttggggttatcctgtgggaacttgtgactctgcaacaaccatggaatggacttagtcatgcccaggtggttggagctgtcgctttccagaataggagactagctatccctccaaacatctccccagcattggcctccctcatggaatcttgttgggccgataaccctgctgatcgtccatcttttggtagcatagttgagtcgctaaagaagctactgaagtcaccagcggatgcaataaaaatgggtggggcaataacataaggagtactctgcccatgacgggtttttggttgctgaaatttattaattaacctaattgatggcatgaagccctttggttgttgcaatttgtatatcgatcggttgattcatgcaaacccatttcgtaagggcacttaaagcaatctttggattcttctgctaaaatgatgacctcaagctcttttatctatagctttgagatcaataaaaatagtgacttgctccctccaagctataattatttggagcttgctattgtttttcagattgtatatatgtaataaattatttggcaatatatatctgatatctcgtctac

SEQ ID NO: 607 - DNA, 466 bp, Glycine max
tcacagtgccagcttctcaaatcttcatggggcttcctgcatctgaggcagctgctccaagtggtggctttgtgccctctgatgtgttgacttctcaggttcttcctgtgattaaacagtcttcaaagtatggtggagtcatgctctggaacagattcaatgatgtccaaaatggttatagtaatgctattattggaagtgtttaatcatgttatagacttatagaaaaactatgtcattaattccattatttaaataatactaatcaccgctcgtgattggtttttctactatatatatatattcaatgtgctttgaacgctacatatgtttattgtaatatgtcacctacaagttacatatggtataattaccaaaataattaaaagttcattgcgaaatatgtcattttcaaccctaccatagtctgaaatttttgcgcttcttctaaaaaaaaaaaggacga

SEQ ID NO: 608 - DNA, 424 bp, Glycine max
tggttagtagacagaaattggaccgtgaaggtctgtgattttggattgtccagatttaaggcaaatactttcttatcatcaaaatccgttgctggaacagttgaactttcacttcatggtgccacatcttcaataagtgtgtaactctcttaattttattttcagcctgagtggatggctccagaatttcttcgaggagaaccttcaaatgagaagtctgatgtttacagttttggggttatcctgtgggaacttgtgactctgcaacaaccatggaatggacttagtcatgcccaggtggttggagctgtcgctttccagaataggagactagctatccctccaaacatctccccagcattggcctccctcatggaatcttgttgggccgataaccctgctgatcgtccatcttttggtagca

SEQ ID NO: 609 - DNA, 281 bp, Glycine max
agccctttggactttggttgttgcaattgtatatcgatcggttgattcatgctagcccatttcgtaagggcacttaaagcattctaagttctctagctagctggccctttggactcttctgctaaaatgatgacctcaagctcttttatctatagctttgagatctataaaaaaaaattctgacttgctccccccaagctataaattatttggagcttgctattgtttttcagatggtatatatgtaataaattatttgacaatatgtatctcatatctcg

SEQ ID NO: 610 - DNA, 1705 bp, Glycine max
atcgagccggcaaaatctaccaatctcaaacagtgcaaaaacactgcgaaatattttcaaccgcaaaacaaataacattcaatttccaaaattgccataatcaaccatagctgaacagaagaagtcagtaaccatcgtcgtgagcgaagatccataataatacagttacaaattgcaataacacactcattgtggttatcgaaatttgatcgcagcgtcgagaagaatgggaagtttgggagcgattctgaaacatccagatgacttttaccctctgctgaagctgaaaatggcggcgaggaacgccgagaagcagatcccgccggagccgcactgggcgttctgctacacaatgctccacaaggtttctcgaagtttcgccctcgtcattcagcaactcggcatcgagcttcgcaacgccgtttgcatattttatttggttctgcgagctctcgacaccgttgaggatgatactagcatagaaacagatgtcaaggtgccaatactgatagcctttcaccgtcatatttatgatcgtgattggcacttttcatgtggcacaaaggagtacaaagttctaatggaccagtttcatcatgtttcaactgcttttctggaacttggaaagaactaccaggaagcaattgaggacattaccaaaagaatgggtgctggaatggccaaatttatttgcaaggaggtagaaacaattgatgactatgatgaatattgtcactatgtggcgggacttgttgggctgggtttatcaaagcttttccatgcgtctggttcagaagatctggctccagatgacctttccaattcaatgggcttgtttctacagaaaacaaacattattcgagattatctggaagacatcaatgagatccccaagtcacgcatgttttggccacgacagatttggagtgaatatgttaacaaacttgaggatttgaaatatgaggagaactctgttaaggcagtgcaatgcttaaatgacatggtcactaatgccctgatgcatcctgaagattgcttaaaatacatggctgctttacgtgacccgcctatatttcgcttttgtgctataccccagataatggcaattggaacacttgcattatgctacaacaacattgaggtcttcagaggtgtagttaaaatgaggcgaggtttaactgccaaagtgattgaccgaacaaagactatggctgatgtctacggtgctttttttgattttgcttctatgttggagcccaaggttgacaaaaacgatcccaatgcaacaaaaacattgagcaggctggaagctatacagaaaacttgcagagaatctggtctcttaagtaaaaggaaatcttacattgtgaatgatgaaagtggatatggctcaaccatgattgtcatattggtcatcatggtttccatcatttttgcttatctgtctgctaaccaccataatagctagttagtgaaacactgatagcacgcctcgttcatggaatgcgaatttgcatgcatgcaagcaatagtatgatggctgcagttgactatcgtgtattttaattgaaaaatagtcgaatatagcgtcaagagcttcttgtgtttagtttggatttaactctatccctacgttcatcccgaaaattatcattattatgtgtgttataagttgattgtattaacatttcacggataaagttgg

SEQ ID NO: 611 - DNA, 455 bp, Glycine max
acttaccacactcaatcacgaggcaaccataggcgaagaacggaagaagccaccatagtcgtcgtcgtgagcgaagatccataacaatacagttacaaattgcaacaacacactcctcgttcgatcgtagccagaagaatgggaagtttgggagcgattctgaagaatccagatgacttttaccctctgctgaagctgaaaatggcggcgagaaacgccgagaagcagatcccgccggagccacattgggcgttctgctacacaatgctccacaaggtttctcgaagtttcgccctcgacattcagcaactcggcaccgagcttcgcaacgccgtttgcatattttatttggttctgcgagctctcgacaccgttgaggatgatactagcatagaaacagatgtcaaggtgccaatactgatagcctttcaccgtcatatttatgatcgcgattg

SEQ ID NO: 612 - DNA, 1856 bp, Glycine max
atataatatacatacatatatatataacttattcccccgcatcttttgatccgtgctctgtgattcccagaccttaatttttctctcattcgcttcaaatttcaggaaatcaattatggctcaaccctcaacaagaataggccttgctggactggctgttatgggccaaaatctagcactcaatattgctgagaaaggctttcccatttctgtttataaccgaaccacttccaaggttgatgagactgtagaacgagcaaaacaagaaggaaatcttccagtttatggctaccatgaccccgaagcttttgttcattccattcaaaagcctagggtgataataatgcttgttaaggctggggcacctgttgaccagaccattaagaccctatctgcatacatggaaaaaggtgactgcataattgatggtggtaacgaatggtatgagaacaccgaaagaagagagaaatcggtggctgaattgggtctgctctaccttgggatgggagtttctggtggtgaggaaggtgctcgtaatggtccctctttgatgcctggtggttcgtttgaggctttcaaatacatagaagatattcttctcaaggtggcagctcaagtacctgacagtggtccttgcgtgacttatattggtaaaggtggttctggtaattttgtgaagatgatccacaatggcattgagtatggtgacatgcagctgattgcagaggcctatgatgtgctgaaatcagttggaaagttgtcaaatgaggaactacaaagtgtcttttcagaatggaacaagggagaacttctgagtttcctgattgaaatcactgcagatatatttggaattaaggatgataagggagatggatatcttgttgacaaggtcctagacaagactggcatgaagggcactggtaagtggactgttcagcaagctgctgaattatcaattgctgctcccactattgaagcatcattggatgcaaggttcctgagtgggttgaaggaggaaagagttgaagctgcaaaggtctttaaatcaggtggtattggtgatatcgtgactgatcaacctgtagacaagaaaaaattgattgatgatgttaggaaggctctttatgcagccaaaatctgtagttatgcacagggaatgaatttgatccgtgcaaagagtattgaaaagggttgggatttgaagttgggtgaactggcccggatttggaaagggggttgcattattagagcaatattcttagacagaatcaagcaggcatatgaaagaaaccctaatctggcaaaccttcttgtggatccagagtttgcaaaggaaataattgattaccaatctgcctggaggagagttgtttgccttgctatcaattctggtattagcactccaggtatgtctgctagtcttgcttattttgacacttacagaagggaaaggttgccagctaatttggtgcaagctcaacgagactactttggtgctcatacatatgaaagggttgacatagaggggtcttaccatactgagtggttcaagcttgccaaacagtcaaagaaattagattactgtatttgagccaatcaggattttcctaataaatgtaatattttctgctcagactgtatgctgagttgagtttacatagccacaacgtggtgaagttttatttatattatttccaactgaattgcttgatagtttgttttcaacttatgttgtatttttgctgatcatgctttgtgcttgatacaaatttgtccccaccaacacaaaaaaaaaaaaaaaaaaaaaaaaaaaaaaaaaaataaaaaaaaaaaaaaagggcggccccgactagtag

SEQ ID NO: 613 - DNA, 447 bp, Glycine max
tctcgagcgaatcggctcgagaggctacttaaagggcttggaaagaagaaaggaaataattgatcaccaatctgcctggaggagagttgtttgccttgctatcaattccggtattagcactccaggttatttcagggataggattttgttcctgactgtattgcagtcaccgaatatggagcaactaaggacggatatttgggggtatattatgggcaacgagaggttggatgcgaattacgtggttccccaatggatgccacaatttaagtgcagaagtgaagctcaaactctaattgttttgatgatgtgtggacactctccggggtggatcagcttatgtgtagaataccaggttgcaagtttcttgtggtgtcaaggcctaaattccaaacggtgttgagttatgaaatggaattgctgattgaagaggatgccctgtctttg

SEQ ID NO: 614 - DNA, 453 bp, Glycine max
gactgtatgctgagttgagtttacatagccacaacgtggtgaagttttatttatattatttccaactgaattgcttgatagtttgttttccaactatgttgtatctttgctgatcatgctttgtgcttgatacaaaattgtcccagctcatggtgcctttttaattttcacattttgataagatttccttcagcgtcatggatacatgttatgttacaccaggagttgaaatttttacatttattgttaacttgttgagtttaatgttgatctactgtcaacagtgaataagtttgatattgttggagaatattaagaatatctttcttgagttatttaggttttggtcttgttattggtgggcttgggcttgtactactagtactagtgctcgacctaagtattagtataaatatcagtattaggttatctccataaatatctttgtttatt

SEQ ID NO: 615 - DNA, 452 bp, Glycine max
  unsure (1)..(452): unsure at all n locations
atgcttgcaattcaacttagtctacagtgtccttgtatattactcttttgtccttgctcacttgatgctttctacaatctctgggacacccagatctcaattttctgcaatttcactcagaccaggaaattaaccatggctcaacctgcaagcctcacaagaataggccttgctggcctggctgtgatgggccaaaaccttgctctcaacattgctgagaaaggctttcccatttctgtctacaaccggaccgcgtccaaggttgatgagacagttgaaagagcaaaacaagaaggaaaccttcctgtgtatggctaccataaccctaaattctttgtccaatccattcaaaagccaagggtcataataatgcttgtcaaggctggtgcacctgttgaccaaaacatcangaccctctcagcacacttggaaaagggtgattgcaccattga

SEQ ID NO: 616 - DNA, 273 bp, Glycine max
gttaatttgcaccttttgtttctctctagaaattagaagttcatgcttaaactttaccttgatacttctttctcgcatgaattttcgaacattgaacaggaaattaaccatggctcaacctgcaagcctcacaagaataggccttgctggcctggctgtgatgggccaaaaccttgctctcaacattgctgagaaaggctttcccatttctgtctacaaccggaccgcgtccaaggttgatgagacagttgaaagagcaaaacaagaaggaaa

SEQ ID NO: 617 - DNA, 282 bp, Glycine max
tcgatcgggtatcacatctgaattgggactgctcctattctgggtactattcttggattggtggtacactggagattaaccatggctcaacccacaagcctcacaagaataggccttgctggcctggctgtgatgggccaaaacctggctctcaacattgctgagaaaggctttcccatttctgtctacaaccggaccgcgtccaaggttgatgagacagttgaacgagcaaaacaagaaggaaaccttcctgtgtatggctaccatgaccctaaattcttt

SEQ ID NO: 618 - DNA, 3536 bp, Glycine max
cgtgttgtgtttccaataggcacttttttcccactcttgttgttgtaagaagtattaatatcaccctgcacgtgtcatccattcaactcatagaagtcaatgtcatcattatttgcggggctgtggaaagaatttatggatgttgttttcttccttttcctcgtactcagagtttatcacaggtgagcgactgaaaggtagcaatggcgaacaggaacctggaaaagatggcatccatcgatgcacagcttaggcaattggctcctgccaaagtgagtgaggatgacaaactgattgagtatgatgctcttctgttggatcggttccttgatattcttcaagatttacatggggaggatctgaaggaaacagtccaagaagtatatgaactttcagctgagtatgaaggaaagcatgaccctaagaaactggaagaacttggaaatttgataaccagtttggatgctggggactctattcttgttgctaagtccttttcccacatgcttaatttggccaacttggctgaagaggtccagatttctcgccgccgaagaaacaagttgaagaaaggggattttgcagatgagaacaacgcaactacagaatcagacattgaagaaactctcaagaaacttgtatttgacttgaagaagtctcctcaggaagtttttgatgcactgaaaaaccagactgttgatttggttcttactgctcatcctactcaatcaattcgtagatctttgcttcaaaagcatggaaggataaggaattgtttatctcaattgtatgccaaagacattactcctgatgataagcaggagcttgatgaggctctacaaagggagattcaagctgccttccgtacagatgaaatcaggaggacccctccaacaccacaagatgagatgagagcagggatgagctacttccatgaaacaatttggaatggtgttcccagatttctgcgccgtgtagacacagctttgaacaatatagggattaaagagcgtgttccttataatgctccccttattcaattttcttcttggatgggtggtgatcgggatggtaatccaagagtaactcctgaagtgacaagggatgtttgcttattggctagaatgatggctgctaatttgtattattcccagatagaagatcttatgtttgagctctctatgtggcgctgcaatgatgaactacgcgttcgtgcagaagaacttcacaggtcttccaagaaagatgaagttgcaaagcactatatagaattctggaaaaaggttcccccaaatgaaccatatcgtgtggtacttggtgaagtaagggataggctctatcaaactcgcgagcgttctcgccatttgctttctaatgggtactctgacattccagaggaagccactttcaccaatgttgaggagttcctagaatctcttgaactctgttacagatcactctgtgcttgtggcgatcgtgcaattgccgatggaagccttcttgatttcatgagacaagtctctactttcggactgtcactagtgaggcttgacataaggcaagagtcagaccgccacactgatgtcttagatgccatcaccaaacatttggaaataggctcataccaggaatggtctgaagagaaaagacaggaatggttgttgtctgagttaagtggcaaaaggcctctatttggacctgaccttccccaaaccgaagaaattagagatgttttggacacatttcatgtcatagcagaactaccaccagacaactttggagcctatatcatatcaatggcaactgcaccatctgatgtgcttgcagttgagcttctacaacgcgaatgccatgtcaagcatccactaagagttgtgccattgtttgagaagctagctgatctagaggctgctcctgctgctttggcgcgattgttctctgtagactggtacagaaataggatcaatgggaagcaagaagtgatgataggatactcagattcaggcaaagatgctgggaggttctctgcagcatggcagctatataaggctcaggaggaacttataaatgttgccaagaaatttggtgttaagctaaccatgttccatggtcgcggtggaactgttggaagaggaggtggacctactcatcttgctattctgtctcaacctccagacacaatccatggatcacttcgtgtgacagtccaaggtgaagtcattgagcaatcatttggagaacaacacttgtgttttagaacactacaacgtttcactgctgccactctagaacatggcatgcaccccccgatttctccaaaaccagaatggcgtgctttgatggatcagatggctgtcattgctactgaggaataccgttccattgtattcaaggaaccacgctttgttgagtatttccgcctggctacaccggagttggagtatggaaggatgaacattggaagtcgaccagcaaagagaaagcctagtggaggcattgaaacactgcgtgcaataccttggatttttgcatggactcagacaaggtttcatcttccagtgtggctaggctttggagcagcatttaaagaagtcattgagaaaaatgttaacaatctcaatatgctgcaagagatgtacaatcaatggcctttctttagggtcacacttgatttggtggaaatggtgtttgccaaaggagatccgaaaattgctgctctgaatgatagactccttgtttcaaaggatctgtggccgtttggggatcaattgaggaacaaatatgaagaaactaagaaactcctacttcaggtggctggacacaaggaaattcttgaaggggacccttacttgaagcaaagactcaggcttcgtcatgctcccattaccaccctcaatattgtccaagcttacacattgaaacgtatccgtgatcctaactacaatgtgaaggtgcgcccccgcatatcaaaggaatctgcagaggcaagcaaatcagctgatgaacttataaaactgaacccaacaagtgaatatgctcctggtttagaagacaccctcattctcactatgaagggtattgctgctggcatgcagaacactggttaagtttgtttgagtcatttattacttgtattttccttttttttattactatcaagatagcatgaatatggttgcagcactgaaagttagtgctctagttttgttctcagatacactttgttttgttttgttttgttattatgctacaccacctttctgcactgaaagagtcagctaccacacaaatgaggcatgccattgatgtgttatgtttcaagacggaaattatgcttagtactgctactactaccctcttctgtacttctttgtatcttcgttccagaaggtcttgttttgttttgtttgccatcattaaatcaggggagtgtttagtactatctctatgtatactaacagagggtttgtactagtctcatgatatgaggggagaaataacaaggaagtaaaagaaattaaatttctttataagtt

SEQ ID NO: 619 - DNA, 3308 bp, Glycine max
cttctctctctctctgtcattggtttttctctggttgacatcatcgtcatctactacttcttcctcttatccaattggcccccaacactggttttggggtactttgaaaagttgcaatggcgaacaggaacttggaaaagatggcatcgattgatgctcagcttcggctgttggttccggccaaagtgagtgaggatgacaaactggttgagtatgatgctttgcttttggatcggttccttgatattcttcaggatttacatggggaggatctgaaagaaacggttcaagaggtgtatgagctttctgctgagtatgaaggtaagcatgacccaaagaaactagaggaacttggaaatctgataactagtttggatgctggagattccattgtggttgccaagtccttttcccacatgcttaacttggccaacttagccgaagaggtccaaattgcccacagtcgaaggaacaagttgaagaaaggtgattttgctgatgaaaacaatgccaccactgaatcagacattgaagaaactctaaagaaacttgtggtggatatgaagaagtctcctcaggaagtttttgatgcacttaaaaaccagactgttgatctggttcttactgctcatcctactcaatctgtccgtaggtctttgcttcaaaaacatggaaggataagaaataatttaactcagttgtatgccaaagacatcactcctgatgataagcaggaacttgacgaggctctacagagggagatccaagctgcattccgtactgatgaaatcaggaggacccctccaaccccacaagatgagatgagagcagggatgagctacttccatgaaacaatttggaagggtgtacccacatttctacgtcgtgttgatacagctttgaagaatatagggatcaacgaacgtgtcccttataatgctcctctcattcaattttcttcttggatgggtggagatcgtgatggcaatccaagagtaactcctgaagtgaccagagatgtttgcttattggctagaatgatggctgctaacttgtactactcccagatagaggatcttatgtttgagctgtcaatgtggcgctgcaatgacgagctacgtgtccgtgcagatgaacttaacaggtcttccaagaaaaattcagtcgcaaaacactacatagaattttggaaagccattcctccaaatgaaccatatcgtgtgctactgggtgaagtaaggaataggctttaccagactcgtgaacgctcacgccatttgctagctcacggatactctgacattccagaggaagagacttttaccaatgttgaggagttcttggaaccccttgaactctgttacagatcactctgtgcttgtggcgatcgtgcaattgccgatggaagccttctagatttcttgagacaagtctctactttcggactctccctagtgaggcttgacataaggcaagagtcagaccgccacacagacgtcttagacgccatcaccaaacatttagaaataggctcataccaggaatggtcggaggaaaaacggcagcaatggcttttatctgagttgagtggcaaacggcccctattcggccctgatcttccccaaaccgaagaaatcagagacgtgttggagacattccatgtcatagcagagcttccactagacaactttggagcatacatcatctcaatggcaactgcaccttctgatgtgcttgcagttgagcttctgcagcgcgaatgccatgtcaagcatccactaagagttgtgccattgtttgagaagctagctgatctagaagcagcaccggccgcgttggcgcgattgttctctgtagactggtacagaaacaggatcaatgggaagcaggaagtgatgataggctattctgattctggcaaagatgctggaaggttttcagctgcatggcagctgtataaggctcaggaggagcttataatggtggctaagcagtatggtgtgaagctgacaatgttccatggtcgtggagggacagttggaagaggaggtggtccaactcaccttgctattctgtctcagcctcctgaaaccattcatggatcgctgcgcgtgactgtccaaggtgaagttattgagcaatcgtttggagagcagcacttgtgcttcagaacgcttcaaaggttcactgcagctactctagaacatggaatgcaccctccaatttctcctaaaccggaatggagggctttgatggatgagatggctgtcattgccactgaggagtaccggtccattgtgttcaaagaaccacgatttgttgagtatttccgcctggccacacctgagttggagtacgggaggatgaacattggaagtcgaccagcaaagaggaggccaagtggaggtattgagacactccgtgccataccttggatctttgcctggacacaaacaaggttccatcttccagtgtggctaggctttggtgcagcattcaaacatgttattgagaaggatgttaggaatattcatgtgctgcaggagatgtacaatcaatggcctttctttagggtcactattgatttagtggaaatggtgtttgccaaaggagacccagggatagctgctctttatgataggctccttgtttcagaggatctgtggtcatttggggagcagttgaggaccatgtacgaagaaaccaaggaactcctccttcaggtggctggccatagggatcttcttgaaggagatccatacttgaagcaaagactgcgcttgcgtgattcttatattactaccctaaacgtgtgccaagcctacacgttgaaacgtatccgtgatccaaactataatgtgaagctgcgccctcacatctccaaagagtctatagagataagtaaacctgctgatgaacttataacacttaacccaacaagtgaatatgcacctggtttggaagacaccctcattctcaccatgaagggtattgctgctggcttgcaaaacactggctaaatctgagtttttgtcttctctttggttccacttttattttctgtttcctttatcagaaataacgagtttagctgcatgcaccaaagggtgtttttccctcccctgtacccatgtttccattataagatattacagagagatagctgccgcaaaatgagacaatgcaagtatgcaactgattcttatgttccaatacgaaattatgctgatttatagacttatttgtatcacctatttcaagcaactctttggtacactaacatttttacgtgaggtggttaagatgcc

SEQ ID NO: 620 - DNA, 3211 bp, Glycine max
gttttcattcattttgtgtctttttatttattgtatttgttcatgtggggttattggttatttttctatgatcggttgattttaggtgagggactgaaaggtagcaatggcgaccaggaacttggaaaagatggcatccattgatgcacagcttaggcaattggctcctgccaaagtgagtgaggatgacaaactgattgagtatgatgctcttctgctggatcggttccttgatatccttcaagatttacatggggaggatctgaaggaaacagttcaagaagtgtatgaactttcagctgagtatgaaggaaagcatgaccctaagaaactggaagaacttggaaatttgataaccagtttggatgctggggactctattcttgttgccaagtccttttcccacatgcttaatttggccaacttggctgaagaggtccagatttctcgccgccgaagaaacaagttgaagaaaggggattttgcagatgagaacaatgcaactacagaatcagacattgaagaaactctcaagaaacttgtatttgacttgaagaagtctcctcaggaagtttttgatgcactgaaaaaccagactgttgatttggttcttactgctcatcctactcaatcaattcgtagatctttgcttcaaaagcatggaaggataaggaattgtttatctcaattgtatgccaaagacattactcctgatgataagcaggagcttgatgaggctctacaaagggagattcaagctgccttccgtacagatgaaatcaggaggacccctccaacaccacaagatgagatgagagcagggatgagctacttccatgaaacaatttggaacggtgttcccagatttctgcgccgtgtagacacagctttgaacaatatcgggattaaagagcgtgttccttataatgctccccttattcaattttcttcttggatggggggtgatcgcgatggtaatccaagagtaactcctgaagtgacaagggatgtttgcttattggctagaatgatggctgctaatttgtattattcccagatagaagatcttatgtttgagctctctatgtggcgctgcaatgatgaactacgcgttcgtgcagaagaacttcacaggtcttccaagaaagatgaagttgcaaaacactatatagaattttggaaaaaggttcccccaaatgaaccatatcgtgtggtactcggtgaagtaagggataggctctatcagactcgtgagcgttctcgccatttgctttctaatgggtactctgacattccagaggaagccactttcaccaatgttgaggagttcctggaatctcttgaactatgttacagatcactatgtgcttgtggtgatagagcaattgctgatggaagccttcttgatttcatgagacaagtctccacttttggactgtcactagtgaggcttgatatcaggcaagagtcagatcgtcacactgatgtgctggatgccattaccaaacacttggaaattggctcgtaccaggaatggtctgaagagaaaagacaggaatggttgttgtctgagttaagtggcaaaaggcctctatttggacctgaccttcctcaaactgaagaaattagagatgttttggacacatttcatgtcatagcagaactaccaccagacaactttggagcctatatcatatcaatggcaactgcaccatctgatgtgcttgcagttgagcttctacaacgtgaatgtcacatcaagcatcccttaagagttgtgccattgtttgagaagctagctgatctagaggctgctcctgctgctctggcacggttgttctcgatagactggtacagaaataggatcaatgggaagcaagaagtgatgattggatactcagattcagggaaagatgctgggaggttctctgcagcatggcagctatataaggctcaggaggaacttataaatgttgccaagaaatttggtgttaagctaaccatgttccatggtcgcggtggaactgttggaagaggaggtggacctactcatcttgctattctgtctcaacctccagacacaatccatggatcacttcgtgtgacagtccaaggtgaagtcattgagcaatcatttggagaacaacacttgtgctttagaacactacaacgtttcactgccgccactctagaacatggcatgcaccccccaatttcgccaaaaccagaatggcgtgctttgatggatcagatggctgtcattgctactgaggaataccgttccattgtattcaaggaaccacgctttgttgagtatttccgcctggctacaccagagttggagtatggaaggatgaatattggaagtcgaccagcaaagagaagacctagtggaggcattgaaacactgcgtgcaataccttggatttttgcatggactcagacaaggtttcatcttccagtgtggctaggctttggagcagcatttaaaaaagtcattgaggaaaatgttaagaatctcaatatgctgcaagagatgtacaatcaatggcctttctttagggtcacacttgatttggtggaaatggtgtttgccaaaggagatccgaaaattgccgctctgaatgatagactccttgtttcaaaggatctgtggccgtttggggatcaattgaggaacaaatatgaagaaactaggaaactcctacttcaggtggctggacacaaggaaattcttgaaggggacccttacttgaagcaaagactcaggcttcgtcatgctcccattaccaccctcaatattgtccaagcttacacattgaaacgtatccgtgatcctaactacaatgtgaaggtgcgcccccgcatatcaaaggaatctgcagaggcaagcaaatcagctgatgaacttgtcaaattgaacccaacaagtgaatatgcccctggtttggaagacacactcattctcactatgaagggtattgctgctggcatgcagaacactggttaagtttgtttgaatactgaaagtgagtgctctagttttgttctcagatacactttttttgttttgttattatgttgccccacctttctgtacaatttggtatgctgctctagaattccagaagagctagctaccacacaaatgaatcaatgacattgatctgttatgtttcttatgctgaggcccgctactacaccattctat

SEQ ID NO: 621 - DNA, 301 bp, Glycine max
tcgaatcgagcgaatcggctcgagtctttttgatccatttttcattcgttgtgatcttcctcttcctcgtacacaggtgagcgactgaaaggtagcaatggcgaccaggaacttggaaaagaggcatccattgatgcacagcttaggcaattggctcctgccaaagtgagtgaggatgacaaactgattgagtatgatgctcttctgctggatcggttccttgatatccttcaagatttacatggggaggatctgaaggcaacagttcaagaagtgtatgaactttcagctgagtatgaag

SEQ ID NO: 622 - DNA, 274 bp, Glycine max
gaaataacgagtttagctgcatgcaccaaagggtgtttttccctctctgtaggatcttataatggaaacatgggtacaggggagggaaaaacaccctttggtgcatgtttccattataagatattacagagagatagctgccgcaaaatgagacaatgcaagtatgcaactgattcttatgttccaatacgaaattatgctgatttatagacttatttgtatcacctatttcaagcaactctttggtacacgaacatttttacgtgaggtggtt

SEQ ID NO: 623 - DNA, 274 bp, Glycine max
gtcagctgagtacgaaggagagcataagcctgaaaagttggaggaacttgggaatatgctgacgggtcttgatgctggggattcaattgttattgccaagtcattttctcacatgctcaatttggccaacttggcagaagaagttcaaattgcgtatcgaagaaggatcaagttactgaagaagggtgattttcctgatgagaactctgccattactgagtcagacattgaagagaccttcaagaagcttgtggctcaactgaagaagacaccc

SEQ ID NO: 624 - DNA, 734 bp, Glycine max
gatggctccaaagtttcaagaattatctgaaaagtatctggatgttgtctttctaaagctggattggagagattggaacacccccccaaaacaagccccaattatggctctgaatctttgtatctcacctaagtttaaatgggttccttccttagatagtgcttcctattctttgagaccttcacttgggtcttgttttggtaacataaacattgctagtgtgagtctaagtactactagaagtttgagtttgaggaggagtgggagtgttagtgtaagatctagtttagaaactgcggggcccacagtcacagtgggacaggtcactgaggttaacaaggacaccttctggccgatcgttaaggctgccggggataaaaccgttgtccttgacatgtacacacaatggtgtggcccttgcaaagtgatggctccaaagtttcaagaattatctgaaaagtatctggatgttgtctttctaaagcttgattgcaaccaagagaacaggcccttggcaatagagctgggaattaacgtggttcccactttcaaaattctgaaggacaacaaggttgtaaaagaagttactggagctaaatacgatgatttggttgatgccatagacaaagttcgatctagctaaaaatatataaaaagtttctctctctctgtaaaaatattatgcttgacaccctttgtaagtattttatgcaattgtacgctgatgatgattg

SEQ ID NO: 625 - DNA, 662 bp, Glycine max
ggctcacttcgggtaacggttcagggcgaagtcattgagcaggctgggggagaggagcacttgtgcttcagaacacttcagcgcttcactgctgctacacttgagcatggaatgcaccctcctgtggcaccaaaaccagagtggcgtgccctcatggatgagatggctgtcattgctacagaggagtatcgctccattgttttccaagaacctcgttttgttgaatatttcagatgtgcaactcctgagttggagtatggaagaatgaacattggcagtcgtccatcaaagcgaaagccaagtggaggaattgaatcacttcgtgctatcccttggatctttgcttggactcagacgaggtttcatctgcctgtgtggcttggctttggggcagcatttagccatgttgttgagaaagatccgaagaatctccaaatgcttcaggacatgtacaatcaatggcctttcttcagggtcaccctggacttggttgagatggtgtttgctaagggagacccggggattgcagccctatttgacaaactcctagtatcagaagagctgcgtccatttggagaaaatttaagagctaaatacgacgatttggttgatgccatagacaaagttcgatctagctaagaatatatagaagtattctctct

SEQ ID NO: 626 - DNA, 445 bp, Glycine max
cggacgacccacgcgacccacgcaacacccccccaaaacaagccccaattatggctctgggtctttgtatctcaccgaacgggggatgggtttcatctcctgcttccttagatagtgcatcttctttgagatcttcacttggttcttgttttggtaacataaacattgctagtgtgagtttaagcactagtagaagtttgagtttgaggaggagtgggagtgttagtgtaagatctagtttggaaactgcggggcccacagttacagtgggacaggtcactgagggtaacaaggataccttctggccgatcgttaaggctgccggggataaaaccgttgtccttgacatgtacacacaatggtgtggcccttgcaaagtgatggctccaaagtttcaagaattatctgaaaagtatctggatgttgtctttctaaagcttgattg

SEQ ID NO: 627 - DNA, 692 bp, Glycine max
atgttattaagaaggatccaaagaatctccaaatgcttcaagatatgtataatcaatggcctttcttcagggtcacccttgacttggttgagatggtgttcgccaagggagaccccgggattgcggccctttttgacaaactcctagtgtcagaggagctgcggccatttggcgagcgattaaggtctatgtttgaagaaaccaagagccttctcctccaggttgctggacacaaagatctccttgaaggagacccctacttgaagcaaagacttcgtcttcgtgactcatacatcacaaccctcaatgtgttgcaagcctacacattgaagcggatccgtgatcctgactaccatgtgaagttgaggccacacttgtcaaaggactacatggaatcaagcaagccagcagcagagcttgttaaacttaaccccaaaagcgagtatgctcctggtcttgaggacacccttattttgacaatgaagggtattgctgctggcatgcaaaatacaggttaagatgccatagcagtggtgtttttcttgttatacgatgtgtgttgtgattgtgacatggatgtataagcattataacctattatgtctactagagagatttccaacaatatcaaataactgttcctctgttgttatgaatatagtatcatcatacaataaaacaaggttttggtc

SEQ ID NO: 628 - DNA, 406 bp, Glycine max
tcaatgtcctgcaagcctacacattgaagcgaattcgtgatcctgactaccatgtgaagttgaggccacatttgtccaaagactacatggaatcaaacaagccagcagctgagcttgtgaaactcaaccctacaagtgattatgctcctggtctggaggatacccttattttgacaatgaagggtattgctgctggcatgcaaaacactggttaagaagctgcatgcctgtgttgccttcctatacaagtaacttaactttggatacacacattttaacctatgttgtctgctacagatgtggaccagcattaaataacaattacgctatctattatcgttatcatgtaataaaaacggattttggcttatgccagcttggattttaactggattttcttctgttt

SEQ ID NO: 629 - DNA, 1770 bp, Glycine max
  unsure (1)..(1770): unsure at all n locations
gaatttgaaaacattttccccagttctcgctatcccgcaccccccaacccccgcgtatggcttcctctgcaacagacgataacccaagatctgtaaaaagagtagctgttgttggtgctggggtaagtgggcttgctgcggcttacaaattgaaatcacatggtctggatgtcactgtatttgaagctgagggaagagctggagggaggttgagaagtgtttctcaggatggtctaatttgggatgagggagctaatacaatgactgaaagtgaaattgaggttaaaggtttgattgatgctcttggacttcaagaaaagcagcagtttccaatatcacagcataagcgctatattgtgaaaaatggggcaccacttctggtacccacaaatcctgctgcactactgaagagtaaactgctttctgcacaatcaaagatccatctcatttttgaaccatttatgtggaaaagaagtgacccctctaatgtgtgtgatgaaaattctgtggaaagtgtaggcaggttctttgaacgtcattttggaaaagaggttgtggactatctgattgatccttttgttgggggcactagtgcagcagatcctgaatctctctctatgcgccattctttcccagagctatggaatttggagaaaaggtttggctccattatagccggggcattgcaatctaagttattcgccaaaagggaaaaaactggagaaaataggactgcactaagaaaaaacaaacacaagcgtggttcgttttctttccagggtgggatgcagacactgacagatacattgtgcaaagagcttggcaaagacgaccttaaattaaatgaaaaggttttgacattagcttatggtcatgatggaagttcctcttcacaaaactggtctattactagtgcttctaaccaaagtacacaagatgttgatgcagtaatcatgacggctcctctatataatgtcaaggacatcaagatcacaaaaaggggaactccctttccacttaattttcttcccgaggtaagctacgtgccaatctcagtcatgattactaccttcaaaaaggagaatgtaaagagacctttggagggatttggagttcttgttccttctaaagagcaaaaaaatggtttaaaaacccttggtacacttttttcctctatgatgttcccagatcgtgcacctagtgatttatatctctataccaccttcattggcggaactcaaaacagggaacttgctcaagcttcaactgacgagcttaggaaaattgttacttctgacctgagaaagttgttgggagcagagggggaaccaacatttgttaaccatttctattggagtaaaggctttcctttgtatggacgtaactatgggtcagttcttcaagcaattgataagatagaaaaagatcttcccggatttttctttgcaggtaactacaaaggtggactctcagttggcaaagcaatagcctcaggctgcaaagcagctgatcttgtgatatcctacctcaactctgcttcagacaacacagtgcctgataaatgatatcatcctagatgtaggaattaggaagggtatgctttctatttaccaaaagtgttgaattaaccccttatttcagcatccgtaaacaatgtaataattattatgcttgcacagtgcaacagtcccccattttgaattgggagaaggaagttcattaaaaatttaaaatgcagacattgtagcnnnnnnnnnnnnnnnnnnnnnn

SEQ ID NO: 630 - DNA, 327 bp, Glycine max
gcggccgcccttttttttttttgttttctaaaaaaattaataatatactgaataaagtgtcgaagaacaataattaaattaattcaaggaattaaattaatagaataattatattgatcaactaaatctaccatatgaaaatttcattctttacttgtaaagagccgaaattatcttcaccttaataattgtggatttaggaagattctgattattcttctacatctacaattattaaggtgaagataattgtagatgtagaagaataatcagaatcttcctaaatccacgtaatttcttcgaaaatgctttgcccaacacaatgat

SEQ ID NO: 631 - DNA, 401 bp, Glycine max
tgtttttttttttcttacaaacaaacagtgaaattcttttattcataacttgaagtacaaaataaacacaattttttttttttttcgttttacattcatgcacccataacactcttgtcgtggccattagcactataaacaaatgatctaaacgcggaagctagccaggtgtaacccttgccataatttgtaaattaaactaaatttttgagcatgacaaagtcaatggttgtagatacacctcttattatgtggaccctgaggaggcaaccaccattaacgagctgaagaagcctgttgtggagaaagaagctccagggcatgccatatgagggcatgcacgtacggcctcggaggggaaccagaaaattatgttaacaaaataatctggaaccctaatg

SEQ ID NO: 632 - DNA, 614 bp, Glycine max
ccaacccttccgaccggttgcaagaagtctacagaagggggggactacaatggtaatgttatagaattgtatgtaaaaaataaaaatggagaagaaagagaagcgggcctgagaagcgaaaagaaggcctgggcttagttgataagcataactgggtgaggaagagagaggagagagtgaagaagatggcgtccaaccccaccggtacccgttttggagggccggcggggatgacgtacataacatactcgggagatatgcgcgaatctggtcaggaatttccctcaaggaaccctacaaggccgaatccctctctcgtgagaaagctccattttgttctctccaaatggcgtcgacgccaagtcctgaaaaacctactattcgttcagacaccccagaacaagtgatctggaataagtgggaagctaataaatgcataaattcttttgagactctgaagttcattgtcattttgaaccctttctgggatgtttaaattcctttgcttctttttttttcattccatgaaatggaaacatgcacttgaattttgatttgcatgattaatcttgtaataataaaagtttaaacaaatgattttgaacttattgact

SEQ ID NO: 633 - DNA, 2331 bp, Glycine max
cctggatcctctaaaaggggcggcccttttttttttttttttaacttctaaaaatccctttgtattaatgtatactgataaattaatgtataccgaataaatgtacaaatgtgaatgactaaaaaaatagtgcaataaactaattctggttctaaaaaaattaataatatactgaataaagtgtcgaagaacaataattaaattaattcaaggaattaaattaaaacaataattatattgatcaactaaatctaccatatgaaaatttcattctttacttgtaaagagccgaaattatctgcaccttaataactggagatgctgaacaataatcatgaatcttcctaaatccacgtaatttcttcgaaaatgctttggccaacacaatgatattgtcacaccagatgctatgcgggggtcttccatttgatattccatttatcgcctggagatttacaatgctaatgacctatttctgcattacaaacgttgttgcccgaaattggacttcttacaagtagataattgtgccacaaagccggcaatacaaatgatccatcttatttggagaaaagtagccgtgtttgccaaatcaaataaaaaaagaagggcacaatatagttgatacaatgataaccagtacatcttcacaatttctatcaaaaaagacttagtgccaatattatgcaaaaagatgtgacagaacacaggtaatatgaagacacccacaattaaatgcgttggctcgatttatttttgatgtgtagcgttcaatatctgatgttagattcatggttatattatcattaaaaaccaaaatcgttttacctttcagaatattgatgaacaccacctagcatcttctgccaataagaccatccaaacttcatattaacattagcagtattttacattaccagcttattaaattgatattaatattatttcattgaaagaaacctgtgttccagttgcaactaaatcgatggttaattttaaaactatagctatcgttgattttatctttaattatgtaaaattgaatatcctaaccctttccaatgtaaattgacagataataccttattcgataggagttggagcgaatcctctgatgtatccctctgatccagagtcgtaatacggagtggagcgacagataggtaataataaaaggcataacgaaaaggattcgttcaaaccctaatcgagtaaaggtaataactgtccatttacaatccgaaagggttaggctattgaatttaaaataattacagataaaaataatcgatagctttgattttaaaaattaatcataatcaatcggttaggttgcaaacataatacttaattcgcttaattttttaactgcgcctcagagtattcataacatattctattaaattaataagctggtgatgtaattaatattaatatgtagttttggcaatcttattggcagaagatgctaggtggagttcatcaatattctggtaggtataatatcttcatgaatctaatataacgttattcatagtgaaaataaatcgagccaaggaatttattaataattgtcttcatttcatattagctgcctgctgcgacttccttatgcataattttactgtttatagaaattgtgaagctagactgttgtaattgtcatgtagatggttccctgtttcatcttacttgatttggtaaactccggttacttgtatccaaataagatgggccatattgtattgcggggggctatgtatatttgtccaataatctacttgtaagaagttcagattcgggcgacaacatttgtaatgcagaattaggtcattaacattgtaaatcttctggcgatgattggaatatcaatgtgaagacgctatatgacttatgctatgacaatatcattgtggttgtcaaggtatttttgaagaaatatcgtggatttacaaagaatctggttaggcttctacaattctttaaggtgaagataacttcggctctttacccaagcatagaatgatattttttcttggtatcaagttattcagtatgtatgtttgtttgttttaattcccttgtgcggcaattattttgatatttctgctgcgattattcagtataattaagttattcagcgtatattcagttatttagtacattgttattcagtaaacataattattctttgtatataaatagttattctgaagtttacatagtaattctgtatagtataaatggttttttctgttttctatacagttattttgctgcgatttgtatactgattaaattaatgcatgttctgtttaagttcttccctgt

SEQ ID NO: 634 - DNA, 960 bp, Glycine max
  unsure (1)..(960): unsure at all n locations
gcacaatgggaaagcaaatacacgacagaagagtcaagcggcgagcaatggcgacatcgctggtgcgatcgggttttcttcgaagcgcgcctaagaggaagcgctcgtggctcccaggttccgaagcgaaactttgcttcctctggtcatcacgatgatgcatatgagacggccaaatgggagaagattacatatttaggcacttgttggttgcaccggtttagccgtttataatctatcaaagggccacccgcacttcaaagaacctcctgcatacccatatttgcatatccgcaataaggaattcccctgggcaggtcccgatggactatttgaaaccaagcaacaattgacagcataattggtttaatgaaggtatttgtggcactggtgggcattcgttttgtcaatgttcaacgaatagtgataatgatgattatcgtgacttttgaaatgtgacctagaacttgcacttggcaacgttagtctgtcatgctcttatcgcatgttcgtttgtatggttgaggaacaaaataaaattgtcaaacaatatgatgcttctttttatgccgattcttgttcagtaagatttttaaagaaaatggtcttaaaaaaaaaaaaaaaaaaaaaaaaaaaaaaaaaaaaaanaaannctcgaagaagcttccagggcatgcccatatgagggcatgcacgtaccggccttcggagggggaaccagaaaattcatgttaaacaaaataatctgggaacccttaatgtattcagtgttcatcatcagtggtggtagtttaaggctagcctttggctatgggtttacgttcctttgaagatggagagttctttgattgaaccaagtaccatttctggatggtatttgcttttccttggaaaggtttaatgcaatgccttctttatcttctgtctagctccaaaaaaaataaaaaagggcggccgccg

SEQ ID NO: 635 - DNA, 1200 bp, Glycine max
ctgcatcaaccaaacaaacaaataaagcaaaaggcctttttattccaaagcaaggaaggaagaaataaaccgaatgagagcatcaaactcttcttcttcgatttccattgcgaacgttactttttcttcttctttctcttcattttcttcgctcttcgatcttcgtccggggactgctccgaataccaccaccaccactcgccgatggccacgatcggaggcttacacgactcccaaggctctcaaaacagcgtcgaaaccgaagccctcgctcgattcgccgtagacgaacacaacaagaagcagaattcgcttctggagtttgctagggtggttagggcacaggaacaggttgttgctggtaccctgcatcaccttactcttgaggctattgaggctggtgagaagaagctctatgaagccaaggtgtgggtgaaaccatggttgaatttcaaagaactccaagagttcaagcctgctggtgatgtaccatcatttacctctgctgatcttggtgtcaaaaaggatggtcaccaacctggatggcaatctgtgccaacacatgaccctcaagttcaggatgcagcaaatcatgcgatcaagactatccagcaaaggtctaattcactagtaccctatgagcttcatgaggttgctgatgcaaaggctgaggtcattgatgactttgccaagtttaatctgcttctcaaagtcaagaggggacagaaggaagagaagttcaaggtagaggtacataagaataaccaaggtgggttccatctaaatcagatggaacaagatcattcctaattctgatcggaagtttggccacgctagcagtataggcctgggtggcacctaaaatatacctttttttttcagtggggtgtatgaatcttattatctatgctatacataattatatactaatagggtattgttcttatctctgtctcagcaagtatgttagtgcttacccctttctctaagccttggcagataagttttcctatgtgtattggctttattaactgggaagctaccaagttacattagtacctttgtaacgtaaatatttacttaacataaaaatgtggatgttgaccatttgcatttaacgtatgcctaaagaatgtgaattattttttacctttaaaattaaattttaacatttaatgtgaataattctttttggctgag

SEQ ID NO: 636 - DNA, 507 bp, Glycine max
gtgccaacacatgaccctcaagttcaggatgcagcaaatcatgcgatcaagaccatccagcaaaggtctaattcactagtaccctatgagcttcatgaggttgctgatgcaaaggctgaggtcattgatgattttgctaagtttaatctgcttctcaaagtcaagaggggacagaaggaagagaagtttaaggtagaggtacacaagaataaccaaggggggttccatctaaatcagatggaacaagatcattcctaattctgatctgaagtttggtcaccctagcaatattgttcttatctatgtctagtgcttacccctttctctgtgccttggcaaataagtagttttacaatgtgtgtatccctttattaactgggaagctaccggtgatgttacattagtaactttgtaacgtaaatattactttagtatcataaaaaatgcggatgttgaccatttgtatttaacgtagcctaaagaatgcgaattattttttttacgttt

SEQ ID NO: 637 - DNA, 543 bp, Glycine max
ggacgcgtataaaaaaataaaatcgagatgctgctacgacgtggcgtccaaactaagccacacggctaataaatacggccggcacactttcactgcatcaagaaaggaagaaacataccgaatgagagcatcaaactcttcttcttcgatttccattgcgaagcgttactttttcttcttctttctcttcattttcttcgctcttcgatcttcgtccggggactgctccgaataccaccaccaccactcgccgatggccacgatcggaggcttacacgactcccaaggctctcaaaacagcgtcgaaaccgaagccctcgctcgattcgccgtagacgaacacaacaagaagcagaattcgccctttgtaaaaatatttttttccacaaaataataatataaagaattgtttttatttttaatcttgttattcgttgtcacttgtttacgtgttttgaatgcacaagaccaggttgctattatgttagtgtttgattcgaattccagagtacaagacaagtttaacagaagaagttgatcatt

SEQ ID NO: 638 - DNA, 427 bp, Glycine max
  unsure (1)..(427): unsure at all n locations
cccacgcgtccgcacggctaataaatacggccggcacactttcactgcgtcaagaaaggaagaaacataccgaatgagagcatcaaactcttcttcttcgatttccattgcgaagcgttactttttcttcttctttctcttcattttcttcgctcttcgatcttcgtccggggactgctccgaataccaccaccaccactcgccgatggccacgatcggaggcttacacgactcccaaggctctcaaaacagcgtcgaaaccgaagccctcgctcgattcgccgtagacgaacacaacaagaagcagaattcgctttctggagtttgctagggtggttagggcacaggaaacaggttgtctgctggtaccctgcatcaccttactcttgaggctatnggaggctgtgagaagaagctctatgaagcc

SEQ ID NO: 639 - DNA, 2257 bp, Glycine max
gttcaccataatcaaactcgaattaaaccaccttcagcaacaatggttaacatccaaaccaatacatcttacatcttccctcaaacacaatccactgttcttcctgatccctccaaattcttctcctcaaaccttctctcaagtccactccccacaaactctttcttccaaaactttgtcctaaaaaatggtgaccaacaagaatacattcatccttacctcatcaaatcctccaactcttccctctctctctcatacccttctcgccaagccagttcagctgtcatattccaagtcttcaatcctgatcttaccatttcagccccacaaggtcccaaacaaggtccccctggtaaacaccttatctcctcctacagtgatctcagtgtcaccttggatttcccttcttccaatctgagcttcttccttgttaggggaagcccctatttgactgtgtctgtgactcaaccaactcctctttcaattaccaccatccattccattctctcattctcttcaaatgactccaacaccaagtacacctttcagttcaacaatggtcaaacatggcttctttatgctacctcccccatcaagttgaaccacaccctttctgagataacttctaatgcattttctggcataatccggatagctttgttgccggattcggattcgaaacacgaggctgttcttgacaagtatagttcttgttaccccgtgtcaggtaaagctgtgttcagagaacctttctgtgtggaatataactgggagaagaaagattcaggggatttgctactcttggctcaccctctccatgttcagcttcttcgtaatggagacaatgatgtcaaaattcttgaagatttaaagtataaaagcattgatggggatcttgttggtgttgtcggggattcatgggttttgaaaacagatcctttgtttgtaacatggcattcaatcaagggaatcaaagaagaatcccatgatgagattgtctcagccctttctaaagatgttgagagcctagattcatcatcaataactacaacagagtcatatttttatgggaagttgattgcaagggctgcaaggttggtattgattgctgaggagttgaactaccctgatgtgattccaaaggttaggaattttttgaaagaaaccattgagccatggttggagggaacttttagtgggaatggattcctacatgatgaaaaatggggtggcattattacccaaaaggggtccactgatgctggtggtgattttggatttggaatttacaatgatcaccactatcatttggggtacttcatttatggaattgcggtgctcactaagcttgatccagcatggggtaggaagtacaagcctcaagcctattcaatagtgcaagacttcttgaacttggacacaaaattaaactccaattacacacgtttgaggtgttttgacccttatgtgcttcactcttgggctggagggttaactgagttcacagatggaaggaatcaagagagcacaagtgaggctgtgagtgcatattattctgctgctttgatgggattagcatatggtgatgtacctcttgttgcacttggatcaacactcacagcattggaaattgaagggactaaaatgtggtggcatgtgaaagagggaggtactttgtatgagaaagagtttacacaagagaatagggtgatgggtgttctatggtctaacaagagggacactggactttggtttgctcctgctgagtggaaagagtgtaggcttggcattcagctcttaccattggctcctatttctgaagccattttctccaatgttgactttgtaaaggagcttgtggagtggactttgcctgctttggatagggagggtggtgttggtgaaggatggaaggggtttgtgtatgcccttgaaggggtttatgacaatgaaagtgcactgcagaagataagaaacctgaaaggttttgatggtggaaactctttgaccaatctcttgtggtggattcatagcagaagtgatgaatagaatggatttggttattgaacatgacaacactgctgatttggttattattattattgctactattactatgccaataaaatcatcaaatatgtcttacatcataataaaaaaattattattatgccaataagtcaatgatttcgatatgttatagaagaagaaaactataataaagttacaacaatatcatgatctataacatgtctga

SEQ ID NO: 640 - DNA, 1882 bp, Glycine max
gatgagatcatattcaatactagtctttcttagtttctttctcttacctcaccgaattcgcggccgcttgaatggtcagactcggaggatttctatttagtaaaaatctttcttagtttctttcatatgcactccatagttgaaggtggaagctaaggtattattatggcttatcaagtgttggtgatttgtgtggtctccagcatagtgtttgcatacatagtatggagaaaagaaaggaagaaaaagcttccaccgagtccaaagggccttcccatcattgggcacctccaccttgtgtccccaataccccaccaagatttttacaagctctcactccgccatggacccatcatgcaacttttccttggctcagtcccttgtgtggtggcttccaccgcggaagccgccaaagagttcctcaaaacccacgaaatcaacttctccaaccgccccggccaaaacgtcgccgttcagttcttaacctacgtgtttggcccttacggaccctccgtgaagttcatcaagaaactttgcatgtccgaactcctcggtgggcgcatgctggaccagttccttcctgtgagacagcaagagacaaaaaaattcatcaaacgcgtcctccaaaagggtatcgctggtgaagccgttgacttcggaggagagttcatgagactctccaacaacatcatttcgagaatgaccatgaaccagacgagttccgaggacgagaaacaggccgaagagatgaggatgctggtggcggatgtcgcagaactcatgggcacgttcaacgtgtcggacttcatttggttcttgaagccttttgatttgcaggggttcaacaagaggatcaggaaaacgaggatcagattcgacgctgtcttggacagaatcatcaagcagcgtgaagaggaaagaaggaacaacaaggaaatcggtggaacgcgtcagtttaaggatatacttgatgttttgttggacataggcgaagatgacagttctgaaatcaaattaaccaaagagaacattaaggccttcatcatggatatatttgttgccgggactgacacgtcagctgcaaccatggaatgggctatggcagagttaatcaacaatccatgtgtgttggagaaggcaaggcaagagatagatgcagtggttggaaatagtagaataatagaagaatcagacattgtcaaccttccttacctacaagccattgttagagaaacacttaggattcacccaggtggtccattgattgttagagagtcatcaaaaagtgttgtggtttgtgggtatgatattccagcaaagacccgattatttgtcaatgtttgggctattggaagggaccccaatcattgggagaacccttttgagtttaggccagagaggttttttgaaaatggacaaagtcaattggatgttaggggacaacattatcattttattccattcgggagtggaagaagatcatgccctggtacttctctggcattgcagattgtgcatgtgaatctggctattatgattcagtgttttcagtggaagtttgataatggcaataacaaggtggacatggaagagaagtctggcatcactcttccgagggctcaccccataatttgtgtccctgttccaaggcttaacccattccctgttatgtgattgacgctccaaatgacattaaacaccttgtgagagagtgaaaaaagagagaatataaatattatgaatggtgaaaatgttgtgatacaaagagaaataaataacaggtgttaacaatgtgtcaataaacttggatgatgtttaaaaatcattactcttattttaaaatatctatttttttttgctaaaaaaaagcggccgcgaattc

SEQ ID NO: 641 - DNA, 1720 bp, Glycine max
cccacgcgtccgcggacgcgtgggaaaaaaagcacctgataattgatagtattatatattatctcaagcaagctaaggcattattatggcttatcaagtgttgctaatttgtttggtctccaccatagtgtttgcatacatactatggagaaaacaaagcaagaaaaaccttccaccaagtccaaaggcccttcccataattggccacctccaccttgtgtccccaattccccaccaagatttttacaagctctcaacccgccacggacccatcatgcaacttttccttggctcagtcccttgtgtggtggcttccaccgcagaagccgccaaagagttccttaaaacccacgaaatcaacttctccaaccgccccggccaaaacgtcgccgttaagggcttagcctacgattcccaagacttccttttcgcgtttgcacccttcggaccctactggaagttcatgaagaaactctgcatgtccgagcttctcagcggccgaatgatggaccagttccttcccgtgaggcagcaagagaccaagagattcatcagccgcgtgttccgaaaaggagtcgccggcgaggccgtggatttcggagacgagctcatgacactctccaacaacatcgtatccagaatgacgctgagtcagaagacttctgagaacgacaaccaggctgaggagatgaagaagctcgtgtcgaatatcgcggagctcatggggaagttcaacgtttcggacttcatttggtacctgaagcctttcgatttgcaggggttcaacagaaaaatcaaggagactcgggacaggtttgacgttgtggtggacggaatcataaagcagcgtcaagaggaaagaaggaaaaacaaagaaacgggcacagcaaaacagtttaaggacatgcttgatgttttattggacatgcacgaagatgagaatgctgaaatcaaattagacaaaaaaaacattaaggccttcatcatggacatatttgttgctgggactgacacgtcagctgtaagcatagaatgggctatggcagagttaatcaacaatccagatgtgttggagaaggcaaggcaagagatagatgcggtggttggaaaaagtagaatggtagaagaatcagatattgccaaccttccttacttgcaagccattgttagagaaacacttaggcttcacccaggtggtccattggttgttagagaatcatcaaaaagtgcggtggtttgtgggtatgatattccagcaaagactcgattatttgtcaatgtttgggctattggtagggatcccaatcactgggagaaaccttttgagtttaggccagagaggtttatcagagatgggcaaaatcaattggatgttaggggacaacattatcattttattccattcgggagtggaagaagaacgtgccctggtgcttctctagcgtggcaggttgtgcctgtgaatctggctataattattcaatgtttccaatggaagcttgttggtggcaatggcaaggtggacatggaagagaagtctggcatcactcttccgagggctaaccccataatttgtgtccctgttccaaggattaacccattccctactatttgattgtgactccgaatgttattcaataaccagtgagagaaaaaaataataataaacaatatgatctgataagagaaaaataataaagccagtttctttcttaggcta

SEQ ID NO: 642 - DNA, 1703 bp, Glycine max
  unsure (1)..(1703): unsure at all n locations
catcaacaaaaaaagcacctgataattgatagtattatatattacggacgcgtgggtactactcaaggtatggcttttcaagtgttgttcatttgtttgatctcaaccatcgtgtttgcatccatactatggagaaaacaaaacaaaaacaagacccttcttccaccgagtccaatgcccctacccatcattggacacctccaccttctttctccaacacctcaccaagattttcacaagctctcactccgctatggacccataatacacctttttcttggttcagtcccctgtgtggtggcttccacagcagaagccgccaaagagttcctcaaaactcacgaacccgccttctccaaccgccccgctaacactgtcgccgtcgaaaccttaacctacggtttccaagacttcttgttcgcaccctacggaccctattggaagttcatgaagaaactctgcatgtccgaactcctcggtggccacatgctggaccagtttcttcccgtgagacagcnagagacaaaaaaattcatcaaacgtgtcctccaaaagggtatttctggtgaggccgtggattttgggggagagttcatcacgctctcgaacaacatcgtgtcgagaatgatcgtgagtcagacgagtactactgaggacgagaacgaagttgaagagatgaggaagctggtgaaggatgccgcagagctctcggggaagttcaacatatcggacttcgtttcgttcttgaagcgctttgatttgcaggggttcaacaagaggctcgagaagattcgggactgctttgacaccgtgttggacagaatcataaagcaacgtgaagaggaaagaaggaacaagaatgaaaccgttggaaaacgagaatttaaggatatgcttgatgttttgtttgacatatctgaagatgagagttctgaaattaaattaaacaaagaaaacattaaggccttcatcttggacatattaattgctgggactgacacctcagctgtaacgatggaatgggctatggcagagttaatcaacaatccaggtgtgttggagaaggcaagacaagaaatggatgcagtggttggaaagagtagaatagtagaagaatcagatattgccaaccttccttacttgcaaggcattgttagagaaacattaagacttcacccagctggtccattgctttttagagagtcatctagaagagctgtggtttgtgggtatgatattccagcaaagactcgattatttgtcaatgtttgggctattggtagggaccccaatcactgggagaaccctcttgagtttaggccagagaggtttgttgaaaatgggaagagtcaattggatgttaggggacaacattatcatctacttccgttcggtagtggaagaagagcatgtcctggtacttctttggcattgcaagttgtgcatgtgaatttggcagttctaattcagtgtttccaatggaaggttgactgtgacaatggcaaggtgaacatggaagaaaaggctggcatcactcttccgagggctcaccccataatttgtgtccctattcgaagacttaacccattccctgttgtgtgattgttttttattttaaacatcatttttccattcacgtatatgatatgatgtcatgtcaaacatttatgcactttttacataatatatttggggattcaaat

SEQ ID NO: 643 - DNA, 1132 bp, Glycine max
gatgattaacattgaaatatcctattcaaatatatgtaatgggttaccgtttcaacaaatcgtcggtagcaaaaataaccaataattagacagatgctgttggaccctgtaaccatatgccaagatcaagtaataggataagcagcaggactaaaaaggaaaattacaacatatatgtacaaaaatccctacatataatataatatatacaaggtcagatttcattattacttgatttcatattcttggccttttccatccactttctcttctcatccaagctctttaaggtgcctttccatttacaacctgactcttgaaaaatgtttcttcaatccttaacttcatattcttttgattcctgatgtatttctgagcaggcactgaaaatcttctaagaacagccctctgctgcagaaggaggggacttttcaatgtctttcaatgcattttcttgtttttcctggttactaacaccagcttcagatttattggtgctaagttttgctacggcgttgccaactaaacccgtctcggacaagttctcctcatgttccatatcttccaatgcattttcttgcactacttgattttcctggtcagaaacaccagcttcagatactttagtgtcaagttctgctacagggttgccaactaaatccttctcagacaagctgtccacatgttcactcccttctgctgaagagcacaaagatgaagccccatcatttgacacagtttctggcacagccaaacaatctggagtaacatcaattccatctcccgtaacagtttcagattcttctgatacctgcactattgcttggctgccaactataccttccttagataatccttcccccttctcagctgatactgggggttttgggacttcagatacattttccatctcagcagcacagcttttactatctgtcccatcctcaatgtcagctagtcctcttgatccatcctgggattccaagattccttccaccttctcagctgatactgagggttttgggacttcagatacatttcccatctcagcggcacagcttttactatctgtcccctcctcaatgtcagatagtcctcttgatccatcctgggcttccaagatcggctcgag

SEQ ID NO: 644 - DNA, 349 bp, Glycine max
tacatttcccatctcagcagcacagcttttactacctgtcccttcctcaatgtcagctagtcctcttgatccatcctgggcttccaagattccttcccccttctcagctgataccgagggttttgggacttcagatacatttcccatctcagcagcacagcttttactacctgtcccttcctcaatgtcagccagtcctcttgatccatcccgggcttccaagattccttcccccttctcagctgataccgagggttttgggacttcagatacattttccatctgagcagcacagcttttactatctgtcccatcctcaatgtcagccagtcctcttgatccatcccga

SEQ ID NO: 645 - DNA, 608 bp, Glycine max
taacaaatcgtcggtagcaaaaataactaataattagccaagtaataggataaccagcaggagttaaaaggaaaactacaacatatatgtacaaaaaatccttacatatgatataataatataataatatatacaaggtcagatttcattacttagtttcatattattggccgtttccttccactttctcttctcatccaagctctttaaggtgccttttcatttacaacctgactcttgaaaaatgtttcttcaatcctcaacttcatattcttttgattcctgctatatttctgagcaggcactgaaaaccttctaagaggagccctctgctgcagacggaggggatttttcaatgtccaactcattttcttgtctttcctggttggtactactcaaggtatggcttttcaagtgttgttcatttgtttgatctcaaccatcgtgtttgcatccatactatggagaaaacaaaacaaaaacaagacccttcttccaccgagtccaatgcccctacccatcattggacacctccaccttctttctccaacacctcaccaagattttcacaagctctcactccgctatggacccataatacacctttt

SEQ ID NO: 646 - DNA, 2004 bp, Glycine max
agagcgttggacgaccgacgcatgcactgcgtacagctcggaattcaggctcgagccacaatatcatatctccaggctatctatcaagtaagaaagctgttaagaggaggagaatggctgatgatggaagcaggagggaattgatattcaggtcgaagcttccggatatctacatccccaaacatatgcccctccactcttactgcttcgagaatttgagagagtgtggttcacgcccctgcctgatcaatgcccccacgggagacgtctacagctaccacgaggtggacagcaccgccagaaaggtggcgagggggctgaagaaagagggcgtggaacagggccaggtcatcatgatcctcctccccaattgccccgaattcgtcttctcgtttcttggcgcatcccaccgcggtgccatggccactgccgccaaccctttcttcacccccgccgagattgcaaagcaagcccatgcctccaatgccaagctcctcatcacccaggcctcttactacgacaaagtcaaggacctccgcgacatcaagctcgtattcgtcgactcttgtcccccccatacacaggagaagcagcatctccatttctcacagctttgtgaggataacggtgacgctgatgttgatatcaagcccgatgacgtggttgcattgccttattcttcgggaacaactggtcttcccaagggagtgatgctgagccacaaggggctggtgaccagcattgctcagcaggttgacggtgataatcccaacctctattaccactgccacgacaccatcctctgcgtgcttcccctctttcacatttactctctcaactccgttcttctctgtggcttgcgtgccaaggctaccattctcctcatgcccaagttcgatattaactccttgcttgctctcattcacaagcacaaagtcactattgcccctgtcgtccctcccattgttctcgccatttccaaatcacccgatctccacaagtacgacctgtcttccatcagagtcttgaagtccgggggagcccctctgggtaaggaactcgaagacactctcagagctaaattccccaacgccaaacttggccagggatacggaatgactgaggcagggcctgtgctaacaatgtctttagcttttgctaaagaaccgatagacgtgaaaccaggtgcatgtggaaccgttgtaagaaatgcagagatgaagattgtcgatcctgaaaccggtcattctttacccagaaaccaatccggtgaaatttgcataagaggcgaccagattatgaaaggttatctaaatgatggagaggctacagagagaaccatagacaaagatggttggttgcacacaggtgacatcggttacatcgacgatgacgatgagttattcatcgttgacaggctcaaggaattgatcaaatacaaaggatttcaagtggctccagctgaacttgaagcccttcttctcactcatcctaagatctctgatgctgctgttgttccaatgaaggatgaagccgcgggagaggtacctgttgcatttgtggtcatatcaaatggttataccgacacaaccgaggatgaaattaagcagtttatctccaaacaggtggtgttttacaaaagaataaaccgagtattcttcattgatgcaattcccaagtcaccgtcaggcaaaatcttgcgcaaggatctaagagcaaagatagcggcaagtgttccaaaatgaaattaaaccaaacccatcatgttatggtgttattatacgatgcccgcataagcaagcttcaacacaaaaggaagaggcgctgttgcttgatcccgctagcttttacgtattttctcttacgtaacaaccgtgtataagttaccagtgtgattttcttacagaactatcttctgtaaagatttcaatctgtcaaggactttcaccttctataatatcaaattatattctttttttataaaattatatttaattgcaaaaa

SEQ ID NO: 647 - DNA, 548 bp, Glycine max
atgcatttgtggtcatatcaaatggttataccgacacaacccaggatgaaattaagcagtttatctccaaacaggtggtgttttacaaaagaataaaccgagtattcttcattgatgcaattcccaagtcaccgtcaggcaaaatcttgcgcaaggatctaagagcaaagctaacagcaactgttccaacatgaaattaaagcagacccacccttcacccatcatatcgtcatatagatgttgtacgatgcccgctcgagcttcagcagaaaaggaagaggcgctgttgcttcatcgctagcttttacgtattttctcgtacgtaacaaccatgtataactaattacgagtgtgattttcttacatggaaaatattcaatctgtcaaggactttcaccttcatcaaattatatttttatttataaaaatatatttaattgcattgtttaatctattgtgattgagatagcaaaattgaccgtcaggttgaaaaaaaattccttttgccaattgaagtgataaacctaattgtcattttgttcgttatt

SEQ ID NO: 648 - DNA, 1878 bp, Glycine max
ttccacgtgtccgcccacgcgtccgcagatatcccaatctccaaccacctccctctccactcctactgcttccagaacctctcccaatttgcccaccgccctggcctcatcgtcggacccgcctccaaaaccttgacctacgccgacacccacctcatttccagcaagatcgccgccggattgtccaacctgggaatcctcaagggcgacgtcgtcatgatcctcctccagaactccgccgatttcgtcttctccttcctcgccatctccatgattggcgccgtcgccaccaccgccaacccgttctacaccgccccggagatcttcaagcagttcaccgtctccaaggcgaagttgatcataacacaggcaatgtacgtggacaagctccgcaaccacgacggcgcgaagctcggcgaggacttcaaggtcgtaaccgtcgacgatccgccggagaattgcctccacttctctgtcctctcggaggcgaacgagagcgacgtgccagaggtggagatccacccggacgacgcggtggcgatgccgttctcctccggcacgacgggtttacctaaaggagtgattctcacgcacaagagtttaaccacgagtgtggcgcagcaagttgacggagagaaccctaacctctacctcaccaccgaggacgtgctcctctgcgtgcttccgctctttcacatattctcgctcaacagtgtgctattgtgcgccctcagggcggggagtgcagttttgttgatgcagaagttcgagatcgggacactgctggagctgatacagcggcaccgagtgtcggtggcgatggtggtgcccccgctggtgttggcgttggcaaagaatccgatggtggcggattttgacctgagttcaatacggttagtgctgtccggagctgctcccttggggaaggagctcgaggaggctctccggaacaggatgcctcaagctgttttgggacagggttacgggatgacagaagcagggccagtgctgtccatgtgcttgggctttgcaaagcaacctttccaaacaaaatcaggctcttgtggtaccgtagtcagaaatgcagaactcaaggttgttgaccctgaaactggtcgttctcttggctacaatcaacccggtgaaatttgcatccgagggcaacagatcatgaaaggatatctgaacgatgaggcagcgacagcatcgaccatagattcagagggttggcttcacaccggtgatgttggctacgtagatgatgatgacgaaattttcattgttgacagggtgaaggaactcatcaaatataaaggcttccaggtgccccctgcagaacttgaagggcttcttgtaagccatccctccattgcagatgcagctgttgtcccacaaaaggatgttgctgctggtgaagttcctgttgccttcgttgtgagatcaaacggctttgatctaactgaagaggctgtaaaagagtttatagctaaacaggtagtgttttacaaaagactgcacaaagtttattttgttcatgctattcccaagtctccatcaggaaagatattaaggaaagacctcagagcaaagctagaaaccgccgccactcagacgccttaaaggctagctagaacctgcccccttttttcttggcaatattttccttattttttatttatattattggtttcacacgtgtaatttacgtatcaatgcttcacggcattaagccaatccgagaagcagttgcacttacgtataatcattgtatttttatgtccattgtccaccaccatgtctgtattgtggttttagatcactaattttcgagaccttgtattattcgtgttatcaaatcctttctattcttcacttttt

SEQ ID NO: 649 - DNA, 1677 bp, Glycine max
  unsure (1)..(1677): unsure at all n locations
taagcaaatgggcactgtttttagatcacgcccaccactccacatcgtataggtgctgaacacaaaaccaatatacagaaatttttttctcactaaagccaaataaaagaaacataagatgatgtacaatgctaaaagtatatgtttgtcgttaattagataccctgctaacttaaccatattcaaacggcaaaccaaattgatatttaacataaaaactgaacggaaagtgctttttcatttgatactgaaccagattaccagcccatcagtgttcttctaactttgtcaacaatctgagttcttgcttggcttctggtcaatggaaagtcacggctttcctccaacaaaaatctatacacttcccattgacgttcttgtgttgaatgtctaacaacttcagccgagaaaatgcctactcccaacgcttttaaagtcaacgtaacatcatagaatacacggggtctcccctttccactcagctccacaggattagcaaccagaagttctgtgtctggaccccggttcactatcgtcacccgcaacggatgaagcatctcttcttttaagcatgaacacaaggttttctggctttcaggatctatgatctttttcccatcgttgtgctggacaaacaagtctatattccgaaagcctttcacacttgaagaaaatcgaccaaaagcaaccttaatatcagagtctttagaaatcctcataatgtcataacacaagcccttctgatcaacgcattgtatctgaagcagggtatgaactgggctcagtgagttatccacagtaacagtaggtgtcttcagtgttgtcatatcttggctgagaggatgcaaagacaacttgtctaacagctcagaactaaataactcttcagcaaaagctggtggaagagaagaaaacccctgcaaatgtccgtattcaggcccagccaactgaagttcactggagatacacctctctcctaaagcatccatcagatattcacatacataatcttgcctctttttggtgtgaagcaattccatcccatcagtgataaagaacatgtctaacacccttccatctggggttggcatcgctttgactctctgaataataagttcaaggttgcacaggatttcattaatatcatgtagcaatcctttttgatcaacacaccaaaccttcaacaggtaaatcggaggcggtgaaggactagtggagtgctgattgaagtgataggaaagcaaacatgaagggcaagctgaaaggagccgagtcttcaaactctcccaatcaacgttgagcgatgctggatgtgcaagaacccaatagacgatgtagcaccatcttccatccgtggaaatatcagcacgggtaatgcggagaccgaactcgaggatgattctgcaaagatcacagccgagaccagccttgtcggggcaattgacggtgacgatgcagggctcattgtgatccttcccttgctggatcacaacgacgtcgtcccatggaatacccatgactttgaagtgtggtgggtttaagggacgatggccaccgggaagaacattgccggagcgcaaaatggtggctccggacaacggggttggtgactgggtgaggaacaaaatcggacgcgtgggcggacacaagggcgcccgcgtgggcggncgcgtgggc

SEQ ID NO: 650 - DNA, 3089 bp, Glycine max
  unsure (1)..(3089): unsure at all n locations
cgaagagagtgattcagtgtagggttttgtagaataagaagaaaattgttttgttgatgatggattctccagaaccttccaagaacaacaatggcagttcttcttctgcctccactctcaacaacaacaacaacaacgatgatgctccttcatcggaatcccctcaagttcaagaatccccctttcttagatttgtgaagactttatctccaattcccaccaaggcttctcatatgacacaaggttgtgtagggctcagttctccaccccttgtgttcaagtctccacgtattagtcaccgtgaaacacagctcacgaaaaggccccaaggcactcagtcattcggtggagtaatacctcaaagtgtaaatgaaggcaacaggcttggtgaagctcctggagattccaggacatcaaattctcatcagtcactgccagagaggtttataaatgacactcagcaggtttttgacttcaagaatgatgaaaatactcaatactacagctctccatcatgcattgataaatatttggtggatcctggggatattgatcaaatgtattcagctgaccaggatgtgcaacaacaatctacagatgcagctgaaacatcactaagtgaccaaactcattcaaagaataatatattaaattttgacaggaaagatggtcctggtgataaagtggaagaatctttgcctttgtctgaagattttaacaaggttcatctagaaaaggcagcatatggtgaagaacctgaaaagatggaaggggagaaaaatgatgttgaatggtcttctcaagagcctgcaaagttagagtccattttagctgcagatggttttgataaacgatatagtcatggtccacttcctcaggatgttaaaggatgtgaagattacaatgagatggtgccaacctcacatgtaactgcagagaatatcttgcaagatggttccgaggctactctaaagcaccatggcattcgtagacgctgtctacaatttggtgaagctgcctcaaatgctcttggaagaaatgtgaaactgaatgcagcttcacacacaatgataacagtcaagccgtctgaacttgtcacttccttgtgtcctcggcgaggtagtggaaacttcccttcaacaagtcccaagccatcaggtatcgggttgcatttaaatagcatcataaatgctattccaattgatcaggctgctactactggtgtgagattatcagatagttcacaggggatgaaatccacatcttcaataaggttacaaagaatggagaatgtgaagagatccatactttcatctaatgtcgatgggcgatcattagttgatacaagaactgagagccatgaaattgatgatacagtggctacagatactggaaattctgaggacctcaaccaacctcctagcccctgcaagaaaaagaagaaaacatcagtcactgctgatgacaatggctgtaaacggtgcaactgtaagaagagtaaatgtttaaaactttactgtgattgttttgctgctggaacgtactgtaccgacccttgtgcttgccaaggctgcttaaacagaccagaatatgtagagacagttgtcgagactaaacaacaaattgaatcccgtaatccaattgcatttgctcccaagattgttcagcctaccactgatatttcttcacatatggatgatgaaaatctgacaacaccgtcatcggcaaggcacaaaagaggttgcaattgcaaaaggtcaatgtgtctgaaaaaatattgtgaatgttatcaggctaatgttggatgctctagtggatgccgatgtgagggatgtaagaatgtccatggcaagaaagaagattatgttgcatttggacatacttcgagtaaagaaagggtgagcagtattgttgaagaaggatcagactgcacttttcacaataaactggaaatggtggctagcaagactgtttatgatctacactgcctctcacctataacgccatcattgcaatgttctgaccaaggcaaggaggatgctaaatccagagttatttctggaaactatctaccatcccctgaatctgatgtcaatatgttggcatcttgtacaaactacactaagtcttctgaaaatttgcatggcagtgaagcacttctggacacaaatgagatgttgggaaataccccctatgattcccaaattgaatgcagcgatgctgccttacttcagcttactcctctgcctaatcctgagcagtctggcaccttcatcattctcatctgtacccaaatgagtgtgcaaagattactcactccagactctcccatggatgtattcgccagttacctggcggttctcttcgttggcgtagttctcccgcttaccccgagcactagagtaggtgaagcacaatatttacagtgttctgaatcagatagcaagctctttgacattctagaaaatgaaacccctgatatactgaaggaagcttcaactcctatgacgtctgtcaaagtaaattccccaacccaaaaacgagtttctcctccccagagttgtcatattgggattggatcaagctcctctggaggattgagaagtggccggaaatttatattgaaagctgtacctactttcccttcattgtctccttgcattaattccaaaagcaatggcgatgaggattcttgtaacagtccgagcaagtcacctctcaaagctaatgagtgccctccaacgtgagagttaacaagcagaagattgtgtaatctgttgccgacatcttgtctgtaaaggttgccgggggtgacttattatgtgaacaatcaacgcgaaattgaagttatggctgcatcttcctccaatgtctattcctttacattcttagcaatttggaattttagtttagtagttttttcttggaacagattcttactcttgtttttttctaccctctcgtggtatgaaatgctattgcacaatcttaaatggcgtctcatccttcaaggtaagcttgcttttttaattaggttaaataaataaaacaccactcattgagtacnnnnnnnnnnnnnnnnnnnnnnn

SEQ ID NO: 651 - DNA, 2053 bp, Glycine max
ctcgagccgaatcggctcgagttcagcactgctgcgtttcccatttttttttttctagaacagtaaatttcaagtaaaccaaaaaaccataaatagtagtattaattaccaatattgtctttttctttttattttttttaaatactctgaaaccgcgaaaccctagctgaaccctctttcccttctccggccaccgcaatggacttcactacgccgccgatcgaggacggtttcaccgccgagaagctcttcacgcagggcttctcctacacatacgatgacgtcatctttctcccccactacatcgacttcgctgccgacgtcgtggacctctccacgcgcctcacgcgccgccttccccttgccgtgccgtttgttgcctctccgatggacaccgtgtcggagtccgccatggcctccgccatggcctccctcggcggcatcgccgtcgtccactccaacgtccccgccgccgtccaggcggccatcctccgcaaagcgaagtcccgccgcgtccccatcctctccgaccccgccttcgccgcaccttccgccgtcgtggagcacgatgacgccttcggggcctcccccttcctactcgtcaccgacactggcacctccgtcgggaaactcctcggctatgtcgcgaggagcgactggacgaatcaaaccgacaagggcttgagagtcggcgactacatggcgccgcctcccaagccagcgccatggaacgccgacctaaacaaaattaatgaaatatttgagagtgagaaaagtggtgctgtggctttggagagggatggtgaggtggttgatttggtggtgagggaggaggtggagagggttaggggatacccaaagctggtggcgccggctacagtgggggcggacggggagtttatggtgggggctgcggtggggacgagggaggacgataaggagaggttggagcatttggtgaaggctgggttgaatgttgtggtgttggatagttctcaagggaactcaatttatcagttggagatggtgaagtatgtgaagagggtgtaccctgagcttgatgtgattggggggaatgttgtgactatgtaccaggctgagaatctgattcaggctggggttgatgggttgagggttggaatggggtctgggtccatttgtactactcaggaggtttgtgctgtggggcgtggtcaggcaactgctgtttacaaggtctcgtccattgcttataaaagtggtgttcctgtgattgctgatggtggcatctcaaactctggtcatattgttaaggctttgtcattgggagcgtcaactgttatgatgggaagcttcttagctggtagccttgaggctcctggggcttatgtatatcagaatggtcaacgtgtcaaaaagtatagaggaatgggttccctagaagctatgactaaagggagtgatgcaaggtacttgggtgatacagcaaagctaaaaattgctcagggggttgttggagctgttaaagataagggttctgtcttgaatttcataccatacaccttgcaagcagtcaggcaagggtttcaggatatcggtgcctcctctctacagtctgctcatgaccttctaagatccagggagttaagactggaggtccggagtggagcagcacaggttgaaggtggagttcatgggctggtttcttatgaaaagaaatacttttgaagtatgaaaccatccaaaatcataagcggtgctataatcccttgctgcagttcagcataaaagaagggaacacactgttattggttagtggcaacttgttgctactctgtcaagcgaattgaagtttataccaatagaacatcgtgggaattttcttccctgaggttctgaaggaagaacactgatttcgtggtttttttttgttttttttcatctccattagactttgtcaaatgtgtcatagactttcctaaatatattttgcatgttttctgtcctgttaagtaaatgttactgtcatagtactgcaaaaatttcctcctatcttatgaaaataagacttcat

SEQ ID NO: 652 - DNA, 397 bp, Glycine max
  unsure (1)..(397): unsure at all n locations
gcactgctgcattttccattcttttccagaacagtaaaattcatagtaaaccaaaagccataaatagtagtattaatttataatttattactatttattattattgtcattttctgttctatatttttttaaataccctgaaaccgcgaaaccctagctgaaccctgtttcccttctccggccaccgtaatggatttcactccgccgccgatcgaggacggtttcaccgccgagaaactcttcacgcagggcttctcctacacatacgatgacgtcatctttctcccccactacatcgacttcgctgccgacgtcgtggacctctccacgcgcctcacgcgccgncttccccttgccgtgccgtttgttgcctctccgatggacaccgtgtcggagt

SEQ ID NO: 653 - DNA, 962 bp, Glycine max
tctgtttctccctcactctgatccacttctacttcaacatcttaagaaagcgaatcgattccgattcctctcaatggctgcggaacccaaggaatcgccttccaacaaccccggtctccatacaactcctgacgaagccaccaagggttacatcatgcaacaaactatgtttagaatcaaagaccctaaagtgagcctcgatttttattctcgagtcttgggcatgtctttgcttaagagattggattttccggagatgaagttcagcctgtacttcatgggctatgagaatacggcagaagctccaagtaatccaattgataaagtggtttggaccttttctcagaaggctacaattgaactgacacataattggggtactgaaagcgatccagagttcaaagggtaccacaatggcaattctgaacctcgtggctttggacacattggtgtaactgttgatgacacatacaaggcatgtgaaagatttcagaatctgggagttgagtttgttaagaaaccagaagatgggaaaatgaaaggtatagcatttattaaagatcctgatggatactggattgaaatctttgatcggaaaacaataggaaatgtaacacaaactgctgcttaggcttaagataacaccttaaggcccggcttttctgtgatatgttcttatctctgatttaattgggtcttttgctcgtatgtggagtatgtaggatttttcgagcttcacctgaatgaataatttgttgtcaaaccagaacgaaaaacaagattgtgttgtgaatcttgtattttttttttctttaatttcaaaaacctagccaaaaaaaaaaaaaaaaacttgattctactcttccattggatgtgtgatacgaatgagtacttctaaaaactttacagcagtaataatatgtgagaggagaatcctaaccagtgtcctcactttctatggt

SEQ ID NO: 654 - DNA, 438 bp, Glycine max
gtaaaggtaacgttctctctctgtttttcaatcactcatataaataccaaatccactaatgacagtcaccgcttccttacaccgtctttctcgtcttcgattcatcgccaaaccccaacctttcctatctcctcattcaacaccatcccatttttctctcacccccaaaaccaagaaaccgaatcgattccgattccgattccgatcaatggctgcggaacccaaggaatcgccttccaacaaccccggtcttcacactacccctgacgaagccaccaagggttacatcatgcaacaaactatgttcagaatcaaggaccccaaagtgagccttgatttttattctcgcgtcttgggcatgtctttgcttaagagattggattttccggagatgaagttcagcctgtacttcatgggctatgaggatacaacagaagc

SEQ ID NO: 655 - DNA, 2425 bp, Glycine max
gatcatggcagctatttctaggctaaaggctaaaattctatctattctgctgagtttgtgtgaagcagaaagcatttcttatcttgatgaagtagccagctcagtacgaagtttagatttggctaaatctgttgcattagaggtttttgacttgttgaagaaagcctttggaagagatcctgggcatctcactgctgacagaagtttcccaatggggtttgtacagctcaatgcaatgcgtctagctgacatcttctctgatgattcaaactttcgatcttacatgatactttgttttactaaagtcctgacagcaataatttcgctctcccatggagattttttatcctgttggtgttcatctaatctctcagagacggaggaggatgcaagtattgaatatgatatatttgctgcagttggatggattttggataatacttcaccggatgtaagaaatgctacaaatttggaattcaacctaatccctaacagcatgcctaaggcttcttatgcacatcataggacatcattatttgtcaagttctttgcaaatcttcactgttttgttcccaacatatgcgaagagcaggagaggaacctttttgttctcaaggtcatggagtgcttgcaaatggatctatctaatttgctgcctgggttttcttttgcttctgatgctcctaaagctgccattgctagcaagaacctccgatcgttgttaagtcatgcagaatctctgattcctaacttcttaaatgtggaggatgtgcaacttttaagagtgttttttggcgaattacaatcactatttacatctactggatttggggaaaatcaagtccaagatagcaaatttgatgagtcattatcttgggataagctttctaaattcaacatgaatgaacattatcaggaggcacagagtgcagggggatgcccgccatctttaactggaaaagaacatgccagtcttaataagaagggtggtaacttcaaggaaggaatgtctgagaattctgcatttccagacatggaccaacataataccagagctgaagaaacaaatcaaggcaagggcctaaataagcaaaatcaggtagatgataaaggcatacctggtaaaactgcatccggaggagctagagaaatggacaaggatgctcagaatgttgaaacaagtggttcagatagtagttctgcaaaaggaaagaatgttgttgataatatggataatggagagctttcaaaatcaaatgagcgtcttaaaagaactgcagttgaggaaaatccagaggatgaaaagattgaactttcacaaaggagaaaacgaaaacgaacaataatgaatgataaacaggtgatgctgattgagagggcactcaaagatgagcctgatatgcagcgaaatgcagcttcacttcaatcatgggctgataaattaagtgggcatggttccgaggttacatcttcacagcttaaaaattggttgaacaatcgaaaagctaggctagctcgcacagctagggatgttaaagcagcagcaggtgatgacaatcctgtcccagagaagcagagagggccagtacctgggtcctatgactcacctggcagtccaggtgatgtatcacatgttgcgagaatagcttcaggtgataataaatccgagctggctcggtttgttgatattggttctccagaatttggtcattgcaatgcaggtcaaaatgttgtgcttgttggtgtacgaggagacgaaattggcagaggaaaagtgtttcaggtgcacggtaagtggtatggtaagagcttggaggaattatctgcccatgttgtggatattagtgagctcaaagctgataaaggcatgcggctaccctatccatcagaagccactggcaacacatttgcagaggctgaaactaagttaggagtcatgagggtgttatggggttcaaacagagtttttgcattgcgacctgaatgagtttaatcatgcttcattagctgcaatctgttgtcaatcttccatgtggttccttgaatgcgcatgttctttatttccataaacattagctgaagggatagcagattggttggctgagaagaacaataccgaatagaaagagtccagtttgttagccaaggatgggtagaaactagaagaggacacttatgttgaaaacaaggttgattcagcaatggaagatggtttagtttaggatataacccaagagccataatcggcagcaaaaatgttggtagggtcttgtacaatatgtggaactgtggtaacgagtgataagatctgaatttaacttacagggaacaagtgaacgtaaattctgtttagattaaaaaaaaaaaatcttgctcatttcatgtcaacagttataatatcataagaaaattaaaagattagatt

SEQ ID NO: 656 - DNA, 1087 bp, Glycine max
tctcgagccgaatcggctcgagtacggctagaagatgacagaagggggatgcaaaagttagtagtagtgaagaaaatgaaagtccttgttttctttgttgctatagttctagcagcatggcattgccatggctcagaccatgaccatgaccatggccacacctaccaaattttccctctgagaatgaaaactggccatggtggccactacattccggaggtatcatgccaaagttggaggcttggtgtggaagcacacaacgtcattgactggaaaaccgttcctcaagattgcgagggatatattgggaactacatgcttggcgaacaatatagatcagactccaaaatagttaaccaacaagcttatttctatgctaaaaccctcaatatcactgccaaaaccgcatgggtgttcgacatagatgagactacactctctaatctcccttactatgctgaccatggatttggggtggagttatataatgaaacatcgtttaataaatgggttgaccttggcgaggcaccggcactgccagagagtctcaaattgtacaagaaactgttgtctcttggcatcaagattgtattcataacaggaagaccactggatcaaaaggctgtaactgctaccaacttaaataaagcttgctggatatcacacatgggaaaagttaattaccaagaatacatctgaataccatggtaagacagcagttacatacaaatctactgagagaaagaagctggaggaaaaaggatacaaaatcattggaaacattggagaccaatggagcgatctattaggaaccaacacaggcgataggacctttaagttgcctgatcccatgtactacattagttgaggtctctagggctcttactagcatgttcctatgaataaaataagatgcatgttgtaataatggagagatcgacttaaaccaaggggcactcgttaattaattgctatgtatgtgactttgtgtgagacaaaaggtcacgtggtaagagactgtacaagcacaacggtgttttatctttcgtggttttaataaatcatgtgtgctataattccgttaatt

SEQ ID NO: 657 - DNA, 543 bp, Glycine max
tagaagacagaagggggaagctggaaaagttagaagtagtgaagaaaatgaaagtcattgttttcttcgttgctataataattttaggtgcagaatggcaatgcaatgggtcagagcatgagcatgagcatgagcatgagcatggccacagctaccaaattttccctctgcgaatgaaaaccggccccggtggccactacattccggaggtatcgtgcaaaagttggaggcttggtgtggaagcacacaacgtcattgactggagaaccattcctcaagattgcgagggatatataggaaactacatgcttggccaccaatatagatcagactccaaaacagtttgccgtgaagcttatttttatgctaaaaccatcaacatcactgccaaaaccacatgggtgtttgatgtagatgagactacgctctctaatctcccttactatgctgaccatggatttggtgcaagctcgacagattctgtgattaattagtcagatttattttcttaaacctgactatttctacgtatcccaatttttt

SEQ ID NO: 658 - DNA, 523 bp, Glycine max
caggaagaccactgtatcaacaggctgtaactgctaccaacttaaagcttgctggatactacaaatgggaaaagttaattaccaaggatacagataaatacaatggtaagacagcagttacatacaaatcaactgagaggcagaagctggaggaaaatggatacaacatcattggaaacattggagaccaatggagcgatatattaggaaccaacacaggccttaggacctttaagttgcctgatcccatgtactacattagttgaggtctctaggctcttatgaatgaaatgagatatgtagtaattaataatggagagacttaacctaggggcactcgttattgctatgtttcatatgtatgtgactttgtgtgagacagtagttacgtgagactgcacaagcacaacttaacgttgttttatcaaaaaaaaaaaataaaaacaaaaaaataaaaaaccatacaaaggacacataaacactcagaatatattgaacaaaaccaacgaaaactccatactat

SEQ ID NO: 659 - DNA, 916 bp, Glycine max
ccgcgcgtccgaacacctccgagaacgtctccagaaggggacacttactagtagtaagcatggagtcctcaaagatctatgcttacctcttcctctgcatgatctttctctcttccgccactcccattctcggttgtggctactgtggcaaaccccccaaaaagcacaagcctggtaaaacaccaaagacacccaaaacacccgttgttaagccaccagtcaccatccctcccattaatgttcctcccgttgttcttccaccaatagtgaagcccccaggtattctccctccaattccaattattaacccaccaaccacaccagggaagggagggaacactccatgcccaccaccaaagtctcctgcgcaggctacgtgccccattgacacgctcaaacttggtgcctgtgtggatcttcttggagggttggttcacattggtttgggtgaccctgttgcgaaccagtgctgccccgtgcttcaaggcctggttgagcttgaagctgcggtgtgtctttgcaccactcttaagctgaagcttctcaacctcaacatttatgtcccacttgcccttcagcttcttgtggcttgtggcaagtctcctcctcctggttacacctgctccctctaaaccagtgaaaggattgaggaaaatatggtcaaaatcgacatgagaggatgtcgagccacactatctctcttctgtcctgattggaactgctgttgtttgttttgctattatttgaaaaaccatttgtttttaattgagattgttgcatgtatgttttaatcctaggcaagtagcagcaaagatgcttctctgtgacatgttcaattattaatttatatgaattgcgctttaatttgttgaataaaacaggttcgtacgcgtctctctagttgtatagcatttgc

SEQ ID NO: 660 - DNA, 1025 bp, Glycine max
gcgtgcctaagctaggactccacctcacgcaattactactttctctctctttgtaacttgtaagcatggagtcctcaaagatctatgcttacctcttcctttgcatgctcttcctctcctccgccactcccattctcggttgtggctactgtggcaaaccccccaaaaagcacaagcctggtaaaacaccaaagacacccacagtacccgttgttaagccaccagtcacaatccctcccattgttaagccaccagtcacaatccctcccattgttaatccaccagtcacaatccctcccattgttaatccaccagtcacaatccctcccattgttaatccaccagtgacagttccacccgttgtgcttccaccaatagtgaagcccccgggttttctccctccaattcttaacccaccaagtacaccaacaccgtcgccggggaagggagggaacactccatgtccaccaccaaagtctcctgcacaggctacatgccccattgacacgctcaaactaggtgcttgtgtggatcttcttggtggcttggttcacattggcttgggagaccctgttgcgaaccagtgctgccccgtgcttcaaggcctggttgagcttgaagctgcggtgtgtctttgcaccactcttaagctgaagcttctcaacctcaacatttatgtcccacttgcccttcagcttcgtgtggcttgtggcaagtctcctcctcctggttacacctgctccctctaaaccagtgaaaggattgaggaaaatatggtcaaaatcgacatgagaggatgtcgagccacactatctctcttctgtcctgattggaactgctgttgtttgttttgctattatttgaaaaaccaatttgtttttaattgagattgttgcatgtatgttttaatcctaggcaagtagcagcaaagatgcttctctgtgacaaaaaaaaaaaaaagggggggccgccgataagagacctcttcgcccggggatttatttcgggacgggtacctgaagggg

SEQ ID NO: 661 - DNA, 908 bp, Glycine max
gggcgaaggcaagatgaagggtacagtttttggttggtttaaccggttaagcaacctaagcctgtactttcacgggccaggctcccttttctttcacctcggaggcacacacacacacacacacacttaatctggaaccatatataaaatagaggttaagcaacaagcacagtaactggaacgggttaagtaagtttgtgctgcgagagagaggggttccgttctgggatatggtgtaaactaaaattctgaatgtgtacacttgtaaggtgtgccagcttgcaaaacttggcatctgcctttttgagtgtagctagccccatcttcacgtgatctgctcttaaccccttttgttttcttctcctcggttctattcttattcctatatatgcaccccatcctcagtctccattctcacacttactagtactttctctctctttgtaacttgtaagcatggagtcctcaaagatctatgcttacctcttcctttgcatgctcttcctctcctccgccactcccattctcggttgtggctactgtggcaaaccccccaaaaagcacaagcctggtaaaacaccaaagacacccacagtacccgttgttaagccaccagtcacaatccctcccattgttaatccaccagtcacaatccctcccattgttaatccaccagtgacagttccacccgttgtgcttccaccaatagtgaagcccccgggttttctccctccaattcttaacccaccaagtacaccaacaccgtcgccggggaagggagggaacactccatgtccaccaccaaagtctcctgcacaggctacatgccccattgacacgctcaaactaggtgcttgtgtggatcttcttggtggcttggttcacattggcttgggagaccctgttgc

SEQ ID NO: 662 - DNA, 594 bp, Glycine max
  unsure (1)..(594): unsure at all n locations
acgaggggtacccaatttatctgtggacactgcctatcagaccaacattgttgcttaattagtccatgcatcttgagcaccatgagaatgagattgtgtataaaataaattatcatgtgctgtgtgttgtgcaagtactaccttctctagctagattgctagagctagaatttcaacctacctatgtgtactgataagatctgcttccctacttaaagagagcatcatcctgtgatcagtgtgcttccttgaagtctttttgcatattttatctgctgcttctgaatttgatgaactacctgtgcgtcataatgaggaaaaatacaatgaagcactgtctgagaaagttaaatatccagtggataagaaccgtctagatgaccctcacatcaaagcacttcttctatttcaggctcatttttctcaattggagttaccaattagtgactatgtcacagacttgaaatcagtattagatcagagtatacgcgtaattcaggccatgattgatatttgtgcaaacagtgggtggctttcaagctcaattacttgcatgcatcttctgcanatggtcatgcagggtttgtggtttga

SEQ ID NO: 663 - DNA, 559 bp, Glycine max
cggctcgagctaactctcattaattgcaagaatggcacttcgttgcttggtgatgtgccctttctgttctcttcactcttggtcttgcgagagaaagccatgccagagacgaagatttttggcatgctgtttggccaaacactcccattccaagttcattgcgagatcttctaaagcctggccctgcaagttagttttgtgaattatcaactctagattcttgattatgggtttatatcttcctagaatgctcaaggttaccccataattggaatggaaaggttgaacgaagaaagagaataaaataaaaagaaaagaagaagaataactatatataaattaccttttattttaaacactccagcacctttttttatctatttatatcatatgatatcataaattctattatatttatattgttctatttatttactcaacttttagtatttaataatataataagtatttatcaaatattttcctttaacaaaacgaagaaagaaaatatatttttatatatgaaaaataaattttgtacatctcttttggtgtttat

SEQ ID NO: 664 - DNA, 628 bp, Glycine max
accgattgctagaatggaatttcgatgctcagtcatctcttttaccattctcttctctctggctcttgcaggagagagccatgtccatgcatcgctacctgaggaagattattgggaagctgtttggccaaacactcccattcccactgcactgcgagagcttctaaagcctctccctgcaggtttattaattttatgagaattatcaattctagattattgattcttgaacatgggttcttatcttcctatcatgccttggcaagtttaaaacgttaattaggtttggctgtgtaacaaagtagcaaagacaaaatttaaaaggaaaatgcttaaagtattaaatgttagagtgcaagacatgcgaaaagtctgcttacaaattcattcataagggtgacttacccagttatataaacccttatcatgttcattaactatttaatgtgggactcttaacacgccccctcgagtcagggctcacctcaaagtgaggactgacggcactatccaccaaactaccggactctgatgccatattaaatgtttgagtacaacaaagacatccgaaatatccccttaaaaatcggttcataagggagtgacctaccagctatataaacactta

SEQ ID NO: 665 - DNA, 1052 bp, Glycine max
cccacgcgtccgcttttttttcctatctcgttgatttttatttgttttttgagagggcgtacctacctcagtgattgcaagatggaatctcggaacctagtcttttccgtcttcgttctcttctctcttgcacttgcaggagaaagccatgctcgtgcatggctatccgacgaaaattattggcaagctgtttggccaaacactcccattcctgacagtctgcaagaccttctgaagcctggccaatctggtgttgaaaacgttaatcgtctgcccatgatgaaaattgaggacacacaatatccgacaaactttttcttcaataaagagctatatccagggaaaacaatgaatgttgaattcagcaagcatccccttacacaaccatacggtgttctcttttgggtacatggtcgtgacgttaaagacattgaaaaagagggatacactcctgagcagctatgtttaagggaaggacccaagggagaagacaaatactgtgcagaatccttggaaaccctaatgaactttgtcatttcaaagcttggaaagaacgttcaggcattttcaagctccttcttgagtaagcaagaggaatacacagtggagggagtgcataatcttggaggcaaagcagtgatgtgtcataggttgaatttccaaaaggctgtgttttactgccatgaagtccatgaaacaacagctttcatggttccattgcttgccggtgatggaaccaaaactcaggcacttgctgtttgccactttgatacttcggtcttgaactttgaattgttccgtcaaataatgaaagttgatcctggaactaaccctctttgccatttccttggaaacaagtccattttgtgggttcccaatttagccacggagggtgcctctcagactaaaattgttgtttaattagtgcatcttgggcaccatcagaaatgtgtgtattataaataaattataatgtgatgttgtgtatttctgccagccggcactaacttttctagcttagagctggaaatggagctacgaacctacgtgta

SEQ ID NO: 666 - DNA, 1239 bp, Glycine max
ggcaaacttcactatatatatctctgtccctgcaagagtttgagtcacaaattttccactcttcctcaccgattgctagaatgtgaatttcgatgctcagtcatggtctggtaccattctcttctctgcttgctcttgcaggagagagccatgtccatggcatctcatacatatagaagattattgggaagctgttcggccagaacactcccattcccactggactgggagagcttctaaaggctcataacagcacgagttgcagatcgatgaactcccctaagcaaatttgatgattcacagtaccccaaaacatttcttctataaaggaagaccttcatcccaggcaaaacaatgaaagtacaattcaccgggcgtccgtgatgcacaaccttaagggggaatataaatggttaacggatattaaagacacctctaaagaaggggatatagttttgaagagatatgcattcaggaaagaagccgtttgagggagaagaagaagttttgtgcaaaatcccttgggaacagtaattggttttgccatttcaaagctgggaaagaacagtggaagtactttcaagttcctttgtcaataagcaagatcaatacactgtggaaggagtgccagattcttggagacaaagacatctatgtgctatggactaactttcagaactacagtattttactgacataaagtccgtgaaacaacagctttcatgggttccattggtggcttgctgatggaaccaaaactcaggccacttggctgtttgccactcaagatacttctggacatgaatcatcacatgcttcatgaactcatgggagactgatcctggaactaaccctggtttgccatttccttggaagcaaggccattttatgggtacccaatttatctatggacactgcctatcagactaacaggtggtgcttaattaggccatgcatctgcatgttgggcaccataagattgtatataaacatcaattatggtgtgtctgtgtatgttgtgcaagacctggacattcaacctttctacgtacgtgtgctgttagaatacagtgtgctttgataatgctttgatgaatatgcagtgtgaatttttaagtctattattttcttttattctcttttcataaggactttagttcttccaccgtgcttgattgttgtctcgattataactaaatttccgttatttaagaacaatagttgacattgtggaaaaac

SEQ ID NO: 667 - DNA, 1318 bp, Glycine max
ccggaatccggtcgaccacgcgtccgcccacccgtccgccaacccgtccgcccacgcgttcgcccacgcgtccgcccacgcgtgcgctcattaattgcaagaatggcacttcgttagcttggtgatgtcccttacctgttctctttcacttcttggtggttgcgatgagaaagccatgtccagagaccgaagattttttggcatggctgtttggtccaaacacttcccattccaaggttcattgcggagatcttctaaagcctgtgccctgcgatgtggtgaaatcggatgatcaccctatgcaacattgaagaccacacagtatcccgaaaacccttcttctataaagaagaccttcatccagggcaaaacaatggaagtacaatttcagcaagcctcccctttcaacaaccacatggggtgttggtacatggttaaaaggaaattaaagacacttcctaaagaaaggatatagttttgaacgagctatgcatcaagaaagaagccattgagggagaaagagaagttttgtgcaaaatcctggggaacagtaatatggttttgccatttcaaagctggggaaagaacattcaaagtactttcaagtttcctttgtcaataagcaagaccaatacactgtggaaggagttgcagaatctttggagacaaagcagtgatgtgtcataggctaaaatttcagaactgcagtattttactgccatgaagtccgtgaaacaacagctttcatgggtccattggtggcttggtgattgaaccaaaaactccagccctttgctattttgccactcaaataccttctgggaaggaatcatccaatgcttcatcaacttatgggaccgtcgatccttggactaaccctgattgccattacccttggaagcaaggccattttatgggtacccaatttatctgtggacactgccctatcagaccaacattgttgcttaattagtccatgcatcttgagcaccatgagaatgagattgtgtataaaataaattatcatgtgctgtgtgttgtgcaagtactaccttctctagctagattgctagagctagaatttcaacctacctattgtgtactgactaagatctgcttccctacttaaagagagcatcatcctgtgatcagtgtgcttcgtattctctctctctatatatatatggtaaaaagtggttatctcgtgccaaaaaaaaaaaaaaaaaaaaaaaaaaaaaaaaagggggggccccccaataaaggccctcccccccggggatttttttccgggcggggacctggggggggaacatttttc

SEQ ID NO: 668 - DNA, 1427 bp, Glycine max
gatagcaaaagctaccaaccaacattgttatatacacacacatagcaagcagaacaaacatatcagaagtgttgaggatagcacaaagaaaagtaaacactgccacagcaagagttttcaaatggcagagggaaaaggtagagtttgtgtcactggaggcactgggttccttggttcatggatcatcaagagactccttgaagatggatatgctgttaataccactataagatctgacccaggacgcaagagagatgttagcttcctcacaaacctacctggtgcatcagaaaagcttaaaattttcaacgctgatctcagcgacccagagagttttggtccagcagttgagggttgtgttggaatttttcacactgccaccccaattgattttgcggtgaacgagccagaggaagtggtgaccaaaagagccattgatggagcactaggcatattgaaagcaggcctaaaagcaaagactgtgaagagggttgtttacacttctagcgcctccactgtttccttcagcagcctagaagagaaagatgtggtggatgagagtgtttggagtgatgtggatttgctcaggagtgtgaagccttttagttggtcctatgcagtttcaaaggtgttgtcagagaaggcagtgcttgaatttggagaacagaatgggttggaagttgcaactgttattgctccttttattgttggtcgttttgtttgtcccaagcttcctgactctattgaaaaagctctgcttatggtgttgggcaaaaaggaagaaattggtgtcattcgttaccatatggtacatgtggatgatgtggctagagcacatatcttcctgcttgagcatcctaacccaaaagggagatataattgctcaccattcattgtgcctattgaagagattgctgaaattatttcagccaaatacccagaatatcaaataccagcactagaagaggtgaaggaaattaaaggtgccaagttaccacatttaacctcccagaaacttgtggatgcggttttgagttcaagtatatgcgttgaggacatatttacggatgcaattgaatgctgcaaggaaaagggttacctttaatcgattttagccacgaagttgaaaaaataaaattgtcgaagatgattgttagttcgtactattttcagatccctggcaatgatgcctcttgacatgtactccatttaatgcatgatgttttcttaataaattgaccagggaaataattcttttggtttgtctgaataaaaaacaatgtaattttcaccttttccccttatctccctaacctcggtgagtatttattaattttgtcttttgttaatggttaatcttctgtgagagagtttaacttattattcacagagtttaacttattatttttttagtaaatctttctttc

SEQ ID NO: 669 - DNA, 460 bp, Glycine max
tgcttgagcatcctaatccaaaagggaggtataactgctcaccattcattgtacccattgaagagatgggtgaacttctttcagccaaatacccggaatttcaactaccaacagtagacgagctgaagggaattaaaggtgccaagcaaccacatttaacctccaagaaacttgtggatgctggttttgagttcaagtatagcttggaggacatgtttcaggatgcaattgaatgctgcaaggaaaagggttatctttaatcgattttagccatgaggttgacaaagtaaaattgacgcagatggttgttagtttgaactatttcagatcgatggcaatcatggctcatgacatatatgcacatcttggaatgcatgatgttactcgtaatagatgaatgagggaaataatcttcttcgtttgtctaaatgctaaataaaccctttaatatttccgtttt

SEQ ID NO: 670 - DNA, 1456 bp, Glycine max
cgtgtgtctcatgaaccattacataaactctttacctttgtttattcataactactatatatgtatatagaccctccttaaacccttttcttcaacagccccccaaaaacaagtctttttctgaaaacttaatttctctctgattttctccctcacttttatttctctctttctggattattctctctgtgtagattgtggcgtgttctcgatgatgatgatgatgagccgcagcggcgccaaccgggtagcgaacaccgcaatgtttgtggcgaagggtttaagcggcgaagttggtggtttaagagcattatatggcggtggtgtgaggagtgagagcactttggctttgtcagagaaggaaaagattgagaagaaggttggtttgtcttctgctggtgggaacaaagaagaaaaagtgatcgtaagttattggggcattcaaccctccaagatcacaaaaaaagatggcacagaatggaagtggaattgctttagcccatgggggacatacaaagcagatctttccatcgatctggagaagcacatgcctccaaccacgtttctggacaaaatggctttttggactgtcaaggttctcagataccccaccgatgtgtttttccagaggcgatatggatgccgagcaatgatgctagaaacagtggctgcagtccctgggatggtagcaggcatgctacttcactgcaaatccctaagaagatttgagcacagtggtggttggttcaaagcactgctggaagaagcagagaacgagcgtatgcacctaatgaccttcatggaagtggcaaagccaaagtggtatgagcgtgcactagtgataactgtgcaaggtgttttcttcaatgcatacttcttggggtatttgttgtcacctaaattcgcacaccgcatgtttggttacctggaggaggaagcaattcactcctacacagagttccttaaggagctggacaagggcaatatcgaaaatgtgccggctccagccattgccattgactactggcagctcccaccaggctccactttaagggatgttgtcatggttgtaagagctgatgaggcacaccatcgtgatgtcaaccactttgcatcggacattcactatcaagggcgagagttacgagaggctgctgctccaattggttatcactaatttttttttgcctcttctgatgttggagtgtggaaatttaagacaaattttggtgtcattttgactagaataaataaaattgctcgtgacagactatacagtgtttttttttttgttatgtctcatgatgccaatgtaaatagggtgtggtggagtctttatttgttcaaagtcatatttggagtatttgtaattctactgtgcactctgtatggtacgagtggagttatatgatatctcacacacctccaagatatagtttttgcctactaaaaaaaa

SEQ ID NO: 671 - DNA, 1097 bp, Glycine max
actcgagccgaagtccctttgtgattcctgggaaactcatttcattagagtgagagagagagagagagagagagagaggtatcacagtgaaacgaagaagccctaactacgcacgcactcattcgtgagaaaactcaatattcgtcgctcatggcactctcttctcgtctcttttccaaatccaaattgatctatggcagtcaaatacttctacaaaaggagcatgctattccagttcgtcactttgctaaagagtctgcccctcctgcccttaagggagacgagatgctgaagaacatttttgtggaggtgaagaacaaatttgagaccgccataggaatattaaagaaggagaaaatcaccattgacccagaagatccagctgctgtttctcattatgcaaaggtcatgaaaacaattagagagaaggcaagcttattgtcggagtcccaagacatactatccaccattgaaattgagacacaggatattccagatgctcggacctatcttctgactttgaaggaaataagagtcaagaaaggtcttacagatgatcttggtgcagaggctctgatgatagatgcattggacaaaattgaaaaggatttaaaaaaacctttactgagaaatgataagaaaggaatggaccttctcttggcagagtttgataagattaataagaaaattggaattcgaaaggaagatctaccaaagtatgaagaggagctagaacttaaagtagccaaagcacaactggaggagctgaagaaggatgctctcgaggcaatggaaactcaaaagaaaagggaggaattcaaggatgagcctgaatcggtcgatgtcaaaactttggacatcagaaacttcctttaaaatgtcttcaggatgtttttgcacacactagaaattattgcatttggataatgatgaagctgtgttcaataagtagacaccactggtttgaagtgcaacattgatgccagtttgaatattcttgagttttttcaagatcttttttgtatttcagattccatgttaaactggaagttgaggcgatcaaattttctaaatttttcttctgtcatgtttcccaa

SEQ ID NO: 672 - DNA, 630 bp, Glycine max
  unsure (1)..(630): unsure at all n locations
gcgtccgaagcaagaagacgacatctcttcacagaagaaaaaagagaagaagatgggtttgaagaacaacatggtggtgctaaaggtgtgtttggtgctacttttccttgtggggggtactactagtgccaacttgaggctgagtaagcttggcctgctcatgaaaagtgatcatcatcaacactcaaatgatgatgagtcttcaaaaccatgctgtgatcaatgcgcatgcacaaagtcaaaccctcctcaatgccgctgttcagatatgaggctgaattcgtgccattcagcttgcaaatcttgtatttgcgcattatcgtatcctgcacagtgtttttgtgttgacataaccgatttctgctatgaaccttgcaaacccagtgaggatgacaaggaaaactactaatgaacaagtgttatgcatgtaagctctctctccaacggacaaagccccctttatgctttgtttgttatgtaaggaatgactaaataaacttggaataaaacttcctctcttttcgtggcccataatttgctttctgcaaatctgggtcttcttcattccaaaaaaaaaaaaaaataaaatnctctatccctnctnatactttatcttagtgtctctctttc

SEQ ID NO: 673 - DNA, 573 bp, Glycine max
agaagatgggtttgaagaacaacatggtggtgctaaaagtgtgtttggtgctacttttccttgtggggggtactactagtgccaacttgaggctgagtaagcttggcctgctcatgaaaagtgatcatcatcaacactcaaatgatgatgagtcttcaaaaccatgctgtgatcaatgcgcatgcacaaagtcaaaccctcctcaatgccgctgttcaaatatgaggctgaattcgtgcaatcaagcttgcaaaccttgaatttcccaataaccttacccggaaaatggttttgggttgacataaaccgattcctgccatgaaccttgcaagcccagtgaggaggaccaggaaaactactaatgaacaagtgttatgcatgtaagctctctctccaatgggcaaagccccctttaggctttgtttgttatgtaaggaatgactaaataaacatggaataaaacttcctctcttttcgtggcccataatttgctttctgcaaatctgggtcttctttattccaatggttattaatttggccaattttataaactcgcaataaaatataaaaata

SEQ ID NO: 674 - DNA, 1528 bp, Glycine max
attcgagcgaatcggctaatattcaaaccttgctctatactacacagtacacacactagaagaataatggcttccatcctccactactttttagccctctctctttcttgctcttttcttttcttcttatccgactcagtcacccctacaaaaccaataaaccttgttgttctacccgttcaaaatgatggttccacagggctccattgggccaacctccaaaaaagaacccctctaatgcaagtaccagtcctggtggacctcaatggaaatcacttgtgggttaactgtgagcagcagtactcatccaaaacgtaccaagcacccttctgccactccacccaatgctctagagccaacacccaccaatgcctcagttgccccgcggcatcaaggccagggtgccacaaaaacacgtgtggcctcatgtccactaatcccatcacccaacaaaccggtttaggtgaactaggagaagacgttcttgcaatccacgccacacaagggtcgacccaacaacttggcccattggtcacagtcccacaattcctcttttcttgtgcaccttccttccttgttcaaaagggtcttcctagaaacactcaaggtgtggctgggttaggccatgcaccaatttctcttccaaaccaactcgcttcccactttggcctacaacgccaattcaccacttgcctttctcgctaccctacttcaaagggtgctataatattcggggatgcacctaacaacatgcgacagtttcaaaaccaagatattttccacgatttggccttcaccccattaaccatcaccctgcagggagagtacaacgtgagagtcaactcaataagaatcaaccagcacagtgtgttcccactgaacaagatatcatccaccatcgtagggtcgacctctggaggaaccatgattagcacctcaactcctcacatggttctccagcaatccgtgtaccaggctttcactcaggtgtttgctcagcagctaccaaagcaagcacaggtgaaatctgtggcaccatttgggttatgcttcaactccaacaagatcaatgcatatcctagcgtggaccttgtgatggacaagcccaatggtcctgtttggagaatctctggtgaggacttgatggtgcaggcacaacctggggtcacgtgtttgggtgttatgaatggaggaatgcaacctagagctgaaattaccttaggggcacgtcagttggaagagaacctggtggtgttcgatcttgcaaggtcaagggttgggtttagcacctcatcactgcactcgcatggagtcaaatgtgctgacctcttcaactttgccaatgcatgatgagccaagatcgcgagactttttataatatgcttatttataattaagcaagcatctactacatgttatggttaataaaagtaataatgtaagaataaagactttgaactaaataataatatgaacgattctctttcgttgttcaatgagaaattaatgttgttggcggccgcggcca

SEQ ID NO: 675 - DNA, 626 bp, Glycine max
ttctcgaccgaatccgctcgacgtgctcgaacacacacacacacacactaagaataatggcttctatcctccactactttttagccctctctctttctttctctttccttttcttcttatccgactccgtccccattccccaacaccacactaaccctacaaaacctataaaccttctggttctacccgttcaaaatgatgcttccacagggctccattgggccaacctccaaaaaaggacccctctaatgcaagtaccagtcctggtggacctcaatggaaaccacttgtgggttaactgtgagcaacactactcatccaaaacataccaagcacccttctgccactccacccaatgctccagagccaacactcaccaatgcctcagttgcccagcggcatcaaggccagggtgccacaaaaacacgtgtggcctcatgtccaccaaccccatcacccaacaaaccggtttgggtgaactaggccaagatgtgcttgcaatccacgccactcaaggctccacccaacaacttggtccattggtcacagtccctcagttcctcttttcttgtgcaccttccttccttcttcaaaagggtctccgctagaacattcaaggagtggct

SEQ ID NO: 676 - DNA, 441 bp, Glycine max
cttttgctctatagtacacagtcacaatatcacccacagtttctcttcatgctccactactttttagccctctctctttcttgctcttttcttttcttcttatccgactcagtcacccctacaaaaccaataaaccttgttgttctacccgttcaaaatgatggttccacagggctccattgggccaacctccaaaaaagaacccctctaatgcaagtaccagtcctggtggacctcaatggaaatcacttgtgggttaactgtgagcagcagtactcatccaaaacgtaccaagcacccttctgccactccacccaatgcaatccagcccacacaagggcggaccggacaacttggcccattggtcacagtcccacaattcctcttttcttgtgcacgttccttccttgttcaaaagggtcttcctagaaacactcaagg

SEQ ID NO: 677 - DNA, 1603 bp, Glycine max
acccacgcgtccggcaaaatacctatacagtagcaatgatctctttcacagtctttgttttccttacactcttgttcactttgtcattggttaaacagctgagaaagcctactgcagaaaagagaagactactacctccaggaccaaggaaactacccttcattggcaacctccaccagcttggtacgttgccacatcaatcccttcaatacctttcaaataagcatggacctctcatgttcttgcagctgggttcaatacccaccttggtagtttcctctgctgagatggccagagagattttcaaaaaccatgactcagttttctctggcaggccttcgctatacgctgcaaaccgtttaggatacggttcaaccgtgagttttgcaccgtacggtgagtactggagggaaatgaggaagatcatgatcttggagctgctgagtccgaaaagggttcaatcgtttgaagctgtgaggtttgaagaagtcaaacttctgcttcagaccatagctctttctcatggtcctgttaacttgagtgaacttaccctttcgttgaccaacaacattgtgtgtcgtattgctcttggtaaaaggaacaggagcggggcagatgatgcaaataaggtttctgaaatgcttaaagagacacaggcgatgctgggaggattctttcccgttgacttttttccacggttggggtggctcaacaagtttagtggccttgaaaataggcttgagaagattttcagagaaatggataacttttatgaccaagtgattaaggagcatattgctgataactcttctgagaggtcaggagcagaacatgaagatgtagtcgatgtgcttcttcgagttcagaaggatccaaatcaagcaattgccatcactgatgaccaaatcaagggtgtactcgtggacatctttgtagcgggaactgacactgcttcggccacgataatatggataatgtctgagcttattaggaatccaaaggcaatgaaaagagcacaagaagaggtaagagatcttgtcacaggaaaagagatggtagaagaaattgatctctcaaagctcttgtacatcaagtcagttgttaaagaggtattaagactccatccccctgcgccattacttgttccaagagagattacagagaattgcacgatcaaagggtttgaaatcccagccaaaacaagggttcttgttaatgcaaaatcaatagcaatggatccatgttgttgggagaatccaaatgagttcttacctgagaggttcctagttagtccaatagattttaaaggacaacactttgagatgttgccgtttggggttggtcgaaggggttgtcctggagtgaactttgccatgccagttgttgagttagcacttgcaaatcttctgtttcgttttgactgggaactgcctcttggacttggaatacaagacttggatatggaagaagcaattggtataaccatacacaaaaaagctcatctttggctgaaagccactcccttttgcgagtagtacttttttccataattaaaaatggtcatgtttatgtcatagaaaataataaatatgatttggttatt

SEQ ID NO: 678 - DNA, 1754 bp, Glycine max
ccgatttaattagttctattttcccaataatggatcttcaacttctctacttcacatccatattctccattttcattttcatgttcatgacacacaaaatagtaaccaaaaaatctaactccactccaagtttaccaccaggaccatggaagctacctatcatagggaacatgcacaaccttgttggctctccacttccccatcatagactaagagatttgtcagcaaaatatggatccttgatgcatctgaagcttggagaggtttcaacaattgtggtttcatcaccagaatatgccaaggaggtgatgaaaacacatgatcatatctttgcatctaggccttatgtccttgctgcggagataatggactatgatttcaaaggtgtagctttcacaccttatggtgattactggagacagctaaggaagatctttgcattggagctattaagttccaaacgtgtccaatctttccaaccaatcagagaggaagtgctcacaagtttcatcaaaaggatggctacaatagaaggatcacaggttaacgttaccaaagaagtgatttcaactgtctttacaataactgcaaggacagcccttggcagcaagagcaggcaccatcagaagctaatatcggtggtaaccgaagccgcaaagatttctggaggttttgacttgggagatttgtacccttctgtgaaatttcttcagcacatgtctggcttgaagcctaagcttgagaagttgcatcaacaagctgaccagataatgcaaaacatcatcaatgagcatagagaggctaagtcaagtgccacaggagaccagggagaggaggaagttcttttagatgtgctcttgaagaaggagtttggcttaagtgatgaaagtatcaaggctgtgatctgggatatctttggaggtggaagtgatacatcatctgctaccataacatgggcaatggcagagatgattaaaaatccaagaacaatggaaaaggtacaaactgaggtaagaagggtatttgataaagaaggaaggcctaatggaagtggcacagagaatctaaaatatttgaaatctgttgtgagtgagacattaagattacaccctccagctcctcttttgcttccaagagaatgtggacaagcctgtgagataaacgggtatcatatacctgcgaaaagcagggtcatagtgaatgcttgggcaattggaagagatccaaggctgtggactgaggctgagaggttttatcctgaaaggttcattgaaagatctattgaatacaaaagcaatagttttgagttcatcccatttggtgctggaaggagaatgtgcccaggcctcacatttggcttgagcaatgttgagtatgtgcttgcaatgttgatgtatcattttgattggaaacttcccaaaggaacgaaaaatgaagatttgggcatgactgagatatttggaataacagtggctcggaaagatgatttatatctcattcccaaaactgttcataattagcctactccatagactctacacgtgacctgtggacctactctccatttggcaatgtatgttttggacttttggtatagaataaaggatgtccagcattgctgttatatctctaaagttttaaacttttaaatgattgattttccccttctctagaatcataaatactttaaggacttgaagtaattattctcaatattcctatctaataataaattaccttcatttcatgtcatc

SEQ ID NO: 679 - DNA, 465 bp, Glycine max
ctgctggaggttttgacttgggagatttgtacccttctgctgaatggcttcaacacatctcagggttgaagcctaagattgagaagtatcatcaacaagccgaccggataatgcaaaacatcgtcaatgaacatagagaggctaagtcaagtgccacacacggccagggtgaagaagtggcggatgatcttgtagacgtgctcatgaaggaggagtttggcttaagcgacaatagtatcaaggctgtgattttggatatgtttggaggtggaactcagacatcatctactaccataacatgggcaatggcagagatgataaaaaatccaagagtaatgaaaaaggtacatgctgaggtaagagaggtatttggtggtaaagtaggacaccccgatgaaagtgacatggagaatctaaaatatttgaaatctgttgtgaaagagacattgagactgcaccctcctg

SEQ ID NO: 680 - DNA, 1757 bp, Glycine max
acaaaagtgaaaatggagttagttctaaacagcacaacaattggagttggagttgtttctctgatcctcctcttgtacttgtttttgcgtggtggttcatggaagagtggggaagagggtcctccaacagttgcaggtgcatggccaataattggtcacctcccattgttgcttggttcaaagacacctcataaaacattgggtgacttggctgacaagtatggacccatattctcgatcaagattggtgccaaaaacgcagtggttgttagcaactgggaaatggctaaagaatgctacaccacaaacgacatcgccgtttcctccctccccgatcttatctccgctaacctcttgtgctacaaccgatccatgatagtcgtagcaccctacggtccctattggcgccaacttcgaaagattttaatgtctgagttcctatctccttcccgagtagagcaactacaccatgttcgcgtctctgaagttcaaagttccatcacggagctcttccgtgattggcgtagcaataagaatgtccagtctggctttgccactgtggagttgaagcaatggttctctcttcttgtcttcaacatgattctgcggatggtctgtgggaagcgctatttcagcgcttctacttcggatgatgagaaggcaaacagatgcgttaaggctgtggatgagttcgtgcgtctcgccgccaccttcaccgtgggagatgccattccttatcttagatggtttgactttggtggctatgagaatgatatgagagaaactgggaaggaattggacgagattattggcgagtggttagatgagcatcgacaaaaaagaaaaatgggtgagaacgttcaagacctcatgagcgtgttgctttccttgcttgaaggaaaaactattgagggcatgaatgttgatattgtcatcaaatcctttgtattgacagtaattcaagcaggaactgaggcaagcattactactcttatatgggcaacaagtttgatattgaataatcctagtgtactagaaaaacttaaagcagaactagacatccaagttggaaaagagagatacatatgtgagtctgatttaagtaagttaacatatcttcaagctgtagtcaaagaaactttaagattgtaccctccagctcctctctcaagacctcgtgagtttgaagaggattgcactataggtggctacactgtcaaaaagggaactcgtctaattacaaatctttccaagatccacacagatcataacgtttggtcaaatccattagagtttaaaccagaaaggttccttacgactgataaagatatagacatgaagggtcaacattttcagctattaccatttggaggtggtaggaggatttgtcctggaataaacttaggccttcaaacagttcgtttgacacttgctagttttttgcattcctttgaaatcttaaatccatcaactgagcctcttgatatgactgaagtctttagagcaaccaacactaaagccactccacttgagattcttattaaaccacgtctatctcctagttgttatgaaagtatctaatatttaattatgtgttagttgtgtgaacctgctgtctgtattttttatttctaaactatatgtaatctgttttaaaataagcctggtttgccttgtaagctattccaaaactatgtattttgttgcttaatctcatttgaataaacatgaagcaagagattgatggtgttttcttc

SEQ ID NO: 681 - DNA, 379 bp, Glycine max
catcattttgaactattcccccttggtggtggtaaaagagggttgtcctggaatttcttttagccctcaattggttcatttcactcttgccaatccttttcattcttttgaattcttaaatccatccaatgaacccattgatatgactgaaacccttggattaaccgacactaaagcccctccccttgagattcttattaaacctcgattatctcctagttgttatgtatgaaagcatgtgattcttgtgtgttagcggtgtgtttaaagtccattgttgaattatatgtgatcttctttacttaaataaggtttggctaataggccattatcttctttaactgtctctcacatccatttcaaccatgcattgttgagg

SEQ ID NO: 682 - DNA, 1800 bp, Glycine max
cccacgcgtccgcggacgcgtgggaatgaactcctgagaccagtagttgagtctagttgtttcccttaaagccatggaatattctccattgtccattgttattaccttctttgtgttcttgctcttgcattggctagttaaaacttacaagcaaaaatcgagtcacaagttgccccctggcccatggaggttacccatcattggtaacctccatcagctagcattagcagcttcacttcctgatcaagctctccaaaaacttgtccgcaaatatggacctctcatgcacctccaactaggtgaaatttcaacacttgttgtgtcctcccccaagatggctatggagatgatgaaaacccatgatgttcattttgtgcagaggccccaacttctggctccacaatttatggtctatggggcaacagatattgcttttgctccatacggtgattattggaggcaaatcaggaaaatatgtaccttggagcttctaagtgccaagagggtccaatctttctctcatatcagacaagatgagaacaaaaaactcatacaatcaattcactcatccgcaggctcaccaatcgatcttagtgggaaacttttctctttgttgggaaccactgtttcaagggcagcgtttggaaaagaaaatgatgaccaagatgagtttatgtctttggtcagaaaagctataacaatgacaggaggatttgaagtggatgacatgtttccttcattgaaaccgttgcatttactgacccgacagaaggccaaagtggagcatgttcaccagcgggcagacaaaatcttagaagacattctcagaaagcatatggaaaaacgaacaagagtaaaagaaggcaacggtagtgaagcggagcaagaagatcttgttgatgttcttttgagactcaaagaaagtggcagcctcgaggttccaatgacgatggagaacatcaaagctgtgatatggaacatatttgctgctggaactgatacctcagcatcaacattggagtgggcaatgtcagaaatgatgaaaaatccaaaagtgaaggagaaggcacaagctgaattaagacaaatattcaaaggaaaggaaataatacgtgaaactgatctagaagaacttagttacctgaagtcagtgatcaaagaaacgttgaggttacaccctccttctcagttgattcctagagagtgcatcatatcaaccaacattgatgggtacgaaataccaataaaaactaaagtcatgataaacacatgggcaattggaagagatccccagtattggagtgatgcagataggtttatcccagagagattcaatgacagttctatcgatttcaaaggaaatagctttgagtatataccttttggggcaggaaggagaatgtgtccaggcatgacatttggattggctagcattacgcttccattagctttattactctatcattttaattgggaactcccaaataagatgaaacctgaggatttggatatggatgaacacttcggaatgacagttgcaagaaaaaacaagttgtttttgattcccactgtttatgaagcttcatgatacacgtattttttttataggccaaaagagatttaataagaataccagtggtactcaaaataaaaaaaagttatggagaataaagaaacttaaaacacacacaaatataatatttgtagtgtctgttgacacctccacactttggggagtctagtttgatgtaattttttgtttgttattgaatctataatctataatatttgattatcatt

SEQ ID NO: 683 - DNA, 2142 bp, Glycine max
cttcatttaatttgaactaaagagattcctgtctctgaaggtcaaggtgaatttgtgcactacattataaataagcacccctctcggtgttgaattcggcacgagatttcctctgaaaattattcatagcatatttcaaaccacactcaaaaggcttcccttcctgacttggatttgattgatttcattacattgctacactatattctttttattggtgaattgctatttgctacactatattttaaggacaattatacatagactatatggggttgatggctgcgaaccaaactcaattgttgtctaagatggccatcggagatggacatggtgaagcatccccatattttgatggatggaaggcttatgatgaaaacccctttcatcccaaagagaatcctaacggggttattcaaatgggtcttgctgagaatcagcttacttctgatttggttgaagattggatactgaataacccagaggcctccatttgcacaccagaaggaataaatgatttcagggccatagctaactttcaggattatcatggtctgcccgagttcagaaatgctgtggctaaattcatgggtagaacaagaggaaacagagtcacgtttgatcctgaccgtattgtcatgagcggtggagcaactggagcacacgaagtcactaccttttgtttggcagaccctggtgacgcatttttggtgcccattccttattatccaggttttgaccgggatttgaggtggagaacaggaattaaacttgttccagttatgtgcgatagctcaaacaatttcaagttgacaaagcaagcattggaagatgcgtatgagaaggccaaagaggataatataagagtaaagggcttgctcatcaccaatccatcaaacccattaggcacagtcatggacagaaacacactaagaaccgtgatgagcttcatcaacgagaagcgtatccaccttgtatctgatgaaatatactctgcaacagtttttagccaccccagtttcataagcattgctgagatattagaggaagacacagacatcgaatgtgaccgcaacctcgttcacattgtttatagtctttcaaaggatatggggttccctggcttcagagttggcatcatatactcttacaatgatgctgtggtccattgtgcacgcaaaatgtcaagctttggattggtgtcaacacagactcagtatcttttagcatcaatgctaaatgatgatgagtttgtggaaagttttctggtagagagtgcaaaaaggctggcacaaaggcatagagttttcactggggggttggccaaagttggcataaagtgcttgcaaagcaatgctggtctctttgtgtggatggatttaaggcaacttctcaagaagccaacgcttgactctgaaatggagctttggagagtgatcattgatgaggttaagatcaatgtttcacctggctcttctttccattgcactgagccagggtggtttagggtgtgctatgccaacatggatgatatggctgtgcaaattgcattgcaaagaattcgaaccttcgtgcttcaaaacaaggaggtcatggttcctaacaagaaacattgctggcacagtaacttgaggttgagcctcaaaaccagaaggtttgatgatatcatgatgtcacctcactcccctatacctcagtcccctttggttaaagccacaatttgagttggcatatttctctgaaccctctagaagaagtaactgatatatgatgattatttggctctttgacttgttgttttggcaaggtacataaagtgcttgagtttgttatttttaacagcagtaacaggcaatgcctgatattgtttttgttaccaaaaaaaaaaaaaaaaaaccttgcgtcatagaacttgtgctactggaaacatgccccttcaatttttaggggcattttttttttcttttttcacttaccaaataatgggttcaaggtgaaaaaagtttataatgtttgtaaggttattggtttattagaagagtccagaagaagtctgtattcttatactgcaattgtaaggtcgatgatcaataaattgttaatagagggtcttcaatacccaccctcttttctttttgagac

SEQ ID NO: 684 - DNA, 4522 bp, Glycine max
atagctttgggagcaaaaactgcacaaagctcctatggaccccccaagttttcctttcaaagcaattttgtgctttgctttgattgtattccttttccttccctacacttcaatttgtagcaagaggaatttgttgtttcctacttagcttgattatttatcaatggcttctttggtatcttcaccatttactcttccaagctctaaacctgaccagcttcattctcttgcccagaagcatctttatcttcattctttccttcccaagaaagccaattacaatggtagctcaaaatcctctctgagagtgaaatgtgctgtcattggcaatggcctattcacccaaaccacccaagaagttcgtagaatagttccagagaatgaccaaaacttgccaacagttaaaattgtgtatgtggtccttgaggctcagtaccaatcatccatcactgctgcagtgatagctctcaacagcaaaaggaagcatgcttcctttgaggttgtgggttacttggttgaggagcttcgtgacgcggcgacgtacaagaccttctgcaaggacttggaggatgctaacatcttcattggttccttgatttttgtggaggagctcgccctcaagatcaaggctgcagtggagaaagaaagggacaggcttgatgcagttttggtgttcccatcaatgcctgaagtgatgaggctcaacaagttgggttctttcagcatgtcacagcttgggcagtctaagagcccctttttccagctgttcaagagaaagaagcctcagtctgctggctttgctgatagcatgttgaagcttgtgaggacattgccaaaggttttgaagtatttgccaagtgataaagctcaggatgccaggctctacatactgagtctgcagttttggcttggggggtctcctgataacttgcagaatttcctgaaaatgatttctggatcgtatattccggcgctgaaagggacgaagatcgagtattcggagccggttttgtacttggatgtggggatttggcaccctttggctccttgtatgtatgatgatgtcaaggagtatttgaattggtatggaaccagaagggatgcaaatgagaagctgaagagtccgaatgcaccggtcattggtttggttttgcagaggagtcatattgtgactggtgatgatgggcactatgtggctgtgatcatggagctggaggctagaggggctaaggtcattcccatttttgccggcggacttgacttttcagggccagtggagaagttcttcattgatccgattacaaagaaaccgtttgtgaattctgtggtttccctcactggctttgctcttgttggaggccctgcaaggcaggaccatccaagggcggtcgaggctttgatgaaacttgatgttccttacattgttgccctgccactggtgttccagacaacagaagaatggctcaacagtactcttggtctgcatccaattcaggttgctcttcaagttgctctgccagagctagatggaggcatggagccaattgttttcgctggtcgagatcctaaaacaggaaaatctcatgctcttcataagagagtggaacagctctgcatcagggcaatcagatgggctgaattgaaaagaaaatcaaaggaagagaagaaactagcaatcactgtcttcagtttccctccagacaaaggaaacgtgggaactgctgcctatctcaatgtcttcgcctccatatactcagttatgaaagaactaaaaaaagatggttataatgttgacggccttccagagactccagaagctttgattgaagatgtaattcatgacaaagaagctcaattcagcagcccaaatctgaatattgcttacaaaatgagtgtccgcgagtaccaaaatttgactccctatgccacagcactggaggagaattggggaaaaccccctggcaatctgaatgcagatggagagaatcttttggtatatgggaaacagtatggtaatgtctttataggtgttcagcctacatttggctatgaaggggatccaatgaggctgcttttctccaaatctgcaagccctcatcatggatttgcagcatattattcctttgttgagaaaatcttcaaagctgatgctgtacttcattttgggacacatggttcccttgaattcatgcctggaaaacaggtggggatgagtgatgtatgttaccctgacagtctgattgggaatattccaaatgtatattactatgctgcaaacaacccttctgaggccaccattgccaagcgcaggagttatgcaaacaccattagctatctgactcctccagcggaaaatgctgggctatacaaaggtcttaagcagttaagtgagctcatctcctcatatcagtccctcaaagacaccggccgtggggcacaaattgtgagttcaattatcagcacagctaaacaatgcaatcttgacaaggatgtgactctgccagatgagggtgaggagatccctcttaaagagcgtgaccttgtggttggaaaggtgtattccaagatcatggagattgagtctcgtctgttaccttgtgggcttcatgtcattggtgagcctccctcagccttggaagcagttgctacactggtcaacattgctgcacttgatcgtcctgaagatggtatttcttctcttccatcaatattagctgacactgtaggaagagatatagaagatgtgtatagaggaagtaacaaaggaatattgaaggatgtagagcttcttaggcaaataaccgaggcatcacgtggagcaatcactgcctttgtggagcggactactaataataagggtcaagttgttgatgtagctgataagcttagctcaatccttggatttggcataaatgagccatggatacagtacttgtcaaacaccaaattttaccgagctgatagggaaaaacttagaaccttgtttgtgttcctgggagaatgtttgaagttggttgtggctgataatgaagtgggaagtttaaaacaagccttggaaggtaaatatgtggagccagggcctggtggtgacccaataagaaatccaaaagtcttgccaacaggaaagaatattcatgccctggacccacaagctattcctacaactgcagcgatgcagagtgccaaaatagtggtagataggttgattgagaggcagaaagctgagaatgggggaaaatatcctgagacaattgcacttgtattgtggggaactgataatattaaaacatatggtgaatccctggctcaagtcttgtggatgattggtgtggaaccagtggctgatacctttggcagggtaaaccgggtggaacctgtaagtcttgaagagcttggaaggcctaggattgatgttgttgttaattgctcaggagtgtttagagaccttttcatcaatcagatgaatcttctggatagagcagtgaagatggttgctgaattagatgaaccagcagagcaaaactatgtaaaaaagcatgcatcagaacaagctcaagcccttggagttgaagttcgagaggcagcaacaaggatcttctccaatgcttctggctcctactcctcaaacataaacttggctgtggagaattcttcatggaatgatgagaagcagctccaggacatgtatcttagcagaaagtcttttgcttttgattctgatgcccctggtgctggcatgactgagaaaagaaaagtcttcgagatggctctgagcacagcagatgccacattccaaaatcttgattcatcagaaatttccctcactgacgtcagtcattactttgactcagacccgactaatctggttcaaaatctaaggaaagatgggaagaagcctagtgcatacattgctgatacaaccacagccaatgctcaggtacgtacactttctgagacggttagacttgacgcaagaaccaagctgttgaatccaaagtggtatgaaggcatgttgtctactggatatgagggtgtacgcgagatcgagaagagactcaccaatacagtggggtggagtgcaacttcaggccaagttgataactgggtgtatgaagaagccaacacaactttcattcaagatgagcaaatgctgaacaagctcatgaacactaatccaaactccttcaggaaactagtgcagacattcttggaagccaatggacgtggttattgggaaacttcagaagataatattgaaaagctcaggcagttgtattcagaagtggaagacaaaattgaaggcattgatcgctgaatttaatagctattcttgaaaagaacattacaacagtgaagagaagagcagcatcctttcaaatgtgatttttgttttccttttctcattttttgagatcaagtctcgtttgtgcagttctgaatttcaacccctgcgaacaaataaaggtttaagttcataattgatttcttagattattttcttgaatgaaaagaatttggtaat

SEQ ID NO: 685 - DNA, 587 bp, Glycine max
gaaccccaagtggtatgaaggcatgctgtctactggatacgagggtgttcgcgagatagagaagaggctcactaacacagttggatggagtgcaacctcaggccaagtcgacaactgggtgtatgtagaagccaacacaactttcattcaagatgtggaaatgttgaagaagctaatgaacacaaatccaaactcctttaggaagctggtgcagacattcttggaagccaatggacgcggttactgggagacttcagaagacaacattgacaagctcaggcagttgtactcagaagtggaagacaaaatagaaggcattgatcgctgaagtgataattgagatgaacagcagaaacattaactgttttttaactatgccttctttgtatctggagcttctttcccacactgaattgaaagttgttgatggtgtccttttaatgtgattttgctcctctctcctttttccctgctgtaattttaatcattttcagggatcatgttcctttgtgcagttgcaaactccaaaccaacatgtcaaatattgctctcagtttaatatatagagaatgattcccttgtatcac

SEQ ID NO: 686 - DNA, 286 bp, Glycine max
aacaaacacaaattttatgtgattagtcgcggtatttaaaatagaatatgaaagtagacatataaaaaagagaaggagaatgtttgaagttgattgtggctgataatgaagtgggtcgtttaaaaccagccttggaaggtacatatgtggagccagggcctggtggtgacccaataagcaatccacaagtcttgccagcaggcaagcctattcatgccctggaccctcaatctattcctacaactgcagcgatgcagagtgccacaatagtggtagataggctgat

SEQ ID NO: 687 - DNA, 495 bp, Glycine max
gacacttgacaggaaaaacagtaaagatgggtttgaagaacaacatggtggtgctaaaggtgtgtttcttggttcttttccttgtgggggttactaatgcacgcatggaactgaacctcttcaaaagtgatcactcatcaagtgatgatgagtcttcaaaaccatgctgtgatctctgcatgtgcacagcctcaatgccacctcaatgccattgtgcagatattaggttgaattcatgtcactcagcttgtgatcgctgtgcgtgcacacgctcgatgccaggccagtgtcgttgccttgacaccaccgacttctgctacaaaccttgcaagtccagtgatgaagatgatgactaggaattaatcaacaaaagctctctcaaatgaacaaagcctttagcttcttgtctttatgtaagggagacaaataaacatgcaataaaaagctcagtggccagtaatttgcttttggcaaattttggtcattttattcaag

SEQ ID NO: 688 - DNA, 1868 bp, Glycine max
  unsure (1)..(1868): unsure at all n locations
ctcgagccgcaacccaaactgaaccaaatcatcacacacacatactaagaagcaacaattcttctacaatggatctcctccttctggaaaagaccctcataggtctcttcctcgctgcggtggtcgccatcgccgtctccaccctccgcggccggaaattcaagctcccaccgggcccactccccgtcccaatcttcggcaactggctccaagtcggcgacgacctcaaccaccgcaacctcaccgatttggccaaaaaattcggtgacatcttcctcctccgcatggggcagcgcaacctcgtcgtggtttcttcccctgagctcgccaaagaggttctccacacgcagggcgtggagttcggctcccgcacccgcaacgtcgtcttcgacatcttcaccggaaagggccaagacatggtcttcaccgtctacggcgagcactggcgcaaaatgcgccgcatcatgaccgtccccttcttcaccaacaaggttgtgcaacaataccgccatggatgggaatcggaggctgccgccgtcgtcgaggacgtcaagaaaaaccccgacgccgccgtctccggcaccgtcatccgccgccgccttcagctcatgatgtacaacaacatgtaccgcataatgttcgaccggaggttcgagagcgaggaggatcccatcttccagaggctaagagccttgaacggagagaggagtcgcttggcgcagagctttgagtataactatggtgattttattcccatcttgagacccttcttgaagggttacttgaagatttgcaaggaggtgaaggagacgaggttgaagcttttcaaggattacttcgttgacgagaggaagaagcttggaagcaccaagagcaccaacaacaataatgaacttaaatgcgctattgaccacattttggatgcccagagaaaaggcgagatcaacgaagacaacgtcctctacattgttgaaaacatcaacgttgctgcaattgaaacaactctatggtcgattgagtggggcattgctgagcttgtgaaccacccagagatccagcaaaagttaagggatgagattgacagagttcttggagcagggcaccaagtgactgagccagacatccaaaagctcccatacctccaagcagtggtcaaggaaactcttcgtcttagaatggcaatccctctccttgtaccacacatgaacctccacgacgcaaagcttgggggctatgatatcccagctgagagcaagatcttggtgaatgcatggtggctggccaacaaccctgcacactggaagaagccagaggagttccggcctgagaggttcttcgaggaggagtcgcttgttgaagccaatggcaatgactttaggtaccttccctttggtgttggcagaagaagctgccctggaatcattcttgcattgccaattcttggcatcactttgggacgtttggtccaaaactttgagctcttgcctccccctggccagtcacagattgacactagtgagaaaggagggcaatttagcttgcacatactcaagcattccaccattgtggcaaagccaaggtcattttagactccaccacatgatcatgatcatatgatcaatccccttaattttttcttttttcttttcccttttctttactctgtattgtatcaatgcttgaaaatggggttgttccaaaaatgtcatatatatttggcctgctaatgggtattgtaaatctctgaacttgaagtgatgcacggttttgagatggttttctaataaacctacacttttgtctctaaatactctgtttcatatagtagaactgttattgttgtaaaaaaaaaaaaaaaaagaacgaan

SEQ ID NO: 689 - DNA, 564 bp, Glycine max
aagcttggtggctatgacatccagcagagagcaagatattggtgaatgcatggtggctggccaacaaccctgcacactggaagaagccagaggagttccggccagagaggttcttggaggaggaattgcatgtggaagccaatggcaatgactttaggtaccttccctttggggttggcagaaggagttgccccggaatcattcttgcattgcctattcttgccatcactttggcacgtttggtccaaaactttgagctcttgcctccccctggccagtcccagattgacaccagtgagaaaggaggccagtttagcttgcacatactcaagcattccaccattgtggcaaagccaaggtcattttagacttcaccacatgttcatatgattgtggcaatcccctttatttttttcttttcttactctttattattgtatcaatgcttgaaaatggggttgttctggaaatgtcatatataattggcctgctaatgggtaggtaatgtttggcgtccccctctctatctcttgcttcaataaagcaaaaatataaaaaaataat

SEQ ID NO: 690 - DNA, 490 bp, Glycine max
ctttgggacgtttggtccaaaagttatgccaagttttggcaatgcaagaatgattccagggcagcttcttgcattgccaatcttggcatcactttgggacgtttggtccaaaactttgagctctgcctccccctggccagtcacagattgacactagtgagatacttgggcaatttagcttgcacatactcaagcattccaccattgtggcatagcctgggccattttacactccaccaaatgatcatgatcatacgatcaatccccttaattttatcttttttcttatcccttttcgttactctgtaatggatcaatgcttgataatggggttgttctacaaatgtcatagatatatggcctgctgatgggtattgataatctctgaagttgaactgatgcacggttttgagatggctttctaatagagctacacttttgtcgctaatacagttgatgccctgcattcttcttggactagcgctgtcat

SEQ ID NO: 691 - DNA, 1535 bp, Glycine max
aagaaaacagtgttaaaagcgaggcagacgaagctcgagcggctggaagcagttgcagaccgagctagctagctagcaagcaagcacagagatggaggcaaagcgaggccatgccctcatgtgcttggcacgtgtttcactcttcctctgcgctctaaccctatccgctgctcacggaagcaccacggttcaagacatcgcgagaaagttgaaactcggggacaacgagcttctgcgcacggagaagaagttcaaggttttcatggagaattacgggaggagctactccacagaggaggagtatttgcgccgtttggggattttcgcccagaacatggtcagagcggcggagcatcaggcgctggaccccaccgccgtccacggcgtcacgcagttctccgatctcaccgaggacgagtttgagaagctctacactggcgtcaatggcggcttcccgtcatcgaataatgccgccggcggtattgcgccgccgttggaggtggacgggctgccggagaattttgattggagagagaaaggagctgtcaccgaagttaagttacagggtagatgtggatcatgctgggctttcagcaccacaggatctatagaaggagccaattttcttgccaccggaaagctcgtcagtcttagtgaacaacagctccttgactgtgacaacaagtgtgacataacagaaaagacttcatgtgacaatgggtgtaatggaggtcttatgacaaatgcctacaattatttgctcgagtctggtgggttggaggaggagtcttcatatccctacactggggagagaggtgaatgcaagtttgatccagagaaaatagcagttaagatcacaaatttcaccaatatccctgctgatgagaaccaaattgccgcatatttagtaaaaaatggtccacttgctatgggcgtgaatgcaattttcatgcaaacatacattggtggtgtctcatgccctctcatatgtagcaagaaaaggctgaaccatggtgtgttacttgtgggatatggtgcaaaaggcttctcaattcttaggcttggcaacaaaccatactggatcatcaagaattcgtggggggagaaatggggagaagatggctattacaagctctgcagagggcatggcatgtgtggaataaacactatggtttctgctgcaatggtgcctcaaccacaaacaacacctacaaagaattatgcttcttattagctatgcacttaaggaaatctaaataaatatttttcattctaggtgatgtatcatgtatgtaccaaaatattttggtacgtaagtcttttaaaaagtttgcatctcctctttggttttccttagttctgaaagttatctcctaagaagacaatcatatgtactgtacgtagtgtgaagatatagtattgtatgctgcagaatatgattgtctaataaggtggactagctgtaataaaagatatttccaggttgaaaacagagcctgtcatgttaaagagctataacattttctgcaggttag

SEQ ID NO: 692 - DNA, 286 bp, Glycine max
gttggattgagttaccccactctacctaattggttcccttctctcctttttcctatctacatacacaatctacacaaagccgtttggggattttcgcccagaacatggtcagagcggcggagcatcaggcgctggaccccaccgccgtccacggcgtcgcgcagttctccgatctcaccgaggacgagtttgagatgctctgcactggcgtcaatgcgataatagtggttatttgtaataataattattcttctttaatattaatatttataaaattatattattt

SEQ ID NO: 693 - DNA, 542 bp, Glycine max
cccacgcgtccgcccacgcgtcctcactcgaaaagacgacagaaggggacagcaaaaacaattaataaagatgagtttgaagaacaacatggtggtgctaaaggtgtgtttgttgcttcttttccttgtgggggttacagctgcacgcatggaactgagcttcttcaaaagtgatcagtcatcaagttatgatgatgatgagtattcaaaaccatgctgtgatctctgcatgtgcacacgctcaatgcctcctcaatgcagctgtgaagatattaggctgaattcatgccactcagattgtaagagctgtatgtgcacacgctcacagccaggacagtgtcgttgtcttgacaccaacgacttctgctacaaaccttgcaagtccagagatgactagaaaaactaatagctctctcaaatggacgaagcccctttaggctttgtttgttatgttaggggagacaaataaaacaagaaataaaagctcagtggccagtaatttgcttttagcaaatttggtcatttttattaaaaaaaaaaca

SEQ ID NO: 694 - DNA, 800 bp, Glycine max
gagcacttcttagctctcaatcatcaactatttaaaacaatggtcagaggctaacttctccactagttttctgtgtagagagctctttggacaacaccctctaaaccaatctatcaagtcctgaatctggtgagcaaatatggagctttgttggcaaacatccatccatggttcttgaagaagcatggagataaaggggtgtgagagggtcctcaccactcacactcctccacttaaaacagtttgttttggcttagctttggcttctctaatcaacaagggatgtgttctaacattctctcttgagtggcagaagcagatatgcattctccaacggaggagaggcttggctacagcctggcaaaccggcaagtcacaaaaaaggcaatggactccattggggtctctatggctatgtattgctcatgtagttcttcttgctgtagaatgtaataataaacaaagttggtcttccttttgagaagttaccagcttttgctgtccaaaattactcaatttgcagctgactagaattcctttctctcttcagtttctgcagatgagtaggtaggcaatttgtgatcactcccttcccttttcatgtcttctgtgttcccttttccatgcttgtttgtgttgttagttatgaccttatgaggaaataaaagaatagtacaattctagtccctcagtttaggattgtattctattgaactttattagaaaagtttccagagtcctttctaaggttggagtgaataatgttcatgatccctcaccctttccctttaaaaaaaaaa

SEQ ID NO: 695 - DNA, 807 bp, Glycine max
ctctcccatattcaattaatcaatatggcttcatgtttaccaaatgcatctccatttttggtcatgctcgcaatgtgcctcttaatttccacctctgaagctgaaaaatatgtggttggaggcagtgaaaaatcctggaagtttcctctctcaaaaccagattcactcagccattgggccaactctcaccgatttaaaatcggcgacactctcatatttaaatacgaaaagagaacagagtcagtgcacgaaggtaatgagacggattatgaagggtgcaacacggtggggaaataccacattgtgttcaacggtggcaacaccaaggtgatgcttaccaaacctggattcagacacttcattagtggaaatcagagtcattgccagatggggttaaagctggctgtgcttgtcatatcgtcgaacaaaaccaaaaagaatcttctttccccatctccttcgccttcaccgccaccatcatcgttgctatcaccatcaccttcgccacttccaaataatcaaggtgttactagtagttcaggtgcgggattcatcggggttatgatgtggttgatgttattgctttaaattgagagtattgtgtattcgcaattttgcatgttaatcctccgtcactaatcactatatatgcaatatatatatttgtggttgtggggttagttattcaggtcaagcatgcattttcgctttcatttttgtaattttttttaaaagtttggacgttttcttttgattgcgcaattgtgcccttaaactcaatgcccgtcttggtaattttgagattga

SEQ ID NO: 696 - DNA, 712 bp, Glycine max
ccgcgtacgtaagctcggaattcggctcgagcggctcgagcggctcgagaaaaaggtggataagccaaacagggtttgggatcaaccggcgccgcagaccaaactggactttactgatcacgtggatggagatggggatagaagcgctgactttttggctaaggagcaaggagagagtatgatggataaagaagagattcttagcagtgatagtgaggttgaagatgatgatgatgatactggaaaggataacatgcctgtggctaaaaagaagggttggttttcctcgatgttccagagtattgcaggaaaggctaatttggagaagtcagacctggaaccagctttgaaagctctgaaggacaggctcatgaccaagaatgtggccgaggaaatagctgagaaactatgtgagtcagtggcagcaagtcttgaaggcaaaaagctagcttcgtttacaaggatatcttcaacagtgcatacagcaatggaagaagcacttgttcgtattttaacccctaggcgttccattgacatattgagggatgttcatgctgccaaggagcaaaggaagccatatgttgttgtgtttggtggagttaatggagttggaaaatctactaatctagctaaggttgcttactggcttctgcaacacaacgtcagtgtcatgatggctgcttgtgatacatttcgatctggagctgttgag

SEQ ID NO: 697 - DNA, 1057 bp, Glycine max
ctcgagccgttttctctctcttttcatcagcttcgcgaattcgccaaatcagaaaacctctctctctctctctctctctcacccttcccagtgatcaattcaacgatgttagagcagttgctgatattcacgcgcggagggctcatcctctggacctgcaaccacctcagcaacgccctgaggggatctccgatcgacacgttgatccgatcctgcctcctggaggagcgatccggtgcggcctccttcaactacgacgcacctggagccgcatactctctcaaatggaccttccacaacgacctaggcctcgtctttgtcgccgtctatcaacgcgtcctccacctcttgtacgtcgacgatttgctcgccgccgtcaagcgcgagttctcgcgcctctaccacccccaaaaaaccgcctaccgagattttgacgagatctttcagcagctccagatcgaggccgagtctcgctccgagaatttcaaaaaacccaaccctgtccccgcgctggctcccaataggaaacaaaacggcacgtggcaggggcaggggttagggcaaaacgccggatcagaaaaaaaaagtgatggagatgggaagaaagggcgtaaattggagaatgataatttttctgtagctaattctaattctaatgctaatgttaaccatagtggtggtaagagtagtgtgaataataatattgggaaagagaatgagagttccaatgttggggcttttgatgtaaataggcttcagaagcttaaaggaaaaaaagggaatgggaacgggaagaagaaagatgctcttgttgttgctgctgccaagggagagcccaaaaaggtggataagccaaacagggtttgggatcaaccggcgccgcaaaccaaactggactttactgatcacgtggatggagatggggatagaagcgctgactttttggctaaggagcaaggagagagtatgatggataaagaagagattcttagcagtgatagtgaggttgaagatgatgatgatgatactggaaaggataacatgcctgtggctaaaa

SEQ ID NO: 698 - DNA, 638 bp, Glycine max
ctcgagccgattcggctcgaggttctagttgatacagctggccgagatgcaggataatgaaccattgatgagagcactgtcaaagctcgtctacctcaacaatcctgaccttatcttatttgttggagaagcactggttggtaatgatgcagttgatcagctttcgaaattcaaccagaaattagccgacctctcaacatctcccacacccagattgatcgatgggatcttgctcacgaagtttgacactatcgatgataaggtgggagctgcactctcaatggtttacgtatctggagctccagtaatgcttgtgggctgcggacagccctatactgacctcatgaaactcaacgtcaagtcaattgcgaagactctccttaaatgagggaacaacataaacctgtcatgaatgtttctgtttgatgagtaacttgattatccccgtagatccccattacatcgtaagacaacattgacgcaatttggtttgtttaatttatattggtaagcttctttcctctgttcaccatgagaataactcgtaaggtgtaactcttatcatgtgtagtacatttaattttcctccccttactaagtgaataatccatgcgaatcgttcaaatatttattgcgac

SEQ ID NO: 699 - DNA, 991 bp, Glycine max
  unsure (1)..(991): unsure at all n locations
ctgcactctcaatggtttacgtatctggagctccagtaatgtttgtgggctgcggacagtgctatactgacctcaagaaactcaacgtcaagtcaattgcgaagactctccttaaatgagggaacaacataaacctgtcatgaatgtttctgtttgatgagtaacttgattatccccgtagatccccattacatcgtaagacaacattgacgcaatttggtttgtttaatttatattgtgaaaaatcctggaagtttcctctctcaaaaccagattcactcagccattgggccaactctcaccgatttaaaatcggcgacactctcatatttaaatacgaaaagagaacagagtcagtgcacgaagtgaatgagacggattatgaacggtgcaacacggtggggaaagaacacgttctgttcaacgatggcaacaccaaggtgatgcttaccaaatctggattcagacacttcattagtggaaatcagagtcattgccaaatggggttaaagctaatggtagttgtcatgtcaaacaacaccaaaaagaaactaattcattcaccatcgccatcatcaccttcaccatcaccatcaccatcaccttcaccttcaccctcaccttcaccttcattatcatcgccatcaccttcaccacttccaaataatcaaggagttactcgtagttcaggcgctgaattcattggagttatgatgtggttgggggtgatgatgttattgctttaaattagagagtattgtgtatttacatgttaatttctccatactaatcactatatatgcaatatatatttgtgtggttagttaattaggtcaagcatgcattttcgctttcatttttgtatttttttaagtctggaagattttctattgattgtgcaattgtgcccttaaactccaatgcctactcgttgtaattttgaaattgaataagccatttggattttttnnnnnnnnnnnnnnnnnnnnnn

SEQ ID NO: 700 - DNA, 1002 bp, Glycine max
cggacgcgtgggcggacgcgtgggcggtcgcgtgggcggactacaaatcagttttctacttgaatcttcgttatccttctttttttctccttgaactcgaatattcactatggcagatgaggtggttctgctagatttctggccaagtccatttgggatgagggtcaggattgcacttgctgaaaagggtatcaaatatgagtccaaagaagaggacttgcagaacaagagccctttgctcctcaaaatgaacccggttcacaagaaaatcccggttctcatccacaatggcaaacccatttgtgaatctctcgttgctgttcagtacattgaggaggtctggaatgacagaaatcccttgttgccttctgacccttaccagagagctcaggctagattctgggctgactttgttgacaataagatatttgatcttggaagaaagatttggacatcaaagggagaagaaaaagaagctgccaagaaggagttcatagaggcccttaaattgttggaggaacagctgggagacaagacttattttggaggagacaatctaggttttgtggatatagcacttgttccattctacacttggttcaaagtctgacttttggcagcctcaacatagagagtgagtgccccaagtttgttgcttgggccaagaggtgcctgcagaaagacagtgttgccaagtctcttcctgatcaacacaaggtctatgagttcattatggacataagaaagaagttcgacattgagtaggttcatgttggatcttaatagccatagtgacgtattgatcattcttggcctttcaactaaatagtatttgtgtagtaaattaaaggcacttggatgtaccaaacttcatgctttttgtaggagtgcgtaggttttaaaaattttctgatgtatctttcatgtgtttgttggttttgcaatagaatatttcctatattatacatataaaaaaaaaactaaaaaaagaaatataagata

SEQ ID NO: 701 - DNA, 1025 bp, Glycine max
ctcgagccgctcgagccgaatcggctcgagcttttttttacttgaattttcttcatccttctctgttctcctagaacttgattacttgaacattccctatgacagatgaggtggttcttctggatttctggccaagtccatttgggatgagggtcaggattgcacttgctgaaaagggtatcgaatatgagtacaaagaagaggacttgaggaacaagagtcctcttctcttacaaatgaacccggttcacaagaagattccggttctcatccacaatggcaaacccatttccgaatccctcattgctgttcagtacattgaggaggtttggaatgacagaaatcccttgttgccttcagacccttaccagagagctcaggctagattctgggctgattatgttgacattaagatacatgatcttggaaagaagatttggacatcaaagggagaagaaaaagaagctgccaagaaggagttcatagaagcccttaaattgttggaggaacagctgggagacaagacttattttggaggagacaatctaggttttgtggatatagcgcttgttccattctacacttggttcaaagcctatgagacttttggcaccctcaacatagagagtgagtgccccaagtttattgcttgggccaagaggtgccttcagaaagaaagcgttgccaagtctcttcctgatcagcaaaaggtttatgagttcattatggatctaagaaagaagttaggcattgagtaggttggagcttaatggccattgtgaagtagtggttttccattggtcgttcttagcctttcaaataagtaatatttgtgtaataaaaggcacttagatgtgccaaacttcgtgctttctgtaggaatgtgtgggttttggaaaatctctgatgtatctttcatgtgtttgttggttttgtaatttttttttggtattgtcttatacttgaataatttgagactactatgatcccccccaaaaaaaattgaaaataattttttttaaccc

SEQ ID NO: 702 - DNA, 419 bp, Glycine max
tcgatctattctactttgagtcttcttgatccttctttttctccttgaactcaaacatggcagatggggtggttctgctagatttctggccaagtccatttgggatgagggtcaggattgcacttgctgaaaagggtatcaaatatgagtacaaagaagaggacttgaggaacaagagtcctcttctcctccaaatgaacccggttcacaagaagattccggttctcatccacaatggcaaacccatttgtgaatccctcattgctgttcagtacattgaggaagtttggaatgacagaaatcccttgttgccttctgacccttaccagagagctcatgctagattctgggctgattatgttgataagaagatatatgatcttggaaggaagatttggacatcaaaaggagaagaaaaa

SEQ ID NO: 703 - DNA, 577 bp, Glycine max
  unsure (1)..(577): unsure at all n locations
cccacgcgtccgantttcnncattcnnttttgncctccgagtttcttgactacttgaacattccctgtgacagatgaggtggttcttctggatttctggccaagtccatttgggatgagggtcaggattgcacttgctgaaaagggtatcgaatatgagtacaaagaagaggacttgaggaacaagagtcctcttctcttacaaatgaacccggttcacaagaagattccggttctcatccacaatggcaaacccatttccgaatccctcattgctgttcagtacattgaggaggtttggaatgacagatatcccttgttgccttcagacccttaccagagagctcaggctagattctgggctgattatgttgacattaaggtacccttcttctgttcttcaagctttttatgctttgattgttacttgtattccctacaattggttttatattatgcttttagattatgatgatgtaatttggttgttttattcccatgttgcttcctattattaacttttcccttcttagttatttagatgtaatttggaatatgagagatgtttaatgaaagga

SEQ ID NO: 704 - DNA, 1052 bp, Glycine max
gaatctacaatgtagaaggttctatgtgactataaatgaggcgacgatttctgctagtccacagcatctagctagttaattcacaaacttgagttggattttggtgatcttgtgaattgatctgcgatgtcggacgaggtagttctgttggatacatgggctagcatgtatggtatgagggctaggattgcattggctgaaaagggtgttaggtatgaatacaaggaagagaatctcatgaacaggagtcctttgcttttgcagatgaacccaattcacaagaagattcctgttttgatccataatggcaaacccatttgtgaatctgcaataatagtgcagtacattgatgaggtctggaatgacaagtctccactcatgccctccgatccttacaagagatctcaagccagattctgggtggactacattgacaaaaagatttatgatacttggaagaaaatgtggctttctaaaggagaagagcatgaagaagggaagaaggagttgatctctatctttaagcaattagaagagacactaactgacaaacccttttatggggatgacacgtttggctttgttgatctttgtttgatcactttctctagttggttttatacttatgagacatatgggaacttcaaaatggaagaagagtgtcctaaactcatggcttgggtcaagagatgcatggagagagagactgtgtccaatactcttcctgatgctaagaaggtgtatggtcttattgtggaactgcagaagacacttgaatcgaaatagaagatttcaataaatcaacccattaaataatattttcatgttaaatatgttgttgtaaggtcttgtgtacttttcctctatggttgtgtgggttgggtcagtcatttatgtggtttactagacactaatacatcttctctattgaagattaaggtatctaattatttttcccattactatatattgaatattatcgtctttgacattgaaaagaaagaaaacgtaggaaaagcaaagacttgtgttattcattaaaaacggaattc

SEQ ID NO: 705 - DNA, 1511 bp, Glycine max
tgaatctgaaggttctataaaagcccacacccctgcttcgctgttctcacattttctacgtattgaatctcaaaattctaaaagagatctttttctgctctttgaagaaagaagggtctttgcttgattttggagatgtctctgctctcagatctcatcaaccttaacctctccgataccaccgagaaggtgatcgcagagtacatatggatcggtggatcaggaatggacctgaggagcaaagcaaggactctcccaggaccagttagcgacccttcagagcttcccaagtggaactatgatggttccagcacaggtcaagctcctggtgaagacagtgaagtgattttatacccacaagccattttcagggatccattcagaaggggtaacaatatcttggttatctgtgatgcctacactcctgctggagaacctattcccactaacaagaggcacgctgctgccaaggttttcagccatcctgatgttgttgctgaagtgccatggtacggtattgaacaagaatacaccttgttgcagaaagatatccaatggcctcttgggtggcctgttggtggtttccctggacctcagggtccatactactgtggtgttggcgctgacaaggcttttggccgtgacattgttgacgcacactacaaagcctgtatttatgctggcatcaacatcagtggaattaatggagaagtgatgcccggtcagtgggaattccaagttggaccttcagttggaatctcagctggtgatgagatttgggcagctcgttacatcttggagaggatcactgagattgctggtgtggtggtttcctttgaccccaagccaattaagggtgattggaatggtgctggtgctcacacaaactacagcaccaagtccatgagagaagatggtggctatgaagtgatcaaagcagcaattgacaagttggggaagaagcacaaggagcacattgctgcttatggagaaggcaacgaacgtcgtttgacaggacgccacgaaaccgctgacatcaacaccttcttatggggagttgcaaaccgtggagcttctgttagggttgggagagacacagagaaagcagggaagggatattttgaggacagaaggccagcttccaacatggacccatacgtggttacttccatgattgcagacacaaccattctgtggaagccatgagcaaaacctgcatgttttctccctttggatggaaaggaacagttatgcttttcttagtaggatttggtctctctctctttttaccttttgattggtactatggttggtgccttgttggttggtgcaactaactggcaagggttgttcattgttttcttctattcctttccctcgttttccgattgttacaatgacaataatttaatggttattatcagtcttgaaggttattatcagtcttgcaagaaatgctgattggaagtataataatatatatgaaattgtcatgttcattgagtaggaaa

SEQ ID NO: 706 - DNA, 777 bp, Glycine max
ggggggggaataggagggggcaaattgagttgggtgttggaaaggcagagcaagaggagtaacataatcaaacatggcggttaggcaaagagccgtgtctgcacttccaactcttctacgcactctccgcaaagaacctttgaagcctcgcaaccacgcacacgtcaatgccttgccctctcttcgacgcgctttctctttgtacgatcagatcaacctcatcgatcaagtccccgaagaccagctccgatttcaagggtataatgatacggggtttactgtaaatggggttgaatacgaaggaagcttgctttgtgttggaaatttgctcatgtcttggaaacctaagaagttttcagagatcactgccgatagcttgtcaatcttccaaatagttcgccctattccagagattttgattattggctgtggaaagaacattcaacatgtagatcctgaactttagacggtttattcggtctactggcattaagctagaagctgttgattcgagaaacgcagcatcaacttacaacatactgaatgaagaaggtcgaattgtggctgctgcacttcttccacacgggagtttcttcatgaagcttggacttgtattcttagtagccaacaattgccccaaagaggttcacctcaatgccacaaaattttttagcccaagtccttgggacatgctttgattttccatttagaaagttttgacatagtaataggacaatgtgaattaaactcaagtgagtcctttgacgtctgctgaag

SEQ ID NO: 707 - DNA, 1504 bp, Glycine max
cgccaccggagggggaagcagtggaacaaagcaaggaagagaaagaaatttgtttctctctaaagagtctccgctgaactttttggtttcttgaagatgtcgttactctccgatcttatcaaccttaacctctccgacatcaccgataaggtgatcgccgagtacatatgggttggtggatctggcatggatatgaggagcaaagcaaggactctctcgggactggttaatgacccttccaagcttcccaagtggaactatgatggttccagcactggtcaagctcctggacaagatagtgaagtgatcttatatccacaagcaatttttcgggatccattcaggaggggtaacaatatcctggttatgtgtgatgcttacactcctgctggggaacccattcctaccaacaagagaaataaagctgcaaagatattcagtacatccggatgttgctgctgaagaaccctggtatggtcttgagcaggaatatacattattgcagaaagatgtccaatggcctcttggatggcctcttggtggtttcctgggcccccagggaccatactattgtggaactggtgctaacaaggcttttgggcgtgatattgttgactcacattacaaagcatgtatttatgcgggatttaacataagtggaatcaatggagaagtgatgccaggtcagtggggattccaagttggtccatcggttggcatctcagctgctgacgagttgtgggttgctcgttacattttggagaggatcaccgagattgctggactggtgctttcctttgaccctaagccaattcagggtgattggaatggtcctggtgctcacacaaattacagtaccaagttgatgagagacgatggtggctatgaaatcatcaaaaaagcaattgctaagttggaaaagaggcacaaagagcacattgctgcttacggagaaggcaatgaacgtcgtttgaccggacccgacgagacggctgacatgaacacctttttatggggagttgcaaaccgtggtgcttctgttagggtagggagacagactctaaaggcagggaagggatactttgaggagaggaggcctgcctctaacatggacccttatgtggtcacttccatgattgctgagacaactattctttggaaaccataagcaacgtcaaaacaatcacatggtgccttccgcatagcattgttgtttagatggtcaatttgtttttctatgtttttgtgtgcattctagttgtgactacctcgcctgttgttaggatattgtttgttggtggtactcatgattaccaagcgaggaattgttgtttcattttcttaatgtacgttttaagtgttccaataatgtgtaatggccctcaagtattgttatttgctgcgaatttatattgtgaagcatctcatgatttctctttgagcaatcaagttcttattaactgtacatgccttatgggtatgggaacggtttgtccagtcagat

SEQ ID NO: 708 - DNA, 1310 bp, Glycine max
gaaaggaaaagagaaaaaatttctcagaagagtctccgctgaaagttttggtttcttgaagatgtcgttgctctccgatcttatcaaccttaacctctccgacatcaccgataaagtgatcgcagagtacatatgggtaggtggatctggcatggatatgaggagcaaagcaaggacactcccaggaccagttagagacccttcaggacttcccaagtggaactatgatggttccagcacaggtcaagctcctggtgaagatagtgaagtgatttatatccataagccatttcaggatccattcagaaggggtagcaatatcctggttatgtgtgatgcttacactcctgctggggaacccattcccacaaacaagagaaataatgctgcaaagatattcggccatcctgatgttgctgctgaagaaccctggtatggcattaagcaagaatacaccttgttgcaaaaagatgtccaatggcctctagggtggcctcttggtggtttcctgggccacaagggaccatattattgtggtactggtgctaacaaggctttcgggcgtgatattgttgactcacattacaaagcatgtatttatgcgggattcaacatcagtggaatgaatccagaagtgatgccaggtcagtgggaattccaagttggtccttcaattggcatctcagctgctgatgaattgtgggaagctcgttatattttggagaggatctccgagattgcaggagtggtgctttcctttgaccctaagccaattccgggtgattggaatggtgctggtgctcacacaaattacagtaccaagtccatgagagacgatggtggctatgaagtcatcaaagcagcaattgctaagttggaaaagagacacaaggagcacattgcagcttacggagaaggcaacgaacgtcgtttgactggacacgacgagacagctgacatgaactccttgttatggggtgttgcaaaccgtggtgcttctattagagtagggagggacactgagaaggcagggaaggggtattttgaggataggaggcctgcctctaatatggacccttatgtggtcacttccatgattgctgagacaaccattctttggaaaccataagcagcctcaaaaataatcacacatgccttgttttttcatgttttgtgtgcactcttgttgtgactacctcgccttttcttaggcattgtttgttggtagtactgaagtgaagaattgtcgtgtcattccattaatgtacgtttttcaaaggaattgtttgtgtgcacccttgttgtgatta

SEQ ID NO: 709 - DNA, 466 bp, Glycine max
ctgacatcaacaccttcttatggggagttgcaaaccgtggagcttctgttagggttgggagagacacagagaaagcagggaagggatattttgaggacagaaggccagcttccaacatggacccatacgtggttacttccatgattgcagacacaaccattctgtggaagccatgagcaaaacctgcatgttttctccctttggatggaaaggaacagttatgcttttcttagtaggatttggtctctctctctttttaccttttgattggtactatggttggtgccttgttggttggtgcaactaactggcaagggttgttcattgttttcttctattcctttccctcgttttccgattgttacaatgacaataatttaatggttattatcagtcttgaacaaagaaatgctgattgtgaagtataataataatatatgaaattgtcatgttcattggagtaggg

SEQ ID NO: 710 - DNA, 840 bp, Glycine max
atgctcccatcaacatcagtggaattaatggagaagtgatgcccggtcagtttgaattccaagttggaccttcagttggaatctcagctggtgacgaggtgtgggcagctcgttacatcttggagaggatcactgagattgctggtgtggtggtttcctttgatcccaagccaattcagggtgattggaatggtgctggtgctcacacaaactacagcactaagtccatgagaaatgatggtggctatgaagtgatcaaaaccgccattgagaagttggggaagagacacaaggagcacattgctgcttatggagaaggcaacgagcgtcgtttgacagggcgccacgaaaccgctgacatcaacaccttcttatggggagttgcaaaccgtggagcttcagttagggttgggagggacacagagaaagcagggaagggatattttgaggacagaaggccagcttctaacatggacccatatgtggttacttccatgattgcagacacaaccattctgtggaagccatgagcaaaacttgcatgttgtctccctttggatggaacaaggaacaaggaacaaggaacaaggaacagttatgcttttctaagtagggtttggtcctttttattttttaccttttgatttttctaggatttcgatttgtggctactttggttggtgcaaccaactgccaagggttgttcattgttttctattcctttccctcgttttccgattgttacaataataataataataatgtaatatggttattttcagtctcaaacaaaagtaatgctgattgtgaagtataataatatatgaaattgtcatgtcc

SEQ ID NO: 711 - DNA, 396 bp, Glycine max
cgcttcttggccactatccatcactgtttaccaacgtttacactctcaacgctctcaacaaaagacccattttttttttttttggtttggaagagagaagaatggagagaaaggttctgatattgtgctctgttgtggccttcttggggctgccgtcggctgcaactagcttcggtgcagaagcgacaaggattaaggtttctcaggttcattttgttacaccaaaccagtgcacgtatcctcgtagtccagctctgcctcttggtttaattgctgcagtggctcttgtgctatctcagataatcataaatgttggaactgggtgtgtttgctgcagaaaaaatttgcaaatccctgattccaattggaaggtggcactggcctgctttggtttat

SEQ ID NO: 712 - DNA, 315 bp, Glycine max
ggcagaatcacgcttcttggccactatccatcactgcttacaaactttacacttcccacaacactctccacctgaaagagacactacaacacacaaaacaaaaatttggaagagaaaaagagagagaagaatggagaaaaaggttctgatattgtgctgtgttgtggccttcttggggctgttgtcggctgcaactagcttcggtgctgaagcgacaaggattaaggtttctcaggttcattttgttgcaccaaaccagtggacatatcctcgaagtccggctctgcctcttggtttaaccgcagcactggctct

SEQ ID NO: 713 - DNA, 390 bp, Glycine max
tggccttctgtcctcaaaatatcccttccctgctttctctgtgtcccatatgtggttacttccatgattgcagacacaaccattctgtggaagccatgagcaaaacttgcatgttgtctccctttggatggaacaaggaacaaggaacaaggaacaaggaacagttatgcttttctaagtagggtttggtcctttttattttttaccttttgatttttctaggatttcgatttgtggctactttggttggtgcaaccaactgccaagggttgttcattgttttctattcctttccctcgttttccgattgttacaataatgacaatttcatatattattatacttcacaatcagcattacttttgtttgagactgaaaataaccatatta

SEQ ID NO: 714 - DNA, 1165 bp, Glycine max
  unsure (1)..(1165): unsure at all n locations
ctttttagggcaaggatgggctttcttaccctgggtcaaggctaatggtgagttgggattttggctcaagaggcttgcagaatggccggacatgatgtatgtcagggtgttggtttggccagcggttcaaagataaaggggatgccccacatttatttccatgacacacatacacacgcgtccgatccccaacactcttcacaaactagtaatattattcttcgaatccattttattattcataatgggtattttcacatttgaggatgaaaccacctcccctgtggctcctgctaccctttacaaagctctagttacagatgccgacaacgtcatcccaaaggctgttgaagccttcaggagtgttgaaaaccttgaggggaacggtggccctggaaccatcaagaagatcactttcgttgaggatggagaaagcaagtttgtgttgcacaaaatagaatcagttgatgaggcaaacttgggatacagctatagcgtagttggtggagttgggttgccagacacagtggagaagatcacattcgaatgcaaattggctgctggcgccaacggagggtctgctgggaagctaactgtcaaataccaaaccaaaggagatgctcagcccaacccagacgacctcaaaattggcaaagtcaagtctgatgctcttttcaaggccgttgaggcctaccttttggccaatcctcattacaactgatccaattcgatcttcagtattcagtgatctgcaaagaccttgttttatattatatacaagagttttcttgccttgtgtggagtgttattcaatcactttgagtgtgtggtgtggcttccaattgatgtaacgagtgtttcctttcttatttcctttttccacagaattgtgagagccagttgatgtctttgtatgtcacttcatcaataaatcaatatgttataataataaaagaaagcatcatttatacttcaaaaaaaaaaaaaaaaaaaaaaactcgagactagttctctctggtnnnnnnnnnnnnnnnnnnnnnnnnnnnnnnnnnnnnnnnnnnnnnnnnnnnnnnnnnnnnnnnnnnnnnnnnnnnnnnnnnnnnnnnnnnnnnnnnnnnnnnnnnnnnnnnnnnnnnnnnnnnnnnnnnnnnnnnnnnnnnnnnnn

SEQ ID NO: 715 - DNA, 783 bp, Glycine max
aaagggcactcctctgctaaagaagcacacagcagcaagcatctccttctcaaactagtagtattattcttccattccattaaaaataaaatcattcataatgggtgttttcacattcgaggatgaaatcaactcccctgtggctcctgctactctttacaaggccctagttacagatgccgacaacgtcatcccaaaggctcttgattccttcaagagtgttgaaaacgttgagggaaatggtggcccaggaaccatcaagaagatcactttccttgaggatggagaaaccaagtttgtgctgcacaaaatagaaagcattgatgaggcaaacttgggatacagctacagcgtggttgggggtgctgcattgccagacacggcggagaagatcacattcgactccaaattggttgctggtcccaatggagggtctgctgggaagctcactgtcaaatacgaaacaaaaggagatgctgagcccaaccaagacgaactcaaaactggaaaagccaaggctgatgctctcttcaaggccattgaggcttaccttttggcccatcccgattacaactaatcctcttcaacttacttgtcatcactttcttgcttggagacttatccaatcactctgttctcaacttaagttgccttccaatgtatccagtctttcctttcttctttccttttcccatataattgtgagacttatgatatatctgtatctcacttcatcaataataaattataataaagatgagcaatcattacaaaaaaaaaaaa

SEQ ID NO: 716 - DNA, 820 bp, Glycine max
cccacgcgtccgcccacgcgtccgcccacgcgtccgctccttctcaaactagtaatatatactattattcatccattccattctatatatttcataatgggtgttttcacattcgaggatgaaaccacctctcctgtggctcctgctaccctttacaaagctctagttacggatgctgacaacgtcatcccaaaggctgttgacgccttcaggagtgttgaaaacgttgagggaaatggtggccccggaaccatcaagaagatcactttccttgaggatggagaaaccaagtttgtgttgcacaaaatagaagcgattgatgaggctaacttgggatatagctatagcgtagttgggggagatgggttgccagacacagtggagaagatcacattcgaatgcaaattggctgctggcgccaacggagggtctgctgggaagctaactgtcaaataccaaaccaaaggagatgctcagcccaaccaagacgacctcaaaattggcaaagccaagtctgatgctcttttcaaggccgttgaggcttaccttttggcccatcctgattacaactgatcctcttcatcactattcagtcagcaacgaccttgctttatattatatacaagagttttcttgccttgtgtggagctttatccaatcactgtgtgtggtgtgtgcttaagttaaaaacttgccttccaattaatgtaacgagtgtttcctttctcatttccttttgccacagaattgtgagagtcagttgatatctttgtatgtgacttcaataaattttaataaaagaaagcatcatttaaacttt

SEQ ID NO: 717 - DNA, 689 bp, Glycine max
gcccgcaggcactcgcgcggatatcctgcgcaaactagtactattattcttccattcataatgggtgttttcacattcgaggatgaaatcaactcccctgtggctcctgctactctttacaaggccctagttacagatgccgacaacgtcatcccaaaggctcttgattccttcaagagtgttgaaaacgttgagggaaatggtggcccaggaaccatcaagaagatcactttccttggaggatggagaaaccaagtttgtgctgcacaaaatagaaagcattgatgaggccaacttgggatacagctacagcgtggttgggggggctgcattgccagacacggcggagagatcacattcgaatgcaaatacctcaaaattggcaaagtcaagtctgatgctcttttcaaggccgttgaggctaaccttttggccaatcctcattacaactgatccaatattcaacttagttatcatcagtgtcttgcttatcatatacaagagtttccttgcgtgaagtactgttatttagtactttgtgctcaagttttaagttggctttcaatgtaacgagtgtttccttttattttcttttgcctcagaattgtaagagctggtcgatatctttgtacctccttcatcaataaataaattataataaaggaaatcatcatttgaactcttgtttt

SEQ ID NO: 718 - DNA, 643 bp, Glycine max
ctcgagccgctccttctcaaactagtagtattattcttccattcataatgggtgttttcacattcgaggatgaaatcaactcccctgtggctcctgctactctttacaaggccctagttacagatgccgacaacgtcatcccaaaggctcttgattccttcaagagtgttgaaaacgttgagggaaatggtggcccaggaaccatcaagaagatcactttcgttgaggatggagaaaccaagtttgtgctgcacaaaatagaaagcattgatgaggcgaacttgggatgacagctacagcgtggtggggggtgctgcgttgccagacacggcggagaagatcacattccactccaaattggctgctggtcccaatggaggctctgctggcaagctcactgtcgaataccaaaccaaaggagatgctcagcccaaccaagaccaactcaaaactggaaaagccaaggctgatgctctcttcaaggccattgaggcttaccttttggccaatcccgattacaactaatccaattcgatcaacttcatgattatcatcactatctctcttgctgtttctgagacttcatatatctgtatctcacttcatcaataaatcaacaaattttaatgatggctaatttcct

SEQ ID NO: 719 - DNA, 534 bp, Glycine max
gtgagtcagcagattcacactatggtatggggcatacataggagcagagtgacaccagaggtagtgctgggctgcttgattataaatagagggcactcctctgcttaagaagcacacagcagcaagcatctccttctcaaactagtagtattattcttccattcataatgggtggttttcacattcgaggatgaaatcaactcccctgtggctcctgctactctttacaaggccctagttacagatgccgacaacgtcatcccaaaggctcttgattccttcaagagtgttgaaaacgttgagggaaatggtggcccaggaaccatcaagaagatcactttccttgaggatggagaaaccaaagtttgtgctgcacaaaatagaaagcattgatgaggcgaacttgggatacagctacagcgtggttgggggtgctgcattgccagacacggcggagaagatcacattcgactccaaattggttgctggtcccaatggaaggtctgctgggaagctcacttgtcaatacgaaac

SEQ ID NO: 720 - DNA, 461 bp, Glycine max
ccacgcgtccgggtcaagattgggtgggttgcttcttccttttccatcactgagaaaatatcataggtgggtattttcacattcgaggacgaaatcacctcccctgtggctcctgctactctttacaaagctctagttacagatgccgacaacatcatcccaaaggctcttgattccttcaagagtgttgaaaacgttgagggaaatggtggccctggaacaatcaagaagataactttcgttgagggtacttactccctctctaatcactagattcatttcattattattccatctctacctatctatatgttgcaatgtatgaatggacagatggagaaaccaagtttgtactgcacaagatagaagcagttgatgaggcaaacttgggatatagctacagcgtagtgggtggtgctgcgttgccagacacagcggagaagatcacattccactccaaa

SEQ ID NO: 721 - DNA, 1086 bp, Glycine max
tcaatattcggctcggagcggaagccatacgccttaggattaccgcgcccatcgcaaaataagcgcacggatcaatgacatggcaataaatttaaattcccgcctaaacccctgacctccccttgatttcatttcgtttgcaattgaatttcaatttccctaggggcttaatatctcccctcacttgtgcctagccttatgtcatagtattatcattcattctcatctttctctcttctctctccacccaaaccctaactcccgaccctgttcccctctcgtatccgtcatgaaaggaggaaagtccaagaccgaatctaagagagccgatcccaaacttgctgtgaataagaagggagccgccaccaaggctaggaaacccgccggcaaggggaaggcagcgaaagaccctaacaagccaaagaggcctccaagtgctttcttcgttttcatggaggagttcaggaaggtattcaacaaagaacatcctgaaaacaaagcagtgtctgctgtgggcaaagctgctggagcaaaatggaagaccatgtctgatgctgaaaaagcaccttatgtggcaaagtctgagaaaaggaaagtggagtacgagaagaacatgagagcctataacaagaaacaggcggaaggtcctactggtggggatgaagaagaatctgagaagtctgtatctgaggtgaatgatgaagatgatgatgaggaaggcagtggcgaggaagaggatgacgattagagaatggactgataattgcatttatgtaggttctgatgattttgatcatctgttgtaggtggtctggtcatttcctgataaacatatttcttgcttccaaaaaatatttccctgctccctccgtaaattggttgtctttccaaaacgtgaatagtttaaagaagggagttctttatttgtacttctaaatccaactgtttagttaaggggtgtttatctcttgtagagcttttagtttgatttagagttttcttgttgaaatctggttaagtttgtatcaatataattggcttatcattcgctttctgcggttatatggaatttatgttttgtttgcc

SEQ ID NO: 722 - DNA, 661 bp, Glycine max
gtttatcgtgaggagaatacggagtcgtacgctctttataagcgcacggatcaatgacatggcaagtgaatttaaattcccgcctaaacccctgaccttcccttgatttcatttcgtttgcaattgaatttcaatttccctaggggcttaatatctccccgcatttgtgcctagcctcattattatcatagtagatattcattccccttatctttctctcttctctctccccgcccaaaccctaactccctaccctattccgctttctctcatccatcatgaaaggaggaaagtccaagaccgaatctaagagagccgatgccaaacttgctgtgaataagaagggcgccgccaccaagactaggaaacccgccggaaaggggaaggcagcgaaagatcctaacaagccaaagaggcctccaagtgctttcttcgttttcatgtaattataatatattgttatctctacgattcatttgacttccgatgcgctctcttatctttcctccgaataattttatcgtcaaaacttttatccttgtccaattgtaagtccacgcgttctttacctgttgttgtttggttacctcgattgctttattgttaaaattatgttttttgagtatgctagatctagcttatgcttcgtgaaaccttgata

SEQ ID NO: 723 - DNA, 497 bp, Glycine max
ttgcaattgaatttcaatttccctaggggcttaatatctccccgcatttgtgcctagcctcattattatcatagtcgatattcattccccttatctttctctcttctctctccccgcccaaaccctaactccctaccctattccgctttctctcatccatcatgaaaggaggaaagtccaagaccgaatctaagagagccgatgccaaacttgctgtgaataagaagggcgccgccaccaagactaggaaacccgccggaaaggggaaggcagcgaaagatcctaacaagccaaagaggcctccaagtgctttcttcgttttcatggaggaattcaggaaggtgttcaacaaggaacatcccgacaacaaagcagtgtctgctgtgggcaaagctgctggagcaaaatggaagacgatgtctgatgctgaaaaagcaccttatgtggcaaagtctgagaaaaggaaagtggagtccgagaagaacatgagagcttat

SEQ ID NO: 724 - DNA, 489 bp, Glycine max
ttccacgcgtccgctttctctcttctcatctccccgcccaaaccctaactccctaccctagtccgctttctctcatccatcatgaaaggaggaaagtccaagaccgaatctaagagagccgatgccaaacttgctgtgaataagaagggcgccgccaccaagactaggaaacccgccggaaaggggaaggcagcgaaagatcctaacaagccaaagaggcctccaagtgctttcttcgttttcatgtaattataatatattgttatctctacgattcatttgacttccgatgcgctctcttatctttcctccgaataattttatcgtcaaaacttttatccttgtccaattggaggaattcaggaaggtgttcaacaaggaacatcccgacaacaaagccagtgtctgctttttgtgggcaaagctgctggagcaaaatggaagacgatgtctgatgctgaaaaagcaccttatgtggcaaagtctgag

SEQ ID NO: 725 - DNA, 930 bp, Glycine max
ctctttccattttttaatttatttatcttcctttaaattcaatcctcagatctttgtaagagtcatccatatcatacccttcactttcctgggaaaaaattggaacctgcctctgttaaagtttgtatttttttgagtgggtgggttgattgagagtactgtgcaagctttggaactttttcccaacctgctacttcaatggccactgaagaggttaacaaacctcaatcacttcctccataccctgagatgatagtgaaagcacttgaagcactgaatgagccaaatggatcgaacaagtcagcaatatcaaagtacatagaaaccacctacggtgagttgccagacgcaaccgttttggggagtcacctgaacaagatgaaagagagtggagagcttgctttcaaacagaacaattacatgaaagctgacccaaatgccccaccaaagaggggccgtggaaggccaccaaagccaaagactccattgccaccaggcactgttgtgtcccctccaaggccaaggggtcgtcccccaaaagaccctaatgcccctcctaagtctcccaaggctaaggccacccctggaagtggcaggccaagaggaaggcctaagaaggttcctcggtctccggccgtcgccgctccgaccgccgtctccagtggcaggcctcgaggtaggcctcccaaggtgaagcctcagttgacagaagtcagtgttgagtcatagaatgacttctttctttctaattgatgtcaaaagatgtagtgttctactcttgaagaagtgatgatgggtgtgatcttagattttgtgttgatgtaatttctttgtaaaattatgtagtggtagctaacttatcatgaggttctgtgttggtttttcttcctaaattattatcaaagtgaacagtgacttgaactaatgtgc

SEQ ID NO: 726 - DNA, 794 bp, Glycine max
  unsure (1)..(794): unsure at all n locations
agggattcataccaaaactttcactttcccaaagaaaattgggacctggctccggtgttaaagtttggaattttttttgaatgggtggattgagaaaactgggcaagctttggaacttcttcaaaagtctggtacttcaatggctactgaagaggttaatanacttcaatcacttcctccttaccctgagatgatagtgaaagcacttgaagccctgaatgaggctgatggatcgagtaaatcagcgatatcaaagtacatagaaaccacctacggtgagttgccagatgaaactgttttggggagtcacctgaacaagatgaaagagagtggagagcttgccttcaaacagaacaattacatgaaagctgatccaaatgccccaccaaagaggggacgtggaaggccaccaaagccaaaggttccattgccaccaggcactgttgtgtcccctccaaggccaaggggtcgtcccccaaaagaccctaatgcccctcctaagtcccctaaggctaaggccacccctgccactggcaggccaagaggaaggcctaagaaggttgctcgctcaccggccgtgccgtctcccaccgccgtctccactggaaggcctagaggcaggcctcccaaagtgaagcctcagttgacagaagttagtgttgagtcatagaatggtttcttagttataatgccaaatttagtgatatgctctgtagtggtggtgggtgtggtcttagattttgtgttgatgtaatctctttgtaaaattatgtagtggtagctaacctattgtg

SEQ ID NO: 727 - DNA, 671 bp, Glycine max
gaattccgtaaccatactaactagtagtacttgtgttgtgccactcaaactaaactaaactcaatttccaatttccttaatcttgttgtgttgatgtacatggagagaattagagtgaaggaggaagaagcagtgacatgtggtggtggttcatcatcatcatcatcttcgtcttcaagcttttctccacagcctatggaagggttgcacgaggtgggtccccctccgtttctgagcaagatctttgacatggtagaagattcttccacggactccattgtgtcatggagcatggctcgcaacagctttgtggtgtgggattctcacaagttttctgctgacattctgcctcgttacttcaagcacggcaatttctccagcttcattcgccagctcaacgcctatgggtttaggaaagttgatcctgatagatgggaatttgcaaacgaaggttttttggcaggacaaaggcacttattgaagaccattaagagaagaagaaatgtgtcacagagtttgcaacaaaaaggaggaagtggagcttgtgttgaagtgggggagtttggactcgaaggtgagttggagaggttgaaaagagacaggaacattttgatggcagaaattgtgagattgaggcaccaacaactgaactcaagggaacaattgaattc

SEQ ID NO: 728 - DNA, 1762 bp, Glycine max
ccacggacgcccccctttttcctttcctatcctctcctctccgaaacttctagaaacaactacaacctaccgctcatttttccggttccgaccctctttctgccctctcagtaaccttatcagatcgatcaaggtagaaaagcggttaggtagctaggtttcagtttcagatctggtagagagcttcatcatgaagccattaccggcggagcaaaccggtgaatcagcgccgacggagttgcagagatccattccgacgccgtttctgaccaagacgtaccagctcgtcgatgatccctccgcggatgacctaatttcctggaacgaagatggcaccagcttcatcgtttggcgacccgcggaattcgctagggatttgcttcctaagtacttcaaacacaacaactattccagtttcgtccgtcagcttaacacctatggtttccggaaggttgtccctgaccgttgggaattcgccaacgactgtttccggcgaggcgagagagctcttcttcgcgacatacagcgccggaaattactgccggttccgcctgcagccgcggcaccgacagcagtcacagctaatacggtgacggtggctgtggcggcaccggcggtgagaacggtgtctccgacgacttccggcgacgaacaggtactatcctcgaactcatctccgattgctgggaataataataatacagtgcaccgtaccacaagttgcaccactgcgcccgagctgctagacgagaatgaaaggcttaggaaagagaacatgcaactgagtaacgagttgagtcaattgaagggtttgtgtaataacatactcgctttgatgaccaattatgcttctggttttagccgccagcagttagaatcctccactagcgctgcgaggaccgtgccggtgccggaagggaaggcggcgctggagcttttgcctgcgaaacatgtttcatcggctgatgaggccgggcatgtaggtggtgccgcgccgtgcgcgacggcgaacgcgggggaagcagaggttccgaagctgtttggggtttcgattggactgaaacgatgtaggacagagtgcgagggcgaagcggagggagaagatcagaatcaaatgcaaacgcgagcacaagcacaaacgcaaacacaatcgtcgcaagaaccagatcacggttcagatgtgaaatctgaaccgcttgatggcgatgactcggatgatcaggatcatgatcctcgttggttggagctaggtaaatgaaatgatgctcctccttcttctaatttggtgaaaatgacagaaggcacgtgacttgggtggggacacgctgtactattagcgctgcgacgctgccattgattgggccatgtatgtaatgtaacattacgctagatggaaagggcggatgaccatccttgtatgtaactcgcggatgggatgaaaagtgtcaaagtcaaagctttgcttgagcgccaaaatttgtaatataaggatttatgtattcttgataagctggggttaaagaacatgtcaaaatggagtaactgaagcaacccctaaaagattcacttctcgttttcctttttaaggaacatttgtgggttacagcaaaatatgtagataaacgtgtctgacatcattacatttttcgaatttgattcgtgtattctaatgtttccatcctttgaaccgagttgttcctaagattcataatcgtaccatgtttctttttaatgaaaaaaaaaaaacgaaaaaaaggggggg

SEQ ID NO: 729 - DNA, 1707 bp, Glycine max
tttcctatcctctcctctccgaaacttctagaaacaactacaacctaccgctcatttttccggttccgaccctctttctgccctctcagtaaccttatcagatccgatcaaggtaaccaaataatatcacaagttattcttcttcacttatttatatttattttccttttggatttgataatattaagaggaaccaggatagataggtaggttctagcctttctgttatcattttcgaaacaaaccaaattgaaactgtttgagttttgtttagaaggctgttatgaatgaaactttgaagcttagaaaagcggttaggtagctaggtttcagtttcagatctggtagagagcttcatcatgaagccattaccggcggagcaaaccggtgaatcagcgccgacggagttgcagagatccattccgacgccttttctgaccaagacgtaccagctcgtcgatgatccctccgcggatgacctaatttcctggaacgaagatgaattccgcttcattgtatggcgacccgcggaatttgcaagggatttgcttcctaagtacttcaaacacaacaacttttccagtttcgtccgtcaacttaacacctatgggttccggaaggttgtccctgaccgttgggaattcgccaacgactgtttccggcgaggcgagagagctcttcttcgcgacatacagcgccggaaattactgccggttccgcctgcagccgcggcaccggcagcagtcacagccaatacggtgacggtggctgtggcagcaccggcggtgagaactgtgtctccaacgacttccggcgacgaacagccgccagcagttagaatcctccacaagcgctgtgaggaccgtgccggtgccggacgggaaggcgccgctggagcttttgcccgcgaaacatgtttcatcggctgatgacgccctgcatgtcggtggcgccgccggtgccgcggcgtgcgcgacggggaacgcggcggaagcagaggttccgaagctgtttggggtttcgattggactgaaacgatgtaggacagagtgcgaggccgaaccagaaggagaagatcagaatcagatgcaaacgcgagcacaaacacaatcacaatcgtcgcaagaaccagatcacggttcagatgtgaaatctgaaccgcttgatggtgatgattcggattatcaggatcatgaccctcattggttggagctatagggaaatgaaatgatgctccttcttcttcttgatctctctactaatttggtgaaatgacagtgcgcacttgctgcctgtactattagtgctgtgacgctgccattgggccggcacgtgacttggccatgtatttaactcgcggttggggtgaaaagtgcgaaacattgtactataaggaattatgtattcttctgattgctgggggttaaagaaagattatcatcgcgtcaaaatggagtaactgaagcaagggaaggacagacccctaaaagactcacgtctcggttttttatttcaaggaacatttgttggatacagcaaaatgtgtagatatttgtgtctgacatcattaaattttcgaatttgattcgtgtattgtaatgtttccatcctttgaaccaagtttgttcctaagcttcataattgtagcatgtatgttcttttaatgaaatgaaattctaatattatctaaaaaaaaaaacggaattc

SEQ ID NO: 730 - DNA, 293 bp, Glycine max
aggatagataggttctagcctttctgttatcattttcgaaagaatctgtagcagtgtaagtaccaaattgaattggttagattttgtttaagaaggcagttaatgaacgaaactttgaagcttagaaaagcggttaaggtagctaggttgagttccagatctggtagagaagttcatcatggcgccgttaccggcggagcaaaccggtgaatcagcgccgacggagttgcagagatccattccgacgccgtttctgaccaagacgtaccagctcgtcgatgatccctccgcgg

SEQ ID NO: 731 - DNA, 1264 bp, Glycine max
gaattccgctctcttctctctttacttccctcaatagcaaaagctatggctcttctactagacaactgtgaaagcattttgctgtctttggacacacacaaatcagttcctgcacctttccttaccaaaacataccaacttgtagacgacccttccaccgaccacatagtctcttggggcgaagacgacaccaccttcgtcgtttggagaccccccgagttcgctagggaccttctccccaactatttcaaacacaacaacttctccagcttcgttcgccaactcaacacctatggttttagaaagattgtgcctgatagatgggagttcgcgaatgagttcttcaagaaaggagagaagaacttgttgtgcgagattcacagaagaaaaacccatcaccagcatcatcaacaagtacaagccatgaacaaccatcaccaccatcataagtttggactcaacgtttcctctatctttcccttccacaataacagactcagtgtttccccttctcatgattcggacgaggtaataatacccaattggtgtgactcgcccccaagaggagttgccggtgttaacaacaacaacagcagcagcaacaactacaacactgtcactgcactttctgaggacaacgaaagacttaggagaagcaacaacatgctcatgtcggagctcgcacacatgaagaagctttacaacgacatcatctacttcgttcagaaccatgtcaagcccgtggctcctagcaacaacaacaatttcccttcttttctactctgcagtgataatagtaatatcaacaacaacacatcaccacaaacacaaacacaagcacaagcctctcctatgagtaacgtttcaacggtgcaaaggcaactgaagcagtttgtagggtgctattccaacaacacaaagcaagcgcgtgctgtgaactctcccactaacagttccataaccattgttgaggaagaggctaacagtaacagttgcaagaccaagctttttggggtgtctcttcaatccaagaaaagggtgcaccctgagtacgggtctaacaatgttcttcaaagctccgaaacgaataaggcgcgtttggctttggaaaatgatgaactattaggcttgaatcttatgcccccttcaacttgttaattagttagttaagttagtcctcccaaaaaaaaaaaaacggaattcttgctattttctaattttaattgcttcatatatgtataaattaatatttattttattcttt

SEQ ID NO: 732 - DNA, 1086 bp, Glycine max
gaattcgccagaaaccttcttcctaactacttcaaacacaacaacttctccagcttcgttcgccaactcaacacctatggttttagaaagattgtgccagaccgatgggagttcgcgaacgaattcttcaagaagggagagaaacacttgctgtgcgagatccatagaagaaaaacggctcagcctcaacaaggaatcatgaaccaccatcaccaccatgctcattctccgttgggagtcaacgttaacgttccaactttctttcccttctccagcagagtcagcatctctacttccaacgactccgacgaccaatccaactggtgcgactcgccgccacgtggagccacctcattggtgaacggtgcagcagcagccaactacaacacttccgtcacggcgctttcggaggacaacgagagactcagaagaagcaacaacatgctcatgtcggaactcgcgcacatgaagaagctctacaatgacatcatctacttcgttcagaaccatgtcaagccagtggctccaagcaattcttactcttcttctttgctactatgcaatacaccttctgccactccaataagtagtgccaataatgtttcaatgatgcaaaggccaatgaaccagcttctggggtattattctactaaccctaaacaaggagctacacaaattactcaacctcagacctatgttgtgaactctcccaccaacacatcaaggagttctataaccatttttgaagggcctgccagcagtaacattaatagctgcaagaccaagctttttggggtgtcgctgcagtccaagaaaagggtgcacccggattgtggatctaatccagagaccaacagggctcgtttggttttggaaaaagatgacttgggcttgaatctcatgcctccatccacttgttagttccactactgatgattaattctaaggaaaagtatgatatcccaagctagctagctacttatattaattttcttttacttgctttgatttgttttcttttttcttttttaactttttaaatcactactctcaagttttgagtcaaaaaaaaaaaaaacggaattc

SEQ ID NO: 733 - DNA, 489 bp, Glycine max
tcatgtcggagatcgaacacatgaagaagcttttcaacggcattatctacttcgttcagaaccatgtcaagcccgtggctccaagcaacaacaacactttcccttcttttctactctgcagtaataacattaatagcaatagcaacaacaacacatcatcacaaccacaagcctctcctatgagcaatgtttcaacgttgcaaaggcaagtgaagcaatttctggggtgttactccaacaacacaaagcaagcgcgtgctgtgaactcttctcccactaacagttccataaccattgttgaagaagaggctagcagtaacagctgcaagaccaagctttttggtgtgtctctccaatccaagaaaagggtgcaccctgatgagtacggatctaactatattcttcaaagctccgaaacgaataataaggcgcgtttggttttggaaaatgatgaactattaggcttgaatcttatgcccccttcaactt

SEQ ID NO: 734 - DNA, 1654 bp, Glycine max
ccaatccactgttgttgttgttgtctaaagccaaataaagtggctagctgtacgtgtggattcgattttcgtttggtccaaaattaacattaggatttcaataacagtgcttctcaaaatttctagaacccacgtcacacgtactctgggagggatgggcttggaaaatgcctgggttccgtattatataagagtctcgccctagaatcctcgagcaggagaatttaattcactgtactttatccttttgtgtggggaattatggtaattgattttgagggtttgactactcatggattatgatggtatgagaaaaccttccaaaaacttatttcactctcgcttcttcctttttgggttctattgctgggattgggagttcttgaccgctctcctcctttttagttcttccccttaatcttctttcttcacaatttttatttccttccttattagacgtattagatcagattgaacaaaagggtttttctttctttctttcttggggaataatagaaataagaaaagattagtgaggttgaaatgtcgcaacgatcggtgccggcgccgttcttgacgaagacgtatcagttggtggaggatcaggggacggaccaggtgatatcgtggggtgaaagtgggaacacttttgtggtgtggaagcatgcggattttgcaaaggatttgcttccaaaatatttcaagcacaacaacttctccagctttgttcgacagctcaatacctatggattccgaaaaattgtgccagacaaatgggaattcgcgaacgagcatttcaagcgagggcagaaggagcttctctccgagatcaaacgccgcaagaccgtgcctcaatcgtcggcacatcccccggaggccggaaagtccggcggcgacggcaactctccgttgaactccggcagcgacgacgcgggctccacctcaacctcgtcctcgtcctccggttccaagaaccagggatcggtggaaacaaacacaacgccttctcaccagttatcgagcgagaacgagaaactgaagaaggataacgaaacgctgagttgcgagctggcacgtgcgaggaagcagtgcgatgagctcgtggctttcctcagggaccgtctgatggtgggtcccgatcagatcgatcgcatcatgcggcaaggaagttgcggatctgaaaacgtggtaggtgaaggcggtggaggagactgtttgaaactgtttggtgtttggttaaaaggggatacgctaacagacaaaagaaacaaccacaaaagaggccgcgaagaccaaatgggcttcggtgggcctcgcctcaaggagtcaaagcccgttgttgactttggagctgtaaatatcatgatgaagagcaacagggtttgcaactgaatgaggctctcacctcgccacgtaatcttttaagcaattaaagaaggaataggataatgattagtgaaaaaagaaaaggctaagcgataattattttgggtaaaagaccaaatgcactagcctatgctttctacacatgttgaggttgtgtaatttgtaatgtacgtaggtcaatgcctctatgaatattgattaggaaattaaacaggttttaatagtcaattatgactttttatgtcaaaaaaaaaaaaaaacggaattc

SEQ ID NO: 735 - DNA, 619 bp, Glycine max
acgagagatagagagagagagctactgatagatagtgagagagtgagagagccttacagagactgattgagctctcgacttcttcctttttgggttctattgctgggattgggagttcctgaccgctcccctcccttttagttcctccccctaatcctccttcctcacaatttttatttccctccctattagaacgtattaattcagattgaacaaaagggtttcccttccttcctttcttggggaataatagaaataagaaaagattagtgaggttgaaatgtcgcaacgatcggtgccggcgccgttcttgacgaagacgtatcagttggtggaggatcaggggacggaccaggtgatatcgtggggtgaaagtgggaacacttttgtggtgtggaagcatgcggattttgcaaaggatttgcttccaaaatatttcaagcacaacaacttctccagctttgttcgacagctcaatacctatggattccgaaaaattgtgccagacaaatgggaattcgcgaacgagcatttcaagcgagggcagaaggagcttctctccgagatcaaacgccgcaagaccgtgcttcaatcgtcggcacatcccccggaggccgga

SEQ ID NO: 736 - DNA, 469 bp, Glycine max
ctgtactttatccctttctgtgagggaattatggtaattgatatcgaggttttgactcatggattctgatcgccccagaaaaccttccaaaaatttagttcactctcgcttcttccttttcggcttctattgctgggattgggagttcttaaccgctctcctcctttttagttgttccccttaatcttgttccttcatatttttatttttttttcttattagatcagattgaacaaaagggttgctctttattttttaatcttgggggaataatagaaatagaaataagaaaagattagtgaggttgaaatgttgcaacaacgatcggtgccggcaccgttcttgacgaagacgtatcagttggtggaggatccggggacggacgaggtaatatcgtggggtgaaagtgggaacacttttgtggtgtggaagcatgcggattttgcaaaggatttgcttccaaaatatt

SEQ ID NO: 737 - DNA, 521 bp, Glycine max
cccacgcgtccgcgataactggtgagaacgagaaactgaagaaggataacgaaacgctgagttgcgagctggcacgtgcgaggaagcagtgcgatgagctcgtggcttttctcagggaccgtctgatggtgggtcccgatcagatcgatcgcatcatgcggcaaggaagttgcggatctgaaaacgcggtacgtgaaggcgggggtggaggacactgtttgaaactgtttggtgtttggttaaaaggggatacactaacagactaaagaaacaaccacaagagaggccgcgaagaccaaatgggcttcggtgggcctcgcctcaaggagtcaaagcccgttggtgactttagttggaataggatgttgttgcttaatgaaaaaggaaaaggctgagcggtaatcatgtttgggtaaaaagaccaaaagcgcttgcctatgcttgctaaacatgttgaggctgtgtaatttttaatgtacgtaggcaaatgcctttatgaatattgattggggaattcaaca

SEQ ID NO: 738 - DNA, 909 bp, Glycine max
gaaatcgatccttgctgatcaaaatcacatttcctttcatttcttcgttatttcctaatcccaatggctcaagcactatcaacttcatcactactactatcacaaaaaacagggtcctacgtcaaaccacagaacaatgtaattgtaccctgcatggcctcttttccatcaaggaaggaatttccaaggctaggaagggtgagagctcaggcttctggtgataacaaagacaactctgtggaagtacaacatgttaacaagggtgaccaaggaaccgcggttgagaagaagccacgcagaactgccatggacatttcaccatttggtctcttggacccgtggtcacccatgaggagcatgcgccagattttggacaccatggaccgagttttcgaagataccatgacattccctggaagaaacgtgggagcaggggagatccgtgccccttgggacatcaaagatgaagaacatgaaatcagaatgaggtttgacatgccgggtcttgccaaggaagatgttaaggtatcagtggaggatgatatgcttgttataaaaggtggccacaaaagtgaacaagaacatggtggagatgattcttggtcaagcaggacctatagttcctatgatacccgtttaaagctgccggataattgcgagaaggacaaggttaaggcagagttgaaaaatggtgtgctttatatcaccattcctaagaccaaggttgaacgtaaggttattgatgtccaagttcagtgagatatgcttgggctttgtattatgcaacacggttttttaccatgtttttacgtttttaacatatatacacccattataagggttaaatatgttgtattaagcgtagagaagtttaaataaaactgctgttgtataattttctaatgtcaa

SEQ ID NO: 739 - DNA, 902 bp, Glycine max
caatctctcaatcgttttctacataatacaaacctctctaatttttgaagcttattatacccaatctcgatatgcagatcttcgtgaaaaccctaaccggtaaaacgattaccctagaggtcgagtcctccgacacaatcgacaacgtgaaagctaaaatccaagacaaggaaggcattccaccggatcagcagcgtttgatcttcgccggtaaacaactcgaagacggcagaactctcgccgattacaatatccagaaagaatcgacgctccacctcgtcctccgccttcgcggtggcatgcaaatcttcgtcaaaaccctaaccggtaaaacgattacgctagaggtcgagtcctctgacaccatcgataacgtgaaagctaagatccaggacaaggaaggcattccaccagaccagcagcgcttgatcttcgccggaaaacagctcgaagacggcagaaccctcgccgattacaatattcagaaagaatcgacgcttcatctggtgcttcgactccgcggagggatgcagatcttcgtgaagacgctcaccgggaaaactattactctggaggtggagagttctgatacgatcgataacgtgaaggcgaagattcaggataaggaagggattccaccggatcagcagcgtcttatcttcgctgggaagcagctcgaagacggacgcactctcgccgattacaatattcagaaggaatccacgcttcaccttgttcttaggctccgtggtggcgatttctagtttcagttgaatcttgctattgagattttctcttccttgaatgtgtatgatataacaaaatttctatgtctatgttgtccttaggctccgtggtggccttctctagtttggttgaatcttattaatcatgtgcacttc

SEQ ID NO: 740 - DNA, 1197 bp, Glycine max
gacgtagcatccacgggtccgtaaactcggaaatcggctccaaatcgttttctacataatacaaacctctctaatttttgaagcttattatacccaatctcgatatgcagatcttcgtgaaaaccctaactggcaagacgatcaccttggaggtggagtcctctgacaccatcgacaacgtgaaggccaaaatccaagacaaggagggcattcctccggatcaacagcgtttaatcttcgccggaaaacagctcgaagacggcagaaccctcgccgactacaacatccaaaaggagtccacgctccacctcgtcctccgcctccgcggcggcatgcaaatcttcgtcaaaacccttactggcaaaacaatcacgctagaggtggagtcctccgacacaatcgataacgtgaaagccaagattcaagataaggaagggattcctccggatcaacaacgtttgatcttcgccggaaaacaactcgaagacggcagaaccctcgccgattacaatatccagaaagaatcgactctgcatttggtgcttcgtctccgcggagggatgcagatcttcgtgaaaaccctaaccggcaaaacgattacgctagaggtagagtcctctgacacaatcgataacgtgaaagcgaagatccaggataaggaaggtattccaccggatcagcaacgtcttatcttcgccggaaagcagttggaagacggcagaaccctcgccgattacaatattcaaaaggaatcgacgcttcatctggtgcttcgtctccgcggagggatgcagatcttcgtgaagacgctcaccggaaaaacgattactctggaggtggagagttctgatacgatcgataacgtgaaggcaaagattcaggataaggaggggattccaccggatcagcagcgtcttatcttcgcagggaagcagcttgaggatggacgcacgcttgcagattataatattcagaaggagtccacgcttcaccttgtcctcaggctccgtggtggtgatttctagttcagttgaatcttgctaatgagatgtttcagttctaataataatttctctttcctttttccaatttctctgtcgtccttaggctccgtggtgtccctgtctagtttcggtactgtggaatcttgttaatgatgtgtacttcaattttattaatataatttcttcgttatgt

SEQ ID NO: 741 - DNA, 1153 bp, Glycine max
tctcgagccgattcggcgtcaggttcatcgtcccactttcttctccttttagggtttcctttttgtttctcctttccagatctgcatcttccattttttaggattaagcggtgagatttgcgaatctgagaaatggcggattcttctcgggaggagaacgtttacatggcgaaattggcggagcaggccgagcgttacgaggagatggttgagttcatggagaaggttgcaaagactgtggaggttgaggagttgacggtggaggagaggaatctcctctctgtggcttacaagaacgtgattggtgcgaggagggcttcgtggaggatcatatcctccattgagcagaaggaggagagcaggggcaatgaggaccacgtggccattataaaggagtacaggggcaaaattgaggctgaactcagcaagatctgtgatgggattttgaacctccttgagtccaacctcattccttccgctgcatctcccgagagcaaagtcttttaccttaaaatgaagggtgattaccacaggtaccttgccgagttcaagactggggcagagaggaaagaggcagcagagagtactttgcttgcttacaaatctgctcaggatattgctcttgctgacttggcccccactcaccccattaggctgggacttgctctcaacttttctgtcttctattatgaaatccttaactcgccagatcgggcttgtaatcttgccaaacaggcatttgatgaggcaatttccgagcttgacacattgggtgaagagtcatacaaagatagtacattgatcatgcaacttctccgtgacaatctgactttgtggacatcagacatcacggacgatgctggagatgagatcaaggaaacatctaagcaacaaccaggcgaataggcgatggcagttgcgatgtggtagttgattggatatgtattaccgataatatacatccaatgtggcttgccatagtggaactgtgtattaatgagtttcgtgatttcaattgcgggttgcgcttgagatttacaatgtttcagtcgtgtatgtgttttattgacgagaacaatgtggcttggtggtttagtgatttataaattttttattgttgctaaaaaaaaaaaaaaaaaaattgacgagttcg

SEQ ID NO: 742 - DNA, 517 bp, Glycine max
ccgggttgacaccaagccttccgccaacccttccgctaacgcgtccgttacttttccggttttaaacttttctgggggctattatgaaatccttaactcgccagatcgtgcttgtaatcttgccaagcaggcatttgatgaggcaatttccgagcttgacacattgggtgaagagtcatacaaagatagtacattgatcatgcaacttctccgtgacaatctgactttgtggacatcagacatcacggacgatgctggagatgagatcaaggaaacatctaagcaacaaccaggcgaataggcgatggcagttgcgatgtgggagttgattggatatgtattaccgataatatggatccaatgtggcttgccatagtgggattattgtattaatgaattttatgatttcaagtgcgcgttgcgcttgggatttacaatgtttcagtggattgtctaatgtgttttatggatgagaagaatgtggtttagtgatttataaattttttattgttgctta

SEQ ID NO: 743 - DNA, 709 bp, Glycine max
cgctattccactgtgtgctctctgtgtggtgtggtcgctcactgcaacaacaacaacaacaacaacgaacgccaacgcaaacgcaaacgcgaataagagcgagaacattctcttcagctcaacccttttctttttcgatggctaatcggcacacgattattctaatgcagacctcgcagaacagagcaactaggacgttcatggattatgaatccataactcaggccatggatggcatatgtgcactgtatgaaaggaaactgaaggagttgaatccggctatcagaaatctctcttatgacattactgatctctacaacttcatagatggtcttgcggacatgagtgccctagtgtatgatagttcaattcacgcttacttgccgcatgatcgactgtggatcaagcaacgaacattccaacatttgaagaaattagcacactgattaaccccttaacttttggcaatttaatgtaaagaaaatcgagaatggccgagagccctttctgttatgtgggctatgtactccgttggctacgtaatacgaatactgcaaatgctggcacgtaattataatatcaacagctggtactgctttagtttcataaacaaatgattgtcgttggcatggttgtgtatcttctatgtctgcaagacttgtcttttttaaaaatcttaatcttgtagttgtaatattaaatagtgagt

SEQ ID NO: 744 - DNA, 333 bp, Glycine max
attcatataatcatattctgaactgttttttcagtttcgctattccactctgctgtgtgcgtgtggtcggtcactgcaaacgcaaaaaccagaacattctcttcagcttaacccttctttttcgatggctaatcggcacacgattattcttatgcagacctcgcagaacagagcaactaggacgttcatggattatgaatccataactcaggccatggatggcatatgtgcactgtatgaaaggaaactgaaggagttgaacccgaccataagaaatctctcgtatgacattactgatctctacaacttcatagatggtcttgcagacatgag

SEQ ID NO: 745 - DNA, 393 bp, Glycine max
gttggggtgtttttttttggtttttttttttgaaaaaaaggacggacaaatatctactataacaatcaataacaagtacattagcaagtattcaagccaagtacatcagcgagtatataaaaatccaaaaactcgatccccctccacaagagaaaacatcaaaagtccaaaaaagagctaatgctcctccaacaagtaacaccactggtttcagaaaccgatttattcagacctctcattttttgctcgagcaagacactaaatcgcagctaaacataaacatacggtaataatgtgaagacaagctactttgaagtaacaccttaaagagacttcttggcaacgaatacaagaagatcaatgacacgtgagctgtatccccattcgttgtcg

SEQ ID NO: 746 - DNA, 957 bp, Glycine max
tcgagatattattcaaaaccatctgctgcaggatctttgcgtggttgttatggaaaaaccagtaactctcaggcgtgatcacatacgggatgagatagtgaaggttcttggatcagtgctccctattaatgatgatgaggttgttcttggacaatatgaaggctataaagatgacccaaccgtacctgatgagtctaacaccccaacatttgcaactgttgttctgcgaatacacaatgaaagatgggaaggtgttcctttcatactaaaagcagggaaggcactaaattctagaaaggcagagatcagggttcaattcaaggatgtccctggtgatattttcaagtgtaaaaagcaggggagaaatgagtttgttatccgcctacaaccttcagaagctatgtacatgaagcttacggtcaagcaacctggactggagatgtctacagttcaaagtgagctagacttgtcatatggacaacggtatcaaggagtaaccattcctgaggcttatgaacgcctaattcttgacacaattagaggtgatcagcagcattttgttcgcagagatgagttgaaggcatcctggcagatcttcaccccacttctgcacagaattgatgaaggggaattcaagccactcccctacaaaccaggaagcagaggtcctgcagaagcagatcagttacttgaaaaagctggctatgttcaaacacacggctacatatggatccctcctaccttgtagagtgatctaatgtaataagatgaggaatctttagctgctaatgaatacacaataagcttgtgaggcttcttccctttgaagcactcccacggatgtgtatcaagcatttggaacaatataagagactaagagtgtttggcacggtttgtgtaactgatttgcctttaaatgcaaaataaatggaaaatgaagtccatttactagtaaaa

SEQ ID NO: 747 - DNA, 851 bp, Glycine max
gtctcattcatttgcaacaacacaacctggggtgttaaatagaaaagaggagtttgagaatggcaacgatcagcgcggttcaggtggagttcctggagtttccagcggtggttacttcaccagcctccggcaagacctatttcctcggcggcgcaggggagagaggattgacgattgaggggaagttcataaagttcacaggcataggagtatacttggaggataaggcggtgccatcactcgccgctaagtggaagggtaaaacttcagaggagttagttcacaccctccacttctacagggatatcatttcagggccgtttgaaaagctaattagagggtcgaagattctgccattggctggcgctgaatactcaaagaaggtgatggaaaactgcgtggcacacatgaagtctgttgggacttacggtgatgctgaagccgcagccattgaaaagtttgctgaagccttcaagaatgtgaattttgcacctggtgcctctgttttctacagacaatcacctgatggaatcttggggcttagtttctctgaagatgcaacaataccagaaaaggaggctgcagtgatagagaacaaggctgtatcagcggcggtcttggagaccatgattggtgaacatgctgtttcccctgacttaaaacgcagtttggcttctcgattgcctgcggtattgagccacggcattatagtctgagaaatgagaaggatcaactttacctttttcaaatattcttgtttttctcctttctttcttgtcgcctgtcatgtatttttactgttttattaaataataaaattgagttttgttagagttgggaaaaaaaaaaaa

SEQ ID NO: 748 - DNA, 876 bp, Glycine max
cttccaacgttgcttattcacacaaacggaacaagatagatatatagaagagccttccatatatagcctcccaaaaaaatgaagagtactacctctttggctctctttctactttgtgccctaacttcatcatatcagccttcagccaccgctgatattgtattcgacaccgaaggcaatcctattcgaaacggcggcacatactatgtgttgccagttataagaggaaagggcggcggaatagaatttgccaaaaccgaaacagaaacatgccctctcactgttgtgcaatctccctttgaggtctcaaagggtctaccactgataatttcatccccatttaaaatccttgacatcaccgaaggacttattttgagcctcagtttcacttatgtacccccctgtgcctcaactccttctcggtggaccgttattctcaagggtctgccagaagaactccatgtcaaactcactggctacaaaaacacaatagatggttggtttaggattcaaagagcttcctctgaatccaactactataagttggtgttttgtacatctaatgatgatagttcgtgtggggatattgtggctcccatcgatcgtgaaggaaacaggcctttgattgtgactcatgatcagaatcatccattgttggttcagtttcagaaagttgaagcttatgaatcatcaactgcatgagttggccttgaaaaatcatgcacgtgctttccggaattattccgatactttggttacttgtaagaccgaataaataatgctttggttgtaataaattattattattattatcattattattccaacgctaaatagcatcaaatcaggatatataatgctatatttttatgtaaa

SEQ ID NO: 749 - DNA, 1950 bp, Glycine max
ctcgtgccattgcatttcgttactttcatttgttgtgcaatcttacaagttccaaacttctctattttgttattatttgttctcacttctcacacatacagatttgtagccttttatattatcatggcttctaaggtggtttcggttttggttatagcgatgatgttgtttgccatgaactgtaactgcactagtgttggccacatgccttcaaccaaagaggaaggtcacgattttcaggagtctaaagccaagaccacacaaactgcgaacaaggccatggaaactggtaaagagggacaagaagccgcagagtcatggacagaatgggctaaagagaaactcagtgaaggtcttggcttcaaacatgatcaggaatccaaagaatccaccactaacaaagtctctgattatgccactgacactgcacagaaatccaaggattatgcaactgacactgctcagaaatcaaaggactatgcaggtgatgctgctcagaaatcaaaggactacgcaggtgatgctgctcagaaaaccaaagactatgccagtgacactgcacagacatcaaaggactatgctggtgatgctgctcagaaatcaaagggctatgttggtgatgctgcacaaaagaccaaagaatatgttggtgatgcagcacagaagacaaaggattatgccactgacgcagcacagaagaccaaagattatgctactcagaagaccaaggactatgcaagtgatgcaactgatgctgcaaagaagactaaagattatgctgctcagaagactaaggactatgcaagtgaagctagtgatgttgcacagaacacaaaagattatgctgctcagaagaccaaggactatgccagcggtggtgcgcagaagaccaaggattatgccagcggtgctgcgcagaagaccaaggactatgcaagtgatgctgcgcagaagaccaaggactatgcaagtgatggtgctcaaaagagcaaagaatatgcgggtgatgtagcactgaatgccaaagattatgctcaaaaaagcaaagattacgcaggtgatgctgcacagaatgtcaaagattatgcaagtgatgcagtgcagaagagaaaagagtattctggtgatgcttctcacaagagcaaagaggcttctgattatgccagtgagacggctaagaagaccaaagattatgtcggtgatgctgctcagagaagcaaaggggctgctgaatatgctagtgatgcggctcagaggaccaaagagtatgctggtgatgctaccaagagaagcaaagaggcttctaatgatcatgccaatgacatggctcagaagaccaaagactacgccagtgacactgctcagagaaccaaggaaaaactccaagacattgcatctgaagctggtcaatacagtgcagagaaagctagagaaatgaaggatgcagcagcagagaaggcaagtgacatagcaaaggctgcaaagcaaaaatcacaagaggtgaaagagaaattaggtggacaacaccgggatgccgagctttgagaattgagatgtttgaatcactttgaaccttttaattatgccacaatagttgtctaaatctgccagaaataatgttgtgtgtatatattatatggcagtatctgtctttgtgtgatcaaggggtttggtctgatataatatattagcaactacgtagtcgaggttggaatattttgtactgaatatcctcatgttttcttcaagtttagttaaaaaataatagatactcagcatgtcatttctctgaataaagtacccaatttgtaggttccatctagctgaattggagacatatcatatgaatgtatgatgtgtatttagcgctttaaagtttaatcttcacttcctgcgaatggcagaggaggcattgtgtgaatgtgatatgaaagttcaggagttatagag

SEQ ID NO: 750 - DNA, 1843 bp, Glycine max
cttgcattgtatttcgtttgttgttcaatctaacaaacttctctatatcgtttactttttcaacacaccttacacacttctttatttgagcctttcatataaatatcatggcttcgagggtggtttcggttttggtgatagcgatgatgttgtttgccatgaactgtaactgcactagtgttggccacatgccttcaaccaaagaggaaggtcacgattttcaggaggctaaagccaagacaacacaaactgcgaacaaggccatggaaactggtaaagatgggaaagaagccgcagagtcatggacagaatgggctaaagagaaactcactgaaggtcttggcttcaaacatgatcaagaatccaccactaagaaagtctctgactatgccggtgatgctgctcagaaatcaaaggactatgccggtgacactgctcagaaaaccaaggactatgccggtgacactgctcagaaaaccaaggactatgccggtgacactgcacagacatcaaaggactatgccggtgatgctgctcagaaatcaaagggctatgtcggtgatgctgcacaaaagaccaaagaatatgttggtgatgctgctcagaagaccatggattatgccactgatgcagcacagaagaccaaagattatgctactcagaagactaaggactatgcaagtgatgcaactgatgctgcaaaaaagactaaagattatgctgctcagaagaccaaggattatgcaagtgatgcaactgatgctgcaaaaaagactaaggattatgctgcgcagaagaccaaggactatgccagtggtggtgcgcagaagaccaaggactatgccagtggtgctgcgcagaagaccaaggactatgcaagtgatgctgcgcagaggaccaaggaccatgcaagtgatggtgctcaaaagagcaaagaatatgcgggtgatgtagcacagaatgccaaagattatgctcaaaagagcaaagattatgcgggtgatgctgtacagaatatcaaagattatgcaaatgatgcagcgcacaagagcaaagattatgctggtgatgcttctcacaagagcaaagaagcttctgattatgccagtgagacggctcagaagaccaaagactatgttggtgatgctgctcagaaaagcaaagaggcttctgaatatgctagtgatgcggctcagaggaccaaagagtatgctggtgatgccaccaagagaagcaaagaggcttctgatcatgccaatgacatggctcggaagaccaaagactacgccagtgacactgctcagagaaccaaggaaaaactccaagacattgcatctgaggctggtcaatacagtacagagaaggccagagaaatgaaggatgcagcagcagagaaggctagtgacattgcaaaggctgcaaagcaaaaatcacaagagctgaaagacaaattaggtggacaacaccgggatgctgagctttgagaattgagacggtttttaatcactttgtaccttttaattatgccacaatagttgtccaattctgccagaaataatattgtgtgcgtatatatataagggagtgtccgtctttgtgttatgtacggggtgtggtctgatatattagcaactacatagtcgaggttggaatattttgtattgaatatgatgttttctttatgtatagttaaaatataatagatactcagcatgtcatttctctgaataaagtgcccaatttgtaggaaaaaaaaaaaaaaaaaaaaaaaaaaaaaaaaaaaaaaaaaagggggggcccccaaaaaaaaaacccccccccccggggaaaatttccggggggg

SEQ ID NO: 751 - DNA, 3012 bp, Glycine max
tctcgagccgattcggctcgcaagcttttctttttcttgttctttaattttctgattttagcaaattaaaatagtagtgttattggtaggttttggcaaagatgttttcagttccaggggtgtcgggaatcctgaacagaggaggagggcataagataaaagggacagtggtgttgatgaggaagaatgtgttggacttcaacagcgtggctgatcttactaaaggaaatgttgggggactcataggcaccggcctcaacgttgttggctcaacacttgataacctcactgctttcttgggccgaagtgtcgccctacagctcattagtgctaccaaacctcttgcaaatggaaaaggaaaagttggaaaggatacgttcttggaagggattattgtgtcgttaccaactttgggagcaggggagtctgcattcaatattcagtttgaatgggacgaaagcatgggaatccccggtgcgttttacataaagaactacatgcaagttgagttttacctcaagagtttgactcttgaagacgttccaaaccaaggaaccattcgctttgtttgcaactcatgggtttataacactaaactttacaaaagcgtgcgcattttctttgccaaccatacatatgttccaagtgagacaccagcagcacttgtggggtacagagaagaagaattgaagaatttaagaggagatggaaaaggagagcgcaaagaacatgataggatctatgattatgatgtctacaatgatttgggcaatccagatcacggtgaaaattttgctcgcccaattcttggagggtctagcactcatccctaccctcgtaggggaagaactggtcgatatccaacaaggaaagatcagaattctgagaagccaggcgaagtttatgttccaagagatgaaaattttggtcacttgaagtcctcggattttcttgcatatggaataaaatctttatctcaatatgtcttaccggcgttcgaatctgttttcgatttgaacttcacgccaaatgagtttgatagcttccaagatgtgcgtgacctccacgaaggtggaattaagcttcctacagaagtaattagcacaattatgcccttaccggtggtcaaagaactctttcgtacagatggtgaacaagtcctcaagtttccaccacctcatgtcattcaagtgagtaagtctgcatggatgaccgatgaagaatttgcaagagagatggttgcgggtgtaaatccatgcgtaattcgtggtcttcaagagtttcctccaaaaagcaatctggatcctacaatctatggtgagcaaaccagtaagataacagcagatgcccttgatctagatggatacacagtggacgaggcactagcaagtcggaggttatttatgttagattaccatgatgtattcatgccatatataaggcggataaatcagacatatgccaaggcttatgcgacaaggactatcctttttctgagagaaaatggaaccttaaagccagtggccatcgaattaagtttgccacattctgctggggatctgtcagctgccgtcagtcaagtcgtcttacctgctaaggaaggtgttgagagcacaatttggctactggccaaagcttatgtggtcgtaaatgactcttgctatcatcaactcatgagccattggttaaatactcatgcggtgattgagccattcatcatagcaacaaaccgacaccttagtgctcttcacccaatttataagcttctaactcctcactaccgtgacaccatgaacatcaacgcacttgctaggcaatctctcattaatgctgatggcataatagagaaatcttttttgccctcaaagcattccgttgagatgtcttcagcggtttataagaattgggttttcactgatcaagcactacctgcagatcttatcaagagaggagtggcaattaaggatccatctgccccacatggacttcgacttctgatagaggactacccttatgctgttgatgggctagagatatgggctgcaattaagacatgggtccaagaatatgtgtccttgtactatgcaagagatgatgatgtcaaacctgattctgaactccaacagtggtggaaagaagctgtagagaaaggtcatggtgatctgaaagacaagccatggtggcctaagttgcaaacaattgaagagcttgttgaaatttgcaccattatcatatggactgcttcagccctccatgcagccgttaactttggtcaatatccatatggaggtttcattctgaatcgcccaacttcttctagaaggttgcttcctgagaaaggcaccccagaatatgaagaaatggtgaaaagtcatcaaaaggcttatttgagaactattacatcaaagtttcaaactctagttgacctttcagtgatagagatcttgtcaaggcatgcttctgatgaggtctaccttggccaaagggacaacccacattggacctctgactcaaaagcattacaagcctttcaaaaatttggaaacaagctcaaagaaattgaggaaaaacttgcaaggaagaacaatgatcaaagtctctccaatcgacttgggccggttcaactgccatacactttgctccatcctaacagtgaggaagggttgacttgcagggggattcctaatagcatctctatctaagggagcatgtggtctactttaattacagtactgtacctaccttccaataaaaaagatgcaaggctagagatccaataaatcttgcatcctatctaatgtttcaattatcttgtgttttaatgctgtaatggagcctacaatttgcaaattaattaagagcaccgagcactattagtttgcgtttagcttctgtcatgtttattaagatatatttcgcagattgtaacacaaaaatttgtggcaaaacaactgtattgtacgaatattttgtattataagtatataagaaataaaaattattagtattagt

SEQ ID NO: 752 - DNA, 2946 bp, Glycine max
caggctttttctttttcttcttcttcttcttctttattttctcattttgccaaactaaaatagttgtgttggtagctttggcaaagatgttttcagcaggccataagatcaaagggacagtggtgttgatgcccaagaatgagttggaagttaaccctgatggctcagcagttgacaaccttaatgctttcttgggccgtagtgtctcccttcagctcattagtgctaccaaggctgatgcacatggaaaaggaaaagttggaaaggatacgttcttggaagggattaatacttcgttaccaactttgggagcaggagagtctgcattcaatattcattttgaatgggacggaagcatgggaatccccggtgcgttttacataaagaactacatgcaagttgagttcttcctcaagagtttgactcttgaagccatttcaaaccaaggaaccatccgctttgtttgcaactcatgggtttataacactaaactttacaaaagcgtgcgcattttctttgccaaccatacatatgtacctagtgagacaccagcaccacttgtgagttacagagaagaagaattgaagagtttaagaggaaatggaacgggagagcgcaaggaatatgataggatctatgattatgatgtctacaatgatttgggcaacccagataagagtgaaaagttagctcgtccagttcttggagggtctagcacctttccctaccctcgtaggggaagaactggtcgaggtccaacagttacagacccgaatactgagaaacaaggcgaagtattttatgttccaagagatgaaaatttaggtcacttgaagtctaaggatgctcttgagattggaacaaaatctttatctcaaattgtccagccggcgttcgaatctgcgttcgatttgaaatccacgccaattgagtttcatagcttccaagatgtgcatgacttgtatgaaggtggaattaagcttcctagagatgtaattagcacaattatccccttaccagtgatcaaagaactctatcgtaccgatggtcaacacatcctcaagtttccacaacctcacgtcgttcaagtgagtcagtctgcatggatgactgatgaagaatttgctagagagatgattgctggtgtaaatccctgcgtaattcgtggtcttgaagagttccctccaaaaagtaatctggatcctgcaatctatggtgatcaaagcagtaagataacagcagattcccttgatctagatgggtacacaatggacgaggcacttggtagtcgaaggttatttatgttagattaccatgatatcttcatgccatatgtgaggcagataaatcagctgaattctgccaagacttatgcgacaaggactatcctttttttgagagaagatggaactttaaagccagtggccatcgaattaagtttgccacattctgctggggatctgtcagctgccgtcagtcaagtcgtcttacctgctaaggaaggtgttgagagcacaatttggctactagccaaagcttatgtcatcgtaaatgactcttgctaccatcaactcatgagccattggttaaatactcatgcggcgatggagccattcgtcatagcaacacaccgacatcttagcgtgcttcacccaatttacaagcttctgactcctcactatcgtaacaacatgaacatcaacgcacttgccaggcaatctctaattaatgctaatggcataatagagacaacctttttgccctcaaagtattctgtggagatgtcttcggcggtttataagaattgggttttcactgatcaagcactacctgcagatcttatcaagagaggagtggcaattaaggatccatcaaccccacatggagttcgtcttctgatagaggactatccttatgccgctgatggactggagatatgggctgcaattaagacatgggttcaagaatatgtgcccttgtactatgcaagagatgatgatgtcaaaaatgattctgaactccaacattggtggaaagaagctgtagagaaaggccatggtgatttgaaagacaagccatggtggcctaagttgcagacacttgaagaccttgttgaagtttgcctcattatcatatggattgcttcagctctccatgcagccgttaattttggtcagtatccttatggaggtttgataatgaaccgcccaactgcttctagaaggttgcttcctgagaaaggcaccccagaatatgaagaaatgattaataaccatgaaaaggcttatttgagaacaattacatcaaagttgccgactctcattagcctttcagtgatagagatcttgtcgacacatgcttctgatgaggtctaccttggccagagggacaacccacattggacctctgattcaaaagcattacaagcctttcaaaagtttggaaacaagctcaaggaaattgaggaaaaacttgtgaggaggaacaatgatccgagtctgcagggcaatcgacttggcccggttcaactgccatacactttgctttatcctagcagtgaggaagggttaacttttaggggaattccaaatagcatctctatctaagggagcctgtggtttactctaattactctatatatagtgcatgtgtaccttccaataaaaaagatgcaagactagagatccgataaatcttgcatcttatctaatgtttcaattatcttgtgttttaattaatgttgtaattgagctcacagtttggttgtggtttgcaaataataagagcagtgagcactattagtttgtgtttagctcctgtcatcatgtttggtattatacattttgcagattacgtaacacaaatttatgttattagtaaaaaaactgtattgtacgaatattttgtattataagtatataagaaataaaaattattagtattagt

SEQ ID NO: 753 - DNA, 652 bp, Glycine max
cggacgcgtgggcggacgcgtgggcggacgcgtgggcttatgctgttgatggacttgaaatatgggatgctattaagacatgggtccatgagtatgtctccttgtattacccaacagatgatgcaattaagaaagactctgaactccaagagtggtggaaggaagctgttgagaagggtcatggcgacttgaaagacaagccttggtggcctaaaatgcagactcgtcaagagcttattcaatcatgttctactatcatatggattgcttcagctctccatgcagctgttaattttggacaatatccctatggtggttttatcctgaaccgtccaactcttagcagaagatggataccagaaccaggaaccaaagagtatgatgagatggtgaagagtccccaaacggcttatttgagaactatcacgccgaagcgccagaccattattgatctcacagtcatagagatattgtcaaggcatgcttctgatgagatctaccttggacagagggacaatccaaattggacctctaatccaaaggcaatagaagcctttaaaaagtttggaaaaaagctagcagagattgagacaaaaatctcagaaagaaaccatgatccaaatcttagaaatcgaaccgggccggctcaatt

SEQ ID NO: 754 - DNA, 738 bp, Glycine max
  unsure (1)..(738): unsure at all n locations
caaagcgtctcttacgtacttgccaaagaggaacaaaagtgtttgactgttgatagcatcatcaagaagaagttgtagagatgttagggctatttgacaagagccacaagatcaagggcactgtggtgttgatgcccaaaagtgtcttggacattaacgacttgaattcagtcaaaaatggcggagttggtggcgttgtctctggtatctttggcgccgtcgccgacgtaaccggccaaatagttgatactgcaactgccatcttttcccggaacgtctccttcaagttgatcagtgctacctccactgatgcaaagggaaatgggaaagttggaaacgaaacctttttggagaagcatctttcgacgctaccaaccttgggagataggagagatgcatacggtattcattttgaatgggatgctaactttggaattccaggagcaatttacatcagaaactatacgtatgatgagttcttccttgtcagtgtcactcttgaggacattccaaatcaaggaaccattcactttgtttgtaactcatgggtttacaactttaaagactacgacaaaaaggatcgcattttctttgccaataagacatatcttccaagtgcaacaccaggtccattagttaagtacagggaagaagagttggagattttaagaggaaatggaaccggagagctgcaggaacatganaggatctatgattatgatgtctataatgatttgg

SEQ ID NO: 755 - DNA, 597 bp, Glycine max
ctcgagccgctcgagccggttttggagggagagaaagaaaaaaggggaatttcaatggcgtcaagggtttactctgaaggcgaaggggaagagttcaaagggatcgaaggctgcggaagatcgatccgcgagcgagtgcctgaaggagtggacgacatgggcgatgcgaaaagcgaaggtcatcactcactacggtttcatccctttggtcatcgtcatcggtatgaactctgaccccaagcccccactttcatcagcatcacaaccccgtctgatccatctcttcaattcatccatcatcaacgcgacatcattctcattgtcctcgtattttgcccccattcatacatatgcaactttcgttatggatcaattttcacttgcacatcgcacgtagcatggtgtgatcaaagtcgattagcttgtctgcgtgtctggatagttttgaaagacgcggtagtaaataatccgttttttttatgattacaatgttcgaatatcgttcccgagttttggtttgtttatcttgatggattgtgatttttatgattttgatggatggtaatgggttgatgaatggatgaatgaaatgtgatt

SEQ ID NO: 756 - DNA, 2536 bp, Glycine max
gggatgagagttttggaattccgggagcattttacatcaaaaactatatgcaatctgagtttttccttgtgagtttcaagcttgaagacgttccaaatcatggaaccattctctttgcttgcaactcatgggtttacaacgcaaaattgtacaaaaaagatcgcattttctttgctaataaggcatatcttccaaatgacactccaactccactagtaaagtacagataagaagaattggaaaatctaagaggagatggaagaggggagcgcaaggaacttgataggatctatgattatgatgtctataatgatttgggcaacccagacgagaatgacgatctagctcgtcctattcttggcgggtctagtaagcatccataccctcgcaggggaagaactggtagaaaaccaacaaagaaagaccccagatgtgagagaccaaccagcgacacttacatcccgagagacgaaaattttggtcacttgaagtcatcagacttccttacatatgcaataaaatccttaactcaaaacgttttacctcaattcaacactgcatttggcatcaatacatgagtttgatagcatcgaggacgtgcattgtctcttccgatggcggagattatctcccttcagatgtactcagctgcattagccccatatcggtgatccgactaatcttccgcactgatggtgagctagccctcaagtttccaccacctcatgtcatcaaagttcgtgagtctgaatggatgactgatgaagaatttggaagagagatgcttgctggtgttaatcctggcatgattcaacgccttcaagagttccctccaaagagcaagctagatcccacagagtttggagatcaaactagtacaataaccaaagaacacttggagatcaaccttggtggactcaccgtagaacaggcactgaaaggtaacaaattgttcatattagatcaccatgatgcattcataccgtttatgaatttgatcaatggcctgcccactgcaaagtcttatgccacaaggaccatccttttcttgcaagacgatggcacattgaagccattagccattgagttaagtttgccacatcctacgggacatgagtttggagccgatagtagagtagtcttgcccccagccgcagtcaacagcgctgaaggcacaatttggttaattgccaaggcttatgttgctgtcaatgacactggctatcaccaactcataagccactggttaaatactcatgccacaattgagccatttgtcatagcaacaaacaggcatcttagtgtgctccaccctattcataagctgggtgttgcctcactaccgcgacacaatgaatatcaatgcacttgcacgacaatcgctcatcaacgcagatggcgttatcgagcgatcatttttgcccggcaaatactctctggagatgtcttcggcagtttacaagagttgggttttcactgatcaagccctttctgcagatcttatcaagagaggaatggcaattgaggatccctgtgccccccacggccttcgccttgtgatagaggactacccttatgctgttgatggactagaaatatgggatgctattcagacatgggttaagaactatgtctccttgtattacccaacagatgatgcaattaagaaagactctgagctccaagcttggtggaaggaagctgttgagacgggtcacggtgacttgaaagacaagccatggtggcctaagttgaacactcctcaagatttggttcacatttgctccattatcatatggatagcttcagctctccatgcagcagtgaattttggacaatacccttatggaggtttgatcctaaaccgtccaactttaaccagaagatttctccctgaaccaggaagcaaagaatatgaggagctttcaaccaattatcaaaaggcttacctgagaacaattacaagaaagattgaggcccttgtggaccttctcagtgatagagatattgtcaagacatgcttctgatgagatctaccttgggaagagggacagtgacgattggactgatgaccaaaaggcaattcaagcctttgaaaagtttggaaccaagctgaaggaaattgaggccaaaatcaattcgaggaacaaagattcaagccttagaaaccggtaatggaccggttcagatgccttatactgtgcttcttcctaccagtgaggaaggccttactttcagaggaattcccaacagcatctctatctaaggccagagtgcgtttatgtgtggttctctttccaaacctacgttacctttctcgttgacgagtaaatatgcaagcttatgcatgcatataataattgtcttatgcattcttaagtgttgtatgtggacgttatctagttttcgtatttaataagaatggtatcaccattactttgtttttactatcatgttcacccgtagtatgtaagattgatatcccaaactatgattatgaaatcaaatttctctatggcaccagttgggattttcc

SEQ ID NO: 757 - DNA, 2831 bp, Glycine max
gtccgcccacgcgtccgcccacgcgtacgcatagatgacaggcgggatgttcggaaggaaggggcaaaagataaaggggacagcggtgttgatgccaaagcatgtgttggacttcaacgccataacctccgtcggaaaaggcagcgctaaggacaccgccaccgatttcttgggcaaaggcttggacgcattaggtcatgcagttgatgcctctcactgccttcgctggccatagcatctctcttgcagcttatcagtgctcactcagactgatggtagtggaaaaggaaaagttggaaacgaagcctatttggaaaaacatcttccgaccttgccaacgttgggagcaaggcaggaagcattcgatattaactttgaatgggatgctagttttggaattccaggagcatttttacatcaaaaactttatgactgatgagtttttcctcgtcagtgttaaactcgaggacattccaaaccatggaaccattaaacttcgtttgtaactcatgggtttataacttcaaaagttacaaaaagaatcgcattttctttgtcaatgatacatatcttccgagtgctacaccaggtccactagttaagtacagacaagaagaattggaggttttaagaggagatggaacagggaagcgcagagactttgacagaatctatgattatgatatctataatgatttgggcaatccagatggtggtgatcctcgcccaatcattggaggctctagcaactatccttaccctcgcagggttagaaccggtagagagaagaccaggaaagatcccaacagtgagaaaccaggcgagatatatgttccaagagatgaaaacttcggtcacttgaagtcatctgatttccttacatatggaatcaaatccttatctcagaacgtgatacctttgttcaaatctataatatttgacttaagggtcacatcgagtgagttcgatagcttcgacgaagtgcgtggtctctttgaaggtggaatcaagctgccaacaaatatactgagccaaattagccccttatcagtcctcaaggaaatcttccgcactgatggtgaaaatacccttcaatttccagcacctcatgtaatcagagttagtaaatctggatggatgactgatgatgagtttgcaagagagatgattgctggtggtaatccaaatgtaattcgtcgtcttcaagagttcccaccaaaaagcactcttgatcccgcaacctatggtgatcaaactagtaccataacaaaacaacagttggagattaacttgggtggggtcacagtagaagaggcaattagtgctcatagattcattcatattagattaccatgatgcattcttcccgtatttgacgaagataaacagcctacctattgcaaaagcttatgccacaaggacaatcctgttcttgaaagacgatggatctttaaagccacttgctatcgaattaagcaagcctgcaacagtgagtaaagtggtgttgcctgcaacagaaggtgttgagagtacaatttggttgttggccaaggctcatgtcattgtgaatgactctggttatcatcagctcataagccattggttaaatactcatgcagtgatggagccatttgccatagcaacaaacaggcatctcagtgtgcttcaccccatttataaacttctttatcctcactacaaggacacaataaatatcaatggccttgctaggcagtccctgattaacgcaggtggcattattgagcaaacatttttgcctggaaagtactccattgaaatgtcatcagttgtttacaagaattgggttttcactgaccaagcattaccagctcgatcttgtcaagagaggattggcagttgaggatccctctgccccacatggtcttcgccttgtgatagaggactacccttatgctgttgatggacttgaaatatgggatgctattaagacatgggtccatgagtatgtctctgtgtattacccaacaaatgcagcaattcaacaagacactgaacttcaagcatggtggaaggaagttgtggagaagggtcatggtgacttaaaagataagccttggtggcctaaactgcagactgtggaggatctcattcaatcctgctctattatcatatggacagctttggctcttcatgcagctgttaattttgggcaatacccttatggaggttatatcgtgaaccgtccaactctagccagaaggtttatcccagaagaaggaaccaaagaatatgatgagatggtgaaggatcctcaaaaggcatatctgagaacaatcacacccaagttcgagacccttattgacatttcagtgatagagatattgtcaaggcatgcttctgatgaggtctaccttggccaaagggataatccaaattggactacggattcaaaggcattggaagctttcaaaaagtttggaaacaaactggcagaaattgagggaaaaatcacacagaggaacaatgatccaagtctgaaaagccgacatgggccagttcagcttccatacacattgctccatcgttcaagtgaggaagggatgagtttcaaaggaattcccaacagtatctccatctaaaatgtgtgtgtggtttgcttatctattgtgcttttgaataaaatagacaatacttgtctatggttattattggctgtatgtctgtatttggatgctctcgatcggtttgcaagtaataagagtgttttcactgtcactttgtatttcgatcatcttaattatgtttactagtaataatgtggaagctgtacgtttgttaattctaggtta

SEQ ID NO: 758 - DNA, 3064 bp, Glycine max
gacaaggcacaggcttccctccctgctttgaagaaacaaattagaagagtgtgttgcgttgtgttgaagtagcaagctagcaaagatgtttggcatcttaggaggcaataaggggcacaagatcaagggtactgaggtgttgatgagcaagaatgtgttggaacttaacgaaatagtgtccactactcagggtggtttggttggtgctgccaccggcatcttcggtgctgccaccggtattgttggtggagttgtcgatggtgctactgccatcttcaagtacaacattggcattcagttgatcagtgccaccaaagactgatggacttggaaatgggaaagttggaaagcaaacctatttggagaaacatcttccttcgttaccaaccttggggagacagtgccaagatgcattcagcggttattttgaatggcgtaatgatttgggaattccaggagcattttacatcaaaaattttatgcaatctgaatttgacctcgtgagtgtcactcgtgaagacattccaaatcatggaaccattcactttgtttgcaactcatgggtttacaatgcaaaaagttacaaaagggatcgcattttctttgctaataagacatatcttccaaatgaaactgggagctctactagtgaagtacagaggaagaagaattggaaaatctaagaggagatgggaaaaggagagcgcaaggaatatgataggatctatgattatgatgtctataatgatttgggtaacccagacaagagcaatgatctagctcgtcctgttcttggagggtctagtgcctatccatatcctcgcaggggaagaactggtagaaaaccaacaacaaaagactctaagagtgagtcaccatccagcagcacctacatcccaagagatgagaactttggtcacttgaagtcatcagatttccttacatatggaataaaattcatagctcaaaccgttttacctacatttcaatctgcatttggtttaaatgccgagtttgataggtttgacgacgtgcgtggactctttgaaggtggaattcatctccctacagatgcactcagtaaaattagccccctaccagtgctcaaggaaatcttccgcactgatggtgatacactcctcaagtttccaccacctcatgtcatcaaagttagtaagtctgcatggatgactgatgaagaatttggaagagagatgcttgctggtgttaatccatgcctaattgagtgccttcaagtgttccctccaaagagcaagctagatcccacagtgtatggtgatcaaactagtacaataaccaaagaacacttagagatcaaccttggtggactctctgtggaacaggcactgagtggtaacagattgttcatattagatcaccatgatgcattcatcgcatatctgaggaaagatcaatgaccttcccactagtaaagtcgtgtgccacaaggaccatccttttcttgaaagatgatggcaccttaaagccattggccatcgaattaagtttgccacatcctaggggagatgagtttggtgccgttagtagagtcgtcttgcccgcagaccaaggtgctgaaagtacaatttggctaattgccaaggcatattgttgttgtcaatgactcctgctatcatcaactcatgaggccactggttaaatactcaccctgacgattgaaccatttgtcatagcaacaaacaggcatcttagtgtgctccaccctatttataaacttttgttgcctcactatcgtgacaccatgaacatcaatggactcgcaagacaatcactcatcaattcaggtgggcattacttgagcaatcatttctgcctggtgccatttgctgtggagatgtcttcggcagtttacaaggggctgggttttcactgatcacagcccttcctgcggatcttatcaagagtaggaatggtattggaggatccatcctctccctatggccttcgccttgtgatagatgactacccttatgctgttgatggactagagatatggagtgctatccagacatgggttaaggactacgtctccttgtactatgccacggatgatgcagttaagaaagactcagaactccaagctttggtggacggaaactgttgagaagggtcacggtgacttgtaaagacaagccatggtggcctaagttgaactctctctcaagatctgattccacatttgctgcattattatatggactgcttcagcactctatgcagctgtgaatttcggacaataccctcatggcggtgtcatcctaaatcgttcaactctaaccagaagattgctcccagaggcaaggcaacaaaagaatatggttgaccttcacagtaatcatcagaaggcttatttgacaacaattacaggcgcgactgaggcccttgtggacctaacagtgatagagatattgtcaaggcatgcttctgatgaagtctaccttggacagagggacaatccaaattggactgatgacacaaaggcaattcaagcctttaagaagtttggaaacaagctgaaggaaattgaggacaaaatctcagggaggaacaagaattcaagccttaggaaccgtaatggaccggcgcagatgccctacactgtgcttcttcctaccagtggggaaggccttactttcagaggaattcccaacagcatctctatctaatgagagtgtgtggtgtgtggtagtgtggttttctttccttccaacgtacctctcattgacaaataaacgtgcaaacttatgtgtgcataattttcttatgtatgcctaaagttttgtaattggatgctatctagtttttcatatctaatagggatgttgtgtcaagtttttaatgtatagtattgtgctcctatcatgttcacccgtatcatgttcacccgtatgtaacgtctgatattctgatctatgaatgtcaaatcaaatttctctatgtcaccaacttggatttgatacccgtatgtaagtcctatcatgttacatatcttgactttgaattgggtacccgaattgttcca

SEQ ID NO: 759 - DNA, 2917 bp, Glycine max
ccctctcgtccgcccacgcgtccgcttcttttgggaaaagattaatatataaaagtgtggagtactgttgatagcacagatgtctgggcatcttcgacaaggggcaacagataaaggggacagtggtgttgatgccaaagaatgtgttggacttcaacgccataacctccatcggtaaaggtggtgttattgacacagccaccggcatcttaggccaaggcgtcagctttagttggtggagtaattgatactgccacttccttcttaggccgtaatatctccatgcaattgcatcagtgctactcagactgatggcagtggaaatgggaaagttggaaaagaagtctatttggaaaaacatcttccgaccttgccaacgttgggagcaaggcaggatgcgttcagtattatctttgaatgggatgctagttctggatttccaggagcattttacattaaaaaactttattgaactgatgagtttttcctcgtcagtgttaaactcgaggacattccaaaccatggaaccattgaatttgtttgcaactcatgggtttacaacttcaggagttacaaaaagaatcgcattttctttgtcaatgatacatatcttccaagtgccacaccagctccacttacttaagtacagaaaagaagaattggaggttttaagaggagatggaacagggaagagaaaggactttgacagaatctatgattatgatgtcctttaatgatttgggcaatccagatggtggtgatcctcgcccaatccttggtgggtctagcatctatccctaccctcgcagggttagaacaggaagagaaaggaccaggacagatcccaacagtgagaaaccgggcgaggtttatgttccaagagatgaaaattctggtcacttgaagtcatcggatttccttacatacggaatcaaatccttatctcacgatgtgatacctttgttcaaatctgccatttttcaattaagggtcacatcgagtgagtttgaaagcttcgaagatgtgcgtagtctctatgagggtggaattaaattgccaacagatatactgagccaaattagccccttaccagccctcaaggaaaatcttccgcactgatggtgaaaatgttcttcaatttccaccacctcatgtagccaaagttagtaagtttgggtggatgactgatgaggaaattgctagagaggtgattgccggtgtaaacccaaatgtgatccgtcgtcttcaagaattcccaccaaagagcacactctgatcccacactctatggtgatcaaaccagtaccataacaaaagaacaattggagattaacatgggaggggtcacagtagaagaggcacttagtactcagagattattcatattagattaccaagatgcattcatcccatatttgacgaggataaacagcctacctactgcaaaagcttatgccacaaggacaatcctgttcttgaaagatgatggtactttgaagccacttgctattgaattaagcaaaccacatccagatggagataatttgggtcctgagagtatagtggtgttgcctgcaactgaaggtgttgatagtacaatttggctattggccaaggctcatgttattgtgaatgactctggttatcatcagctcgtgagccattggttaaatactcatgcagtgatggaaccatttgccatagcaactaataggcatctcagtgtgctccaccctatttataaactactttatcctcactaccgcgacaccataaatatcaatggacttgctaggcagtccctgattaatgcagatggcattatagagaaatcatttttgcccggaaagtactccattgagatgtctacatagcagtctacaataattgggttttcactgaccaaaccttacacagctgatctcgtcgagaaaggattggcaattgaagatccctctgcaccccatggcctatcacttgtgataaaagactacccttatgctgacgaaggacttgaaatatgggatgctattacgacatgggttcatgaatatgtctcccttgattaccccaacagatgcagcagttcacacaagatactgaactacaagcatggtggaaggaagctgtggagaagggtcatggtgacttaaaagaaaagccttggtggcctaaaatgcagacaactgaaagatctcattcaatcatgctctattatcgtttggacagcttcggctcttccatgctgctgagaattatggacaattatccttatgggggcataatcctgaactcgtccaactctagccagaacgtttatcccagctgaaggaaccccagagtatgatgagatggtgaacaatcctcaaaaggcttatctggataccaatcacacccaattttgagacccttaattgaatctttcagtgatagagatattgtcaaggccatgcttctgatgagatataccttggagagagggagacttcaaattggactactgataagaaggcattagaagctttcaaaaggtttggaagcaaactgactggaattgaaggaaaaatcaatgcaaggtacagtgatccaagtctgagaaaaccggactgggccagttcagctgccatacactttgactccatcgttcaagtgaggaagggttgactttccaaaggaattcccaacagtatctctatctaattaaaaagagtttgtggtttccttatctatgtttgtacttctgaataacatagactttatgcatgtctatgcgtaattattgcctgaagcttctgcactattgtatttggatgctctcgcgttttcatataataaagtgtgttctcactttcactttgtatttagttcatcttatgtttaccagtaataataccgaagcgatcgcgtttattactag

SEQ ID NO: 760 - DNA, 1662 bp, Glycine max
ttcgcagagagagagagagagagagagtgagggagagagagtgaggcttcttctacccagatttgtttcattttaaccaaagaagaatctctcacaaatggcgtcaagagcaattgttcaacaacaacaagccagaggtgaagcagtagtagggggaggaaaacagcagaagaagaacggtgttgcggatggaaggaaccgcaaggcattgggtgacattgggaatttggccaatataagaagtgccgttgaagtcaagccaaatcgccctatcacaaggagttttggtgcgcaattacttgccaatgcacaagcagcagcagctgctgggaataacaagagacaagcatgtgctaatgtggctggtcctcctgccgttgctaatgaaggagttgcggtggccaaaagagcggcccccaaaccggtttcgaagaaagtgatcgtaaaacctaagccttctgagaaagtcactgacattgatgctagtccagataagaaggaggtcctgaaagacaagaagaaggaaggagatgccaaccccaagaagaaatcgcaacacactcttacttcagtgctcactgctaggagcaaggcagcatgtggcataacaaacaaaccaaaggaacagattattgacattgatgcttctgatgttgacaatgagcttgctgctgtggagtacattgatgacatttacaagttctacaaacttgttgagaacgagagccgcccccacgactatattggttcacagcctgagataaatgagaggatgagagctattctggttgattggctgatagatgttcacaccaagtttgaactttcacttgagaccctttacttgaccatcaatataattgatcggtttttagcagttaagacagttccaaggagggaactgcaattggttggcatcagtgccatgctgatggcatccaaatatgaagaaatctggccccctgaggttaatgactttgtctgcctctcagatagggcttacactcatgaacatatactaaccatggagaaaaccatattgaacaagctggaatggactttgactgtgccaacacctttagttttccttgttcgttttatcaaggcatcagtcccagatcaggagttggacaacatggctcatttcctgtctgagttgggaatgatgaactacgcaaccttaatgtactgcccgtcaatggttgctgcctcagcagtgcttgcagcaagatgcactctgaacaaggctcctttttggaatgagacacttaagctgcacactggttactcacaagagcaactcatggattgtgctagactattggtggggttctactccactcttgagaatggaaagcttagggttgtgtacagaaaatattctgaccctcagaagggtgctgttgctgtgctcccacccgctaaatttcttctgcctgaaggttctgcttcccaacatagttaaaaagaagaaaagggagaggagtagtcttttatgattttcagcaaataatcatttgtattttttttcttcataaggtacaagaattgatttttatataagatgcaagtttgtcacttgccaattgtcacagcatcaaacttttatttggggttcacgttctctgagtgtagtgtgcaaccaggttgcagttatataca

SEQ ID NO: 761 - DNA, 927 bp, Glycine max
cccacgcgtccgctcaaaagttcaaaatagtttatcactgagagatagcaccaattaatggagaaaatgagactggtactaattactttattcctgtttataggtgcagcagttgcagaagacactggtattgatgccattactcctgaagaaggcaaagccactaatattattgaggcgtatgagtcacctagattccaaaagtttgtgacacattgcagctcacatgttactcaaacatgcagtggaaatgatccattaaataatcaggaggctagtagaatgaatagtccatttgggttgtctttttgcctttttgattctatggagaagtgcttggcagaccataaagcctcacttaaagatccccaagataacaacaacctagcttcaatgtcgtctcttcctggctcaatccaaaatcagccactcctcattgagactgtaaaattcagagccgtcttgaaaacctgttcccatgtcagtgcacgatattgtttcactaatcctaacgttgctacatcggctttagcggattgtctcatgccatctctcactcattgtgtttatccttctagtagccctacgcccccgccaccacccccgccacccccgccacctggtatttagatctttgaagtacttgctaatagaagaataactgggtttgttgaatcagcctatgaactaatcctttgcctaatcaagggacaagtctttatctctcttgaaacatccctagcgatatgtcaataatacatatgattgacttgcaagcttgttttatggtgaaggatttattataccttcaatattccaattagctacatctggtttgtgtaagaaatctctcgtcatgaatcatgatcgataatgactttcctactaaatagtaattaataaaacttgctttacatcttcttcttt

SEQ ID NO: 762 - DNA, 819 bp, Glycine max
cttgtcttcatatggttgttgtgtcaccgaaaatggctaatgctacacctaatggttcggtgccacataaccatgtaggagcagtacttctaacaattcccacaatcaaaattgatgggaagcaaaccctagccaccgaagatcacaccagcattgactatttacagagggcacagtggcttcgtgcagcgattttaggagccaatgatgggttggtttcggttgcatcgttgatgatgggtgtaggagctgttaaaagagatgcaaaagctatgctacttgctggttttgcagggttagttgctggggcttgtggcatggcaataggagagtttgttgctgtgtacactcagtatgaggtagaggtaggtcaaatgaagagagatatgaatatgagtgtgggaggggagagagacttggagatggagatggagagaagaacattgcctaatccattgcaagctactttggcatcagcactctgcttttctataggtgcattggtgcctctactttctgctgctttcattgaaaactacaggactaggattattgtggttgtggcaatgtcttgtttggctttggtggtgtttggatgggtgggcgctaagctgggaaaaactcccaagtgaaaatcttgtgtaaggttccttcttggaagatgcattatagccatgtccatcacttttggctcaactaaattacttggtgctagcgcataataatgataagtaaggctgtgtatttattttacttatgagagtgattaattactactctagtgtcttttatgaataagattactttgtcaaaaaaaaa

SEQ ID NO: 763 - DNA, 1108 bp, Glycine max
ctagacagagcagagtgtccagggcagtttacaaagccaaattttgttccttagttgtttccttgttctctgtaactgatggctgattattcagcaggaactgaatcccaggaggtggtcgtaaatgtaaccaagaacacctccgaaacaatccaacgctcagactcccttgtctctgttcctttcttgcagaagttggtagctgaggcggtgggaacatatttcctgatatttgcagggtgtgcttcattggtggtgaacgagaactactacaacatgataacatttcctgggatagcaattgtttggggtctggttctgacggtgttggtttacactgtcggtcacatctctggtggccatttcaatcctgctgtcaccattgcttttgcctccaccagaagattccccttgatccaggtaccagcttatgtagtagctcaactcctaggaagcatacttgcaagtggaactctgagactattatttatggggaatcatgaccagttttcaggaacagtcccaaatgggactaacctgcaggcttttgtgtttgaattcataatgacctttttcctcatgttcgtcatatgcggggttgccaccgataacagagcggttggtgagttcgctgggattgcaattgggtcgacattactgctgaatgtgattattggagggccagtgacaggagcatcaatgaacccagctagaagcctaggacctgcttttgtacacggtgaatacgaaggaatatggatatatttgttggcacctgttgtgggggccatagctggagcatgggtatacaacatcgttaggtacacagacaagccattgagtgagatcaccaagagtgcttctttcctcaaaggccgtgctgcctccaaataatttatatgagcaaatggagacactcaataattttttccttgtaatagtaattaaaaaaaaataaatatgaatgaaagaaatcactcaaagaaactacgctatgctgtttcatttccttgttttatgaaaggtcatgcacttgaatatcatctccctctttttcctctctatttggattaaaaataaatgatttttgacattgttggtggatctt

SEQ ID NO: 764 - DNA, 961 bp, Glycine max
ggtttatcactaagaccaccaattaatggagaaaatgagagtggtactaattactctattgttgtttataggtgcagcagttgcagaaaaagctggtaatggcaaagctgccaataatcctgcagaagatgctagtgatggcgaacataatcttgtagaagaagctggtggtattggtgatgccattactcctgcagaaggcaaagcactaatctcagcgtatgagtcagctagattcaaaaagtttgtcacacattgcagctcacatgttgctcaaacatgcagtggaaatgatccattgcatgcatcaggaaggtgccatggaataaacgttccacttgggttgtcattttgcctttttgattctatggagaaatgcttgggagaccatgaagccaaacttatagatccgaacccaggtcccatgtcggctattcctaattcaatccaatctcagcaactcctcattgagactgtaaaattcagaactgtcttgaaaacctgtactcgtgttagtgcaaaattttgtttaagtgctcctaacgttgatacatcggttttaccggcatgtctcgggccatctctcaatcaatgtgtttatcctgcagctgatgcatttacacctggcccgccgctcgaactcccacctattattattatgaattagatctcggaagtactgcaaacagaagaataattgggtttgctcgatcagcctatctaataatcctttggcctagtgaagggactaaagtctttatctctcttgaaacgttccagtgatatgtcaattatacatgattgccttgcaattaaccttgtattatgatgaaggatctgttataccttcattattccaatttgcaacatctggtctgtataagaaatcactcatgtcatgaatcatgatcgataattacattcctactaaatagtaattactaaaacatgttttacatct

SEQ ID NO: 765 - DNA, 1303 bp, Glycine max
aaaattaagtaagaaaatggaggagaaaatattaatgagagtgatagtaattaccgtattcctatttataggtgcagcaactgcagaagatgcagcagctgaggcgtatgagtctcctaaattaaaaaagttgataacagattgcactgggcatgttggtgaaacatgcagtactactactagtagtagtggaagtgaagcattaatgcagaagcaggatgggttggctctttgccttttggattctatggagagatgcttgctagaccatcaaacaaatgttggaactcttggagacctaattacacttccaccctttccaccaagacctccagtagatcctaacataattccatttccaagacctccaaacatagttccattttcacctcgtggtcgtcgctccaaattagataaccatcaaacagatgctggaactcttggaaaagtaattccacttccaccgattcgaccaggaccgccattaaaaataattccatttccaggaactaacatagttccatttccaagacctccaaacatagttccatttccaagacgtcgtcgctccaaattagataaccatcaaacagatgctggaactcttggagacctaattatacttccaccctttccaccaagacctccagtagatcctaacataattccatttccaagacctccaaacatagttccattttcacctcgtggtcgtcgctccaaattagataaccatcaaacagatgctggaactcttggaagagtaattccacttccaccgattcgaccaggaccgccattaaaaataattccatttccaggaactaacatagttccatttccaaaaccttacattcctcattcatacaatacaattacgaaccttcttggcgcacgacgtgatcaagttcaagatttgccactcctcattcagactacacaattacgaaccgtattgggaatctgtagtcatgtcactgcacgaacttgtctcactgctccaaatgttgctacatcagatttagaggcttgtctcactccttccatgaatcaatgcgtctatcctcctggagctgaatctggtagcccgccaatataattagggcatacaggaaaatatgttggaagaataaatggacatgtcaactagatttaagcaagctagcttgttttatgatgaaggattttgtatcccttcaaaattccaatagctgcatcactggcatgcataaataaatagctgaatgttacgaacgatatggtgttcctactaaataaatagtcataaaaaaggcttatttct

SEQ ID NO: 766 - DNA, 954 bp, Glycine max
aaaattaagtaaggtgctaattattagcggctagctaagtaaccaagtaattaatggagaaaatgagggtgatagtaattactgtattcctatttataggtgcagcaattgcagaagatgttggtattggtctccttagcgaagctgaggcgtatgtgtctcctaagttaaaaaagttcatcacaccttgcacttcgcatgttggtgaaacatgcagtactactagtagtagtggaagtgaagcattaatgcagaaccagggtgggttggctctttgccttttcgattctatggagagatgcttggtagaccatggtgcccaactttatcaaacaagtgttactaaccttcaagttgaaccttctgaagtatttccaaggaagaataatccacaaggtggacgtaagtccaaattagatgaccatcaagttcaacccttatcatttcgattaccaccatttcgattaccaccaatgccaaaactaggaccaacaagtccgattataagaacgattccatcaccacccatagctcctcgagatttgtcactcattgagactatacaattacgaactgccttgagaacctgtactcatgtcactgcacgaacttgtctcactgctccaaatgttgccacatctgatttagaggcttgtctcactccatccatgaatcaatgcatctatcctcgtggagctgaatatggtagcccgcctattagggcgtaaattatttcaggcataaaggaaaatatgttggaagtattgctagtagaagaatagccagacatgcgtcaactagatttaagctagctagcttgttttatgatgaaggatttgttataccttcaaaattccaagtagctactacattgacatgcataaataaacattgaatgtcacgaacgatatggtgttcctactaaataataataaaacatgctttatttctatt

SEQ ID NO: 767 - DNA, 1798 bp, Glycine max
caattgcaacataactagcaaaaaaatggaccttctcctaaattgcctaaaccttaacaccattgctattgcatcaatcctttctctaatcttcttatgtttgtttctatatcgtaaaaattctcgtgggaaagatgctccagtagtgtctggtgcatggccaatacttggtcacctctcattgctgaatggttcacaaacaccacataaagtgttgggtgctttggctgacaagtatggacccttattcaccatcaagctcggtatgaaaccggctttggtactcagcaactgggaaatgtctaaggaattgttcaccacaaacgaccttgccgtttcatctcgccctaaactcgtcgccgttgaagtcatgtcttacaaccaagcctttgttggcttggcaccgtatggaccctattggcgcgagttacgtaaaattgtcacgttcgagtttctctccaatcgaagaatcgaacaacggaaccacattcgtgtctccgaagttcgaacttcgattaaagagctattcgacatttggtcgaatggaaataagaacgagtctaggtatactctggtggacataaaacaatggttggcgtatttgacatttaacatggttgtgcgaatggtcgttgggaagaggtattttggtgtcatgcacgtggaaggcaaagacaaagcgcaaaggtttatgaagaatattagggagttcatgaatttgatggggactttcacggtggcagatggggttccttgtttgaggtggttggatttggggggtcatgagaaggctatgaaggcaaacgctaaggaagttgataaattattgagtgagtggttggaggagcaccgtcagaagaagcttttaggtgaaaatgttgaaagtgatagagacttcatggacgtgatgatttcagcacttaatggtgcacaaatcggtgcgtttgatgctgataccatatgcaaagccacaagcttggaattgattttgggaggaactgattcaacagctgttacccttacatgggcacttagtcttctattgcgaaatcctcttgcattgggaaaggctaaagaagaaattgatatgcaaattggcaaagatgaatatatacgtgagtcagatataagcaaacttgtgtatcttcaagctatagttaaagagacactaagattgtatccaccagcccctttttcatcacctcgtgaattcacagagaattgcatcctaggtggataccacatcaaaaagggaactcgacttatccataacttgtggaagatccacagggaccctagtgtttggtcagacccattggaattcaaaccagaaaggttccttaccactcacaaagatgttgatctaaggggtcacaattttgagttgttaccctttggaagcgggagaagagtttgtgctggaatgtcccttggcttaaacatggttcatttcactttggctaatttattgcattcctttgacatcttgaatccatcggctgaacctgtagacatgactgaattctttggatttaccaacaccaaggctactccacttgagattttggtcaaaccacgtcagtctcccaactattatgaaactttataacccttatgtcagtcgtgtgatccttattgttctttttcaaatcgtggtttgtcgtctattctaagttaaaattgcgtctgttttggaaaattttgttatgtaaccttgcgatattttaatttttcttaattaggtagatgcattgtctggcttctatttactgatcgtgaaaacccgtggttttgttac

SEQ ID NO: 768 - DNA, 1825 bp, Glycine max
agttcactacctagctagctagctaaaatggaattagttctacatttcctaaacaccacaacaattggagttgtttctctaatcttcctcttgtgtttgtttttgtatggtcccttaaaaaaagttcacggtagcagcaaagaggctcccacagttggtggtgcatggccaatatttggccacctcccattgttgattggttctaagtcacctcataaagccttgggtgctttggctgagaagcatggacccttgttcaccatcaagctcggtgccaagaaggctttggtagttagcgactgggaaatggctagggaatgcttcacaacgaacgacgttgcagtttccgctcgccccaagcttctcgtcgctgagctcatgtgctacaacaacgccatgttgctcgtggcgccctacggtccctattggcgcgaactaaggaagatcattgtgacggagatcctctcctcgagccgtgtagagcaactacaagatgttcgtgtgtccgaagttcaaaattcgatcgtagaactctacgacgtttggcgtagccaaaagaacgagtctgactatgcatccgtggagttgaagcaatggtttgctcagcccatattcaacatggttctacgaatggtcgtcgggaagcggtttctgagtgccacggcgaccgacgagaaggcagagaagtgtgtaaaggctgtggacgagttcatgcgtctggcgggcgtgttcaccgtcggagacgctattccgtatttgagatggcttgattttggtggctatgagaaggccatgaaagaaactgccaaggaattggatgtgatgtttggtgagtggttagaggagcacaaacaaaatagggcttttggtgagggaacaacgttgatggaattcaagacttcatggacgtcatgctttcctcgtttgatggaaaaacaattgatggaatagatgcagataccatcatcaaatccactttactgacaataatttcaggaggaactgaatcaatcattactactcttacatgggcaatgtgtttgatattgaaaaatcctattgtattggaaaaagttaaagcagaacttgacatccaagttggaaaagagagatgtataagtgagtctgatataagtaagttaacatatcttcaagctgtggtcaaagaaactttaagattgtaccctccaggtcctctctcatcacctcgtgaattcacagaggattgcactttaggtggctacaatgtcaaaaagggaactcgtctaattacaaatatttggaagattcacacggatcctaatgtttggtcagatccattagagtttaaaccagaaaggtttcttaccactcataaagatattgacgttaagggtcatcattttcagctattaccatttggaagtggtagaagggtttgccctggaatatcctttggccttcaaacagttcatttggcacttgctagtttcttgcattcctttgaaatcttaaatccgtcaactgaacctcttgatatgactgaagcctttggagtaaccaacactaaagccactccacttgaggttcttgttaaaccatgtttatctccaagttgttacaaaagtatgtgatatttaattatatgttagttgtgtgtattgttgattgttaaactatatgtaatatgttttggtgtaataaggtttgccttgcaaactattcgaaaactatttattttgttgctttcattttaatcatcacgaaggaagagatgtatttgaagaattttgttatggattatttggtcataatagtatttgggttaaggtcaaaattatacttt

SEQ ID NO: 769 - DNA, 946 bp, Glycine max
cccatgcttccgcccacgcgtccggcagccactatagtaaacaatcttctctatctaaaatggagtttgttctaaattacctaaatgccactgccattggagttctttctctaaccctcttctttttgtttttgtataatcccttcaaatttgcattaggtaaaaaagaggctcccaaagttgcaggtgcatggccaatacttggtcacctaccactattgagtggttcagagacacctgatagggttttgggtgctttggctgataagtatggacccatattcaccatcaacaatggtgtcaaaaaggttttggtaatcagcaactgggaaattgctaaggaatgcttcaccaaaaacgacatcgtcgtttcgtctcgccccaagcttcttggcattgaactcatgtgctacaaccaagccatgtttgggtttgcaccctatggtccttattggcgcgaactaagaaagattgtaaactttagaaatcctctccaatcgccgagtagagcaactagagaatgttcgtgtctccgaagttcaaagttcgatcaaagagctcttcaatgtttggtcaagcaacaagaataatgagtctggctatgcgttgctggagctgaagcaatggttttctcaattgacatacaacatggttcttcgaatggtcgtcggaaagcgacttttcggtgctagaactatggatgatgagaaggctcagagatgtgtgaaggctgtgaaggagttcatgcgtctgatgggggtgttcacggtggcagatgctattcctttcttgagatggtttgattttggtggctatgagaaggccatgaaggaaactgccaaggatttggatgagatttttggtgagtggttagaggagcacaaacaaaatagggcttttggtgagaacaacgttgatggaattcaagacttcgtggacgtcatgc

SEQ ID NO: 770 - DNA, 516 bp, Glycine max
  unsure (1)..(516): unsure at all n locations
cagatcttagtgtttggtcaaatccattagagttcaaaccagaaaggtttctaaccacccataaagacattgatgtcccctaacatcaatgtctttatgggtggttaggggacatcattttgagctattaccatttggtggtggtagaagagtgtgccctggaatatcctttagccttcaaatggttcatttgactcttgccagtctttgtcattctttttcattcttaaatccatcaaatgaacctattgatatgactgaaacctttggattaaccaatactaaagctactccacttgagattttaattaagccacgattatcttctagttgttatgtatgaaagcatgtgattcttgtcttagcggtttgtggaaaattcattgttaaactatgtgatcttcttttagttaaatcaggtttgcctgataaattatgtcgaaactatgtataattgtctctcatttaattctaccatggattgttaagggacnnnnnnnnnnnnnnnnnnnnnnn

SEQ ID NO: 771 - DNA, 1261 bp, Glycine max
ggctcttgctattttcatccacctaatgtgacaagatgagtatgcaagttaaacaaacaactgcaagggaaataggggcctaactttatatatctgcgtgagtgagtgcgtcatttctttctttctctgcttccctaaccaactgaaccagcagcaacatttgcgcaaatcgaaattgattctctgccacttaacctaaaatggaaatctttccgattcccgccgaatcctacactctcggcttcatcggcgccggaaaaatggccgagtccattgcccgaggcgccgtccgctccggcgtcctgccgccttctcgcattcggaccgccgtccacttcaacctcgcccgccgtggcgccttcgagtccttcggcgtcaccgttctcccttcaaacgacgacgtcgttcgcgaaagcgacgtcgtcgttttgtcggtcaaacctcaattagtgaaagacgtggtgtcgaaattgacgccgcttttgacgaagcacaagcttttggtttcggtcgctgctggtaccaaattgaaagatcttcaggaatgggctgggaacgacagatttataagagtgatgcctaataccccagcagctgttggccaggcagcatctgtaatgagcttggggggatctgcaacggaagaagatggaaatattatagcccaattatttgggtcaattggcaaaatatggaaagctgaggaaaagtattttgatgcaataactggcctgagtggcagtggtcctgcttatgtttatttagcaatagaggctttggctgatggaggagtagcagctggtttaccacgtgatctttcattaagtctagcttctcaaactgtattaggggcagcatcaatggtctcccagactgggaagcacccgggacagctcaaagatgacgttacttctccaggtgggacaacaattacgggcattcatgagttagaaaatggtgggttccgtggaacactgatgaatgctgttgttgctgctgctaagcgcagccgagagctttcctgaatcaagagattaggattctactttttttttagacgaaaatctgatttcggtcgaattttcagtcactattatgagaacttggggctcttctttgagaggagtaaacaagaatgtttggccataacagtcttttcgagctagcatcatgaatgcatccgagtctatatgagaacttgaagtttccttgcaaaagaagagtactagcagtaaaaataaaataaaaccacttggccact

SEQ ID NO: 772 - DNA, 1098 bp, Glycine max
gaatttcaatatccgctcaaaccctaacctaactcctctcgtcgtcacaaaaagtcttcttctccgatcgttacgatgttggaactccgtctcgtgcaaggttcccttctgaagaaggttctggaatcgatcaaggagctcgtaaacgacgcgaacttcgactgctcctccaccgggttctccctccaggccatggattccagccacgtcgccctcgttgcgctcctcctccggtccgagggctttgagcactaccgctgcgaccgcaatacctccatgggcatgaacctcaacaacatggccaagatgctcaagtgcgccggcaatgacgacatcataaccatcaaggccgacgacggcagcgacaccgtcactttcatgttcgaaagccctacacaagataagatttctgattttgagatgaagctgatggacattgacagtgagcaccttgggattccagaggcagagtatcatgctattgttaagatgccatcctctgagtttgctaggatctgcaaggatctcagtagtattggtgacactgttgtcatttcggttactaaggagggtgtgaagttttccaccaaaggagatattggaactgccaatatagtttgtaggcagaatacttctgtggacaagcctgaagaagcaactgtcattgagatgaatgagcccgtgtccttgacatttgctttgcgatatatgaactcttttacaaaggcaacgccattgtctaacacagttaccattagtctttcaaatgagttgccagttgttgttgagtacaagattgctgagatgggttatgtgcggttctatttggctcccaagatagaagaggatgaagaagatacgaaacctcaagtttaatctacctattagatgttgggttaggatattaggattttaatgtctttgaacttgtagctttcgtcatacatcttctgttgaagatattttaaccgtgtgagcaatgaattcacattttgtggatttcttagatgtgtattggttacctaccaccttattttccctcgatttgattgttaagaacaattcgaaacaattggtaaaaaaaaaaaaagggcggcc

SEQ ID NO: 773 - DNA, 512 bp, Glycine max
gacgcctcagttccattttcaattttaatttcctctcaaaccctaaccctaaccctaaccctccccgtcacaaaagaaaaccctctttgtccgatcatcgtcgtcaagatgttggaactccgtctcgtgcaaggctccctcctgaagaaggttttggaatccgtcaaggagctcgtgaacgacgcgaacttcgactgctcctccaccgggttctccctccaggccatggactccagccacgtcgccctcgtcgctctcctcctccgatccgagggcttcgagcactaccgctgcgaccgcaacatctccatgggcatgaacctcaacaacatggccaagatgcttaagtgtgctggtaatgacgacatcatcaccatcaaggccgacgacggcagcgacactgtcactttcatgttcgaaagccctacacaagacaagatttctgattttgaaatgaagctgatggacattgatagtgaacaccttgggattccggaggcagagtatcatgc

SEQ ID NO: 774 - DNA, 528 bp, Glycine max
tcccgggccgacccacacgtccacccacgcgtccgggcagccaaagaaaagaaaatcctcaattttctgagcagccaaacactctctctctgtctctcgaaaattctcagtttgcagagaaaatctgaatcatgtcgtggcaagcgtatgtcgacgatcaccttctgtgtgacatcgaaggtaaccacctcactcacgctgctatcatcggccaagacggcagcgtttgggctcagagtaccgacttccctcagttcaaacctgaggagataactgccatcatgaatgactttaatgagcctggatcacttgctccaactggattgtatctcggtggcaccaaatatatggtcatccagggtgaacccggtgctgtcattcgagggaagaagggtcctggtggtgttactgtgaagaagaccggtgcggccttgatcattggcatttatgatgaaccaatgactccaggtcaatgcaacatggtagttgaaaggcttgctgattatctcattgaacagggtctctaat

SEQ ID NO: 775 - DNA, 788 bp, Glycine max
cggctcgagacgggccgaagatgacgacagatgaacgcagccaagaaaagaaaatcctcacccattttcttcgtagccaaacactctgaaattctcagttatgtcgtggcaagcgtatgtggatgatcacctactgtgtgaaatcgaaggtaaccacctcactcacgccgctatcatcggccaagacggaagcgtttgggctcagagcaccaacttccctcagttcaaacctgaggaaataactgccatcaataatgactttaatgagcctggatcacttgctccaactggattgtatatcggtggcaccaaatacatggtcatccagggtgagcctggtgctgtcattcgagggaagaagggtcctggtggtgttactgtgaagaagaccggtgcggccttgatcattggcatttatgatgaaccaatgactccaggtcaatgcaacatggtagttgaaaggcttggcgattatctcattgatcagggtctctaatctttgctttatgtcttgttatcgtgcatatttcattggcttctgtacaagtttttgcatcgacctggactggaatgctttgattgcagtgtaataatcttgtgagtatgaaaagtcacgggatctgcgtgtagtgaagaaagtgtttgatgcttgagaaatgatgactataatctctatctttgtacttttttagtggggtacctgtatacattacagtggttttaaaattttaatgctatgttataatggttggcatatttatcaaaagtttgcttattctaaatgacaa

SEQ ID NO: 776 - DNA, 501 bp, Glycine max
gacacaattaatcttgtgcataacaatttcacaagtgctattttcagtacattttcttagttgtgataatatgagagtgagcgcagagtttgagcgtgttctcaagtatttcgatgaagatggggatggtaagatttccccatctgagcttaggaaccggctatgcatgatgggtggtgagttattgttcaaagacgctgaaaagttgattgaggaattggattctgacggtgatgggtttttgagtttggaagattttgtgaagataatggaggcagcaggggaagatgagaagttgaaggatttggcggaagcttttgagatgtaccatgacactgaaatgtttgggtttattacacccaaaagcttgcaaaggatgctgaataggttgggagaatcaaaatccatggagcaatgcagagcaatgattggccattttgatttgaatggagatggcgtgcttagctttgatgaatctggagtgatgatgcagtgatgatt

SEQ ID NO: 777 - DNA, 870 bp, Glycine max
ggagcgaaaataggacaatgaaaaggagattcctgtacagtgtacagggatttataggcagagatagttgcgtaatatgaacgcagctgagaagcagttgattttccgatcagaaaatctgaatcatgtcgtggcaagcgtacgtggatgatcacctgctgtgtgaaatcgaaggtaaccacctcactcacgccgctattatcggccacgacggcagcgtttgggctcagagcgccaacttccctcaggtaacgcttctagattcgccgatccctgagagtgttgattatatactgtgcaactatgtttgattttggcgtggttcaaagctgaggaaataactgctatcatgaatgactttaacgagcctggatcacttgctccaactggattgtttctcgctgccaccaaatacatggtcatccagggcgagcctggtgccgtcattcgaggcaagaagggtcctggtggtgttactgtgaagaagaccggtgcggccttgatcattggcatttatgacgaaccaatggctccgggtcagtgcaacatggtagtggaaaggcttggtgattatctcattgaacagggtctctaatcctctatttatgtcttgctatcgtgcatatttcattggcttctgtacgagtttttgcatcgacctcgactgtaatgctttgattgcagtgtaataatattgttgggtgggtatcaaaagtcacggcatgtgcgtgttgccaagaaaaagtgttttggtgcttgagaaattatgactataactctctatcgttgtacttttttttgcggggtccctgtatacattagtgagttaaaattttaatgttatggtactatgtttctcacaattcacat

SEQ ID NO: 778 - DNA, 652 bp, Glycine max
tcgtcacaaccaagcacctacataactaaataatcttgtgcctaacaatttcacaagtgtaatttttttcatcaatatttttgcgtgtattttctaaagttatgaggatgaacacagagtttgagcgtgttcttaagtattttgatgaggatggggatggtaagatttctccatgtgagcttaggaaccggctaggcatgattggtggtgagttgttggccaaagatgctgaaaagttgattgaggagttggattctgatggtgatgggtttttgagtttggaagattttcgtgaagacttatggaggcagctggggaagacgagaagttgaaggatttggctgatgctcttcagatgtaccatgacactgaactgcttgggttgatgactcccacctgcttgcaaagcatgcttcatatgttgctataatcaaacctcatgactcgctcaactcaatgatatatcattgtgacctgaatcgtgatcatccacttagatcctgttactgtcatgtcgatgaacgaagatgactggtttgtatctgtataagataccggtgcggccgtgatcattggcatttatgatgaaccaatgactcccagtcaatgcaacatggtagttgcaaggcttggcgattatctcattgatcag

SEQ ID NO: 779 - DNA, 819 bp, Glycine max
  unsure (1)..(819): unsure at all n locations
gggcagtctcaagaaaaggaaagatccgtcacccatctttgtgtggtagcgcgaaacacatnnctgaaagttctcagtgtattgtnncgtggcaagccgtattgtgtgatgaatcnaacctcactgtgtgagaatcgaagagtaaaaccacctcacttcacgcgcgctatcnatcggccaacgacgggaaagcgtttgggcttcagagcanccaacttccctcagttcaaaacctgaggaaataactgccatcaataatgactttaatgagcctggatcacttgctccaactggattgtatatcggtggcaccaaatacatggtcatccagggtgagcctggtgctgtcattcgagggaagaagggtcctgttggtgttactgtgaagaagaccggtgcgggcttgatcattggcatttatgatgaaccaatgactccaggtcaatgcaacatggtagttgaaaggcttggtaattatctcattgaacagggtctctaatctttgctaaatgtgttgttagcgaacatatttcagtggcttctgaacaagtttttgcatccacctggagtaaaatgcttttacagcagtaaaataatcttgtgagtaaaaaaagccgcggaatctgcgtgttgcaaaaaaagtgtttaacgcttaaaaaataaccaaaaaaatctctatcttggcccttttaaaggggggcccgtaaacaaaaacccgggttttaaccttttaaaggaaagggaaaaagggtggcaaattttaaaaaaaaaaaannnnnnnnaaaaaaaaccgccgctctagaggatcccagcttacgt

SEQ ID NO: 780 - DNA, 440 bp, Glycine max
gtacagtgtacagggatttataggcagagatagttgcgtaatatgaacgcatctgagaagcagttgattttccgatcagaaaatctgaatcatgtcgtggcaagcgtacgtggatgatcacctgctgtgtgaaatcgaaggtaaccacctcactcacgccgctattatcggccacgacggcagcgtttgggctcagagcgccaacttccctcagttcaaagctgaggaaataactgctatcatgaatgactttaacgagcctggatcacttgctccaactggattgtttctcgctgccaccaaatacatggtcatccagggcgagcctggtgccgtcattcgaggcaagaagggtcctggtggtgttactgtgaagaagaccggtgcggccttgatcattggcatttatgacgaaccaatggctccgggtcagtgcaaca

SEQ ID NO: 781 - DNA, 516 bp, Glycine max
cgagctcgagcgcgcacctacataactaaataatcttatgcataacaatttcacaagtgttattttgcgttaattttcttcagttatgagggtgaacacagagtttgagcgtgttcttaagtattttgatgaggatggggatggtaagatttccccatctgagctcaggaaccggctaggcatgatgggtggtgtgttattgttcaaagacgctgaaaagttgattgaggaattggattctgacggtgatgggtttttgagtttggaagattttctgaagatcatgtcgtggcaagcgtacgtggatgatcacctgctgtgtgaaatcgaaggtaaccacctcactcacgccgctattatcggccagacggcagcgtttgggctcagagcgccaacttccctcagttcaaagctgaggaaataactgctatcatgaatgactttaacgagcctggatcacttgctccaactggattgtttctcgctgccaccaaatacatggtcatccagggcgag

SEQ ID NO: 782 - DNA, 484 bp, Glycine max
cagaaaatcctcacccattttcttcgtagccaaacactctgaaattctcagttatgtcgtggcaagcgtatgtggatgatcacctactgtgtgaaatcgaaggtaaccacccgaagaccacgccgctatcatcggccatttggcggaagcgtttgggctcagtaccatgacaactgcaatgtttgggtttattactcccaaaagcttgcaaaggatgctgggtaggttaggagaatcaaaatccatggagcaatgcacaactatgattggccactttgatttgaatggagacggcctgctttgctttgatgaatttagagtcatgatgcagtgatgagtctttgtctttatttgatttaatgggggatggggtagcatgagattgaatcacacttatacagaattctacaattaggagctggacgagagttgctgattgatagaaaggctgatttatgtttaagattgtgatgtctgggggtgc

SEQ ID NO: 783 - DNA, 278 bp, Glycine max
cctcgagccgaatcggctcgaggaaaagaaaatcctcaattttctgagcagccaaacactctctctctgtctctcgaaaattctcagtttgcagagaaaatctgaatcatgtcgtggcaagcgtatgtcgacgatcaccttctgtgtgacatcgaaggtaaccacctcactcacgctgctatcatcggccaagacggcagcgtttgggctcagagtaccgacttccctcagttcaaacctgaggattcctttactctttttcccagtcggatctcgat

SEQ ID NO: 784 - DNA, 443 bp, Glycine max
gaacgcagccaagacaagaaaatcctcacccattttcttcgtagccaaacactctgaaattctcagttatgtcgtggcaagcgtatgtggatgatcacctactgtgtgaaatcgaaggtaaccacctcactcacgccgctatcatcggccaagacggaagcgtttgggctcagaggaccaacttccctcagggcagcttctagattcgccgatctatgctcacttgttatggatattcaacatgcacaatagttctcaacttgtggcttgtttctcaatcagcaatggaagttcactgcatcttcatcttctccgataattaacaattaactaattaacaacaaaagcagattattagttgtgatgattatgattatgtacttgccacttgccagcaacaatggtaacggatctgttttttgtttttcttgatctgttctaat

SEQ ID NO: 785 - DNA, 237 bp, Glycine max
ggcagccaaagaaaagaaaatcctcaattttcggagcagccaaacactcggctctctgtctctcgaaaattctcagtttgcagagaaaatctgaatcatgtcgtggcaagcgtatgtcgaccatcacctcctgtgtgacatcgaaggtaaccacctctctcgcgctgctatcatcggccaagacggcagcgtttgggctcagagtaccgacttccctcagttcaaacctgaggagat

SEQ ID NO: 786 - DNA, 1524 bp, Glycine max
ccaacgatcaccatcctgtgagactgtactttgtgccccgggcaatgcacccattgctagctcaggtaatgctacttgcatctctgaccttgaagtttatgatggagcagcagtaatctccttttgccggaaaatgggggtgggacttgttgttgtgggacctgaggctccacttgttgcaggtcttacaaatgagttacttaaggcaggaatcccaacttttggtccatctgcagaggctgctgctttggaaggttctaaaaatttcatgaagcatttgtgtgacaagtatgatattccaactgccaagtacaaaacatttattgacccatctgctgcaaacgaatatatacaagaacaaggagcaccaattgtcatcaaagcagatggactggctgctggaaaaggagttactgttgccatgacactggaagaggcaaatgaagctgtcgatcaatgctggtcaagggtgattttggttctgcaggttgtcgtgtcattgttgaggaatttctacaaggagaagaagcatccttttttgcattggttgatggagaaaatgcaattccactacaatcctgcacaggaccataaacgagttggtgatggtgacacagggccaaatactggtggcatgggtgcatattctccagctcctataataactaaggaacttcaatctatagtaatccattcaattatcatcccgacagtaaaaggaatgtcagcggaaggttgcaagtttgttggggttttatatgctgggcttatgattgagaagaagtctggcatgcctaagttaattgagtataatgtgcgatttggtgatcctgagtgccaggtcttaatggttcggttggagtctgatttggtacaagttctactttcagcatgtagaggagagttgagtgggttatcactgaactggtctcctgggtctgccatggttgtggtaatggcaagtaacggatatcctggatcatatgagaagggaactgtgattgaaaaccttcaagaagctgagcttgctgctccaggtatcaagatatttcatgcaggaactcttttgactctgaaggaaaatttattgcaattggggggcgtgttcttggggttactgccaagggaaatgatcttgaagtggcacgtgatcgagcttatcaagctgttgagaagttaactggtctggaggctctatcgtcgggatattggttggagagcccttcctcagaaacaatatgttacaaagggataaactacagctgagtcctagaacagtaatagacattggtcaacactcattagtggtaaacgttttacaaacatttagaaagtccccagtgtaagaggatggatcttgtcttttgtacttttcgggtgtaacgggattaggtaatgtggttacatcaagagctatggtgggaaacctcgtaagaataaacaatactaccgcccctcccataaaaatatggtgtatttcttcaataaaagttaacttatgtattaaaaaaaaaaaaaaaaaaa

SEQ ID NO: 787 - DNA, 1547 bp, Glycine max
tcttcgaatgctgaccccagccccagagtgtgcttcttcgttcacaacacttcactcattaacttttcattctccgatacgccactcgcttcatatgcaagcacagcctgaatacaaggacaccatcaacatcttgaagagctcgctgtgttgttcgttccttttggccccttcaacgaaattgtactaatctaagatttgcgattttttgttcaaattaaaatgtccatggaagctcaacagattctttccagattctgtccaaaaccatgtcagtgccatctattccaattgtgaaacaacaattctctccaaagttccctcgtttaccttcttcatcgttgtatccttctagtcaatctcagaatctcaatgttcctagtggagctttccatcctatcagcattgtgcacaaagaagtgtgttctagttcttgcaagaggatatggtgcagcagcagcagcagcagcactgcagaaccaaaggagggccatgaggtgagggctcaggtcaccgtgcgaaggaaaaagctaggagttttcgccacgcgtccggtttctggtggaggatccaacttcagagcaattcatgaggcctccaaaaggggatcacttcatggagatgttcttgtgttggtcacaaataaaagtgattgtggaggtgcggagtatgcaagaaataatggtatcccagttatactgtaccatatatcaaaggatgaatctaatccaagtgaccttgttgatacactaaggaaatttgaggttgattttattcttttagctggatacctcaaacttataccagtggaattgatccgagcttacaaaagatctatattcaacattcatccatcacttcttccagcttttggaggcaagggattctatggcatgaaagtgcacaaagcagtaattgcttctggagcaaggttttcaggtcctaccattcattttgttgatgaacactatgatacagggcgtatccttgcacagcgtgttgtccctgtgcttgccaatgatactgtagaagagctggctgcaagggttctcaaagaggagcaccaattatatgtggaggtggtggaggctttatgcgaagaacgtgtggtttggaggcaagatggtgttcctctcatccaaagcaaagaaaaccccaatgagtttcgctgattatcatttatatggggattttggttggagattttgcatatgaaattttcgcattcaccccaaatccagttaatgaattgtaattattaggtaatttctggtgcactcatgatgtcacatatccaagaatgttataaccaggaagtcacaaacttttctcttgaaaaaaaaaaaaaaaaatctgttctgcacaaactgttaatatgctctcagtggattttaaaatctggtcactgatcatattttggagtctttcattcccctcacaagattccattaacgtatcatgattgcgctccataataaagaaattatctactgtactatttggataaaaaataagatgtgccgttagacattttatcccaaaaaaaa

SEQ ID NO: 788 - DNA, 393 bp, Glycine max
ctttcaaataggtggtgaacacgtgatagctggattctttcaaggcatcttcgaatgctgaccccagccccagagtgtgcttcttcgttcacaacacttcactcattaacttttcattctccgatacgccactcgcttcatatgcaagcacagccagaatcctctatagatcgaaactgttaagtttcgacaaactcgacacaaggacaccatcaacatcttgaagagctcgctgtgttgttcgttccttttggccccttcaacgaaattgtactaatctaagatttgcgattttttgtaccaaattaaaatgtccatggaagctcaacagattctttccagattctgtccaaaaccatcttcagtgccatctattccaattgtgaaacaaca

SEQ ID NO: 789 - DNA, 1191 bp, Glycine max
ccctccagccgctcgagccgctcgagcggctcgagctacactatacttgtcaaccctttgagagttagaatggctgctgctattgaaatccccacaatagtgtttccaaactcctctgcccaacagaggatgccagtggttggaatgggatctgcccctgacttcacatgcaagaaagacacaaaggaggctatcattgaggccgtgaaacagggttacagacacttcgacactgctgctgcttatggctctgaacaggctctcggtgaagctctcaaggaagctatccatcttggcctcgtctcccgccaagacctctttgtcacttccaagctttgggtcaccgaaaatcatcctcatcttgtccttcctgctttgcgcaaatcacttaaaactcttcaactagagtacttggacctgtatctcatccactggcccctgagttctcagccagggaagttctcatttccaattgaagtagaagatctcttgccttttgacgtgaagggtgtgtgggaatccatggaagagtgccagaaacttggcctcaccaaagccattggagtcagcaacttctctgtcaagaagcttcagaatctgctctctgttgctaccatccgtcccgtggtcgatcaagtggagatgaaccttgcatggcaacagaagaagctaagagagttctgcaaagaaaatgggataatagtgactgcgttctctccactgaggaaaggtgcgagcaggggcccaaatgaagtgatggagaatgatgtgctgaaggagattgcagaggctcatgggaaatccatagcccaggtgagtctgagatggttgtacgaacaaggtgtgacatttgtgccaaagagctacgataaggagaggatgaaccagaatctgcacatctttgactgggcattgactgaacaagatcatcacaaaataagtcaaatcagccagagccgtttgatcagcggacccaccaaaccacaactcgctgatctctgggatgatcaaatataaactatttactactatgcagctcccactctatttttataatccatctttttacctcttgtttcattttacgtttaaataattcataccatgccacttcttattttagatttcacaatcaataaactaggcacgcgcggcacatgatatgaataaacaaagaaaaaattttttttc

SEQ ID NO: 790 - DNA, 1088 bp, Glycine max
atcacattttatgttaagtcaatcatcaccattcacccaacaagttaatagcattccgcaaaatggctgccaccaccttagtctctgaagtcactctcccctcctcctccggccagcggaagatgccgctgatgggcctcggcaccgcgccggaagcaaccagcgcggttaccacaaaagatgctgttcttgaggccatcaagcagggctacaggcactttgatgctgcttctgcttatggtgtggaacagtctgtgggagaagccatagctgaagcacttaagcaaggactaattgcatccagagatcaactcttcatcactaccaaattgtgggtcactgataaccatgcccatactattcttcctgccctgcagaaatctctcaggacacttcaactagaatacatagatctctttctgatccactggcccattgctactaagcctggaaaagttgtgtaccccattgaagtatcagagatagtggaatctgacatgaagggtgtgtggggatccatggaggagtgccagagacttggcctcaccaaagccattggagtcagcaacttctccatcaagaagcttgaaaaattgctctcttttgctaccatccctcccgcagtgaatcaagtagaagttaaccttgggtggcaacaacagaagcttagagatttctgcacggaaaagggtattactgttactgccttctcacccctgaggaagggtgctagtaggggtgctaattttgtgctggacaatgatgtaatcaaagaattggcagatgctcatggcaagactgcagcccagatttgtcttcgatggctatatgaacaagggttgacttttgttgttaagagctatgacaaagagaggatgaagcaaaacttggggatttttgattggtcactgactgaggatgattacaagaaaataagtgaaatccaccaagagaggctcatcaaaggaccaaccaagcctcttcttgatgatctatgggatgaagaatgagcagtcacctaaatttcatagtttgagtgttttctggttactcttgagagaataaagcaaagtgtcaccattctgttg

SEQ ID NO: 791 - DNA, 585 bp, Glycine max
ggctatatcaatgggataacccctcagagggccgacacttttgagaagccatagctgacgcacttaagcaaggactaattgcatccagagatcaactgttcatcactaccaaattgtgggtcactgataaccatgcccatactattcttgctgccctgcagaaatctctcaggacacttcaactagaatacatagatctctttctgatccactggcccattgctactaagcctggaaaagttgtgtaccccattgaagtatcagagatagtggaatttgacatgaagggtgtgtggggatccatggaggagtgccagagacttggcctcaccaaagccattggagtcagcaacttctccatcaagaagcttgaaaaattgctctcttttgctaccatccctcccgcagtgaatcaagtaattagttaataattaagttaatcacacattagtttaattacgtgactgatccactgatcaaaatcactgatcgaactaaaccttaatcaatccttaacaggtagaagttaaccttgggtggcaacaacagaagcttagagatttctgcaaggaaaagggtattact

SEQ ID NO: 792 - DNA, 410 bp, Glycine max
gtttgggcattggctgtaggcagtacaacagaaaaccttgcaacgggtggcccagactccgctgcccaatagtggattcaatcggctgcaactggatctgcacatgacttcacatgcgaggaagacacaaatgaggctatcattgaggccgtgaaacagggttacagacacttcgacactgctgctgcttatggctctgaacaggctctcggtgaagctctcaaggaagctatccatcttggcctcgtctcccgccaagacctctttgtcacttccaagctttgggtcaccgaaaatcatcctcatcttgtccttcctgatttgcgcaaagcaggaaggacaagatgagtgccagaaacttggcctcaccaaagccattggagtcagcaacttctctgtcaagaagcttc

SEQ ID NO: 793 - DNA, 1358 bp, Glycine max
gaggagcctacggtttggcattgagtgtgaaacaggctaataaatgtgagtggttcaccgccgcaacttccaatgtgcgagcacttactcgtctcactgtcttgctatatttgggtgagaacacagaggatagtggagttcaacgagatggagcaaataaagcacagaacagttgaagtgaatggcataaaaatgcatgttgcagagaaaggagagggtccagtggtgttgttcctccacggcttccctgagctctggtactcatggcgccatcagattctctctctcagctccctcggctaccgcgccgtcgctcccgatctccgtggctacggtgacaccgaagcaccaccttcaatcagcagctacaactgcttccacatagtgggtgatctcgttgcgcttattgactctctgggtgtccaacaagtgttccttgtggctcatgactggggagccatcataggttggtatctatgcatgtttcgccctgacaaagttaaggcctatgtctgcctcagtgtccctctcctccgcagagacccaaacatcagaacggtggatggcatgcgtgctttgtatggagacgactactatgtctgcagatttcagaaaccaggggaaatggaggctcagatggctgaagttggcactgagtatgttctcaaaaacatccttacaactcgcaatcctggtcctccaattcttcccaagggaaggtttcaattcaatccagaaatgcccaacaccttgccctcttggctcacagaagaagatctcgcctattatgtctccaaatttgagaaaaccggattcactggacccttgaactactacagaaatttcaacttaaattgggagttgacggcaccatggacaggagggcaaatcaaggtgcccgtaaaatacataacaggtgagttggacatggtatacaactcgctgaacttgaaggagtatatccacggcggagggttcaagcaagatgtgccaaatttagaacaagtgattgtgcagaaaggagtggctcacttcaataatcaagaagcagcagaggaaatcgataattacatatacgattttatcaacaagttctgatcttgtccaaaaacgaattcaaccagatataaagtcgcagctgaagtgaaagggtgttataattgcgcttttgttttgatatttaaggtatcgagatcttttttatgggcaggattcatcaactgcagaaaacctccataccatcaaccttcctatgcttgtttgtattaattaactgataataatactgtatggtttggtacttgctaaataaacttagtcttgtcatgcaaatggtatatcttaaaaaatgttttgcc

SEQ ID NO: 794 - DNA, 643 bp, Glycine max
cgccttgtgtcaaggcaactaaagcttctctcgctttgcaagagagggaggagtgagtgagatggaaggagtgatacacagaacagtggaagtgaatggcataaaaatgcacatagcagagaaaggagagggtccagtggtgttgttcctccacggcttccctgagctctggtactcatggcgccaccagattctctctctcagctccctcggctaccgcgccgtcgctcccgatctccgtggctacggtgacaccgaggcaccaccttcaatagacagctacacctgctttcacatagtgggtgatctcgttgcgcttattgactctctgcgtgtccaacaagtgttccttgtggctcatgactggggagccctcataggttggtatctatgcatgtttcgccctgacaaagttaaggcctatgtctgcctcagtgtccctctccttcgcagagacccaaacatcagatcggtggatggcatgcgtgctttgtatgcggacgactactatgtgtgccgatttcagataccaggccaaatggatgctcactatggctgagctggcacttgatttgttctcgtcaacatccttacgccttcaccttcaggccctccactttttcacactggaactcctcaattc

SEQ ID NO: 795 - DNA, 1009 bp, Glycine max
ctcgagccgattcggctcgaggcaaagagagagggagatggagggaatagagcacaggacagttgaagtaaatggcataaaaatgcacattgcagagaaaggagaaggccctgtggtgttgtttctccacggcttccccgaactctggcactggtggcacaaccagattgtggctcttggttccctcggataccatgcggtggcaccagatctccgaggctacggtgacaccgatgcaccaccttcaatcggacagctacacctgcttccacatagtggctgatctcgttgcgcttattgactctctgggtgcccagcaagtgttccttgtggctcatgactggggagccatcatagttggtatctctgcatgtttcgccctgacaaagttaaggcctatgtctgcctcagtgtccctttctggcccagaaacctcaaagtgaggcccgtcgatgccatgcgcgccatgtatggagaagactactatatctgcagatttcagaaaccaggggaaatggaggctcagatggctcaagttggcacagaacgatgatcttgcctattatgtttccaaatatgagaaatcgggcttcactggacccttgaactactaccgaaatttcaacttagattgggagctgacggctccatggactggagtgcaaatcaaggtgcccgtaaaattcattacaggtgagttggactcggtatatacctcgctaaacttgaaggagtatatccccggtggagggttcaagcaagatgtgccaaacttagaacaagtgattgtgcagaaaggagtggctcccttcaataatcaagaagcccccgaggaaatcaatactcccatttccgattttatcaagaagttttaatctcatccaaaaacgaattcatcctgaaatatagttgcagggtcatatatatatacagtttaaatcgttaaagttgtatgtaataataatcatatatggcatagcctctaaattaattttcaatcttatcatgc

SEQ ID NO: 796 - DNA, 557 bp, Glycine max
taccggtccgacattcacgggtgcccccacgcgtccgaagacgacagaaggggactcactcatacaatagagaccagcttttgcttctttgtgaacatggagatgaggaaatcatgtggcttcttcttcttgctcctcctccttgtctttgcttcccaggtggtggtgcagacggagggaagagtgtgtgagtcacaaagccacgggttccatggtttgtgtaatagagaccacaactgtgctttggtctgcaggaacgaaggtttctccggtggcaggtgcaaaggcttccgccgccgctgcttttgcaccaggatttgttgagatctcatcaaacactactcttgccatgcaaattaataaatcatagctaggccaaataaattgcatctactctttatccatttgggagctagctaccacaaccaactcatacttggtcattggattgcttccctttggcttctgcctttgcttatctctctacctctacgtcttgttcagggtttatgtttcgtaatgattaatgaatgctgtttaattaacttgccgaaaaa

SEQ ID NO: 797 - DNA, 1894 bp, Glycine max
gaacacagcaactgaaattggtgctctttagcttcaacaatctctcatgcaacgcatcagccgaatctagtggcatatctcagccttcactttcacaacactgccaaaaaaaaagaagtagaaaaaaagaaaccctttacttctttttagggacgcaggtcgtgtttgttcttgttttcgctgctgacactatcctagtttttttgttaggtgaagtcaagcccgctaatgtgtgtacacattagagaagggcattgaaacaaagtgtgatttctggtggagcttgactagtcatcttctatgctgtcttttgtacagaaaatatgggcttactctgtagcagaaatcgccgttataatgatgctgatgctgaagaaaatgcacagactgcagagattgaaagaagaatagaggttagaaacgaaagggctgaaaagcatattcagaaacttctactacttggagctggagagtcagggaagtccacaatatttaagcagataaaacttttgtttcaaactggctttgacgaggcagaactaaaaagctacttaccagtcattcatgcaaatgtgtatcagacaataaaattactgcatgatggatcaaaggaatttgcccagaatgatgttgattcttcaaagtatgttatatccaatgaaaataaggaaatcggggaaaagttattggaaattggaggcaggctggattacccatatctcagcaaggagcttgcacaggaaattgagaatctgtggaaggatcctgcaattcaggagacatatgcccgaggtagtgagcttcaaattccagattgtactgattatttcatggaaaatttgcaaaggctgtctgatgcaaattatgttccaacaaaggaggatgttttgtatgcaagagtgcgtaccactggtgttgtagagatccagttcagtcctgttggggaaaataagaaaagtgatgaagtctatagactctttgatgttggcggccagagaaatgagaggagaaagtggatccatttgtttgaaggagtttcagctgtaatattctgtgctgcaattagcgagtatgatcagacactttttgaggatgaaaacagaaacagaatgatggagaccaaggaacttttcgagtggatcctgaagcaaccatgttttgagaaaacgtccttcatgttattcttaaacaagtttgacatatttgagaagaagatcctgaaagtcccacttaatgtatgtgagtggttcaaagattaccaaccggtttcaacagggaaacaagagattgagcatgcatatgagtttgtgaagaaaaaatttgaggaatcatatttccagagcactgctcctgatcgcgtagatcgcgtctttaagatctaccggaccactgcccttgatcagaaggttgtgaagaagactttcaagcttgttgatgagactttgaggcggagaaatctcttggaagctggcttgttatgagcactgaaccatacatgttataaaatgggataacaatatttttacattgaagaggtgaccagattttgggtatactaggcgattcaggtatactaaatattaaaatcgatttgttgatttttatttctaagttaatcttgtggagagaagaaaggccttgcttggagttgatatcataatctgtgatcatatttttatagattgaaagtcactaatcatatgatatatttcatactattagtgattatattttgcctctagtgttgttgtgttaatgtgcatacatgcatcatgcagattagatgcatgcacgcgtgtaaataatttggaaacgtgccatgtgtcatgtgctggctttgtcgagtctgaattcagaccttatattaaatttgcttttaataaacgtttcgaat

SEQ ID NO: 798 - DNA, 851 bp, Glycine max
gcgtccctaagtgagaaacaaagaaaggaaataattgatctttgaaaatgcagggaggaaagaaagctggagagtccatcaaggaaacagctgcaaacattggtgcttctgccaaggctggcatggagaaaaccaaggccactgtccaggagaaggcagaaagaatgacggcacgtgatccgatgcaaaaggagttggcaacccagaagaaagaggcaaagatgagccaggcagagctggacaagcaggcggcgcgtcagcataacacggcggcgaagcaggctgccacggcagggcacatgggacaacccatggggacccatcagacgtcagctatgcccggtcatggaaccggacagcccacgggccatgtcaccgagggagtggtgggctcacaccctattggaaccaacagaggcccgggtgggactgctacggcccataatacccgtgcggggggaaacccaaatgattatgggtatggaactgggggtacttacaattaaataatgatgatttagaaaaggaaagctacgacccataagaaggtttagttaagagtatgacttttgttgtggttatcttcttgtttggttatctttttgtttgtgtctccttttctctccatttttgttgtggagaattgggtgtggttacacgacagtgttttcacttctactaggtgcaagcattctgtgtcgtgatgttgtattccttcgtttcaatgaataaataaaatcgtggttgtgcaaaaaaagaaaaaaaaaagggtgtcagccaactagggatctcgactgcccgggatttaatcccggaaggggacctgaaggcacacgcattttccaaaaagt

SEQ ID NO: 799 - DNA, 863 bp, Glycine max
cccacgcgtccgcccacgcgtccgagaaaacctaagcttagaattagaaacaaagaaaagaagaaaggaaagaattgatcgttgaaaatgcagggaggaaagaaagcgggagagtccattaaggaaacagctacaaacattggtgcttctgccaaggctggcatggagaagaccaaggccactgtccaagagaaggcagaaagaatgacagcacgtgatccggtgcaaaaggagttggcaacccaaaagaaagaggcaaagatgaaccaggcggagctggacaagcaggcggcgcgtcagcataacacggcggccaaacagtccgccaccacggctgggcacatgggacatggccaccacaccaccggaaccgggactggaaccgccacgtattccaccaccggggaatatggtcagcccatgggggcccaccagacgtcggcaatgcctggccatggaaccgggcagcccacgggccatgtcaccgaaggagtggtgggctcacatcccattggaaccaacagagggccgggtgggaccgctacagctcataatacccgtgcgggtggaaagccgaatgattatgggtatgggactgggggtacttaattaatgatgattatatcatcaaggtttattggcaatagtttaataataaggtttattaaatgtagttagtttggggtatggcttttgtacttgtttgtttggttatctttgtttgtctgcttttctctccacttgttatggagagacttgggtgtggttatgacagtgttttcactacgtggaaacgttatatgtggtaaacttgtacttgtatcatttcgtgataataattaaataaaatagtggttgtgtaa

SEQ ID NO: 800 - DNA, 871 bp, Glycine max
cggtcaggaattcgcggctcgaccgatgcgacaatacgacagaaagggatctggcggcagcagaacaagtagttgagaactaagaaggagaagcaaatggcttcctcaatgatctcttccccagctgttaccactgtcaaccgtgccggtgccggcatggttgctccattcactggcctcaagtccatggctggcttccccaccaggaagaccaacaatgacattacctccattgctagcaacggtggaagagtgcaatgcatgcaggtgtggccaccagttggcaagaagaagtttgagactctttcctacctgccagaccttgatgatgcacaattggcaaaggaagtagaataccttcttaggaagggatggattccttgcttggaattcgagttggagcacggtttcgtgtaccgtgagcacaacaggtcaccaggatactacgatggacgctactggaccatgtggaagctgcctatgtttggttgcactgatgcttctcaggtgttgaaggagcttcaagaggctaagactgcataccccaacggcttcatccgtatcatcggattcgacaacgttcgccaagtgcagtgcatcagcttcatcgcctacaagcccccaggcttctaagtgtgaaaaatttgcaaagcatttgtagccgccaccccactttgtttgtttgtacttaaactacattcccatttgtttttgctttttgagatttcatcatcctgtatttttggtttctgttttcggacttcaatggaaattaatggatgagaactaatgaataagctattgtgttgtgttgctttgtttcaaaaaaacttcaataacccatagtccttgcatttccttctagtgggac

SEQ ID NO: 801 - DNA, 626 bp, Glycine max
  unsure (1)..(626): unsure at all n locations
tatgactgtcgcatgcaccgcgttnacgtaagctctnggaattcggcttcgagcggattcgcttgtcttggatatttcgagtatggagccacggttgtcgtggtgaccgtgagtcacaacgaggtcaccagtgatacctacgatggacgcttactggaccatgtcggaagctgcactatgttatggttgcacctgatgcattctcaaggtgttgaagagagccttcaaagaggcttaagactggcatactcccaacgtgcttcattccgtatcatcnggattcgacaacggttcgccaagtgcagtgcatcagcttcatcgtctacaagcccccaggcttctaagtgtgaaaaatttgcaaagcattagtagccgcccaccccactttgtttgtttgtacttaaactacattcccatttgtttttgctttctgagatttcatcatcctgtatttttggttttctggtttcggacttcaatggacattaatggatgagaactaatgaataaaaaaaaaaaaaaaaaaaaaaaaaaaaaaaagggggggcccccgaaaaataaccccttcacccgggaaattaattccggccgggaacttaggggggtacaattttccccaaagggga

SEQ ID NO: 802 - DNA, 451 bp, Glycine max
  unsure (1)..(451): unsure at all n locations
tgataagcttctcttggagcttaaaagtattggaatttccccaggcttctaagtgtgaaaaatttgcaaagcatttgtagccgccaaccccactttgtttgtttgtacttaaactacattcccatttgtttgtgctttttgagatttcatcatcctgtatttttggttttctgttttcggacttcaatggaaattaatggatgagaactaatgttnaaaaaaaaaaataaaaaaaaataaaaaaaaaaaaaaaaaaaaaaaaaaaaaaggaaaaaaaaaaaaaaaaaaaaaaaaaaaaaatattaaaaaaaaaaaaataattaagggggggccgttttaaaggatccaagtttacttacgcgtgcatgcaaggtaatagtttttttttagggccacctaaattcaattcattggccggcgttttaaaacgtcgggattgggaaaaccttgg

SEQ ID NO: 803 - DNA, 733 bp, Glycine max
ggcttcagaaaaacaagtacttgagaactaagaggaaggatagtgcttcctcaatgatctcctccccagctgttaccaccgtcaaccgtgccggtgccggcatggttgctccattcaccggcctcaaatccatggctggcttccccacgaggaagaccaacaatgacattacctccattgctagcaacggtggaagagtacgatgcatgcacgtgtggccaccaattggcaagaagaagttcgagactctttcctacttgccagacctcgatgatgcccaattggcaaaggaagttcaataccttctaaggaaaagatggattccttgcttggtagttcgaggtttggagctacggtttcgtgtaccgtcagcccagcggggcaccgggattatacataggccactagcttgcctttgaatagctgggtgtcatttatgacactagttcgattctgctgcaagctgccctttattgtactaaggaatatatattgaacaaattaatctacataatatgtatatatatcacgatcccaaagtgcagtgcatcagcttcatcgcctacaagcccccaagcttctaagtgtgaaatattttcaaagcatttgtagccgccaccccactttgtttgtttgtacttaaactacattcccatttgattttgctttttgagatttcatcatcctgtatttttggttactgttttcggacttcaatggaaattaatggatg

SEQ ID NO: 804 - DNA, 429 bp, Glycine max
cccacgcgtccgcccacgcgtccggttgaaaacgaaggacaagcacgtggcttccgcaacggtctcctccccagctggttaccgccggcaaccgtgccggtgccggcatggtggctccatccaccggcctcaagtccatggcgtggcttccccaccagggagaccaacgatgacattacctccattgctagcaacggtggaagagtgcaatgcaatgcatgcaggtgtggccaccaagttggcaacacgaagtgtgagactctgtcctacctgccagacctggacgatgcccaattggcacaagaagttgaataccttctaaggaaaggatggattcctcgcttggaattcgagatggagcacggtttcgtgtaccgtgagcacaacaggtcacctggatactatgatggacactactggaccatgtgg

SEQ ID NO: 805 - DNA, 1204 bp, Glycine max
  unsure (1)..(1204): unsure at all n locations
accggtccggaanttcccgggnntcgacccacgccgtccccgacgccgagaagaccgactacaaggggggaaggtgacttgcaagagtttgttgtgagctataagctagtttatcgtgaggagaatatgaagttgtttgttttctttgttgctgcagtagttttggtagcatggccatgccatggcgcaggctaccaaaggttccctctccgaatgaaaactggctatggtgagcgttcttcggaggtaaaatgcgcaagttttaggcttgctgtggaagcacacaacatccgagcctttaaaaccattcctgaagagtgcgttgaaccaacaaaggactacattaatggcgaacaatttagatcagactctaaaacagttaaccaacaagctttcttttatgctagtgaacgcgaagtccatcacaacgacatatttatattcggcatagataacaccgtactctctaatatcccatactatgaaaaacatggatatggggtggaggaatttaatgaaaccttatatgatgaatgggttaacaagggcgacgcaccggcattgccagagactcttaaaaattacaacaagctgttgtctcttggcttcaagattgtattcttgtcaggaagatatcttgacaaaatggccgtaacagaagcaaacctaaagaaggctggcttccacacatgggagcagttaattctcaaggatccacatcttatcactccaaatgcactttcatacaaatcagcaatgagagagaatctgttgaggcagggatacagaattgttggaatcattggagaccaatggagcgatctgcttggagaccacagaggcgaaagcaggacctttaagcttcctaatcccatgtactacattgagtagtaccttcacctctctcaacaatctagctagagtttgctcctatctatatgtaataaggtatgctgatatgcactattcaaataggagcattagctatgtttgttaatgtcactttatgttatgtgggtaagtcacctaagacactccacgtacctacttgttgtctcttacgcggctttaataaatcttctgcccttgttccatatttactaaaaaaaagacgctacggatatttctttctaaaaattgggccttaatgaattgaaaaaagaaaaagggcggccggtttaaaggatccaagcttannnnnnnn

SEQ ID NO: 806 - DNA, 1158 bp, Glycine max
  unsure (1)..(1158): unsure at all n locations
ctgacacagtctcactcaagtttcgtttggttttctctctctcacacacacaaaaatgccttattctttcttctaaagccttttgactctcacggcgcccaccaatctgggatttgttgaaacagtgtgatgaaaatgaaggtccttgttttcttcgttgctacaattttggtagcatggcaatgccatgcgtacgatatgttccctctccgaatgaacactggctatggtgcccgtactccggaggtgaaatgcgcaagttggaggcttgctgtggaagcacacaacatctttggctttgagaccattcctgaagagtgcgttgaagcaacaaaggaatacatccatggcgaacaatatagatcagactccaaaacagttaaccaacaagcttacttttatgccagagacctcgaagtccatcccaaggacacatttgtgttcagtatagatggcaccgtactctctaatattccatactacaaaaaacatggatatggggtggagaaatttaactcgaccttgtatgatgaatgggttaacaagggcaatgcaccggcactgcccgagactcttaagaattacaacaagctggtgtctcttggcttcaagattatattcttgtcaggaagaacactggacaaacaggccgtaacagaagcaaacttaaagaaggctggctaccacacatgggaaaaattaattctcaaggatccacaagatccttccactccaaatgcagtttcatacaaaacagcagcgagagagaaactgataaggcagggatacaacattgttgggatcattggagaccaatggagcgatctcctcggaggccacagaggcgaaagcaggacctttaagcttcctaatcccctgtactacattcagtagttccttcacctctcaacaatctagcttgctcctatctatctatatgtaataagatgcgttcaaataggggcactagcttcactttatgttgtttcagctgtgtgtcaacaagtcatgtaagagacttcactatgttgttttctctttcgtggctttaataaattatgcgcccttgttccatacaataaaaacatttttaagggttgtcattgtttcnnnnnnnnnnnnnnnnnnnnnnnnnnnnnnnnnnnnnnnnnnnnnnnn

SEQ ID NO: 807 - DNA, 269 bp, Glycine max
ccagtgaatggagcaaccatgccggcaccggcacggttgacagtggtaacagctggggaagagatcattgaggaagccagttgcttctccttcttagttctcaactacttgttctcatttgtgttcagtatagatggcactcgtactctctaatattccatactacaaaaaacatggatatggggtggagaaatttttcccatgtgtggtagccagccttctttaagtttgcttctgttacggcctgtttgtccagtgttcttcctgac

SEQ ID NO: 808 - DNA, 669 bp, Glycine max
acgcccacgcgttcggagtaatgtttctcgttcttgtatcatgaatgtattgggaagggctattcttagggtctgacttcgactctctctgcaatgcatcccgtatggactctctatggctcatgagcataatcgcgtctcgttgaactattcactatcagcccgtttcagatgcctcctttccgaaggctggctacccctcatgggagaaattgattctgaaggattcacaagatcctttcactctaaatgcatttttatacaaaacagcatcgagagataaactgattaggcagggatacaacattgttgggatcattggagacctttggagcgatctcctcgggggccacaggcgcgaatgccgtacctttaagcttcctaatcccatgtactacattgagtagtaccttcacctatatcaacaatctagctagagttcgctcctatctatatgtaataaggcatactgatatgcactattcaaatatgaacactaactatgcatgttaatgacactttatgttatgtgggtaagtcacctaatacactacaccttcctacttgttgtatgttactccattttaataaatcttatgacattgttccatatgcttagattctttaatggtgtgaaataatatgactggctctagcatttaaacaaca

SEQ ID NO: 809 - DNA, 475 bp, Glycine max
cttgcgcatttcacctccggagtacgggcaccatagccagtgttcattcggagagggaacatatcgtacgcatggcattgccatgctaccaaaattgtagcaacgaagaaaacaaggaccttcattttcatcacactgtttctagttatctcgatcaacaaactcacttgctcctatctatctatatgtaataagatgcgttcaaataggggcactagcttcactttatgttgcttcagctgtgtgtcaacaagtcatgtaagagacttcactatgttgttttctctttcgtggctttaataaaatatgcgcccttgttccattcaaaaaaataacataatgatcccttctcaaatgtacttatttgtattaccctttctttatcatggaggaaacaaaaaacccaaaaatttaatggggcgggggttttagaggatccaacttaacatacgcgtgcttggaaaaaaatagtttt

SEQ ID NO: 810 - DNA, 582 bp, Glycine max
  unsure (1)..(582): unsure at all n locations
ccggntggaaaaccggccgacgacgcgttcgcccacgcgtccgtcccgcgtccttccactttccggtattcttgtcaggaagatatctggacaaaatggccgtaacagaagcaaacctaaagaaggctggcttccacacatgggagcagttaattctcaaggatccacatcttatcactccaaatgcactttcatacaaatcagcaatgagagagaatctgttgaggcagggatacagaattgttggaatcattggagaccaatggagcgatctgcttggagaccacagaggcgaaagcaggacctttaagcttcctaatcccatgtactacattgagtagtaccttcacctctctcaacaatctagctagagtttgctcctatctatatgtaataaggtatgctgatatgcactattcaaataggagcattagctatgtttgttaatgtcactttatgttacgtggagtgcttacgtgacttacccacataacataaagtgacattaacaaacatagctaatgtcactctatgttatgtgggtaagtcacctaagacactccacgtacctacttgttgtct

SEQ ID NO: 811 - DNA, 775 bp, Glycine max
acgagggaatacatccatggcgaacaatatagatcagactccaaaacagttaaccaacaagcttacttttatgccagagacctcgaagtccatcccaaggacacatttgtgttcagtatagatggcaccgtactctctaatattccatactacaaaaaacatggatatggggtggagaaatttaacccattcatcatacaaggtcgagttaaatttctccaccttgtatgatgaatgggttaacaagggcaatgcaccggcactgcccgagactcttaagaattacaacaagctggtgtctcttggcttcaagattatattcttgtcaggaagaacactggacaaacaggccgtaacagaagcaaacttaaagaaggctggctaccacacatgggaaaaatttaattctcaaggatccacaagatccttccactccaaatgtcagtttcatgcaatactgcagcgatttccagacttgtgtttaagccatgcaaaaatcactgtagggatcattgttgaccaataaatcgatgtcttcgaagactttatagtttatagcaggaccgttaagattcctaatccccagcagactataaagtagttcattcaactcacaacaatctagcttgctccaatctatatatatgtaataagatgcgttcaaataggggcacaagcttcactttatgttgtttcacatgtgtgtcagcaagtcatgtaagagacttcccaatgttgttttatcttcgctggctttaataaattatgcgccctt

SEQ ID NO: 812 - DNA, 461 bp, Glycine max
cccacgcgtccgcccacgcgtgcgcccacgcgtgcgcccacgcgtccgattggagaccaatggagcgatctgcttggagaccacagaggcgaaagcaggacctttaagcttcctaatcccatgtactacattgagtagtaccttcacctctctcaacaatctagctagagtttgctcctatctatatgtaataagggatgctgatatgcactattcaaataggagcattagctatgtttggtaatgtcactttatgttatgtgggtaagtcacctaagacactccacgtacctacgttgttgtctcttacgcggctttaataaatcttctgcccttgttccatatttaaaaaaaaaaaaacaagaagaatagaaaacggaataaagagggagagacatcttaatctagcacatgaggggagacccaattcgggcaggggagattggggtgtttaatgtcga

SEQ ID NO: 813 - DNA, 713 bp, Glycine max
acgcatggcattgccatgctaccaaaattgtagcaacgaagaaaacaaggaccttcattttcatcacactgtttctagttatctcgatcaacaaactcacttgtgccagagacctcgaagtccatcccaaggacacatttgtgttcagtatagatggcaccgtactctctaatattccatactacaaaaaacatggatatggggtggagaaatttaactcgaccttgtatgatgaatgggttaacaagggcaatgcaccggcactgcccgagactcttaagaattacaacaagctggtgtctcttggcttcaagattatattcttgtcaggaagaacactggacaaacaggccgtaacagaagcaaactgataaggcagggatacaacattgttgggatcattggagaccaatggagcgatctcctcggaggccacagaggcgaaagcaggacctttaagcttcctaatcccatgtactacattgagtagtaccttcacctctctcaacaatctagctagagtttgttgtgagctataagctagtttatcgtgaggtgtatatgaagctgttagtagccttagttactgcagtagttgtggtagcatggccatgccatggcgcaggctagcaaaggttcgctctccgaatgaaaactcggctaggtgagcgttcttcggcggtaaaatgcgcaagttttaggcttgctgtgga

SEQ ID NO: 814 - DNA, 1316 bp, Glycine max
  unsure (1)..(1316): unsure at all n locations
taacactaattaatgtgaatcatatcaaataatgaaaagtaaataaaattgtaattaactctatatgtatacacacacaaataataaataatagtaaaaaaaaattatgataaatatttaccatctcataaagatatttaaaataatgataaaaatatagattattttttatgcaactagctagccaaaaagagaacacgggtatatataaaaagagtacctttaaattctactgtacttcctttattcctgacgtttttatatcaagtggacatacgtgaagattttaattatcagtctaaatatttcattagcacttaatacttttctgttttattcctatcctataagtagtcccgattctcccaacattgcttattcacacaactaactaagaaagtcttccatagccccccaaaaatgaagagcaccatcttctttgctctctttctcttttgtgccttcaccacctcatacctaccttcagccatcgctgatttcgtgctcgataatgaaggtaaccctcttgaaaatggtggcacatattatatcttgtcagacataacagcatttggtggaataagagcagccccaacgggaaatgaaagatgccctctcactgtggtgcaatctcgcaatgagctcgacaaagggattggaacaatcatctcgtccccatatcgaatccgttttatcgccgaaggccatcctttgagccttaagttcgattcatttgcagttataatgctgtgtgttggaattcctaccgagtggtctgttgtggaggatctaccagaaggacctgctgttaaaattggtgagaacaaagatgcaatggatggttggtttagacttgagagagtttctgatgatgaattcaataactataagcttgtgttctgtccacagcaagctgaggatgacaaatgtggggatattgggattagtattgatcatgatgatggaaccaggcgtttggtggtgtctaagaacaaaccgttagtggttcagtttcaaaaacttgataaagaatcactggccaagaaaaatcatggcctttctcgcagtgagtgagacacaagtgtgagagtactaaataaatgctttggttgtacgaaatcattacactaaataaaataatcaaagcttatatatgccttccctaaggccgaatgcaaagaaattggttcttctcgttatctttgccactttactagtacgtattaattactacttaatcatcttgttacggctcattatatccnnnnnnnnnnnnnnnnnnnnnnnnnnnnnnnnnnnnnnnnnnnnnnnnnnnn

SEQ ID NO: 815 - DNA, 449 bp, Glycine max
cgggtccacccacgcgtccgaagcgggcagacgacagcaggggattcacacaacgagctaagaaggtcgtccatagccccccaaaaatgaagagcaccatcgtctttgctctcgttctcttttgtgccttcaccacctcatacctaccttcagccatcgctgatttcgtgctcgataatgaaggtaaccctcttgaaaatggtggcacatattatatcttgtcagacataacagcatttggtggaataagagcagccccaacgggaaatgagagatgccctctcactgtggtgcaatctcgcaatgagctcgacaaacgggattggaacaatcatctcgtccccatatcgaatccgttttatcgccgaaaggccatcctttgagccttaagttcgattcatttgcagttaaaatgccgtgtgttgggactcctaacgagtggtccgttg

SEQ ID NO: 816 - DNA, 894 bp, Glycine max
cagaaactaggggatcaaactgatgtcagagaggatgaacgtaaaaatcaaaaagtcaaaacatcgggatactaaaagagcaggtcaaatctgtggaaggaacatcgtttaaaagataaatcaggtgaaaatagagataagaaatcaaaacccgtgatagaaagcgttcaaagtcaatatcattagaagataagcatgacaaaggagacacttcacctcatataaattttgatgagagaaactttgaaccgacaaagtcccctgaaggcaagaatcactccagtgataaatatggaagtagaggtgaaaaatcagagcatcaaaagaaaaccccatctaaatcaaaatcagaacaatttgatgggagtgggcccttacgaggaaattacaaggagtatgattcaaaaggaaaatcaccatctgattctggatctgctgaagttaagcatcatttgagtgatggagaaaatgctaccagtgaagaaaattctaaactctttggagatgtgtttcaggaaccaattagaactgcaaaggactcaacaatcctgaatgataacgggacactgacttcagtgaatggtaactacaagtcagaagagtcaagtgaaaatgcaggagctgatgataacccaggatggatatcagtggaaaaagtgggaagtggaaagtattaagcaaacttggcttggagtggtggttctaaatgatatcaaagaacatagccatgagtatagatttctgttattcaatcttgaattggaagtggtgtcctcaaggctactatcatttcttgtcactatagtgtagatttatttcaaaagcattgcacagatcatggttttttgtggttgaagatttctgcacctgtcaatgattatgggataaagagca

SEQ ID NO: 817 - DNA, 648 bp, Glycine max
tgtagaagaccagcaagaaaagggaagggaggagaggggagagaaaatgccaatattagaaggttgtagatggaattagtgaacatacccgctcaaagcgacacccaaattacacgcacaaccacacctttaaattctccgcaccaatcttttagcagataaaaagcgaaaagaggttcgttccatttcccgcttcttcttttttccctcacttttccccggcgagaaaatgagagaaatcctccacattcagggcggccagtgcggcaaccagatcggagccaagttctgggaggtgatctgcgatgagcacggcatcgaccacaccggaaattacagcggcgactccgaactccaattggaacgcatcaatgtctactacaacgaggccagcggcggaaggtacgttcctcgcgccgtcctcatggatctggagcctggcacgatggactcggtcagatccgggcctttcgggcagatattccgccccgataattttgtgttcgggcagtccggcgccggcaacaactgggccaagggtcactacacggaaggtgccgagctcatcgattccgtcttggatgtcgtgaggaaggaggccgagaattgcgattgcttacaaaggtttcaagtgtgccactctttggg

SEQ ID NO: 818 - DNA, 548 bp, Glycine max
gacagacaagggtttcttccgggttcacgtttcgcaatcactttttgcgcttctctcagtcactcactcagtcttcctgctactcctggggttggtttccttcttcgaactcgaacgaagatgacgtgagattcatcacatccattggacggccatgcgggaaccagatcggaagccaaattctgggaggtggtgtgcgcggagcaacgggatcgattcaacggggaggtaccaaggggacaacgagttgcaactcgagcgagtcaacgtctactacaatgaagcgagttgcggaaggttcgtgcctagggcgttgctcatggatctggagccagggaccatggaaaacgttaggatctggtccctacggtcagattttccggccagataacttcgtctttggacagtccggcgccggaaacaactgggccaaaggtcactacaccgaaggcgctgagttgattgactccgttctcgacgttgtcaggaaggaggcagaaaactgtgactgccttcaaggtttcagtttgccactctctcgtggtgga

SEQ ID NO: 819 - DNA, 1557 bp, Glycine max
ctctctctctctctgtatatatatatgcacgcaaatatatatgtgcatgaatctgcacttcatttcaaatcccaacaaaaaaccaaagtaatctaacaaagtaagcacaatgagggagatattgcacgtgcaaggtgggcaatacgcggaaccaaatcggttccacattctgggaactgatatgcgacgaacacggcaatcgaccccaccggaaattacaccggcgacgaggcctccgatctccaactggagaggatcaacgtctactacaatgagcgcctccggcggaaggtacgttccccgggccgtcctcatggatctggagcccggcaccatggacagcatcagatccggcccatacggcaagatcttcaggcccgacaacttcgtctttggccagtccggcgccggcaacaattgggccaagggccactacaccgaaggtgccgagttgatcgattccgtcctcgacgtcgttcgcaaagaggccgagaattgtgactgcttacaaggttttcaagtgtgtcactcacttggaggaggcacgggttctggcatgggaaccactgttgatatcgaagatcagggaggagtacccggacagaatgatgctcagcatccccggttttcccatccccaaaggtctctgacacggttgtggagccttacaatgctactttgtccgttcaccaactagtggagaatgcagatgagtgcatggttcttgacaatgaagcactctatgacatttgcttcaggaccttaaaatctcaccactcctagttttggtgatctgaaccacctgatatctgcaacaatgagtggagtgacctgttgcttgaggttccctggacaactgaactccgacctgaggaagctagcagtgaacctgatcccattcccacgtctccacttcttcatggtggggtttgcacctctcacctcacgcgggtctcagcagtacgtgtccctcactgtccccgaactcacccagcaaatgtgggacgccaagaacatgatgtgtgccgccgatcctcgccacggccgatacctgacagcatcagccatgtttaggggaaagatgagcaccaaggaagtggatgagcaaatgatcaacgtgcaaaacaagaactcatcctacttcgttgagtggattcccaacaacgttaagtcaagtgtgtgtgacatccctccgaggaacttgaagatgtcgtgcactttcattggaaactccacctcaattcaggagatgttcagaagggtgagtgagcaattcactgcaatgtacaggcgcaaggccttcttgcactggtacaccggtgaaggaatggacgaaatggagttcactgaggcagagagcaacatgaacgatttggtggcagagtaccagcaatatcaggatgctactgctgatgaggatgagtacgatgaggacgaggttgaggagggggaacaagcttactaagaccagtaaatggttcatcactaccttgttttaattactaaatttcctgctagtagtcatgtatctatatatgtctgtctctacttttttcc

SEQ ID NO: 820 - DNA, 1797 bp, Glycine max
cccgcgcgtacgtgcctccctctcttttttcttccatagatcactccactctccggaacgcatcatcgtattgcattggatggccctcctaccactcgcaccgccaacgccaaacaaaccctaaatctctctcgtcgtcttctgcttcgtcctccgtcaaccatgcctgcagatcctgcacgttcagggaggccaatgcggtaaccaaatcggttccaagttctaggaggtgatatgcgacgagcacggcatcgatcctaccggaaagtacaacgacgaaggcaacagcggcatccaactcgagaggatcaatgtctattacaatgaggcctctggcggaaggtacgttccgagagccgtgcttatggatctcgaacctggaaccatggacagcatcagatctggcccctacggcaagatcttccgccctgacaacttcgtcttcggccagtccggcgccggtaacaattgggccaaaggtcattacacagaatggcgccgagctgatcgactccgttctcgatgtcgttcgcaaagaggctgaaaactgcgattgcctgcacagttttcaagtttgccactctcttggaggaggcacaggttctggcatgggaacactgttgatcatcgagaattcgggaggaatacccagacagaatgatgctcactttctctgttttcccatctaccaaaagtttctgatacagacgtggagccatacaatgccactttgtctgtacaccaactggttgaaaatgcagatgagtgcatggttcttgacaatgaagcactttatgacatttgctttaggacattgaaactcagcacccctagctttggtgatctcaaccatctgatttctgcaaccatgagtggggttacctgttgtctgaggtttcctggacaactgaactctgacctcaggaagctggctgtcaatctgattccatttccccgtcttcacttctttatggtggggtttgcacctctcacttctcgtgggtctcagcaatatgtctcccttactgtcccagagctgactcagcaaatgtgggatgccaaaaatatgatgtgtgctgctgatccccgacacggccgatacttgactgcatctgctatgttcaggggaaagatgagcaccaaagaggttgatgaacaaatgatcaatgtgcagaacaaaaactcgtcatactttgttgaatggattcccaacaatgtgaagtccagcgtttgtgatattccacccaggaatttgaagatgtcatccacatttattgggaactcgacatcaattcaagagatgtttaggagggtcagtgagcagttcactgctatgtaccggcgcaaagccttcttgcactgggtacactggggagggtatggacgagatggagttcactgaggcagagagtaatatgaatgatttggtagcagagtaccagcagtaccaggatgcaaccgcagaggaggatgatgaatacgaggatgacggtgatgagcagcagtatgatgaccagtagctggatcaatcttagggcaatgctctgatggtaattaccaatggcgtgatgataacttctggcaccgatctataccatcactgatttacatttgctgcaattcgtgtatctactgccatatgaactctatttcattcccatttatctctgtttttttacattttgccaatttcgtctatatgttctgcttttgaattgtttggaatttggccggttagacaatagttgattattctatacttccaattgccaagcatagcacgtgtatgaacaagtt

SEQ ID NO: 821 - DNA, 906 bp, Glycine max
gtacggtcaggaattacggctcgaccacgcgtcaagccaaacgtccgttacggtgccaaaagaacacaaaaagggaacggccaagggttccgttccgggttggacgtggttaaaaatcaactttcggcccttcactcatccccttcgcgccggttttctttctttgccgaactcgtgcgaaaaatgcgtgaggattcttcacatacagggagggcaatgcggaaaccagatcggagcgaaatttctggaaggtggtgtgcgcggcagcacggggatcgattccacggggaggtaccagggggacaacgagttgcaactcggagcgagtcaacgtctattacaatgaatcgagtttgctgaaggttcgtgccgaaggcggtgctcatggatctagagccagggaccatggacagcgtcagatcttgtccctactgtcagattttccgacctgataacttcgtcttcgggccagtccggcgccggaaacaactgggccaaaggtcactacaccgaaggcgctgagttgattgactctgttctcgatgttgtcaggaaggaggcagaaaactgtgactgccttcaagggtttcaggtttgccactctcttggtggtggaactggttctggaatgggaacactgttgatctcgaagatcagggaagaataccctgactgaatgatgcttacattctctgtgttcccatcccctaatgtttctgacacagttgttgagccttacaacgcaacattatcagtgcaccagctcgttgaaaatgcatatgaatgcatggttttggataacgaagctctctatgacatatgcttccgcagccttgagcccatcaccccaagctttggagatctgaaccatctaatttcagccaccatgagtggtgtgacatgttg

SEQ ID NO: 822 - DNA, 1807 bp, Glycine max
accagccttatgacaattggacaccaccaaaaaaagatcattttaaaaacattccctctcttccaaaaacaccctcgaaacattccatatttacaaaacaggaccatccttcaaattctcccccaccaccattggccccgcttcattcattttcattccaaactcacaaattctcaaatccaaatccaattccaattccaattcccaatcttctcaaaccctaattcctcatcttgaaaatgagagaaatcttgcacatccagggagggcaatgcgggaaccagatcggagcgaagttctgggaggtgatatgcgacgagcacggcatcgaccacaccggaaagtacagtggcgactcctgacttccaattggaacgcatcaatgtttattacaacgaagcgagtggcggaaggtacgttccacgcgccgtcctcatggatctagagcccggcaccatggactccgtcagatccgggccctaagggcaaaatcttccgccccggacaacttcgtcttcggccagtccggcgccggaaacaactgggccaaaggtcactacaccgaaggcgccgagctcatcgactccgtcctcgacgtcgtacgcaaagaagccgagaattgcgactgcttgcaagggtttcaagtgtgccattcgcttggtggaggaacgggttccggcatggggacgcttctgatctcgaagattcgaggaggagtatccggatcggatgatgttgactttttccgtgtttccttctcccaaggtttctgataccgttgtggagccttacaatgctactctttctgttcaccagcttgttgagaatgctgatgagtgtatggttttggacaatgaggctctctatgacatctgtttcaggactctcaagctcgctacgcccacgtttggtgaccttaaccacctgatatctgccaccatgagtggagttacttgttgtctacgtttccctgggcaactgaactctgatcttcgcaagcttgctgttaatcttatcccattcccccggctccatttcttcatggttgggtttgcacccttgacatcaagaggatcccagcagtaccgggctttgactgttcccgaattgactcagcaaatgtgggatgctaagaacatgatgtgtgctgctgatcctcgtcatggtcgttatttgactgcttcggccatgttccgtggtaagatgagcacaaaggaggtggatgaacagatgatcaatgtgcaaaacaagaactcctcatactttagtcgagtggatacctaacaatgtgaagtccagcgtgtgtgatatcccacctaagggtcttaaaatggcatccacttttattggtaactcgacctcaatccaggagatgttcaggagagtcagtgagcagttcacggccatgttcaggcgcaaggctttcttgcactggtacaccggggaaggaatggacgaaatggaattcaccgaggccgagagtaacatgaacgatcttgttgctgagtatcagcagtaccaggatgctactgctgacgaggacgagtatgaggaggaggaagaggaagaagagattgctgcttaaggcgcctctcttatttgtcaaaaattgtttcaaatatcaatatgggtgggctttaaacgagtggtgtaagtttaaaattgtgatgcagtcaaattaaattgactcgttaatgtgtatgcttattgttgattgttgacattgaataaactgggttttgttgacaatgcttatgtttttgaaagatcaagtcttggattgtttgtaagagttaatgactggtcc

SEQ ID NO: 823 - DNA, 590 bp, Glycine max
gacccacacgtcagcccacgcgtccgaaaaaaaaccctcttttttctctctcttgcaaaacctaattttcattttttctcttcaaacaaattttccaaaatgcgtgagacccttcacatccagggtggccaatgcggcaaccagatcggcgcacaagttctgggaggtggtttgcgcggagcacgggatcgaccccactggaaggtacggtggggactcagagcttcagctcgagaggatcaatgtctactacaacgaggccagttgcggtcgagttcgtgccgcgcgcggttctcatggacctcgaaccgggcaccatggacagcgtccggtccgggccgtacgggcagatcttcaggcacgacaactttgtgtttgggcagtccggggcagggaacaactgggccaaggggcactacactcgagggtgctgaactcattgattctgctctcgatgtggtgcgcaaggacgctgagaactgcgcttgcttgcaaggttttcaagtgtgccattctctgggaggaggaactggatcaggaatgggtcccttggtgatttctaagatcagggaagagtacccagataggat

SEQ ID NO: 824 - DNA, 532 bp, Glycine max
cggaggagttgaaatgaaatcatccactgtctgttgtggtttatctccgcactccgtcttcatcagtcatgcatcaccacggctccaacacaggggaaaatgcagggagatccttcacgtggcagggagacgcaatgcgggaacggggatgggttccaagttctgggaagtggtgtgcgacgagcacggtatagatccgacggggaagtacgtcggaaactcagatctgtaactcgagcgtcgtgaacgtgtacttacaacgaagcttcctgcgggcggtttgtcccacgcgcagtgcatgatggacctggagccctgtaccatggacagagtgcgggactgggccgtacggacagatatttcggcccgacaactttgtgttcgggcagtccggcgcgggcaacaactgggccaaggggcactacacggagggcgccgagctcatcgactgcgtccttgacgtcgtgcgtaaggacgccgagaactgcgactgcctccaggggttccaggtctgccactcgctcggcggcgg

SEQ ID NO: 825 - DNA, 1045 bp, Glycine max
tattaagcaagtcaaaatcactgtttgattttgcagacaagtataggggttcttactcgggttcttgtccattctattgctcgtactcaggttaccaggatgaactgttatgggctgcttcttggctatataaggcgagtggagaaagcaagtacttgagttactccataggcaaccaaggttggagtcaggcggtgtctgaattcagctgggataacaaatatgttggagctcagacattactaacggaggaattctatggtgggaagaaagacttggccaagtttaagagtgacgttgaatcatttatatgttcagtgatgccagcaagtagctctctacagattaaaacaactcctggtgggcttctatttactagagacagcagtaatttgcaatatgccacgagctcaaccatggtgctattcattttctctaaaatcctaaacagaaatcacattgatagaatacattgtggttctgcgcttttcaccccgtctcagattagagcctttgcaaaaacacaggtggactacatactaggaagcaatccgatgaagatgtcttacatggtgggatttggcagtaaatacccaaagcaattacatcacagaggctcatccatcccttcaatcaatgttcatccgaccaaggtgggttgcaatgatggtctctcagtttattacaattctgctaatccaaatccaaatactcatgtgggtgcgattgttggaggccccgattcaaatgaccgattcagtgatgcaagatctgactattcccacagcggacctaccacctacatgaatgctgctttcgtggcttcagtgtctgctttgcttggcaaaacgaccgatcgaaaccaaattcaggactctgcagtttccccatatcgatgctagggaaactaatgaagttaattaatgtaacataatcaccgattatatatgtgtcagtggtactagttatttaccctgccatatattgaaactccacttttatgggctggtataataaaatcatacgtactgttttaccaactgcc

SEQ ID NO: 826 - DNA, 1081 bp, Glycine max
gacaccataaatcacacttaactaccaactacctaagaaactaacaaaaatcttagtggttgtgataacatggctcttacacttcaacgtgcattatctgaactactcaccctaatagctattctctcaatattcctagtgatcccttccttttgtttcaaccccaaaaagctttataatgcttcatattattctccatctagttcagattggtcacctgcagtggccacttggtatggacctgccaatggagatggaagtgaaggtggagcttgtggatatggtaacgctgttgggcaacctccattttcttctttaatatccgcgggaagccctcttatatatgactctggcaaaggatgtggttcttgttatgaggtgaaatgcacagggaattctgcatgctcaggcaaccccgtgaaagtagtcatcactgatgagtgtgctgggtgtggctcagatgctcaatatcattttgatctgagtggcaatgcttttggagcaatggcaatttcgggccaagatgagaatctacgcaatgcaggaaaaataaacattcagcacagaagaattgaatgcaactatcccggtaggtcaatagctttccacgtggattctggctcaaaccaagaatattttgctaccttggttgaatatgaggatggggatggtgaccttgccaaggttgaactcaaggaagcacttgattcagggtcatgggattccatgcaacaatcatggggtgcagtttggaaatttgacaagggctcaccactgagagcaccattctctatcaagctaaccacacttgagtctggccagaccattgtggccaacaatgtgatccctgcagggtggactcctggtcagacttacagatcgattgtgaattttgcaacctaaggatgtgtccatcattttgcatcaccagcttgtagctataccctaattataatattatatatgtagctgaagatgtataatcaaatgtcatcctattagtggacttttgattgtcttctgtaatcaattatgaatgcattgtgctagttactatgttaattattatgtttatgggtta

SEQ ID NO: 827 - DNA, 1770 bp, Glycine max
tcggctcactcgagcgaatcggctcaggaaaattgactgtgacgttgctgaagctgattggtaaagtattgaatcctgtgcatacatcctcacttatcctcttcctgcgactctcttctcattggttctccgtattctccctcaatcctattaaccttttcttctttcatttcccaccccattctataatcaatcaatggcaatggcttcttcaatccctaatgcgccttctgcgttcaattctcagagctacgttggtctcagagcgccactgaggaccttcaacttttcttctcctcaagctgccaaaattcctcgctcccaacgccttttcgtcgtcagagcctccgattcggagttcgaagccgccgttgtcgccggtaaggttccgccggcgcctcccgtgccgcccagaccggcggctccggttggaacaccggtggttccttcacttccacttcaccggcgtcctcgtcggaaccggaagtcgccggcgcttcggtcggcttttcaggaaacgagcatttcgccggcgaatttcgtgtatccgcttttcattcacgaaggtgaagaggatactccaattggggctatgcctggatgctacaggcttgggtggaggcatggacttgtagaagaggttgcaaaagcacgggatgttggtgttaatagtgttgtgctcttccccaaaattccagatgctttgaagtctcccacaggagatgaagcatacaatgaaaatggtttagtgcctcgaacaatacgtttgctcaaggataagtacccagaccttgttatctatacagatgttgcattagatccttattcatcagatgggcatgatggcatagttagagaagatggagttattatgaatgatgagacagttcatcagctatgtaaacaagctgtagcccaggcccaagctggagcagatgttgtcagtcctagtgatatgatggatggtcgggtaggagcactgcgtgcagctctggatgctgaaggctttcagcatgtttctataatgtcctatacagcaaagtatgcaagttctttttatggtccatttagagaggcactagactcaaacccccggtttggagacaagaaaacttatcagatgaacccagctaattacagagaggctctgactgagatgcgggaggatgaatctgaaggagctgacattctcttggtgaagcctggtcttccttacttggatatcataaggctgctcagggataattctcctttgccaattgcagcataccaggtttctggtgaatatgcaatgataaaggctgccggtgctctcaaaatgatagacgaagaaaaggttatgatggagtcactgatgtgcctccgaagggccggtgctgatatcatcctcacatattctgctctgcaagctgccagatgtttgtgtggagagaagaggtgaagttctctgattatgtagggcgttgttcatgtagaaggttgaagagtttataataccagtatctgctggattttggttattgtaaattgtttaagagggacatggaggtttgtgtatagagagacattcataataaaatattatggcctcgtttgatttaatatatttaaggacataatagaaaaagacttggccgttgtttttggtgttaattgtaactttacgtgtggattgtcaacccattgtatgaatgaaagtgtgcactcacctgcagaatatttcgtactgtaactctgttggtgctgaaatcaaggtgcattctgggaagt

SEQ ID NO: 828 - DNA, 845 bp, Glycine max
ggatctaatcctattcccttgtgttgtgcctccaaaagtcacgtgcgacgacacgtcgtcacgtgtcgacaccgtgttgggcctttgtgtgtcgtttatgtataagaatgcgtgtgggtttgggtgttaaggtatcgttgggtgtgatcggtgtgagtctaatatttgcagtgctgaaaatgtcgcagttgttggaaaaagccaaaaactatgttgcggagaaagtcaccaacatgcccaagccagaggcgagtgtcaccgacgtggacttcaagcgcgtgagccgcgacagcgtcgagtacttggctaaggtctccgttcagaacccttattccacttccattcccatttgtgagatcaagtactccctcaaaagtgctggcagggagatagcagcaggaacaatacctgacccagggtcattgaaggcaagtgacacaacaatgctggatgtgccagtgaaggtgcctcatagcatattactgagcttggcaaaggacattggtgcagattgggacattgattaccaattggatattggactagttattgaccttcctgtcattggcaacttcaccattcctctttctcagaagggagagatcaagctccctaccctctctgacatgtttgcctgattccaacaaaaggcatagaagaaagaaaataaatcaataaatacaccctccatcatattttcctgttgtatcaatttggattttagtttttgttttcacacttcattatgcctttttttctttctttcctttgtggatgctttaaagtataaactacacatcataatatttaaaacacatatggtttttggaattctcttctaaaaa

SEQ ID NO: 829 - DNA, 654 bp, Glycine max
ctcgagccgttcctccttaatttgaggttaatattcccaaaagacgcgagagcgagcgtatcgctcatccttattacaaggactgggcacgttaagcttcacaattcattcacattcacattgtagctccgttaacaagattcactttcatctatccactcactaacgtgatcacacactcatcatcatcaataatggcggagttgttggaaaaggccaaaaactatgttgcggagaaagtcaccaacatgcccaagccagaggcgagtgtcaccgacgtggacttcaagcgcgtgagccgcgacagcgtcgagtacttggccaaggtctccgttcagaacccttattccactttcattcccatttgtgagatcaagtactccctcaaaagtgctggcaggttcctatcactattcgctaccccccctttttaattattggattaattggttttcttttgtgtttgtgatcgagttaatcacccaccatgaactaatcatggatcgggttgatttgttttatggttgttggatttttgcagtatctgcttcttcttaaatgattgaatacaaagatcaatctttggtttgagcttaatcaaacttaaactttctcgtccttctccagaaatctactgtgtgaaaattgaataca

SEQ ID NO: 830 - DNA, 2370 bp, Glycine max
  unsure (1)..(2370): unsure at all n locations
atccctcgtgccatttcaaaacccagaaaccaattacaaattacactctttgcctcgcaccttcaacttaaccttttctactcataatcttaacaacttgctagaagaagataaagaaagagaaaaagtgtgtgtgtgtgagagagagcaatggctggctcgtgggcacgccgttctctgattgttctggctatcatttccttcggatgtttatttgcaatttccattgctaaggaggaagccacaaaattggggacggtcatcgggattgatcttggaacgacctattcatgtgttggtgtttacaagaacggccatgttgaaatcatagccaatgatcaaggtaaccgtatcaccccatcgtgggttgctttcaccgacagtgagagactaattggagaggctgccaagaatctggcagctgtcaacccagaaaggaccatctttgatgtcaagagacttattggaagaaagttcgaagataaggaagttcaaagagatatgaagcttgttccttataagattgtcaacaaggatggaaaaccttacatacaagtgaaaattaaggatggtgagaccaaggtgttcagccctgaggaaatcagtgccatgattctgactaagatgaaggaaactgcggaagcattccttggaaagaaaattaatgatgccgtggtcactgtcccagcttacttcaatgatgctcagaggcaggccaccaaggatgctggtgtcattgctggtctcaatgttgctagaattatcaatgaacccactgctgctgccattgcctatggattggacaagaaaggtggcgagaagaacattctagtctttgatcttggtggtgggacctttgatgtcagtatcttgacaattgataatggtgtttttgaagttcttgctacaaatggagatactcatcttggaggtgaggactttgatcagagaataatggagtacttcattaaattgatcaagaaaaagcatggaaaggatattagcaaggacaacagagcacttggcaagctgaggagagaggctgagcgtgcaaagagggctctcagcagccagcaccaggtccgcgtggaaattgaatcactttttgatggtgttgatttttctgagccactcacccgagctcggtttgaggagttgaacaatgacttgttccggaagaccatgggtccagtgaagaaggctatggaagatgcaggattacagaagagtcagattgatgagattgttcttgttggtggaagcacaaggattccaaaggtacaacagcttttgaaggactactttgatggaaaggagccaaacaagggtgtcaaccctgatgaagcagttgcctatggtgctgcagtgcaaggaagcattttgagtggagagggtggtgaagaaaccaaagacatccttctcctggatgtggctcccctcactctcggaattgaaactgttggtggagtcatgacaaagttgattcccagaaacactgttatcccaaccaagaaatctcaggtgttcaccacctatcaggaccagcagactacagtctccattcaggttttcgaaggcgagaggagtctcacaaaggattgccgccttcttgggaaatttgatctgtctggaattcctccagccccaaggggtacgcctcaaattgaagtgaccttcgaagttgatgccaacggcattctaaatgtgaaggcagaagacaagggcactggtaaatcagaaaagatcaccattacaaacgaaaagggacgtcttagccaggaagaaattgagagaatggttcgcgaagcaagaggagtttgcagaggaagacaagaaggtgaaggagaggatcgatgctcgcaacagtcttgaaacctatgtatacaacatgaagaaccagatcagtgacaaggacaagctcgctgacaagttggagtctgatgaaaaggagaaaattgagactgctgtgaaagaagcactggaatggctggatgacaaccagagtatggagaaagaagattatgaagagaagctgaaggaggttgaagccgtttgcaacccaatcattagtgctgtgtatcagagatctggaggagccccaggcggtggtggtgcatcaggcgaagaagacgaggacgattctcacgatgagctctagattagtcggagtctgttaaatttttatgatagctgggaattaagaagtcccctgcgcttgcttttttggtggcgatgataagatactttgtgaaattacttgtactttacttttttgcttagttttacgacgaaacttcttcagctgtatgaatgagccttgttttcacttccaaaaaaatatggggtccaaaaaaaaaagggggggnnnnn

SEQ ID NO: 831 - DNA, 2449 bp, Glycine max
gaattccggcacgagatcgtccatcgagaaaggaagaaaagaaacaaggtgacatcatcatggcttgctcgttttctcgcgggtcttcttgctttcctctcgccatcatcgtttccttaggatgtctatttcgcgatttttccattgcaaaggaggaagccaccaagttggggacggtcattgggattgatcttggaacgacctattcatgtgttggtgtttacaagaacggccatgttgaaatcatagccaatgaccaaggtaaccgtatcaccccttcttggagcttcaccgacagtgagagactcattggggaggctgccaagaatctggcagctgtcaacccagaaagggtcatctttgatgtcaagagacttattggaagaaagtttgaagataaggaagttcaacgagacatgaagcttgttccttataagattgtcaacaaggatggaaaaccttacatacaggagaaaattaaggatggcgagaccaaggtgttcagccctgaggaaatcagtgccatgattctgaccaagatgaaggaaactgcggaagcattccttgggaagaaaattaatgatgctgtggcctacttcaatgatgctcagaggcaggccaccaaagatgctggtgtcattgctggtctcaatgttgctagaattattaatgaacctactgctgctgccattgcttatggattggacaagaaaggtggcgagaagaacattcttgtttttgaccttgggggtggaacatttgatgtcagtatcttgacaattgataatggtgtttttgaggttcttgctacaaatggagatactcatcttggaggtgaggactttgatcagagaataatggagtacttcattaaattgatcaataaaaagcataaaaaggatattagcaaggacagccgagcacttagcaagctgaggagagaggctgaacgtgcaaagagagctctcagcagccagcaccaggtccgcgtggaaattgaatcactttttgatggtgttgatttttctgagccactcacccgagctcggtttgaggagttgaacaatgacttgttccggaagacaatgggaccagtgaagaaggctatggaagatgctggattacagaagaatcaaattgacgagattgttcttgtcggtggaagcacaaggattccaaaggtacaacagcttttgaaggactactttgatggaaaggagccaaacaagggtgtcaacgctgatgaagcagttgcctatggtgctgcagtgcaaggaagcattttgagtggagagggtggtgaggaaaccaaagatatccttctcttggatgtggctgccctcacccttggaattgaaactgttggtggggtgatgacgaagttgattcccagaaatactgttatccctaccaagaaatcccaggtgtttaccacctaccaggatcagcagagtaccgtctccattcaggtttttgaaggggagaggagtctcacaaaggattgccgtctgcttgggaaatttgaactgtctggaattcctccagctccaaggggtacccctcaaattgaagtgaccttcgaagttgatgcaaatggcattctaaatgtgaaggcagaagacaagggcactggtaaatcagaaaagataacaattacaaatgaaaagggacgtcttagccaggaggaaattgagcggatggttcgcgaagcagaagagtttgctgaggaagacaaaaaagtgaaggagaggattgatgctcgtaacagtcttgaaacctatgtctacaacatgaaaaaccaggtcagtgacaaagacaagctcgctgacaagttggagtctgatgaaaaagagaaagttgagactgcagtgaaagaagcattggaatggctggatgacaaccagagcgtggagaagagatatgaggagaagctcaaagaggtggaagctgtttgcaacccaatcatcagtgctgtctatcaaaggtcaggtggagccccaggtggtggtgcatcaggcgaggacgacgatgaagattctcatgacgagctctagagatgttgttgcttaagcagtagcattaaatgatgagcagtagtgtaggttaaacggagtcttcaaaattttgtaacaggtggaaattgacaatagtttccccagctcttgtatctttggtgccgaaaatactttaaagatgaatgcttgaatttgttttaggatcgctagttaaccaccgatacttcttcgcttcgaattaatcggttttatcttcatgctagggaggacggttggactcggaactacagccgtctacgtatgttggaattagtgtctgttacgtagattgagcttaaaattcagtctatcaaaccaaagtaactcttctaaagatcttttgtctgctactcttttaaaatttattttaattcattctttcgtgattctcgtca

SEQ ID NO: 832 - DNA, 1398 bp, Glycine max
ctcgagccgtgcatgtggggcgtcgttgcttaccgcgtcccacagtcctctgtctttaattgctgaaatttataataaaagaagagagagagactctgcagtatcctaggccttttgttttgtttccttttcaactttttcagttactatttctattcattcaaaatatatccattctttttttaattcccccccactataaatatgtatccttgcacaccaagctcttgccggacaactctgattctatgcctacgtcttcctccaaatcacaacacacccaattacaccctctgttctctgcaaatgcggtgaaggagaacacttggctttaatttggatctggatatggcgattgaagcacagttgtatcccaacaatgctcctccgtttccttttcacgtgtcaagggtagacaaatctccagcagcatatagtcatagtcacaggcaacaacaaccaggtggctggcagatgaatcagaacattcctcttgttcctcccaacttttcttgtttttccaattccaattccaattccaattccaatgtcctccaaaacgccttcaataagaatgttgttcagccttcagcctcatatcctcaatgcttggctattgagtttgatcaacagagggagattgatcaccatatcagatcacataacgaaaaattgaggattttgttgcaagagcaaaggaaacagcatgtggcagagttattgaagaaggtggaatcgaatgctcttcatttgttgagacagaaagatgaagaaatagcgcaagcaacaaagaaaaccaccgagttgaaagaatttctgacaaggttggaggtggagaaccaatcatggcgtaaggtagccgaggaaaacgaggctatggtattgtcccttcacaacaccttagaagatatgaaagaaagagctctgtatcgggtgacaaaagaggatgcagagtcgtgttgcgatgaaaacatgagaaacagggcaatggaagaaggaacaggagaaaacagactgtgcggtggtggtggcgctggtggggtagaagaggttgagcaaattaggaaaaggacaatggattgcaaatgttgtaattctcaaaattcgtgctttatgtttcttccttgcagacacctctgttcgtgtaaaacttgtgagccttttctgcaagtttgccctgtttgtagtatgcctaaaaagtctagcatagagacattaattgtataggctgaatgatctcttcaatatgacatcattttaatttttatacaaaaaattgcttaattgtcagtattaagatttccagtcagttgttatcaattttgtgtgttccaaaacatgatttggtatcattgcaaaaaccccattaatgcagataaactgttaattttggatacc

SEQ ID NO: 833 - DNA, 690 bp, Glycine max
acaaaatctgcatgtggggcgtcgttgcttaccgcgtcccacactcctctttctttaattctgaaatttataataaaagaagagagagagactctgcagtatcctaggccttttcttttgtttccttttcaactttttcagttactatttctattcattcaaaatatatccattaatttattatttccaccccactataaatatgcatccttgcacaccaagcactgccacactactccgattcttgcctgcgtcttcctcgcaatcacaacacacccagttcatcctctgaatctgatccatccttttaatcttgttctgtgcaattgcgtgcaaatgcggtgaagaacaacggttcggtgtttattttaacaggatatggccattgaagcacagttgtttcccaacaatgctcctccgtttccgttttatgggtcaaagaatttaatggcagacaattctcaagcagcatatggtcataggcaacaaccagtagaacaacatcatgcctggcagatgaatcagaacatgtctcttgttgatcccaacttttcttgtttttctaattccaatgtccaccactacgccctccataagaacgttattcaacctttagcctcatatccttaaagcttggctattgtgtttgatcaacagagggagattgatcactgtatcagatcacagaat

SEQ ID NO: 834 - DNA, 289 bp, Glycine max
ctctcttcgacctcgcatcgcaccttcaacttaacctattccacttgtaatcgtaaatgctttgctagaagaagagacaaagtgtgtctgtgtgtgtgagagagagagcaatggctggctcgtgggcacgccgttctctgattgttctagccatcatttccttcggatgtctatttgcgatttccattgctaaggaggaagccaccaagttagggacggtcatcggcattgatcttggaacaacctattcatgtgtcggtgtttacaagaatggccatgttgaaatcat

SEQ ID NO: 835 - DNA, 1225 bp, Glycine max
taccggtcttatcttcccgggccgccccacgcgcgcaccttaagatttggcataatacattgatttgtttcttaaaaacaacactgcaatgtctgccatatttctgcttgttggaatgctatcgtccattacagttgcacaatccataggagtttgctatggagtgattggtgataatctaccatcaaggcaagaagttgtggacttatataaaacaaatggcattggtagaatgcgtatatactacccagatgaagaagcactccaagcccttagaggttcaggcattgagttgattatggacgtggctaaggaaacccttcaatcattgacagactccaatgctgctacagattgggtcaataaatatgttacaccttactcgcaagacgtcaatttcaagtacatcgctgttggaaatgaaattcatcccaataccaatgaggcacaatatattctatctgccatgaccaacattcagaatgcaatttcatcagcaaatttacaaattaaggtgtcaacagctatagactctactttgattactaactcttaccctcccaatgatggcgttttcactagcgatgcggagccatacataaaacccataatcaacttcctagtgagcaatggggccccacttcttgccaacgtgtacccttactttgcttatgcaaatgatcaaagcattcctcttgcctatgctctttttacccaacaaggaaacaacgacgttgggtaccaaaacctctttgatgctatgttggattcaatatatgctgctttggagaaagtgggagcgtccaatttgcagatagtggtttctgagagtgggtggccatctgaaggtggagctggagcctcaattgataatgcaggcacttactatgctaatttgattcgtcatgcctcgagtgggaatggaactccaaagaggcctggtgagtctatagagacttacttgttcggccgatgtttgagcgaaaaccagaagcaggtgctgatactgagcgtcatctttggtctctctcttccaatctcctcttgagaaatcccaatcactagtttcaactaattgaaactaacagaaatatatatatatatatatatgctcctatatcatatttactttgaataagtgtgtcaagatatatgcacatctgtaaaacgcttatttatgccctaaatgacaaatatataagaagtgtcataatttagtttgtga

SEQ ID NO: 836 - DNA, 814 bp, Glycine max
cccacgcgtccgcccacgcgtccgcggactcgtgggtccacccaatgatgctgttttcagtagcgatgcagagccatatgtaaaacccataatagacttcctagtgagaaatgaggcgccacttcttgccaatgtgtacccttactttgcttatgcgaatgatcaacaaaacagtattcctcttgcctatgctctttttacccaacaaggaaacaacgacgctgggtaccaaaacctctttgatgctatgttggattcaatatatgctgctttggagaaagtgggagcgtccaatttgcagatagtggtttctgagagtgggtggccatctgaaggtggagctggagcctcaattgataatgcaggcacttactatgctaatttgattcgtcatgcctcgagtgggaatggaactccaaagaggcctggtgagtctatagagacttacttgttcgccatgtttgacgaaaaccagaagcaaggtgctgatactgagcgtcattttggtctcttcaatcctgataaatcacctaaataccaacttagtttcaactaattgaaactaacagaaatatatatatatatatatatgctcctatatctatttactttgaataagtgtgtcaagtatatatgcacatctgtaaaacgcttatttatgccctaaatgacaaatatataagaagtgtcataatttagtttgtgatatttttttttacttactttgtttaaataaatacaaaccaaatttctgttggatgattgttatcataaggagaaaagaataagaatcactgtttaatatcattagtag

SEQ ID NO: 837 - DNA, 2365 bp, Glycine max
atggcttctctggcgttgctacgtcgaaccacgctctcccactcgtccgtgcgtaacagaggcttctctgaggggcagagcagcaacagacaccgtctcgaccagattctagtagccaaccgcggtgaaatcgcttgcaggatcacgcggaccgcccggaggctcggcattcaaaccgtcgccgtttacagcgacgccgacagggattcgctccacgtggcaaccgccgacgaggccattcgaatcggaccgccgccggcgcggctcagttacttgaacggagcctccatcgtcgacgccgcaattcgctccggcgcgcaggctattcaccctgggtatggattcttgtcggagagtgctgacttcgccaagctctgtgaggagagtggtctcacttttatagggcctcctgcgtctgctattcgagatatgggtgacaagagtgcatcgaagagaataatgggagctgcaggtgtgcctcttgtacctggatatcacggatatgatcaagatattgaaaaaatgaagttggaagctgatagaattggatatccagtcctaattaagccaactcatggtggaggtggaaagggtatgaggattgtacacactccagatgagtttgttgaatccttcttagctgcacaacgggaagcagctgcttcttttggcgtcaacacaatattgttggagaagtatattacacggccaagacacatagaagtccagatatttggggataagcatgggaatgttctgcatttgtatgagcgagattgcagtgttcagagaagacaccaaaaaataattgaagaagctccagctccaaacatttctgctgactttcgtgcacaattgggtgtagccgctgtttcagctgcaaaggcagttaattattacaatgctgggactgtggagtttatagttgatacagtctctgatgaattttactttatggagatgaatacacgtcttcaggttgagcatcctgttacagaaatgattgttggtcaggatcttgttgaatggcaaatccttgttgccaatggagaagctcttccattgagtcaatcacaagtacccttatcaggtcatgcttttgaagctcgaatctatgctgaaaatgttcaaaaagggtttcttccagcaactggagttctacaccattatcatgttccagtctcatctgcagtccgagtggagactggagttaaagaaggagacaaagttagcatgcactatgatcctatgattgctaagcttgtggtgtggggagaaaatcgtgctgctgccttggtcaaactcaaggatagtctgtcaaagtttcaggttgcaggtctgccaaccaatgtcaactttcttcaaaagcttgctaatcacagggcatttgcaaatggcaatgtggagactcattttattgataactacaaagaagacctctttgttgatgctaacaattcagtgtctgtgaaagaagcatatgaagctgctagacttaatgcatccctggtggccgcatgcctcattgaaaaagagcatttcatattggctagaaatccacctgggggcagcagcttgctccctatatggtattcttctccacctttcagaatccatcatcaagctaagcgtagaatggaacttgagtgggataatgaatatggtagtggtagctcaaagatcatgaagcttaccatcacttatcagcctgatgggagatacctaattgagacagaacaaaatggatctcctgttttagaagtgaaatcaacatatgtaaaagataactattttagagttgaagctgctggtgtaatcaatgatgttaatgtagctgtttattcaaaggatcaaataaggcatattcatatttggcaagggtcctgtcatcattatttcagagagaaactaggcctggagctgtctgaggatgaagaatcccaacataaacccaaagttgaaacatcagccaaccctcaagggacagttgtagcacccatggcaggcttggtagttaaggttctagtggagaacaagacaagagtggaggaaggacaacctgtgttagtattggaagcaatgaagatggagcatgttgtaaaggcaccttcttctggctatgtgcatgggcttcaacttatggtgggtgaacaggtttcagatggcagtgttcttttcagtgtaaaggatcaataaaatcgcacttgacagctttacgccaagactttggcaagggggacattatctggaattctagttatacgcaggttaacaaccgaacacctgaaagttgattacttgcttaacaatctttgtgactcaatttttcaagttacaaaagatgaaatatacttcacaataatgc

SEQ ID NO: 838 - DNA, 1381 bp, Glycine max
ggcagtctcttttcgggcaacaactgggccaaggggcactacacggtgggcccctagctaagcgactccgtccttgacgtcgtgcgcaaggaggccgagaactgcgactgcctccaggggttccaggtctgccactcgctcggcggaggaaccggctccgggatggggacgcttttgatttccaagatcagagaggagtaccctgacagaatgatgcttactttctccgtttttccttcccccaaggtctctgacactgttgttgagccttataacgctactctctctgttcaccagttggtggagaatgctgatgagtgcatggtgcttgacaatgaagctttgtatgacatctgcttccgtaccctcaagctaaccacccctagctttggtgacttgaaccatttgatctcagcgaccatgagtggtgtcacatgttgtcttcggttccctggtcaactcaactctgatctgcgaaaacttgccgtgaatctcattcccttccctcgtctgcacttcttcatggttggatttgcgcctctcacatctcgtggctctcagcaatacagagcattgactgttccagagctgacacagcaaatgtgggatgccaagaacatgatgtgtgctgctgatcctaggcacgggcgttacctcacggcatcagccatgttccgtggcaagatgagcaccaaggaggtggacgagcagatgataaacgtgcagaacaagaactcttcatactttgtcgagtggattcccaacaatgtcaagtcgagtgtgtgtgacattgctcctagagggctctccatggcgtccacattcattggaaactcgacctcgattcaggagatgttcaggagggtgagcgagcagttcacggccatgtttaggaggaaggctttcttgcattggtacactggtgaaggcatggacgagatggagttcacggaggcagagagcaacatgaatgaccttgtgtctgagtaccagcagtaccaggacgccactgctgaggacgaaggggagtacgaggatgaggaggaagaggatggtgaagcagacgaccatatgtgaagagactaaaatgtgaagatgcctgtgtcttacttatgctatgtgatgcgtaagtgtgtttgctctgcactccaacgtgaagaagattgtaattactaatagtgtatgtacggtttgcgggataatactttgatggtagtgagagtggagtttgggacctttgggtacatgttatgcggcacctatcggtttgttcttatattggcttgctttttatttttatttttgtccatctggtatattggatctcatgtttccgtaatatgttgttgttcttatgcatggcttttgtttacattgaaaa

SEQ ID NO: 839 - DNA, 1168 bp, Glycine max
gaagcgagttgcaactcgagcgagtcaacgtctacaatgcaaccctatcagtgcaccagctcgttgagaatgcagacgaatgcatggttttggataacgaagctctctatgacatctgcttccgcacgcttaagctcaccactccaagctttggggatctgaaccatctaatttcagccaccatgagtggtgtgacatgttgtcttcgattccctggtcaactcaactcagatcttcgcaaactcgccgtgaatctcattcccttccctcgtctgcacttcttcatggtgggatttgccccactcacttcccgcggttcccaacagtacagggctctcactgtccctgaattgacccaacaaatgtgggatgctaagaacatgatgtgtgcagctgatcctcgccacggtcgttacttgacagcttctgcgatgttccgtggaaagatgagcacaaaggaggttgacgaacagatgatcaatgttcagaacaagaactcatcatactttgtggaatggatccccaacaatgtgaaatccactgtctgtgacatccctccaactggcttgaaaatggcatcaaccttcattggcaactctacctctattcaagaaatgttcaggagggtgagtgagcaattcacagctatgttccgcagaaaggccttcttgcattggtatactggagaaggtatggatgaaatggagttcactgaagctgagagcaacatgaatgaccttgtgtccgagtaccagcaataccaagatgcaactgctgatgacgagggctatgagtatgaagatgaggaagaacctcaggaagatgaggcttaaaacagtgtagtagtgttttgcagggtgttcttgtttgtgtgttttgttgtgatactctgtttaacgttgtgttttttttcatcatcccttgacctgaatatctttttcgggattttggattgctttgggggcactctctggcttcgtggcttatctcttctagtttagggattttatttttctgcatgttttcattattgttaacatggtggtcgccctttgattgaaacgtagttgatatattcttataatttggatgtcgctcttcctgcctgttaaggggtttgaaagttaaacatttcaggtttaattttacgatttagataaaaaaaaaa

SEQ ID NO: 840 - DNA, 847 bp, Glycine max
ggagcagtgttgtaattgaagagggaactagattaggtggcgagtgaagagaagatcggtgaaggagtgaggtagcaaggggaaggagtgaggtagcaacagcactgccactgccactaccaatagcagaatgggaaccttgggcagagctttctacgccgtcggattttggatccgcgagaccggccaagccatcgatcgcctcggctctcgtctccaaggcaactacctctttcaagaacagctatctaggcatcgacctctgatgaatctgttcgacaaagctccctcggttcacagggatgcatttgtggcccccagtgcctccctcctcggcgatgtccacgttggcccagcttcctccatttggtatggatgcgttctcagaggtgatgttaacagcattactattggatctggaactaatatacaagacaattctcttgttcatgttgccaagtctaatttaagtggaaaagtcttgccaactatcattggagataatgtcactgtaggtcatagtgctgtgttacaaggatgtactgttgaggatgaggcatttattggcatgggtgcaaccttgcttgatggtgtatatgttgagaaacatgccatggttgctgctggagctcttgtcaggcagaatacaaggatcccttatggagaggtttggggaggtaatcccggcaaggttcttgagaaagctcacagaagatgaaatgaccttcttctcacaatctgccttaaattattctaatttggctcaggctcattctgctgaaaatgcaaaaggactcgatgagactgaatttgtaaaggttcttcacaagaaatttgctcgtcatgg

SEQ ID NO: 841 - DNA, 1238 bp, Glycine max
aagattaatagtaccatagcatacaagtgccagggttcagccgcttagtccgcaaacgcagccgagtgcattgcacttgacggtgaaccatagtatgacattccattccgtcacctcaagctaaccaccccaagctttggtgacttgaaccatctgatctcagctacaatgtctggtgtcacttgttgtttgaggttccctggtcagttaaactctgatctgcgaaagcttgcagtgaacctcattcccttcccgcggctccactttttcatggtgggatttgctcctttgacatctcgtggctctcagcaatacagggccttgagtgttccagagctgacacagcaaatgtgggattcaaagaacatgatgtgtgctgctgaccctcgacatggccgctacctcactgcctcagccatgtttagaggcaagatgagcaccaaggaagtcgacgaacagatgatcaatgtgcagaacaagaactcctcctactttgttgagtggattcctcacaacgtgaaatccacagtctgtgacattcccccaaccggcttgaagatggcttcaacattcattggcaactctacctccattcaggagatgttccgtagagtgagtgagcaattcactgctatgttcaggaggaaggccttcttgcattggtataccggggaaggcatggacgagatggagttcactgaggctgagagcaacatgaacgatcttgtgtcagagtatcaacagtaccaggatgccactgctgatgaggatgagtatgaggaggaagaggaggaggaggagtatggccaacatgatatgtgattttgaacttggtaatgtattgcggtggcttgaagatgtataacatgccgcaacttcctgttgccggttgattgtctcttttgaggggatggttctgttccggctagatctagtttccattactgttctataaaactggttctgtttgtttccgtttttatgtaacctgttgtttgtagggaagacaatatgaaactgctattattttaaagctctaaatgttcaatccaactaaatgcccgatgattggtgtttcttttttaaaaatcaatgaaaaaaaaaaaaaaaaaaaaaaaaaaaagtaaaaaaaaacaaaaaaaaaagggggggggcccccaaaaaggagccctccccggcgggatatatcgcgggggggggtagggaggggggcacatttttcccaagaaggggccctt

SEQ ID NO: 842 - DNA, 440 bp, Glycine max
ggaagtgatttctgagattggatgcgagagttctgagaagaaaagagaagatcggtgagtgaggaagcaaatagcaatagcaccgccaccgtcaccactgccactgccactgccactagcaacagcagaatgggaaccttgggcagagttttctacgccgtcggattttggatccgcgagaccggccaagccatcgatcgcctcggctctcgtctccaaggcaactacctctttcaagaacagctgtctaggcatcgacctctgatgaatctgttcgacaaagctccctcggttcacagggatgcatttgtggcccctagtgcctccctcctcggcgatgtccacgttggccccgcttcctccatttggtatggatgcgttctcagaggtgatgttaacagcattactattggatctggaactaatatacaagacaattc

SEQ ID NO: 843 - DNA, 381 bp, Glycine max
agactgactcagagggtgagcgagcagttcacggccatgtttatgaagaaggctttcttgcattagtacactggtgaaggcttgaggactggcatcagcactgccactgccactaccacccccagaatgggggccttccgcagagctttctacgccgtcggattttggatccgcgagaccggccaagccatcgatcgcctcggctctcgtctccaatgcaactacctctttcaagaacagctatctaggcatcgacctctgatgaatctgttcgacaaagctccctcggttcacagggatgcatttgtggcccccagtgcctccctcctcggcgatgtccacgttggcccagcttcctccatttggtattgatgcgttctc

SEQ ID NO: 844 - DNA, 753 bp, Glycine max
tccgtcaagcagtcctgctatgcacattgattaactagtgcactactccgtcgtctcacttcattctgaaataccaagagtatacaatacattcaacagactatgcttgtgatgacccacatgtaaccctgttgtcatctccactgttaaaggctcacttcttgcattctctctataaaaattcagagggtgacgacattccggctatgtcccagaaaggcttctgcattggtatactggagaaggtatggataaatggagttcactgaagctgagagcaacatgaatgaccttgtgtctgagtaccagcaataccaagatgcaactgctgatgacgagggctatgagtatgaagatgaggaagaacctcaggaagatgaggcttaaaacagtgtagtagtgttttgcagggtgttcttgtttgtgtgttttgttgtgatactctgtttaacgttgtgtttttttcatcccttgacctgaatatctttttcgggattttggattgttttggggcactctgtgtctgtcttcgtggctggatttcgtagtgtttagggatttgatttttctgcttgttttcattattgtgaacatggtgccctctgattgaaacgtagttgatagattctgatgaactatttggagatcattcttcatgtcaaggggtttgatccttgcaccacaacttgtttggattcccagttttagatggtttttcaatcgttttttaagggtggtgcgtgaattggcaat

SEQ ID NO: 845 - DNA, 743 bp, Glycine max
ccattcccccaactggcctgccgccctcttcaagccagtcgggggaccgtcacagactggcttgaagatggcttcaacattcattggtaactctacctccattcaggacccgttccgtagagtgagtgagcaattcactgctatgtttaggagccaggctttcttgcattggtataccggggaaggcatggacgagatggagttcacagaggctgagagcaacatgaacgacctcgtgtcggagtaccagcagtaccaggatgccactgccgaggatgatggggagtatgaggacgaggaggacgatgatgttgaagcagaccacatgtgaagagactgaatgtgaaagatgcctgtgtcttacttatgctatgtgatgcgtaagtgtgtttgctctgctctccaacgtgaagaagattgtaattactaatagtgtatgtacggtttgcgggataaaactttgatgagcttggtgtggagaatggaaaaaatagggggttagtgggagtggagtttgggaacaatgttatgcggcacctatctgtttgttcttatattggcttgcttttatgttgttatattgagtcatgtttccgtaatatttgttgttcttatgcatgacttttgtctacgttggattcttggaatgtctttggagaaacccttgcctcatgtttttgtctatactgtgttgaggtcaaggtgtgatttaggatactgatcgaatctagttatcctttgag

SEQ ID NO: 846 - DNA, 546 bp, Glycine max
gagtgagtgagcaattcactgctatgttcaggaggaaggccttcttgcattggtataccggggaaggcatggacgagatggagttcactgaggctgagagcaacatgaacgatcttgtgtcagagtatcaacagtaccaggatgccactgctgatgaggatgagtatgaggaggaagaggaggaggaggagtgtgcccaacatgatatgtgaatttgaacttgggtgtacgtgtattgcggtggctttagacaagaagatggatagcaatgctgcaacttcctgttgccggttgatgattgtctcttttgaggggatggttttgttccggctagatctagtttctattactgctctataaaactgattctggtttgtttccgtttttatgtataacctgttggtagggaagacaatataaaactgctattatttgaagctctaaatgtttgatccaaaacaaaaaaaacccccaaaatggcgtgccgtcttcaaggaaacaaagtcccccccctccttggattaaaataaaaaatctctttttttt

SEQ ID NO: 847 - DNA, 322 bp, Glycine max
cggacgcgtgggcggacgcgtgggcttacgcttgaagagggaactagattaggtggcgagtgaagagaagatcggtgaaggagtgaggtagcaacagcactgccactgccactaccaatagcagaatgggaaccttgggcagagctttctacgccgtcggattttggatccgcgagaccggccaagccatcgatcgcctcggctctcgtctccaaggcaactacctctttcaagaacagctatctaggcatcgacctctgatgaatctgttcgacaaagctccctcggttcacagggatgcatttgtggcccccagtgcctc

SEQ ID NO: 848 - DNA, 464 bp, Glycine max
cgaagacagcatgtaacaccactcatggtcgcagagatcaagtggttcaagtcaccaaagctaggagtggtcaactcaactctgatctgaggaaattggccgtgaatctcattcccttccctcgtctgcacttcttcatggttggatttgcgcctctcacctctcgcggctctcagcaataccgcgcattgacagtgccagagctgacacagcaaatgtgggatgccccgaacatgatgcgtgctccagatccaaggcacgggcgttacctcacggcatcagccatcttccgtggctagatgagcaccaaggaggtggacgagcacatgataaacgtgagaacaagaactcttcatattttgtcgagtggattcccaacaatgtcaagtcgagcgtgtgtaccaatgcaagaacatcttcctcctaaacatggccgtgaactgctcactcaccctcctgaacat

SEQ ID NO: 849 - DNA, 1802 bp, Glycine max
  unsure (1)..(1802): unsure at all n locations
cgccatacaaagagcaagccctgagacaccattgtagagagagagagagttgagactcgagcccaaacctagcccatcctcaactggcccatactatgctccaatctcactgaagccctaatccctttccgttcacttcattcctctctgaaaccctaagaacacagaagccacgctgttctttcaaatcgtaaccgaagaatgaagatggtgcgctgctgtcggtgcttcgcctgagtctcattccgtttgcgcccactatcacaggttgtgctgaggcttaactggttcttgaagcatatttcagagttttatcagagaacaaatgggttatattgggactcacggtgttgcagctctgcacagatataaatatagtggagtagatcattcctatgtggccaaatatgtactacaacccttttggagtcgctttgttaattttttccccctatggatgcctccaaacatgataactcttatgggatttatgttcttactactgtctgcattgcttggttatatatactccccacaattggacacagctcctccaagatgggttcattttgctcatggactacttctgtttttataccagacatttgatgctgttgatgggaagcaagctagacgaacaaattcctcaagcccattgggggagctctttgatcatgggtgtgatgcacttgcttgcacatttgaagcattggcttttgggagcacagccatgtgtggaagaactactttctggtggtggttaatatctgcaattacattttatggtgcaacctgggagcattatttcaccaatacacttatactgcctgttataaatgggcctacagagggtcttatgataatatacatctgtcactttttcactgctatcgtgggtgctgagtggtgggttcagcaatttggaaagtctttgccattcttaaattggcttccttatcttgggggaatcccgacattcaaagctatattgtgtttaatgatagcttttggtgttacaccaacagtcacatgcaatgttagtaatgtttacaaggttgtgaagggaaagaatggaagcatgccacttgcattggcaatgctttacccatttgttgtacttgtgggaggagtgcttgtgtgggattatttgtcaccatcagacatcatggggaaatatccacatttagttgttataggaacaggacttactttcggatatcttgtggggaggatgattttggcacacttatgtgatgaacctaagggtctgaaaactgggatgtgcatgtccctcatgtttctcccattggccattgccaatgtacttgcatccaggctaaatgatggggttcctttagtagatgagagactagttcttcttggttactgtgcattttcagtgacactatacttgcattttgccacatcagtcattcatgaaattaccaatgccctgggaatatattgtttcaggataactaggaaggaagcttgaatccacccaagatttcctttagcttgcaagtcgagcaaaatattggcaagggtcagtactaattttgctttatttgactaacatggatcttgtaattatatattgattctttatccttttttttttaagttcttaagttttatatgtgaccaggtctgttgaaatttacatcgttgattatgatcacaatataagtcatacaacgttttatcttttcaacctaaacaacccaggtaactttccaaaaaaaaaaaaaaaaaaaaaaaaaaannaaccggcgctctagaggatccagcttacgacgcgt

SEQ ID NO: 850 - DNA, 412 bp, Glycine max
cccacgcgtccgcccacgcgtccgctcactcgtgacctaacaaatttggtgcttctttttctgggcagcctcttcgatcccgctggtgctcacttcgatcccgttggcgctctcttcgattcagtttagcaggttgtgctgaggcttaattgacccttgaagcatatttcggagttttatcagagaacaaatgggatatattggggctcatggtgttgcagctctgcacagatataaatatagtggagtagatcattcctacgtggccaaatatgtactacaacccttttggagtcgctttgttaattttttccccctatggatgccttcatacatgataactcttatgggatttatggtcttactagtgtctgcattgcttggttatatatactccccacaattggacaca

SEQ ID NO: 851 - DNA, 1504 bp, Glycine max
atgatcattcaatattcatcaaattggagctgcaatttatccatgatggcaaggcttgccttgtgcctccttgtgatgttgagcaataatgcaagttcttcatctgctcgtttattgttcaatagaacaagaggagggttcacgatcatgcctaaagaagtacataggagaaacctgcttgataatggacttggccatacaccccccatgggatggaatagctggaaccattttgcctgcaatattaaagaagacttaattcgagaaacagccgatgctatggtgtcaactggccttgctgctctaggttaccaatatattaacatagatgattgttggggagagcttaaccgagactcaaagggcaatttggttcccaaagcctcaacatttccttccggaatgaaggctctagctgattatgttcataaaaatggtttgaagttggggatatattctgatgcaggaaatcaaacgtgcagtaaaactatgcctggatcacttggacatgaagaacaagatgcaaaaacatttgcttcctgggggattgactacttgaagtatgataactgtgagaataacaatataagccccaaagaaaggtaccctccaatgagtgaagctttggcaaacactggaaggccaattttcttctctttgtgtgaatggggatcagaagatccagcaacttgggccaaaagtgtgggaaatagttggagaacaacaggagacattcaagataagtgggatagtatgatatctcgtgcagatctaaatgacaaatgggcttcttatgctggacctggaggatggaatgatcctgacatgctagaagttggaaatggaggcatgacaacagaagaatatcgtgctcatttcagcatatggtcattagctaaggctcctttgttgattggttgtgacattagagcactggatgccaccacaaaagaattgctaagcaacaaagaagttattgcagttaatcaagacaagcttggagttcaaggaaagaaggtgaaaagtactaatgatttagaggtttgggcaggtcctctcagtaataacaaggtagcagtgatcttatggaatagaagttcatccaaagcaaaagttactgcatcctggtctgacataggcctgaaacctggaacttcagttgaagcaagagatttatgggcgcattcaacacaatcatctgtttcgggagaaatatctgctgaattagattcacatgcttgtaagatgtatgtcgtcactcctaactaagctgttaatttcttgaggcagaaaaaggaggtaaaaacagaagtcaggagaaacaaatgcattggcaatagttggatgttccatagaaggaaaaagaaatcaataggatatttatttatcaataggaaatatagaaagatatgtatacgcttgtttagctccgaaggtttccattttaaattatacattgtcattgagatccacttgatttcaattaaataatatgcattctcgt

SEQ ID NO: 852 - DNA, 1854 bp, Glycine max
gatagaaacaaagtgctttgctactaagcaaacgggaacaatatgggtaatcacagtaccaacatctccctgtttgcttattgatttgcttcttccgatcccatcacgaagtgcaaatagcaattccgctactcacaaaaaaccttttcctattccctttctctttcctgaacccaacacaacaacacaacacaggataaataaataaaattaaactaagctaaattcctttctctctctttctttctcttcgagggtttgggtttctcttcctcccttggagaaaaagaagagccaccgctgcgacgccgttcgtgcatttttgaggtgccgctgtcatgtttgggcgtggtggaccaaggaggagtgataactccaaatattatgatattctcgggatttccaaaaatgccagtgaagatgaaatcaagaaggcctatagaaaggcggctatgaagaaccatccagataagggaggagatcctgaaaagtttaaggagttaggtcaagcatatgaagttttaagtgatcctgagaagaaagaactgtatgaccagtatggtgaagatgcccttaaagaagggatggggggaggaggctcgtttcataatccatttgatatatttgaatcattttttggaggagcaagctttggtggtggtggtagttcccgaggtagaagacagaagcatggtgaagatgtggtgcattctttaaaggtttccttggaggacgtttataatggcacaacaaagaaactatctctttctagaaacatattatgcccaaaatgtaaagggaaaggttcaaaaagtggaactgctggtaggtgttttggatgcaaaggcactggtatgaaaattacaagaaggcagattggactaggcatgattcaacaaatgcaacatgtctgtcctgactgcagaggatctggtgaggtcattaacgagagagataaatgtcctctgtgcaaaggaaacaaggtttcccaggaaaagaaggtgctggaagtgcatgttgagaagggcatgcagcagggtcagaagattgtttttgaaggacaagctgatgaagctcctgacacaatcacaggagatattgtttttgtattgcaagtaaaggatcacccaaagttcagaagggagcaggatgacctctatattgatcacaatctcagcttaaccgaggcactctgtggcttccagtttgctgtcaaacatcttgatggtaggcaactattgatcaaatcaaaccctggggaagtcatcaaaccaggtcaatataaagcaataaatgatgagggaatgccacaacacaataggccattcatgaagggtcgcctttacatccagtttaatgttgatttcccagactcagggtttctttcccctgaccaatgccagttactggaaaaggtgttacctcaaaagagcagcaagcatgtgtcagacatggagctggatgattgtgaggagaccactttgcatgatgtcaactttaaggaggagatgagacgaaagcagcaacagcaatatcgcgaggcatatgatgaagatgatgatgagccatctggtcaacgagtgcaatgtgctcaacagtagtgcaatttatggtagtagaggttctataatttctgcatggtttttatcttttgtttgcataatgcagttataactgcgtgataaatttaccctttaggttttggctggtaacgttatttagtcttggcagatttctaaagtctgttttttgttgtaatatatgaaaattaaatgttttggtacaaggcgcgcaataacgattgcatatcccagtttcatacctcctgtactatttggttcttagctttggggt

SEQ ID NO: 853 - DNA, 497 bp, Glycine max
attcatgaagggtcgcctttacatccaatttaatgttgatttccccgactcagggtttctttcccctgaccaatgccagttattggaaaaggtgttgcctcagaagagcagcaagcacgtctcagatatggagctggatgattgtgaggagaccactttgcatgatgtcaactttaaggaggagatgagacgaaagcagcaacagcaacaccgcgaggcatacgacgaagatgatgatgagccatctggtcaccgagtgcaatgtgctcaacagtagtgcaatttatggtagtagaggttctataatttctgcttggtttatcttttgtttggataatgcagttataactgcgtgataaatttacctttaggttttggctggtaatgttatttagtttacagttcttggcagatttcaagtatatgaaaattgaatgctttggtataaggcgcgcaataatgattgcatatcccagttgcatgcctcctgccctcct

SEQ ID NO: 854 - DNA, 573 bp, Glycine max
tgccaaatgcaaggaacatggcccatgtgcttgctaatgcaaaaaccatagacagatcttcccgccctcagcatcagcaaatgtggattgcctcctaatactgcaccgaggatactttacaactgactttgaaccaaaccatcttagccttaactctactctatcaaacatgtcatccactatcagaggttgaccactataataagcatcccgtgcttggcaataaagggcttcgaggttctctttgttagcggtttcgagggggccaacgtagatgcagcagggtcccgcggggcgttggtcagaggtggcggagacgcggtggctcttggcggagattctgacgtggcgggtggttctgggcaattctaggaccgtcgattggatcacgtgagagaggctcgtgccggccatcagcccacgacgccacaattcattcgcaagccaaacacattctcgatgtctgtcctgactgcagaggatctggtgaggtcattaacgagagagataaatgtcctcaccagatcctctgcagtcagtacagacttgttgcatttgttgaatcatgcctag

SEQ ID NO: 855 - DNA, 471 bp, Glycine max
ctttccttatctcaacccaacacatctcatcataaattaaataaataaataaaatggggactaagctaaattcctttctctctctttctttctcttcgagggtttgggtttctcttcctccctggaagaaaaagaagagtcaccgctactgacgccgttcgtgcttttttgaggtgccacagtcatgtttgggcgtggtggaccaaggaggagtgacaactccaaatattatgatattctcggggtttccaaaaatgccagtgaagatgaaatcaagaaggcctatagaaaggctgctatgaagaaccatccagataagggaggagatcctgaaaagttcaaggagttaggtcaagcatatgaagttttaagtgatcctgagaagaaagacctgtatgaccagtatggtgaagatgcccttaaagaagaaatgggggggaggaggctcgtttcataatccatttgatatat

SEQ ID NO: 856 - DNA, 1118 bp, Glycine max
cccacgcgtccgggtgtgaatactataccttagcatgaaattcaactttgtgggactacatgctgcattacaacctgagcctcagatctcatctcttatccacaaaaccatggctgaaaaggtgaccatcatgaaactcaaggttgactcttgagtgtgagaaatgctacaagaaggttaagaaacttctcggcaagtaccctcaaattcgggaccagaagttcgatgagaaggaaaacattgtgttcatcacagtggtgtgttgcagcccagagaagataagagacaagctttgctacaaaggtggaggctcaatcaaaagcattgagatactggaaccgcccaagcccaagcccgccgggcccgagaagaaggaggccgagaaacccaaggccgagcccgagaaaaagaaagacccagagaagcctaaagcagaccctcccaaagccgaaaagcccaagaccgagcccgagaaaaagaaggacggtggtggcgagaagcccaaggaagagcccgaaaaaaagaaggacggtggggagaagcctaagcccgggcccgagaagcccaaggataagccaacacccgcgccgttacctgtgcagccacatatagcggcaccgatggcggtcccagttgggatgctctatgctcctcctccgtgctacggaggcaggcccgttgggcctggctacgagtacggtgggcccatgctctgttacgacggttactatgcaaggcccgtttacgatagttacagtggaggcagaccctgttatgggaaccgttgtgatcaatatttcagcgaagagaatccacaaggatgcacaattatgtgacaattacatccacggcgttgcattattgttgggatctgtaaatgatggtggccattcacaatttctctcaattatcatcatgtttaatcacgttcaatccaatgagctagtatttctctgtttttgttatttaaaattcgacgagagaaaaaaaaaacaatgaggggggaaaagaaaaataaggttatttaatcaatggttataaatgctatactgcagtgatgttttttttttttcgttccatgagttaataaaataaagtttctttaccaacaaaaaaga

SEQ ID NO: 857 - DNA, 2323 bp, Glycine max
cccacgcgttcgcccactcatgcgtccggaattgttgtaactttttgattcctaaattctctaaaattcgaaattctaatttcgttaggggaaagagattgtttgtgtgtgagtgagtatggctggaaaaggcgagggtcctgctatcggaatcgatttgggaacgacgtactcttgcgtcggcgtgtggcaacacgatcgtgttgaaatcatagccaacgatcagggtaacagaactaccccatcctacgtggctttcaccgacacagaacggttgatcggcgatgcggcgaagaaccaggtcgctatgaacccaaccaacaccgtttttgatgctaagcgtttgattggaaggcgtttttccgatgcatcagtacaaggtgacatgaaattgtggccgttcaaggtgattcctggccctgctgagaaacctatgattgtggtgaactacaagggggaggagaaacagttttccgcggaagagatatcctccatggttcttatgaagatgaaggagattgcggaggcgtatctaggttccaccataaagaatgcggttgtcactgtgcctgcttacttcaacgactcacaacgtcaagccaccaaggacgctggtgtcatttctgggctcaacgtgatgcgaattatcaacgagcctaccgcggctgccattgcttatgggctcgacaaaaaggccactagctctggggagaagaatgttctcatttttgatctcggtggtgggacttttgatgtctctcttctcaccatcgaggagggtattttcgaggtgaaggccactgctggtgatactcacttgggaggtgaagattttgataacagaatggtgaaccattttgttcaggaattcaagaggaagaacaagaaggatattagtggaaatgccagagctctgaggaggttgagaacagcatgtgagcgggcaaagaggactctctcttccactgctcaaaccaccatagagattgattccttgtacgagggtattgacttctacacaaccattacccgtgcccgttttgaagagctaaacatggatttattcaggaagtgcatggagcccgtggagaagtgtttgcgggatgccaagatggataagagtaccgtccatgatgttgttcttgttggtggttctactaggattcccaaggttcaacagttgttgcaggacttcttcaacggaaaggaactttgcaagagtattaacccagatgaagctgttgcttatggtgctgcagtgcaggctgcgattctcagtggcgagggtaatgagaaagtgcaggatcttcttttgttggatgttactcctctatccactggtttggagactgcaggaggagtcatgactgtgttgattcccagaaacacaaccattcccaccaagaaggagcaggtgttctcaacctactctgacaaccagcccggtgtgttgattcaggtctatgaaggtgaacgaacgaggactcgtgacaacaatttgcttggcaaatttgagttatctggaattcctcctgctcccagaggtgttcctcagatcaccgtttgctttgacattgacgccaacggtatattgaacgtgtctgcggaggacaaaaccactggacagaagaacaagattacaattaccaacgacaagggcaggctttctaaggaggagattgagaagatggtgcaggaagctgagaagtacaaggctgaggatgaggagcataagaagaaagtggaggccaaaaatgcattggaaaattatgcctataacatgaggaacacaatcaaggatgataagattgcttccaaactgtcttctgatgataagaagaaaattgaagatgcgattgagcaggctatccaatggctagatggaaaccaacttgctgaggctgacgaatttgaggataagatgaaggagttggagagcatttgtaatcccatcatagcaaagatgtaccagggtgctggtggtgatgcgggtggagccatggatgaggatggtcctgcagctggcagtggaagcggtgctggacccaaaattgaggaagtcgattaagcagaagattctcatgggttgttcttgattttgtcaaagacccttttgaagtttagataacagcctgtcttgtcattatgttttggatttgcgattttatttttctcgtttttttttaatgtacttttccccgtttctacttgaacaatgatataagttgcatatggtctatagaaagaaacgtcgccatatttgcttaattgcttatgaagtgggttgctctcccatttttgagagttgaacatctcttgctag

SEQ ID NO: 858 - DNA, 1322 bp, Glycine max
cgtgtcaaccaaagacagcacatgggagtagaagctgtgtgctgagttgcaaagccatcatcaatccaatcttgtgttactataagtatttaacagcatagacacacaccctttggttctggccaccctcaggtgtgaatacaataccttagcatgaaattcaactttgtgggactacatgttgaagtttgattggtgaacgaggtgcgctaatgccttcttaagttttgcttttctgtcactttccctctgtgttggtttgctctgatcacttttgtctgcattacaacctgagcctcagatctgatctcttgatccacaaaaccatggctgaaaaggtgaccatcatgaaactcaaggttgaccttgagtgtgagaaatgctacaagaaggttaagaaacttctcggcaagtaccctcaaattcgggaccagaagttcgatgagaaggaaaacattgtgttcatcacagtggtgtgttgtagccccgagaagataagagacaagctttgctacaaaggtggaggctctatcaagagcattgagatactggaactgcccaagcccaaggccgagaagcctaaagcagaccctcccaaagctgagaagcccaaggccgagcccgagaaaaagaaggacggtggcggcgagaagcccaaggccgagcccgagaaaaagaaggacggtggcggcgagaaacccaaggccgagcccgagaaaaagaaggatggtggggagaagcccaaaggggatgctccgaaaaaggaagccgagaagcccaagcccgggcccgagaagcccaaggacaagcccgcgccagctcccttacccgtgcagccacatatggctgcacctatggcggttccagttgggatgctctatgctcctcctccgtgctacgaaggcaggcccgttgggcctgggtacgaatacggtgggcccatgttctgttacgacgggtactatgcaaggcccgtatatgatagttacggtggaggcagaccctgttatgtgaaccgtggtgatcaatatttcagcgaagagaatccacaaggctgcataattatgtgacaattacgtccacggcgttgcattattgggttctgtaaatgatggtggccattcacaatttgtttcaattatcatcatgtttaatcacgtccaatccaatgtttttgttatttaaaattcaacgaccaaaaaaaatgaggggggaaacaaaaataaaggttatgtaattaatggttataaatgctatactgtcatgatgtttcgtttccttacgtttgatgagttaataaaataaagtgtttctttaccaac

SEQ ID NO: 859 - DNA, 452 bp, Glycine max
cactcgagccgaatcggctcgagtgtcaaccaaagacagcacatgggagtagaagctgtgtgctgagttgcaaagccatcatcaatccaatcttgtgttactataagtatttaacagcatagacacacaccctttggttctggccaccctcaggtgtgaatacaataccttagcatgaaattcaactttgtgggactacatgttgaagtttgattggtgaacgagatctgatctcttgatccacaaaaccatggctgaaaaggtgaccatcatgaaactcaaggttgaccttgagtgtgagaaatgctacaagaaggttaagaaacttctcggcaagtaccctcgtgagtgccatcaccccttgctttttttttttcatgcatgtaattttatatatattagaatcagaattgtgaaatgattttttttttttcaaatttgcatgcatttat

SEQ ID NO: 860 - DNA, 269 bp, Glycine max
tgaaactgtgatttcaattcttctgcttggagcataaccaaatgatgatgccattcctctattctatgccaccatcatgagtttggttcactttggatacatagtgtgcaataattctaatgggtggttttgttgaacacattaattcaggtgaccatcatgaaactcaaggttgatcttgagtgtgagaaatgctacaagaaggttaagaaacttctcggcaagtaccctcaaattcgggaccagaagttcgatgagaaggaaaacat

SEQ ID NO: 861 - DNA, 892 bp, Glycine max
gaccaacgcgtcagacgacagaaggggaccttgcttccattatcttcaattcttcttctcatcacttctttttccacaaaaaagaaaccatggaagggagaatgggactgttgtttcttgttgtattaggtgctgcttgggcatgtgatgcaagggaactggctaactctgaaacttctgaactaagcataaagccggatgtgtgtgcactttgtgaggaatatattaccaaggcacttgattatctacatgaaaacaagactgagacagagatcattagtatcctgcacaacacttgccaccagcttccttctttcaagcagaagtgcgttgctttggtggactattatgttcctcttttcttctcggaagtagctacaattcagcctggagaattctgccacaaagtcaatctctgtcaggacattgcacatatttccttgaaagttcaagaagatagctgtgagttttgccaagatactgtttcaactctattggaaaagttgaaggagagtgatactaagctagagataattgagacgttactgaaggtgtgcaattcagtggagaagtatgcaaataagtgcaagagaatggttttcgagtatggacccttgatttttgaccatgcagagaaaatcctagagacgacagatatatgcaatataatacatgcctgcagatcttcagatgtagctggacagcaagcctttctttcggtctcttaattatagagacaaagctctaccagatttatgcttcacttgttggctgaaaaagattgccatatattcaaatgtaataagggggagggggagtacaaattcgatacgttatcagcgtaaaattcttaatactatctaagtttctaattatgtgtcagcacaccatt

SEQ ID NO: 862 - DNA, 409 bp, Glycine max
ttcatatgctcctggacttgcttcgcaagtttctgattcctttcttcagaattccaagttttcatttcgttagggacaaaagattgtgagatagagtatggctggaaaaggcgagggtcctgctatcggaatcgatttgggaacgacgtactcttgcgtcggcgtgtggcaacacagatcgtgttgaaatcatagccaacgatcagggtaatagaactaccccatcctacgtggctttcaccgatacagaacggttgatcggcgatgccgcgaagaaccaggtcgctatgaacccaatcaacactgtttttggtaagtactctcaaatcgtccactattaccttgattctctgctttttttctctgtttcactgattttggatgtctacacatcgtgatttataatcat

SEQ ID NO: 863 - DNA, 782 bp, Glycine max
  unsure (1)..(782): unsure at all n locations
agccgagtatggacacttgatttttgaccatgcagagaaaatcctagagacgacagatatatgcactataatacatgcctgcagatcttcagatgtagctggacagcaagcatttctttcagtctcttaattatagaaacaaagctctaccagatttatgcttcacttgttggctgaaaaagattgccatatattcaatgtaataacaggaagctgagaagtacaaggctgaggatgaggagcataagaagaaagtggaggccaaaaatacattggagaattacgcctataacatgnagganncacattaaagatgatangattgcttccaagctgtctgctgatgataagaagaaaattgaggatgcaattgagcaggctatccaatggctcgatggaaaccaacttgctgaagctgacgaattcgaggacaagatgaaggagttggagagcatttgtaaccccatcatagcaaagatgtaccaaggagctggtggtgatgcgggtgaaaccatggatgaggatggtcctgctgctggcagtggaaacggtgctggacccaaaattgaggaagtcgattaagcagaccaattgtcatgggttgttcttgattttgtgaagacccttttgaagtttagataataaccagtattgtcacatggttcaggtgcagtgaacaataattttgatatataagatgtcaatctgcacgtttccccttaccaatgatataagttgcatatggtcnnnnnnnnnnnnnnnnnnnnnnnnnnnnnnnnnnn

SEQ ID NO: 864 - DNA, 650 bp, Glycine max
attagaacaatctcttaaccctatctcaaattcattcagattctcccttcccctttttgatttttcttagaaaactcccaacttcgaatcaatatgaagaaagtggtgctaaaggtggaactccatgatgacaaaatcaagaaaaaggccatgaaggcagtatctggtatttcaggggtagagtcagtctcagtggacatgaaggaccagaaaatgactataattggggatgttgatcctgtaacagtagttggaaagtttacaaaattcagtcttggcaagcttagaaaattctgtcatgttgagatactttcagttggaccagccaaagaggaaccaaagaaagaggagaagaagccagaagccaagaaagatccaaaggaggaatatgctgaacttctgaaggtagttgaagccaattattatcagactagacatctgcaatacccttattactatagcagaactgtggaagagaatccaactggctgtgttatttgctaagtattggagtttgatggataataaatgagatcaaggaaagaagatggtggctggagttgagaaagatttggttctgttcttgaaatttccttttttccttttctttgttaagttttggcctttcttcttgttttagtacacaaaag

SEQ ID NO: 865 - DNA, 3075 bp, Glycine max
tcgcctacgcgtccgcccacgcgtccgcggacgcgtgggttctaccttctccaaaaccatccaactctcatgttcgaagaaaacatacacaatctcttcaaactctaattttcttttcctttcatttaatttcctcaatggcggcttccgtcgaccagcgtccgtaccccggcctccacaatggcgtcgttcggcccctcaaaccaggcccggatatcccgcgtcccaagaagctaccccagccgccgccgccactctcggattcctcaagcgacgaagaagaagacaccaccttgaacttgaaggacctgattcgcaagggaacaacggaagttgaatcctccattttcgacccgcgcgacgatggaacctctgaccactggatccaacggaactcttcccttgtccgtttaacgggaaagcacccgtttaactcggagccacccctccctcgcctcatgcaccacggcttcatcaccccggtccccctccactacgtccgcaaccacgggccagtcccccgggcccgctgggaggactggaccgtggaagtcacgggcctggtcaccaggcccacatgcttcaccatggagcaactcctccacgatttccccagtcgcgagttcccagccacactcgtctgcgctgggaaccggcggaaggaacagaacatggtgaaacagagcatcggcttcaactggggggcagccgccatctccacttcggtgtggcgcggcgtgcccttgcgcaccctgctcaagagctgcgggatctacacccgcaccaagggcgcgctccacgtgtgcttcgaaggggccgaggatctgccaggtggaggtgggtccaagtacggaaccagtatcctgagggaggttgcactggatccctcccgcgacatcattctcgcctacatgcaaaacggggagcctttgtccccggatcacggcttccccgttagaatgataatacccggtttcattggtggccgcatggtcaaatggttgaagcgcatcattgttactaccgaccaatctcaaaactattaccattataaggataacagggtactcccttctcacgttgatgccgaacttgccaatgctcaagcttggtggtacaagccggactatattatcaacgagcttaacataaactccgtgataaccacgccttgccacgaggagatcttgcccatcaactcatggactactcagatgccttatttcatcagaggctatgcgtattccggtggtgggagaaaggtgacacgtgttgaggtaaccctggacggaggtgaaacgtggcaagtgtgcacactggactgtccggagaaacccaacaaatatggaaagtactggtgttggtgtttttggtctgtggaggttgaggttttggacctgctcggagccagggagattgcggtgcgtgcttgggacgaggccctcaacacccaacctgaaaagctcatttggaatgttatgggcatgatgaacaactgctggttcagagtgaaaaccaatgtgtgcaggccccacaagggtgagataggtatagtgtttgaacaccccacccaaccaggcaaccaatccggcggatggatggcaaaagaaaaacacctagagaaatcatctgagtccaacccaaccctcaagaagagtgtctcctccccattcatgaacaccacctcaaaaacctataccatgtctgaagtcagaaggcacaacaacgccgattcggcttggatcatagtccacggtcatgtctatgattgcacccgcttcctcaaagaccatcccggtggcacagacagcatcctcatcaacgccggcaccgactgcaccgaggagttcgaagccatccactccgacaaagccaagcaaatgcttgaagactaccgaatcggcgagctcaccaccacctgctacaactctgattcttcatcgtcaaacccctccgtgcatggcagctccgacaccatccctttgacccccatcaaggaagtgattacaccaatgcgaagcgtggctcttaacccacgcgagaaaatcccatgcaagctcatctccaaaacctccatctctcacgacgttaggcttttccgctttgccctcccctccgacgacctactcatgggtttgccagttgggaagcacatattcctatgtgccaccgttgacgagaaactatgcatgcgagcctacactccaacaagcagcgttcacgaagtgggatacttcgacctcgtcgttaaggtttacttcaaaggggtgcaccctaagttccccaacggtgggatcatgtctcaacacttggactctctccccattggttctgtcttggacgtgaaaggcccacttggccacattgaatacactggcagaggaaacttcctcgttcatgggaaaccaaggtttgccacgaggctagccatgttggctggtggcacaggaatcacacccatttaccaagtggttcaagccattctaaaggatccagaggactgcaccgagatgcatgtggtttacgcgaaccgaaccgaggatgatatattgctgaaggaagagcttgatgagtgggctaagaagtatgataggttgaaggtgtggtacgtgatacaagaaagcataagagaagggtgggaatacagtgtgggattcatcactgaaagtatcctgacggagcatattccaaatgcatctcctgataccttggcattgacttgtggaccaccacctatgattcaatttgcagtccagccgaatttggagaagttgggctacgacacccagaataacttgctcgtgttttaggggactaaactagaatacattgtatgtgtatatagtagtttattgttatatataaataatggattctattagctgcttcgtttcaagatttttttatgtttcaatttttaaataaaagtgtacatgggacagctagctagctacgcaggtttacttttcctcgtcaacttttgatgtagacaagtatgtcaattattttgactacttttgcatgtataaataaataaataaaacagtgtgcaactatcactttttcaatttattt

SEQ ID NO: 866 - DNA, 1432 bp, Glycine max
acatttaaaatatatatataataaattgtcttaaaaaatactgaacgaaaagctcatgaatattataagacaatttattattttttgttgaaaaaaatactgaacgaaaagctcatgaatatttcacgacttcataatgtagcaaatccgaacagcttttctaaatacaagtgaaatacttaaaattgaaatagaaaagtttatacgctaacaagactcttgccaagaattatgtcatctgttgagaaatcagcctctttccgatatgttcctctaccaaagtccaggttgtacgagtctgctagaccctctacaagtccaaattcaggttccaatccaagcacgctctttgctttctcaactgatgcaaagaaatgctggtcacggaatggaaatgatttctttttcccaaaatcaaaatctttagggttgtagtgaatgatctctggctctgggaacccaccagccttagcacatgctcttgctaatccatcaaatgtgacatacttatctcccgagatgttgaatacttccttgctggccttctcattaccaagaacctggataaaagcttttgccaaatccttaacatgaccaagttgggttatctgtattcctgagccggggataggaattgggcgtcccgctttcaatctatggaagaaccactcttcaacagggttgtagttcaagggtccatagatgtagactggccttatagatgtccaattaacaccccttgcttgtagcaaactctctgtctcaagctttcccttgtgtctgctcttaggatcaactgcatcagtctctgcgtgaggtaatagatcagatttgagatagacaccggcagaagagcagtaaataaactgctccagattaggcagagcatccagtatgggttcaacttcatctgcctcgcgtccatttatgtcataaacaacatcaaatccctctgctgagagactggattttacaaagtcgaagtccttcctgtctcctttcaaatgcaagatcttggaagaaaaatcagcataatcactgtctgattcacctggcaactgttgagtgacaggcgctttacctcttgtgaataaagtcacctggtgaccctctttgacaaggagcctagacaaaaacacaccaataaacctggtgcctcccattattaggattttcttggtgctcgatgcggagacgtagaaagacccttttggatggcattgctttctcttgaactgaagttgagtttgaagtctggttccactgaagtcagaaagagaggaagctaaggtagagaaagatagttggttctgttggagtgccaccactcttgccatgtttcgtttccacacagtgcagtgttttgctgtgtgtgtgtgaaattggaagtggcttctctttccggctgaaatttgaagtggcttttctttcc

SEQ ID NO: 867 - DNA, 2811 bp, Glycine max
ctctttcaccagaaagtgacactgagagaagaaggaaaaactaaccaacaccacagcccctaatttcctttttctcacaatggcggcttcagtcgacaaccgtcaatacggcacccacataaacgccgtcgttcgcgcttgcggcccagacttcaatacccctctcccgtcggatttcgatctggactcatccagcgacgacgaagaccaaaacgacgacgcttcgtatctcaaggagttgatacaaaaagcgaacgcggaaaccgaggcgtcgctgttggacccgcgagacgagggaaccgcggaccagtggatcccgcggaacgcctccatggtgcggctcacagggaagcaccccttcaacgcggaggccccactcccccgccttatgcaccacggtttcatcaccccatcgccactccgctacgtccgcaaccacggtccagttcccaagatcaaatgggatgaatggaccgtggaagtgactgggttggtcaaacgatcaacccacttcaccatggagaaacttatgagggaattccctcaccgcgagtttcccgccacactagtgtgtgcgggaaatcggcgcaaagagcataacatggtgaagcagagcatcggcttcaactggggtgccgccgggggctccacctccgtgtggcggggggtcccgctgcgtcatgtgctcaaacgctgtgggatcctcgcccgtatgaagggcgccatgtacgtgtccttcgagggcgccgaggatctccccgggggtggtgggtccaagtatggaaccagcgtcaagagggagatggccatggatccgtcgcgtgacatcattctcgcgttcatgcaaaacggcgagccgttggcgccggatcatggatttcccgtgcgcatgattattccggggttcatcggtggaagaatggtgaaatggctcaaacgcattgtcgttactgagcatgagtgcgatagtcattatcattataaggataatagagtactcccttcccatgttgatgcagaacttgctaatgacgaaggttggtggtacaagccagaatacatcatcaacgagttgaatataaactcagtgataactacgccttgtcacgaggagatcttgcccatcaactcatggactactcagatgccttatttcatcagaggctatgcgtattccggtggtgggagaaaggtgacacgtgttgaggtaaccctggacggaggtggaacgtggcaagtgtgcacactggactgtccggagaaacccaacaaatatggaaagtactggtgttggtgtttttggtctgtggaggttgaggttttggacctgctcggagccagggagattgcggtgcgtgcttgggacgaggccctcaacacccaacctgaaaagctcatttggaatgttatgggcatgatgaacaactgctggttcagagtgaaaaccaatgtgtgcaggccccacaagggtgagataggtatagtgtttgaacaccccacccaaccaggcaaccaatccggcggatggatggcaaaagaaaaacacctagagaaatcatctgagtccaacccaaccctcaagaagagtgtctcctccccattcatgaacaccacctcaaaaacctataccatgtctgaagtcagaaggcacaacaacgccgattcggcttggatcatagtccacggtcatgtctatgattggacccgcttcctcaaagaccatcccggtggcacagacaggatcctcatcaacgccggcaccgactgcaccgaggagttcgaagccatccactccgacaaagccaagcaaatgcttgaagactaccgaatcggcgagctcaccaccacctgctacaactctgattcttcatcgtcaaacccctccgtgcatgggaggtccgacaccatccctttgacccccatcaaggaagtgattacaccaatgcgaagcgtggctcttatcccacgcgagaaaatcccatgcaagctcatctcgaaaacctccatctctcacgacgttaggcttttccgctttggcctcccctccgacggactactcatgggtttggcagttgggaagcacatattcctatgtgtcaccgttgacgagaaactatgcatgcgagcctacactccaacaagcagcgttcacgaagtgggatacttcgacctcgtcgttaaggtttacttcaaaggggtgcaccctaagttccccaacggtgggatcatgtctcaacacttggactctctccccattggttctgtcttggacgtgaaaggaccacttggacacattgaatacactggcagaggaaacttcctcgttcatgggaaaccaaggtttgccacgaggctagccatgttggctggtggcacaggaatcacacccatttaccaagtggttcaagccattctaaaggatccagaggactgcaccgagatgcatgtggtttacgcgaaccgaaccgaggatgatatattgctgaaggaagagcttgatgagtgggctaagaagtatgataggttgaaggtgtggtacgtgatacaagaaagcataagagaggggtgggaatacagtgtgggattcatcactgaaagtatcctgacggagcatattccaaatgcatctcctgataccttggcattgacttgtggaccaccacctatgattcaatttgcagtccagccgaatttggagaagttgggctacgacacccagaataacttgctcgtgttttaggggactaaactagaatacattgtatgtgtatatagtagtttattgttatatataaataatggattctatta

SEQ ID NO: 868 - DNA, 1467 bp, Glycine max
gtacaaggaaaaatcttgtcatttcagctgtcaaatttgtactcaaacacgtgaaaatcttaaacccaaaagaatgacacaatgccacaagaccatgaagtataaaaaatttgcccacctacgaacactaaactcaattccattcgcaaaggccccataggatttgccccttaggacattcactcacagttctataatgatattagaaacttccttcagcaccatgaaatcattggaaaaatcagtctctccctttcctttctcacctttttggtatgcataatcccctataatgacaaaaaaatttaacttattctatgagaacatagtatgcctaatcagttgtccaaggatcgctctctgcaatgacttcagaaggttcataaacttctggctctgaactttcttcacttgtgcttgaatcagcagcttcaacagaagcatctccctcctcttcttctgatctaccccatcttcctcccaaggccaaggccatcatttcataaatcttatttcccaactcagcagggctgtcaggagaaaatccactagaaattagtgctgtgtcatataagaggtcaactgctcgcttagcttcgctgctgtcaggtgcattcttgcaggcagcactcaagtctttgataatagggtgatctgtattaatttccaatattctcctccccctcataaactccaaacttgcagtgtccccaagggcttgcgccttcattagtctctccatgtttgcagaccaaccaaacttccctgatacaagcacacaaggagatgaactcaagcgatttgagatttgaactttggccaccttgtcaccaagttgttgttttatccaatcacagagtaggttgtattcttgcttgttttccctctctttgacctcatcctcatcacctaattccaaatcctccttgctgatatcaacaaatttcttttctttgtaggtctgtaggttctgaatggcaacctcatcaataggttcaaccaaataaagaacctcaatatctttttgaaccaatttctccaaaaatggagcagtctttgcactcttcaagctgtcagttgctagataaaagatagccttttggttttcacccatattttcaacataatcatctaggcttttaagctcctcctcacttttggaagtgtaaaacctcaatagtggtgtaatgcgcttatgatttgcagtgtcttcaatgcaacctaattttatgaacctaccaaagttctcccagaattttttgtagtcctctttattttcactttcagcaaggtcttgaatcatatcaaatgccttccttacaagtctctttctcattattcttacaattctgctttcttgaaggatctcccgagaaacattgagaggaagatcatctgaatcaaccacacccctcacaaagctcaggtaacgtggaaacagctccccatcaaaatcggacgcgtggg

SEQ ID NO: 869 - DNA, 1007 bp, Glycine max
aaaaccaatatccattattttttgttgaaaaaaatactgaacgaaaagctcatgaatatttcacgacttcataatgtagcaaatccgaacagcttttctaaatacaagtgaaatacttaaaattgaaatagaaaagtttatacgctaacaagactcttgccaagaattatgtcatctgttgagaaatcagcctctttattttcactttcagcaaggtcttgaatcatatcaaatgccttccttacaagtctctttctcattattcttacaattctgctttcttgaaggatctcccgagaaacattgagaggaagatcatctgaatcaaccacacccctcacaaagctcaggtaacgtggaaacagctccccatcaaaatcatctgaaatgaatacacgcttaacatacaagcgtatgttctttgttttagggttcactacttcttcattgttaagaggtcccattcccggaacatacagaatacttctgaactcaacctcaccctcggtagtgaagtgagtatgtgcaagtggttctaagaattcactaaatgtcttcttataaaattcattgtactcctccttttcaacttcctttgggttgcgcatccatattggctttgtttcattggccaattcccagtcccagtacttctcagttttagtctttttcaccttctttttctcaccctcttcttttggttcctccccttctttgggttcttcctcctcttccacctccacagttcttgacttttcttgccatgtgtagatggggaaggaaacaaactgtgagtaattcttcaccaaaccctgaatcctgcttggctctgagaattcatacttgtcatcctctcttaaatagagtgtaatctgtgtaccacgacgcagaaccttttcaggatcagtttcttcttttatcacataagagctactgtcagcttctgcttcccacacatattgcttatctgatcttgggctctttgtagaaacaacaaccctctcagc

SEQ ID NO: 870 - DNA, 302 bp, Glycine max
cttctcattaccaagaacttggataaaagctgtcgccaaatccttaacaatgaccaagttgggtaatctgtagtcctgagctgggaataggaattgggcgtccggctttcaatctctaatgaatcaacccccggcatcagggtgtgggcccccacgtatgattcaatttgcagtccagccgaatttggagaagttgggctccgacacccagaataacttgctcgtgttttaggggactaaactagaatacattgtatgtgtatatagtagtttattgttatatataaaataagaattctatt

SEQ ID NO: 871 - DNA, 2683 bp, Glycine max
cccacgcgtccgctgaattcggcacgaggtgaattctgctctttgttcactttgatcatcatcttcttcaattccagcaaggatgtcacagcaaggcgaatcatcggacccgaaatcggggaagaaggacttctcgaccgcgattctggaacgtaaaaagtcgccgaaccggcttgttgtggatgaggctgtcaacgacgacaactccgtagtgaccatgcacccccaaaccatggaaaagcttcagcttttccgaggggacactatcctcatcaagggtaagaaacggaaggataccatttgcatagctcttgctgatgagaactgtgaggagccgaagatcaggatgaataaagttgtgaggtcaaatttgcgggttcggcttggagatgttgtgtctgtgcaccagtgcccggatgttaaatatgggaaacgtgtgcacattctgcctattgatgataccattgaaggtgtcactggcaatctgtttgatgctttcttgaaaccctatttcttggaagcttaccgtcctgtcagaaaaggagatctatttcttgtccggggagggatgagaagtgtagagttcaaggtggttgaaaccgatcctggagaatattgtgttgttgctccagacactgaaattttctgtgagggggagcctttgaaaagagaagatgaagagagactggatgaagtcgggtatgatgatgtgggtggtgtcaggaaacaaatggctcagattcgtgagttggttgagcttccattgaggcatccacagctttttaaatcaattggtgtgaagcctcccaagggaattttactttatggacccccaggttctgggaagacattaatagcaagagctgtagctaatgaaactggagcttttttcttttgtattaatggaccagagattatgtccaaacttgctggagagagtgaaagcaatctcaggaaagcgtttgaagaagctgaaaagaatgcaccatccattatcttcattgatgaaattgattccattgcccccaagcgggagaagacacatggtgaagttgaaaggaggattgtttcacaacttttgactcttatggatggattaaaatctcgtgctcatgttattgttattggagctactaatcgtccaaatagcattgacccagcattgagaaggtttggtagatttgatagggaaattgatattggtgttcccgatgaagttgggagacttgaagtccttcgcatacatactaaaaacatgaagctatctgatgatgttgatttagagagaattgcaaaagatactcatgggtatgttggtgctgaccttgctgccctttgcactgaagctgctttgcaatgcattagggagaagatggatgtaattgacttggaggatgagactattgatgcagaagtactgaattccatggcagttacaaatgagcatttccagactgcccttggaacaagcaacccatcagctttacgtgaaactgttgttgaagtgcctaatgtcagctgggaagacattggaggccttgaaaatgtcaagcgtgaactgcaagagactgtacaatatccagttgagcacccagaaaagtttgagaagtttggtatgtctccatctaaaggagtacttttctatggtcctccaggatgtgggaaaactttgttagccaaagcaattgctaatgaatgtcaagctaacttcatcagtgtgaaaggtccagaattgcttacaatgtggtttggtgaaagtgaagctaatgttagagaaatttttgacaaggccagacaatcggctccatgtgtcctcttctttgatgagcttgactctattgccactcagagaggaagcagtgttggggatgctggtggtgcggctgatagagttctaaatcaacttttgactgaaatggatggcatgtctgccaaaaagactgtgttcataattggggcaactaacagacctgacatcattgacccagcacttcttcgaccaggccgtctggatcaattgatctatattcctctccctgatgaggattcccggcatcaaatctttaaagcctgcttgaggaagtcacctatcgcaaaaaatgttgatttgagagcattggctaggcacactcaagggttcagtggtgctgatattacagaaatatgccagcgagcatgcaaatatgccataagagaaaacatagagaaggacattgagcgagagaggaagagtagggaaaaccctgaggccatggatgaagataccgtcgacgacgaagttgcggagatcaaggctgctcattttgaggagtcaatgaagtttgcacggaggagtgttagtgatgctgatattcgcaagtatcaggcatttgctcagaccttacagcaatcaagagggtttggaagtgaatttaggtttccagagtctggagataggactactactggatctgacccctttgcagcttctgctggtggggctgacgaagatgatctatatagttaggctttattatcacagtgatgtatgaaatcacatgtctacctcacctctcaggagggataactttgaagcctgtcttatattttgcttttcttgtactcaattatcctgaattgttaccgggttaaccttaaataccatatatggaaaaaaaaaaaactcgagggaaagatattgtag

SEQ ID NO: 872 - DNA, 801 bp, Glycine max
tgatggaaaattgaattccacctccttcatttcttctcctcttaattaatcccttttgaaccctttatagttgccttcattaagattttgatgcattgatagcatcaaaatatggtggccacaagcacaaatgagttggaggcaggaactgtttctaggtatgacaggaaaagtgaaatcaaggtattcgatgaatcaaaaactggggtccaaggactggtagaaaatggtgtgacaaaggttccacggatgttctattgtgaacactctaatctcagtgatggattaaccacagaatcaaattcaaacttcactatcccctccatagacctcactggcatcaatgatgaccctattttgagagatgctgttgtgggaaaagttagatatgcatgtgagaagtggggcttctttcaggttataaaccatggaattccaactcaagttttggatgagatgatcaaaggaacttgcaggtttcaccaacaagatgcaaaggtgaggaaagagtactacactcgcgaagtaagccgaaaagttgcttatctttccaattatactctttttgaagacccttctgctgattggagggatacacttgcattttccttggcacctcatccacccgaagctgaagaatttcctgcactttgtagagatattgtgaatgaattccccaaggaaattatggctcttgcttatgctttgtttgagttactgtcagaggctcttggccttaatcgcttttaccttaaagaaatggattgtgctgaagggcaacttcttctctgtcactattac

SEQ ID NO: 873 - DNA, 913 bp, Glycine max
tcggaatccgtcgactcgagcgttttaggaaaaagtgagatatgcttcaactaaataacaacaaaaaatgatcactatcaagtcactttattgaatagtagtttcaatgatttagtttccctataattatacgtagggcatcctgagaaacaaacaagcatgcctccaatctattcactgtctaggaaaactccaatgaaaacattcttcattctctgttccatatactcactcttcaatccttgtgttttgaacacttcatacttacttccattgctatgatttggtgcatagaaagcctctaaatatggcagccacaagcacggataagttggaggcaggaacagtttcaagttatgacaggaaaagtgaaatcaaggcatttgatgattcaaagactggtgtccaaggactggtagaaaatggtgtaacaaaagttccacttatgttctattgtgaaaactctaatctcaatgatggcgtaaccggtgcatcatattcaaagatcagcatccccataattgacctcacagtcatccatgatgatcctattttgagagatcatgttgtgggaaaagttagatatgcatgtgagaagtggggcttctttcagattatagccccaagcggcatatgaggtggatatcctttggtatatagttgaggttaatttcactgccactgcctacaaatcgaccaaatagcattgaccctgcattgaaaatgtctggtagatttgatagtgaaattgatattggtgttcctgatgaagttggaagacttgaagtccttcgcgtacataccaaaaacatgaagctttcagatgctgttgatctagagagacttgcaaaagatactcatggatatgttgatgctgaccttactgccctttgcactgaagctgctcttcaat

SEQ ID NO: 874 - DNA, 349 bp, Glycine max
tggagggatacacttgcattttccttggcacctcatccacccgaagctgaaccttttcctgcagtttgtaggtttgtgataatagtaatactacttttattattgtcagcacttgcacatgttaggacttcttaatggtggataactaatttcttgggacagtatctactttgtggtgacatgatatcattacattgaaatttttgttaagggaacatagtatatctgtttctatttttctaaaatatcttccacaactgaaattttttattatgttggagagtctcgcatcatctacttcaatacttcagatgcaacttatatactggatttgttggatttgatcatt

SEQ ID NO: 875 - DNA, 716 bp, Glycine max
caaatgagcatttccatactgctctgggaacaagcaatccatctgctttacgagaaactgttgttgaggtgcctaatgtcagctgtgggaggatattggaggccttgagaatgtcaagcgtgagctgcaagagactgttcaatatcctgtggagcacctagaaaaatttgagaagtttggtatgtcaccattaaaaggggttctcttctatggtcctccaggatgtggaaaaactttgttggccaaagcaattgctaatgaatgtcaagctaacttcatcagtgtaaggggcccagaattgctcactatgtggtttggtgaaagtgaagccaatgttcgagaaatttttgacaaggccaaacaatcagctccacgtgtcctcttctttgatgagcttgattccattgctactcaggtctatttttgtacttcgcatccatgcaggccaggttgaattaaattatgtggctgggttgaaaggaattgtatgattttgttgccaaatctgtagatgatttaaggagataatgttacacggtgtttttcttatgtgtaagttggtttttcctagaaatattctaaagtatcatcaacgcatgttgcgtgcacctgggagggtaagacaaactcatcaaaacattgtatctcaagagaatagtgcacctccatttccatcaaagaaggattttgggcgatttaaaaaaaaaaaaaaaaaa

SEQ ID NO: 876 - DNA, 394 bp, Glycine max
caaatatacctttcctttcataattttgcatacatatataataaaaatctcatttttattggtgggctatctttgatctgagcattttacacttattggtggctttagtttctctacgtggtcctcgatagatttttagttgtgcctttatgtgtcgattatagccccaagcggcatacgaggtggatatcctttggtatatagttgaggttaatttcattgccactgcctacaaatcgaccaaatagcattgaccctgcattgaaaaggtctggtagatttgatagtgagattgatattggtgttcctgatgaagttggaagacttggagtccttcgcgtacataccaaaaacatgaagctttcagatgctctaaattcagcatgcttaactt

SEQ ID NO: 877 - DNA, 675 bp, Glycine max
  unsure (1)..(675): unsure at all n locations
ctccctgatgaggattcccgtcatcaaatctttaaagcctgcttgagaaagtcacctgtcgcaaanaatgttgatttgagaacattggctaggcatactcaagggttcagtggtgctgatattacagaaatatgccagcgagcatgcnaatatgcaataagagaaaacatagagaaggccattgagcgagagaggaagagtaaggaaaaccctgaggccatggatgaagacacagttgatgacgaagttgccgagatcaaggctgctcattttgaggagtcaatgaagtttgcacgtaggagtgttagtgatgctgatatacgcaaatatcaggcatttgctcagaccttgcagcaatcaagagggtttggaagtgaatttaggtttccagagtctggagataggactactactggatctgacccctttgcaacttctgctggtggggctgatgaagatgatctgtatagttaggtttaattattatagtgatgtatgaaatcacatgtctacctcataggaagtgtccctagacttcctctttgaagcctctcttatattttgcttttcatgtactctaattatcctgaattgttactggcttaaccttaaataccatatatggtatgttctttttattgggggnnnnnnnnnnnnnnnnnnnnnnnnnnnnnn

SEQ ID NO: 878 - DNA, 2063 bp, Glycine max
cgaagggtaagtgctgtgtcacattctcactctcgtttaccaagagcgagatatctatttagatctcagaaaaacagtgtttcatttcaattcattcagtcttattattattagggtttggcgattcagagagaaagagaaatgggagaacgaaaaggaatcccaatggctttggggctcttggcgatgatcctcttcttcattgcttcctcttcctctcacctcgttcgcgcttccgatgacgccgacgacgcgatcttctacgagtcgttcgacgaggattttgatggacggtggattgtatccgacaaggaggattacaatggtgtctggaagcatgccaagagtgatgggcatgatgattatggacttcttgttagtgaacaagccaggaaatatgctatagtcaaagaacttgccgagtctgtcagtcttaaggatggaacagttgttcttcagtttgagactcgccttcagaatggcctcgaatgtggtggtgcatatattaaatatcttcgaccccaggagagcggatggaaaccaaaggaatttgacaacgaatctccatattctatcatgtttggtcctgataagtgtggtgctacaaacaaggttcacttcattttcaagcataagaacccaaagagtggggagtatgttgaacaccatctcaagtatcccccttctgtcccatctgacaaactaactcatgtgtacactgcaattctgaagcctgataatgaattgcaaattttgattgatggggaggagaagaaaaaggcaaatttcttgtctgctgatgattttgaaccccctcttatcccttccaagacaatcccagatcctgatgataagaaacctgaggactgggacgaaagagccaaaatcccagacccaagtgctgtgaagccagatgactgggatgaggatgcacccttggaaattttagatgaagaagcagagaaacctgaaggatggttggatgatgagccagaggaaattgatgacccagaggcaacaaaaccagaagactgggatgatgaggaggatggtgaatgggaagccccaaagattgaaaacccaaagtgtgaggcagcccctggttgtggtgaatggaagaggccaacgaagaggaatccagcttataagggaaagtggagtgctccttacatcgataaccccagttacaagggcatatggaagcctcgcgagattccaaaccctgaatactttgaactcgcaaaacctgattttgagcctattgctgctattggcattgagatttggacaatgcaggatggcatcctatttgacaatgttctgatagctaacgatgataaagttgcagaatcctatcgggagactacatggaagcccaagtttaccattgagaaagacaaacagaaggctgaagatgaggctgcaactggttcagatggtattgcaggcttccagaagaaggtatttgacctcttgtacaagattgcagacattcccttcctgagcgaccacaaatctaagatatacgatctcattgagaaagctgagaaacagccaaatctcactattggaattcttgtagctgttgtggttgtcttcgtgtcaattttcttcagactcatatttggtggcaagaaacctgcaaaggtggagaagaaaccagaacgcacagaagcttccaataaccaaggtagtggagagaatgaagaaaacaaagagaaggagaaacagaaagaggaagcatctaatgctgcgcgtcggaggccaaggcgagaaacttgaaatggttgaatctttattttaaagtggcgccctgtttagtatcatcatcaccacagataaattttgggcttagtttcattttaggtgcactctgttttcagtattttcttttttcttccttttaagaaaaggaaaagattatttgcttcaggggtgtagatcttctcctgtttttggagactcgagtgtttgagctagttgaagttgtacaattatttttctattaatggattctgtttttaacccagattaatgcctagctacctttccataattaatcg

SEQ ID NO: 879 - DNA, 571 bp, Glycine max
cccacgcgtccgcccacgcgtccggcaaattgcaaaattctcttccgtttcaggattagggtttcaccgttacagtgaaacatggcaaaaccaaagcgaatctctctgcgtatctttgcgctgctcctcttgatttccacctcttcgtttcagcttctccgcgcttccgatgacgccgatgatgatgcgatcttctatgattcgttcgacgaggattttgaagaccgttgggttgtgtctcagaaagatgagtacagtggtgtctggaaacatgccaagagtgagggacatgatgattatgggcttcttgtcagtgagaaagcaaggaaatatgctatagtaaaagaacttgatgaggccgtgagtctcaaggatgaaacagttgttcttcagtttgaaactcggcttcagaatggccttgagtgtggtggtgcatatctaaaatatctccgaccacaggaggctggatggaaatccaaggaatttgataatgaatctccatattctatcatgtttggtcctgacaagtgtggtgccacaacaaagtacacttcattttcaagcataagaa

SEQ ID NO: 880 - DNA, 1241 bp, Glycine max
tagaagacgacagaaggggaagctgagaaacctgaaggatgggacaatgaacctgaggagatagatgatccagaggcaacaaaaccagaagattgggacgatgaggaggatggtgaatgggaagcccctaagattgagaacccaaaatgtgaagcagcccccggttgtggtgagtggaagaggccaatgaagaggaatccagcttacaaaggaaaatggcatgccccactaattgaaaatcctgcttataagggaatttggaagcctcaggacattccaaaccctgactactttgaaattaaaaaacctgattttgagcctattgctgctattggcatcgagatttggacaatgcacgatggtatattggtcgacaacatcttgatagctaaagatgataaaattgccgactcctaccgggacactacatgctaagcccaattttaccgtcgagaaagaaaaacagaaggaagaacattcggaagctgcatcaagtggtcttgctggcttccagaagaacgtatttgacctgttatacaagatcgcagacattcccttcctgagtgcctacaagcttaaaatatacgatgtcattgagaagggtcaagagcaaccaaatctcactgttggaattgttgtagccgttgtggttgtcatcgtgtcagttttcttgaggctcatatttggtgggaagaagaagcccacaagggtggagaagacaaacgtagaaccagcagaaactgcaactagccaaggcagtggtgagaatgaggaaaacaaagagaaggaggaatcatctgcccctgcacgtcggaggccaacaaggagagataattgaagaaatgattgaaacttaacagacaggggcggccattaaagaacactaccgcacataaattttgagcttagtttgggcattaggccaattctgtagtagcaggttgttgtaatttttcccttcaccttttgaaagatgatattgcgtaaggagtgtagatcagatacacaattatttttctttatttttctggtaatgtaacacagaaatcaactcactgttacatttccacccctggtttgagtacacatgcgtgacgtgatccaactttaagaatacgtgggtaatatacgctgtttcccctgtgtgaatcttgccgacagaatccgtacttcactaatactttttcggaaatgctagttatgcatttactttaaaaaaaaaaaaaaaaaagggcggccag

SEQ ID NO: 881 - DNA, 678 bp, Glycine max
acgagaccacatggaagcccaagtttaccattgagaaagaaaaacagaaggctgaagatgaggctgcaactggttcagatggtattgcaggcttccagaagaaggtatttgacctcttgtacaagattgcagacattcccttcctgagcgaccacaaatctaagatatacgatctcattgagaaagctgagaaacagccaaatctcactattggaattcttgtagcggttgtggttgtcttcgtgtcaattttcttcaggctcatatttggtggcaagaaacctgcaaaggtggagaagaaaccagaacgcacagaagcttccaataaccaaggtggtgcagagaatgaagaaaacaaagagaaagaggaagcatctaatgctccgcgtcggaggccaaggcgagaagattgaaatggttgaatcttttaaatggcgccctgtcaactatcatcaccacagctacagataaattttgggctttagtttcattttaggtgcactctgttttcattcgtttccttttttccctttttttttaagaaaaagaaaagattatttgcttcaggggtgtagatcttctcctgtttttggagacttgagtgtttgagctagtagttgaagttgtacaattattttttgtctttatttttctattaatggatcctgtttttaacgc

SEQ ID NO: 882 - DNA, 468 bp, Glycine max
cgtttaccaagagcgagatatctatttagatctctgaaaaacagagtttcatttcaattcagtcttattattatgggcggacgcgtgggttaggggtttgccgattgacagagaaagagaaatgggagaacgaaaaggaatcccaatggctttggggctcttggcgatgatcctcttcttcattgcttcctcttcctctcacctcgttcgcgcttccgatgacgccgacgacgcggtaattccgatactattgttgttgttgttatgttgtgatggatctctgattcgagaatgtttgtgtcgtttagatcttctacgagtcgttcgacgaggattttgatggacggtggattgtatccgacaaggaggattacaatggtgtctggaagcatgccaagagtgatgggcatgatgattatggacttcttgttagtgaacaagccaggaaatatgctatagtcaaagaac

SEQ ID NO: 883 - DNA, 351 bp, Glycine max
cccacgcgttcgcccacgcgtacggcataattatcttccgtttcagggtgggggtttcgacgcggtacagtgaaacatgggagaaccaaaacgaatctatctgcgtatctttgcgctgctcctcttcatttccgcctcttcgtttcagctgctccgcgctttcgatgacgcgatcttttacgagtcgttcgacgaggatttcgaagaccgttggattgtgtctcacatagatgagtacaatggtgtctggaaacatgccaagagtgagggacatgatgattatgggcttcctgtcagtgaaaaagttaagaaatatgctataggtaaagaacttgatgaagccgtgggtct

SEQ ID NO: 884 - DNA, 983 bp, Glycine max
ctctcactccccattctcggagacaaagattttttcccagcttgctcatcaagtccaagaaccaacctaccttttgcaatctcaattcaatggcgtcctctctcattgcgaacgcttcctctcctcttccctcctctccaggtccctccttcgccccgccgcttccgcttcccaccgctctttcaacaccaacgccatgcgccagtatgacaaccgcgccgacgaccacagcaccgacatcgatcgtcactccgaacgctctttccctagcactgcgcgccgcgacgatatcttctcagatgtgttggatccattttttccgactcggagtttgagccaggttctgaacatgatggaccaggtcatggacaatccgttcctctccgcgtcgcgcgggatcggagctggcgctggagtgcgtcgcggatgggacgcgagggagacagaggatgctctgcatctgcgcgtggacatgcctgggctcggcaaggaagacgtgaagatctccgtggagcagaacactctcattatcaaaggtgaaggtgctaaagaaggcgatgaagaagagagcgctcgtcgctacactagcaggattgacttgccggacaagctctacaagattgaccagatcagagctgagatgaagaacggtgtgctcaaggtcgttgtgccgaaaatgaaggaggaagagaggaaagacgtgatcagtgttaaggttgagtagaacaacccaagctgatttggccattttgcatcgacactactctttagttttcttttattaggtggtgatgaatctagttagtagatataacagcttaatagtattgttgctgtgtttggttttgaaacttcaaacgtatctgtaataattgttatatagagttgtgaatgagcttgttgtttagaagtctactgcagtctgaatttgacttgtcaatgaaattcgtgtcattttaaattcgtaaaaaaaacggctcgag

SEQ ID NO: 885 - DNA, 418 bp, Glycine max
agctcatcaagtccaagaaccaacctaccttttgcaatctcaattcaatggcgtcctctctcattgcgaagcgcttcctctcctcttccctcctctccaggtccctccttcgccccgccgcttccgcttcccaccgctctttcaacaccaacgccatgcgccagtatgacaaccgcgccgacgaccacagcaccgacatcgatcgtcactccgaacgctctttccctagcactgcgcgccgcgacgatatcttctcaggtagttgtagtcgctctctccctaacctcgcactaaccgatatctcttaattcttctattttttatgtagtttagttgattcaatcgtggttttaaattgcgttgccgcaattgtccaaatctataaaaaatttatggctcaccgaaagtgcaatcgcaa

SEQ ID NO: 886 - DNA, 792 bp, Glycine max
gataacatacaagaaaactatcataagtgaccaaaaaagacaacctttggggaatcataaaattcttcagaatggctcgcacaattacaattgcagcaatgtgtcttcttctctcattagtgtccctctgtgtcaccaccaacgcattaatgccatacacacgtagcaccctctgggacatgatgctccaatccgaggacccatttggaatcttggaacagaacccattcaacaacatacccaacatcagaggaggagccgagactctcgccctggcacgtgcggattggaaggaaacccccagcgcgcacgtgatagtgctggacctacccgggatgaaaaagaaggacgtgaagatcgaggtggaggagagtcgcgtgttacgtatcagcggcgagaggaagggagaggaagaagaagaagaagaagaggttgagggcgagaagtggcatagggctgaaaggactaacgggaagttcatgagacagttccggttgccggtgaatgcggacttggagaaggttacggcgaggcttgaaaatggggtgctgaggatcacggtgggcaagtttggtgaggacaagaagaggcagcctaaggttattgacattgctcagagggattctgctgctgagaatgtgaagcccaccaagcctcaaatgtaatgtcatatgtcatcatcagccaatccaattacatatgttcttgcttatgttttccttttttttttctttcagtttacaagttgtaagttgcatcttcactttgtttgggacatgggatttcagtgat

SEQ ID NO: 887 - DNA, 809 bp, Glycine max
cagacaaacaattcagatatagccaaagtccaacccatatagtctcattgctttcaattttccaataccttttctgagtaccaaaacagaaggcatatccgcacatacacattccaacgtacaaaatgaggcactttttagtactagtaccactgatcttgcttgtttttgctggtttcccatccaaagcaaaagggtctctgctaccattcacaaatcatccaaataccctcttggctgatctatggtctaatcatttccctgatccatttcgcgtgttagagcaaatcccatttggggttgacaaagatgaaacattcacagctctatcatcacatgcaagagtggattggaaggagacaccagaagggcatgtcataatgctagatgtgccagggttgaagagagatgagatcaagatagaagtggaagggaatagagtgctgagagtgagtggagaaaggaagagggaagaggagaaggaaggggatcactggcatagagtggagagatcctatggcaaatcctggaggcagttcaaggtgcccgacaatgtggacttggattctgtcaaggctaagatggagaatggagtgcttactctcacaatgaacaagttgtcacctgataaggtcaaaggtccaaggttggtcagcattgcaggggatgatgagcaagctcccaagctcaagggtaatgaagacaagcaggagctttgaattattcacaaatgataataactttatcatacagacttcttatgtgtgtcagtaaaaaagggtttgtaatttgtagttagttttgtgaat

SEQ ID NO: 888 - DNA, 2311 bp, Glycine max
attttatccattttccacatacaaaagactccgcgtttccccttcccctcaaccacaatcaacagacactgcaccaaacaccaacaacgctttagctctctctcttctctccataaccgccaccggcgatctggcactaacagatcgccgctgctacatctgaacccgatccagccaacagatctctccaattcaaatggagaatctaatctctttggtcaacaaaatccagagagcttgcaccgccttaggtgaccacggcgaaaacagtgcactccccacactatgggactctctccccgccatcgccgtcgtcggaggccagagctcaggaaagtcctccgtcttggagagcgttgtcggcaaagatttcttacctcgtggatcaggtattgttacgcgacgaccgctcgtgttgcagcttcacaagattgaagagggaagcagagagtacgcggagttcctccacctcccgaggaagaggttcaccgattttgttgctgtgaggaaggagattcaagacgaaactgatagagagactggacgaaccaaacaaatttctactgttcccattcatcttagtatatactctcccaatgttgttaacttgacactcgttgatcttcctgggcttacgaaagtagctgttgagggtcaaccggatagtattgtgaaagacattgaggatatggttcgctcctacattgagaagccgaactgtataattttggccatttcaccagccaatcaagatcttgcaacatctgatgcaattaaaatttcccgtgaagtggaccctactggagataggaccattggagttttgacaaagattgatcttatggacaagggtactgatgctgttgatatattggaaggaagagcatataggttaaagtttccctggattggtgttgtgaatagatcacaacaagacataaacaagaatgttgacatgattgctgctaggcgtagagaacgtgagtacttcaatagtacccctgaatataaacaccttgcgaacagaatgggttccgagcatctggcgaagatgctctcaaagcatttggagacagtaatcaagtccaaaattcctggcattcaatctctaattaacaaaacaattgctgaacttgaagctgaactaactcgtttaggaaagcctgtagcagctgatgctgggggaaagttgtatgcaatcatggaaatatgccgctcatttgatcaaatatttaaagaccatcttgatggcgtgcggcctggaggtgataaaatttataatgtctttgacaatcagctccccgctgctttaaaaaggttgcagtttgataagcagctttcaatggaaaatataaggaaacttattactgaagctgatgggtatcagcctcatcttatagctccagaacaaggatatcgtcgtctaattgaatcttctctaataactattaggggccctgctgaggcagctgttgatgcggttcactcgctgttaaaggacttggttcacaaagctatcagtgagactttggacttgaagcagtatcctggtctccgggttgaggttggggctgctgctgttgattcactagaaagaatgagggatgaaagcaaaagagcaacactgcagctagttgatatggagtgtggctatctgactgttgatttctttcggaagcttcctcaagatgttgataagggtggcaatcccacacattcaatttttgatagatataatgattcatatctaaggcgaattggaaccacaattttgtcatatgtcaatatggtctgtgctacactgcggaattcaattcccaagtccatcgtctattgtcaagtgcgggaggcaaaacgaagtctacttgatcacttttttaccgagctaggcaaaatggagaccaagcgtctgtcatcgttattgaatgaggatcctgcaattatggaacgacgtagtgcgctcgcaaagagactagagttataccggagtgcacaagctgaaatagatgcagttgcttggtctaagtagatatatgtatgtcagatcacgtttatacgagagccagcagtgtcattattcattgtttccctatttccagttcattattcatactcattttttgttgtcatcttatccacttgtattgtcatcttaaatagatgagacgattctgaaaagggaaaaaaatgattttttgggttatacaattgagtgtccccgtatatttcatttttcagaccttccaaatctccactgcccatttttatttgtatgagattctgatgcgttcacaatgaaaataatctttat

SEQ ID NO: 889 - DNA, 2211 bp, Glycine max
gaattcggcacgagcgtcgtaaaagcgagtatcccgttggcaatttggcatcacgtcccttttcaaaccaagttccacagacaccaacaacgctttagctctctcttctctccgtcaccgtcaccggcgatctacatctgaacccgatccagccaatagatctcagaaatccaaatggagaacctaatctctttggtcaacaaaatccagagagcttgcaccgccttaggcgaccacggagaaaacagtgcactccccacactatgggactctcttcccgccatcgccgtcgtcggaggccagagctcaggaaagtcctccgtcttggagagcgttgtcggcaaagatttcttacctcgtggatcaggcattgttacgcgacgacctctcgtgttgcagcttcacaagattgacgagggaagcagggagtacgcagagttcctccacctcccgaggaagaggttcaccgattttgttgctgtgaggaaggagattcaggacgaaactgatagagagactggacgaaccaaacaaatttcgagtgttcccattcatcttagtatatactctcctaatgttgttaacttgacgctcattgatcttcccggccttacgaaagtagctgtagagggtcaaccggatagtattgtgaaagacattgaggatatggttcgctcctacattgagaagccgaactgtataattttggctatttcaccagccaatcaagatcttgcaacatccgatgcaattaaaatttcccgtgaagtggaccctactggggataggaccattggagttttgacaaagattgatcttatggacaagggtactgatgctgttgatatattggaaggaagagcatataggttaaagtttccctggattggtgttgtgaatagatcacaacaagacataaacaagaatgttgacatgattgctgctaggcgtagagaacgtgagtactttaatagtacccctgaatataaacaccttgcaaacagaatgggttctgaacatctggcgaagatgctctcaaagcatttggagacagtaatcaagtccaaaattcctggcattcaatccctaattaacaaaacaattgccgaacttgaagctgaactaactcgtttaggaaaacctgttgcagctgatgctgggggaaagttgtatgctatcatggaaatatgccgctcatttgatcaaatatttaaagaccatcttgatggcgtgcggcctggaggtgataaaatttataatgtctttgacaatcagctccctgctgctttaaaaaggttgcagtttgataagcagctttcaatggaaaatataaggaaacttattacagaagctgatgggtatcagcctcatctaatagctccagaacaaggataccgtcgcctaattgaatcttctctaataactattaggggccctgctgagtcagctgttgatgcggttcactccctgttaaaggacttggttcacaaagctatgagtgagactttggacttgaagcagtatcctggtctccgggttgaggttggggctgcatctgttgattcactcgaaagaatgagggatgaaagcaaaagagcaacactgcagctagttgatatggagtgtggctatctgactgttgatttctttcggaagcttcctcaagatgttgataagggtggcaatcccacacattcaatttgtgatagatataatgattcatatctaaggcgaattggaaccacaattttgtcatatgtcaatatggtctgtgctactctgcggcattcaattcccaagtccatcgtctattgtcaagtgcgggaggcaaaacgaagtctacttgatcacttttttaccgagctaggcaaaatggagatcaagcgtctgtcctcgttactgaatgaggatcctgcaattatggaacgacgtagtgcgctcgcaaagagactagagttataccggagtgcacaagctgaaatagatgcagttgcttggtctaagtagagatatgtatgtcaaatcacgtttatacgagagccagcagtgtcattatcattgttcactattttcttattcatactcatttttcattgtcatcttattctgttgcatttcctcttgaatagatgagacgattctgaaaaagggaaaaaatgattttttgggttatatataattgagtgtccctatatctttcatttttcagtc

SEQ ID NO: 890 - DNA, 510 bp, Glycine max
  unsure (1)..(510): unsure at all n locations
tacattgtcaatatgttgaaaatgaattaaactactaacagtagtgatgtgtatgtataaacaggaaccaatgttctgtcttatgtcaatatggtctgtgcaagtctgcgtcattcaattcccaagtcaattgtctattgtcaagtgagggaagccaaccgaggcctccttgatcagtttttccccgagctaggcaaaattgagcccaagcgtctgtcctcatttctgaatgaggttcctgcattcatggaaagacgaagtgccctatcaaagaggcttgagttataccggagtgcacaagctgagatcgatccagttgcatggtctaagtagatatgatatagatgtgtatgctccatcgcgttattgttaatattgatcaagaaatctctctctctctctctctcctatttttgttaggcttttgctttgtacaacgcatattgtaattgccatctttaatagaaaggtttttggtgagatnnnnnnnnnnnnnnnnnnnnnnnnnnn

SEQ ID NO: 891 - DNA, 1311 bp, Glycine max
acacactccatcacccccatatataccccttggcaccgaggagagagagagagagagatcaaaaaaaccttctttctttcaggttcattacttgatcagtgtcaaaagggtagttgcaaattgcaatggctaagcatgatgttgagggtggttccttctcagcaaaggactaccatgatcctcctccagcacctttgattgatgctgaggaactcacacagtggtccttctacagggctttgattgctgaattcattgccacattacttttcctttacatcacagtgctcactgtgattggttacaagagccagagtgatgtaaaggctgggggtgatgtgtgtggtggagttggcattcttggcattgcttgggcctttggtggcatgatcttcatccttgtgtactgcactgctggaatctcagggggtcacataaacccagcagtgacatttgggctcttcttggctcgcaaggtgtctttgatccgagccatcatgtacatggtggctcagtgcttgggtgctatctgtggagttggtttggttaaggctttccaaaagtcttacttcaacaagtatggtggtggggctaattccctcgctgatgggtacagcacaggtgctggattgggtgctgagattattggaacctttgttttggtctacactgtcttctctgcaactgaccccaagaggaatgctagagattctcatgtgccggttttggctccacttccaattggctttgctgtgttcatggttcacttggcaaccatcccagtaacaggcactggcattaaccctgctaggagtctaggagctgctgtcatgtacaaccaacagaaggcctgggatgaccattggatcttttgggttggaccatttattggagcagccattgcagccttctaccaccaatttatcttgagagcaggtgctgctaaggctcttggatcattcaggagcaaccccactatttgagtcaatttcctcttcataatcatgggtttcaaaaaggagataattggaagcaaaatgacttgatattgtaagaataataatgttattaataatggcaattgcttgtgcttttattgcaagcttttctttgatcctatgtagattaaaggttctttcaagacaagagccattggtaaataccctttagtattttcaagcactttcctttctttcagtgtgtgatattttcttttaggtaatttaatctcttgtactcaacgtggaaaagaaaaaaaatattatataatatccatgcttttactcaaaaaaaaaaaaaaaaaaagggggg

SEQ ID NO: 892 - DNA, 1038 bp, Glycine max
  unsure (1)..(1038): unsure at all n locations
gacacacacttgcccatcatcaaagtttcttcctttctctgctctttgccttctctgacacatttggtgccttgtagagcgtgttttggcaggaaggtggtatggcgaaggacgttgaggttgctgagcgtggctccttctctgggaaggactaccaggaccctccaccagcaccactcattgatgctgaggagctcacaaagtggtccttttacagggctctcattgctgaattcattgccactttgctcttcctctacattactgtgctcacagtcatagggtacaagcaccagactgacctcaaggaaaatggtgaaatctgtggtggggttggcattcttggcattgcatgggcctttggtggcatgatcttcatccttgtctactgcactgctgggatttcagggggtcacattaacccagcggtgacatttgggctgtttttggctcgcaaggtgtctttgatccgagccatcatgtacatggtggctcagtgcttaggtgctatctgtggagttggttgggttaaggctttccanaagtcttacttcaacaagtaatgtggtggngctaattccctcgctgctgcgtacagcacaggtactggtatgggtgctgagatcattggaacctttgtttgggtttacactgtgttctctgcaactgatcccaagaggaatgctagagattctcatgtgccggtatgaactcaatcatttttattgccttctttgaaaagacattgttacattaactcagaggaaaatgttgcttgcataagttgtgttgaaagcaatgattcaatggaataatacatgccatgttcatattatattgccatatatcttgcgtaggagtgaatctatggttgcttaaaagcagggtaggtctttcaggtttttaatagaagatcgagttccttgaaattattttagactggttacaggtaaagaaaaaagctgagtggaagtgacttaaccataatcacatatctaatcttcatgcttctagctttgctttctaaatgaaattagc

SEQ ID NO: 893 - DNA, 658 bp, Glycine max
gtctacactgtcttctctgccactgaccccaagaggaatgccagagattcccatgtgccggttttggctccacttcccattggatttgctgtgttcatggttcacttggccaccatcccagtcactggcactggtatcaaccctgctaggagtcttggagctgctgttatctacaaccaagataagccatgggatgaccattggatcttttgggtaggaccatttattggggcagccattgcagccttctaccatcagttcatcttaagagcaggtgcagctaaggctcttggatcattcaggagtaacccccataattgagttgtctttctcttccttatgatggctctagtggaaagaagataattggagagatggaggttgatatggcaagtttaataataattgggaatgcttttggcttgtgttttgcaacgtttctttgaccctctcgattatgtcttcaagattgtggataagtgtagattaaagtctctttcatgacagggggagccttttgcactttcctctgtggtgttcttccctttagtgtgtcatttttttcttttaagttattctcttcagctgtcatctctgtactcaaaatatatttatggaaaatgttaaattttaattttaattacattcctgcttttgc

SEQ ID NO: 894 - DNA, 632 bp, Glycine max
acgtaaactcacacatgcccatcatcaaagtttcttcctttctctgctctttgtcttctctgacacatttggggccttgttgagtgtgtttttgcaagagggtatggcgaaggacgttgaggttgctgagcgtggctccttctctgggaaggactaccaggaccctccaccagcaccactcattgatgctgaggagctcacaaagtggtccttttacagggctcttattgctgagttcattgccactttgctcttcctctacattactgtgctcacagttatagggtacaagcaccagacggatcatgctgatgcgtgtggtggggttggcattcttggcattgcatgggcctttggtggcatgatcttcatccttgtctactgcactgctgggatttcaggaggtcacattaacccagcagtgacatttgggctgtttttggctcgcaaggtgtctttgatccgagccatcatgtacatggtggctcagtgcttgggtgctatctgtggagttggtttagttaaggcttttcaaaagtcttacttcaacaagtatggtggtggggctaattccctcgctgatgggtacagcacaggtactggattgggtgctgagatcattggcacctttg

SEQ ID NO: 895 - DNA, 484 bp, Glycine max
gaacacactcatccaaacaaccttctttctttttctgtgagcctttctttcaggttcttaacttgatcagtgtgcagtgtccaaatcataagggtagttgcaaattgcaatggctaagcatgatgttgagggtggttccttctctgcaaaggactaccatgatcctcctccagcaccgttgattgatgctgaggaactcacacagtggtccttctacagggctttgattgctgagttcattgccacaatgctcttcctttacatcacagtgctcactgtgattggttacaagagccagagtgatgtaaaggctgggggtgatgtgtgtggtggagttggcattcttggcattgcttgggcctttggtggcatgatcttcattctggtgtactgcactgctggaatctcagggggtcacataaacccagcagtgacatttgggctcttcttggctcgcaaggtgtctttgattagagcaataatg

SEQ ID NO: 896 - DNA, 722 bp, Glycine max
gctaggagtctaggagggttaatgccagtgcctgttactggaattgttgccaagtgaaccatgaacacagcaaagccaattggaagtggagccaaaaccggcacatgagaatctctagcattaaccctgctaggagtctaggagctgctgtcatgtacaaccaacagaaggcctgggatgaccattggatcttttgggttggaccctttattggagcagcaattgcagccttctaccatcaattcatattgagagcaagtgctgctaaggctctgcgcgcgttcaggagcaaccccactatttgagtcaatttcctcttcatggggggttagtggaaatggtaaaaaaaagataattggaggcaaaaaaagttgatattgccaccaataataataataatatggtgctgtttgtgctttgatcctctgcagattgaaggttctttcaagaaaaggaagcctttggtaaatagtaaagaccctttagtacttcgaagcactttcctttgtatttccttgttagaattgatgagcttttttttgatatattggaagtaaaatctattagatatcttgttttaatattttgtgatatgtaataagtcgacttgttggtgaactagtgtggtaacccatgttatgagggatgctaggccaatgtcacactttttgcttgtgatattgaattttcacaaaaaaaaaaaaaaaatcaagtcactgtat

SEQ ID NO: 897 - DNA, 577 bp, Glycine max
cccaagaggaatgctagagattctcatgtgccggttttggctccacttccaattggctttgctgtgttcatggttcacttggcaaccatcccagtaacaggcactggcattaaccctgctaggagtctaggagctgctgtcatgtacaaccaacagaaggcctgggatgaccattggatcttttgggttggaccatttattggagcagccattgcagccttctaccaccaattcatcttgagagcaggtgctgctaaggctcttggatcattcaggagcaaccccgctatttgagtcaatttaatttcttcttcatgatgagttcaaaatgaagaggaaattataagaataataaaaatattgtcaataatggcaattgcttgtgcttttattgcaaccttttctttgatcctattatgtagattaaaggttcttttcaagacaagagccattggtaaataccctttagtattttcaagcactttcctttctttcagtgtgtgatattttcttttaggtaatttaatctcttgtactcaacgtggaaaaaaatatatataaatccatgcttttactt

SEQ ID NO: 898 - DNA, 401 bp, Glycine max
ctctgctaggagttttggagccgctgtgatgtacaaccaaaagaaggcttgggatgaccaatggatcttttgggttggaccgtttattggagcagccattgcagccttctaccaccaattcatcttgagagcaagtgctgctaaggctgttggatcattcaggagcaaccccactatttgagtcaatttcctcgtcatggggggatagtggaaatggaaaaaaattcatgggaagtgtttgtgctttgatcctctgtagattgaaggttctttaagacaatgaagcctttagtaaatagtaaaaaccctttagtatttgcaagcactttcctatgtatttccttgttagaattaagctttttcttgaaatattgccagtaaaatctattagatgtcttgtt

SEQ ID NO: 899 - DNA, 332 bp, Glycine max
accgcttgtacaagaacaccgaagggggtgttcgagtagaaaacgtaacggtcaagggcgggctatgcgagactcaagccgaaaggtttattgctattaatatttggctctctttttcagtgtcaaattgcattattgcaataatcaaaggcactaaccacactccatcacccccatatataccccttctcctctcacactaattaacacactcatcaaaaaacccttctttctttcaggttcattacttgatcagtgtcagaagggtagttgcaaattgcaatggctaagcatgacgttgagggtggtgccttctcagccaatgactacca

SEQ ID NO: 900 - DNA, 1457 bp, Glycine max
acacaaaacagggtttgtattatttgccgggcaaatgtcatgattgagctaactggccttgctgacataagtcatcattgaacttacacaccactcccacccattctctctcctttctatataacctcacacccacacggcccctcctatcactccaaaacctaaactccccttgcttttcttaccatctccttcaattctctctcactctcttttttctctcaccaaaacctttcacccaatatcctcaaactactacttctgataaattgctaatttttataaagctagctagagatgatggttcaaaaggaagatttgggtttgagtttaagcctcaacttccctcatcacaataccccaaatcctcaacatccgagtctcatgtcatcctctactcattcctcttctccttctggttgcaaccctcaaaaaccctcttggaacgaggctttcacttcttcggatcgaaactccgacacatgcagaggcgaaacgcgatcgttcctgcgcggaatcgacgtgaaccggttaccttccgccgtggacaccgaggaggaaacgggagtttcgtctccgaacagcaccgtctctagcgtgagtggaaaacgtagcgagagagaagaaccgaacggcgaagaacacgacatggacagagcctgttcccgcggaatcagcgacgaggaagacgctgaaaccgcaaggaaaaaacttagactctccaaagaccaatccgctatactcgaagaaagcttcaaagaacacaacaccctcaaccccaagcaaaaattggcactggcgaaacagctaggacttcgacctagacaagtggaggtgtggttccagaacagaagagcaaggactaagctgaagcaaaccgaggtggactgcgaagtattgaaaaggtgctgcgagaatctgacggaggaaaatagaaggttgcagaaggaggttcaggagcttagagcactgaaactttccccacagttttacatgcaaatgaccccacccacgacgctcaccatgtgcccctcgtgtgagcgtgtcgcgttcccccctcctctgccgttgatcctgccacgcgtcaccatcacgtgcctccatctcacccccgggcctttcccattggcccatggccaggcccttcgatgccctccgtcccagatcttagactcgcggaaacaaaatgacaaaattgaaaaaaaagataggaagccatgaattatgtgttcaaagtgtggtctaagatatggttgttaggaaaactgattttgtgggtctctaatgttttgtactagtttgacccttcgtctttcttttggatttcggggcatgacctggtctagttactagttaggttttttagttttataatacttactgcgttactctcgtttctcatgattaaatccgagactttctgtaaagtttactggtcttaattaatagtattatat

SEQ ID NO: 901 - DNA, 1358 bp, Glycine max
gggaattcggcccgcgaggccaacaattcaagccttcttgcagcatctctctccattaccttcataactcaatctcccattattattagagatgacggttgaaaaggaagatttgggtttgagtctaagcttgagcttccctcagaaccccccaactcatcttcatctcaatctcgtttcctcttctccttccagccacaaccctcagaaaccctcttggaacgaccctttcacttcttcagctggatcatcattccttcgcggaatcgatgtgaaccgtttaccttctgtggttgattgcgaagaggaagcaggtgtttcatctccaaacagcacggtttctagcgtcagtggaaagcgcagcgagagggaaaccaatggagaagaaaacgacacagacagagcttgttccagaggcatcatcagcgacgaagaagatgctgaaacctctagaaagaaacttagactctccaaagatcagtcaattgtcctggaagagagcttcaaagaacacaacactcttaaccccgtaagtaaacgtacaaaacaaaagttggcgctggcgaaacagctaggtcttcgacctagacaagtggaggtgtggttccagaacagaagagcaaggactaagctgaagcaaaccgaggtggactgcgaagtattgaaaaggtgctgcgagaatctgacggaggaaaatagaaggttgcagaaggaggttcaggagcttagagcactgaaactttccccacagttttacatgcaaatgaccccacccacgacgctcaccatgtgcccctcttgcgagcgtgtggctgttccgtcctccgccgtcgatgctgccacgcgtcatcatcccatggcccaggcccaggcccaggcccagattcggcacaggcccattggcccgtgggcttccgcctctcccattacgcaccggccgtttgatgtcttccaccactgatcttgagggtgttttggtcattgtgaaattattattatttactattctgggcctacttgtaccaccgtgtaggtgtgtaaccccaaaaggagagaaaaattgggggaaacagaaagagtgagggagcggtcgaaacagcgtgctgtggaattgtgcggtctaaggatatggtcattagaagaagggatttggtgggtctccaatgttttgtaccagtttgacctatcatcttttgttttgttgggtatgacctatatattagttactagttaggtgttttttttttattcagtttatagtattacttaacttttccccctctaaacagagactttgtgtaaagtgcaattatctagttaaattatatagggtttggttcccgtggcctatttcactt

SEQ ID NO: 902 - DNA, 702 bp, Glycine max
caagttgtaatatttgtggggtaaaagccatgattcagataattggggcttgctgacataaaggcatgattgaactctccactcctttctatataatcccttccacacgcacttctccacttcatagtcacaactagagatgacggttcaaaaggaagatttgggcttgagtctaagtttgagcttccctctcctctcctcttctccttccagccacaaccctcagaaaccctcttggaacgaccctattttcacttcttcaggtgaagctggatcattcctccgcggaatcgatgtgaaccgtttaccttctgtggttgattgcgaagaggaagcaggtgtttcatctccaaacagcacggtttctagcgtcagtggaaagcgcagcgagagggaaaccaatggagaagaaaacgacacagacagagcttgttccagaggcatcatcagcgacgaagaagatgctgaaacctctagaaagaaacttagactctccaaagatcagtcaattgtcctggaagagagcttcaaagaacacaacactcttaaccccgtaagtaaacgtacacatgccaattaattttttttgtcctgtatcagagacatagtatcctctgatctactggatcatatattaatctcactcacgatgtataggtgcgattgatcatagaaaattttgtacacaatgtgaatcaaata

SEQ ID NO: 903 - DNA, 1324 bp, Glycine max
gccactcttctcattaacacactacgcgtgcaaagaacctctgctctcctcttgcttttgatagagaagaaagaagcgagaagatgtcagacgcgttctgcagcgactgcaagaggcagacggaggtggtgtttgaccactctgccggcgacacggtgtgctcggagtgcggcctcgtactggagtcccactctatcgacgagacctctgagtggcgtaccttcgccaacgagtccggtgacaacgatcccaatcgtgtcggcgggccctccaaccccctcctcaccgacggcggcctctccaccgtcatcgccaagcccaacggcggcggaggtggcggcgagttcctctcctcctccctcggtcgctggcagaaccgcggctccaaccctgatcgcgccctcatcatcgccttcaagaccatcgccaccatgtccgataggttgggactagttgcgaccatcaaggatcgggcaaatgagatatataagagggttgaagatcaaaagtctagtagaggaagaaatcaagatgctttattggctgcttgtctctacatcgcttgccgacaagaagacaaacctcgtactgtaaaggaaatttgctctgttgccaatggggccacaaagaaggaaattggccgagcaaaagaatacatagtaaaacaactgggtttggagaatggtaatgctgtggagatgggtacaatacatgcaggggactttatgaggcgattctgttctaatctttgtatgaataatcaagctgttaaagctgctcaggaagctgtgcagaaatcagaagaatttgatataaggaggagtcccatatcaattgctgcagcagttatatacatcataactcagctttctgatgataagaagcctctcaaagatatatcacttgccacaggcgttgcagaaggaacaattaggaactcctacaaggatctttatcctcatgtttccaaaataataccaaattggtatgctaaggaggaggatttaaagaacctttgcagcccttgaattgtagagcagaatattaccatccatattaacaatttacaagttataatgtcattagagcattctgtttcagatgtaactgaactggttattacaaatcaaagtgccgtttttattcattgccgtcgatcgcaccattttttaaaccctcctaatttgagtactcgttgggagcaagcaacatacaatgtatgaatttcttgattatggtaaaacatcagagttattttttgctacaaaaaaaaaaaaaaaaaaaaaaaaaagcgaccgcccgctctaaaggatgctagcgtacg

SEQ ID NO: 904 - DNA, 381 bp, Glycine max
  unsure (1)..(381): unsure at all n locations
ggctgcggtagttggctctctctctttctctcataaaaacactccgagtacaaagaccctctctcctctcctctttgcattcgagtgaaagaagcgaagaaaaagaaacatgtcagacgcgttctgcagcgactgcaagaggcagacggaggtggtgttcgaccactccgccggcgacacggtgtgctcggagtgcggcctcgtcctcgaatcccactccatcgacgagacctccgagtggcgcaccttcgccaacgagtccggcgacaacgacccccaccgtgtcggtgggcccctncaatccccttcttaccgacggaggcctctcgaccgtcatcgncaagcccaacggcggcggcggtggcgagttcctctcctcct

SEQ ID NO: 905 - DNA, 976 bp, Glycine max
ttcctttcgtccgtttaaatttaatttaattcggcacgagattttcccttctttttattttctctgcacaacaattcgagattccaaccatcgatctcaattttcaaccttaacctctaagaatgtcttacgcttatctcttcaaatacatcatcatcggtgacaccggagttggaaagtcttgtcttctacttcaattcacggacaagcgctttcagcccgtccatgacttgaccatcggtgttgaatttggtgccaggatgatcacaattgataacaagccaatcaagttgcaaatatgggatacggctggtcaagaatcattcagatctattacaaggtcttattacagaggggctgcaggtgcattgcttgtttatgatataaccaggagggagacatttaatcatttggctagctggttggaagatgcaagacagcatgcaaatgcaaatatgactattatgctgattggcaacaagtgtgatcttgctcatagaagggctgtaagcacagaggaaggcgagcaatttgcaaaggagcatggattgatcttcatggaggcctcagcaaaaactgctcagaatgttgaagaggcattcataaaaacagctgcaaccatatacaaaaagattcaagatggagtttttgatgtatcaaatgagtcttatggaataaaagtaggatatggtggaattcctggtccttctggaggtagggatggcccttctgcttcggctggaggttgctgcagttgaagagaacctatcagaacctatctgcatcaatgtagtcctttatgtcttctcttcttttattttgggtttggatatgaagatatatatgttctacgtccattcataaaatcagataattgtataatgttttctttttaaacttgactttgtttctttgacgtgaactgataatttgacgagatttgtgtgcatagttaattgatctgttgtttcatttt

SEQ ID NO: 906 - DNA, 449 bp, Glycine max
tctcgagccggaactgtttataatttcattttgactctctctctctctgattgcttccttttcccttttattttgctctcttctctgcacaacaattccttctcattccagatattccaaccatcgaccgatctcaattctcaaccttaacctctcagaatgtcttacgcttatctcttcaaatacatcatcatcggtgacaccggagttgggaagtcttgtcttctacttcaattcacagacaagcgctttcagcccgtccatgacttgaccatcggtgttgaatttggtgccaggatgatcacaattgataacaagccaatcaagttgcaaatatgggatacggctggtcaagaatcattcagatctattacaaggtcttattatagaggggctgcacgtgcacttgcttggttatgatataaccaggagggagacatttaatcact

SEQ ID NO: 907 - DNA, 2820 bp, Glycine max
cggcacgagcgtaattgtgacacactcgaagtagcccataaggatagcataagaagtatcgcctccatcactatggggtttgactctttttccttcttctaataacaaaaccctgtttcctttaccttctccttcactaggctccccaagcaacaacaacaactactcttttttctctttcatcgacgatcttcactaagctctttcactcaaacacacacccttgattatatcactttctcttgttctcttaccgtagaacattgcatttactcctatctctcactctggatcttcaacttcttcctgattttgctgatttgggggattgagttggaaggggaaacatggctgcttcttctgcatctctttctggtgcttctgcttcggatcttctgaggagttcaaccagcggtttcaatggtgttcctttgagaaccatggggaagggaaagttggttttgaagaggagggactttacagttgctgccaggctgaggaaggtgaagaagcatgaatatccttggcctgctaaccctgatcccaatgtgaaaggtggggtgctgagccacctttccttgttcaagccactcaaggagaagccaaagcctgtcactttggattttgaaaggcctcttgttgatctgcaaaagaagatcattgatgtacagaagatggcgaacgaaactggactggacttcagtgatcagattctctcattggagaccaagtaccaccaggctttaaaggatctgtatacgcatctgactcctattcagcgggtcaacatcgcacggcaccctaacaggccaactttccttgatcatgtgtttaacataactgagaagtttgttgaactccatggtgatcgggcaggttacgatgatcctgctattgttactggtctagggactatagatggtagaagctacatgttcattggtcaccaaaagggtagaaatactaaagaaaatattcagcgtaactttgggatgccaactcctcatggttacaggaaggcccttcgcttgatggaatatgcagatcatcatgggttccccatagttactttcattgacacgcctggggcatatgctgaccttaaatcagaggaactaggacagggtgaagcgattgctcacaatttgagatccatgtttggtctgaaggtgccagttatatctatagttattggagaaggtggttcaggtggcgccctagccattggatgtgctaataaattactcatgcttgaaaatgctgttttttatgttgccagtccagaggcatgtgcagcaatcttgtggaagacagctaaagcttctccaaaggctgctgagaaattgaagattacagccactgaactgtgcaaattacaaattgcagatggtgttatacctgagccacttggtggtgcacatgcagatccagagtggacctctcaacagataaaaaaggctatcaaagaaaccatggatgagctcatgaagatgaacacagaagaactgttaaaacatcgcatgcttaagttcagaaagattggtggattccaggaaggtattcctatagatcctaagagaaaagccaacatgaagaagagggatctatctattgctaagatttctgatgctgaactagaagttgaggttgagaaactgaagcaacaggttttggaagctaaggaatcttctcctgttcctccaaaactagatctggatgagatgctaaagcaactgacaagggaggtcgatctagaatactctgaggcagttaaagccacgggcttgacagacagtttgttgaaactaagggaggaagtttcgaaagcaaatgcagataatcaaattgttgatccattgctggagggtaagatagaaaagctaagggtggagtttgaacagcaattgcgtgcagctcccaattatggtaggctgcagaataagcttaactatctgagcgaattatgtaaagttaagcttctgtcagatggaaagaagaacaatgaggctgtcacatttaagcaagagttgaagaaaaaaattgatgatgccttgagtgatccgaaaataagggagacatttgaagcattaaaggctgaaattaaaggtgttggtgcatcctcagcaagtgatttggatgacgagttgaagaagaaaatcattgagtttatcaaagaagtaaaagaagtaaaagaagtaaaagaggtaatagaaaatcaaattgaaagtttggtaaactcgtcggatgatattaagagcaagatactgcaattgaaattggaggttcctaaggctggagagacgcctgattcagaaccaaagaatagaattggtgctttggtgcaactaattaagccgagcctagtggaggccgttgactcgtctggcttaaaagatctgtttgaaaatctggtgtctaatgatggaagtttgacacatggagatccagctagagacagtctcaccgatgaccagtagagggtgaaagttggtgcaaactgcaccatttcttaataaatgctgctcatatggtgctggctgcaacaagttaatgaatggaatagtgaaaactgcaccagtgtgagtgatcttgatacattaccatatcagctggttgtacatcatctagaattatggccatacttcttagggacaagttttggtaattttaaggagataccgtgttaatggtgactaatattttttctgtaatcttcaaatagaggaccagaagggggaataaaattgaaaaccatgttgtctttgtttgagtcaaaatgttgcagttatattttgaatgattttttatgttttcttttca

SEQ ID NO: 908 - DNA, 2588 bp, Glycine max
gttgcgagatacacactcactcatagcataagaagtatcgcctccatcacttgggagtttggctttttccttttttaacaacaaaaccccaatctgtttcctttgccttctactccctacaacaaacaacaacaactactcctttttccctttcctattctcttctctttcattgacgatctccacgaagttctttcacctcaaacacacccttaattacatcgcattctcttcctctttctcttaccgtttgaattagattgcacctactcctctctctttcactcttctttttctggatcttcaacttctccctgattttgctgatttgggggattgagttggaaggggaaacatggctgcttcttctgcatctctttctggtgcttctgcttcggatcttctgaggagttcaaccagcggtttcaatggtgttcctttgagaaccttggggaagggaaagttggttttgaagaggagggactttacagttgctgctaaactgaggaaggtgaagaagcatgaatatccttggcctcctaaccctgatcccaatgtgaaaggtggagtgctgagccacctttccatgttcaagccactcaaggagaaaccaaagcctgtcactttggattttgaaaagcctcttgttgatctgcaaaagaagatcattgatgtacaaaagatggcgaacgaaactggactggacttcagtgatcagattctctcattggagaccaagtaccagcaggctttaaaggatctgtatacgcatctgactcctattcagcgggtcaacatcgctcggcaccctaacaggccaactttccttgatcatgtctttaacataactgaaaagtttgttgaactccatggtgatcgggcaggttatgatgatcctgctattgttactggtctagggactatagatggtagaagctacatgttcatcggtcaccaaaagggtagaaatactaaagaaaacattcagcgtaactttgggatgccaactcctcatggttacaggaaggcccttcgcttgatggaatatgcagatcatcatgggttccccatagttactttcattgacacgcctggggcatatgctgaccttaaatcagaggaactaggacagggtgaagcgattgctcacaatttgagatccatgtttggtctgaaggtgccagttatatctatagttattggagaaggtggttcaggtggcgccctagccattggatgtgctaataaattactcatgcttgaaaatgctgttttttatgttgccagtccagaggcatgtgcagcaatcttgtggaagacagctaaagcttctccaaaggctgctgagaaattgaagattacagccactgaactgtgcaaattacaaattgcagatggtgttatacctgagccacttggtggtgcacatgcagatccagagtggacctctcaacagataaaaaaggctatcaaagaaaccatggatgagctcatgaagatgaacacagaagaactgttaaaacatcgcatgcttaagttcagaaagattggtggattccaggaaggtattcctatagatcctaagagaaaagccaacatgaagaagagggatctatctattgctaagatttctgatgctgaactagaagttgaggttgagaaactgaagcaacaggttttggaagctaaggaatcttctcctgttcctccaaaactagatctggatgagatgctaaagcaactgacaagggaggttgatctagaatactctgaggcagttaaagccacgggcttgacagacagtttgttgaaactaagggaggaagtttcaaaagcaaatgcagataatcaaattgttgatccattgctgaaggataagatagaaaagctaagggtggagtttgaacagcaactgcgtgcagctcccaattatggaaggctgcagaataagtttacctatctgagcgaattatgtaaagttaagcttctgtcagatgcaaacaaggacaatgaggctgtcacatttaagcaagagttggagaaaaaagttgataatgccttgagtaatccaaaaataagggaaacatttgaagcattaaaggctgaaattaaaggtgctggtgcatcctcagcaagtgatttggatgacgagttgaagaagaaaatcgttgagtttatgatagaactaaaagaagtaaaagaagtaaaagaggtaatagaaaatcaaattgaaagtttggttaactcatcggatgatattaagaacaaggtactgcaattgaaattggaggttcctaaggctggagagacgcctgattcagaatcaaagagtagaattggtgattttatatttagaacatcatctagaattattatggccatacttcttagagacatgtttggtaattttaaggagataccgtgttaatggtggccaatattttttctataatcttccaatagaggaccagtaggggggaataaaattgaaaaccattttgtatttgtttgagtcacaatgttgcagttatatttagaatgacttcttatgttttcttttcttttcatgttcattttgctctttttta

SEQ ID NO: 909 - DNA, 1184 bp, Glycine max
ctcgagccgctccaaatacaagccaatagaaattgaaatatagatcatcataagatattaagataaggacccatttcctcttctaagctatatagtgctcgtctagcctacccactacaagcaacattgttaaccattctcttcactttaaagttacatagtttttcattgttttacaatatacaatactacaatggctgcttcaacgaatgacgtctcgtcttcatcagtcatctggcttggcgcaagctatcgaagccttgccgccctccaccccatgagcttggtgttggaagggttagcatgaggaaaacagcctccaagactgatttcatcaggaagcccatggtacggcccagaccgtgtcaagtacttgggcccattctctgggtgagcccccatcctatctcactggtgaattcccaggtgaactattggtgggaaactgctgggctttctgctgacccagagacttttgccaaaaaccgtgaactggaagtcatccactccagatggggccatgttgggagccttgggctgtgttttccctgaactcttgtcccgcaacggagtcaagtttggcgaggccgtgtggttcaaggccgggtctcagatattcagtgagggtgggcttgactacttgggcagcgccaagcctgatccatgcacaaagcattcttgccatctgggccacccaagttatcttgatgggtgcagttgagggttaccgtattgctggtggggcctcttggtgaggtgactgacccaatctatccaggtgggcagctttgacccattgggccttgctgatgacccagaggcttttgctgagttgaaggtgaaagagctcaagaatggtaggttggccatgttctccatgtttggtttctttgttcaggcaattgtgacaggaaagggacccttggaaaaccttgctgatcaccttgctgacccagtcaacaacaatgcttgggcttatgccacaaactttgttcccggaaagtgagcatagcaatagtgaaacaaagagaaacacagttgacttgaaaattcgcctgagcgtttcattgtttatttggagaaatacatattgaatgttttcttttaagaagaatatgaattatatatcttattgtgcattgagatcatttacactatcgcttcttctttttttttttttcgta

SEQ ID NO: 910 - DNA, 1097 bp, Glycine max
gactcaccacttcaaaacactcataacacaaagcacaaagcaaagctcatcctagagttttaaaaggggcatttgtttcctgcatggctctttcttccccacccttggctgggcaaggccgtgaagctgggcccatcagcccccgaagtcagaaggggtcagcatgaggaagaccgtgaccaagcaggcctcctccggaagcccatggtatggcccagaccgcgtcaagtactttgggcccattctctggcgagcccccgtcctacctcactggggaggttcccaaggtgatacggctgggacactgctgggcttttcggccgacccagaaaccttggcaaaaaaaccgtagcttcgaagttgatccactccaggtgggccatgcctcggggccttgggctgcgtcttccccgaactgttgtcccgcaacggggtcaagtttggagcaagctgtgtggttcaagggccgggtcccagatcttcagacgagggtgggctggactacttgaggcaacccaaggcttcgtccacgcccagagcatgcctcgtcatcttgggctacccaagttatcctaatgggtggctgttgagggttatcactattgctgggtggggccctcggagaaggtccttgccccattctacccctgggtggcaggctttgacccatttgggcctttgctgatgaacccagaggctcttgctgagcttaaggtgaaggaactcaagaacgggaagattggccatgttctctatgattgggttctttgttcatgccattgtcaccggtaagggtccattggagaaccttgctgatcaccttgcggacccagtcaacaaccaatgcctgggcctactttcaccaacttcgtccccggcaagtgagcatgaaagaaaaggatgacttgtggacttttgagagtttttagatttgtgtttggtgaagtatatgttcaccgcaatgtacttcagataatgtgaattatcttgtgtatccgaatccaacttaatgttacttgctttttacgaaaactcaagtgtcaatttgttctctcattttacacttctatgcttatgacaccaaattgaactctaaa

SEQ ID NO: 911 - DNA, 1540 bp, Glycine max
ggtcactcaccacttcaaaacacggcataacacaacagcgacaaagcataagctgcatcctctgaagttaaagaaattggcaagcagctttccttccattggttctctcatccccatccttggctggcaaggccgtgaagctgggcccatcagccccagaaagtgggaagggtgagcattgaggaaaaccgccaccaagcacgtctcctcaggaaagcccattgtacggtccagaccgagtcaagtacttgggcccattctctggcgagcccccgtcctacctaaccggtgagttcccaggcgactacggctgggacactgctggggctttccgcagacccagaaacccttcggcaaagaaccgtgaactcgaagttattcaatccaaggtgggccatgctcggaacccttgggctgcgtcttcccggagttgctgtcccgcaacggggtgaagttcggagaagcgcgtgtggttcaaggccgggtcccagatcttcagcgagggtggggctcgactactggggcaacccaagctctgatccacgcccagagcatcttcgctgtctgggccacacaagttaatcctaatgggtgccgttgaaggttacccgtatttgcttggttgccccccttcgtgaggtcactgacccaatctacccaggtggcagcttcgacccattggggccttgctgatgacccagaggccttttgctgagcttaaggtgaaggaactcaagaacggacgattggccatgttctctatgtttggcttctttgttcaggccattgtcaccggaaagggtatcattggagagacctcgccgatcgccttgctgaccctgtcaacaacgacgcttgggcctatgccaccaactttggtccccgaaaagtcatttcgttctttgacgctcactttccggggacgaagttggtgctcaaatcctctgagagaaaaaaaaattagggttttgcatttcgggtcagacagactcagacatgggaggaggcaatgcccagaagtcaaagatggctcgcgagaagaacctcgagaagcagagggctgccgctaagggaagccagttggattcaaacaagaaagccatgtctattcagtgcaaggtgtgcatgcaaacatttatatgcaccacatcagaagttaagtgccaaggagcatgctggagccaaacacccccaatcccgatctccatgtttgtattcctcatcttaaaaaagtgaaagagttcatgttgagacatgatatatcaatatatggcctgttatatagtctctatccacagagatcttcaatttcttttaatataaaatatgtctgtgtgtttgtgtcttggggggtagggagagacgagaggggataattagtaagtttttccattgtttaagcgtgagatactgtgttaattttctctttttttgtctaattgtaacttatgaatgattgctagtgtcaatattaatcttcttacagaatcatagattacatgaaagtgtttaggaatgacaaatatgaaaataagggtct

SEQ ID NO: 912 - DNA, 1894 bp, Glycine max
gaattcggcacgagggcccctccgccggacgtcaaggaggccttctccgccttctccgacgccgctgccgcatccatgtccgccgaccagctcctccgcttcctgcacgatcaccagcgcgaaacggactgctccgctgaggattccaaccgcatcctcgacagcatcattcaatcgcgcaaacaaaacgacaccaatgccgaatgcgaccaccacaccgacaacaacaacaatggtctcagcctcgacgagttcttccgtttcttgttcctcgtcgatttcaacgatcccctcaaatcccaggtacatcatgatatgaatgctccgttgtcacattatttcatatatacagggcacaattcctacctgactgggaatcagctgagcagcgattgcagtgatgtgccaatcataaaggctttgcaacgaggtgtgcgagtaattgaactagatttatggccaaattcaactaaagatgatatcgacgtagttcatggaaggacacttactgctcctgtctcacttatccaatgtttaaagtccataaaagagtatgcttttgttaaatctgactacccagtcatcataactttagaggaccaccttacaccattccttcaagctaaagttgcagagatgatagctcaagtatttggagacatgctctattttcctcaggcagattctctgacagaattccccacaccagaatcgttgaaaggtcgaattcttatatcaaccaaaccaccaaaagaatatcttgaatccaagcaattcaaggatagtgacagtgagagggaatcaactgaagaaggatcattatccccatgtgttatccctgaattggaggctgttgatgagaagttaaatggaagtgatcttgatgaggaaggcttgaatgctcgtgataaaaaatcagaccaacagagtgcacctgagtacaaacgtttgattacaatccatgctgggaagccaaagggtcatgtaaagcaccacttgaacaatgttgggggcgtgaagcgcttgagcttgagcgaacaggaacttgaaaaggcttctgctacttatggatcagatattgttagatttacacagaagaatattatcagggtgtatccaaagggaacacgtgttacctcctcgaattacaggccacatataggatggatgtatggagctcagatggtggcatttaacatgcaggggcatggaaaatcactctggtacatgcaaggcatgtttagagcaaatggcgggtgtggttatgtgaaaaagcctgcatttctaatagaaaaaggtccacataatgaggtttttgatcctaaaagagcattgccagtgaagaaaacattgaaggtgaaagtatatatgggaaatgggtggagctcagatttcagcaaaacacactttgattccttctctccaccggacttttacacaaaggtttgcattgttggagtaccagctgataaagccaataagaagaccaaggtaattcaagacaactggtttcccgtctgggacgaagagtttgaatttcccttgactgttccagaactagctttgctccgaatagaagttcgagaatatgataagcatgaaaaggatgactttggtgggcaaacatgtttgccaatctctgagttaagatctggtttccgtgcagtccctctatttgatcagaagggcgagcaattaaaatctgtaaagcttttaatgcggtttcagttcaaatgaactacaaagattagccattatttaggcatgtaacatgatataatattcctaggtggttttccttttgactagtgtgactaggggcatcaagaagattgttttaactatattatgggcttaagaggtttatttaaaaaaaaaaaaaaaaaaactcgag

SEQ ID NO: 913 - DNA, 2204 bp, Glycine max
ggcacacaacacacatattcgtgtgtgtttgaagtggaagaaagagaacgcataacacagaacacagtgcagacagcaagtgatgacgtcgaaacagacatacagcgtgtgcttctgctggcggcggcggttcaagctggcgctggcggaggcgccgtcggaaatcaagaccctattcaatgagtactccgagaatgagctcatgacaccttcgcatcttaagagattcctggtcgatgtgcagaggcaagagaaggccactgaagaagacgcgcaagccatcatcgatagcttcaggcatttccatcgcagaggcgctggcctcaatctcgaaactttcttcaagtacctcttcagtgacgataatcctcctcttcttccttctcatggggtgcaccatgatatgactttacccttgtcacattatttcatatatactggccataattcctatttaactgggaatcagctgagcagcgactgcagtgacgtccccatcataaatgcactgaagaaaggtgtgcgggtgattgaattagacatatggcctaatgcatcaaaggatagtatagatgttcttcatggaaggacattgactactcctgtagagcttatcagatgtttgaggtctattaaggatcatgcctttgtggcatcagaatatccagttgtaataaccctagaagaccaccttacaccagatcttcaggctaaagtggctgagatggttacccaaacatttggagacatactatttactcctaactcagaaagtgtgaaggaattcccttctcctgaatcacttaagaagagaattattatatcaaccaaaccacctaaggagtaccttgaggcaaaagaaaaggaaaaaggggatgattcacagcacgaaaaggagaaaggggatgattcagagcatggaaaggcatcaggtgaagatgaagcttgggggaaggaagtcccaagcttgaaaggtggtactatagaggattacaaggacaacaacgtggatgaagatcttaatgatgaggaagaatttgatgaatcagacaagtcacatcataatgaagctccagaatatagacacctaattgccattcatgctgggaagcctaaaggtggattagtggaatgcctcaaagtggatcctgaaaaagtgagacgtctaagtttaagtgagcaacagcttgaaaaggctgctataaatcatggacaacaaattgtcaggtttactcagcggaatatactgagggtgtatccaaaaggtactcgcattgactcatcaaattataacccattaattgggtggatgcatggagctcagatggttgcatttaacatgcaggggtatgggagatctctttggttgatgcatggaatgttcagagccaatggagggtgcggttatgttaaaaaaccaaattttctattggagactggtccagatgacgaggtcttcaatcctaaagctaagttacctgtgaagactactttgaaggtgactgtatatatgggggaaggatggtactatgatttcaagcatacacactttgatcaatattcacctccagacttctacacaagagtggggattgctggagtccctaatgatactataatgaagagaactaaggcaatagaggataattggttacctacatggaatgaggcatttgagttccctctcactgttccggagttggccttgcttcgcatagaagttcacgagtatgacatgtctgagaaagatgactttggtggacaaacatgcctacctatctgggagcttagaagtggcattcgagcaattccactgcatagccaaaagggagataaatacaacactgtaaagcttctcatgcgctttgagtttattaataattgattctgtgcaatgtgcatccttctgctccccattattattattattattatgtacagtcattaagatgtgttagtagcaagagtttgtatgtagtagctggatgatatcgtgaattatgtgccccgttaaatgatgtaagaaacaaaatgtgttgtgtattttgttttcttgaggagacttgttggtcttgtaaggcttgtcaatatatactacttatatatatatatataaacataaggaaattgctcgtgttttgtatgagaatactttttaagtcatctgtactcaaatgttggttttgatcaaaaaaaaagaaaaa

SEQ ID NO: 914 - DNA, 2320 bp, Glycine max
gccaaagtggctgagatgattactcgaacatttggagacatattatttgctcctacctcaaaaagcttgaaggaattttcttcttcttcaaggtgttgggagacatgcctagcaaacagacttatagcttttgcttcgaattcggcacgaggtttcaggatccccgtgtcggaggccccgccggagataaggacccttttcgaccgttactccgatcagaatggcgtcatgacagccactcacctccgaagtttcctggctgaggtgcagagggaagacaatgccactgaggaggaagcacaaaccatcatcgatggccacaagcatctcagtatctttcaccgaagaggtctcaatctcgagagtttcttcaactatctttttagtcaccataataacccacctctctcgccctcctattggggtgcaccaagatatgtcttcacctttgtctcattacttcatttatactggtcataattcctatctaactgggaaccagcttagcagtgactgcagtgacgtccccatcatcaatgcactggagaagggtgtaagggtgattgaattagatatatggcctaatgaatcaaaggataatgtagatgttcttcatggaaggactttgacttctcctgtggcactcatcaaatgtctgaggtctattaagcagcatgcctttgttgcctcagaatatccagttgtaataaccttagaagaccatctaactcccgaccttcaggccaaagtggctgagatgattactcaaacatttggagacatactatttgctcctacctcagaaagcttgaaggaatttccttctcctgaatcacttaaagggaggattattatatcaaccaaaccacctaaggagtaccttgaggcaaaagaagtacaggaaaaggaggaggaatcacaacaggaaaagcctgcagatgatgaagaagcatgggggaaggaagtccctagtttgagaggtggcactatctctgattacaagaacattgaggatgatgatgttcttgatgatgaggaagatattgatgaagcagaaaagtcacgtcaggatgcagcggacgaatacagacgtttaattgccattcatgctgggaagcctaaaggcggattaacggaatgtctcaaagtggatcctgataaagtgagacgtctaagtttaagtgagctacagcttgaaaaggctgctgaaactcatggaaaagaaattgtcaggttcactcagcggaatatactgagagtgtatccaaaaggtactcgcattacttcgacaaattataacccattgattgggtggatgcatggagctcagatggttgcatttaacatgcaggggtatggtagatctctttggttgatgcagggaatgttcaaagccaatggcggatgcggttatgttaaaaaaccagatcttctattaaaggttggtccaaataatgaggtctttgatcctagatctcatttgcctgtgaagacaaccctgaaggtgactatatatatgggggaaggatggtttcttgatttcaaacatacacactttgataaattctcacctccggacttctacgcaagagtggggattgctggagtccctaatgatactgttatgaagaaaaccgagaaagtagaggataattggtcaccttcatggaatcaagtattcaagttcccacttgctgttccggaacttgctctgcttcgtgtagaagttcacgagtatgacatgtctgagaaggatgattttggtggccaaacgtgcttacctgtgtgggaactaagaagtggaatccgagcagttccactgtattcccgcaaaggagataagtatgccaatgtgaagcttctcatgcactttgaattcatttgattttgtgcgtccttctgctccatgtttttgtacagtcattacaatatgttatagcaagcaagagtgtgtatgtatgtagctgtgtaatattgtaaatgttgtttatttagagtgatgctttttatttattctgtcttttactgaaaatataagggtgcgagtgagagtgagactaatgcattagggggatatcggtgatgtctgtaacaaggagtgagtttccacggattttgaataatgctgtgaagaagaaataagatgtgtatactatatacaatttgttttgttgaggagacgtgaaggagctgtcatttgtgttgtaacttgtaaggattgtccatgttcattttatgtaacataaaccagagtgatgtgatttgaaagcctggctagtacttcaatacattactgtttcgtaaaaaaaaaaaaaaaaaa

SEQ ID NO: 915 - DNA, 2150 bp, Glycine max
gtttcacttccgaattcggcacgagccacattccaacacaacaacaacgttaaagcagaaacacacgcacatattcgtgttcgaagtgaaacccaaagagaacacagagcagagagcaggagcgaagcatgacttcgaagcagacatacagcgtgtgcttctgctggcgacggcggttcaagctggcgctggcggaggcgccgtcggagatcaagaccctcttcgaggagtactccgagaatgagttcatgacaccttcgcatctcaaaaggtttctcgtggaagtgcaaaggcaagagaaggccaccgaagaagacgcgcaagccatcatcgacagcttcaggcatttccctcgcagaggcgctggcctcaatctcgaaactttcttcaagtacctcttcagtgacgataacccccctcttcttccttctcatggggtgcatcatgatatgactttacccttgtcacattatttcatatatacaggccataattcatatttaactgggaatcagctgagcagcgactgcagtgacgtccccatcataaatgcactgaagagaggtgtgcgggtgattgaattggacatatggcctaatgcatcaaaggataacatagatgttcttcatggaaggacattgactactcctgtagagctcataagatgtttgaggtctattaaggatcatgcctttgtggcatcagaatatccagttgtaataaccctagaagaccaccttacgccagatctccaggctaaagtggctgagatggttactgaaacatttggagacttactatttactcctaactcagaaagtgtgaaggaattcccttctcctgaatcacttaaaaagagaattattatatcaaccaaaccacctaaggagtaccttgaggcaaaagaaaaggaaaaaggggatgattcacagcacgaaaaggagaaaggggatgattcacagcatggaaaggcattaggcgaagatgaagcttgggggaaggaagtcccaagcttgaaaggtggtactatagaggattacaaggactacaatgtggatgaagatcttaatgatgaggaagaatttgatgaatcagacaagtcacatcataatgaagctccagaatatagacgcctaattgcaattcatgctgggaagcctaaaggtggattagcagaatgcctcaaagtggatcctgataaagtgagacgtctaagtttaagtgagcaacagcttgaaaaggctgccataaatcatggacaacaaattgtcaggtttactcagcggaatatactaagggtgtatccaaaaggtactcgcattgactcatcaaattataacccattaattgggtggatgcatggagctcagatggttgcatttaacatgcaggggtatgggagatctctttggttgatgcatggaatgttcagagccaatggagggtgtggttatgttaaaaaaccaaattttctattggagactggtccagatgacgaggtcttcaatcctaaagctaagttacctgtgaagactactttgaaggtgactgtatatatgggggaaggatggtactatgatttcaagcatacacactttgatcaatattcacctccagacttctacacaagagtggggattgctggagtccctaatgatactataatgaagagaactaaggcaatagaggataactggttacctacatggaatgaggtattcgagttccctctcactgttccggagttggcgttgcttcgcatagaagttcatgagtatgacatgtctgagaaagatgactttggtggacaagcatgcctacctatctgggagcttagaagtggcattcgagcaattccactgcatagccaaaagggggataaatacaacactgtaaagcttctcatgcgctttgaatttattaataattgattctgtgcagtgcatgtgcatccttctgctctacattatcattattattattatgtacagtcattaagatgtgttagtagtaagagtttgtttgtagtagctggatgatatcgtaaaatgatgtaagaaataaaatgtgttgtgtattttgttttcttaaggagacttgtttgtcttgtaaggcttgtcaatataaacacaaggaaattattcgtgttt

SEQ ID NO: 916 - DNA, 1247 bp, Glycine max
gtcgatctcttgcgtccgatgggttccatgcgtctattagtagtggcattgttgtgtgcatttgctatgcatgcaggtttttcagtctcttatgctcagcttactcctacgttctacagagaaacatgtccaaatctgttccctattgtgtttggagtaatcttcgatgcttctttcaccgatccccgaatcggggccagtctcatgaggcttcattttcatgattgctttgttcaaggttgtgatggatcagttttgctgaacaacactgatacaatagaaagcgagcaagatgcacttccaaatatcaactcaataagaggattggacgttgtcaatgacatcaagacagcggtggaaaatagttgtccagacacagtttcttgtgctgatattcttgctattgcagctgaaatagcttctgttctgggaggaggtccaggatggccagttccattaggaagaagggacagcttaacagcaaaccgaacccttgcaaatcaaaaccttccagcacctttcttcaacctcactcaacttaaagcttcctttgctgttcaaggtctcaacacccttgatttagttacactctcaggtggtcatacgtctggaagagctcggtgcagtacattcataaaccgattatacaacttcagcaacactggactgatccacttggacacaacatacttagaagtattgcgtgcaagatgcccccagaatgcaactggggataacctcaccaatttggacctgagcacacctgatcaatttgacaacagatactactccaatcttctgcagctcaatggcttacttcagagtgaccaagaacgtttctccactcctggtgctgataccattccattgtcaatagcttcagcgaaccagaatactttcttttccaactttagagtttcaatgataaaaatgggtaatattggagtgctgactggggatgaaggagaaattcgcttgcaatgtaattttgtgaatggagactcgtttggattagctagtgtggcgtccaaagatgctaaacaaaagcttgttgctcaatctaaataaaccaataattaatggggatgtcgatgctagctacgatgtaaaggcaaattaggttgaaacctctttgctagctatattgaaataaaccaaaggagtagtgtcgatgtcaattcgattttgccatgtacctcttggaatattatgtaataattatttgaatctcaaaaaaaaaaaaaaaa

SEQ ID NO: 917 - DNA, 1652 bp, Glycine max
  unsure (1)..(1652): unsure at all n locations
ttnnnnnccatcnattacgccaagctcgaaattaaccctcactaaagggaacnaaagctggagctccaccgcggtggcggccgctctagaactagtggatcccccgggctgcaggaattcggcacgagatttgggaccaggtattgatgtaatgttgccagttgccatcttactaatgtcttatgacttaaattaactaaaatactttcttgaaaacaatttaatacatattatgaactatgttatcataacaaagtcgaggggtaagttttgtggatgcaaaaaacaatccaacatcgaaacgaggtcgttttgtgttccgccgaaggcaccggaggttgtagcaggctagcagctatggatttggcatccaatctcggtggcaagattgacaaagccgaagttctctctgccgttcagaagtatgagaagtatcatgtttgctatggaggtcaagaggaagagaggaaagctaattataccgatatggttaataaatactacgatcttgttaccagcttttatgagtttggctggggggaatctttccattttgcacccagatggaaaggggaatctcttcgagagagcatcaagcgacatgaacacttccttcctttacaacttggactgaagccagggcagaaggttttggatgttggatgtggaattgggggaccattaagagaaatttctcgatttagctcaacttcaattaccgggttgaataacaatgagtaccagataacaagaggaaaggaactcaatcgcattgctggagtggacaagacttgcaattttgtcaaggctgacttcatgaaaatgccattcccagacaacagttttgatgcagtgtatgcgattgaagccacttgccatgcaccggatgcttatggatgctataaagagatttttagagtgttaaagcctggtcaatattttgctgcttatgaatggtgcatgaccgattcttttgatccccaaaacccagagcaccaaaaaatcaaggcagaaattgagattggtgatgggctacctgacattcgattgactgctaagtgtcttgaagctctgaagcaagcaggttttgaggtaatatgggagaaagatctagcagtggactctcctcttccttggtatttgcctttagacaaaagtcacttctcactgagtagcttccgtctaactgctgtcgggcgacttttcaccaaaaacatggtcaaggttctggagtatgttggactggctccaaagggtagtctaagggttcaagacttcctggagaaggctgcagagggactagttgaaggagggaagagagagattttcacaccaatgtacttcttcctggcacggaagcctgatttagacaggaactaagctggctgtacaaataggttgctgttttcatcagttacggtgattctggtagggtgaaccgtaagctaggattgtttttggccttgttgccttagtgattcttgctgtttctttgttttgtttaggttaccaacacttcattttgctgcttgtttcgatgaagcagtgctcctccatattttgtttaccctacatattatatgctcttttactttgtttaaaaaaaaaaaaaaaaaaattggtattaaaaaaaaaaaattttttaatttttt

SEQ ID NO: 918 - DNA, 855 bp, Glycine max
  unsure (1)..(855): unsure at all n locations
gaagggggggaacccccagcaagaatcccccattcccaaaatttctcattctccctttcctctccgaaccctcgatcactctcacgcgctcctatattcgctcctccaccgtcgctctctcgaacaaccacaacaccatcttcatcacatggcaaacgcagcatctggtatggcagtccatgatgactgcaagttgaggtttttggagctgaaggcaaaaaggacacaccgtttcatagtttttaagattgaggagcagcagaagcaggtcattgtggagaagcttggtgagcctgcccagggctatgaagatttcactgccagccttcctgctgacgagtgccgttatgctgtttatgattttgagtatctgactgaagggaatgtccctaaaagcagaatttttttcattgcgtggtcccctgacacatcaagggtgaggagcaagatgatttatgcaagctccaaagacagattcaagagggagctggatggaattcaagtagagttgcaagcaactgatcctactgagatgggtcttgatgtgttcaaaagccgtgccaactaaaatgattatataaaatagtaggctttctggtgggagcagcacccctgaagccttagttactcatatggaaaatatcctagtttgtgggatggtcaacttgggtagttatggtcccaaactctcaattttccaagttgtggcataaaattctattgcaccttttgacaagctttgcttgttccagtgtgtactttgccagcctcgttgtccccagggttattttgatgatatccccccttgcgtgtgcaaaaaaaaaaaaaaaaaacttnggggggcgccaatccccc

SEQ ID NO: 919 - DNA, 877 bp, Glycine max
cccacgcgtccgaccgttcctttcttcgttccttccccaacccaatcttcgccttcgcccacaacaactcctccttcaggatcgctgccaacgttactttccatttttacccttcatcctcgagaaaaaaatggcgaacgcagcatctggtatggccgtccatgatgagtgcaagctaaagtttctggagctcaaggcgaagaggacgtaccggtatatcgtttttaagattgaggagaaatcgaagcaagttattgtggagaagctgggtgaccctgcaaatggctatgatgaattcgctgccagtcttcctgctgatgagtgtcgatatgctgtttatgattttgattttgtcactgaagagaattgccaaaagagcagaattttcttcattgcttggtcccctgacacatcaagggtgaggagcaagatgatttatgcaagctccaaagacagattcaagagggagctggatggaattcaagtagagttgcaagcaactgatcctactgagatgggtcttgatgtgttcaaaagccgggccaactaaaatgattatagaaaatagtaggctttctggtgggagcagcactccttaagccttagttactcatggaaaatatcctagtttgtgggatggtcaacttgggtagttatggtcccaaactctcaattttccaagttgtggcataaattctattgcaccttttaacaagctttgcttgttccagtgtgttttattatgatttgtgatttatacaaccttgcgtttgagtgccattttagtcgtcttatcccttactagttgaatttgtaactgtttgtgttatcagacaaaaaatggggtttcttcacttattgacactcgtcatccact

SEQ ID NO: 920 - DNA, 837 bp, Glycine max
caacccaatcttcaccttcgcccacaacaaatcccattcctgcatctcctccttcagcatcgctgcaaactttactttccatttttgtccttcctccccgagaaaaaaatggcgaacgcagcatctggtatggccgtccatgatgactgcaagctaaagtttttggagctcaaggcgaagaggacgtaccggtttatcgtttttaagattgaggagaagcagaagcaagttattgtggagaagctgggtgagcctgcaaatggttatgatgatttcgctgccagtcttcctgccgacgagtgtcgatatgctgtttatgattttgattttgtcactgaagagaattgccaaaagagcagaattttcttcattgcttggtcccctgatacatctagggttaggagcaagatgatttatgccagctccaaagatagattcaagagggagcttgatggaattcagattgagctgcaagcaactgatcctactgagatgggtcttgatgtgttcaaaagccgtgccaattaaatgattccgattattcataaataggagttgtgatggggatggtcaacttggctaatttggactcaattttccaagttttgacatgaggtctattgcagcttcaacaaagcttctcttgttccagtgtatcttgtggtttgcgacatataacccgtgtttgggtgtaatcttagtcctattcctagtagttaattttgtaactgttctttgtgtgattgaacgaaaatttgggaccaggtattgatgtaatgttgccagttgccatcttactaatgtcttatgacttaaattaactaaaatactttcttg

SEQ ID NO: 921 - DNA, 460 bp, Glycine max
ccggctcgagccacgcgtccgcctgaacctaacccaatcttcaccttcgcccacaacaaatcccattcctgcatctcctccttcagcatcgctgcaaactttactttccatttttgtccttcctccccgagaaaaaaatggcgaacgcagcatctggtatggccgtccatgatgactgcaagctaaagtttttggagctcaaggcgaagaggacgtaccggtttatcgtttttaagattgaggagaagcagaagcaagttattgtggagaagctgggtgagcctgcaaatggttatgatgatttcgctgccagtcttcctgccgacgagtgtcgatatgctgtttatgattttgattttgtcactgaagagaattgccaaatgagcagaattttctgcattgcttggtcagtaggctcttacacaaactgaacaaccataacttagaagatttgaagtag

SEQ ID NO: 922 - DNA, 637 bp, Glycine max
ttaagatactaatctctctttctcatagttcgttcccaattcatcgttgtctccgccttcttttatctctctctccactcccatatcgaaacaaagtcgttttgagttccgccgaaggcaccgtaggttgcagcagctatggatttggcatccaatctcggtggcaagattgacaaagccgaagttctctctgccgttcagaagtatgagaagtatcatgtttgctatggaggtcaagaggaagagagaaaagctaattataccgatatggttaataaatactatgatcttgttaccagcttttatgagtttggctggggggaatctttccattttgcacccagatggaaaggagaatctcttcgagagagcatcaaaagacatgaacacttccttgcttcacaacttggactgaagccagggcagaaggctttggatgttggatgtggaattgggggaccattaagagaaatttctcgattcaggtaaacaagattgatttcatataggtttcctcttcctttgtctttcactgtttaactttactagctaataaaaatcaaggggtatctgtgcagcttaacttcaattaccgggttgaataacaatgagtaccagataacaagaggaaaggaac

SEQ ID NO: 923 - DNA, 464 bp, Glycine max
ccgccttcttttatctctctctccactaccatgtgagtcacttcttctctctttcgcctttccccctcactcactcctctttttactttaacgtaaataaattctctgtgttcagatcgaaacgaggtcgttttgtgttccgccgaaggcaccggaggttgtagcaggctagcagctatggatttggcatccaatctcggtggcaagattgacaaagccgaagttctctctgccgttcagaagtatgagaagtatcatgtttgctatggaggtcaagaggaagagaggaaagccaattattcccgatatggttaaataaaatactaacgatcttgtttaccagccttttatggagttttggctggggggggaatctttcccatttttgcaacccaatatggtaaagggtgaatctttttctcagaagaggcatccaagccgcacaatgaaacacctttcctttt

SEQ ID NO: 924 - DNA, 919 bp, Glycine max
aacgccaaaggcagaatattccgtccggaaattagggttagggttgcagcgtcctccatcagcacccgtatataaatacccttttcccgcccacttgttctaccgtaatccttacgctctctcactcacaaacgcacactgaattcaaaaacatcgaaagagagaggcatggccgagcaaaccttcatcatgatcaagccagatggcgttcaaagaggccttattggcgagattattagcagatttgagaggaagggtttttacttgaaagggttgaaactcgttactgtggaccgtccttttgctgagaagcactatgctgatttgtctgcaaagcctttctttagtggtttggtggattacattgtctctggccctgttgttgccatgatctgggagggcaagaatgttgttacaactggccgaaagattatcggagccacaaacccagctcaatctgagcctggaactatccgtggtgactttgccattgacattggaaggaatgttatccatggaagtgatgcagttgaaagtgctaacaaggaaattgcattgtggttccctgagggccctgctaactggcaaagctcccaacactcttggatctatgagtaaatcatatgcctcaagttgatcttgaaattgccttaggttgatccagattatctacatgttttctgtttctgtccgttgttggacttttttgtttaagagtttggtaccttggcttgcatttcaggctctatttatgtcacagtttgataaattaaatcccagaccagttttgcttttaccttgttgattgttaatgttttttcctatgagccatttttgaggatgcagatgcaattacattataatattccatcctcatctctatagataaattgtcaattattgatacatatttgcttct

SEQ ID NO: 925 - DNA, 730 bp, Glycine max
aagccttcattaaggcggcaaaaggcaaacggaagggaaatttaaaagaaaaggttccaacttaaaaggtttgaaacttgtaacggtggaccgtccttttgctgagaagcactatgctgatttgtctgccaagcctttctttagtggtttggtggattacattgtctctggccctgttgttgccatgatctgggagggtaagaatgttgttacaactggccgaaagattatcggagccacaaacccagctcaatctgagcctggaactattcgtggtgactttgctattgacattggaaggaatgttatccatggaagtgattcagttgagagtgctaacaaggaaattgcattgtggttccctgagggccctgctaactggcaaagctcccagcactcttggatctatgagtaatacaaatgcctcaagttgatcttgaaattggccttaggttgatccagattatctacatgttttctgtttttgtccattgttggacttttgctaagagtttggtaccgtggtttgcatgtagagtctatttatgtcatttctgttgaaacatgctcacagtttgataaattaaatcccaaactagttttgcttttaccttgttgattgttaatgtttttgcatatgagccattgatgaggatgcaggtgcagttacattatagtcttccattgtcatctcaacttcccagttataataaataaaatggcacttgtt

SEQ ID NO: 926 - DNA, 272 bp, Glycine max
cgggagctttgccagttagcagggccctcagggagccacaatgcaatttccttgttagcactttcaactggcagagctcccaacactcttggatctatgagtacatcatatgcctcaagttgatcttgaaattgccttaggttgatccagattatctacatgttttctgtttctgtccgttgttggacttttttgtttaagagtttggtaccttggcttgcatttcaggctctatttatgtcacagtttgataaattaaatcccagaccagt

SEQ ID NO: 927 - DNA, 458 bp, Glycine max
atctactgctctatcacacacccccccgtactaaacctcatcagcagagacatggctgagcaaaccttcatcatgatcaagcctgatggcgtccaaagacgccttattggcgagatcattagcagatttgagaagaaaggtttctacttgaaaggtttgaaacttgttactgtggaccgtccttttgctgagaagcactatgctgatttgtctgccaagcctttctttagtggtttggtggattacattatctctggcctcgttgttgccatgatctgggagggcaagaatgttgttacaactggccgaaagattatcggagccacaaacccagctcaatctgagcctggaactatccgtggtgactttgccattgacattggaaggtatagacttgttttcatcatcgttcaagcaagtttacgttttcaaatcttttgttttaacacatgaatatg

SEQ ID NO: 928 - DNA, 616 bp, Glycine max
tggggcatcgaacagagagagagagaatggcagcacttggtgggaatcgtgatgtgacaggaagccagaacagcgttgagatcgatgctctagctcgctttgctgttgaagaacacaacaaaaaacagaatgcccttttggagtttgaaaaggtggtaactgcgaaacagcaagtggtttctggtaccttgtacaccatcactttggaggcaaaagatggtgggcaaaagaaggtttatgaagccaaagtttgggagaagtcatggttgaacttcaaggaggtgcaagagttcaagcttgttggagatgcacctgcatagtctagtgcttaattaggttgctgaagagtgaagaatgagacagcctggttcgaaggggaaaagcctaaggatatatcaaaggatcctatatgtataaaataaatgttgcttttttaccttcggtattgatatctgaagtctaatttgacatcctatatatgaatatatgatctatgtgtttctttctctccctacctctctctcttttaaagattcaaatttggttttactttttagccattgtaagtgtattaacatcaatacttaaatctatatctatatctacattataatct

SEQ ID NO: 929 - DNA, 938 bp, Glycine max
cctcgagccgaatcggctcgagtacgagacgacagaagggggataaagaaaagagaaatggcaacagaaacaaaagtggcagtattaggtggcatcaccgaagtgcagggagctgccaacagcgtcgagatcaacaatctcgctcgctttgctgtagaggaacaaaacaaaagagagaattcagttctggagtttgtgagggtgattagtgcaaagcagcaagtggttgctggagtgaattactacataacattggaagcaaaagatggtgagattaaaaatgagtataaagcgaaggtttgggagagggaatcctagaagtcccaagagttgctagaattcaagccaacattaggtgcagtaccgatgtgactgcgaatagcctcgagatcgacattctcgctcgttttgctgttgatcaacacaacaaaagagagaatgcaaatctggagtttgtgggggtgattagggcaaagcagcaggtggtggaagggttcatatactacatcactttggaagcaaaagatggtgaaaccaaaaatgtgtatgaaacgaaggtgtgggtgagatcatggttgaactccaaggaggtcctcgaattcaagcccatcagtattaatcctctttcggtgtcggtctagtctttataaggttacagaaataaatggtcgcaagctgaaagttgtactaaaatttattttttataaaaaaatcgaaggtagtattaaatatgttatatgtatgtattgtgcggaataaatgcagccacgtactatatacaatggtacatacggtgtagggctgtacaagttgggcatcctatttcaatattaacgaccactaataaatattaaaaaaaaaaaaaaaaaaaaaaaaaaaaaaaaaaaaaaaaaaaaaaaaacaacaaagggggggcccctccaaatatcccccccccc

SEQ ID NO: 930 - DNA, 514 bp, Glycine max
ggagataagatgaaccttgatatttcccctatatataaaaagccttagaatagagtatagaagataaagaaaagagaaatggcaacagaaacaaaagtggcagtattaggtggcatcaccgaagtgcagggagctgccaacagcgtcgagatcaacaatctcgctcgctttgctgtagaggaacaaaacaaaagagagaattcagttctggagtttgtgagggtgattagtgcacagcagcaagtggtttctggagtgaattactacataacattggaagcaaaagatggtgagattaaaaatgagtataaagcgaaggtttgggagagggaatcccaagagttgctagaattcatgccaacattaggtgcaggaggcgagatcgaccatctcgctcgctttgctgtagaggaacaaaacaaaagagagaatgcaaatctggagtttgtgggggtgattagggcaaagcagcaagtggtggaagggttcatatactacatcactttggaagcaa

SEQ ID NO: 931 - DNA, 628 bp, Glycine max
cccacgagaaaagagacatggcaacagaaacaaaagtgcaagaattaggtggcatcaccgatgtgcatggagctgccaacagcgtcgagatcaacaatctcgctcgctttgctgtagaggaacaaaacaaaagagagaattcagttctggagtttgtgagggtgattagtgcaaagcagcaagtggttgctggagtgaattactacataacattggaagcaaaagatggtttgattaaaaatgagtatgaagcgaaggtttgggtgagggaatggttgaactccaaagagttgctagaattcaagccagtcaatgtttctagcacaccaataggtggcattaccgatgtgactgcgaatagcctcgagatcgacattctcgctcgttttgctgttgatcaacacaacaaaaaagagaatgcaaatctggagtttgtgggggtgattagggcaaagcagcaggtggtggaagggttcatatactacatcactttggaagcaaaagatggtgaaaccaaaaatgtgtatgaaacgaaggtgtgggtgagatcatggttgaactccaaggatgttctcgaattcaagcccatcagtattaatcctctttcggtgtcggtctagtctttata

SEQ ID NO: 932 - DNA, 435 bp, Glycine max
gaaatggcaacagaaacaaaagtggcagtattaggtggcatcaccgaagtgcagggagctgccaacagcgtcgagatcaacaatctcgctcgctttgctgtagaggaacaaaacaaaagagagaattcagttctggagtttgtgagggtgattagtgcaaagcagcaagtggttgctggagtgaattactacataacattggaagcaaaagatggtgagattaaaaatgagtataaagcgaaggtttgggagagggaatcccaagagttgctagaattcaagccaacattaggtgcaggaggcatcatcgatgtgcctggagctgccaacagcatcgagatcgaccatctcgctcgctttgctgtagaggaacaaaacaaaagagagaattcggttctggagttggtgagggtgattagtgcaaagaaacaagtg

SEQ ID NO: 933 - DNA, 731 bp, Glycine max
  unsure (1)..(731): unsure at all n locations
ccacgcgtgccggctagcagacagacgactgattggatatcaaagggcagaaacggcatctgcggcgaatctgctcgtattagctggcgccaccgatacgcttgctgctgccctcggcatctagatcatctatgtcgctcgctttgctgtagaggaacaaaacagatgagagaattcagctgtggagtcatgtgacggtgattagtgcacagaatctagtggtttctggagtgaattactacataacattggaagcaaaagatggtgagattaaaaatgagtatacagcgaaggtttgggagagggaatcccaagagttgctagaattcatgccaacattacgtgcacgaggcgagatcgaccatctcgctcgctttgctgtagaggaacaaaacaaaagagaggntctntctatatttttcttgtcttcatttaagtctacttcactacctaagaatcaggattatctttttattttattttaaaacttataagattaatataataatcaagaaattgagaaagaaaaaaataattccgaatttaaacttttcactaacaaaagctcattcaagttcacgggatggcactgggtgttcttttgtttctattgttgtactgtttctttcatttggtatcattgatatctatatgcatgtttaatttaatttctctatgtttaattgcttgtcgtgattacattggagttggaaatgcagaatgcanatctg

SEQ ID NO: 934 - DNA, 736 bp, Glycine max
caaaaaagtcatagaagggaagagagaaacataagaaagaagatcaaaagaaaaaagagaaacaaatggcagcactgggtggctttaccgacatcaccggagcacagaacagcatcgatatcgaaaatctcgctcgctttgctgttgatgaacacaacaaaaaagagaatgcagttctggagtttgtgagggtgattagtgcaaagaaacaagtggtttctggcaccttgtactatatcactttggaggcaaatgatggtgtgacgaaaaaggtttatgaaactaaggtgttggagaaaccatggttgaacatcaaggaggttcaggaattcaagcccatcactgttgctgttaatcctctttcggtgacggtctagcacatagctaggttatggaagtgactagcttggccgcaagagtaataatatgtatgaactgaataaatgtacctattaactctacaaacggtgtggggttgtgcatgtttgccatcctatatatttcagtataaatattgccatcgagattaataaaataattgattatgtattaatttatgcgtgtttcgtccaaagcgtggatggtgatgattcgaactttatagcagaatgatctggtggagcggtcccttctgtactcaatgcgattatggggtcacaatcttgaagttcttgccctccttggatctatcttaatatttattgacattaagtgaaatatagatttcatttaagtt

SEQ ID NO: 935 - DNA, 442 bp, Glycine max
atccgaacaattccaagcatctattattggtttgaacaagttttgggcttttggtggtaatgtggtggctatggataatgactcgtgtggagtggggttcatggcggaactgtccaacgaaagtagctgcaaaacggtgattgatgttttggagatgctggtgcgcatggacccttcggacattggtattaggcttttggagccactcaaggcggagttccctattttgagctatgccgatttctacccggtgatgatttttttgtctttggtgtttgtgcgcttaatgttgtatttgtgttgacgcaattggttggcgttgttgccgttgaggtcacgggtggacctgaagttccattccaccctggaagagaggttaatatataataccttggtagagttgtgttcaacacaaatgacgggaactgattcacacacaact

SEQ ID NO: 936 - DNA, 1604 bp, Glycine max
aaaaaaattgacgtggagtgtgtccatttatgtcgattattggcacatgaatggcaagcattcgtatctcgcactcacaagttaagaaaaacgtttgtatctgtgaaaggcatatactaccaggctgaggtcgagggccagacaataacatggttaactcctcattcactacaacaggttgtatctgatgatgttgacatcactaccatgctaaactttctgcaattgtatgagcctcttcttagttttgtcaatttccgcctctaccattctataaatttgaagtatccccccatccttgatcctcagttggaagctttggcagcagatctatatgctctgtcaaggtatgccagtgccaataccagaccctctgtactgatttctgaagcttctcaagctgaatctgaacaagtggagaccaagcaaaaagaggcagagactggagataaaacatctgaactaagacttgctcaacttcagcatcaacttccttctaatgaacctggtgcactaatgcatcttgctgaggaagtgactgcagaagatgaagaggatcaggatacaaaagactgtaaaaagctctttaaaaatatgaaattcttggaaagcagggaggtaccaagggaatcgatgctttttgttattcctgcttttggtggcatagtttcctgggagggagaaggggcaccttttggggaatctgaccagagcatttatcatcagattgttgacagggaagcacaaggacatcggttcctctcaagagaattacgttcaacccacagtgggtatatgactgtgtgaatgcacgaattattttgccaactgacaattatttggtgggaaggactcctccaccacatttgtcaccttttattaactacgatgaagaaggagcatacattcctgattatgcaaagaccattaaacacttgcaagctgctgccagaaaggaaatccttccacttcctggtgttgggaaggaagatctggaagatcctcaaaatcttctggttgaaggtatcattgatcgagcagaggctaatgatgcagctcagagagagcagaagatgatgattctggagcagcaataccgtgatgatttgaaaaaagaacttcaaggtattacatgtacctcagcaggttctatagaaacatctactgaagtggtacagactggagaatcaactaccagtgttcatgaaaatgttgatcatgatgacatgggtaaacttatgttgtcacgtaaaaggagggggctagctgaaagccattgagaaatctagggaacggaataaagctcaaactgatcttattaaacaacggaaaaagaaaattgatgaagagcaacggctaaggagttgaagagatgccgcattcacaaggattccagcattgacttcattgtgtcatagctgatgatttgaaaggttaagtcatttttgttcggagtataggcagttgaacttattctagtcttgttctctatgttttgtaaccgatatgtttctaggccaaaaagaaaaaatattttgatttagcaccggatgtttttataacatctcaggtttgagcctttgaaagattaaactatggttaag

SEQ ID NO: 937 - DNA, 742 bp, Glycine max
ctctgctcgtgcctctagggttatcatatctccatttccatggcctggctctcagtttccaagaatcttaagctatgggaaagtctgacccaaccgggagcgctgcataccggagagcaccatgctggacaatacaaaggggagcaccatggtgaacacagtagtgagtacaaaggagagcatcatggtgaacacaaagcttggagagtaccatggtgagcacaagccagagcacaaagaggggttcctagacaaagtcaaggacaagatccatggtgagggcggcgccgccgagggcgagaagaagaagaaggagaagaagaagaaggagcatggccatgagcatggcgcatgacagcagctgcagcaacagcagcagtgacagtgattaaactgctgcatcacctatatatttaaaaggtttatgggaccatagtagcgagggctgtgccttaatttctctctcagctctctgtctacttttttctctctctctctctttttcctttttccctatcttgtgatctatttatgagtgagaaacacaagagtgagatattgtgcgtgtatctggttgctaattcgagtgctattagtctgtggtttggttggtttgtaaccccgctacttgggttatgtttgattgtatattatcctagagaaataaaaattttaaattatcagtcgctaaaaaaaatgacaacacacaaaaatagcggccgctctagaggatccaagctta

SEQ ID NO: 938 - DNA, 738 bp, Glycine max
gtctgtggtttcgttggtttgtaaccttatacacgcactatttctctcgctcataaatataaatgaaagagagaagaaaagtcaaagacaatgtcagggatcattcacaagattgaggagacccttcatgtgggaggccacaagaaggaggaggagcactaaggagtgagcagtcaccatgcgtgagagtatacagaaggggtagcatcatgagtgaaccacagtaactgaatacaaaggacgagcatcatgtcggtgagcacaagcacggagcaccatggaggagaagagcacaaagaggggttcctagacaagatcaaggacaagatccacggcgaggagggtggcgccaccgccgagggcgagaagaagaagaagaagaagaaggagaagaagaagcatgaacatggccatgacagcagcagcagcagtgaacagtgattagattatcttccactgctgcatcacctatatatcttataagggtgtatgggaccattagagtgaggggctgtgtctttctcttttttttcctacttgtcatttatatttatgagcgagagaaatagtgcgtgtatctggttgctaattcgagtgctattagtctgtggtttcgttggtttgtaacccctctgctttggttatgctggattgtatattatccttaaagaaatgaaagattaaattatcaatgcgtaaaaaaaaaaaaaaaaaaaaactcgagactagttctctggt

SEQ ID NO: 939 - DNA, 1083 bp, Glycine max
cattgctggcttgtgctctgctcgtgcctctagggttatcatttctccatttccattttctctctctcacttttcaagaatcgtaagctatgggaaagtcttacccaactgtgagtgctgattaccagaaggccgttgagaaggcgaagaagaagctcagaggcttcatcgctggagaagatatgcgctcctctaatggctccgtttggcatggcactctgctggaacctttgacaagggcacgaagaccggtggatgccttcggaaccatcaagcacccctgccgaactggctcccaacgctaacaaacggtcttgacattcgctgttaggctttttggagccactcaaggcggagttccctattttgagctacgccgattttctaccagttggctggcattgttgccgttgaggtcacgggtggacctgaagttccattccaccctggaagagaggacaagcctgagccaccatcagagggtcgcttgcccgatgccactaagggttctgaccatttgagagatgtgtttggcaaagctatggggcttactgaccaagatatcgttgctctatctgggggtcacactattggagctgcacacaaggagcgttctggatttgagggtccctggacctctaatcctcttattttcgacaactcataccttcacggagttgttgagtggtgagaaggaaggtctccttcagctaccttctgacaaggctctctttgtctgaccctgtattccgccctctcgttgataaatatgcagcggacgaagatgccttctttgctgaatgcgctgagggctcacaaaagctttccgagcttgggtttgctcgatgcctaagcaacgtttaggggattgttgaagaggcatggtgcccataatatttctctagaaaattgtatggtcatggtttttaatgccaatgtgggttccccagattttagatagcttttgaatgtattttgctggacgtgacgatgattgggaagttgggttgttgtttttatttgtggttgatacttttgttaaataacattgttcagcgataatgatagtgatctttcggacct

SEQ ID NO: 940 - DNA, 1173 bp, Glycine max
cactcgagccgaatcggctcgagcggctcgaggctcgtgcctctagggttatcatatctccatttccatttcctctctctcagtttccaagaatcttaagctactgggaaagtcttacccaaccgtgagcgctcgattaccacgaaggcctttgaaaaagcgaagaaaaagctcagatgcttcatcgctgagaagagaatgcgcttcctctaatgctctcgtttggcatggcactctgctggaacttatcgacgtgagctccgaagaccggggtggtccccttcggaaccataaagcacccctccgaacttgcttcacggcgctaacaaccggtcttgacattgcttgttaggctttttggaagccacttcaaaagcggagttttcctatttttgagcttacgccgattttctacccagttggccttggcgttgtttgccgttgaggtcaccggtggacctgaagttccctgtgcatcctggaagagaggacaaacctgagccaccaccaagagggtcgcttggccgatgccactaagggttctgaccattttgagagatgtgtttggcaaagctatggggcttagtgaccacagatatcgttgctctatctgggggtcacactattacagctgcgcacaaggagcgttctggattcgagggtccctggacctctaatcctcttattttcgacaactcatacttcaaggagttgttgagtggtgagaaaagaaggcctccttcagctaccttctgacaaggcacttttgtctgaccctgtgttccgccatcttgttgagaaatatgcatcggacgaagatgccttcttcgctgattacgctgaggctcaccaaaagctttctgagcttaggtttgcctgaagcctaagcaacgttatagggattgttggagagagcacggtgcccataatatttctctcataaattctatggtcatggtttctaatgcgccacttgtggttccttcaaattttaaaatatcttttgaatttatttttgcttcacaattgtgatgattaatttgagttgggttcgttttaatttgagtctatccttttgttaaataacattgttcagcgattgcgatattattaccctttgtagtatgtgaccatttaccgtaataactagtaatttgtctattattactggac

SEQ ID NO: 941 - DNA, 1233 bp, Glycine max
accacccttccaactttatcttttctctatagctccgtccaaacatgactctccgcaaccaccaagagctcttggttgctcttgcaattctatattttcttgccacctcactcccttcagtttcagctcatggcccatatgcatgggatggggaggccacatataaattcactacttaccaccctggccaaaactacaaaggtttatccaatgtcaaaaactacttccaccatctcggctacatccccaatgcaccacacttcgacgacaacttcgatgacaccctcgtatctgccatcaaaacctaccaaaagaattacaacctcaacgtcaccggcaagttcgacatcaacactcttaaacaaatcatgacaccccggtgtggcgtccccgacataataatcaacacaaacaaaaccacatcgtttggcatgatctcggactataccttcttcaaagacatgccgcggtggcaagctggaaccacacaactcacctacgctttctccccggagccaagacttgatgacactttcaaaagcgcgattgcaagggccttcagcaagtggaccccagtggtgaacatcgcgttccaggagacgacgtcgtatgaaacagccaacattaagattcttttcgcgagtaagaaccacggtgatccgtatccttttgatggtccaggtgggatattgggccatgcattcgctcccactgatgggaggtgccactttgacgccgacgaatattgggtggcgtctggcgatgtcaccaaatcgccggtgacaagtgcgtttgaccttgaatctgtggcagtgcacgagatcgggcacttgctcggattaggccactcgtcggacctaagagccatcatgtatccttctataccacctcgaactaggaaggtgaatctagcgcaagatgatatagacgggattcgaaagctctatggtatcaacccctaattattatagctaggtgttgtttgtactagaactagagttttatttcggtaatttgcattaaaggattttgaaagttatcgaggtgaaattattctaattcaagaacaacaaaaatagcatgtaagatattgtattttagttttctcttaattaagaataaaccagctgatactaggtgatgcatatatgataatgaataaatgtgacaaatttaccttaaaaaaaaaaaaaaaaataatgttttagcatttacattaaaaaaagacagaaa

SEQ ID NO: 942 - DNA, 1301 bp, Glycine max
tctcgagccgcggctcgacgccctcacttcccttctccaacatgccaaacgacagcgttctgagtcttttcttcttcgttaccctcttcacatgccttctctctgctaattcccacgatgaccatattttcctaccgagtcaactccatgacgatgactcagtgagttgcactgctaccgacccaaaccttaactacaagccggtgatcggaatcctgacccaccccggcgacggtgcctctggccggctcagcaacgccaccggggtttcttacatcgccgcctcctacgttaaattcgtggagtccggtggtgctagagttattccccttatctacaatgagtcacctgagaaccttaacaagaagctcgatttggtcaatggagtgctcttcactggtgggtgggctgtttctggtccatatttggatactcttggaaacatttttaagaaagctttagagaaaaatgatgctggagaccatttcccagtaattgccttcaacttaggtggaaacctcgtaataaggatcgtaagcgagcaaactgatattcttgaaccatttactgcgtcgagtttgccaagttctcttgtattgtggaaggaagcaaatgctaaaggaagtctatttcaaagatttccttcagatttgttgacacagctgaagacagattgtctcgtcctgcacaatcatcgttatgccatatccccacgcaagcttcaatataataccaagttatctgacttttttgagattctggcaacatctgaggatagagatggaaagactttcgtttccacagcacgtggtaggaaatatcccgtgactgtcaacctatggcaaccagagaaaaatgcttttgaatgggctacatctttgaaagcccctcacacagaggatgcaattcgggttactcagtccacagcaaactttttcataagtgaagctaggaaatccacaaacacacctgatgctcaaaaagtgcgagataatctcatctacaattacaaacctacttttggtggaacggctgggaaaggatatgatcaagtgtatctctttgaataattctatctgtaggaggtgtccttgaatttgattttatgcacaataaattatgaactggggatgtagtttgaagaaataaaaatttgtgcacagtgatgtttgtaagatgcttaatttcagggcaatgctctgcttatcaatgtgttatatcttgatattgcaacaaccttggtgtattcttcattttgctataattctattaattgcacggataatggccgtgatacatgt

SEQ ID NO: 943 - DNA, 277 bp, Glycine max
cggctcgagggaaaggatatgatcaagtgtatctctttgaataattctatcccacccgttccaccaaaagtaggtttgcacttgtagatgagattatctcgcactttttgagcatcaggtgtgtttgtggatttcccagcttcacttacaaacctacttttggtggaacggctgggaaaggatatgatcaagtgtatctctttgaataattctatctgtaggaggtgtccttgaatttgattttatgcacaataaattatgaactggggatgtagtt

SEQ ID NO: 944 - DNA, 482 bp, Glycine max
gttctcttatattgtggtttgaagcaaatgctaaaggaagtctatttcaaaggtaaataatctgcattctgcattatagtattatacattttagttatctgaagatcgatgctttgaagggacattttatgaataaaaaagtttctatcgcttcctatttcacaaagttggtgtgaacttatattgttattttactgcatatctttcattttagaggtcatgaactcatgatgttcatttcaaaaagatttacgatatttttatactagatttgagatatttgtgtacctaaagtcttaacaatccttgcattaacatttctttttcttttttttgtttctttaatagatttccttcagatttgttgacacagctgaagacagattgtctcgtcctgcacaatcatcgttatgccatatccccacgcaagcttcaatataataccaagttatctgacttttttgagattctggcaacatctg

SEQ ID NO: 945 - DNA, 1362 bp, Glycine max
cggcacgagctctctctctctctctctctcaattcttcaggcaccttcaaaatttctctctagagtcacgatgcttgcgacgctcaaatccgaagagtccagtggtcagttacagctcgtcgaacgagaagacatagacgacgatgaagatctcttcgaagccatcgacaaactgattgctcaaggcatcaatgccggagatgtgaagaagcttcaggacgcagggatatatacttgcaatggcttgatgatgcacacgaagaagaatttgactggaatcaaaggtctatccgaggctaaggttgataagatctgcgaggctgctgagaagcttgtgaatttcggttatattaccggaagtgatgctctgctcaaaagaaagtcagtgatccgaattactactggaagtcaagcgcttgatgaattgctaggaggcggggtcgagacatcggcaattacagaggcgtttggagaattccgatctgggaaaacacagctagctcacactctctgtgtttccactcagctgccaactaatatgcgtggaggcaacggaaaagttgcttacattgacacagaaggaactttccgaccagaccgaattgttcccatagctgagagatttggcatggatcctggggctgtactggacaatattatatatgctcgtgcctacacttatgagcatcagtacaacctcctccttggtttggctgcaaaaatgtccgaagaaccattcagacttctgattgtggattcggtgattgctctgtttcgagtggacttctcaggaagaggagagcttgcagatcgccagcaaaaattggcacagatgctttctcgattaataaagatagctgaggaatttaatgttgccgtctatatgacaaatcaggtcatatctgatccaggaggtggcgtgtttgtaactgatccaaagaaaccagcaggagggcatgtgctagcccatgcagccacggtaaggttgatgttcagaaaagggaaaggggaacagcgcatttgcaaagtgtttgacgcccccaacctgccagaggctgaagcagtgttccagataacagcagggggaattgcagacgctaaggactaaagagtcgcttctgagttgtgacttctgggccgaatccacaaaagaaacagtagtggctgaatatttctggtaaccttaatcttccagatatttgctacagtttgtatgaaaagtgttgttccttgaacacttttactattttccagtgatatgatatgagttccccttagttatacttatacacgtttcctttattgtaagttgcgatacattttgcaatttgaacgtttcacaaacattgaaaatcttgctgc

SEQ ID NO: 946 - DNA, 1390 bp, Glycine max
gatccaactcaggaagggaaggcgagacagctcaatcctacacatgacatctcaatctcaatctctttcgtagtgttttttgtttttaaatacataaaaaaccattcattctgtttcgttccactccctaatagctgctacagttacagcataacttctattctatatttctttctactcgcaagcaaatcagaacaagagaagagaatggcaggagcagaggggctaaacagagaacagtacgtgtaccttgcgaagctgtcggagcaggcggagcggtacgaagagatggtggagttcatgcagaaggtggtggtggggtggacgccggcgtcggagctcacggtggaggagcgcaacctcctctcggtggcctacaagaacgtgatcgggtctctgcgtgccgcgtggcgcatcgtgtcctccatcgaacagaaggaggaagggcgcaagaacgacgaccacgtgtccctcgtgaagcactacagatccaaggtcgagaacgagctcacgcaggtctgcgccagcatcctcaacctcctcgactccaacctcgtaccctccgtcttcgccagcgagtccaaggtcttctacttgaagatgaagggcgattaccaccgctatctcgcagagtttaaggttggggatgagagaaaaaccgctgctgaggataccatgttgtcttacaaggctgcccaggacattgcttctggggatcttccccctactcaccccatcagattgggtctcgctctcaacttctccgtcttctactatgaaatcctcaaccagtctgacaaagcgtgtgccatggctaaacaggcttttgaggaagcaattgctgagctggacaccttgggagaagaatcctacaaagacagcacgctcataatgcagcttttaagagacaacctcaccctttggacttctgatgtccaggaccagctagatgagccctgatatccattataggttgatgggtggtattcttcctctcatggaggtgggctttgaatgtcatttatttgtgctaattaagaatcgccctagtttataaaatgattggcaatctgtgatataatgttgtatgaacagagaccaggcttcttttttttgtgtgtcatatggtattggaaaggatactgtataatgggatatccaattaattattatctgttgcaatctttcttgtgttacttccacagtcccacaacacatagggtcctaactcataagtgcccccattttaaaattttgggtcagcatctggtggtcctataggaactagaaatgtcattgtagcaacattattctcttggaaagaacatttttcattacagctataatggcgcataaaaaaatataataaaaagaaatatgaatacaaggg

SEQ ID NO: 947 - DNA, 827 bp, Glycine max
ctcttgcgatgctgtaccggtgcggagtacccaggcgtgcgtcctcttactctagactcttccttttctcttctctgtctaaggggtgccctgagatcacattgaacaatggtgaaggctgtggccgttcttggcagcagtgagggtgtcactggaactattcacttcgttcaggagggaagtggtccaaccaccgtaactggatctcttgctggtcttaagcctggtctccatggtttccatgtccatgccttgggggacactaccaatggttgcctctcaactggatcacatttcaatcctaataacaaggagcatggtgcccctgaggatgagaatcgtcatgctggtgatcttgggaatgttaatgtcggtgatgatggtactgtcagcttcactattactgacagccagattcctctcactggaccaaacaacatcataggaagggcggttgttgtccatgctgatcctgatgatcttgggaaaggtggtcatgagcttagcaaaactactggaaatgctggtggcagagtagcttgtggtatcattggtctgcaaggataaactaatcacatgaggttggaaccgtgctttagaattgtggaataaagtagcacccatttaaacccgtttggttaggtccggtctgtgtacggctgaattctgtgttttgcttgtatcgtatctgagggttatatgtagacacttgatgcttaatcaaattgttactttgcctgaagtatgtgttagtggttatccttatttcttgtattagtttgtgcttgaaatatgatatgatactcgagaaatgtgagatttttctg

SEQ ID NO: 948 - DNA, 401 bp, Glycine max
tgactatttaaatatgatctaatggtccgtattcaccgttcttatttattataataatatccatgagttcttacctgatactatgtatgtcacgtcacgcgtgagtactccagtcttagatgttttgttttaaatggctgttttgttgttcagatcactttgagcaatggtgaaggctgtggccgttcttggcagcagcgagggtgtcactggaactattctcttcactcaggaggagtggtccaaccaccgaactggatcttgctggtcttaagcctggtctcaggtttcatgtccatgccttggggacactacaatggtgctttaactgatcacatttaatctataacaggacatgtcccctgagatagatcgcatgctgtgatcttggatgtaatgtc

SEQ ID NO: 949 - DNA, 498 bp, Glycine max
ctagactcttctttttctctaagtctaaggggtgccctgagatcactttgagcaatggtgaaggctgtggcagctcttggctgcagcgagggtgtcactggaactattttcttcactcaggagggaaatggtccaaccaccgtaactggatctcttgctggtcttaagcctggtctccatggcttccatgtccatgccttgggggacactaccaatggttgcctgtcaactggagcgcatttcaatcctaataacaacgtgcacggggcccctgcggacgagaatcgtcatgctggtgatcctgggaatgttaatgtcggtgatgatgggacgtctgatctattattttttcttctggtctcctctatttgattcgttaatgtcggcgatgatgggactgtctgatctattattctttcttctggttcatctatttggattagtgactgattccaactaagctggtaaggtcaacaagccacatatttattctgtatc

SEQ ID NO: 950 - DNA, 362 bp, Glycine max
tgggaaaggtggtcatgagcttagcaaaactactggaaatgctggtggcttgagtagcttgtggtatcattggtctgcaaggataagctaatcacatgaagttggaaacgtgctttagatttgtggaataaagtagcacccatttaaacccgtttggttaggtccggtctgtactgctgaattctgtgttttgcttgtattgtatcgacacttgatgcttaatcaaattgttacattgcttgaagtatgtgttggtggttatccttatttcttgtatcaatttgtgcttgaagtatgatgatactcgagaaatgtgagattttcaattggaaaataatgacatggaatggaatacaagtgtc

SEQ ID NO: 951 - DNA, 1324 bp, Glycine max
  unsure (1)..(1324): unsure at all n locations
ggaaaaggaaaaacagagaaaaaggaagggacacatttgacatttcacgaccgcgttcttttctacggagcctcgaccaagaagaatcgcagagagaagagggtcagagtgagaaagagagagagagagagagagaaactgagagaaattcgcaaaccctaatttcggaaagatcggcgatggctgcctccaaggatcgcgagaacttcgtctacatcgccaagctcgccgaacaggccgagcgatacgaagagatggtggaatcaatgaagaacgttgcgaatctcgacgttgaactgactgtggaggagcggaatttgctttctgttgggtacaagaatgtgattggtgctcgcagagcagtcctggaggatcctgtcttccattgagcagaaggaagaaacaaaagggaacgagttgaatgcgaagcggattaaggagtacagacagaaggttgaattggagctatcgaacatctgtaatgatgttatgagagtgattgatgagcaccttatcccttcggctgcagctggtgaatccactgtgttttactataagatgaaaggagattattatcgttatcttgctgaatttaagtcaggcaatgagaagaaggaagctgctgatcagtctatgaaagcatatgagtctgctaccgctgcagcagaggctgatttacctcccacacatcccatccgattgggtctagctttaaatttctctgttttctattatgagatcttgaactcccctgaaagagcctgtcatcttgcgaagcaagcttttgatgaagctatttctgagcttgacaccttgaatgaggagtcatacaaagatagcaccttaatcatgcaacttctcagggacaacctaactttgtggacttctgacatcccagaagatggagaagatgcccagaaagtgaatggcactgccaagcttggtggaggtgaggatgcagagtgagtccgatggatgatggaatcttccataggattcgatgcatgcgtttgggaatgaaacatgagggccgattacttatctgtgtattagctagagatagggattctattgtttcctctttgtttcctgttggattgcccaatacttcccgataggggaaagagatactccatttgtgctatatttatggtatgtttttatttgtgtggtgtctggaaatggcctatttcattcccaatccgtttcctccagtctctgggggatttgattgatgagaattgcttatggtgggtgtatttccttttccaatgaaatgctacaacatttactgcaatgttggagattgattcttcgattnnnn

SEQ ID NO: 952 - DNA, 646 bp, Glycine max
aaacaaaacacacaaaccaattttaaataaccaaaaagaaaccacaagtttaaaaataaaaccgcaacaacatgattggtagttgagtacaacgcggcatgttataattggttgcaagatgttaccgaaggtttaatgcgacacgtggaccccattcactggttggaaatccagtttattctccaccctcacgcacgtaatcatatccctggagtcaagttcaagcatcgataggaccaaaaaagtaaaacagagaaaggggagggacatatttgacatttcacaaccgcgttcttttctacggagcctcgaccaagaagaatcgcagtgagaagaagagggggtcagagtgagaaagagaaagagagaattcgtaaaccctaatttcggaaagatcggcgatgactgcctccaaggatcgcgagaacttcgtctacatcgccaaactcgccgagcaggccgagcgttacgaagagatggtggaatcaatgaagaacgttgcgaatctcgacgttgaactgacggtggaggagcggaatttgctttctgttgggtacaagaatgtgattggtgctcgcagagcgtcctggaggatcctgtcttccattgagcagaacgcataaacaccagggaacgacttgaatgc

SEQ ID NO: 953 - DNA, 453 bp, Glycine max
aaattcatgaggtagagagctggggagagaatggttattacaagatttgcagaggtcgaaatgtgtgtggagtagattccatggtctcaactgtagctgctatatatccatccagccattaaatacaaggatatgcatatgcctgattgtagttgtgtgatatgatactgggctaggggagtttgtataaatatttatgttgtgaaccgtattgtttggtaccggtaaaattatctccatatagggtcaggaaactgctaagatcatgttgtttatgtggtatgtaattctgtatgtatgcttgttagacaaagtgctgttgtccatggttatgttatgcgcacttggcagagtaaatgaattggaaatacttcagtgtaaaattttattgcctcctaatatttgtagtacatgttttgaaatatcagggtaatttgaatggaaaaaaaaaaa

SEQ ID NO: 954 - DNA, 620 bp, Glycine max
cttcctttgcaaggttcatactttcgtttccccttctcatcgaatcgaagcgccgcaccgtgtttcttctctgcctgaataacgcaaagaaaattgaagcatcctaagggttgtttctaagggataccgggttgggagagaagatgaagcaggtggtgggaacggtggtttcaaataagatgcagaaatcagtggtggtggcagtggatagactattctaccacaaattgtacgaccgatatgtcaagcgcacgtctaagtttatggctcatgatgagcacaatcattgtaacatcggtgaccgagttcggctggatccttctaggcctttgagtaagcataaacattgggcagttgctgaaattctcaagaaagcacgtatatatgttccgccctcaatgccagtgccggggagtgtgagctcaagctctgaagcatctgcttcctgatttggctgaaggtattataacatattttggctgtcaatatctacacaagttgtagctgttcgtattgaagtgattctggaaataaagtttagctgaatgagttgtggatagcttgtaaccttattcaagttacttgttttaaggactgttatttaaaaaacaaaatagacc

SEQ ID NO: 955 - DNA, 440 bp, Glycine max
catttccaacctctccaatccattctcccttttgacttccccatatggctcgctactccttcctcttggccctcctcctcctcctcttcgccgccgtgtccagcgccgacgacgacatcctgatccgttaggtggtgccggatgccgtcggcgaagcggcggagaaggaggaggaccacctgctgaacgcggagcaccacttcgcgagcttcaaggcgaagttcgggaagaagtacgcgaccaaggaggagcacgaccgtcgcttcggcgtcttcaagtccaacctccgcagagcgaggctgcacgccaagctcgacccctccgccgtccacggcgtcaccaaattctccgatctcactccggtcgagttccgccgccaattcctgggcttcaagccgctgcgcttgccggcgaacgctcagaaggcacccattctcccc

SEQ ID NO: 956 - DNA, 500 bp, Glycine max
ggagattcttcttatttctccacttgctgccactggggtgattcgtcttcatccttcatcggcattgcgcttcacaaattctcagtctacgacttgggtgttggatttcattaagttgtgataaacatgggaaaagactcaaagccaaaggagtccggaggcaagggaaaggggaaacaggctgcaagtggaagtgatgagaatgcttctaagggaaaaggaaaaggtgggaaaggtggagatgggcttggtacttgcacctatgtcaaagctaggcatatcctatgtgagaaacaaggtaagatcaatgaagcctacaagaagctgcaggatggttggcttggcaatggagacaaggtcccaccagctgagtttgcaaaggtagcacaagagtattcagaatgtccatcaggaaagaagggtggagaccttggatggtttccccgaggaaagatggctgggcccatttcacggtgttgccttcaacacaccctgtggag

SEQ ID NO: 957 - DNA, 1818 bp, Glycine max
cccacgcgtccgtctctaaccactttgcttcagctatggagtttcgtcgccttccattggttttctctctcaatctgatcctgatgactcctacatgctgccatagcctccagaagtttactgggaaatgatgcttccacataccccaatgcccaaagcaatcatagactttctaaactcttgatcaacttcctactttggtatggtgctaaggaaacccaatctacagatcaaatattcctggtatgatgctaagaaaaccaatcaccagtatcaagtgtcctccgatcttttatggggataagaaaacccaatcaacagatgaagttcctcctatcttttatggtgctaagaaaactcaatcaatagatggagttcctcctatcttttatggtgctaagaaaacccaatcaacagatgaagttcctccatacttttatggtgctaagaaaatccaatcaacagatgaagttcctcctatcttttatggtgctaagaaaacccaatcaacaaatcatattccttctttttttctcttatggtgctaagaaaacccaatcaacagatcaaattcctcctttttttttcttatggtgctaagaaaacccaatcaacagatcaagttcctccttttttttatggtgctaagaaaacccaatcaacagatcaagttcctatcttttatggtgctaagaaaactcaatcaacagatcaagttcctatcttttatggtgctaagaaaatccaatcaacagatcaaactcctctttttttatatggtgctaagaaaacccaataccgaagatcaagttcctatttattggtacggtattaagagaagtcaatccgaagatcaacctcctctatagtacggagttaagacaacctatgttgctaaaagaagtctttacacaagaagatgaaacgatccttgattgctaatggtcatggaacatgacattcccaaaagcagaccaagttttctttgaagaaggattaaggcctggcacaaaattggatgctcacttcaagaaaagagaaaatgtaaccccattgttgcctcgccaaattgcacaacatataccgttgtcatcagcaaagataaaagaaatagttgagatgctttttgtgaacccagagccagagaatgttaagattctagaggaaaccattagtatgtgtgaagtgcctgcaataactggagaagaaagatattgtgcaacttcattagagtccatggtagattttgtcacttctaagcttgggaagaatgctcgagttatttctacagatgcagaaaaggaaagtaagtcccaaaaattctcggtgaaagatggagtgaagttgttagcagaagataaggtcattctaccgtctccctacggctcacccatatgttgtgtttatgtgtcatgagatatcaaatactactgcgcattttatgcctttggacggagaagatggaaccagagttaaagctgcagctgtatgccacaaagacacatcagaatgggatccaaaccatgtgtttttacaaatgttcaattcatagcctggagctgctccagtgtgtcacatcttccctgagggccaccttctctggtttgccaaataggttacttaagtctttatttgttagtgtgtccttaaataagtaggcatttccatcaggcattgtgacgtcatatatcagcgtgcagtgtacttctctatggttgaaagtgtgatcgaccgtaatggcatcataatgtagtgattccgttgttcccccgtattacatatgtattaatgtaaccatgctatgcgacttttcttttc

SEQ ID NO: 958 - DNA, 1452 bp, Glycine max
ctcggaagcgtgcattaaatttcccgaaaggctaaaatatccattccacctttctcttcctccgatggctaatctctcactcttgttcttcggtctcctcctattctccgctgccgtctgccaccgtcgaacgacatcgacgatgaacacgaccttctagatccgtcaagtggtgccggatacggaggaccaccacctgctcaacgcggagcgccacttttacgtctttaggacaaaagttcgtcaagacctacgcctacgcacgccggagcacgaccaccagcttccgtatcttcaagaacaacttgctccgcgccaagtcacaccagaaattggatccctccgccgtccacggcgtacaccaggttctccgatctcactccgtctgagtttcgcggccagttcctcggcctgaagccgctccgccttccctccgacgctcagaaggctccgatccttccgaccagcgaccttcctaccgatttcgattggcgcgaccatggagctgttaccggcgtcaagaatcagggctcgtgcggatcgtgttggtcatttagcgccgttggagctttggaaggtgcccattttctttctaccggtgggctcgtgagcctcagtgagcagcaacttgtggattgcgatcatgagtgtgatccggaagagcgtggagcatgtgattcgggttgtaacggtgggttgatgaccactgcattcgatgacacacttcaaggctggtggactaatgcgagaagaggattatccctacactggaagagaccgtggcccctgcaaatttgacaagagcaaaatcgctgcttccgtagcttacttcagttgtgtttccccttgatgaagaacaaattgcagcaaatttggtccagaatggtcctcttgcagttggtatcaatgcagtttttatgcagacatatattggtggcgtctcatgcccatatatctgcggcaagcatttggatcacggggttcttttggtggggtatggttctggtgcttatgctccaattcgttttaaggaaaagccttactggatcataaagaattcatggggggagagctggggagaagagggatattacaagatctgcagaggtcgcaatgtatgtggggtggactcgatggtctcacctgtcgctgctatacatgtttctaacaattaaatataaggatggatgcctaaacatggtaggggcaccagtatagtgtgtatgtaaataatttacatgatgtataatgttatggaggaggaaactgctaagcccatgtttatgcttttatgctgtaattctctatgctagctagtctagccacaaatcattacccacggttatcgatagttattgcaagtaacctgaataaaattaatttgtgttcccacaattaaaaaaaaaaaaaaaagaagagaaaacaaaagaaaaaaaaaaagggggggggccc

SEQ ID NO: 959 - DNA, 1722 bp, Glycine max
cataaaaggttccccaaacagggctaatcccaaaaaaaggccacaaccctctcacacgtgtcgttcacacgagtgccacccacctctctctataaatctttctagaaagttccctcactccctgaacctgatcgatctctttaccagttgccacactacaccgagatacacccctaaacccgtttgcgttgttggtttgcgcaggtttgcgaataaatggcaactaagaggagcgtgggaacgttgacaggagggtgatttgaaggggaagagggtattcgatgacggtcagatctgaacgtgcctttggatgacaaccttagcatcaccgatgacactagagtccgtgctgctgttcccaccatcaagtacttaactggtcatgggagccaaggtgatcctttctagccacttgggacgtcctaaaggtgtaacacctaaatacagtttgaagcctcttgtgccaaggctgtctcaacttcttggaattgaggttacgatggccaatgactctattgggaaggaagtgcagaagtctggttgcacaacttccagaaggtgggtgttttgcttctagagaatgtgaggttctacaaggaggaagacgaagaatgatcctgaattagcaaagaagttggcttctctagctgatctctatgtgaatgatgcatttggcactgcccacagagctcatgcttctacagaaggagttgccaaatacttgaagccctctgttgcaggattcctaatgcagaaggagcttgattatctagttggggctgtgtcaaaccccaagagaccatttgctgctattgtgcggtggatcgaaggtgtcttccaagattggagttattgaatccttgttggagaaagttaatgttctcttgcttggtggaggaatgatctttaccttttacaaggctcagggttattcagttgggtcatctcttgtggaggaagacaagcttagccttgcaactacacttcttgaaaaggccaaggctaaaggggtttctttgttgcttccaactgatgttgtcatagcagacaagtttgctgctgatgctaacagcaagactgtgccggcatcaagcatcccagatgggtggatggggttggatattggtcctgattccatcaagacatttggtgaagcattggatacgactcagaccattatttggaatggaccaatgagtgtttttgagtttgataagtttgccacaggaacagaggctatagccaagaaactggcagagctgagtgggaagggagtgacaaccatcattgaaggaggtgactccgttgccgctgtggagaaggttggacttgcagacaagatgagccacatctccactggtggtggtgccagcttagagcttcttgagggaaagcaactccctggtgtccttgctctttaagaatgcttaagcaaaaatcattcgttcctttgaagtttgtgctttatattattattatggttgggtttcagccaacagtggattaaggtacaatgagagctgcgagctcttgctcctgtagaggcttaatataggataggtttcaaaataagagggttttgtggcatccttggtgttgcattgagctttgatctaattgttcttgaacaatgttcatttcaaaaggagttttactttgttggtcaaaaaaaaaaaaaaaaaaaaaaaaaacagctggccgctctagaggatcctagcttac

SEQ ID NO: 960 - DNA, 1831 bp, Glycine max
gaactcttcctctttttacttcccctatggctcgtcactccttgctctgtagccctacctcctcttcgccgccgtgggccaccgccgcgatggcggtggccgcgtaccgacgccgtctgacatactgatccgtcaggtcggtgccagatgttcggcgaagcgcaagcaggacagacaacctgactgaacgccgagcaccacttcgcgagagcttcaaggcccaagtttcgcccaagaccctacgccaccaaggagggagcacgatgcctctcttcggcgtcttcaagtccaacctccgcagagccaggctgcacgccaagctcgacccctccgccgtccacggcgtcaccaaattctccgatctaactccggccgagttccgccgccagttcctcggcctcaagccgctccgcttcccggcgcacgcccagaaggcgcccatcctcccccaccaagggatctccccaaggatttcgattggcgagacaaaggagccgtcactaacgtcaaggaacaaagggggcgtgtggttcgtgttggtctttcagtacgacgggagcgttggaaggagctcattatctggccactggtgagctcgtgagccttagcgagcaacagcttgtggattgcgatcacgtgtgtgatccagaagaatatggagcgtgtgacttcaggctggaatggtgggttgatgaacaacgcatttgagtacatacttcagtctgggggagtacagaaagaaaaggactatccatacaccgggagagatggcacctgcaaatttgacaaaaccaaagttgcggctactgtatctaattacagtgtggtttcccttgatgaagaacaaattgctgcaaacctagtaaagaatggccctcttgcagttgctatcaatgcagtttttatgcaagacatatgttgggtggcgtctcatgcccatacatctgtgggaagcatttggatcatggggttcttctagttggttatggtgaaggtgcatatgcgtcccatgggttttaagaacaaaccttactggatcattaagaattcatggggcgagagctggggagagaatgatggatatgacgagatctgcagaggtcgaaatgtgtgtcggagtagattccatggtctcaactgtagctgctatatatgcatccagccattaaatacaaagatatgccctgattgtggttgtgatgtgatacttggacttaagggagttgggataaaaatttatggtgggacctttatcatttggttctggtaagattttcttccgtataggatcagaaaactactaagtccatgttggttatgtagggtgtaatttctgaaagtatgtctcacatatacaagtgggaaatccaaggaaatgtgtggtcctaaaaatgggtgcaagataagcaactctctatggagattggcggggtggggttgtttcaaactgcaccaggggaatacctgccactgattatgtctcaggtatcgcataattaaactaatatacgtgccactgtcaatgttggttcttatggatgtgctagtgccatacccaaaaggataccaaaatgcttaagatgcttctgtacctttgattcgtttacctttgagtttgtgcatgtataaaaatttctatggacttaggacttcaaaatgccaaaattgcgggatccctaatttgagtgctcctctgcttagcctgtcctgttctgatagtggaatggatatatctgtttgcaagaaaaaaaaaaaaaaaaaaaaaaaaaaaaaaaaaaaaaaaaaaaaaaagggggggcccccggcataggaccctccccccccgggaatt

SEQ ID NO: 961 - DNA, 1215 bp, Glycine max
acgcccacgcgttatattccattctctctgtgtatttccctacctctcccttcacgatgcagatcttcgtcaagaccctcaccggcaagaccatcacccttgaggtggaaagctctgacaccatcgacaacgtcaaggccaagatccaggacaaggaaggaatccccccggaccagcaacgtctcattttcgccggaaagcaacttgaggacggccgtacccttgctgactacaacattcagaaggagagtactcttcacctcgtcctccgtctccgtggtggcatgcagatcttcgttaagacactcaccggcaagaccataaccctagaggttgaaagctccgacaccatcgataacgtcaaggccaagatccaggacaaggagggtatccccccggaccagcaacgtctcatcttcgccggaaagcagctcgaggacggccgcaccctcgccgactacaacatccagaaggaatcaacccttcacctcgtcctccgtctccgtggtggcatgcagatcttcgttaagaccctcaccggcaagactattaccctagaagtcgaaagctccgacaccatcgacaacgtcaaggctaagattcaggacaaggagggaatccccccagaccagcagaggctgatcttcgccgggaagcagctcgaggacggacgcacccttgctgactacaacatccagaaggagtcaactctccacttggtgttgcgtcttcgtggtggtatgcagattttcgtgaagactcttacgggtaagactattaccctcgaggtggagagctctgacaccattgacaatgtgaaggccaagattcaggacaaggaaggcatcccaccggaccagcagaggctgatttttgctggcaagcagctcgaggatggaaggaccctcgctgactacaacatccagaaggaatcaacccttcaccttgtcctccgtctccgtggggggttttaagctcgttgtgtaatgttggatgtgttcccaaaacatttgaagaactttgatgtttaatgggtctgtaataatgtcccttgaaaataagttcggtttgtgttgaactcaattgtgtcccattaataatagtactctaatatcccacctacgtttgttatgaatgtgtgaaatatgaaatgattaattgtcatatcgtgttcaaaaaaaaaaaaaaaaaaaagggggggccgccgattattga

SEQ ID NO: 962 - DNA, 768 bp, Glycine max
ccaatatattccattctctctgcgcagttccctacctctcccttcaagatgcagatcttcgtcaagaccctcaccggcaagaccataaccctagaggtcgaaagctccgacaccatcgacaacgtcaaggccaagatccaggacaaggagggtatccccccggaccagcaacgtctcatcttcgccggcaagcagctcgaggacggacgtacccttgctgactacaacatccagaaggagtcaactctccacttggtgttgcgtcttcgtggtggtatgcagatcttcgtcaagacccttacgggtaagactattaccctcgaggtggagagctccgacaccattgacaatgtgaaggcgaagatccaggacaaggaaggaatcccaccggaccagcagaggcttatttttgctggcaaacagctagaggatggaaggaccctcgctgactacaacatccagaaggagtcaactctgcacttggtgttgcgtcttcgtggggggttttaagctggagctgatttctgtgtgatgttcgatgttggattttcccaaacattttaagaagaaatgtgatgtgtaatgggtctgtaatgacctttgaaaataagtttggtttgtgttgaactctattgtcccattaatgttactactgtttgttatcaatttgtggagctgatatataattatcaactgtatgctggcatattgtgtttgaattttgttctcaatccagtgaattggcgtatattagtgggttttttattc

SEQ ID NO: 963 - DNA, 325 bp, Glycine max
gaaggaatcaacccttcaccttgtcctccgtctccgtggggggttttatcctcgttgtgtaatgttggatgtgttcccaaaacgggggatgaactttgatgtttaatgggtctgtaataatgtcccttgaaaataatgttcggtttgtgttgaactcaattgtgtcccattaataatagtactctaatatcccacctatagatatattcattatattatttttatattatatatatattattaaaaagtgtctccgttctatatgatccaagctaacgtactcttgtatgcgacttcttaacttttttatagtgacacctaaatt

SEQ ID NO: 964 - DNA, 363 bp, Glycine max
cccacgcgtccgcttgaaaatatgttttgtttgtgttgaactcaattgcgtccgattgataatagtactctaatatcccacctacgtctgttatgaatgtgtgaaatatgaaatgattaattgtcatatcgtgttgatttaatttgttctgaattggctagaggggacttaatgtggattttttattcgatttgagtggacttccatgcttgtcatgaaggaaaaacagggatgagttgtctgaaggatggtgatcatccttcgaattcgatcgtattataggttgaagtcggtcattgatagatgttatgtaaaggcaacaatgaaatttgaacaaactgagatcattgtggtgatcaattg

SEQ ID NO: 965 - DNA, 856 bp, Glycine max
cggctcgagcggctcgaggagaagacgacagatagggggaggggaagacatgggaaaagcttgggtaggcctggtggtattgctgtgtttgattgtcacggccatcgccgaacaatgcggtcgtcaagctggcgggcagacatgtcccaacaacctatgctgcagccagtacggttggtgtggaaacaccgaagaatactgttccccttctaagaactgccagagcaactgctggggaggcggcggcggtggcggtggcggcggcggcggtgaaagtgcttctaatgtccgcgccacatatcattactatgagccagagcaacacgggtgggacttgaacgccgtgagtgcttattgctcaacttgggacgctagcaaaccttactcatggcgcagtaaatatggctggaccgctttctgtggtcccgttggtcctcgtggccgtgattcttgtggaaagtgcttgcgggtgacaaatacaggaacaggagcaaacacaattgtgagaatcgtagatcagtgcagcaacggagggttggatttggacgtgggagtgttcaatcggatagacacagatggaagaggatatcaacaggggcatctcattgttaactatcagtttgtggattgtgggaatgagctcgacctcaccaaacctttactctccatcctcgatgctccctaattaatactagctctctgtaataaacaataaagtgaatgtgtgagttgcagatctagagtctttctattcggaaagacctatatatagaattcatactcacgtgctctgaataattaatattttgttgtctccatcactatttttcagaatctatatatcaaagattgcagg

SEQ ID NO: 966 - DNA, 802 bp, Glycine max
cggctcagcggctcgagcggctcgagcggctcgagcgagttagatagagatcatggaaaaagttggggtaaggctggtggtattgctgtgtttcattgtgacggcggcgatggcccaaaactgcgggcgacaagctggtgggcagacatgtggcaacaacctatgctgcagccaatacggttggtgtgggaacagcgaagatcattgttctccctctaagaactgccaaagcacatgctggggcagtggcggtggcggaggaggcggtgaaagtgcgtctaatgttcgcgccacgtatcataactatttaccagagcaacacgggtgggacttgaacgccgtgagtgcttattgctcaacttgggacgctgccaaaccttactcttggcgcagcaaatatggctggactgctttctgtggccccgttggacctcgcggccgtgatgcttgtggaaaatgcctccgggtgacgaatacagggacgggagcgaacataattgtgagaattgttgatcagtgcagcaacggagggttagatttggacgtgggagtgttcaatcggatagacacagatggaagaggatatcaacaggggcatctcattgttaactatcagtttgtcaactgtggggattaattagttgcaacaatatgcaacttactaaacctaatttactccacatatcctcgatgctagctccttaattaataaacatcgatcgtggtctttacctaagtaatcatcaataagtggggttcgggattttgtatatcttatccttattaatgacattggaccccg

SEQ ID NO: 967 - DNA, 1871 bp, Glycine max
ggcacgaggaactcgtctctacttctccgttccacttaattaattctattcaatccgatggccgaggaagccaaagccaaaggcaacgcggcattctccgccggcgacttcgccgccgcggtccgccacttctcggacgccatcgccctttccccctccaaccacgttctctactccaaccgatccgccgccacgctccctccagaactacgcggaggccctagccgacgccagaagaccgtcgacctcaagcccgactggcccaaggcctacagccgcctcggcgcagcccacctcggcctccgccgccaccgcgacgcttctccgcctacaaaaccggcctccaactcgaaccccgacaatgccgccctcaaatccggccttgccgatgcccaggccgccgcctcccgccctccccccaccagccccttcgccaccgccttctccggccccgacatgtgggcccgctcaccgccgaccccaccgcacgtccaacctccaggaccccgagttcgtcaagatcatgcaggacatccagaaggaccccaacaagttcaacctgcatttgagtatcagagagtcatgcatgccattggggttttgctcaatgtcaaaattcaaacccctaaccacgacgaaaacgaccacgatgccgatgatgacgtgtccgaggatgaggttgtttcccagcccgaacctgaacacgagcctgaagcggcggtggaagtggcggaggaggaggaggaggaggagaaggagacgagggataggaaagggcaggctcagaaggagaaggaagctggcaatgctgcttacaagaagaaggattttgaaaccgcgattggacattacagcaaggctttggagttggatgatgaggatatttcctaccttactaatcgtgctgcagtttacttggagatgggaaagtttgaggactgcataaaggattgtgaaaaggctgttgagaggggaaaagaactaagatcagattacaagatgatagcaagagctttgacaaggaaaggtactgcattggctaaaatggctaaatgctctaaggattttgaacctgccattgagattttccaaaaagcacttacagagaaccgcaacccagacaccttgaagaaactgaacgaagctgaaaaggctaagaaagaactagagcaacaagaatattttgatccaaaattagctgatgaggcgagagaaaaaggaaatgaattattcaagcagcagaagtatcctgaggctacgaagcattatacagaagctataaaaaggaacccaaaagatgctaaggcttatagtaacagagctgcatgctatacaaaactgggggcaatgcccgaaggcttaaaagatgcagagaaatgcattgagcttgatccaaccttttcaaagggttatactaggaaaggtgcagtgcagttttccatgaaagaatatgacaaagctttggaaacatacagggagggtttgaaacatgatcctaacaatcaggaattgcttgatggcataagaagatgtgtagaacaaattaataaggctagccgtggagattttacacctgaggagttaaaggagagacaggccaaggcaatgcaagacccagagatacaaagcattctgcaagaccctgttatgacacaagtattgactgatttccaggaaaatcccagagctgcagaggaacatgtgaagaatccaatggtgatgaacaagactcaaaacgtgacagtgccgggatgccagatgagatgaatttgatggaaggtggcaatcaagcagagaaacaattgacaattgtatttttcagtgtaactatataatttaaatagattggattagaaaaaaaaaaaaaaaaa

SEQ ID NO: 968 - DNA, 1663 bp, Glycine max
cggctcgagggaacactgccccaaggtcaaacggatatccatccacaagtctcaacattggagcaccccctcatcaaacagatgtatcaggcacttctcatgatcattttctgccttcaccaagtgctggaatgttttatgcggtgcctgaaaattatgtacaccagccttctaattctaattatgacagacaagcattttctgctgctgatgggggttttattgatcttacaatgggaaatggacgagggcctcaaaagcgaaagagccctggaattcctccagtctgtgaaagaggcagtacaagcagatatttcaatgctgcaagtgcagctgatcgtcctacatcttcagaattgtggccagagaagcccaatatggattctctatatatgccttgggaccatgttaatatgacacccacatttagaggtagaggcctttctatacggggcgagggtcctttaaggaatgtgaggagccgttctgcacttgatttggaatccaacctggctaggacccatttatcaaatactcatccacacaactcatactctactggtctaccaattgaccattctaacatggtcgatctttcaactcaaacttctggcactttgaccagggattggagcccaatgagtatatgtcctcctcatggaagggtgtcatcatcagatgcaaatgcttttaatcacgaggcaagtcatttccttattggaagcagttctagtaatgctcctgtagatgttggaggttttcataatgaatttggaactagtagaaatcctactgctcctcaaagttttcataataatctgactcaaactgcaagaggagttcacagtaactactctcaaagatccactccaacttttagggcttcttctagcttacgtttgggacgtgtggcaccttctgatgatggattgcatatggtgtccgaaagttactcttctagacagccaaggccattgaccaccgttggctggcagaacaataatagaaatggaaggtcaagaatacctagtgacagatatcggtcattggatgatgagggtttcatgattgttgatcgcacttcactgtatggacctaggaatatgcttgatcgacatagagacatgaggatggacatagacaacatgagttatgaggaactacttgcacttggagagagaataggccatgtgagcacaggattgtctgaggatttgatttccaagtatttgacagaaacaatatactgttcatctgagcaaagtcaagaagaagaagcttgtgcaatctgcctggaagaatacaagaacatggacgatgtcgggacgctgaaagcttgtggacatgattaccatgtgggttgcattaggaagtggttgtctatgaagaaagtatgtcctatatgcaaagcttctgctttgcctgaggataagaagggcaaataaacaatttattcattatactttagtttaacgtatatcatcattctgtacatatatttggatattccttgaagtggagaaaacagacttccatttggatatgttgttgtaatagctaatgctatactctatctatatgtctatgaattcgttctctttggcttcactcttaatttcgtgaagccttgaaattaaattatagtacttcgatggttgctcgc

SEQ ID NO: 969 - DNA, 2574 bp, Glycine max
  unsure (1)..(2574): unsure at all n locations
aagagctangacggcgcatgcaccccgtccgtaggttcggaattcggttcgagcaataacaatattattctcctcattccttcatttttaaacctagctccatctccctccactcaccataacatggcatcagaagcaaatgctgccaacaccaacttctgtgtaaatgttagcaacaatggctacattagtgctaatgaccccttgaactggggtgcggcggcggaggctatggctgggagccacctcgacgaggtcaagcgcatgctagaggagtaccggaggcccgtcgtcaagctcggtggagagaccctgaccatctcgcaggtcgcggcgatcgcggcccacgaccagggggtgaaggtggagctggcggagtcctccagggccggtgttaaggccagcagtgactgggtgatggagagcatgaacaagggcactgacagctacggcgtcaccaccgggttcggtgctacctcccaccggagaaccaaacagggcggtgccttgcagaaggagctaattaggtttttgaatgctggaatatttggcaatggtacagagtccaattgcaccctaccccacacagcaaccagagcagctatgctagtgagaatcaacacactcctccaaggctactcaggaatcaggtttgaacttttggaggcaatcacaaagcttctgaacaacaacattaccccatgtttgccacttaggggaacaatcacagcatctggtgatcttgttcctttgtcctacattgctggtttgctaactggtagaccaaactccaaggctgttggaccctctggtgagattctgaatgccaaagaagcctttgaattggccaacatcggtgctgagttctttgagttgcaacctaaggaaggccttgcccttgtgaatggcactgctgttggttctggcttggcctcaattgttctatttgaagccaacatcattgctgtcttgtctgaagttatttcagcaatttttgctgaagtgatgcaagggaagcctgaattcactgaccatttgactcataaactaaagcaccaccctggtcagattgaagctgctgctattatggaacacattttggaaggaagctcttacgtgaaagctgctaagaagttgcatgagattgatcctttacaaaagcctaaacaggaccgttatgctcttaggacttcaccacaatggcttggtcctctaattgaagtgattagattctctaccaagtcaattgagagggagattaactcagtcaatgacaaccctttgattgatgtgtcaaggaacaaggcacttcatggtggtaacttccaaggaactcctattggagtctccatggataatacacgtttggctcttgcttcaattggtaaactcatgtttgctcaattctctgagcttgtcaatgattattacaacaatggtttgccttcaaatctcactgccagcagaaaccccagcttggattatggattcaagggagctgaaattgccatggcatcttattgttctgaacttcaatatttggcgaatccggtgacaagccacgtgcaaagcgcggagcaacacaaccaagatgtgaactctctggggctgatttcatcaaggaagactcatgaggctattgagatcctcaagctcatgtcctccactttcctggtcgccctttgccaagccattgacttgaggcatttggaggagaatttgaagaacacggtcaagaacgttgtgagtcaagttgctaagaggactctcaccacaggtgtcaatggagagcttcacccttcaaggttttgtgagaaggacttgctcaaggttgttgatagggagtacacatttgcatacattgatgacccctgcagtggaacataccctttgatgcaaaagctaaggcaagtgcttgtggactatgcattggccaatggagagaacgagaagaacacaaacacatcaatcttccaaaagattgcaacatttgaggaagagttgaagacccttttgcctaaggaagtggaaggtgcaagagttgcatatgagaatgaccaatgtgcaattccaaacaagatcaaggaatgcaggtcttaccccttgtacaagtttgtgagagaggagttggggacagcattgctaactggtgaaagggttatctcaccgggtgaagagtgtgacaaagtgttcactgctttgtgccaagggaagatcattgatccacttttggaatgccttggggagtggaatggggcacctcttccaatatgttagtttttcttattttctgttttcttgaagagtggtttcttttctgtacacgtgtttgtgttgatattaagcatttggtttgtctatataaggctgtggcaaatcaatccacatacaacaacttcccagttttccttgatgtatgccatgcaaggaacttgtaattcataatgtaatagaattccatttgtttgccgtagctttgcgtgcaaatatcaatacatggccttccatgtgaaggatgttttctcttgaataatacttatttgtttctataaaaacaaaaaaaaaacaaaaaca

SEQ ID NO: 970 - DNA, 592 bp, Glycine max
agaaatccaagcttggactatggtttcaagggagctgaaattgccatggcttcttactgctctgaactccaatatcttgcaaatccagtaactacccatgtccaaagtgctgagcaacacaaccaggatgtcaactctgtgggcttgatctcatctagaaagacaaatgaagccatcgagatccttaagctcatgtcttccacattcttgattgcactttgccaagcaattgacttgaggcatttagaggagaatttgaaaaactcggtcaagaacaccgtgagccaagtttccaaaaggattcttaccacaggtgtcaatggagaactccatccttcaagattttgtgagaaggatctgctaaaagtggttgatagggagtatatattttcctacattgatgacccctgcagtgctacatacccattgatgcaaaaacttaggcaagtgcttgtagatcatgcattggttaatgcagagagtgagaaggatgtgaactcgtccatcttatcaaaagatagcaatctttgaggaagagttgaagaatctcttgccaaaagaggttgaaggtgcaagggctgcttatgagagt

SEQ ID NO: 971 - DNA, 525 bp, Glycine max
cttttctccatttcttcattccttaatttaaaacctccactcattccataaatctctgtttactctcctcgattttaccgcaacatgacacaagaaggaaatggcaacaccaacttctgtatgagtgttaacaacaacggctacattagcgctaatgacccgttgaactggggcgcggcggcggaggcgatggccgggagccacctcgacgaggtcaagcgcatggtggaggagtaccggaggccggtcgtgaagctcggcggcgagaccctgacgatctcgcaggtggcggcgatcgcggcgcacgaccagggggtgaaggtggagctggcggagtcctccagggccggggttaaggccagcagcgactgggtgatggagagcatggacaagggcactgacagctacggcgtcaccactgggttcggtgctacctcccaccggagaaccaaacaaggcggtgccttgcagaaggagctaattaggtttttgaatgctggaatatttggcaatggtacagagtcc

SEQ ID NO: 972 - DNA, 1397 bp, Glycine max
cgttcgcatcggttcaacctctctgattttgtaattgagttcgatcaaatagctcccagtactttaattgatttctgaatatcatcacttaatttgaaggaaagatggtgagcgtagctgagatccgccaggcacaaagggcagaaggcccagcaaccatccttgccattggaactgcaaacccaccaaactgtgttgatcagagcacctatcctgactactacttcagaatcaccaacagtgagcacatgaccgagctcaaagagaaattccagcgcatgtgtgacaagtctatgatcaagaggagatatatgtacctaaacgaagagatcttgaaagagaatccaaacatgtgtgcttacatggcaccttctttggatgctaggcaagacatggtggtggtagaggtaccaaagctagggaaagaggctgcagtaaaggccataaaggagtggggccagccaaagtcaaagattacccacttgatcttctgcaccactagcggtgtggacatgcctggtgctgattaccaactcaccaaacaattgggccttcgcccttatgtgaagaggtacatgatgtaccaacaaggttgctttgcaggtggcacggttcttcgtttggccaaggatttggctgagaacaacaagggtgcacgtgtgcttgttgtctgctctgagatcactgcagtcacattccgtgggccaagtgacactcaccttgatagtcttgtgggccaagcattgtttggagatggagctgctgcagtcattgttggttctgacccaattccacaagttgagaagcctttgtatgagcttgtttggactgcacaaacaattgctccagacagtgaaggtgctattgatggacaccttcgtgaagttggactcacatttcacctcctcaaggatgttcccgggattgtctcaaagaacattgataaggcactttttgaggctttcaacccattgaacatctctgattacaactccatcttttggattgcacaccctggtgggcctgcgattttagaccaagttgagcaaaagttgggtctcaaacctgagaagatgaaggccactagagatgtgcttagtgaatatgggaacatgtcaagtgcttgtgttcttttcatcttggatgagatgaggaggaaatctgctgaaaatggacataaaaccacaggtgaaggacttgaatggggtgtgttgttcggttttggacctggacttacacttttcaaacttgcttggggtttgtaacaacaacaaccaccaaaaaaaaaaaaactcgtttagagtttgtttgtgtacgtttatattaaaataataatacgtgtttggtggccttttagcctaattatcaataacaggcatttgttttagaaaaaaaag

SEQ ID NO: 973 - DNA, 1126 bp, Glycine max
  unsure (1)..(1126): unsure at all n locations
gggaacannaaagctggtagcttctcaccgcggtgtgcggcccgcttcnatgnaannntagtgtgatccnncccgggctgcnaggtaagttcggcatcgaaggcctagccnnaaagtcaaagattacncnncacttgatcttctnngcaccaccagtggtgttgacattgcctgnngtgctgattaccaactgaccaaacaattgggccttcgcccctatgtgaagaggtatatgatgtaccaacaaggttgctttgcaggtggcacggttcttcgtttggccaaggatttggctgagaacaacaagggtgcacgtgtgcttgttgtctgttctgagatcactgcagtcacattccgtggaccaagtgacactcaccttgatagtcttgtgggccaagcattgtttggagatggaggctgctgctgtcattgtgggttctgacccaattcccacaagttgagaagcctttgtatgagcttgtttggactgcacaaacaattgctccagacagtgaaggtgctattgatggacaccttcgtgaagttggactcacatttcacctcctcaaggatgttcccgggattgtctcaaagaacattgataaggcactttttgaggctttcaacccattgaacatctctgattacaactccatcttttggattgcacaccctggtgggcctgcgattttagaccaagttgagcaaaagttgggtctcaaacctgagaagatgaaggccactagagatgtgcttagtgaatatgggaacatgtcaagtgcttgtgttcttttcatcttggatgagatgaggaggaaatctgctgaaaatggacataaaaccacaggtgaaggacttgaatggggtgtgttgttcggttttggacctggacttaccattgaaactgttgttttgcatagtgtggccatctgagatgcctcatatattatttcattattgtgtaccacttttcaaacttgcttggggtttgtaacaacaacaaccaccaaaaaaaaaaaactcgtttagagtttgtttgtgtacgtttatattaaaataataatacgtgtttggtggctttttagcctaattatcaataacaggcatttgtaaaacacgagactag

SEQ ID NO: 974 - DNA, 610 bp, Glycine max
  unsure (1)..(610): unsure at all n locations
tcgattgatagtaagaaattatcgcaaaaacaaaactagaattgtaggtcaaaaacgaaaaccacagcttaattctctctactactgctagctgtgacttgttttgagttcaatcaaatcgcattggtatctgaaatcaggaaagatggttagcgtagctgagatcaggcaggcacaaagggcagaaggcccagcaaccatccttgccattggaactgcaaacccaccaaaccgtgttgatcagagcacctatcctgattactacttcagaatcaccaacagtgaccacatgaccgagctcaaagagaaatttcagcgcatgtgtgacaagtctatgatcaagacgagatatatgtacctaaacgaagagatcttgaaagagaatccaaacatgtgtgcttacatggcaccttctttggatgctaggcaagacatggtggtggtagaggtaccaaagctagggaaagaggctgcagtaaaggccataaaggagtggggccagccaaagtcaaagattacccacttgatcttctgcaccactagcggtgtggacatgcctgttgctgattaccaactcaccaaacaatttggccttcgnccttatgtgaag

SEQ ID NO: 975 - DNA, 356 bp, Glycine max
cttcacgttttcgcccacgcgtccggttcaatgggttgaaagcctctgattacaactccatcttttggattgcacaccctggtgggcctgcgattttagaccaagttgagcaaaaggtgggtctcaaacctgagaagatgaaggccactagagatgtgcttagtgaatatgggaacatgtcaagtgcttgcgttcttttcatcttggatgagatgaggaggaaatctgctgaaaatggacataaaaccacaggtgaaggacttgaatggggtgtgttgttcggttttggacctggacttaccattgaaactgttgttttgcatagcgtggccatctgagatgcctcatatattatt

SEQ ID NO: 976 - DNA, 548 bp, Glycine max
gccatctttttttggggcaaaaccagaaatggtgaccaaaggtggggtggttgcatgggctgatatgggtgacccaaatgcaagcatccccactcctgaaccggtgaagatgaggcctatgtttggaacactaggcaaggctggtggtgctttatccatagcttttgtgagcaaggcagctgtagaccagagagtacatgctctatacggactgaacaagagggtggaagcagtaggcaatgtgaggaagctcactaaactagacatgaaacttaatgactctcttccacaaatcactgtcgacccagataactacactgttacagcagatggcgaggttctcaccagttttgcaaccacctttgttcccctttctcgaaattacttcctcttttaagtactagctcccataaataaagcttaaaaattatctctcttctaaggttttaatgtgtagcactacccttataaattttttagttcccctgctcttgttcttatgaattcagatgcaataaaactaagtgtgttggtttggtaaaaaaaaa

SEQ ID NO: 977 - DNA, 1866 bp, Glycine max
cgtccgaattccggtcgaccacgcgtccgccacgcgtccgccacgcgttcgcccacgcggtggggaagaacgaatcgaaaaaagaaagatcatggcgatggcaaacttggctcgacggaagggttacgccgtcgttttgtcgtcgaggtcgtcgctttgtctgacaaggtggagggggttcgcgtccggatctgacgaaaacgacgtcgtggtcatcggcggcggtcccggcggctacgtggcggccattaaagcggcgcagctgggtctgaaaaccacttgcatcgaaaaacgtggcactctcggcggtacctgcctcaacgtcggatgcatcccttccaaggcacttttgcattcttcccacatgtatcatgaggctaaacatgcatttgccaaccatggggtcaagttttcatctgtcgaggttgatttgccagccatgatggcccaaaaagataaagcagtttctaatcttaccaagggtattgaaggtctattcaagaaaaacaaggtaaactatgtcaaaggttatggcaaattagtttcaccatctgaagtctctgtggacaccactgaaggtggaaatactgttgtgaaaggcaagcatattataattgccactggctcggatgtgaaatctctgcctggcgtcactattgatgaaaagaaagttgtttcatcaacgggggctcttgctttgactgaaatccccaagagactcgtagtcattggggcaggctacattgggctggaaatgggctcagtatggggccgacttggctccgagataacagttgttgagtttgcatcggagattgttccaaccatggatgcggaggtccggaagcagtttcagcgttctcttgagaagcaaggcatgaaattcaagctgaagactaaggtggttggagttgatacttctggggatggtgtgaagctaactcttgaaccagcagctggtggtgatcagactacacttgaagcagatgttgtcctggtatctgctggtaggaccccattcactgccgaacttgggttggacaagataggagttgaaactgacaagattggacggattttggtaaatgaaagatttgccacaaatgtctctggtgtttatgcaattggagatgtaattccaggcccaatgttggcacacaaggcagaagaagatggtgttgcttgtgttgagtacatagctggtaaggttgggtcatgtggattatgacaaagtccctggcgttgtctatacaatgcccgaggttgcatctgttgggaagacagaggagcaggtgaaggaacttggagttgaataccgtgttggcaagttcccattcctggctaatagcagagctaaggcaattgacaatgctgaaggactggtgaagatattggctgaaaaggagacagacaagatattgggagtgcacattatggcgcccaatgcaggagagcttattcatgaagctgcaatagcactacagtatgatgcatctaagtgaggacattgcacgtgtgtgccatgcacatccaacaatgagcgaggctgtgaaagaagccgcaatggccacttatgacaagcccattcacatctaaagagccggttgctactttcttctcttgttttcatttttgtccaagaattttacaatgacttggagatgataccacctctgttaaatttagattcagatttttaaatgcaaattagccccttgtttacttgtttgcataataagaggaatggttgtgttgttcttatccttgttgaataatatatatatctccccttctctctgggacaatattgtaattctgacagggtgaagacaacttaatggaagtgtgggacggttttgattaaac

SEQ ID NO: 978 - DNA, 440 bp, Glycine max
ccggaattcccgggtcgactccacggaaaaacaaaagagtagtggcctttaggtggtgaagaacaagagctcaaatcaaatcgaatcgaaaaaagaaagaaagatcatattcatggcgatggcaagcctggctcgacggaagggttacgccgtcgttttgtcgtcgaggtcgtcgttttgtctgacaagctggaggggattcgcgtccggatctgacgaaaacgacgtcgtcgtcatcggcggcggtcccggcggctacgtggccgccatcaaagccgcgcagctcggtctgaaaaccacttgcatcgaaaagcgtggcactctcggcggtacctgcctcaacgtcggatgcatcccttccaaggcacttctgcattcttcccacatgtatcatgaggctaaacatgcatttgccaaccatggggtcaagttttcattct

SEQ ID NO: 979 - DNA, 2143 bp, Glycine max
gcttccttaattcctcactttttctttcattttctcatgacctcttcttcttcttcttcttaatatataatataaatataaacattcttttgatattgttcctgagttgaacaagttcgtggaattttgcacctttttaggtcataatcctttcaaaattccgtgcttcggcttgacatcgatttctctgcacttcccaaagaattggttgtgcagtccttgttttcagacaccgtctttaagttactgtcgacgtttgagttctataatgcccagtgattcttctgtaatctccaatggacacagcaatggcagtgtcaatccactacctaacctgcaaaggacttaccaagtggtagtggctgccactcaagattggggcatcggtaaggatgggaaattaccctggagattgcctactgatctcaagttttttaaggagatcactatgaaaacatctgagcctgggaagaagaatgccattgtaatgggaaggaaaacatgggagagcatccctcttgagtacaggcctctttctggtcgccttaatgttgttcttactcgctcaggaagttttgatattgcaacagcagagaatgttgttatatgtggaagcatgtcttctgcattggaactgttagctgcttctccttactctctgtcaattgagaaagtttttgttatagggggtggtcagatatttagagaggctctcaatgtgcctggatgtgaagctatccacttaacggaaattcagtcaagcattgagtgtgacacttttatgcctccagttgatttcactatatttcggccatggtactcatcctttcctaaagtggaaaacaacatccgctattctttcaccacttatgtgcgtgtacggagttctgctgcagagtccgcgggtcagaacattgatccacttcttgataataattctgagtccatgaaatttgaggtcaaggatttttcttttcttcctaaaatgatttctgagagacatgaggagtatctgtatcttaagctggttcaggacatcattgctgaaggtacaactaagggtgataggacagggactggtaccttgtcaaaatttggttgccagatgaggttcaatctgcgtggaaactttcctcttctaacaactaagaaagtattttggcgaggggttgttgaagagcttctttggtttatcagtggctcaacaaatgccaaggtgctacaggaaaaaggcattcatatttgggatggcaatgcatccagagaataccttgatggtgttggtttgacagagcgggaggagggtgacttgggacctgtttatgggtttcaatggaggcactttggtgccagatatactgacatgcatcatgactactccggccaagggtttgatcaacttttagatgttattaacaagataaagcgtaatcctgatgatcggcgaatcattctctctgcatggaatccagtggatcttaaattaatggcacttccaccctgccacatgtttgcacagttttatgtagcacacggggagttatcatgtcaaatgtatcagcgatctgctgatatgggcctgggcattccatttaatattgcatcttatgcccttttgacatgcatgattgctcatgtttgtgatctcattcctggtgattttattcatgttattggggatgctcatatttaccgcaatcacgtgaggcctttgcaggagcagctccataaccagccaaagccttttccaactttgaagataaatccaaagaagaaagatatagattcttttgtggctgctgatttcaagctcataggctatgatcctcaccagaagattgatatgaagctgtctgtctaaaatctggggattctcactccttcaggttgtttctgctttttgaaatgaggcacaaccttaggaagattatgttaaatctgtgtacaattaaagaacatatcgtagcacatacttcatcgcataaatactgttacttaagtgggaattctctggctccccctgttatgcctctaaggtgatttagattaacttaatttccttcctttccaagggacacgctctattgtacttttgagggatctgaaactcgatgtttaaaataaaaccggtgtttttatgtgg

SEQ ID NO: 980 - DNA, 494 bp, Glycine max
aaaaccttttccaactttggagataaatccaaaaaagaaagatatagattcttttgtggctgctgatttcaagctcataggctatgatcctcaccagaagattgatatgaagctggctgtctaaaatctggggattctcactccttcgggctgtttctgctttttgaaatgagaaccatggtgagcatggatgctgatgtgctgtgcaagatagctcataatttattatcaacaccttaggggctgtatggcaagctaaatgacaggcacaaccttaggaagattatgttaaatctgtgtacaattaaaagaacatatcgtaggacttaattcatcgcattcatactgttagtgggaattctttggctccacctgatatgcctctaaggtgatttagattgacttttgagggttctgaaactcgatgttcaagataagcggtctttttaagtgggccatttctattttgtttatttgataaaaaaaaacaaaaa

SEQ ID NO: 981 - DNA, 424 bp, Glycine max
ctctgcgaaaaaaaaatccatagcggtttttctcactctcagcagctactttattcctcacttttttctttcattttcttatgacctcttctccttcttattataattataatataaatataaacattctttctgtttgtactttgataatgatcctgagttgaaaaagttcgtggaactttgcaccttgttaggtcatattcctttcaaaattacgcgcttcggcttgacatcgattcctttgcacttccaaaagaattggttgtgcagtccttgttttcagacaccatctttaagtttctgtcgacgtttgagttctataatggctggtgattcttctgtaatgtccaatggatacagcacgggcagtgtcaatccactaactaacctgcgaaggacttacccagggttagtggctgccact

SEQ ID NO: 982 - DNA, 683 bp, Glycine max
tcactatagctataactatgacatgcactccacccttacctcagcattgcattcgtgcaaaactcacaacacatctaaacaaaaaatcaagaacaatggcttatgctaggcttgctcctatggctgtcttcttgcttgccacttccaccataatgttcccaacgaagatagaagcagcagattgtaatggtgcatgttcacctttcgagatgccaccgtgccgctcacgtgattgtcgttgtgtccctataggactagttgctggtttctgcatacatccaactggactttcatctgttgcgaagatgatcgacgaacatcccaacttatgtcaatctgatgatgaatgcatgaagaaaggaagtggcaatttttgcgctcgttaccctaataattatatcgattatggatggtgttttgattctgattctgaagcactgaaaggcttcttggccatgcctagggcaaccaccaagtaatatggtgggtatgccaaagtgggcatgcttgatgcatcttctactacttaaaaataaaagcttatgatgcatctactgctttaaacaaaagagtgctccactacgcaacttttgtttccaacttatagttggttacgttttatgtaaactcaacccatgtatgttttggagcattccagttaataaaaaatgtttctataaaaa

SEQ ID NO: 983 - DNA, 2156 bp, Glycine max
tggagctctagtaactcagaggtggttgcttcaaacaaaaccacgttagaagaggttttggacattgagaacaacatggctcatcagtgggtgctcaatgctccagagccaccttccatgctgcgtcaggtggtggacaacgtcaaggaaaccctcttaccgcatccaaatccaaacacattctcttatctcaggaaccaacccttttccaaacgtgcctttgccttgttgcaaaatttgtttcccattcttgcttcactccaaaactacaatgcccaaaagctcaagtgcgatttaatggccggtctaacccttgcaatcttcgctattccccagtgtatgggaaatgcgactttggcgcggctaagtcctgaatatggcctatatacaggaattgtcccacctcttatttatgccatgctggcgagttcaagggagatagtgatcggacctggatccgtggattcactgctactttcctcaatgattcaaacattgaaagttcctattcatgattctagtacttacatccaacttgttttcactgtgactttttttgcgggcatttttcaagttgctttcgggctctttaggtttggttttctggtggaacatctttcacaagccacgatcgtggggttcttggcagcagctgccgtgggcattggactacaacaactgaaaggattatttgggatcgataattttaacaataaaactgatttgttttccgtggtgaaatctctttggacatcgttcaaaaaccaatcagcatggcatccctacaatttaattattggattctcatttctctgtttcatcctatttaccagattcttggggaaaaggaacaagaaactgatgtggttgtcacacgttgctcctctcctttctgttattggatcatctgctattgcatacaaaataaactttaatgagcttcaagtgaaggactacaaagttgcagtcttgggaccaattaaaggaggcagcttgaatccaagttcactccatcagttaacatttgatagccaagttgtgggtcatttgatcagaatagggttgacgattgctattatttcactcacgggatccattgctgttggccgatcatttgcatctctaaaaggacacagtattgatcccaatagagaagtggtatcattgggcataatgaacattgttggatccttaacttcttgctatattgcatcagggtctttgtcacgtactgctgtgaactataatgctggatctgaaaccatggtctccatcatagtgatggcacttacggtgctcatgtcacttaaatttttgacggggcttttatatttcactccgaaagcaatccttgcagcaataattctctcggccgtaccgggactgattgaccttaacaaagcacgtgaaatttggaaggttgataaaatggatttccttgcttgcactggagcctttttgggagtcttgtttgcatctgtggaaataggccttgcaattgggtgcagatcgcgatatcatttgcgaagataattataacctctattcaacctgctatagcggttattggaaggcttccaggaacggctgcattcggcgatgttgaacaatatccaatggctgtcaacattcctggggttttgatagtctctttaaaatcttcttggctttgttttgcaaatgcaaatcttgtagaggaaaggattgagagatgggtgaacaatgcaaaagctaaggatggcaaaggaggagaaaacaccttcatacacgtcattattgatgcctcaagtcttacaaatattgacactgtgggaattgcttctctggtggagctcaacaaaaatttgatttccagtggagtaaagttacgtatcgctaaccctaggtggcatgtaattcacaagctaagattagctaacttcgtgagcaaaattggaggaagggttttcctttctgtaggagaagcagtagatgcatgtgttggcactaaaatggttgctgtataacaaacaacaattgcctttctatggattaattgttttttttttgtatttggagcaaattgtcaaacatttgttagttattaattttatcacaagtatttaaaaatttaataatattaactgacaaatattggctattcatttttaataaaa

SEQ ID NO: 984 - DNA, 375 bp, Glycine max
gatccaaagcttcttcagttattcatctgcttactaaaatttcttccattcttagctttgttcaatcaaagttttttaagatggcccagagaaatgttactgctaattcttcttttgaaaggactagcttgccttccctagatcaaaagttggccatggccaagcgctgctctcatgagggtgtgatggcaggagcaaaagcagctgttgttgctactattgctactgccataccaactctggctagtgtaaggatgcttccttgggcaagagccaatctcaatcactctgctcaagctctcataatttccacagtggcgggagcagcatatttcatagtagctgacaagactgtcttggcaactgctagaaaga

SEQ ID NO: 985 - DNA, 1782 bp, Glycine max
tgccgaattccgctcgagctcgacccggtttccttcatcttcttcttcttcttctatctctctacaacacacttttttaagtgattcgttcgcagaaacatggcttcttcgtttctatccgcagcttcgcacgctgtctcaccctcttgttctctgtccaccacgcacaagggaaagcccatgcttggaggcaacactttgagatttcacaaaggacccaattccttctctagttcaaggtctagaggtcggatctctatggctgttgcagttaatgtatctcggtttgaaggcatacctatggctcctcctgatccaattctcggagtttccgaggcgtttaaggcagacaatagtgatgtcaagctcaatcttggagttggggcatacagaacagaagaactacagccatatgtgcttaatgttgttaagaaggcagagaatcttatgctggagagaggggataacaaagagtatctcccaattgagggtttggcagcatttaataaggcaactgcagagttgttactcggagcagacaacccagcaatcaaacagcaaagagttgccactgtccaaggtctttctggaactggttctctgcgactaggtgcagctctgatagagcgatattttcctggggcaaaagttttgatatcagctcctacctggggtaatcacaagaatattttcaatgatgctagtgtcccatggtctgagtaccgatattatgatcccaagacagttgggttggattttgagggcatgattgaagatataaagtcagctccggaaggatcttttatcttacttcatggatgtgctcataatcctactggtattgatccaacacctgaacagtgggaaaaaatagctgatttaattgaagaaaagaaccacattcccttttttgatgttgcttaccaggggtttgctagtggaagccttgatgaagatgcagcttctgtgagactgtttgtggcacgtggcatcgaggttcttgtagctcaatcttacagtaaaaatctcggtctctatgctgaaaggattggagcaatcaatgtgatttcatcgtcaccagaatctgcagcaagggaaacgagccaactgaaaaggattgcccgaccaatgtactctaatccaccggtacacggggctaggatagttgccgatgttgttggaaacccagttctctttaatgaatggaaagcagagatggaaatgatggctggaaggataaagaatgttagacagcagctatatgatagtattacttcaaaagacaaaagtggaaaggattggtcattcatacttaagcagataggcatgttctcattcactggcttgaacaagaaccagagtgacaacatgacaaacaagtggcacgtatacatgacaaaggatggaaggatttccctggcaggattgtcgttggctaaatgcgaataccttgcggatgctattattgattcatatcataatgtcagctgaaactcaattagatatttttggtgagtgttatacccaatcggagcgattggcatacatgaaaataatttagaataatttatgtatgcattatgtgtgtacatatgtaccctcaaagtaccctaggaaattttttttaactttgaaacaagttgactcaaagtattgatgcgtaatgagtcaggttctcagacttaaagctagttgaatcgaagtactgatgcatagtgaggatgtttatcatttcatatgggtgagattggataaatcatggtaacaatagtttcgttaaaa

SEQ ID NO: 986 - DNA, 484 bp, Glycine max
gactactacttgatcacatcgtattctctacgctattccgattaatcaatcatagatagatccattattcatagttaaacataataactgttgtgttacatctcgtgaattgttacaactgcttaaccattttctattgcagatggcttcgtcggttctctccgcagcttcgcactctgtctcaccctcatgttctctgtccaccacgcacaagggaaagcccatgattagagacaacactttgggattccacagaggacccaattccttctctagttcaaggtctagaggtcggatctctatggctgttgcagttaacgtttctcggtttgaaggcatacctatggctcctcctgatccaattctcggagtttccgaggcgtttaaggcagacaatagtgatgtcaagctcaatcttggagttggggcatacagaacagaagaactacagccatatgtgcttaatgttgttaagaaggcagag

SEQ ID NO: 987 - DNA, 272 bp, Glycine max
atcgtattctctacgctattcctattaaatgaatcatagtcatagatagatccattattcatagtttaaattaggaaccttttgtgctctgttctgttctgttacatctcgtgaatcgtttacaacttcttaaccgttttctgttgcagatggcttcttcgtttctatccgcagcttcgcacgctgtctcaccctcttgttctctgtccaccacgcacaagggaaagcccatgcttggaggcaacactttgagatttcacaaaggacccaat

SEQ ID NO: 988 - DNA, 1945 bp, Glycine max
ccgtaacatgatgctcacaaatcacatgcattaatgtgacacggaactaacttgtcgtacataatatatatatatgttccggaacaaaaataaccttatatatcaaattaattccatctttactattgactgaaaatatcatatttattactgtatctgttagctagtactcgtaccgggtaattcctgccgacagaagaaatatgataaatttagctaatttttaatattaaattcatttccttttgattgtacagtatgtatatgatccaattgagtgcgtgggaacatacatgcatagataatacacaaacaagcatacacacaaaaatgatatattattggaaaagcaagctagctagcagaaatgtttaattacaaattgataaaagaagagagtatatataaacctagtgaaacatgggatgataaatgtacataatcatgcatcttattcatgtaacccttcaaacatataattaattgcaaagagctccctcaatgacgcaaatcacatggcatgtttctggtcatctaatcgaacgaccatgatcaaatctcagaaggcagcatgcatgggtcgttggatgtctcccatatcgaacttattattggtggttcggcgaggggacaaactttgtccccacaattgtttctctttctcatgtgaccgaccacttccccttacttgatctgtcattgctcccacttaacctctcttttttttccattcactttctctctctctatatatataaagccctttctattccatattcctaacaattcaattcattcatccttcactactacaccaaattaatagaaattaaagatatatcattccacaacacaaattaaagttagtgagacgtacccttattatggccaaagaaggtcttggacttgaaatcactgagctaaggttgggtctacctgatgcggagcatcaagtaagtgtagtcaataagaaaaatgagaagaagagggcattctcggaaattgatgatggtgttggagatgaaaatagctcctccggcggaggcgaccggaaaatggagacgaataagagtcaagtggtggggtggcctccggtgtgctcttaccggaagaagaacagcatgaacgaaggtgcttcaaagatgtacgtgaaggttagcatggacggtgctcctttcttgcgtaaaattgatttgggtctgcataagggctactcagatttagctttggctttggacaagctctttggttgctatggaatggtggaggcgttgaaaaatgcagacaattctgaacacgttcccatttatgaggacaaagatggtgattggatgcttgttggagatgtcccttgggaaatgtttatggagtcatgcaagaggctgaggattatgaagaaatcagatgcgaagggcttcggtttgcaaccaaaaggatctttaaagggattcatagaaagcgcggcaaagtgaaagattatgttaggcttctaattaatgtcgtgcacattttgcgatcatcaatccaagtttatgtgttatcgttttcttatatttgaggaaaaacatgcatttttagtttgatatatgaattatcagacttttgtttatgtcaagttattaatgaatgacatataggaccctatataaataatagggaaaactcgtcgttttagattaattaatgctttgccataaatgtttgtttatttgcattcagttgcagtacaagttattgtatcagtatactgttttcttactgattccaatttgttaattacttcacctaaactctcctttttttccttttcctttttaaatagttgatatagtaaaccgccatatcaagttattcacgtaaaaagagactaaagtaaagaatttaaataataatgagaaaaatacaagtatgttttattttatttcttataatatatagcattgct

SEQ ID NO: 989 - DNA, 392 bp, Glycine max
gagaaaataaaccaatattattccacaaaacaaattaaatttcgtgagagtttaatcaatttgatacacgtacccttatggccaaagaaggtcttggacttgaaatcaccgagctaaggttgggtctacccgatgcggagatgtaactgtggtcaataagaatgagaagaagagggccttctcgcaaattgatgatgaaaatagctcctccggcggcgaccggaaaatcaagaccaataagagtcaagtggtggggtggcctccggtgtgctcttaccggaagaagaacagcatgaacgaaggttcaaagatgtacgtgaaggttagcatggacggtgctcctttcttgcgcaaaatagctttgggtctccataaggggtactcagatttaa

SEQ ID NO: 990 - DNA, 1784 bp, Glycine max
gaaaggttgaagaattatttagaatgataaaagccatgaaaacagtgagttacttaccctcttgtgtgtgaaatgacgaaaccctaggagaaggagagtaataaagaaagaaatatgtggtgtaagcaagcaacatggagtgtccacttccgcttcttccactgaacaatcataggaagatagcatcaccttgtcgtcagcaagggcagcatgcacagaaaagtccagctcacacattcctccacgtgtcacaaacccatttccctctaaaaagacaggacgcaccatgcgtccttgtattatacgtccccttgtcctgcccctgcccctataccatagaacattagtacccccacacacacccctcctctatctttcactattattgccacacaaatcaattaactgaatgcttagagagagaaagaggagaaggagtagtgataaggtgatcatagagcatattataagagagtgaaaactaatggaggttggcctcaagaaggagaacatggggtttgaggaaactgagttaaggcttggactgcctggaaacggaggcactgaagaagtgctcatcaggaagaggggtttctctgagactgaaactggtcatgaagatgagtctgccaccactgtggatttgatgcttaatctttcttctaaggaggccgcaaccactgctgctgctgctgcagatccaactgataagcacaagactttgcctaaggagaagacccttctgccagcagatcctgctaagcctccagccaagacgcaggtggtgggttggccacctgtgcggtccttccggaagaacatgttggctgtgcaaaagagcgttggagaagagagcgagaagaacagcagccctaatgcaagctttgtcaaagttagcatggatggagcaccttaccttcgcaaagtggacttgaagatgtacaagagttaccgagagctctctgattctttaggcaaaatgttcagctccttcacctttggcaattgtgaatcccaaggaatgaaggatttcatgaatgagagcaagctgaatgatctcttgaacagctctgattatgtcccaacctatgaggacaaggatggtgactggatgcttgtcggtgatgtcccatgggagatgtttgttgaatcatgcaagcgtttacgcatcatgaaaggaaaggaggctattggtcttggtcttgcaccaagagccatggcaaaatgcaagaacaggagctagactagtcgcacaattcatgacctgccccatcctttgtaattgtggtgcccagttggcttagtaactaaagtaaggataagctgcagcagacacggatggacattgcagggtgttgaattatagttaatttgtgtatcattatggtttgttataatatttcaaacaaaacaatgagatgcatgtctaattaagtactaatcatgaacaggaacataatgactctcaatcatgttgttagacttggctttcttatatatctttgcttgttctgtgtgagtgcttgcttaataataattttaagatgtgtttgtctgttgtagttgtagcgacatgttatcatgctttacatttaaaattgtcttgtaaaggttttccttatcattatgagattccttggtattaatcatttttcatataataacaaaattgtatttattacatttacgttagtttttgttgtgatcatcaagagccgaatatatagtactggaaatgttccctgaacatggtggatgggaaacaagaacatgtgcgtgttcat

SEQ ID NO: 991 - DNA, 1059 bp, Glycine max
  unsure (1)..(1059): unsure at all n locations
gtccccacaacgtaataacgtgcctgcccctatacctcaccccacttactattattattgtacaacacaaccaggtccctgaatgctttttagagagagaaagagtaataataataaagtggaagaaaaagaattaggagagtgaaacaagaagaagaagaagaagaagaagaagaagaagaattgagaagatggtgtttgaggaaactgagctgaggctgggactgggactatgtctccctggaaatggaaccacggcaacaactgaagctgctgctgcggaattaggagtgaggaagagagggttctctgagactgaaactgatgaaacagccaccgttgatttgatgcttaacctctcacccaaggaagctgctgctgctgatggtgcagatccacgtgagaagccaaagacttcgccgaaggagaagacccttctgcttcccgatcccgccaagcctcctgccaaggcgcaagtggtgggatggccacccgtgaggtctttccggaagaacatgttcgcagcccaaaagagcagcggcggagaggaaagcgaaaagagcagccctaatgcaagctttgtcaaagttagcatggatggagcaccttacctccgcaaagttgacttgaagatgtacaagagttacccagagctctctgatgccttgggcaaaatgtttagctccttcaccattggaaattgtgaatcccaaggcttcaaggatttcatgaatgagagcaagttgatggatcttctgaacagctccgactatgtcccgacctatgaagacagggatggcgactggatgcttgtcggtgatgtgccatgggagtaatttttttttttctccacttgatgacccgatcgaaattattttggttgcaataatttgaccttgtaatagtttcaatgaaaangaatatggaacacaaaaggcagaaaaaagaagacaggagcttgatatgcacatcacaatgttacttcaaaactagtccttatccaagaaactttgcgtaaaatattatgcatgttctaaggaaatcatgggttatcatctt

SEQ ID NO: 992 - DNA, 469 bp, Glycine max
gctccgactatgtcccgacctatgaagacagggatggcgactggatgcttgtcggtgatgtgccatgggagatgtttgttgaatcatgcaagcgtttacgtatcatgaaaggaaaggaagctattggactggcaccaagagccgtggagaaatgcaagaacaggagctagactagtagttaccagtccaaaatctgctccatcatcattagcggtgcctagttgacttagtaactgaagcaaggttaagctgcagcagacacagagggagagagcagggtgttaaaaaatatagttaagtaaatctgtgtatcattatggtttgttatataatatatatttcaaacaaagttgtgagatgtcgtaagtataaattatgaacacaaacgataatgactctaaattatgttgcaagactttcttatttctttacttgtgtgcttgcataataataagtttattaatttgct

SEQ ID NO: 993 - DNA, 544 bp, Glycine max
accaccacctcctcctccaaagaagaaaccatactactatcactccccaccacctcctcaccctatacctcacccccacccactattattattgtactacaacacaatcaagtccctgaatgctttttagagagagaaagagtcataataaagtgaaagaaaaagaaaaaggagagtagtgaaacaagaagaaaggagaagaagatggtgtttgaggaaactgagctgaggcttggactgagactaggactccctggaaatggagccgcgccaacaactgaagctgctgcggaattaggagtgaggaagagagggttctctgaaactgaaaccgatgaaacaacctccgttgatttgatgcttaacctctctcccaaggaagcttctgctgctgctactactgatggagcagatccacgtgagaatccaaagacttcgccgaaggagaagaatcttcctcttctcgatcccgcaaagcctcctgccaaggcgcaagtggtgggatggccacctgtaaggtctttccggaagaacatgtttgcag

SEQ ID NO: 994 - DNA, 1397 bp, Glycine max
attgttgaaaagtctcagccaatacaagttttgtttgtctatatagacgaactagttatcaagcctgaattgcatatctgccgatcagttcttctttcctcaaccttctttcttcttatatatcgaacatggctaagtatcattcaagtgggaaaagctcttccatgactgctatagccttcctgtttatccttctaatcacttatacaggcacaacagatgcacaatccggggtatgttatggaagacttggcaacaacttaccaacccctcaagaagttgtggccctctacaatcaagccaacattcgcaggatgcgaatctacggtccaagcccagaagtcctcgaagcactaagaggttccaacattgagcttttgctagacattccaaatgacaacctcagaaacctagcatctagccaagacaatgcaaacaaatgggtgcaagacaacatcaaaaactatgccaacaatgtcagattcagatacgtttcagtgggaaatgaagtgaaacccgaacactcatttgcacaatttctagtgcctgcattggaaaacattcagagggccatttctaatgctggccttggaaaccaagtaaaagtttccactgccattgatactggtgccttggcagaatcattcccaccatcaaagggttccttcaaatctgattatagaggagcatatcttgatggtgtcatcagatttctagtgaacaataatgccccattaatggttaatgtgtactcttacttcgcttacactgcaaaccctaaggacattagtcttgactatgcactttttaggtctccttcggtggtagtgcaagatggttcacttggttaccgtaacctctttgatgcttcggttgatgctgtttatgctgcattggagaaagcaggaggagggtcattgaacatagttgtgtctgagagtggatggccttcttctggtggaactgcaacttcacttgataatgcaagaacttacaacacaaacttggttcggaatgtgaagcaaggaacccctaaaaggcctggtgcaccccttgaaacttatgtgtttgccatgtttgatgaaaatcagaagcagccagagtttgaaaaattttgggggctcttttctcctataactaagcagcccaaatactcgattaatttcaattaatttttagcagaagcataatttggtgtgaaataagggccacgagtccaaatgaaacttcaataattgttttagaagaggcaggtatagaactttaatttatctgcattcttgaagtctgcatgtaccatttacgagctaagttaattagctttaaataaaagttctcttattaatgatcaagaagatcttcttttaaaaaaaaaaaaaaaaaaaaaaagggggggc

SEQ ID NO: 995 - DNA, 772 bp, Glycine max
ggctcagtggctgcagtgcttgacccctcagtagtgtgaatgacgccatagaaattggaggggaaaaaaatctaatggcccaatacaagccgcctcatttgtctattaaacgagctagttttggagcctaaattgtcattcccttgtatcacttttgcttccttaacctattttgttatcctcaattttcaatggctcaatcccattctggaaaaacctcttccatgacttcaatactcctcctgtttatgcttcttatcagtaatacaggcacaacaggtgcacaatctggtgtatgctatggaagagttggcaacaatctgccatcgccacaagaagtagtttccctttttaaacagtacggcttccaaaggatgagaatctatgatcgaaaccatgaagtcctccaagctctgagagattccaacattgagttgctgctagatcttcctaacatcgacctccaatatgtagcttccagccaagacaacgcaaacagatgggtgcaagacaatgtcagaaacttttggaatgtcagattcaggtacattactgtgggaaatgaagtgaagccttgggactcatttgcacagtttgtagtgcctgcaatgcaaaacatccaaagagcaatttctaatgctggccttggaaaccaaatcaaagtttccactgccattgagtctggtgcattggcagaatcataccctccatcaagaggctcatttaggtctgattatagaacatcatatcttgatggtgtcatcagattttt

SEQ ID NO: 996 - DNA, 555 bp, Glycine max
ttagtcttgactatgcactctttaggtctccttcggtggtagtgcaagatggttcacttggttaccgtaacctttttgatgctatggttgatgctgtttatgctgcgttggagaaatctggaggatggtcactgaacatagttgtgtctgtgcctgggtggccttcttctggtggaactgcaacttcacttgataatgcaagaacttacaacacaaacttggttcggaatgtgaagcaaggaacaccaaaaaggcctggtagaccccttgaaacttatgtgtttgccatgtttgaagaaaatcagaagcagccagagtatgagaagttttgggggctcttccttccaaataaacagctcaaatactctattaatttgaattagttattagaagtatatatagtttataagaaataagggctatgatttcaagtgaagcttccataattgacctagaagaggcagctatggagctttatctgaactgttggagtcaatatgtacccatttacgagcaaagttagctttaaataaagattttccttatcaatattag

SEQ ID NO: 997 - DNA, 491 bp, Glycine max
  unsure (1)..(491): unsure at all n locations
aatttagctagacttccttgatgcataagaagtagcattatcaattcaccattttagtgccattttgttccatctggtgtatgctacggaagagttggcaacaatctgccatcgccacaagaagtagtgtccctttctaaacagtacggcttccgaaggatgagaatctatgatcgaaaccatcaagtcctccaagctctgagaggttccagcattgagttgctgctagatctccctaacatcgacctccaatgtgtagcttccagccaagacaacgcaaacagatgggtgcaagacaacgtcagaaactttggcaatgtcagatttaggtacttttcaatgagaaacgaagtgaagccttgggactcatttgcacggtttctagtacttgcaatgcaaaatatccaaagacctatntctagtgttggccttggaaaccaaatcaaagtttccactggcattgagactggcgcattggcagaatcataccc

SEQ ID NO: 998 - DNA, 1899 bp, Glycine max
aacatgtccttcattcaattcaaagtctaacgtgaccagcccatagttaccttgagcttgttgttggcggttaatttgttgagagagagcaatcaaaaacattcatggcgtcttccaaggagagagaagaaaacaccaattaaccaccacctgataggctgatacaatacaatctcctttcctttttcgacaacaagaatggctgcgaaatctagttcgagttcgacaacaacaaacgtggtgactctgaaggcggcgtgggttctcccgcagcgcacgcagaacatccgtgaggtgtacgaggttgggcggaagctcgggcagggccaattcgggaccaccttcgagtgcacgcgccgtgcgagtggtgggaagttcgcgtgcaagtcgattccgaagcggaagctgctgtgcaaggaggactacgaggacgtgtggcgggagattcagataatgcaccacttgtcggaacacgccaacgttgtccgcatcgaagggacgtacgaggattccacggccgtgcacctggtcatggagttgtgcgagggtggagagttgtttgacaggatcgtgcagaagggacactacagcgagagacaggcggcgaggttgataaagacgattgttgaggttgttgaggcgtgtcactcgctaggggtcatgcatagggaccttaagcctgagaatttcttgtttgataccattgatgaggatgctaagcttaaggccaccgatttcggcttgtctgttttttacaagcctggtgaatccttttgtgatgttgtcgggagcccatactatgtcgcaccagaggtcttgcgcaagctctatggacctgaatcagatgtttggagtgcaggggttattctgtacatcttattaagtggggtgccaccattttgggccgaatctgaaccggggatcttccgacagattttactaggaaaacttgattttcattctgagccttggcctagcatttcagacagtgccaaggatctaattcggaaaatgcttgatcaaaatccaaaaacaaggcttacagcacatgaagtactccgccacccatggattgttgatgacaacattgcacctgataaacctcttgattctgcagttttatcacgtctgaaacaattctctgccatgaataaattgaaaaagatggcattgcgtgttattgcggagaggctatctgaagaagaaattggtggcctgaaagagttattcaagatgattgacacagacaacagtggaacgataacgtttgatgagttaaaagatggcttgaagcgagtaggatctgaacttatggagtctgaaatcaaggatcttatggatgctgcggatattgataaaagtgggacaattgattatggtgaattcattgctgccactgttcatttaaataagctggagagagaggaaaacctagtgtcagccttctcctattttgacaaagatggcagtggttacataacccttgatgagatacaacaagcttgtaaggactttggtttagatgatatccatattgacgacatgatcaaggaaattgatcaagataacgatgggcaaatagattatggggaatttgctgccatgatgagaaagggcaatggaggaattggaaggcgaactatgagaaaaacactaaatttaagagatgctcttggattagtagacaatgggtccaatcaagttattgagggctactttaagtaataattacttggagacaaaattgaccaaatattaatttagtaaatttctacgttgtttgtagttgcttgaccaaattttgcgtatcttttaaattatagacccacttcagggatctggatgaggtccatgaaaaaatgaaatggtccatacaacgaattgcagctcctttaaaaa

SEQ ID NO: 999 - DNA, 512 bp, Glycine max
gcgtctttcaaggagagagagaaaatatagcacgccgaaaaacacgctcccacttgtaacttagtataacgacctccaacaactgatacatacaatctcctttccttcgtgttggacaacaacaatggcggcgaaatctagttcgagttcgacaacaaacgtggtgactctgaaggcggcgtgggttctcccgcagcgcacgcagaacatccgtgaggtgtacgaggtggggcggaagttggggcagggtcaattcgggactaccttcgagtgcacgcgccgccgtccggggggaaattcgcgtgcaagtcaattcccaagcggaagctgctgtgcaaggaggactacgaggacgtgtggcgggagattcacataatgcaccacttgtcggagcacgcgcacgttgtccgcatcgaagggacgtacgaggattcctcggcggtgcacctcgtcatggagttgtgtgacggtggggagttgtttgacaggatcgtgcagaacggacactacag

SEQ ID NO: 1000 - DNA, 484 bp, Glycine max
agtctgaaatcaaggatcttatggatgctgcagatattgataatagtgggacaatagactatggtgaattcattgctgctacggtccacttaaataagctggagagagaggaaaatttggtgtcagctttctcctattttgataaagatggaagtggttatataaccattgatgagatacaacaggcttgtaaggagttcggtttggatgatgtccatatcgatgaaattgtcaaggaaattgatcaagacgatgatggacagattgattatggggaatttgctgccatgatgagaaagggtaatggaggaattggcaggcgaaccatgaggagcacgctcaatttcagagatactctgggaattaaaggccatgggtccgattaagtcattgtaccttaaataattattacttggtgataaaattttgaacaatgaaaactacaactatttattcatgaatggactcaaaacgtcctttaggg

SEQ ID NO: 1001 - DNA, 504 bp, Glycine max
atatactgatgcagccttagataatatgttgtcactgttgttctctgcccatatttacagcaatcctcagaaagttttgttcctgtttcaatatgcttataacctatagctgtaaatgtttctgctgctttaacaatttccttctggaagtccttccctgaacgtgtggccctatacaacttttccagctggtgatgtctctgcatttcgacctcatcgatgaccacaacatctgaactctcataaccactactactgaactgctttattacagcctgttgctgtttggcaacttgctctctgagcttgctggcttgtttcctcagagcgtccatggcagtttctttcagctctctgttcttagttctcagaatataaaagacagacaaacaaacaaagtatgaaatcagatccaacgaatgttatctgagagaaccccagctcagctcaacgttgtcaacttgaattatgtcactcttttcccctcttttttcttctgtaaat

SEQ ID NO: 1002 - DNA, 584 bp, Glycine max
tagattttgaattgtgtttattataaataagaattaattaataatacatggtgtctgatgtacgtaacagaaggtaaaagtaatagatgcatgcatgtaactttggaatgactgagttcagtcatcaattatcataggtgcggcactcatcagtctctggattgtccttgcagtaattttcgagcgggtcagactgcttctgcttctccctggcgtggctcgccgccgcgctcagctcctccacctcgtcccaggccgccgcgcattccgcgtcaccgccgcctcccgagcacgcctcctccgcgctctttatgctctcctctaccttctccgatatcttctccggcgtcgcccgaacgggccgggtcttcaccaaaccaggccacttttgaatgggcctcgacagagctggaaacctcacggcctgggccttttgtgctgagtctattcccttagcattagcaaataccctgctagggcttgaaagactcacaccaccagctattgttaccattcttttcttctttttttctcctcttttgagtgtttttattgtaatagagctcgagccgattcggctcgag

SEQ ID NO: 1003 - DNA, 2128 bp, Glycine max
agatcaacactttcacgcaatcgatatctcatatatgttttggttaattaatttgatccaacctcatttagcatgttctttagcatccaattgaaaacataagaaaggaattccggagtgcatatataattggctttgattaaacataagttaccatgaaactatgagtggctatggattatgctttaaagaaacattaatacgtacacagctgttcacaatttgatatatagtgaaacgcaatagtctcacgtacgaacgaagcatgcatgctcagtcttcgaaagttttgcactcaatggtctccgggttgtccttgcagtaattctcgagcgggtcggagtccttttccttttgcttgtccctggcgtggctcgccgccgcgctcagctcctccacctcgtcccacgccgccacgcactcgccgctcgtcggatcgccggcgcacgcctcctgcgcgttctttatgctctcctccaccttctccgatatgcgctcaggcgcagcgcgaacgggtcggatcctcatcacgcgacccaacttgatactacccggtcgcactgcttggctgggtggaagtgagaactttacagcatgcgcgttttgcggtgaggctgatgcgttgaagaaaaccctggggcatgaaaggctcacaccagtcatagttgccattctttgattcttgttctcttctacggttatggcgtccgccttgggcacttcttcaattgcggttctgccttcgcgctacttctcttcttcttcttccaagccttccattcacactctctctctaacttcagggcagaactatgggcggaagttttatggaggaattggaatccatggcataaagggaagggctcagctctcggttaccaatgttgccactgaagttaactctgtagaacaggctcagagtattgcttctaaagaaagccagaggccagtatacccattttctgccatagttggacaagatgagatgaagctttgtcttctccttaatgtgattgatcctaagattggaggtgtaatgatcatgggggataggggcacagggaaatctacaacggtcaggtcattggttgatttacttcccgaaatcaaggttgttgctggtgacccttataactcagacccacaagatccagaattcatgggtgttgaagtcagagagcgtgtacttcaaggagaggaactttctgttgtcttgaccaaaattaacatggttgatttgccattgggagctacagaagatagagtgtgtggaacgattgacattgagaaagccctgactgagggtgtcaaggcatttgagcctggactactggctaaagctaataggggaatcttatatgttgatgaagttaatcttttggatgatcacttggtggatgtgttgttggattctgctgcatcaggatggaacacagtagagagagagggaatttctatctcgcatcctgcacggtttatcctaattggctcaggcaaccccgaagaaggggagctccggccgcagctgctagataggtttggaatgcatgctcaagttggaactgttagggatgctgagctcagagtgaagattgtggaggagagaggtcgatttgacaaaaatccaaaggaatttcgagattcttacaaagctgagcaagagaagctccaacaacaaattacctcagcaaggagtgttctttcttctgttcaaattgatcaagatctcaaggtgaaaatctccaaggtgtgtgctgagttgaatgtggatggattaagaggagacatagtaacaaatagagctgcaaaagctctggctgctctgaagggaagagacaacgtaagtgccgaggatattgctactgtcatccctaactgcttgagacaccgtcttagaaaggatcccttggagtctatagactcaggtttacttgtcactgagaaattttatgaggtattcagctgaggatcatagatgtaacacggtttgtattctgtggtattccatgagtataatgctacttcattatttacattttaccttttctgtggagattttcattgtcgttaaacatccggaattctcatgagttccttctacacaggaaattccgagcatttaacgtgc

SEQ ID NO: 1004 - DNA, 625 bp, Glycine max
aaaaatacaaaattatcaagtttttatttttaaaaaatattgtatcaaaagtataaaagttatttaattaaaaaaacttggaagagaaattgtattggtacaaaaatttcgtgataaatgttatgcaataaagaaagatgaaacgagagaatctaccacacgctgatcgccgtgctccgcaaacagatactccgaggtccctctccttaaattgactcattgggcttcacttcctaacaggcatttatgtatgttgagcctactcactcactcctcttgttagcccaattaaacttcacagtggacaaatttaaaattaaaaaatctttgaccattacttcatccaatagaatcacaagatactctgttggcaaaagacgtgaatgtccagaacctccagtgggagttcggaggtagcaaccagtgaggaaaatctctctccctcgcttcagaattccattctgcagtcctgtcaagtcatagaatctgctggacaaaatacaataagcatgcgcgttttgcggtgagcctgatgcgttgaagaaaaccctggggcatgaaaggctcacaccagtcatagttgccattctctgattcttctatgctattgggttctgctaaagtc

SEQ ID NO: 1005 - DNA, 1113 bp, Glycine max
  unsure (1)..(1113): unsure at all n locations
ctcacttttccccccggggcccctttaaaaaattttttttaaaaaacccccgggggnccccccaaaaggggggnccccttttgggggggggccccgggaaaaaaaaaaggggggggcgggcgggcgnaaatttgggttggggcccttggggcccaaaaaggggggncccgcccacttttttaaaaaaaaggggtttntttggggggggggtttaaanaanccccgggnccccaaaggggggngntnntntttttccccccccaaaggtttcccaancccggaanncgggttnttggggttaanaaanancggnnaccggggcccccaaggttgnccccaaaggggcctttaaaaaaaattttaaaaaccccccctttcccaanntttaaaaaaaggggaataagctntgaattggtgttttaaatttnaataanaaattaagggaattnaanattnaataatacatggtgtctgatgtacgtaacagaaggtaaaagtaatagatgcatgcatgtaactttggaatgactgagttcagtcatcaattatcataggtgcggcactcatcggtctccgggttgtcccggcagtaagttcttcgagcggggtcagactgcttttctgctttctcccctggcgtggctttcgcccgccgcgcttccagcttcctcccacctcggtcccagcgccgccgcggcactccggcgtcgccgccgcctcccgagcacgcctcctccgcgctcttgatgctctcctccaccttctccgatatcttctccggcgtggcccaaacgggccgggccttcaccaaaccgggccacttttgaatgggcctgaacagagctgggaagctcatggcctgggccttttgtgctgagtctgatttcatagcaagtactgtgctagggcttgaaagactcacaccactagtagctattgttgccattctttattaactctttcagtattagaatagagaggtttaatttgtgggagggatatataagcaatgccggtgaatatttgtgtacgcatattacttatcttgtcacaaccacttgacgagttttttgttttttagtactagagatattacattttgttagagctcgt

SEQ ID NO: 1006 - DNA, 827 bp, Glycine max
tggatcctctagagcggccgctttttttttaaacagtatatatttttttttgcataataaagaacagatcacgcaaaagtgcagtaatcgcggtgcacggtgcacctgtaaagatctacactttcacgcaatcgatatttgtttccttaatttgatttagcattcacaaaaaaaaaaaaactagggcataattttggtttgattaaacataaggggctatggattatgctttaaagaaacattaacacatagcatgttcacaatttgatatatcatgaaacgcaatagtgttttagttgacagacagacatgtggagatcatcatgcacgtaagaagcgctttctcagtcttcgaaagttttgcactcaatggtctccggattgtccttgcagtaggtctcgagcgggtcggagtccttttccttttgcttgtatttggcgtggctcgccgccgcgctcagctcctccacctcgtcccacgccgccacgcactcgccgctcgtcgggtcgccggcgcacgcctcctgcgcgttctttatgctctcctccaccttctccgaaatgcgctctggagctgcgcgaacgggtcggatcctcatcacccgacccaacctgacactaccaagtcgcatcccttggctgagtggaactgcgaactttacggcgtacgtgttttgcggtgagggtgatgcgttgaagaaaaccctggggcttgaaaggctcacaccagtcatagttgccattctttgattcttgttctctggagggggtttatgatgatcggtgccgaattcactgcaaggcccggggggatcacaactagtatc

SEQ ID NO: 1007 - DNA, 414 bp, Glycine max
taacagtgattgcatacaaggactagtcaaagtaaaggaaaaaagaaacaaaagctaatcttcacgtgtttcaatatgcttataacctatagctgtaaatgtttctgctgctttaacaatttccttctggaagtcttcatccaatagaatcacaagatactctgttggcaaaagacgtgaatgtccagaacctccagtgggagttcggaggtagcaaccagtgaggaaaatctctctccctcgcttcagaattccattctgcagtcctgtcaagtcatagaatctgctggacaaaatacaataagcatgcgcgttttgcggtgagcctgatgcgttgaagaaaaccctggggcatgaaaggctcacaccagtcatagttgccattctctgattcttctctgctcttgggttctc

SEQ ID NO: 1008 - DNA, 501 bp, Glycine max
cagtttttgaattatatattcttactatgaataagaattaattaataataataatacatggtgtctctgatgtaacagaaggtagaataatagatatacattgaaacgttgaaatgcatgagttcagttatcataggtgcggcactcatcggtctccgggttgtccttgcagtagttctcgagcgggtcagattgcttctgcttctccctggcgtggctcgccgccgcgctcagctcctccacctcgtcccacgccgccgcgcactctgcgtcgccgccagctcccgagcacgcctcctccgcgctcttgatgctctcctccaccttctccgatatcttctccggcgtggcccaaacgggccgggccttcaccaaaccgggccacttttgaatgggcctgaacagagctgggaagctcatggcctgggctctctgtgttgagctcgatctcacagtaagtctcgctctatgtctctatatctctctctctctctctctctc

SEQ ID NO: 1009 - DNA, 384 bp, Glycine max
cacgaaagttgaatgaaatccatctatcttcttatccgaagcccgggaggccaataagaagcacgtcagctgctatgaatggtgaataaaacacaaaagaaacaaattgctacatagcacacactccctcttctcttctacggttatggcgtccacgttgggcacttcttcaattgcggttcttccttcgcgctgcatctcttctttttcttccaagccttccattcacacactctctctaacttcagggcagagctatgggcggaaattttatggaggaattggaattcatggcatcaagggaaggtctcagctctcagttgccaatgttgccactgaagttaactctgtagaacaggcccaaagtattgcttctaaagaaag

SEQ ID NO: 1010 - DNA, 506 bp, Glycine max
agaaaaaaactagtgcatatataattggctttgattaaacataagttaccatggtctccgggttgtccttgcagtaattctcgagcgggtcggagtccttttccttttgcttgtccctggcgtggctcgccgccgcgctcagctcctccacctcgtcccacgccgccacgcactcgccgctcgtcggatcgccggcgcacgcctcctgcgcgttctttatgctctcctccaccttctccgatatgcgctcaggcgcagcgcgaacgggtcggatcctcatcactgcgacccgacttgagactacccggtcgcactgcttggctgggtggaagtgagaactttacagcatgcgcgttttgcggtgaggctggtgccgttcacgatatcccaaattgtgaacagctgtgtacgtattaatgtttctttaaagcataatccatagccactcatagtttcatggtaacttatgtttaatcaaagccaattatatatgcactagttttttt

SEQ ID NO: 1011 - DNA, 273 bp, Glycine max
gaaacaaattgctacatagcacacactccctcttctcttctacggttatggcgtccacgttgggcacttcttcaattgcggttcttccttcgcgctgcatctcttctttttcttccaagccttccattcacacactctctctaacttcagggcagagctatgggcggaaattttatggaggaattggaattcatggcatcaagggaaggtctcagctctcagttgccaatgttgccactgaagttaactctgtagaacaggcccagagtattg

SEQ ID NO: 1012 - DNA, 1949 bp, Glycine max
atataagatcacagaattttcgcagtccaagaggacacgcatcccaaaccgttttgatttggaacgtgtcacgctctaaatttgcatggcatattgtctttaactgagtcaatttcgcttaataaaacctctcttcactcctctgctttaccaacccaaccccctgttcctgtgtgtgtgagtgaccgagtgagtttgtttttctcagctgatatatatggcgcttgatcgctccattataagcaaaacgacgtggtacagcgtcgtattatggatgatggtggtgctggtgagagtgcacggtgcagccgcgaggccgaaccggaaggagtgggactcagtcataaagttaccgactgaaccggtggatgctgactcggatgaagtgggaacacgatgggcggttctcgtggctggttcaaacggctacggaaactacaggcatcaagcagatgtgtgccatgcgtaccagttgctgataaaaggtggactaaaagaagagaacatagtggtgtttatgtacgatgacatagctaccaacgagttgaatcctagacatggagtcatcatcaaccaccctgagggagaagatctgtatgctggtgttcctaaggattacaccggtgataatgtgacgacggagaacctctttgctgttattcttggagacaagagtaaattgaagggaggaagtggcaaagtgatcaacagcaaacccgaggacagaatatttatatactactctgatcatggaggtcctggaatacttgggatgccaaacatgccatacctttatgccatggattttattgatgtcttgaagaagaaacatgcatctggaagttacaaggagatggttatatacgtggaagcttgtgaaagtgggagcgtgtttgagggtataatgcctaaggatctgcagatttatgtcacaactgcatccaatgcacaagagaatagttggggaacttattgtcctggaatggatccttctccacctccagagtacatcacttgcctaggggatttgtacagtgttgcttggatggaagatagtgaggctcacaatctaaaaagggaatccgtgaaacaacaatacaaatcggtaaagcaacggacttcaaatttcaacaactatgcgatgggttctcatgtgatgcaatatggtgataccaacatcacagctgaaaagctttatttataccaaggttttgatcctgccactgtgaacttccctccacaaaacggcaggctagaaactaaaatggaagttgttaaccaaagagatgcagaacttttcttcatgtggcaaatgtatcagagatcaaaccatcagtcagaaaataagacagacatcctcaaacaaattgcggagacagtgaagcataggaaacacatagatggtagcgtggaattgattggagttttattgtatggaccaggaaaaggttcttctgttctacaatccatgagggctcctggttcgtcccttgttgatgactggacatgcctaaaatcaatggttcgggtgtttgagactcactgtgggacactgactcagtatggcatgaaacacatgcgagcattcgccaacatttgcaacagtggcgtttctgaggcctccatggaagaggcttgtttggcagcctgtgaaggctacaatgctgggctattccatccatcaaacagaggctacagtgcttgattttgggttttgtacacaaaagctttaaagcccggttgatgatgtaatatttctctattgcattctgcctactggtttctgctgcttgtgtcaaattttctctaaactagagtagcccaatagcatacgtgttatgtgcattggtcatgtatacaagtgtaatactaaaaccttctacataatataagattagttagtttacttgtctctattttcttaaactccgctccttcaaatcaagaag

SEQ ID NO: 1013 - DNA, 505 bp, Glycine max
  unsure (1)..(505): unsure at all n locations
agggactcattcacatactataatactacgatagcgtagactcttcccagttctgttgtgtgagtctgtgagtctttcttagctgatatggcggttgatcgctcccttacgaggtgctgtagcctcgtactgtggtcgtggatgttgctgaggatgatgatggcgcagggtgcagccgcgagggccaaccggaaggagtgggactcggtcataaagttaccggctgaaccggtcgatgctgactcggatcatgaagtgggaacacgatgggcggttcttgtggctggttcaaacggctatggaaactacaggcatcaagcagatgtgtgccatgcgtaccagttgctgataaaaggtgggctaaaagaagagaacatagtggtgtttatgtacgatgacatagctacagacgagttaaatcccagacctggagtcatcatcaaccaccctgagggacaagatgtgtatgctggtgttcctaanggattacaccgtgagaatgtga

SEQ ID NO: 1014 - DNA, 481 bp, Glycine max
  unsure (1)..(481): unsure at all n locations
ttgacgcgtgggttgcgttcctgttgatgatattttccaaatagtaataatttgatggtcaattcataagctagcactagctacatggtctaaacagattagtcattaatcatcttagtatcaaatattaaaggggattacaccggtgataatgtgacgacggagaacctctttgctgttattcttggagacaagagtaaattgaagggaggaagtggcaaagtgatcaacagcaaacccgaggacagaatatttatatactactctgatcatggaggtcctggaatacttgggatgccaaacatgccatacctttatgccatggattttattgatgtcttgaagaagaaacatgcatctggaagttacaaggagacggttatatacgtggaagcttgcgaaagttggagcgtttttaggggantactccataggaacataanatctatgtcacaacagtaactaatgctacaagagaaag

SEQ ID NO: 1015 - DNA, 1606 bp, Glycine max
aatctttttgctcttagtgccttagtacacaatccatgtaaccaccactagtgctaaagaggatccggcaaaaaggtaaactttttgcaacaaccatggttgcaatggcagcagcaacagcatccacccagttgattttctcaaagccttgttccccttcacgtctatgccccttccaactatgtgtctttgacactaaacaagtgctatcaagtggcaggagaaggcatgtggggggttctggagttaggtgcatggctgtgggggaagcagcaaccactgggacaaagaagagaagtggatatgagcttcaaacactcactagctggttgctgaagcaggagcaagctggggtgattgatgcagaactcactattgtgctgtctagcatttccatggcatgcaaacagattgcttctttggtgcaaagagctaacatttccaacctcactggggttcaaggagctgtcaatgttcagggggaagaccagaaaaagcttgatgttgtttcaaatgaggttttctcaaactgcttgaggtcaagtgggaggacagggataatagcatcagaggaggaagatgtgccagtggcagtagaagagagttattctggaaactacattgtggtgtttgacccacttgatgggtcatccaatattgatgctgcagtgtcaactgggtccatttttgggatatacagccccaatgatgagtgtcttgctgacattgatgatgaccccacccttgacacaacagaacaaagatgtattgtgaacgtgtgccaacctggaagcaaccttcttgcagctggttactgcatgtattctagctcaataatctttgttctcacacttggaaatggagtgtttgtgtttacattggacccgatgtatggcgaattcgttttgactcaggaaaacctccagatacctagagcaggcaaaatctatgcattcaatgaaggtaattatcagttgtgggatgagaagctaaagaaatatattgatgatctcaaggacccaggtccaagcggcaagccttattctgcaaggtacattggtagcttggtaggagatttccacaggacactgctatatggtggcatttacgggtaccccagggacaagaaaagcaagaatgggaaactaaggctcctgtatgaatgtgctcctatgagcttcattgtagaacaagctggtggaaaaggtacagatggccttcaagtactccggcttcaagggacagagattcatcaacgtgtgccactgtacattggggaagaggtagagaaggtggaaaagtacttggcttaaacgataagctaatgcaagaggtttacttgtgtatgaaaactatgcccaatcaaaacttccaaagcaatacaatcaggttttaaggaaaaaaaaaaccatggtacccggatcctcccgtccttttgtgcaaagaaaaaagtgatgccaacaatcttcatatcagtttgaacaagaattttgtataactttgaacatgtttcaaattggatataattttgttcattctggcaatatttctgccaagagaagcaatcatgtcagtaaatttcaaacccttctttctcactgatacc

SEQ ID NO: 1016 - DNA, 385 bp, Glycine max
tagcggcaagccttattctgcaaggtacattggtagcttggtagagacttccacaggacactgctatatggtggcatttatgggtaccccagggacaagaaaagtaagaatgggaaactcaggctcctgtatgaatgtgctcctatgagcttcatagtagaacaggctggtggaaaagggtcagatggccaccagagaatacttgacattcaaccaacagagattcatcaacgagtgccactgtacattgggagcgtagaagaggtagagaaggtggaaaagtacttggcttaaatgataagctaatgcaagaggtttacttgtgtatgaaaattatgcccaatcaaaactttccaagcaatacaatcatgtggtcttaagaatt

SEQ ID NO: 1017 - DNA, 273 bp, Glycine max
ctttgctctcagtgccttagaacacaatccatgtaaccaccactagcaccataccacactgccaaaatcaacaaaccaaaaaggtaaactttttgcaacaaccatggttgcaatggcagcagcaacagcatccacccagttgattttctcaaagccttgttccccttcacgtctatgccccttccaactatgtgtctcaaactaaacaagtgctatcaagtggcaggagaaggcatgtggggggttctggagtcaggtgcatggctgtggggg

SEQ ID NO: 1018 - DNA, 1374 bp, Glycine max
ggatttagaattaaaataaaatagtgagggaattgattgatactatactagtgagaaaagaaagggaagtcctccgcgccgccactcctcccatctctctgctctaaacgacaccgttttagtcttctcctcaagtcatggccacactcaagagcctctgcttcagaggaactgcctttcccgtttgcccctccaatgtcaccaacaatagaaactccaggagctcatattggaggcctgcacaagcagccgtgaagcccaatttccatctcccaatgcgcagttttgagttaaaaaataggacttctccagaggacataaaggctctgagattgataactgccattaaaactccatacctacctgatggtcgatttgatcttgaagcatatgatgacttggtgaatatgcagattggacaaggggccgaaggtattattgttggtgggacaactggtgaaggccaattaatgagctgggaagagcacataatacttattgctcatacagtcaactgttttggtgggaaaattaaggttattggaaatactggaagcaactccaccagggaagcaattcatgccactgagcagggttttgctgttggaatgcatgctgcccttcacataaacccttactatggcaaaacctccttggatggtatggttgctcactttcgaagtgtgctttccatgggacccacaataatctacaatgtgcctgcacggaccggacaagacattcctccgcatgtaattcaaaccttagctgaaagtgttaacctggctggtgtcaaggagtgtgtgggaaatgaccgaatcaaacagtatacagatgatggaattgttgtgtggagtgggaatgatgatcaatgtcatgatgctagatggggttatggggctaccggagtggtatctgttgcgagcaacctggttcccggtttaatgcgagaactcatgtttggcggtgtaaaccctactctaaattctaaactcttgcctctgattgactggcttttccacatgccaaaccccattggtttgaacactgctcttgctcaacttggagttgtcagacccgtttttaggctaccgtttgtacctctccctgtggacaaaaggatagagtttgccaatttggtgaaggaaattggtcgagagcattttgttggaaataaagatgttgaggttcttgatgacgatgactttttcttggttagtcgttattaagttaccatgtaggttcgttgtatcctttcttggggtttgccaaatttaaaatccagatgagagtctattgtagtgaactagttaatgatcatctagtttctttttactggctactttgtaaatgaaaaaaaaaaaaaaaaaataa

SEQ ID NO: 1019 - DNA, 355 bp, Glycine max
cccgccaatttcttctcctgtcatctaagatctctccgcacaaacacttcgaacgacaccgttttaggcttcgtcggattccgatcttccttttttcttcctcaagtcatggccacactcaagagcgtctgctctcagaggatccacctttcccgtttgcccctccaatttcacgaacactagaaacaccaggagctcatgttggaggcctacacaagcagctgtgaagtccaatttccatctcccaatgcgcagttttgagttaaaaaataggacttctccagaggacataaaggctctgagattgataactgccattaaaactccatacctacctgatggtcgatttgatctt

SEQ ID NO: 1020 - DNA, 1204 bp, Glycine max
cttccaaatgatgcacttcttatttataaaaatttaggttaaatttaaaaggataaaaagaagagagggaaagagagaggaacaaggggtcttggggcagggtctagtgcttataaatactctggcattagccactcgcacgcgtccgcccacgcgtccgaaaaaaatgggttcttcttcttctatgtggacggtgtgtgtgattttggcatcactggcctctgcagcactctgtgccaacccacgcaggccagtggatgtacaatttggccgaaactacgtgcccacatgggcctttgatcacatcaaatatttcaatggtggttctgacattcagcttcatcttgacaagtacactggtactggcttccagtccaaagggtcttacttgtttggtcacttcagcatgtacataaagatggttcctggagattctgctggcacagtcactgctttctatttatcttcccaaaacgcggagcatgatgagatagactttgagttcttggggaacagaacaggacaaccttacattctgcaaacaaatgtgttcaccggaggcaagggtgatagagagcaaagaatctatctctggtttgatcccacgaaagaataccacagatactccattctctggaacttgtatcagattgtgttctttgtggacgaggtgccaatcagggtgttcaagaacagcaaggacttgggagtgaaattcccattcgaccagccaatgaagatctacaacagtttgtggaacgctgatgactgggcaacgaggggtggtttggagaaaacggattggtcgaaagcacccttcatagcagcgtacaaggggtttcacatcgacgggtgcgaggcttcggtgaacgccaagttctgcgacacgcagggcaagaggtggtgggaccagcctgagttccgtgaccttgacgccgcccagtggcgtaggctcagatgggtgcgccagaaatacaccatctacaactactgcactgacactaaacgctatcctcatatctctcctcctgagtgcaaaagagaccgtgacatttaaatttcgagtgaatagatattttagtccgtgatatttaaatttctcattcactttattattgttgcttctcttttcaccggaattccacccgtgccacagcattcacagtttccacttcctagtgtacaatgtttatataatgtatat

SEQ ID NO: 1021 - DNA, 1135 bp, Glycine max
cgagaagacgacaaaagggggcacaacatcttcagcttttccctcgttgaaatgaaaatgggttcttctttgtggactttgtgtctaattttggcttcactagcctcttctgcattctgtgcctttccacggaggccagtggatgttccattcggcagaaactacgttcccacttgggcttttgatcacatcaaatacttcaatggaggttctgagattcaacttcatcttgacaagtacactggtactggcttccagtccaaagggtcatacttgtttggtcacttcagcatgaacataaagatggttcctggcgattcagctggcacagtcactgctttttatttatcttctcaaaatgcggagcacgatgagatagattttgagttcttggggaacagaacaggacaaccttacattttgcaaacaaatgtgttcaccggaggcaagggtgacagagagcaaagaatctttctctggtttgatccaacaaaagcataccacagatactctgtgctgtggaacatgtatcaaattgtgttcctagtggataacatcccaataagggtgttcaaaaacctaaagggcttgggagtgaagttcccctttgaccaacccatgaaggtgtacaacagcttgtggaatgctgatgactgggccacaaggggtggtttggagaaaacagattggtccaaagcacccttcatagcagaatacaaagggttccacgttgatgggtgtgaagcttcagtgaatgcaaagttctgtgctacacaaggcaagaggtggtgggatcaagcacagtatcatgatcttgatgcttctcaatggagatggctcaggtgggtgcgcaggaaatacaccatctacaactactgcactgacagaagccgctaccctcagcttccacctgaatgtagaagaaaccgtgacatttaaattcacatgtagtactatgtttatggttgctaccataagtttcttattgtattattgattcatcatttaccatatactttattcctaccattatttattatcattgtattgtttgagctgtgtaattgatgagtgaggtttgaatacagagcagagcctctataataaaattatatatgttgtgtaattctacttt

SEQ ID NO: 1022 - DNA, 1217 bp, Glycine max
ccttcatatgcatttgatatgtaaattgtttcattgtttatgattttgatgaggtatgtcaatttgcagaaacaatatcaaagtttggctcgggcatgtttcttcttgttcaagtcatgctcttgttggattttgttcatggatggaatgacaaatgggttggatatgatgaacaattctggtacattgctctatttgttgtttcccttgtttgttatgtggcaacatttgcattctcaggagttctctttcacttcttcacgccatctggacaagactgtggactcaatgtctttttcattactatgaccatgattcttgcatttgtttttgccatagtggcattgcatcctgcagtaaatggaagtgttttgcctgcttcagtaatatcattatactgcacttatctctgctatagtgcactggctagtgaaccaagagattatgagtgcaatggtcttcacaaacactcaaaagctgtttccactggcacccttactttgggtttagctacaactgttctatctgtcgtttattctgctgtgcgtgctggatcttctgctgcagtgctttccccaccaagctcccctcgtgctggtaagcctctgcttccattggatgcaaaggaggatgaagagaaggagaaagcaaagccagttacatattcatatgccttcttccacttgattttctctcttgctagcatgtattctgcaatgcttctgactggttggtctacatctgttggagagagcgggaagttggttgacgtggggtggccttctgtgtgggttcgaatcatcacttcctgggcaactgctctgctgtacttgtggtctctcgtagctcctatcatgtttccagaaagggagttctgagcatcacgttcctcagttccaagtttctgagggaaaatgtgtcacctaactactatatagtcgagtggtgttgctttttataataggatatacggtatgcatctatatcagcatacatttgaataaagtgttacgaatgacatgattccgagtggtgtgcttttaactgtatagtgaaagatttgtgtcatgaacaaatctatatttgtccataatggtctgtttgtgcatctaaaatcatgaaagatttgtatgtgttgtgactgatcttattgaaagtagaatgaatgagacaattcttgttgaaaatgataggtgaaacacaggagagttttagtg

SEQ ID NO: 1023 - DNA, 906 bp, Glycine max
ctttttctttcctacttgcatattttttcatgccccaaaaaggttaagtgacgggtaatcctcattcctcaccaagccacgacgcgacaccaaatattctcactcgtcgtcttcgtctgcgccctaaccaaattcaattcaaactcttctcatcaaaatccaaggctcgttcttgaaaccctaattcgatatcctcctcctcagaagaagaaggatcgatgtgggcagcttcttgcctggcgtcatgctgcgcggcctgcgcatgcgacgcctgcaggaccgtcgtatcgggaatcagccgccgttccgccaggatcgcctactgcggcctcttcgccttctctctcgtcgtcgcctggatcctccgtgaggtcgccgctcccctcatggaatcccttccctggatcaatcacttcaaacacacacctagccgagaatggtttgaaacggatgcagttctgcgggttagcttggggaattttctgtttttcactattctagctgttctgatggttggtgtgaaaacccagagggatccccgggatagtatgcaccatggaggttggatgatgaaaattatctgctggtgccttctggtaatctttatgtttttcgttccaaatgagatcatcagcttctatgaaacaatatcaaagtttggctcgggcatgtttcttcttgttcaagtcatgctcttgttggattttgttcatggatggaatgacaaatgggttggatatgatgaacaattctggtacattgctctatttgttgtttcccttgtttgttatgtggcaacatttgcattctcaggagttctctttcacttcttcacgccatctggacaagactgtggactcaatgtctttttcattactatgaccatgattcttgcaattgtttttg

SEQ ID NO: 1024 - DNA, 1254 bp, Glycine max
gcgcgagacgacgacagacgggggtatcacaacacaagttgaaaacacaaaagaaaaaaaatgggttcttctctgtggacctgtctgattttgttatcacttgcttctgcttccttcgccgccaacccaagagcaccaattgatgtgccatttggcagaaactatgtgcctacctgggcctttgatcacatcaaatacctcaatggtggttctgagattcagcttcatcttgataaatacacaggtactggcttccaatcaaaagggtcctacttgtttggtcacttcagcatgtacataaaattggttgctggtgattcagctggcacagtcactgctttctatttatcatccacaaactcagaacatgatgaaatagactttgagttcttgggaaacagaaccgggcaaccttatattttgcaaacaaatgtgttcaccggtggcaagggtgacagagaacaaagaatctacctctggtttgaccctacaagagaatatcacagatactcagtgctatggaacatgtaccagattgttttctatgtggatgactacccaataagggtgttcaagaacagcaatgacttgggagtgaagttcccatttaaccaaccaatgaagatatacaacagtttgtggaatgctgatgactgggccacaaggggtggtttggagaaaacagattggtccaaagcccccttcatagcctcctacaagggcttccacattgatggttgtgaggcctcagtgaatgccaagttctgtgacacacaaggcaagaggtggtgggatcaaccagagttccgtgaccttgatgctgctcagtggcaaaaactctcctgggttcgccagaaatacaccatctacaactactgcgccgaccgcaaacgctaccctcaagtctctccagagtgcgccagagatcgagacatttaatttggctcatcaagatattggtggtgtcaattatccactgactttgctcatgagtaatctttctgtccccatacatataatttaatataagcttccatatcctatttttattaccactaccataaagttcccatctacttgatttcatgaaggccacacctaagtgctgatacaaaattcaatttgggtttattgcttgtattgctgataatttatatcatcatctattgctgctgctaatgctatggtatgtatacctgtttgagctatgtaacaaaagaaatggcaatgtgccttaatttgtatctgtaattc

SEQ ID NO: 1025 - DNA, 482 bp, Glycine max
ggcatggcatgaaaggggcgaaaaggtcaagtcacgggtaatcctaattccccaccaagtcactacagaccaaatattcttcgtcctcccgctcgctcttctcactcgtcatcttcgaattcgtctgcgccctaacaaaattcatttcaattccaactcctctgatcaaaatcctaggctcgttcttgaatccctaattcgatctcctcctcctcctccgaagaataaaaggaggatcgatgtgggcagcatcttgcctggcgtcgtgctgcgcggcctgcgcatgcgacgcctgcaggaccgtcgtttcgggaatcagccgtcgttccgcccggatcgcctactgcggcctcgtcgccttcgcccttgtcgtcgcctggatcctccgcgaggtcgccgctcctctcatggaatcacttccctggatcactcatgttattcacacgtttaacctagaatggttttacacagatgcaattctg

SEQ ID NO: 1026 - DNA, 376 bp, Glycine max
gacacgcagggcaagaggtggtgggaccagcctgagttccgtgaccttgacgccgcccagtggcgtaggctcagatgggtgcgccagaaatacaccatctacaactactgcactgacactaaacgctatcctcatatctctcctcctgagtgcaaaagagaccgtgacatttaaatttcgagtgaatagatattttagtccgtgatatttaaatttctcattcactttattattgttgcttctcttttcatttttatcaccctgccacacattcacatttccacttcctatgtacaattttatataattatatcctatcatgtcagtttctccttgaattattaattatttaatatgaccaaaataattattcatc

SEQ ID NO: 1027 - DNA, 641 bp, Glycine max
aaaaaatgggttcctcctcctccaagttgaccgtgtgtgttaacttgggcacactgtacatcctgatctttgtgctccaacctaccaaggcaacttgatgtaaatcttggtagtgagtttttgtctgcaggggcttttgttcacacgaaatatttcaaaggtgggttgtgacaatcccccatcattctgacaagttaaccgggactggattccattccataggggcctacttgtttggtcacttcagcatgttcatgaagatcggttcctggagattccgctggcacagtcaccggctttctatttatcctcccaaaacgcggaacctcgacgagatagactttgagttcttggggaacagaacaggacaaccttacattctgcaaacaaatgttttcacaggaggcaagggtgacagagagcaaagaatctatctctggtttgatcccacaaaagaataccacagatactccattctctggaacttgtatcagattgtgtaagcacacttcactcaaactctcgcataccctttttcatttttcaccatttgttggaaatcccagtcatatagctaaatattatgtatataattggagggcaagcacattctaagatgggttagttttatttatttattt

SEQ ID NO: 1028 - DNA, 338 bp, Glycine max
tggctcgagatttaatttgaataacgtgatattaatgcgaagtatctatcagttttactgagtattatcacctctcagccatagaacctaccaagacatataatttaatataagcttccatctcctatttttattaccactaccataaagttcccatctacttaatttcatgaaggccgcacctaagtgctgatacaaaattcaatttggggtgattgcttgtattgttgataatttatgtcatcatctattgctgttgttatggtaatgtacaccatgtttgaggtattgtaacaaaaagatatggcaagtgtgcccttaattgtgtatcttgtaac

SEQ ID NO: 1029 - DNA, 471 bp, Glycine max
caactgatccaccatgtctttacataactttaacttatatttaaaaggatacaaagtacagagggaaagatagaggaacaagggttttagggcagggtctagtgcttataaataccctgcattagccactagatttcacaaactgaggcacacagaaaaaatgggttcttcttcttctatgtggacggtgtgtgtgattttggcatcactggcctctgcagcactctgtgccaacccacgcaggccagtggatgtacaatttggccgaaactacgtgcccacatgggcctttgatcacatcaaatatttcaatggtggttctgacattcagcttcatcttgacaagtacactggtactggcttccagtccaaatggtcttacatgtttggtcacttcagcatgtagataaagatggttcctggagattctgctggcacagtcactgctttctaggtatcttcccaaaacgc

SEQ ID NO: 1030 - DNA, 885 bp, Glycine max
ctgagattcagcttcatcttgataaatacacaggtactggcttccaatcaaaagggtcctacttgttaggtcacttctgcatgtacaacgacttgcatgctggtgattcaggtgacacaccacctgatacccagttaccatccactcactcagaacatgatgaaatacactctgagttctcgggaaacataaccgtgcaaccttatattttgcaaacaaatgtgttcaccggtggcatgggtgacagatatcatagaatctacctctggtttgaccctacaagagaatatcacagatactcagtgctatggaacatgtaccagattgttttctatgtggatgactacccaataagggtgttcaagaacagcaatgacttgggagcgaagtttccatttaaccaaccaatgaagatatacaacagtttgtggaatgctgatgactgggccacaaggggtggtttggagaaaacagattggtccaaagcccccttcgtagcctcctacaagggcttccacattgatggttgtgaggcctcagtgaatgccaagttctgtgacacacaaggcaagaggtggtgggatcaaccagagttccgtgaccttgatgctgctcagtggcaaaaactcacctgggttcgccagaaatacaccatctacaactactgctccgaccgcaaacgctaccctcaagtctctccagagtgcgccagagaccgagacatttaatttggctcatcaagatattggtggtgtcaattatccactgactttgctcatgagtaatctttctgtccccatacttataatgtaatataagcttccatatcctatttttattactactaccataaacttcccatcttcatgaaatcaagtagatggg

SEQ ID NO: 1031 - DNA, 1175 bp, Glycine max
tctcgatccacatcctccacaacacaactccactcttagctgccattggtttttcctcttccatttctcttactttctaagcctttttcgattacccatttggttatttcgccctaatggctcttgctccatccaaagtttccaccttttctggtttttctcccaaacccagtgttgggggtgctcagaaaaacccaacttgctctgtttctctgagctttttgaatgagaaacttggaagcagaaaccttagggtttgtgcctcaacggtgcctctcactggggtgatttttgaaccgtttgaggaggttaagaagagcgagcttgctgttccaactgctccccaagtctcgttggctcgtcagaactacgctgatgagtgtgaatctgcgattaacgagcagataaatgtggaatacaatgcttcctacgtgtaccactccttgtttgcatactttgacagggacaacgtggctctcaagggatttgccaagttcttcaaggaatctagtgaggaagaaagagagcacgctgaaaagctcatgaaatatcagaacactcgcgggggaagagttgtacttcaccccatcaagaatgtcccctcagaatttgagcatgtggaaaagggggatgcattgtatgcaatggaattagctttgtctttggagaagttagtgaatgagaaacttctgaatgtgcacagtgtggcagatcgcaacaatgaccctcaaatggccgacttcattgaaagcgagtttttgtctgaacaggttgaatcaattaagaaaatttcagagtatgtggctcagttgagaagggttggaaagggtcacggtgtttggcactttgatcaaagacttcttgattaggaagatgctgcttaatcttgaatagccttattattagtcttcatttacatttggtcttttctgaaattctgggttgttttctaatttagtagtatttaaatgtttttcctatgtactgagatttaggaactcggagtaatgtaattgctagtagcacatgtaaaaggctgcaagcctattatgcaataacatttgatatctgcatttcaattatctccagtaaaatgtcattggttaaagcttaaaaagagatataaatgggtgcccgcaactaggacgctcgtcaacccggttattattccggac

SEQ ID NO: 1032 - DNA, 746 bp, Glycine max
gaaaaaaataagaggaaaggtatgtggcttttggtaagaactaactttgaatttggccatgctattgtgtgcgttgaatgctatcctggaagaaaagaggaagacacatactaaaaataaattgaatagcattaaatgtgcatctatgctgtgaacattgaacttaaatttgcaagttgactctgtatctttgctgatattaccaatgtttgttgaaacatcactttcttttgtacacgttgaatcaattaagaggatttcagagtatgtggctcagctgagaagggttggaaaggctcacggtgtttggcactttgatcaaagacttcctgattaggaagatgctgcttaatcttgaatagccttattattagtcttcatttacatttggtcttttctgaaattctgggttgttttctaatttagtagtatttaaatgtttttcctatgtactgagatttaggaactcggagtaatgtaattgctagtagcacatgtaaaaggctgcaagcctattatgcaataacatttgatatctgcatttcaattatctccagtaaaatgtcattggttaaagcttaaattggtggaattctgatggtttgaacatttccacgtagtgcagtatcgtgatactgcataacacccgagaaagaaaaatgtccccaaaagttaaattgaaaactacctcgccccaaaagttaaattgaaagctatctgcgaactaaacctacctatcatactga

SEQ ID NO: 1033 - DNA, 1162 bp, Glycine max
agagccatgaccggacgtggcatgcacgcgtacgtctgggaattaatttcgagtccaaaatcctcactccagccacacgcttcagaagacatggcctcattgggtgggttacaaaatgtgagcggcatcaattttcttatcaaagagggtccaaaagtcaatgcaaagttcgagctgaagccgccaccatatccactgaatggtttggagccggtgatgagccagcagacacttgagtttcactgggggaagcaccacaagacttatgtggaaaatctgaaaaaacaagttgttgggacagagcttgatgggaagtcactagaagagattattgtcacatcatacaataagggtgacattcttccagctttcaacaatgcagcacaggtatggaaccatgacttcttctgggagtgcatgaaaccaggtggaggtggaaagccatccggggagcttctagaactgattgaaagagactttggttcatttgtaaaattccttgatgagttcaaggctgctgctgcaacacaatttggttcagggtgggcttggctagcatatagagcaagaaaatttgatggggaaaatgtagcaaatcctccttcacccgatgaggacaacaagctagtggtgctcaagagtcccaatgctgtgaacccccttgtttggggaggttactacccacttcttaccattgatgtttgggagcatgcttactaccttgattttcagaaccggcgtcctgattatatatcagtgttcatggataagcttgtttcctgggatgcagtgagctctagacttgaacaagctaaggctttaattaccagtgcatgatgctgaattaaatgcagaataagtgatttatcctgatagtgatgatgaattggatggcgtcatgcggaatagtgaattatttttatctagaaagtgtaagcaggcacatcttttgtactttaaataggtgttgtggtatcagggctaaatctcagattattatgttctatggttagaaatcttagttatggttctctttgtgtgacaatgtgaacaataagattgcttatgcatgaataatcaacaaaataatactatggtgtagagccttttcatataaaaaaaaaaaaaaaaaaacatggctaatggacttgtttcgaatgaa

SEQ ID NO: 1034 - DNA, 409 bp, Glycine max
  unsure (1)..(409): unsure at all n locations
cagtactgcctggtcttatgctgcagtgctgtactagtgttacgcccgagtagattaggagagccaaaaaacttttgaaacagctcactcggaagcagagcagaatagatgaatttgttatcgcaatccactgccccttctacttctctatcaccttcctgttttcttccacgccaccctcatggttccacctggttctcttctggtaccttcaaattcttgaagaaagagagtagatgtctaaggaaagctggacgtactaaaatcactgcaaagtttgagctgaagccaccaccatatcctttgagtgctttggagccaattatgagtcaggagacactcgaataccattgggggaagcatcatangacttatgtagataatctgaacaggcaaattgatggaacag

SEQ ID NO: 1035 - DNA, 294 bp, Glycine max
tgcacagttatgcttagtgcaatggtgccttctacattttcttaatttccccagttttgattggattcgtgtttactttctttggctgggttacaaaatctgagcggcatcaattttcttatcaaaaaagagggtccaaaagtcaatgcgaagttcgagctgaagccgccaccatatccactgaatggtttggagccggtgatgagccagcagacacttgagtttcatttggggacacaccacaagacatatgtggaaaatctgtaaaagcaaatcgttgggacagcgcttgat

SEQ ID NO: 1036 - DNA, 1662 bp, Glycine max
cggtcgcgtgggcggacgcgtgggttggacttccacctcaccgttttcagccactttctttgcgccatggaaacaggtaatctgccagtttttccatatttgaagtaaggatattcatcttatgaccaagagtgtcaatctttcggattaagagttattgctttagttttatctagagtaaaggaccagctagtgagatgctatagatccttaattcaaatctcatcaagagaaggtacgttgtctggcatgcgtacttgttcaaggtgacatgtgacctatacaattatcagaacttaatctgatctcaaggcagtttttttgagctgatctggatgggaaccggtgaagaaagcacagctaaagttcctaaaccatcttctacttcttcaattcagataccactggcaccttcatatcctgattggtcaagctcgatgcaggcttactatgctcctggagccactccacctgcattttttgcctcaaatattgcttctccaactccccattcttatatgtggggaagccagcaccctctaattccaccatatagtactcctgttccatatccagctatatatcctcctgggaatgtctatgctcatcctagcatggcaatgaccctgagcaccacacagaatggtacagagtttgtaggaaagggttctgatggaaaagatcgggtttctgccaaaagttcaaaggctgtgtctgcaaacaatggttccaaagctggaaacaatggaaaggcaagctcaggtcccagaaatgatggcacctcaacaagtgctgaaagtgggtcagagggatcctcggatgctagtgatgagaatactaaccaacaggaatcggctacaaacaagaaagggagttttgaccaaatgcttgttgatggtgctaatgcacggaacaattctgtgagcatcattcctcaacctggaaatcccgctgtgtcaatgtctccaactagtcttaatattggaatgaacttgtggaatgcatctcctgctggtgacgaagctgcaaaaatgagacagaatcagtcttcaggagctgttactcctccaaccataatgggacgtgaagtcgcgctgggtgaacactggatacaagatgaacgtgaactaaagaaacagaaaaggaaacagtctaatagggagtctgctaggagatcaagactacgcaagcaggctgagtgtgaagagttacaaaagagggtggagtctctgggaagtgagaatcaaactctcagagaagagcttcagagagtatctgaagaatgcaaaaaacttacatctgaaaatgattccattcaaggaagagttagaacaattgtttggaccagaagcagttgctaatcttgaataaatcaacttcttattatcatgccaagcatcgggcggaaaatgtccaactcctaggaggaggatgatttgcagctgaaatttttatcaatggcgaaaatgaacataggatataatttttttcccttggtttactatttacaccattaacccttaattgccaccccccttatgttttgcccatttagtattgtaaaacaaatcatagcaaaatattattttcaacactttttattggacagattttttttatgtaggtcatagtaaataaccttgacttacattatttattgag

SEQ ID NO: 1037 - DNA, 1911 bp, Glycine max
acgcgttcgactacgcgtccgctctttccctcgttttttaagagagagaaagtagagagagagacacacacaactcccacaattgctttgcctaaccttaatttcaggacacttcgaagctaccaggaccaattgttgttgttcttccctttttgtgctttttgattcagagatttttggttttcgttttttttctttcacaaggagaaagttcggtgtctttaagttgaataacttgttgggacatatttgatttggcgctttttcttttggtgcttgcctcatgggaaacagtgaggaagagaaatctgttaaaactggaagtccttcttcttcacctgcaacaactgagcagaccaaccaacctaatattcacgtctatcctgattgggctgccatgcagtattatgggccaagagtcaacattccaccatacttcaactcagctgtggcttctggtcatgctccacacccatacatgtgggggccgccacagcctatgatgcaaccttatgggccaccttatgcagcattttattcgcatggaggggtttatactcaccctgcagttgctattgggccacactcacatggtcaaggagttccatcttcacctgctgctgggactccttcaagcgtagaatcaccaaccaaattatctggaaatactgatcagggtttaatgaagaaattgaaagggtttgatgggcttgcaatgtcaataggcaattgcaatgctgagagtgctgagcgtggagctgaaaacaggctgtcacagagtgtggatactgagggttccagcgacggaagtgatggcaacactgcaggggctaatcaaacaaaaaggaaaagaagccgagaaggaacaccgaccactgatggagaagggaaaactgagctacaaaatggtccggcttccaaagagactgcatcttccaaaaagattgtgtcagctaccccagctagtgttgcaggaacattagttggacctgtagtttcttcaggtatggccacagcactggagctgaggaacccttcgactgttcattctaaggcaaattccacaagtgccgcacaaccttgtgcagttgtgcgtaatgaaacttggttacagaatgagcgtgagctgaaacgggagaggagaaaacaatctaaccgtgaatctgctagaaggtccaggctgaggaagcaggccgagactgaagaattggcacgaaaagttgagatgttaactgctgagaatgtgtctctgaagtcagaaataactcgactgactgaaggttctgagcagatgaggatggaaaattctgcattgagggaaaaactgataaatactcaactgggaccaagggaagagataactttgagcagcattgacagcaagagggctgcacctgtaagtacagaaaacttgttatcaagagttaacaattccggatctaatgatagaactgcagagaatgagaatgatatctgcgagaacaaaccaaattctggtgcaaagctgcatcaactactggatacaaatcctagagctaatgctgtagcagctggttgaaaccagtaactgcactggctaattatgtaattttggcatattacaagcccaaaattacagcttggtgctaacagttttcagagggatggatcagctgaattttacaatctaattccatctatatagaccagaactaattctttgcttgtgagtttcttagggcataaactctgtattttactagatttcacagaattgaatgacaactttaaaagtttgtaaattgaagagtattagggatttagtttagactttaagagaggcttgtcggccgctgtataattggttgtgtattaactatattggtgtgatcttcctaatggtatcttagtcaaggcattctgactttgggt

SEQ ID NO: 1038 - DNA, 1730 bp, Glycine max
  unsure (1)..(1730): unsure at all n locations
agaagagctatgacgncgcatgcacgcgtacctaagcttcgaatttcgcttcgggatgttttcttggttaccaagattatataggatcatgtgtagattttagatggcagaaatcttggtttatgaattttgtcttgtcccttgcaatattttcatgccgataataattaacaagctgacatggctcctgttaatgcagttgagacatttttcaagaagtagtaaagctccttctacaatattttttgacttggtgctttccttttggatcttacaatgggaaacagtgaggaagagaaatctgttaaaactggaagtccttcttcttcacctgcaacaactgagcagaccaaccaacctaatattcacgtctatcctgattgggctgccatgcaggggccacactcacatggtcaaggagttccatcttcacctgctgctgggactccttcaagcgtagaatcaccaaccaaattctctggaaatactaatcagggtttagtgaagaaattgaaagggtttgatgagcttgcaatgtcaataggcaattgcaatgctgagagtgctgagcgaggagctgaaaacaggctgtcacagagtgtggatactgagggttccagcgacggaagtgatggcaacactgcaggggctaatcaaacaaaaaggaaaagaagccgagaaggaacaccgatcactgatgcagaagggaaaactgagctacaaaatggtccggcttccaaagagactgcatcttccaaaaagattgtgtcagctaccccagctagtgttgcaggaacattagttggacctgtagtttcttcaggtatggccacagcactggagctgaggaacccttcgactgttcattctaaggcaaattccacaagtgccgcacaaccttgtgcagttgtgcgtaatgaaacttggttacagaatgagcgtgagctgaaacgggagaggagaaaacaatctaaccgtgaatctgctagaaggtccaggctgaggaagcaggccgagactgaagaattggcacgaaaagttgagatgttaactgctgagaatgtgtctctaaagtcagaaataactcgactgactgaaggttctgagcagatgaggatggaaaattctgcattgagggaaaaactgataaatactcaactgggaccaagggaagagataactttgagcagcattgacagcaagagggctgcacctgtaagtacagaaaacttgttatcaagagttaacaattccggagctaatgatagacctgcagagaatgagaatgatatctgcgagaccaaaccaaattctggtgcaaagctgcatcaactactggatacaaatcctagagctaatgctgtagcagctggttgaaaccagtaactgcactggctaattatgtaattttggcatattacaagcccaaaattacagcttggtgctaacagttttcagagggatggatcagctgaattttacaatctaattccatctatatagaccagaactaattctttgcttgtgagtttcttagggcataaactctgtattttactagatttcacagaattgaatgacaactttaaaagtttgtaaattgaagagtattagggatttagtttagactttaagagaggcttgtcggccgctgtataattggttgtgtattaactatattggtgtgatcttcctaatggtatcttagtcaaggcattctgactttgggt

SEQ ID NO: 1039 - DNA, 604 bp, Glycine max
cccacgcgtccgcccacgcgtccgcccacgcgtccgcttggagctgcgagcactagttttcccttttccccttgtttgtttttttaggataataattgaccaattgggtatcttgtcagttgagacatttttcaagaagtagcaaagctccttctacaatatttgacttggtgctttccttttggatcttacaatgggaaacagtgaggaagagaaatctaccaagactgaaaaaccttcttcacctgtaacagtggatcaagccaatcagaccaaccagaccaatattcatgtctatcctgattgggcagccatgcaggcatattatgggccaagagtcaccatgccaccatactacaactcagctgtggcttctggtcacgctcctcacccatacatgtggggaccaccacagcctatgatgccaccttatgggcctccttatgcagcaatttatccacatggaggggtttatactcaccctgcagttcctattgggccacatacacatagtcaaggagttccgtcttcacccgccgctgggactcctttaagcatagagacaccacccaaatcatctggaaatactgatcagggtttaatg

SEQ ID NO: 1040 - DNA, 460 bp, Glycine max
ggggcacgtgtaacaatgcaggctgggactcctttgagcatagagacaccacccaaatcatctggaaatactgatcagggtttaatgaagaaattgaaagagtttgatggacttgcaatgtcaattggcaatggccatgctgaaagtgcagagcgtggaggtgaaaacaggctctcacagagatggagaagggaaaactgagatacaaggcagtccaatttccaaagagactgcagcttctaataagatgttgggagttgtccctgccagtgttgcaggaacaatagttggacatgtagtttcttcaggtatgaccactgcactggagctgagaaatccttccagtgttcattctaaaacaagtgccccacaaccttgtccagtattgcctgcagaagcttgggtacagaatgagcgtgactgaaacgggagaggcggaacagtcaatcgagatctctag

SEQ ID NO: 1041 - DNA, 474 bp, Glycine max
ttttcttcacacagctctttccctcttttttttagagagagaaaatgcagagttaaccaccttaaccttaattgcttctccaaaccttaatctttttttttttatttttttatttttttgaggatacttggagctaccaggactagtttttttttttttttacccttgtttctttttttgacacgttgttttgtgaggataataattggccaattgggtatctagtcagttgagacatttttcaagaagtagtaaagctccttctacaatattttttgacttggtgctttccttttggatcttacaatgggaaacagtgaggtagagaaatctactaagactgaaaagccttcttcacctgtaacaatggatcaggcgaatcagaccaaccagaccaatattcatgtctatcctgattgggcagccatgcaggcatattatgggccaagagtcaccatgccaccatactacaac

SEQ ID NO: 1042 - DNA, 2086 bp, Glycine max
cccttggaattcggcacgaggagcaagcaaaggcgggagaaagagaggcagcaaacaaaaacaatggcgacgtcgctctctgtttcgccatctctctctctcaacactctcttcatcgccaaagcgcttccactatctcgcccctcctttctctctctccctctccccaaatccctactctctctctccacgcgccgccgcaccttcatcgtccgcgccgaatcccaaaacggcgccgaccccgttcccgcccactacgacttcgacctcttcaccatcggcgcaggcagcggcggggtccgagccggtcgcttcgccgccaactacggcgcttctgtcgccatctgcgagcttcctttctccactatctcctccgaaaccaccggagtcggcggaacctgtgtaatacgaggatgtgtgccgaagaagttgctggtttatgcatctaaattttctcatgaatttgaagaaagtaatggtttcggatggagatatgacagtgagcccaagcatgattggagtagtttcatagctaataaaaatgctgagttgcagcgtcttactggcatctacaagaatattttgaacaatgctggggtcaagctgattgaaggccatggaaagattatagatcctcacacggttgatgttaatgggaagctatattcagccaaacacattttagttgcagttggaggtcgccccttcattcctgatatccctgggaaggaatatgcaatagattcagatgctgcccttgatttaccaacaaaacctgtgaaaatagccattgttggtggtggttacattgccttggagtttgctggtatctttaatggtttgaaaagtgaggttcatgtatttatacggcaaaagaaggttttgcggggatttgatgaagagattagagattttgttgaagaacaaatgtctgtaagaggtattgaattccataccgaggagtctcctcaagctatcacgaagtcagcggatggctcattctctttaaagaccaacaaaggtacagtggacggtttctcacatattatgtttgctacaggacgcagacctaatactcagaacttaggcctggagtctgttggtgtgaaactagctaaagatggagctatagaggttgatgaatactctcaaacatcagtttcttcaatttgggcagttggagatgttacaaacaggataaatctcaccccagttgctttgatggagggaggagcattagtaaaaacgctgtttcaggataacccaacaaaacctgattatagagctgttccttctgctgtattttctcaaccaccaattggacaagttggtcttactgaggaacaggctgtacaacaatatggagatattgacatcttcactgcaaattttaggccgctgaaagctactctctctgggcttccagaccgggtttttatgaaattagtagtctgtgcaaaaacaaatgaagttctaggtttgcatatgtgtggagaagatgctcctgaaattgtgcaggggtttgcagttgctcttaaagctcgcttgaccaaggctgactttgatgccactgtaggcattcacccaagtgcagctgaggaatttgttaccatgaggacacctactaggaagatacgaaagagtgaatcgtctgagggtaagtcgggctctcaagcaaaagctgcagcaggggtttaacaatatgactctgcttcaattgttatacttgaagaaaccagccggtgcctcaagggaagaaattcagaacgatcttcagctactgagttttcagagcaatacatggaatatctcattaaggtcgtgtgtcatacttctctggtcttgcaatgtaattatgacagttgggagcctggaagtcgagtgaaattcgtgccaatttttgccatttgtaatttaacttattttcccatgcatgtacaaaaaataagaggaaattccgtgtgggaatttgatttttacataatctctgcatcgaatttgaactagttggaattgagaccaacggcaatggtcagcatgaaaaatatttttcttttctaatatatataacgttgttcatctctgt

SEQ ID NO: 1043 - DNA, 461 bp, Glycine max
gttaccatgaggacacctactaggaagattcgaaagagtgaatcgtctgagggaaagtcgggttctgaagcaaaaactgcagcaggggtttaaacagcattacactgcttcaattgttatacttgaagaaaccagctggtgcctcaagttacctggcgggttgtcactgaatttagcgtggttgtcaaattgttgggaagacattcagaacaatcttccgcaactgagttttcagagcaatacatggaatatctcattgaggtcgtgtgtcatacttctcaagtcttgcagtgtaattatcagagttggggagcctggtaagggcgagtggaatttttggtgccattgtttgccatttgtaatttaacttgccagtcctttcatgtacagaaataaaaggaaattccgtgtgggactttgattttaaataatctctatcgaatttgaactagttggaattg

SEQ ID NO: 1044 - DNA, 1943 bp, Glycine max
agaatccagaattccgaaatagaatgcgaactattttattgtataattagttgtatggatagtttgacatttatttacccaatattttgattggccagttatctaagtacaaaagcattcttagacactaccaatcttaaacccatcttgatttgtaacccaaccccccacatcaatagattcgaaattcccattgaagtcgtcgtcccaattgaagtgagcaacaccaagcctcttcatttgaagttcctcaggctcaacagggtacttcccagagaagcaagcatagcagtagttaagagcatcatcccctaacaatgtcttcaacttatccaagggaagaaaagccagcgaatccgacccaataaacttccttatctcctccacactcatccggttggatatcaactcctctgaactgggtgtgtcaactccataataacacgaagcaacaataggaggacatgcaatcctcatgtgaacttccttggcaccggcctccttcaagagcctcacaatcttggacgacgtggtgcctctcacgatggaatcatccacaaccacaacacgtttaccttcaagcacagcacgaaccggagatagcttcagcttcacaccaaagtccctaattttctgagagggctcaatgaaagtcctccctacatagtgggacctaatcaacccctgctgaaagggtaccccagcttttgcagcataaccaagcgcagccacaacgccagaatcaggaaccgcgatcacaacgtcacactcaacgggactctcagaggctagtatttctccgaatttttttctagactcgtacacggacctcccgaaaacaacagagttaggaagcgcgaagtatatgtgctcgaagatgcattgttttggctcaggatgagacacgaggcagagggattggattccagtgtggtccaccacgataacttcacccgggtacacctctctctcgtacgtggcttcgattaaatcaagcgcgcatgtctcggaggccaaaactacagcgccgttggttctcctacccatcaccaagggtcggaacccgaaggggtctctgacggcgacgagcttgtcctccgtgacgaatacgagggagtaggcgccttggagatgctcgcaggcgtccacgattctgaggaggaatggcctgtgttttgaagtggcgatgaggtggaggacaacctcggtgtcggaggtggtgttgaagatggagccgttgttgtgttcgagtctggctcggagggagcggtagttgacgaagttgccgttgtgagcgacggcgacggcagcgaagcggtagtcggccaggaagggttggacgtttttgagcatggattggccggcggtggagtagcggacgtggccaatggccgaggtgccggggaggcgggagagcttggactgctcgaagacgtcggagacgaggccgacgccggtaacggattggaggtggttgtcgtggacggctacgatgccggcaccttcttggccgcggtgctggagggcgtggagggccagggagcagagacgggaggcttccgggtcgccgtagatgcccaccacgccgcactcttcacggggcttttggtcttcgtcgtcgaagaagacacaagtgttttggttttttgggttgcatgcgagaggcagaggggaagagagtttgtgagagagagagttttggtttggaagggatttgttgtggagaaaagaagcgttgttgtttgttggtgtgttgcggaaagggaaagaggacgagggtttggagagggaagaggaggagagagtggagagattagacgcagcagccatgacaagaagaagaagaagaagaagagaggaagaagaagaagagaggaagcaagtaatgtaacagaccaatactttcttccgggttttgttagttgctcggtgggaccaagaag

SEQ ID NO: 1045 - DNA, 1346 bp, Glycine max
  unsure (1)..(1346): unsure at all n locations
nnnnnnnnnnnnnnnnnnnnnnncgaagaaaactctatatatattaaaaaaaaagagtaaagaaaaacatccaaagttcttataccatggtttgttctaaattctaaataacaaaagttccatatatcagatgacaaaagcatcaccggccttcagaatccaaatgaaccaatgaagctcaccagtggagctggatgctttgacagtatttcccctccccgcatcacatcatcacatcacaacataggtagtagtacggttaggctgaaactatcaaaccggacaagatttagagacagttgcggaagttcttctaggactttctcgagtcagaattagaattttacttagagaacttatattgacctataatgtaaacattattatccgtatcatcaaggtaaaacttcaattgaaaatgaagaacaacaccaaaaacacctgaagaactgcatctgatttttgtccactgagggatgccttatgctgcaaaaaccagatataggaatattatgaaatactagtactagtactccagtaccaaccttgatttgatttcggtttgcctgaacccaaccaccatcaatagactccaagcttccattcaagccatcatcaacaaagtccccaaccctcttcactttaagctctcttggctccacagggtaattcccagagaaacaagcataacaaaaatttggactttcacttcccaacaacctcttcaagctatcaaaaggcaaaaaggccagtgaatccgacccgataaagtcccttatctcctccacactcatcctattcgaaatcaactcctcggagctaggagtatccacaccatagtaacaagaaccaataatcggaggactcgcaatcctcatgtgaacctccttagcaccggcctccttcagcagcctaacaatcttggacgaggtggttcctctcacaatggaatcatccacaaccacaacacgtttaccttcaagcacagcacgaacaggtgatagcttcagcttcacaccaaagtccctaatcttctgagagggctcaatgaaagtcctccccacatagtgcgacctaatcaaaccctgctgaaacggaaccccagctttcgcagcataaccaagcgcagccacaacaccagagtcaggcacagcaatcacaacatcacactccacaggactttcagtagccaaaatctccccaaattgtctacgagactcatacacagacctcccaaaaacaaccgaattgggaagtgcaaagtaaatatgttcaaaaatgcattgctttggttatggggagaaggagcaacggtgctgttgttttcgcttctgaaacctgcgcgc

SEQ ID NO: 1046 - DNA, 1630 bp, Glycine max
cacaaaggcacgaggttgctttctagtttcgcttcacacttcacacttaacacttaacacttaacgtatccgccaaatctaggggcatattttaccaccacttctctgcaaaagagacccttttgcttcttttcagataatatgggcttagtctgcagcagaagtcgtcgttttcgtgaagctcatgctgaagaaaatgctcaggatgcagaaattgaaagaagaatcgagttagaaacaaaggctgaaaagcatattcagaaacttttactactaggtgctggagagtctgggaggtctacaatatttaagcagataaaacttttgtttcaaactggctttaatgaggctgagcttaaaagctacataccagtcgttcatgctaatgtgtatcaaacaataaaagtactgcaggatgggtcgaaagagttggcgcagaatgactttgattcttcaaagtatgtaatatctaatgaaaaccaggacattggtcaaaagctctcagaaattggaggcaccctggtttacccgcgtcttaccaaagagcttgcacaggaaatagagactatgtgggaggatgctgcaattcaggaaacatatgcccgtggtaatgaactccaagttccagattgtgcccattatttcatggaaaatttggagaggctgtctgatgcaaattatgttccaactaaggaggattttttgtatgcaagagttcgtacaactggtgttgttgagatccagttcagccctgttggagaaaataagagaagtggtgaagtctatagactctttgatgttggtggccagagaaatgagagaagaaaatggatccatctttttgaaggagttacggctgtaatattctgttctgcaattagcgagtatgatcagacactttatgaggatgaaaacaagaacagaatgatggagactaaggaactttttgagtgggtcctaaggcaaccatgttttgagaaaacatccttcatgttatttttaaacaagtttgacatatttgaaaagaaggtcctgaatgttccgctcaatgtatgtgagtggttcaaacatgattaccagccagtttcaacagagaaacaagagattgaacatgcgtacgagtttgtgaagaaaaagtttgaggaattgtatttccagagcactgctcctgactgtgtagatcgcgtgttcaagatctaccaggcgactgcccctgaccagaagcttgtgaagaagactttcaagcttgttgatgagactttgagacggaggaatctctttgaagctggcttattatgaccatgcccatgcaacagtatgtatgtttaagagggatatgatatttttacattgagaaattaaaaggtcatctgattttgttgggtatattagaggtcaggtatacaacaatataaaatcgatttgttgattttatgtcaaagtaaatcctgggtggatagggaaagcctttctgaatacctacttgatcaccacatccatctttagaaggaaaattagttgcgctcaaattttcagacatgacattatgctttgtgattatctttttcattgattgaaagtcacataatgatatatttcatatcctttatttaaaaaaaaaaaaaaaaaa

SEQ ID NO: 1047 - DNA, 1868 bp, Glycine max
ggtgttggatgaggcgaaactcgagagtgtaaggttttgcatttcatttgacgaagagtgagagagtcttatctgtcgtctctgatctctgatcgcatcttcattccgaaaatggctgtttcggctatcactggagcgaggctaactctagggatgtctctttcctcttccacgcgatcacgaaccgtcgcaatggccgtatctatcgaccccaagaccgataacaaactcactcttaccaagtccgaggaagctttcgctgcggccaaggagctgatgcctggaggcgtgaactccccagttcgtgccttcaaatccgtgggtggtcaaccaattgtgattgattcagtcaaagggtctcgtatgtgggatatcgatggcaatgagtacattgactacgttggttcctggggtcctgcaatcattggtcacgctgatgatcaggtgcttgcagctctgggtgaaaccatgaagaaaggaaccagctttggtgcaccctgtctgctggaaaacactttggcagagctggttatcgatgccgtccccagcattgaaatggttcggtttgtcaattcaggcactgaagcttgcatgggtgcgctccgtctggcccgtgcttataccggaagagagaagatcatcaagtttgagggctgttaccatggccatgctgatccttttcttgttaaggcaggtagtggagttgccaccttgggacttcctgattctcccggtgtccccaaagctgccacttttgaaacccttacagccccctacaatgacaccgaggccattgagaaactcttcgaggccaacaaaggagaaattgccgcagttttcctcgaacctgttgttggaaacgctggtttcattgttcctaagcctgattttcatagtttcttgcgcaagatcaccaaggagaacaatacccttcttgtgtttgatgaagtcatgactggatttcgtttgtcatatggaggtgctcaagagtattttggcataactccagatataacaactctaggaaagatcattggtggaggtctgccggtaggcgcttatggagggaggagggatattatggagaaggtggcaccagctggcccaatgtatcaggctgggaccttgagtgggaaccctttggccatgactgcaggaatacagaccctgcagcgtattaaggagccaggaacttatgagtacttggacaaaatcaccggtgagcttgttcagggcattattgaagctgggaagagggcaggccatgcaatatgtggtggtcatataagggggatgtttgggtttttcttcacagaaggaccagtgtataattttgcagatgccaaaaagagtgatacggccaagtttgctaggttcttttggggaatgctggcggaaggtgtctatttggcaccttcccagtttgaggctggcttcaccagcttggcacatacttctgatgacataaaaaagacgatagccgctgctgagaaggttttcagggagatctgatggttaaattttgttttgttgcaaatttaattttcggagggtgaatttttaggtcaatttagattattgttatggcagttgctttcgttatgatctgtatcattttcgcatcctgtatctatccagtgtattatgttgagctgtgagttacttgaatttgaagcttgtaagcattcgaattcattgtttaactcctcattctagtttcacatgttatgtttttaatgtaggcatgcattttgctaatgcattacatatcagtatacatctttgtggactacacactttcggggtgggaatagatagagaattgtctttgtgctagataaattgaactaatttttgagctgtgatcc

SEQ ID NO: 1048 - DNA, 509 bp, Glycine max
attgaattctgcaaactggagaggataaggctttgcatttcatttgagagagagagcgtcttacctttccattatcaaaatggctgtttcggctatcacaggagcgaggctaaccctagggatagggttggcgatacctctttcctctcccacgcgctctcgaaccgtcgcaatggccgtatccgtcgaccccaagaccgacaacaaactcactcttaccaagtccgaggaagctttcgctgctgccaaggagctgatgcctggaggtgtcaactccccagttcgtgccttcaaatccgtgggtggtcaaccaattgtgattgattcagtcaaagggtctcgtatgtgggacatcgacggcaatgagtacattgactacgtcggttcttggggtcccgcaatcattggtcacgctgatgatcaagtgctttcagctctggttgaaaccatgaagaaaggaactagctttggtgcaccctgtctgctggaaaacactttggcagagctgg

SEQ ID NO: 1049 - DNA, 1097 bp, Glycine max
ttcctaaaaaatatcattacaaatacgtcaccgtatttgtccggtttccacgcgattttgattcaaaagaaaattcggaacgagcagcgaagccgtctttcgattccttcgtgcgtgcgattctcctgtatccaaggtgaagcaccgacaccggacctatctccggcgaatccccagtccccactttcttccttcgaaatgaatcccgagtatgattatctgttcaagctccttcttattggagactctggtgttggtaaatcatgccttcttctgagattttctgatgattcgtacatcgaaagctacataagcaccattggagttgattttaaaatacgtaccgttgagcaagatggaaagaccattaaactacagatctgggacacagctgggcaagaacgatttaggacaatcaccagtagctactaccgtggtgcccatgggatcattattgtttatgatgtgacagatggggaagagagcttcaataatgtgaagcagtggctcagtgaaattgatcgctatgcaagtgataatgttaacaagcttttggttggcaacaagtgtgatctggaagcaaatagagcagtgtccaatattgaaacagctgatctggaagcaaatagagcagtgtccaatattgaaacagctaaggcatttgcagatggaataggcataccttttatagaaacaagtgcaaaagatgctacaaatgtcgaacaggctttcatggcaatgactgcttcaatcaaggatagaatggcaagccaacctgcaaataatgcaaggcctccaacagtgcagatcaggggccagccagttgcacagaaaggcgggtgctgctcttcctgaccacagttactcagatccaatttattgggccacctttttcatgtaagattttttttattattatatttcgctaaatagtggaccagtgtcagaatttgtctgttggtttggaactgacctagatgatcccattctttgaatatacttaatgatgtggcttgtgcaaagtataatactcatcaatgctaaatacatattcctattcatatcttttaaaaaaaaaaaaaatttaaaaaaaaaaa

SEQ ID NO: 1050 - DNA, 1128 bp, Glycine max
  unsure (1)..(1128): unsure at all n locations
tccttcgtgcgtgcgattctcctgatatccaaggtgaagcaccgacaccggacctatctccggcgaatccccagtccccactttcttccttcgaaatgaatcccgagtatgattatctgttcaagctccttcttattggagactctggtgttggtaaatcatgccttcttctgagattttctgatgattcgtacatcgaaagctacataagcaccattggagttgattttaaaatacgtaccgttgagcaagatggaaagaccattaaactacagatctgggacacagctgggcaagaacgatttaggacaatcaccagtagctactaccgtggagcacatggaatcattattgtttatgacgtgacagatgaagatagcttcaataatgtgaagcaatggctcagtgaaattgaccgctatgccagtgataatgttaacaaacttttggttggaaacaagagtgatctgacagcaaatagagttgtctcatatgacacagctaaggaattcgcagatcaaattggcatacctttcatggaaacaagtgcaaaagatgctacaaatgtggaagatgctttcatggccatgtctgctgccatcaagaatagaatggctagtcagccttcagcaaacaatgcaaggcctccaacagtgcagatcagaggtcagccagttgcacagaaaggtgggtgctgctcttcctgaccacagttactcagatccattttatttggtcacctttttcatgtaagattttttttattattatatttcgctaaatagtggaccagtgtcagaatttgtctgttggtttggaactgacctagatgatccattctttgaatatacttaatgatgtggcttgtgcaaagtataatactcatcaatgataaaacttttatatttctgctcatctatttttaccaccatggcctagttttaattttttttacttgtttggtttgaaacacgtgccatcttttgtgattgctccatgactgtcactgaacattagagaacaaaaagttgtgaacaatgactaatggcaaacaatcatggagaacaaggcattgcatggagaatctgttttcctcgcctgattgaataacaaactttatntgntnaa

SEQ ID NO: 1051 - DNA, 1192 bp, Glycine max
gatttccattcaaaaaagcctaatttcccttttctgcatcatatttttcattctcccacaacacaacaccttttccttttcccttccgttggtgccattcgtgcagcaccggatcctctcatttctccggcgataactctcccttttccggcgaattcaccgcttcctcgatatgaatcccgagtatgactatctgttcaagctccttctgattggagactctggtgttggtaaatcatgccttcttctaagatttgctgatgattcatacattgagagctacataagcaccatcggagttgattttaaaattcgcactgttgagcaggatgggaagacaattaaactacagatttgggatactgctggacaagaacgatttaggacaataactagtagctactatcgtggagcacatggaatcattattgtttatgacgtgacagatgaagatagcttcaataatgtgaagcaatggctcagtgaaattgaccgctatgccagtgataatgttaacaaacttttggttggaaacaagagtgatctgacagcaaatagagttgtctcatatgacacagctaaggaattcgcagatcaaattggcatacctttcatggaaacaagtgcaaaagatgctacaaatgtggaagatgctttcatggccatgtctgctgccatcaagaatagaatggctagtcagccttcagcaaacaatgcaaggcctccaacagtgcagatcagagggcaacctgttggacaaaaaagtggttgctgctcttcctaaccaggtggtgctgcttggtctacacttaccttttgcatgtaaggggcatatgctatttcactaaatagtggaccagtgtcacgtaatccaacctgtggtttgggaattggcctagatgatcccattctttaccatatacttgaatgctatgattgtgcttagtacttgttaatgataaaacttttatatttctgctcatctatttttaccaccatggcctagttttaattttttttacttgtttggtttgaaacacgtgccatcttttgtgattgctccatgactgtcactgaacattagagaacaaaaagttgtgaacaatgactaatggcaaacaatcatggagaacaaggcattgcatggagaatctgttttcctcgcctgattgaataacaaactttatatgat

SEQ ID NO: 1052 - DNA, 541 bp, Glycine max
gaatggtgacgtatttgtcccgtttccacgcaattttcattgaaaagaaaagaagcaccgagcgaagccagccaggttgtcttccgattccttcgtgcgtgcgattcttctgatattccaaggcgacgcaccgacaccggacccatctccggcgacatctcaccgatctccggcgaatccccggtccccactttcttccctcgaaatgaatcccgagtatgattatctgttcaagctccttcttattggagactctggtgttggtaaatcatgccttcttctgagatttgctgatgattcgtacatcgagagctacataagcaccattggagttgattttaaaatacgtactgttgagcaggatggaaagaccattaaactacagatctgggacacagccgggcaagaacgatttaggacaatcaccagtagctactatcgtggggcccatgggatcattattgcttatgatgtgacagatgaagagagcttcaataatgtgaagcagtggctcagtgaaattgatcgctatgcaagtgat

SEQ ID NO: 1053 - DNA, 2028 bp, Glycine max
gatggtcagtagtaggtaacttgttttctcttcctcgatttgatcgatcgttccttctctctcttgtgtttatgccaggaatgacagcgtatcagtggcagtgcaggaaacgagagggagagttttcattgggaaggtaaaagcctttgtttgtagcagtgccttacatgaaccctcgccccccttctcttgttcgctaccactaactcatcgttttctcagtgtgccccgcgtgcgttctgctgtgtcctctcactcacaggtgtaaccgtgtaaccactaggatcatacttagtggcatggaaagaaagaaagaaagattaacctaaaaaccctgtgcaggctttcccagaaaagccaagtgagaaaaccaaaccctctattaccacttactacttacttcatgtaactgactatagccaccactatcactatttaggattttctgtaaaaagcctgatactcttttaccataaaacccgggagagccctcataataaaattgagagagagaataagagaattgtgtgtcgtgtttgtttttgtttggtttgttgtaaggttagctagtgagtattctacacaagggtggtggtagggcaaaaaggataagacagtgaatgtgtgtgtgtgtgtgtgtgtgtgtgtgttgttgacaagcaaaagctatggagggtggtagtagtagctctaatggcacttcttatctgttggcttttggagaaaacaacagtggtgggctatgcccaatgacgatgatgcctttggtgacttcccatcacgctggtcatcatccaataaatcctagtaataataataatgtaaacacaaactgtctcttcattcccaactgcagtaacagtactggaactccttctatcatgctccacaataatcacaacaacaacaaaactgatgatgatgataacaacaacaacactgggttagggtactatttcatggagagtgaccaccaccaccatcaccacggcaacaacaacaacaatggaagctcctcctcctcctcctcttctgctgtcaaggccaagatcatggctcatcctcactatcaccgtctcttggcagcttacgtcaattgtcagaaggttggggccccgcctgaagtggtggcaaggttagaagaagcatgtgcttctgcagcgacaatggctggtggtgatgcagcagctggatcaagctgcataggtgaagatccagctttggatcagttcatggaggcttactgtgagatgctcacaaagtatgagcaagaactctccaaacccttaaaggaagccatgctcttccttcaaaggatcgagtgccagttcaaaaatcttacaatttcttcctccgactttgctagcaatgagggtggtgataggaatggatcgtctgaagaggatgttgatctacacaacatgatagatccccaggcagaggacagggatttaaagggtcagcttttgcgcaagtatagcggatacttgggcagtctgaagcaagaattcatgaagaagaggaagaaaggaaagctacctaaagaagcaaggcaacaattacttgaatggtggaacagacattacaaatggccttacccatccgaatcccagaagctggctcttgcagagtcgacaggtctggatcagaagcaaatcaacaactggtttattaatcaaaggaaacggcactggaagccttcagaggacatgcagtttgtggtgatggatccaagccatccacactattacatggataatgttctaggcaatccatttcccatggatctttcccatcccatgctctagaaaattatccctcgtttgtgggctgctgataatagattcataaactcgtgctgtcacttattaaaaccttacaattattaatattaattaatatgcattctaagaaatcctagattgctatactataatatagtacgcaggtgtatcccttgctagctttttagacggtcctttgtgtggatcatctagttgaaggagttatgaataaataaaattccat

SEQ ID NO: 1054 - DNA, 770 bp, Glycine max
tgctgaccttattcaaatccctttaaggttttaatagatgttattttatatccatggatatgaagattaaaactagtatttgattacatgtttaagtagaataattatttgtcaatcatatcacaacatgtttatccttttacttactatataatccttttagtatccaattaatgttatcataaattgaatcgattcatatgatgatcagctagcaatgagggtggtgataggaatgggccgtctgaagaggttgttgttctacaccaacatgatagatccccaggcagaggaccagggactgaaagggtcagctcttgcgcaagtaccgcggatacctgggcagtctgaagcaggaattcaccaagaagaggaagaagggcaagctgcccaaagaagcaaggccaccatttacttgaatggtggagcagacactacaaatggccttacccatccgaatcccagaagctggctcttgcagagtcgacaggcctggatcagaagcaaatcaacaactcgtttatcaatcaaaggatgcggcactggaagccttcagaggacatgcagtttgtggtggtggatccaagccatccacactactacatgcatgatgttctgggccatccctctcccatggatctctcccacccaatgctctaaaaaataacgttttggtgcttgtgtgctcttaaagtatatgtattgtgtctaaatgcaaggcattcatataataataagtatgttactctgattagtaacgatatttacac

SEQ ID NO: 1055 - DNA, 495 bp, Glycine max
ctccagtttacaagcctcagttgaaaaaccacctgtttataagcctccagtttataagccacccatttacaagcctccagtgtataaacctccagttgaaaaaccaccggtttacaagcctccagtttataaaccacctgtttacaagcctccagtgtataaacccccaattgagaaaccacccgtttataagccaccagtttacaagccaccagtgtacaagcctccagtgtataagccaccagtgtacaagccaccagtgtacaagccaccagttgagaagccaccagtatacaaaccacccgtttataggcctcctgtttacaggccacctgtgtacaagccaccagttgagaagccaccagtgtacaagcctccagtgtacaagccaccagtatacaaaccaccagtttataagcctccagtgtacaagccaccagtatacaaaccaccagtttataagcctccagttgagaaacctcctatttacaagca

SEQ ID NO: 1056 - DNA, 1328 bp, Glycine max
ccacctcctccatactactaccactctccaccaccaccaaaacactcacctcctcctccatactactaccactccccaccaccaccgaaacactcacctcctcctccatattactatcactccccaccaccaccgaaacactcacctcctcctccatactactatcactccccaccacctccgaagcactcacctcctcctccatactactatcactctccaccacctcctaagcactcacctcctcctccctattactaccactctccaccaccaccaaagcactcacctcctcctccctactactacaagtccccaccaccgccacctaagaagccctacaaatacccatcccctccaccaccagtttacaagtacaagtctcctcctcctccctacaagtacccatctcctccacctcccccatacaagtacccatctccaccacccccagtctacaagtacaagtctccaccacccccagtttacaagtacaaatctccccctcctccttacaagtacccatctcctcctcctcctccatacaagtacccttctcctccaccaccagtttataaatacaaatctcctcctccaccagtctacaaatacaagtctccacctcctccatacaagtacccatctccaccacccccaccatacaagtacccatcaccgccacccccagtgtacaagtacaagtctccaccacccccagtctacaagtacaagtcacctccaccaccacacaagtacccttctcctccaccaccaccctataagtacccatctccaccacccccagtctacaagtacaaatctcctcctcctccctacaagtacccatctccaccacctccaccctacaagtacccatctcctccacccccagtttacaagtacaagtctcctcctcctcctgttcattcaccacctccaccacactacatctatgcatcccctcctcctccatatcactactagatagtggttttgcttagcttcccgagtagttattaatgaagaatataagccaataaagaacgttgttgatagcaggaagatgcacttcgcaattacacaaggaaaacaacggaagcaaagtttccgcgcattttgtcacataagaagaaagaagtgtccatccttttcttcttcgtttgtattgtttatgaatttttattattgtgtttttagacagttgtatggcactatatcacatgaatgcattttggtttgtaacctgctacgtttgcaaggggttgtgaagccaatttaataataaataaaaacaaatgctttctctcaaaaaaaaaaaaaccgaattc

SEQ ID NO: 1057 - DNA, 675 bp, Glycine max
accatacaagtacccttctgctccaccaccaccatataagtacccatcttcaccacccccaggctacaagtacaagtctccaccacccccagtttacaagtacaaatctcctcctccaccctataagtatccatctcctccaccaccaccatacaagtacccatcaccaccacccccagtttacaaatacaagtctcctcctcctcctgttcattcaccacctcccccagtttacatctatgcatcccctcctcctccatatcactactaggttatttctgaagaatataagccaataaaaaacgttgttgatagcaggaagatgcacttcgcaattgcacaaggaaaacaacggaagccaagtttccgcgcattttgtcacataagaaaaacgaagtgtcaatccctttcttcttcgtttgtattgtttatgaattattaattactttggttttagacagttgtatggcactgcttttgtctctgtcgttgaatgatatcacatgaatgcattttggtttgcaacctgctgcgcttgcaaggggttgtgaagccaattttataatgaataaaatcaaatatatgctttgtatatttattgaaaaattctacaatatgtattgtatcttcaataataaaaatttgatttaaagataattaaaaaaaaaaaaaaaa

SEQ ID NO: 1058 - DNA, 1070 bp, Glycine max
  unsure (1)..(1070): unsure at all n locations
ggctgcaggaattcggcaccagcccaccaccaccttattattatcattccccacctccacctaaagagcatgtaccccctccctactactaccactcaccaccaccaccatccccatctccaccacctccttattattataaatcccctccaccaccatccccttctcctcctcccccctactactatcactctccaccaccaccatctccttctcctcctcctccctactactaccactctccaccaccaccatctccatcaccaccacctccatactattacaaatcccctccacctccatctccatctccaccacctccttactactatcaaagtcctcctccaccatctcccactcctcatcctccctactactacaaatcccctccaccaccaacgtcgcatcctccaccttaccactatgtgagccctccaccaccttctccatctcctcctccaccataccattacacatcaccacctcctccttccccagctcccgctcccaagtacatttacaaatcacctccacctccagtttacatatatgcttccccacctccacctatctacaagtaagttcgaattgcggaagcaccattcacgataaatcatgttctagtttttatcgaggaataaaggcaagctctatttggagtcaagtgaaacatctatcttcctgtccaagttctttgaataaaagtctgaatgtgtcatctctgcactacaatatttgtgattctgaccaagttggttctatttgtttgatggccatcttgcacgtcctgatcttattgtgttcaagtgacagacaaatccaaacagggaagagagatttgaaatgtaaatgccaagtaaatgtgaaaagtacagtccagttttagtgatctctttaatttatttgttcatagattaatatgatggtgtatgattgcttttctatttattgtggcatttttgtgttgtaccctgttgttgtgtttgcaataagtattagtaataaagcagcaaattcaattttgtgttcatgcatccaataacaaaaaaatttangaccatattatttta

SEQ ID NO: 1059 - DNA, 1094 bp, Glycine max
agacgacagaaggggatcacatcccaccttaaacccatttccataatcactttttcctactttcttctccatccatcccttgactaattaattatccctcacaactaccaatggccgaagagaaacaccacaagcaccgcctcttccaccaccacaaggacgaggataataagccagtagaaaccgatactggttacgacaacacatcatattccaagccttctgatgactatgactctggtttcaacaagccatcgtatgagtcttctggcggtggctatgaaggtggttacaacaaaacatcttattctagtgatgagccagcttctggtggtggctatgaaggtgggtacaagaaaacaggttattctggtggcattgatgagacttctggtggctatggcgctggtggtggtggatactctgacgtcactgatggtggctacggcaaaccaagtggtggctatggcgccgctggtggtggtggtgtgtaccctgacactaccactgatggtgggtacagcaaaacaagtggtggtgggtatgatgatgaggttgactataagaaggaagagaagcaccacaagcatcttgagcaccttggtgagttaggtgctgcatctgctgctgcttacgccttgcatgagaagcacaaggcagagaaagacccagagcatgctcacaggcacaagatagaagaggaggttgcagcagcagctgcagtgggatctggtgggtttgccttccatgaacatcatgagaaaaaggaagcaaaggagcaagatgaggaagctcatggaaagaagcaccaccatctctttggctgaagcataagcaaccaattatgagcatattccttctacttgtcttatatatatatatgcttttggcttatatatatatgtgtgtctttaagttaatcatcttccagtttattttgggagatcagtatggtttggagaatgtttccttgaaatgtgttgctctatatatgcatgtgtactgtgttaagtgttaagtacataaaataatatatactcaaatggtttgagattaaaaaaaaaaaaaaaaaaaaaagggcggccacgggcgta

SEQ ID NO: 1060 - DNA, 675 bp, Glycine max
ctcaaacccatttccttgatatcttagttatctaattacctcaattaatcccttaattgcaagcatcatggctgaggagaaacaccaccaccacttccaccaccacaagggcgatgatgtgcctggcgaggttgattataagaaggaggagaagcaccacaagcatcttgagcaccttggggaacttggtgctgcggctgccggtgcttatgccttgcatgagaagcatgaggccaagaaagacccagagcatgctcacaggcacaaggtagaagaggagattgcggcagcagctactgttggtgctggtggttttgtcttgcatgaacaccatgagaaaaaggaagttaagaaagaagatgaggaagctcatggaaagaagcaccaccatctgtttggctgaacatgataaatattcatatataattaatattcaagctccaaagtatcaccatgcctgtgtatctctatcatatcttccatttctagtgtgcctttgaataaattctgtgcgagcttgaagagtgtttaattatgcctatggtgttacttcatatatatatttgcgtatatataatgtatgctatgttggctatattgataataagattgtaaagtaatttgagattgtattattatcctgataattttatgcaaggcgtatgtgttaagagt

SEQ ID NO: 1061 - DNA, 574 bp, Glycine max
  unsure (1)..(574): unsure at all n locations
cggctcgacctcgagcgaatcggctcgaggacttctggtggctatggcgctgactggtggtggatactacgacgtcactgatggtggcacacggcaaaccaagtggtggctatggcgccgctggtggtggtggtgtgtaccctgacactaccactgatggtgggtacagcaaaacaagtggtggtgggtatgatgatgaggttgactataagaaggaagagaagcaccacaagcatcttgagcaccttgcgtgagttaggtgctgcatctgctgctgcttacgccttggtaatcttctttaccattattattaatttgctttttatatatataatatattttcactaagttaacatgaaaatgattgtaaattaatgtatgtatgcactaaagcatttatttgttcttaattaaccttttcatttcgacggaaaattaaataaaatttatttaagaattgttttcataaaaaattaaattctcataatattcaaacatttaattttaatttcagcatattaattatttntttcaattcatttggttatggatatatacgtttagttttatggtc

SEQ ID NO: 1062 - DNA, 431 bp, Glycine max
cgctcggatccatcacacctcaaacccatttccttgatatcttagttatctaattacctcaattaatcccttaattgcaagcatcatggctgaggagaagcaccaccaccacttccaccaccacaagggcgatgatgtgcctggcgaggttgattataagaaggaggagaagcaccacaagcatcttgagcaccttggggaacttggtgctgcggctgccggtgcttatgccttgcatgagaagcatgaggccaagaaagacccagagcatgctcacaggcacaaggtagaagaggagattgcggcagcagctactgttggtgctggtggttttgtcttgcatgaacaccatgagaaaaaggaagttaagaaagaagatgaggaagctcatggtaagaagcaccaccatctgtttggctgaacatgataaa

SEQ ID NO: 1063 - DNA, 430 bp, Glycine max
ccctcagaacctaggcaggtcgattgacataacacccgaatccaagtgaaacgaaaaacactcatcatcatggattcagttgcattaaatggcaaaagcaatgataagcctcttcacgttgccatgctcccatggctggccatgggtcacatatacccttacttcgaagtcgccaagattcttgctcaaaagggtcactttgttaccttcataaacagccccaaaaacattgaccgcatgcccaaaaccccgaaacacttagaaccattcatcaaactcgtgaagctacccttgccaaaaatagagcatctcccagaaggcgcagagagcacaatggacattccgtccaaaaaaaactgtttcctcaagaaagcttacgagggcctacaatacgccggttccaagttgctgaaaacgtcaaaccctgact

SEQ ID NO: 1064 - DNA, 391 bp, Glycine max
ccatgcctgtgtgtctctatcatatcttccatttctagtgcgcctttgaatattaattatatatgaatatttatcaggttcagcagctactggtggtgctggtggttttgtcttgcatgaacaccatgagaaaaaggaagttcagaaagacgatgaggaagctcatggaaagaagcaccaccatctgtttggctgaacatgataaatattcatatataattaatattcaagctccaaagtatcaccatgcctgtgtatctctatcatatcttccatttctagtgtgcctttgaagcttgaatattaattatatatgaatatttatcatgttcagcagctactgttggtgctggtggttttgtcttgcatgaacaccatgagaaaaaggaag

SEQ ID NO: 1065 - DNA, 284 bp, Glycine max
tatctctctctctctctctctctctctctctctctctctctctctctctctctctctctctctctctctctctctctctcgtgccgaattcggcaccagaagttaatcatcttccagtttattttgggagatcagtatggtttggagaatgtttccttgaaatgtgttgctttatatatgcatgtgtactgtgttaagtgttaagtccataaaataatatatactcaaatggtttgagattacttgatttatctcatcgatcatagaagtatttttcaaaaaaa

SEQ ID NO: 1066 - DNA, 241 bp, Glycine max
gggatctggtgggtttgccttccatgaacatcatgagaaaaagacccagagcatgctcacaggcacaagatagaagaggaggttgcagcagcagctgcagtcgggatctggtgggtttgccttccatgaacatcatgagaaaaaggaagcaaaggagcaagatgaggaagctcatggaaagaagcaccaccatctctttggctgaagcataagcaaccaattatgagcatattccttctac

SEQ ID NO: 1067 - DNA, 253 bp, Glycine max
atctaattacctcaattaatcccttaattgcaagcatcatggctgaggagaagcaccaccaccacttccaccaccacaagggcgatgatgtgcctggcgaggttgattataagaaggaggagaagcaccacaagctcctgggcaccttggggaacttggtgctgcggctgccggtgcttatgccttgcatgagaagcatgaggccaagaaagacccagagcatgctcacaggcacaaggtagaagaggagatt

SEQ ID NO: 1068 - DNA, 2243 bp, Glycine max
tgaagaaaacaccatcatagacgttacattgatatcaacagtactccaagtccttcaacaacattcagggcaaggaagacagttatataacatttatagaaagaaaaaaaagaagaagaaagagttctgaccatggctgcatcattatttatgccttcatccatagtggacgaagaagcgaggtttgaagccgaagtggcggaggtgcaagcatggtggaactctgagaggttcaggctaacaaaaagaccatacacagcaagagatgtggtgtccctccgaggcaacctcagacaaacctatgcctcgaacgagatggcgaaaaagctctggtgccttctgaagaaccaccaagccaacggcacagcctcaaggacttttggtgcacttgatcctgttcaggtcactcaaatggccaagcacttggacacaatctatgtctcagggtggcagtgctcagccacacacaccacgagcaacgagccgggccctgaccttgctgattacccttatgatactgtcccaaacaaggttgagcacctcttctttgctcagcagtaccatgacaggaagcaaagagaggagaggatgagaatgagcagggaagagagggcaaggaccccttatgttgattacttgaggccaatcatagctgatggcgacactggttttggtggtaccacagcaactgtcaagctttgcaagctatttgtggagagaggtgctgccggaatccacattgaggaccagtcttcagtgaccaaaaaatgtggtcacatggctgggaaagtgcttgttgccatcagtgaacacatcaacaggcttgtggctgcaaggcttcagtttgatgtcatgggggtggaaactgttttggtggcaagaacagatgcagaagctgctaatttgattcaatcaaacattgacacaagggaccatcaatttatcttgggagtgaccaaccccaaccttaaagggaagagtttagcaactcttatgcaacaaggcatggctgctgggaagagtggagctgagcttcaggctttggaggatgagtggctctcaaaggcacagttgaagactctctcagaagcagttgtggaggcaattgagaggcagaacattggagaggaagagaagagaaggaagctgaatgagtggatgcaccattcaagctatgaaaggtgtctttccaatgaggagggtagggagatagctgaaaagttaggagtaaggaacctcttttgggattgggacttgcctaggactagagaagggttctacaggttcaaagggtcagtgattgcatcagttgttagaggttgggctttttctccacatgctgatgtgatatggatggaaactgcaagcccaaatgtgattgagtgcacacagttttctgagggggttaggtcaaagcaccctcagatgatgctggggtacaacctctctccatctttcaactgggatgcttctggcatgagtgatgaacaaatgagggacttcattccaaagattgcaaagttggggtatgtgtggcagttcatcacagtgggagggctgcattctaatgcactcattacttcaacatttgcaagggattttgccaataggggaatgctagcttatgtggagaggattcagagagaggagaggaacaatggggttgacacacttgctcaccagaaatgggctggtgctaactactatgataggtatctcaagactgtccagggaggtgtggcttcaactgctgcaatgggaaaaggagtaactgaagagcagtttaaagaatcatggactaggccaggagctgtagaaattgatagaggcagtattgtggttgctaaggccagaatgtgaaagtgctacttttgcagaactatactgccgagagtggaacttggggaaaattcaccaatttctgtgttggattggaatttggaataaatgtcctcaataattgaagtattaaacgggccattgaatcattctgctatttttgccttcataatttcttatatttcttacttgttcagactcttggccatgtgggcaaggagaacaaggaaaacttgtttttctgtgttttgtaatttgttttactcctactgttaaacatattttacttatagtgtatatttggacatgcaattgtggacaaggagcacaaagaaatctggttttactgttttgtaatttggtttactccttcccttaaatatattttacttggtgcttattcg

SEQ ID NO: 1069 - DNA, 2070 bp, Glycine max
gaagaaaacaccatcatagacgttacattgatatcaacagtactccaagtccttcaacaacattcagggcaaggaagacagttatataacatttatacaaaaacgaaaaacaagttctggccatggctgcatcatcatttaggcctccagccatagtggcggaagcagcgaggttcgaagccgaagtggcggaggtgcaagcatggtggaactctgagaggttcaggctaacaaaaaggccatacacagcaagagatgtagtgtccctccgaggcaacctcagacaaacctatgcctcgaacgagatggcgaaaaagctatggcgcctcctgaagaaccaccaagctaatggaacagcctcgaggacttttggtgcacttgatcctgttcaggtcacccaaatggccaagcacttggatacgatctatgtctcagggtggcagtgttcagccacacacaccacgagcaacgagcccggtcctgaccttgctgattacccttatgacactgtcccaaacaaggttgagcacctcttctttgctcagcagtaccatgacaggaagcaaaaagaggagaggatgagaatgagcagggaagagagggcaaggacaccttatgttgattacttgaggccaatcatagctgatggtgacactggctttggtggcaccacagcaactgtcaagctatgcaagctctttgttgagagaggtgctgctggaatccacattgaggaccagtcttcagtgaccaaaaaatgtggtcacatggctgggaaagtgcttgttgccatcagtgaacacatcaacaggcttgtggctgcaaggcttcagtttgatgtcatgggggtggaaactgttctggtggcaagaacagatgcagaagctgctaatttgattcaatcaaacattgacacaagggaccatcaatttatcttgggagtgaccaaccccaaccttaaggggaagagcttagcaactcttatgcaacaaggcatggctgctggaaaaaatggagctgagcttcaggctttggaggatgagtggctctcaaaggcacagttgaagactctctcagaagcagttgtggaggcaattgagaggcagaacaacattggagaggaagaaaaaagaaggaagctaaatgagtggatgcaccattcaagctatgaaaggtgcctttctaatgaggaaggtagggaaattgctgaaaagttaggagtgagaaacctcttttgggattgggacttgcctaggactagagaaggtttttataggttcaaaggttcagtgactgcatcagttgttagaggttgtgctttttctccacatgctgatgttatatggatggagactgcaagcccaaatgtggttgagtgcacagagttttccgagggggttaggtcaaagcaccctcagatgatgcttggatacaacctctctccatctttcaactgggatgcttctggaatgagtgatgaacaaatgaaggatttcattccaaagattgcaaagttggggtatgtgtggcagttcatcactgtgggaggtcttcattccaatgcactcataacttcaacatttgcaagggattttgccaataggggaatgctggcttatgtggagaggattcagagagaggagaggaacaatggggttgacacactagctcaccaaaaatgggctggtgctaattactatgataggtacctcaagactgtccagggaggtgtggcttcaactgctgcaatgggaaaaggagtaactgaagagcagtttaaagaatcatggactagatcaggagctgtaaacattgatagaggcagtattgtggttgctaaggccagaatgtgaaagtgctacttctgccgaactatgctgcatgctgagagtggaacttaatggaaaattcaccaatttctgtgttggattggaataaatgtcctcaataatataaacaggccattgaatcattctgctattttttcctgcataatttgttacatttcttactagttcagactcttagccatgtggcaagaacaagcaaggaaaacttgtttctgtgttt

SEQ ID NO: 1070 - DNA, 1296 bp, Glycine max
  unsure (1)..(1296): unsure at all n locations
gaccatatccgtttccttatttttttcttcaattctcttgtatacagttttggtctgtaatttgttgctttggtgagagagtggatatggacgaacggtacgagactttgaaggagcttggttcagggaacttcggagtggcaaggttggccaaagacaaggagacaggagaacttgttgccatcaaatacatagaaaggggaaaaaagattgatgcgaatgttcaaagggagatagttaaccaccgatctttaaggcatccaaatattatcaggttcaaagaggtatttctgacccctactcatttagctatcgtcctggagtatgctgctggtggtgaactcttcgagaggatatgcaatgctggtcgattgagtgaagatgaggcaagatttttctttcagcaactaatatctggagttagctattgtcattccatgcaaatatgtcatagagatctgaaattggaaaacactctactggacggaaatccagctcctagacttaaaatttgtgactttggtttctccaagtctgctttgctgcactctcaacctaaatcaactgttggaactcctgcatacattgctccagaagttttgtcgcgaaaggaatatgatggaaaggttgccgatgtttggtcgtgtggtgtgacactttatgtcatgttagttggagcatacccatttgaagatccagaagatcctaaaaatttcagaaagagtattgggagaattatgagtgttcaatatgccatacccgactacgtacgtgtctctaaggagtgtaggcatcttatatctcgtatttttgttgccaatcctgccaagaggatcaacatctcggagataaaacagcacctttggtttaggaagaacttgccaagagagataattgaggctgaaagaaggggttacgaggaaacacaaaaggaccaaccaagccaaagtgtggaagaaatcatgcagatcattcaagaagcaaggacaaaaatccacactggtgagcaagctggcacaggaacttcggatgttgtgcgtggtgatgaggctaatgaggaagttgatattaatgaccactttgccaaatacctaacccttgattaatttgtggttggctaaattccctctctctctatatatatattgtttaccgaagctagtgtgcattcttcgtgtgtatgatatagagttgaatgagacacaacacttcatcgaatttgaaagttgggctattttgtttatcaattataataagaattaatttttgttgtttnnnnnnnnnnnnnnnnnnnnn

SEQ ID NO: 1071 - DNA, 1243 bp, Glycine max
ccaaaacaaaaccatatccgtttccttattttggtcttctcttgtatacagttttggtctgtaattttattgcttttggtgagagtggatatggaggaacggtacgagactttaaaggagcttggttcagggaacttcggagtggcaaggttggccaaagacaaggagacaggagaacttgttgctatcaaatacatagaaaggggaaaaaagattgatgcaaatgttcaacgggagatagttaatcatcgatctttaaggcatccaaatattatcaggttcaaagaggtatttctgacccctactcatttagctatcgtcctagagtatgctgctggtggtgaactcttcgagaggatatgcaatgctggtcgattgagtgaagatgaggcaagatttttctttcaacaactaatatctggagttagctattgtcattccatgcaaatatgtcatagagatctgaaattggaaaacactctactagacggaaatccagctcctagacttaaaatttgtgactttggtttctccaagtctgctttgctgcactctcaacctaaatcaactgttggaacacctgcatacattgctccagaagttttgtcacgaaaggaatatgatggaaaggttgccgatgtttggtcgtgtggtgtgactctttatgtcatgttagttggagcatacccatttgaagatccagaagatcctaaaaatttcagaaagagtattgggagaattatgagtgttcaatacgccatacccgactacgtgcgtgtctctaaggagtgtaggcatcttatctcttgtatttttgttgccaatcctgccaagaggatcagcatctcggagataaaacagcacctttggtttaggaagaacctgccaagggagattattgagcctgaaagaaggggttacgtggaccacaaaaggacccaaccaagccaaagtgtggaagaaaccatgcggatcatacaagaagcaaggaccaaaatccacactggtgagcaagctggtacaggaacctcggatgctgtgcatggtgatgaggctaatgaggaagttgatattaatgaccactatgccaaatacctagcccttaattagtttgtggttgggtgtttaccaaagctagtgtgcattcttcgtgtgtaaggtatagagttgaatgagacataacacttcatcgaatttgagagttgtatcaatttttatgagaatcaaactttgttgtttgggt

SEQ ID NO: 1072 - DNA, 1632 bp, Glycine max
cactctttgagaggttggtgtagtagctttttggagggttgacatggaagaacggtatgagccattgaaggagcttggtgctgggaattttggtgtggcaaggttggcaaaagacaagaaaactggagagcttgttgcggtcaaatacatagagaggggcaaaaagattgatgagaatgttcagagggagataattaaccaccgatctttaaggcatccaaatataatcaggtttaaagaggtgtttctgacccctactcatttagctatcgtcctagagtatgctgctggtggtgaactcttcgagaggatatgcaatgctggtcgattgactattttgcaggcaagatttttctttcagcaactaatatctggagttagctattgtcattccatgcaaatatgtcatagagatctgaaattggaaaacactctactggacggaaatccagctcctagacttaaaatttgtgactttggtttctccaagtctgctttgctgcactctcaacctaaatcaactgttggaactcctgcatacattgctccagaagttttgtcacgaaaggaatatgatggaaaggttgccgatgtttggtcgtgtggtgtgactctttatgtcatgttagttggagcatacccatttgaagatccagaagatcctaaaaatttcagaaagagtattggggtgaattcttatttgacttaaaagagatcctttatgattaatatctttgatccatagcaccaagtttaaactctgattctctcgttggcagagaattatgagtgttcaatacgccatacccgactacgtgcgtgtctctaaggagtgtaggcatcttatctcttgtatttttgttgccaatcctgccaaggtaagtattatttattctgttcatccataggatttatataagtattgttaagatattcaaaactaaagatgttcgtggtataaaatggccccagcgaaattcatacttcaccttaaaaatatcataatgaaatgttaggaagtgtcttcaaggtgaaattatcacatagttgagtttttcaatttgcaataaaaaattaataacatttgattacatgttattcgataattaattggaacaataatagtcctactcttaaatcatgtaataatttctaggtttgtttcttctatattgagaatctccttgtattttaaaacttactatttctcatcattgttaaagaggatcagcatctcggagataaaacagcacctttggtttaggaagaacctgccaagggagataattgaggctgaaagaaggggttacgaggaaacacaaaaggaccaaccaagccaaagtgtggaagaaatcatgcggatcatacaagaagcaaggacaaaaatccacactggtgagcaagctggtacaggaacttcggatgctgtgcatggtgatgaggctaatgaggaagttgatattaatgaccactatgccaaatacctagcccttaattagtttgtggttgggtgtttaccaaagctagtgtgcattcttcgtgtgtaaggtatagagttgaatgagacataacacttcatcgaatttgagagttgtatcaattataatgagaatcaaactttggtgtttgggt

SEQ ID NO: 1073 - DNA, 419 bp, Glycine max
tctgctcgagatttgcttgtactaagttttggtctgtgatttgcttgctttggtgagagagtggatatggacgaacggtacgagactttgaaggagcttggttcagggaacttcggagtggcaaggttggccaaagacaaggagacaggagaacttgttgccatcaaatacatagaaaggggaaaaaagattgatgcgaatgttcaaagggagatagttaaccaccgatctttaaggcatccaaatattatcaggttcaaagaggtgaagagtttgtttctatacttaaacggttctttgagtgtgatttttccagatatggatttggacattgaattttcttattagtagttacctgcattttttggttcttacagctcttaaatacacactggttgaaacttgttttagttcaaaaa

SEQ ID NO: 1074 - DNA, 534 bp, Glycine max
gggaaataaaaatactccatttacgtttcctgcatgttagtggtgatgagcatgtccgttcttggtgtgggctaaagattaaacaaattagattagttctattgagagctttctgaagttatatacacattctggaagtcagatcttttctgcaggtatttctgacccctactcatttagctatcgtcctagagtatgctgctggtggtgaactcttcgagaggatatgcaatgctggtcgattgagtgaagatgaagcaagatttttctttcaacaactaatatctggagttagctattgtcattccatggtacatatgcattcagaattttgggggtggtggtaatttaaaagtcccttggagtatcatcttctgcctcctactgcagcacatatgtcccagggatactgaattggcacacactctaatagacggaaatccagctcctaggcttaaaatttgtgactttggtttctccaaggttaataacatctcaccagaatgagcctttatggactagtcctttcatata

SEQ ID NO: 1075 - DNA, 1777 bp, Glycine max
cccacgcgtccggccacgcgttcgtccacgcatctacacaaaagtgttccacttgagtgaaaagtagtgtgttaagaactaaacaatttttcaatggcgtccaagaaacaagaggagcgagctgaggcagctgcgaaagttgctgccaaagaactcgaacaagtcaacagagaaagaagagaccgtgatttcggtgttgttgctgaacaacaacaacaacatcatcaggaagatcaacaaaaacgtggtgtaatcgggtccatgtttaaggcggtgcaagacacctacgagaacgccaaggaagctgtcgttggcaagaaagaagctactaataacgcgtacagtaatacagaggttattcacgatgttaacattcagcccgatgacgtgtcggcaacgggggaagtaagggacatatcagccacaaagactcatgatatctacgattctgccacggacaacaacaacaacaaaaccggttccaaggtcggagagtacgcagattacgcttctcagaaggccaaggaaacaaaagatgcaacgatggaaaaagctggagagtacacagattatgcttcgcagaaagcgaaggaagcgaagaagacgaccatggagaagggtggagaatacaaggattactctgcggagaaagctaaggagagaaaagatgctactgtgaataagatgggagagtataaggactatgctgcggagaaagccaaagaggggaaagatgctactgtgaataaaatgggagagtataaggactatgctgcggagaaaacgaaagaggggaaagatgccactgtgaataagatgggagagtataaagattatacggcggagaaggcgaaagaggggaaagatacgacgttggggaagcttggggagctgaaggactctgcggctgatgcggcgaagagggcagtgggttacttgagcggcaagacagaggaaaccaaagagaaagtctcggagacggcagaggcgacggctaataaggcaggggagatgaaggaggcaacaaagaaaaagacggcggagaccgcggaggcggcgaagaataaggcgggggagatcaaggacagagccgcggagacggcggaggccgcgaaaaacaagaccgcggagaccgcggaagtgacgaagaataaggctttggagatgaaggatgcagcgaaggacaggaccgctgagacaacggatgcggcgaagcagaaaactgcacaggcaaaggagaacaccaaggaaaatgtgagtggtgcaggtgaaactgcaaggaggaaaatggaagagccaaagcttcaaggtaaagaagggtatgggggccgtggagacaaggtggtggtgaaagtggaagagagtcgaccaggggcaattgcggaaacgctgaaagccgccgaccagattgcgggacagaccttcaacgatgtaggacgcttcgatgaagagggtgtcgtcaatgtggagcgccgcaagaaataattaaaacgtgatctatgatacaacaatattagtatatatagacgcatgcagtttatatagtatatattgtcatgttgtatgtttttacattttggtttgcttgtttacattctcttcaaaaaaaaaaaaaatgtgtagtacgtgtaaggttttgaagattggttctaggctccgtgggaaccatttcaacaataaacattttgcgcgttcttgtacacgtagtgatgagaagagatgccttatgggcagtatcatctaaaacttattttcatccatcatagaatttggatct

SEQ ID NO: 1076 - DNA, 882 bp, Glycine max
tgacgtcggacgcacgcgtgcctaaactcggaattcggtccgaagtcggatcgagcaaattgagacagatgactcacacgtattgtgttaagaagtaaacaatttttcattggcgtccaagaaccaagaggagcgagctgaggcagctgcgagagttgctgccaaagaactcgaacaagtcaacagagaaagaagagaccgtgatttcggtgttgttgctgaacaacaacagcaacatcatcaggaagatcaacaaaaacgtggtgtaatcgggtccatgtttaaggcggtgcaagacacctacgagaacgccaaggaagctgtcgttggcaagaaagaagctactaataacgcgtacagtaccacagaggttattcacgacgttgacattcaacccgatgacgcggctgcagcgagggaagtgagagacaaatcagcctcaaagtcaccaggtatctacaattctgccactgctgacaacaaaaccggttccaaggtcggagagtacgcagattatggttctcagaaggcgaaagaaacaaaagatgcaacgaaggaaaaagctggagagtacacagattatgcttcgcagaaggcgaaggaaacgaaggacaagacaatggaaaaggctggagagtacactgattatgcttcgcagaaggcgaaggaaacgaaggacaagacaatggagaaggctggagagtacacagattatgcttcgcagaaggcgaaagaagccaaggacaagacaatggagaagggaggggaatataaagactatgctgcagagaaggctaaagaaggaaaagatgctactgtgaataagatgggagagtataaagattatacggcggagaaggctaaagaggggaaagatacgac

SEQ ID NO: 1077 - DNA, 395 bp, Glycine max
gaaggcgaatgaaacgaaggacaagacaatggagaaggctggagagtacacagattatgcttcgcagaaggcgaaagaagcgcaaggacaagacaaccgggtccaaggccggagagtacgcagattatgcttcgcagaacgcgaaagacacaaaagatgcaacgaaggaaaaagctggagagtacacagattatgcttcgcagaaggcgaaggaaacgaaggacaagacaatggaaaaggctggagagtacactgattatccttcgcagaaggcgaaggaaacgaaggacaagacaatggagaaggctggagagtacacagattatgcttcgcagaaggcgaaagaagccaaggacaagacaatggagaagggaggggaatataaagactatgct

SEQ ID NO: 1078 - DNA, 411 bp, Glycine max
gacatcgcatgcacgccgtacgttaaccccggaatccggcccaagcaaaacttccacttgagagaaaagtagtgtattaagactacaaattttcaatttttcaatggcgtcgaggcaacaaaaagaggatcgagctgaggcagctgcgaaagttgctgcgaaagaactcgaacaactcaaccgagaaaaagaccgtgatttcagtgttggtgttgcagaccaacaccaacaagaagaacatcagttagatcaacaaaagcgtggtgtaatcggatccatgttcaaggcggtgcaagacacctacgagaacgccaaggaagctgtcgttggcaagaaagaaccttcgacgacgactaactcgtacagtaccagagaggttattcacgacgttgacattcaacccgatgacgc

SEQ ID NO: 1079 - DNA, 614 bp, Glycine max
taagatagtctctgctatgccggtgatgctgctcagaaatcaaaagactatgctgcagagaaggctaaagaaggaaaagatgctactgtgaataagatgggagagtataaagattatacggcggagaaggctaaagaggggaaagatacgacgttggggaagcttggggagctgaaggactctgcggctgatgcggcgaagagggcagtggttacttgagcggcaagacagaggaaaccaaagagaaagtctcggagacggcagaggcgacggctaataaggcggcggagatgaaggaggccaccagggagaaggctgccgggactgcggaggcggccaagaacaaggccgcagaggtaaaggacagagctgcagaaaccgcggaggcggccaagaacaagactgccgagactgctgaggcagcgaacagaaaaccgcacaggcaaaggacaacgccaaggaaaatgtgagtggtgcagatgaaggagcaaggaggaaaatggaggacctaaggcttcgaggtaaagggtatggaagtcatgaatctgcaggggggcgtggagataaggtggtggtgataatgctgacacagtaatcaggggcatttgcagctt

SEQ ID NO: 1080 - DNA, 337 bp, Glycine max
tggagataaggtggtggtgaaagtggaagagagtcgaccaggggcaattgcggaaacactgaaagcagcggatcagattgcgggacagaccttcaacgatgtgggacgcttcgatgaagaagagggtgtcgtcaatgtggagcgccgcaagaaataaaataaaacgtcgtctatgatacaaatatagacgcagtttatattatagtatattatcatgatgtatgttgtttactttttggtttgcttctttacaaaaaatgtgtatgtgtatggttttgaagattggttctagactcgtgggaaccatttcagcaataaaaattttgcgcgttcttgt

SEQ ID NO: 1081 - DNA, 1721 bp, Glycine max
accctctctccctctctgttcgcactctgtctttcccctgtttccgcgtcactgagtcatggcgattcgcaactcgctcaccggccaattcctccgccgcagctccgtcgccggagcaaggctcatgtcttcttcgtcctcatggttccggagcatcgagcccgctcccaaggatcctatcctcggagtcactgaagctttcctcgccgatcagagtccaaacaaagtcaacgtcggagtgggtgcgtatcgcgatgaccacggaaacctgtggttttggaatgtgttagagaagcagagaggagggttgccggaagtcaattcatggagtatcttcccatgggtggaagcataaaaatgatagaagaatcgctgaagctggcatttggagacaactctgagttcatcaaggataaaagaatagctgcagtgcaggctttatctgggactggtgcatgtcgactttttgctgcatttcaacagagatttcatcctaatacccaaatctatataccagtgcctacctgggccaaccaccataacatttggagagatgctggagtgcctatgaagacattccgttactatcaccctgagtctagaggattggatttttcaggactgatggatgacataaagaatgctccagatggttccttctttctgcttgtgcttactgctcataatcctactggagtagatccttcagaagaacaatggagagagatctcttcccagataaaggctaagggtcatttccctttctttgacatggcatatcaaggttttgctagtggtgatccagagagagatgcaaaagccataaagatttttcttgaggatggtcatttaataggacttgctcagtcatatgcaaaaaatatgggactgtatggccagcgagcaggaagcctgagtgtgctttgtgaagatgagaaacaagctgtggctgtaaaaagtcagttgcagctgattgctagacccatgtacagtaacccacctctccatggagcacttatagtttctactgtccttggtgatccagatttgaagaagttatggcttaaagaagtcaaggttatggcagaccgcatcatcggaatgaggactacactacgagaaaacttagaaaagaaggggtctactttgccatggcagcatataactaatcagattggtatgttctgctacagtggattgacacctgaacaggttgatcgtatgacaaacgagtttcatatttacatgacccgtaacggtcgtatcagtatggctggtcttaatacgggcaacgttggatatgtcttggacgctatccatgaggttacaaaatcattctagattattcaatcacccaacaggtgaccaaatttttgtctttggagacaaacatctcagaagtagtacccttatccaggggagcaaaataaatttaataaagtctgacaaattttcaacttgtttcggggtaagatagtgatactcttcagggtttaccttgcatattgaagacccttattgcaatacgtatccgatttatcatatccatgcaccatagattatatccatttttacagacatcttgtttagcactttaatgagcataaccctgtatcatcattttttttataaaataatttgagtagtagattgaataagggctttatttatggtgaacaggaagtacgtagcttcattccttactacactattattctgtt

SEQ ID NO: 1082 - DNA, 1804 bp, Glycine max
gacagtagtaacgctctctttcttgaataagcgacaattcaaaatgtcgacccagaatcgtcgctcgtcgttttcctcctcaacgacgtcgtctttggccaaacgccatgcatccgcctcaacgacgtcgtctttggccgccgctcctacaaacatggccaagaagcggcctcctctctccaacctcaccaacaccgttgctcaccgcaactcttcctcttcggttccatgcgcagctaaatttgccaagaccaagaaagacgttgttccggcgtgttcagggaacaaaaggcccacattggcgaatgtgaaacccgctagcgcagttatttttccgaaggctaattctttccctgtaaagaatgaagctccaccaactcctcctcctccagttgccaccgttactgttccggctccggtggtggatgtttcacctagtaaatcagatacaatgtccgtttctacggatgagtcaatgtcctcttgtgactccttcaagagccctgacattgaatatgtggacaatagtgatgttgcagccgttgattcaattgagaggaaaacattcagccatctcaacatctctgattctacagaagggaacatatgtagtagagagatacttgttgagttggagaagggggacaaatttgtcaatgttgataataattacgcggatcctcagctctgtgcaacctttgcttgtgatatctacaagcaccttcgtgcatctgaggcaaagaaaaggccttccacagacttcatggagaaaattcagaaggagataaactccagcatgcgtgctatattgattgactggcttgtcgaggtggctgaagagtatagactagtacctgatacattgtatttgacagtaaactacattgatcggtatctatcagggaatgtgatgaacagacaaaggttacagttacttggtgttgcctccatgatgattgcctctaaatacgaggaaatttgtgcacctcaggtggaggaattttgttacataactgataacacatacttcaaagaagaggttttgcagatggaatctgctgtcctgaattttctcaagttcgaaatgacagccccaacagtaaaatgtttcttaagaagatttgttcgtgcagctcaaggagttgatgaggtcccttcgctacaactagagtgcttgacaaactatattgctgaattgtctctcatggagtacagtatgcttggttatgctccatcacttgtagccgcttcagcaattttcctggccaaattcatacttttcccttcaaagaaaccatggaattccacattacagcattacaccttgtaccagccttctgatctgtgtgtctgcgtaaaggatcttcaccgtctttgttgcaacagccctaattctaatttgcctgcaattagggagaaatacagtcagcacaagtacaaatatgtggccaagaagtactgccctccttcaatacccccagaattttttcagaattgagcagagatgacagtctaattttcggttgggataggcttagattgacgtaacttcttgtctccggagaaagatgctttctctcacactgtacaatgtagttgtcaaccccttccgtctcaattagaattcttgcatctgctttcattgacgtgcatactcttatgcccacaaattcacaaaaaaatcaacgcttcaagaagcgacttgtattattagctaagctaatgcttcagtagcatcattaatagctaagctactactcttgcaacagtttggaaggtataaaatctaggtgcattacctagt

SEQ ID NO: 1083 - DNA, 283 bp, Glycine max
cgaaaacaaagaagcaaacgaaactaaagcactatagacagtaacgctgtcttccttgcttcgttcttgaataagagagtattcaaaatgtcgacccagtatcgtcgttcgtcgtctttggccgctcctgctaacatggccaagaagcgtcctcctctctccaacctcagcaacaccgttgctcaccgcaactcttcctctttggttccatgcgcactaaatttgccaagaccaagaaagaggttgttccggcgtgttcagggaacaaaagaccaacattggc

SEQ ID NO: 1084 - DNA, 1831 bp, Glycine max
ggcatttctcaaaggaacaaagaaacaaagaagtaaacacactgtttcatactttcgtttcgttcattcggcgtagaagcaaaagagagagatagagagagggaaaaaggttgctaccaacaacaaacaaaaacagtgttgcttgattccgcggtggcgagaaccgacgtgagcggcggaggagaggcgcggaacggtggtcttcagggttttctgacgtctctgttctcgaccctcggcggtgttttcgggtcaacgtttcaagaaccgcatcaaagtgttatcatggcttccagattggaacaacagcaacaacccaccaatgttggtggtgagaataagcagaaaaacatgggcggtgaaggaagaaacagaagggtgctgcaagatattgggaatctcgtgggtaaacaaggccatggaaatggaattaacgtgtctaaacctgtcacaaggaactttcgtgctcaactattggccaatgcacaagccgcaacagaaaagaataagaaatcaagcactgaagtgaacaacggagcagtggtggcaactgatggggttggtgttgggaattttgttcctgctagaaaggtgggagcagctaagaagcctaaagaagaacctgaagtgattgtgattatctctgatgatgaatcagacgaaaagcaagctgtgaagggaaaaaaggcaagggaaaaatctgccatgaagaatgccaaggccttcagttctgttctctctgctagaagcaaggctgcttgcggacttccaagggattttgtgatgaacattgatgcaactgacatggacaatgaattggcagcagccgagtacatcgatgatatctacaaattttacaaagagactgaagaagatggttgtgtgcatgactacatgggttcgcagccagatattaatgccaagatgaggtcaatccttgtggactggttgatagaagtgcataggaagtttgagctcatgccagaaactctttatttgaccttgaacattgtcgatcggttcctgtctgtgaaggctgtgcctagaagggagcttcagctggttggcatcagctccatgctgatagcctcaaaatatgaagagatatgggcaccagaggttaatgactttgtgtgcatatcagacaatggttatgttagtgaacaagtattgatgatggagaaacaaatccttaggaagcttgaatggactttaacagttccaacaccctatcactttttggttagggataccaaagcctccactccgtctgacaaagagatggagaacatggtgtttttccttgctgaacttggattgatgcattatcctactgtaatcttgtaccgtccttctctgattgctgcttctgctgtgtttgcggctcgatgtacccttggaaggagccctttctggacaaacactttgatgcactacacaggctactctgaggagcaactaagggattgcgccaaaatcatggccaaccttcatgctgctgctgcaccaggaagtaagcttagggcagtttacaagaaattctctaactcggatctttctgctgttgctcttctttctccagcaaaggacttgtcagcactgtcttgagcaagcttaggaggggaagtttaggttattttaggccccgatcatgattgttatgatctatattatatattcgtttatattttttttcagtgtgataaacaaaagtgtttgtatttggaatttgctaggaattgcttgaagcctcaagctaagtttgatgattctttttgtgtaaagcagaaatttgaaatattgctgggaaatattgagtgagctttttgtc

SEQ ID NO: 1085 - DNA, 774 bp, Glycine max
  unsure (1)..(774): unsure at all n locations
atttggttctgaagtagaagttacttaatttgtgcctttttctactctattgtattttgaatacaaagaatttagaagcttggaagttctacgtttattttcatgtattaggcttgcgaagagtagaaaaaagtgagtgtgttctgagatacaatgtagcgctgtttgcaggtcatgccattggggcaaagcctgcaattcctagaatgtttccaaatatgtttccactggttataagtcagagaaagtcacaaacagaaggctgattgcagtcatgaaatggtctcttgacaagtctgcccaaggagaaagaatttctgacataagctagaatggtcatattgcttcctacaggttaatgactttgtgtgcttatcagacattgcttatgttagtgaacaagtgttgatgatggagaaaacaatccttaggaagcttgaatggtacttaacagttccaacaccctatcacttcttggttaggtataccaaagcctccactccgtctgacaaagagatggagaacatggtgtttttccttgctgaacttggattgatgcattatcctactgtaatcttgtaccgtccttctctgattgctgcttctgctgcgtttgcggctcgatgtacccttggaaggagccctttctggacaaacactttgatgcactacacaggctactctgaggagcaactaagggattgcgtccaaanaatttccaaatttggggggccccccccccaaaaaaaaacccctcccccctttttttttttt

SEQ ID NO: 1086 - DNA, 1195 bp, Glycine max
ctcgagccgaatcggctcggccagcaccacaatttctctttctctctttttttgtgtgtccaaaatggctcctagttctgctcacaacaatgggttctatgtgcttatgctagttgggatagtggttagcactatggttgctacctgtgctggtagcttctaccaagactttgatctaacatggggtggtgaccgtgctaagatattcaatggtggccagcttctatcactttccctagacaaagtctctggctctggcttcaaatcaaagaaagaatacctatttgggaggattgatatgcagctcaagctcgttgctggcaactctgctggcactgtcactgcttactacttgtcatcccaagggccaacacatgatgagattgatttcgagtttttgggaaacctaagtggggacccttatattctccacacaaacatcttcacccaaggcaaagggaacagggagcaacagttctatctctggttcgaccccaccagaaacttccacacttactctatcatttggaagccccagcacatcatattcttggttgataacacacccataagggtattcaagaatgctgaacctcttggtgttccttttccaaagaaccagcccatgagaatctattctagcctctggaatgctgatgactgggccaccagaggaggattggtgaaaactgattggtccaaagcaccctttacagcatactaccgcaatttcaaggccattgagttctcatccaagtcttccatttcaaattctggggctgaatatgaggcaaatgagcttgatgcttatagcagaagaagactgagatgggttcagaagtacttcatgatctataactactgcagtgatctcaagcgattcccacaaggtcttcctgctgaatgtaaacgttgaaggttctaagagatgaagagaatggtcactttctgagttggatttgaatggtctatgtaaaatatgctatgtttatgtcttagattctttactgacttctgtccttttttttaagtatctattttatagttgctaatgtatatgtgtattaaggggccttaataataaatcatattctttgttccaaaaaaaaaaaaaaaaaaaaaaaaaaaaaagggggggcccccgataaggaaccccttcacccggggatttattccgggccgggtccttgagggg

SEQ ID NO: 1087 - DNA, 1031 bp, Glycine max
actcgagccgattcggctcgagacacaacatttacattactctctcactctctccagtatggcttctactcacaatgagttttatgcacttatgctagtggtggtggttggctccatggtggcttcctgtggtgctaacttcaaccaagactttgatctaacatggggtgatcaccgtgctaagatattcaatggtggtcagcttctatctctttctctggacaaagtctctggctccggcttccaatccaagaaagagtacctatttgggaggatcgatatgcaactcaagctcgttgctggcaactctgccggcactgtcactgcttactacttgtcgtctcaagggccaactcatgatgagattgattttgaattcttgggaaacgtgagcggtgacccttacattctccacacaaacgtgtttaccaaaggccaagggaacagagagcaacaattctacctctggttcgaccccaccagaaacttccacacttactccatcatctggaagccccaacacatcatattcttggtggataacattcccataagggtgttcaagaatggtgagactattggcgttcctttcccaaagaagcaacccatgagaatctattctagcctgtggaacgctgatgactgggccaccagaggtggtttggtgaaaactgattggtccaaggcaccctttacagcctactaccgcaatttcaaagccacagagttctccacctcttcttccaattccttctctgatgctgcatggcagagcaacgagcttgatgcctatggcagaagaaaactgagatgggttcagaagtacttcatgatctataactactgcaacgatcttaagcgattcccacaaggcattcctgttgagtgcaggcgctgagacctcacacctatttttcttttctccttgtggtttattcatcatcaaaataaatcaaattcgttgtaccactttcttgatttttaaaaaatatgccttcccgccgtacaataaaaagttgtggttgctctgt

SEQ ID NO: 1088 - DNA, 379 bp, Glycine max
gccactgagttctcactcaagtcttccatttcaaatgctggtgctgaatatgaggcaaatgagcttgattcttatagcagaagaagactgagatgggttcagaagtacttcatgatctataactactgcagtgatctcaagcgattcccacaaggtcttcctgctgaatgtagacgctgaaggttccaagagatgaagagaatggccactttctgattggatttgaatcgtctatgtaaaatatgctatgtttattatgtcttagattctttattgacttctgtcttttgtttctgccttgttttttagtttctattttatagttgctaatgtatatgtatattaaggggtcttaacaataaatcatattctttgtacc

SEQ ID NO: 1089 - DNA, 1456 bp, Glycine max
taaccatatactaatatttgcttgtattgatagcccctccgttcccaagagtataaaactgcatcgaatactacaagccactaggcatgggtctagcaaaggaaacaataatgggaggtggaggccgtgtggccaaagttgaaattcagcagaagaagcctctctcaagggttccaaacacaaagccaccattcactgttggccaactcaagaaagccattccaccgcactgctttcagcgttccctcctcacttcattgtcctatgttgtttatgacctttcattggctttcattttctacattgccaccacctacttccacctcctccctcaccccttttccctcattgcatggccaatctattgggttctccaaggttgcattcttactggcgtgtgggtgattgctcacgagtgtggtcaccatgccttcagcaagtacccatgggttgatgatgttgtgggtttgaccgttcactcagcacttttagtcccttatttctcatggaaaataagccatcgccgccaccactccaacacaggttcccttgaccgtgatgaagtgtttgtcccaaaaccaaaatccaaagttgcatggttttccaagtacttaaacaaccctctaggaagggctgtttctcttctcgtcacactcacaatagggtggcctatgtatttagccttcaatgtctctggtagaccctatgatagttttgcaagccactaccacccttatgctcccatatattctaaccgtgagaggcttctgatctatgtctctgatgttgctttgttttctgtgacttactctctctaccgtgttgcaactatgaaagggttggtttggctgctatgtgtttatggggtgccattgctcattgtgaacggttttcttgtgaccatcacatatctgcagcacacacactatgccttgcctcactatgattcatcagaatgggattggctgaagggtgctttggcaactatggacagagattatgggattctgaacaaggtgtttcaccacataactgatactcatgtggctcaccatctcttctctacaatgccacattaccatgcaatggaggcaaccaatgcaatcaagccaatattgggtgagtactaccaatttgatgacacaccattttacaaggcactgtggagagaagcgagagagtgcctctatgtggagccagatgaaggaacatccgagaagggcgtgtattggtacaggaacaagtattgatggagcaaccaatgggccatagtgggagttatggaagttttgtcatgtattagtacataattagtagaatgttataaataagtggatttgccgcgtaatgactttgtgtgtattgtgaaacagcttgttgcgatcatggttataatgtaaaaataattctggtattaattacatgtggaaagtgttctgcttatagctttctgcct

SEQ ID NO: 1090 - DNA, 687 bp, Glycine max
  unsure (1)..(687): unsure at all n locations
agaaaatatgattaggaaagaataagtcatcatattttcttgtattgatagccccgctgtcccttttaaactcccgagagagtataaaactgcatcgaatattacaagatgcactcttgtcaaatgaagggggggaaatgatactacaagccactaggcatgggtctagcaaaggaaacaataatgggaggtggaggccgtgtggccaaagttgaaattcagcagaagaagcctctctcaagggttccaaacacaaagccaccattcactgttggccaactcaagaaagccattccaccgcactgctttcagcgttccctcctcacttcattgtcctatgttgtttatgacctttcattggctttcattttctacattgccaccacctacttccacctcctccctcaccccttttccctcattgcatggccaatctattgggttctccaaggttgcattcttactggcgtgtgggtgattgctcacgagtgtggtcaccatgccttcagcaagtacccatggngtgatgatgttatgggtttgaccgttcactcagcactattagtgccttatttctcatggaaaataagccatcgccgccaccactccgacacggattgccttgaccgtgatgaagtggttgtcccaaagcaaaatccacacatgcatggtacacctaagtacctc

SEQ ID NO: 1091 - DNA, 492 bp, Glycine max
  unsure (1)..(492): unsure at all n locations
cccacgcgtccgagggggggaaatgatactacaagccactaggcatggtatgatgctaaattaaattgtgcctgcaccccaggatatttcatgtggggttcatcatatttgttgaggaaaagaaactcccgaaattgaattatgcatttatatatcctttttcatttctagatttcctgaaggcttagggtgtaggcacctagctagtagctacaatatcagcacttctctctattgataaacaattggctgtaatgccgcagtagaggacgatcacaacatttcgtgctggttactttttgttttatgggcctagcatcggtctctctaatctgtcacttccctccattcattttgtacttctcatatttttcacttcctggntgaaaattgtagttctcttggtacatactagtattagacattcagcaacaacaactgaactgaacttctttatactttgacacagggtctagcaaaggaaacaataat

SEQ ID NO: 1092 - DNA, 478 bp, Glycine max
aatatttgcttgtattgatagcccctccgttcccaagagtataaaactgcatcgaataatacaagccactaggcatggtaaattaaattgtgcctgcacctcgggatatttcatgtggggttcatcatatttgttgaggaaaagaaactcccgaccttgaattatgcatttatatatcctttttcatttctagatttcctgaaggcttaggtgtaggcacctagctagtagctacaatatcagcacttctctctattgataaacaattggctgtaatgccgcagtagaggacgatcacaacatttcgtgctggttactttttgttttatgggtctagcaaaggaaacaacaatgggaggtagaggtcgtgtggccaaagtggaagttcaagggaagaagcctctctcaagggttccaaacacaaagccaccattcactgttggccaactcaagaaagcaattccaccacactgctttc

SEQ ID NO: 1093 - DNA, 274 bp, Glycine max
gtgccttgtaaaatggtgtgtcatcaaatcggtagtactcacccaatattggcttcattgcattgggccatagtgggagttatggaagttttgtcacttatcacttaattagtagaatgttataaataagtggatttgccgcgtaatgacttgtgtgcattgtgaaacagcttgtagcgatccatggctataatgtaaaaatatgtggaaagtgttctgcttataactttcttccttaaatgcacactccatagaacaatattattggtactaa

SEQ ID NO: 1094 - DNA, 2263 bp, Glycine max
ctagttctagatcgcgatctagaactagtccaacctcaaaaactcaatattctcaacaacacactactttccttcttccaataatgtcttcttcattctctgttcgttttcttgctcctccatcatcatgcttccccagctctcggcccaagacatggctctgcgccgccaccaccccaacggtggctccggcaactgcctcctcggaggtggaggcttcaaggttggagcctagagtggaggagagagatgggttctgggttttgaaggaagagtacaggggaggcatcagccctcaggaaaaagtgaagcttgagaaagaccccatgaagctctttatggaaggtgggattgaggacttggctaagatgtcccttgaggaaattgagagctccaagcacaccaaggatgatattgatgttagactcaagtggcttggcctttttcataggagaaagcagcattatggtagatttatgatgaggctgaagcttccaaatggggtgacaacaagtgcccaaacacgatatttggctagtgtgatcaggaagtacggaaaagatgggtgtgctgatgtaacaacgaggcagaattggcaaattcgtggtgtggtgctacctgatgtgccagaaattctcaagggcctcgatgaggttggattgactagtcttcagagtggaatggacaatgtgagaaaccctgttggtaaccctcttgcaggcattgacccagatgagattgttgatacacgaccttacaacaacttgttatctcaattcatcactgccaattcacgcggcaacccagccatgtcaaacttgcctaggaagtggaatgtgtgcgtggttggatcccatgatctgtttgagcatccccacattaatgatctggcttacatgcctgcaaacaaggatgggcgttttggattcaacttacttgttggtggtttcttcagtgccaagagatgtgctgaagcaattccacttgatgcatgggtctccgcagatgatgtaatcccactatgtaaagctgtccttgaggcctatagggaccttggcttcagagggaacagacagaaaacaagaatgatgtggttgattgacgaattgcatggtctatttccactgtcattaagtgtatctgcttggcaagtaagtgataaaagtgtttggcaaatgaaggggatagaagtattcaggtcagaggtggaaaaaagaatgccagggaagcagctggagagagcatctgaggaagaactggttaagaaaaaatgggaaagaagagactacttaggtgttcatccacagaaacaagatggcctaagctatgttgggattcacattccagttggtagagtccaagcagatgacatggatgagttggcgcgtttggccgacgaatacgccaccggtgagctcaggctcacagtggagcagaacattataatcccaaatgtggacagcaacaaaattgatggcttgctcaatgagcctctcttgaaggggagattctcacccgaaccttctctattgatgaagactctggtggcatgcactggtaatcaattttgtggacaagctataattgagacaaaggaaagggcattgaaagtgactgaggaagtggagaggcaagtggctgtgactaggcctgtgagaatgcattggactggctgccccaacacttgtggccaggtgcaagttgctgacattggtttcatggggtgcatggctagggatgagaatggtaaggccactgaaggtgtggatattttcctgggagggagaattggaagtgattcacatctagctgaggtgtataagaagggtgtgccttgcaagaacttggtgcctattgtggtagacatactagtaaagcattttggtgctgtccaaaggaatagagaggaaggggaagattaaactttatggccattggcaattttagtttctttactaaatctaccattgtccctgaacaaaagtatcagtgtcctctacataaaagaaaaagggatgatcatgagacatgcattatatcatatgcatgtacacttttggataagacatgtacattctttgctagtccctaagttacactttatttcttcaaagatgtatgctatatatttctcattttcttgtggcaaatgcttaagaattattttaacattataaactaattttagaggcaaaatggtttatatttaaattttttttatgtataacaaaatactaaggatttagatgaatcttccactccc

SEQ ID NO: 1095 - DNA, 520 bp, Glycine max
ggaatcccactatgtaaagctgtccttgaggcctatagggaccttggcttcagagggaacagacagaaaacaagaatgatgtggttgattgacgaattggggatagaagtattcaggtcacaggtggaaaaaagaatgccagggaagcagctggagagagcatctgaggaagaactggttaacaaaaaatgggaaagaagagactacttaggtgttcatccacagaaacaagatggcctaagctatgtagggattcacattccagttggtagagttcaagcagatgatatggatgagttggcgcgattggtggacaaatatggaactggagagctcaggctcacagtggagcaaaacataataatcccaaatgtggatagcaacaaaattgatgccttgctcaatgagcctctcttgaaggagagattctcacctgaaccttctctattgatgaagacactggtggcatgcactggcaaccagttttgtgggcaagccataattgagacaaaggaaagag

SEQ ID NO: 1096 - DNA, 452 bp, Glycine max
agtgattcacatctggctcaagtgtataagaagggtgtgccttgcaaggacttggtgcctgttgtggtagacatactagtaaaacactttggagctgtcctaaggaatagagaggaaggggaagattaagtgcatgtttggatagttattacaaacagacatttgcatcaaaatgagttttgcaaaaggatcctcaccctttcttttgcaaaatgagttttgaagatcattgatttgatctcggaatttgtgcataagttgaattaaaaaccaaatatgcattaaattttaatggccattggtaattttagtttctttattaaatccaccattgtcccttggacaaaattattagtgtcctctacatagaagaagggatgatatatgcatgtacacttttggtttagacctgttcattctttgctagtccctaatttacactttatttcttt

SEQ ID NO: 1097 - DNA, 445 bp, Glycine max
cttccttcttcttcttccaataatgtcttcttcattctctgttcgttttcctgctcctcttcctcctcctccatcatcatgcttccccaccagctctcggcccaagacatggctctgcgccgccgccaccccaacggtggctccggcaaccgccacctcctcctcggaggtggaggcttccaggttggagcctagagtggaggagagagatgggttctgggttttgaaggaagagtacaggggaggcatcagccctcaggaaaaagtgaagcttgagaaagaccccatgaagctctttatggaaggtgggattgaggacttggctaagatgtcccttgaggaaattgagagctccaagcacaccaaggatgatattgatgttagactcaagtggcttggcctttttcataggagaaagcagcattatggtagatttatgatgagg

SEQ ID NO: 1098 - DNA, 1166 bp, Glycine max
cccacgcgtccgcccacgcgtccggtgatttcagtgagtgatcggtgttcacttgatctcatcagaatcgtcagcgtcaattgattgagattccgatcagaaacagcggcggcggaaggcctggagaggcgactcaccgcggaggaggtggaaagcggctttggctgatttcatcgtcaaccttcagcttcgtgttcgccggctcagtgctccgtgcatctgcctacaacaagctcacacgtcaacggcgctgccagggcctgccgggctcatctccgcctccatcgcccatgcgatccgccctttttcgtcgccgttcccgttgggcgccaacatctccgaggggccacgtcaaaccccgccggtcacccttcggctgccttcgtcggcggcaacatcacctttcttcgcggcatcgtctacgtcatcgcccagctcctcggctccatcgtcgcctccctcctcctggccttcgtcaccgccttcactgttccagcattcggactctccgctggagttggagtttggcaacgcccttggtgttggagatcgtgatgaccttcggtctgggtgtacaccggtctacgtcaactgtaccattgaccccaagaagggtaattttgggaattattgctcccatcgccattggtttcattgtcggcgctaacattttgttcgggtggggccttctctaggtgcggccatggaaccccgctgtggacattgtggggcctgcttgtcgttgagctggcacctgggaccagatcactggactctactggggccgggcctgatcatcggtggtggaatcgctggccttgtttacgaggttgtctttatcagccacacccacgaacagccttccaacaactgactactagagggggggaaatgaaaataaaaaaaaaaaaaaattgtgtattattgaatttctctggaatcttcctctgtgtatggttttccttccttgtgttttcttcctaattcactttcgaaggttgtacttgttcctttcgtcttaaatccttggatggttgatgatcatgaagttctctttaaagttaaattattatcattttgtgcatgctctctctctctcacttggtccacaacaattgaattgaatgtagtatcattattcgggtctggttggttgtaccatttcc

SEQ ID NO: 1099 - DNA, 1320 bp, Glycine max
gggtcgactcagtcgtgagtacagatgcaaacagaaggggatagcgaagacagagagtggtttcagtgagtgatacggtgttcacttgatacttcataagtcgtcatcagcatcagcattcatcatcatcatcatcatcaccgttgattgactgaagatgccgagcagagacatcgccatcgtaaggcctgaagaggctactacaccccgacacgttgaaggcggggttggctgagtttcatctccaccactgatcttacgtgttcgccggttcaggtttccggcatcgcctacaacaagcctcaccgacaacggcgcgccgccacttcccgccgggcctcaatctccgcttccattcgcccatggcttttcgcccttcttttcgtcgccggtctccggtcgggcgcccaaacattctccgggcggccacgttaactcccgccgtcacccttcggcgcccttccgtgggcgggcaacatcaccttacttccgcggcatcgtctacgtcatcgcccagctcctcggctccatcgtgtcctccctcctcctcgctttcgtcactgctccccctggtcagcatttcgggctttcccgctggagtccggagttggcaaacgcctttgtgtttgagatcgtgatgacccttcgggtttgtgtacaccagtctacgccacctgcccgttgaccccaagaagggcacatttgggaattattgctcccatcgccattggtttcaatgttagcgccaacaatgaaaccaatggcgatgggaggggccttctccggagcagccatgaaccctgctgtgacatttgggcctgctgtcgtgagctggacctggaccaaccactggatctactgggccggccctctcatcggaggtggaacttgctgggcttatctacgaggttgtcttcatcagccacacccacgaagcagtttccctagcattacttactataggcgaaaattgaaataataaaaaaaaaaaaaatgtgtattattgaaatttctccggaaatcttcttctgagtatgggctttcccttcctttggtgttttcttttcctggttgaatcggtgggccgtttgattctttggctttggattggtttgatgatcctgaagttttcttttaagttaatttaattatcattttgtgcatgctctctctctctcacttggtccacaacaattgaattgaatgtatgtatcattattcgggtctggatggttgttccatttcactagtacttcttactttctgcggtatcctctgttcccgtcacaattgagattagataaatgttaattagtgtct

SEQ ID NO: 1100 - DNA, 993 bp, Glycine max
acgacagaaggggaacccccctcgatccgattctctcttctattctattctaaactcgaaacaatcttagagaaagaagcagaagaaaatgccgatttctagaattgccattggaaattcttcggagttgaaccaatctgatgcacttaaggctgcactagctgagttcatctcaatgctcatctttgtttttgccggggaaggctctggaatggcttataataagctgacaaacaatggttcagcaacaccagcagggttagtggcagcatcactgtcacatgcctttgcactttttgttgcggtctctgttggagccaacatttctggcggtcatgtaaaccctgctgtcactttcggtgcctttgttggtggccacattaccctctttagaagcatcttgtactggattgctcagttactcggctctgtcgttgcttgcttgctccttaaatttgccactggtggactggaaacatctgcatttgcactatctcctggggtggaagcagggaacgctctagtgtttgagattgtgatgacttttgggttggtttacacggtgtacgcaactgcagtggatccaaagaagggtgatcttgggataattgctccaattgcaattggtttcatcgttggtgcgaacatcttggcggggggtgcatttgatggtgcatccatgaaccctgcagtgtcgtttgggcctgctgttgtcagttggacctggtctaaccactgggtttattgggtcggcccatttgctggtgctgccattgctgctattgtctacgagattttcttcattagcccaaacactcatgaacagctccccgtcacagattcattagaggcttaactctctgccttcctttgttgtcagctgctctgtgtttttttgttttgcatttgcttgttttcaaatgttggttctctgaactttgtaacatgaacatctttttctttttttttcattatgaaatgttcatttcatct

SEQ ID NO: 1101 - DNA, 949 bp, Glycine max
acccacttgccccttattaaggaaatcaccacaacaccaccaccaccaccacgcgacgtggttcttaaaacacgtgagaaaatcccatgcaagctcgtgtcgaagacttccatttcccacgatgtgaggctcttccgtttgggcttaccctcaaaagaccagctcctaggtttacccgtggggaagcatattttcctatgtgccaccatcaatgagaagctatgcatgcgagcctacactccaacaagtagtgtggacgaagtagggttcttcgatcttgccataaaggtttacttcaaaggtgtgcaccccaagtttccaaatggaggactcatgtctcaacatttggactctctacccattggatccatgttggacgtgaagggcccattaggtcacatagaatacaccggaagaggcaacttcatggttcatggaaaaccaagattcgccaagaggttggccatgttggctggtggaactgggatcacacccatttaccaagtggcacaagcgattctgaaggacccagaggaccccacagagatgcatgtggtctatgcaaacaaaactgaggatgatattttgttgaaggaagaaatgatgtgtggcgaagaacaatgtgaccgattcaaggtggtggtacgtgtggaaactgctagggaaggatgggaatacagtgttgggttcatcacagaaagtatcatgagggagcaccttccagaaacgtcgacggatgccttagctttgacatgtgggccaccacctatgattcaatttgcagtgcagcctaatttggagaagatgggatatgatatcaaggccgatctacttgtgttttagggcatgtttgtgtattgctattgttgtgtggttaatgtatgtgtattattattgttgcttgtgtatcaacaattattcgaatatttcatgaataaatatatatgtg

SEQ ID NO: 1102 - DNA, 478 bp, Glycine max
gggatcacccatatagggaagaccggggaagatttaggaacagattacccttgggatcattgtccacggtcacgtctatgattgcacccgcttcctcaaagatcaccccggtggtactgacagcatcctcatcaatgctggcaccgactgcaccgaagagtttgacgccatccattctgacaaagcaaaaaaattgcttgaagattaccgaatcggggagctcatcaccactggctacacctcagactcatcgcccaacaactccgtgcatggcaattccgaattcactcatttggcccctattaaggaaactacaacaccaccatcacgtagtgtggctctcaacccacgcgagaaaatcccatgcaagctcgtgtcaaagacctccatttctcatgacgcgaggctattccgttttgcattaccctcagaggaccaactcttgggattatccgtggggaaacacattttcttgtgt

SEQ ID NO: 1103 - DNA, 672 bp, Glycine max
ttcatggttcatggaaaaccaagatgcgtcaagagtttggccatggtggctggtggtactcggatcacgcccattgaccaagtggcgcaacgtattttgaaggacccatgagtaccacaccgaaatgcatgtagtgtatgcgaatcgcacagaggatgatatattactgagggaggatttggatgagtgggcgaagatacataatgaccggttcaagctatggtacgtggtggaaatcgcaaaggaagggtggaaatacagtgtagggttcatcacagagagtatcacgagggagcaccttccaaaagcgtcgagggattccttggctttgacatgtgggccaccacccatgattcagtttgcagtgcagcctaatttggagaaaatgggatatgatatcaagaacgatttgcttgtgttttagggcatggagaagtagctagattgctagattgtgttgtgtattgtatttgtttgtgtatcgggtgttattggagtattaatgtttgtttcattctttataagggtaaaaaaagaagtgaaaaattgtatatgaaccgagattgttgggaagtaactcttcatcccttctcacgctttaatgtagacaggtacgtcaagatttttttactactttagtgtaaataaattaatgttatatatgcctaatac

SEQ ID NO: 1104 - DNA, 1792 bp, Glycine max
cgggtctgaaagggaaaaaaaaaaaaatagcaacaaaaacaagaaaaaaggttacctctttcaattttatcccttgttgtgagcttaattcaatttctgctcacacataatggcttgcacgctcgctgattcattactcctattcaagggttcttatcagaaaccagttctgaggagagacattgctgcccggtactccccgggtatatttagtctaaacagtaatgggcttatccagaaaaggttcaggcgtcaaaggaattttgttactaggaataaggttactgtcatacatgccgtggcaattccagtacaaccagctccggtggaaagtgcggagtatagaaaacagctagctgaagactacggtttcaggcaagttggagagccgcttccagatgatgttactttaaaggatgtcatcaattcccttcctaaggaggtctttgagattgatgatgtgaaagcatggaaatctgttctgatatctgtcacttcttatgcactgggtctcttcatgatttccaaagccccctggtatcttcttcctctggcttgggtatggacagggactgcaataactgggttctttgttataggacatgattgtgctcacagatcattttcgtctaacaaattggtagaagacattgttggaactctggcctttatgcctctgatttatccatatgagccttggcgatttaagcatgacaggcatcatgcaaaaacaaacatgttacgtgaagatactgcttggcaccctgtttggaaggacgagtttgaatctactccacttttgaggaaagcaataatatacggatatggtccatttcgatgttggatgtctatagctcactggttgatgtggcactttgatttgaagaagttcagaccaagtgaagtaccaagggtgaagataagtttggcttgtgtttttgcctttatagcaattggatggccattaattatttacaagactggaatcatgggatggataaaattctggttgatgccatggttgggctatcacttctggatgagtacgtttaccatggtacatcatactgcaccgcatataccattcaaatactcagaagagtggaatgctgcgcaagcacagcttaatggaactgttcattgtgattatcctaaatggatcgagatcctatgtcacgatattaatgtccatattccacaccacatatccccgaggataccaagctataatttaagagcagcccataagtctctccaagaaaactggggacagtatctgaatgaggctagttggaattggagattgatgaagacaatcatgacagtgtgtcaggtgtacgacaaggagaaaagtttatgttgccttcgacgaacttgcccctgaagattctcgtccaattacatttttgaaggaaaccatgcctgattatgcttaattatgcccaaactggctttttttctcatatgaaattttttatgtatcaaattaggttcgtatgccattcattttctttttacattttcgatcttgtttaatatagttctactagtatttttcatatcatgtataacgaaaaaattgcttgctgctctcaaagttcacgtattagggtaattatattaccaagttgcggattatccaaggtcaagtcatcgagaagcattcattaggttaaagtagatgttatggtaatctgaacagtggggttcttgttatcacgttggaagaatattatattataaagttgtctgatggataaaaaagcacgtggcgtgtggcacattggattgt

SEQ ID NO: 1105 - DNA, 352 bp, Glycine max
aaaaatagcaacaaaaacaagaaaaaaggttacctctttcaattttatcccttgttgtgagcttaattcaatttctgctcacacataatgggcttatccagaaaaggttcaggcgtcaaaggaattttgttactaggaataaggttactgtcatacatgccgtggcaattccagtacaaccagctccggtggaaagtgcggagtatagaaaacagctagctgaagactacggtttcaggcaagttggagagccgcttccagatgatgttactttaaaggatgtcatcaattcccttcctaaggaggtctttgagattgatgatgtgaaagcatggaaatctgttctgatatc

SEQ ID NO: 1106 - DNA, 1200 bp, Glycine max
cccacgcgtccgcggacgcgtgaattcggcacgaagtggagtgaagtgtgaactgcaaagggcttctccagcctagtttgttctcagatcttcttcttccatggaccagtacgagaaggtggagaagataggcgagggaacatacggcgtcgtttacaaggctcgcgaccgcgccaccaatgagacaatcgctctgaagaagattcgcctcgagcaggaggacgaaggcgttcccagcaccgccattcgcgagatttctcttctcaaagagatgcagcataggaacattgttaggttgcaggatgtagtgcacagtgagaagcgattgtatctggtttttgagtatctggacttggatctaaaaaaacacatggattcatctccagagtttgtgaaagatccgcggcaagtaaagatgttcctttatcaaattctctgtggcattgcttactgtcattcacatagagttcttcatcgagacttgaaaccacagaatttgttgatagatcgccgtactaattcactaaagcttgcagattttggattggctagggcatttggcattcctgtcaggacatttacacatgaggtggtgacattatggtacagagctccagaaatattgcttggatctcgtcattattctacgccagttgatgtttggtcagtgggatgtatatttgcagagatggtaaaccgacgacctctattccctggggactctgagattgatgaattatttaaaatattcagaatcttgggtaccccaaatgaagacacatggcctggtgtaacttcattgcctgattttaaatcaacatttcccaaatggccatccaaggacttggcaaatgtggttccaaatcttgatgcagctggtcttaatcttctttctagtatgctttgcttggatcccagcaaaagaatcaccgccaggagcgctgtggagcatgaatacttcaaagacattaaatttgtgccctgattccatatcttgatggcaaacgtgtttatagtaatattgtgcagaatttatgggttttgactcttcgagaaatgcgtgttgtcttttgctactttttttgtgacttgggggttgggactgagtcatacttctattttttggtccttacagaatgtttcagattcaacttgagtgattgattatattgcatattactttttcattcaaaaaaaaaa

SEQ ID NO: 1107 - DNA, 1235 bp, Glycine max
ggaggaaagaaattgatatcgcttacagtaagaggtgagaaagagagacaaatcggcagaagcaaggaggctgagagcgagagagcaactgcacgcactgtaactcctaacttcccagatcgtcttcttcctcttttctctccggtgattgttggaactcagagagcttctttgatggaacagtacgagaaggttgagaagataggcgaaggaacatacggcgtcgtttacaagggtcgcgaccgcgtcaccaacgagaccatcgcgttgaagaagattcgcctcgagcaggaggatgagggggttcccagcaccgccattcgcgagatttctctcttgaaagaaatgcagcacaggaacattgttaggttgcaggatgtagtgcacgatgagaagagtttgtatctggtttttgagtaccttgacttagatctaaagaagcacatggattcatctccagaatttgcaaaagatccacgacaagtaaaaatgttcctgtaccaaattctctgtggcattgcatactgtcattcacatagagttcttcatcgagacttaaaaccacagaatttgttgatagatcgcagcactaatgcactgaaacttgcagattttggattggccagggcttttggaattcctgttaggacatttacacatgaggtggtaacactgtggtacagagctccggaaattttgcttggatcccgtcagtattctaccccagttgatatttggtcagtgggatgcatatttgcagagatggtaaatcaacgaccacttttccctggggactctgagattgatgaattgtttaaaatattcagaatcatgggtacaccaaatgaagatacatggcctggagtgacatcattgccagattttaaatcagcctttcccaaatggcaacctaaggacctgaaaaatgtggttccaaatcttgagccagctggtcttgatcttctttctagcatgctttacttggatcccagcaaaagaattactgctaggagcgctcttgagcatgaatacttcaaagacattaaatttgtaccctgatttcttatcttcaaggctgaggtgtcttattagtatgtgtagcatttatgggttttgactcaaacgcgtgttgtccttgcttttttcttcaatgcttttggaccgaatcatatttcatttatttgttcttacatttttatttagtatgtgtgatcttgttacctatttacccgttt

SEQ ID NO: 1108 - DNA, 431 bp, Glycine max
gagagagcaagtgacaagagtggagtgagagatagtgactgcaaaaccgctccagccttgtttcttctcagatcttcttccatggaacagtacgagaaggtggagaagataggcgagggaacatacggcgtcgtttacaaggctcgcgaccgcgtcaccaatgagaccatcgctctcaagaagattcgcctcgagcgggaggacgaaggcgttcccagcaccgccattcgcgagatttctctcctcaaagagatgcagcataggaacattgttaggtttatcatccatttcccttctcctttcatttgaatgcaatgtgttgttgtcgatgatgaaaataatgttttatccgtgcgctatttgtcgtgaaattggtttctgctttaaccttgggtttttagctattgaataatataatgtgttgccgatga

SEQ ID NO: 1109 - DNA, 405 bp, Glycine max
gaagacgacagaagggggagactaagaggtaacagcctctcgccagaaaggaggcagagaccgagagagcaactgcacgcactgtaactctctcaccgtttcttccgctttgatggaacagtacgagaaggttgagaagataggcgagggaacatacggcgtcgtttacaagggtcgcgaccgctccaccaacgagaccatcgccttgaagaagattcgcttggagcaggaggatgagggggttcccagcaccgccattcgcgagatttctctcttgaaagaaatgcagcacaggaacattgttaggttgcaggatgtagtacatgatgagaagaagttgtatctggtttttgagtaccttgactcagatctaaagaagcacatggtttcatcttcagaatttgc

SEQ ID NO: 1110 - DNA, 2987 bp, Glycine max
cagagagaatattattagcgcctagagacaaagacgatcaattcatcacaagcaagttcccatgaccggtaacgagtttcgcttcttcttgtcctgcgatatcagtgttcctgtcaccttccgcgtcgagcgccttgaaggcaatttgccccttccgaatcccaaatcacccgatttagaaactaatgcccccacagagaatagaacaaaagagttgtttgtggagtgtgctttgtacattgatggtgcaccgtttggccttccaacgagaacaaggttggagtcctcaggaccatcatattgttggaatgagctcatcactttgacaactaaatatcgagacttaactgcccagtcacaactcacgttcactgtttgggatctttcgcatggtgaaggattaattggaggagccacaattcttctcttcaacaacaaaaagcagctcaaaactgggaagcaaaagcttaggctttgggcaggaaaagaggcagatggaacattccctactagtacacctggaaaggtccctaggcatgaacgtggggaattggagcgattagaaaagcttgtgaataagtatgaacgaggtcaaattcaacgggtggactggctggatcgcctgacatttaaaactatggagagaatcaaggaacgcgaaagcttgaaaaatggaagttctcatttgtacctggttgtggacttctgtagttttgagcatcgagttgtttttcaggaatcaggtgcaaatttcttgtttccatcacctatagcctccaccaatgatattgttgttgtctgggatccagaagtgggaaagataaatccctctgagcacaaacagttaaagctggccaggagtttgacccgtggtgtcatagacagagatctgaagccaagctcaaatgagagaaagtccattcagcgaatactaaaatatccaccgacaaggactttgagtggagatgagaggcagctcttgtggaaatttcgattctctttgatgtctgaaaagagggctcttacaaagttcctgcgttgtgttgaatggagtgatgtccaggaagcaaaacaagcattagagttgatgggcaagtgggaaatgattgatgtttgtgatgcactggaacttttgtcgcctgtttttgaaagtgaagaggtccgtgcttatgcagttagtgttcttgaaagagctgatgatgaagaacttcagtgttatttgcttcaattggttcaagctcttcggtttgagcgttctgacaaatctcgcctttctcatttccttgtccagcgtgcattacgcaatattgaattggcaagctttcttcgctggtatgtggctgttgaactttatgatcctgcatatgccaaacgattttactgcacttatgagattctggaggagaatatgatgaagatagcagctggtgttaatggagaggaagatgggtttaaacagtggcagagtttggtacgccagacagaattgactgctcagttgtgttcaatcactagagaagtaaggaatgttcgtggtaatacacagaagaagattgaaaagctgagacaactactttctggtcttcttagtgaacttacctattttgatgagccaatacgatcacctttggcaccaggtgtcctcattgctggaattgtaccttcagagtcatcaatatttaaaagtgcattgcatcctttgcgcctttcttttagaacagcaaatggtggaacatgcaaaatcatatttaaaaagggtgacgatcttcggcaggaccagttggttgttcaaatggtatcactaatggatcgattgcttaagttggaaaatcttgatctgcacctaacaccatacaaggtgctagcaactggacaagatgaaggcatgttggaatttattccatctcgctcattggcacagattttgtcagagaatcgtagcatcataagctatttgcaaaagtttcatcctgatgaccatgggccttttggaattacagccacctgccttgaaacatttataaaaagctgtgctggatactctgttataacatatatacttggtatcggagacaggcatttagacaatctcctccttagaaatgatggaggtcttttccatgttgattttggttttattcttggccgagatcctaagccatttccaccaccaatgaagctttgcaaggaaatggttgaggctatgggtggagctgaaagccaatattatacaaggttcaagtcctattgttgtgaagcatacaacattcttcgcaaatccagtaacctaattttgaatctattttacctaatggcgggttccaatattcctgatatagcttctgatcctgaaaaggggattcttaagcttcaggaaaagtttcggttggacttggatgatgaagccagtatacatttcttccaggatcttatcaatgagagtgtgagtgcattattccctcagatggttgagactatccatcgttgggctcaatattggcggtaaccccaatatttattgggtgttattacaccaagtaattaaccagcatctgatgctgtctttttaggcttcttcgaagcttaaaacgtatgtggttttatcttctcttggaactccacactcagatcccactgcagctgtatgcgcttctaatttctgaactaattatcctgaaggccacttagtgacattgtctatgtaaataaattagttctctttcgctcttctggttacggttgcttcaagactgcagcataacttaaaaaatcgtatcatacacaaactaatggttgtttaagtgaaaccatcctatttcatttttgtaaataactcttgcctggttataatctgtagtttgatatatatgtaaagtaacttttagttatgatgtttggccactttgctggggtaaattatcaaaactgtatctgtaagaactgttgatttatttttatattaataataaattttttattattatttt

SEQ ID NO: 1111 - DNA, 3702 bp, Glycine max
agtgaaaatgtctacctcaaggcctagccaatcatccagcaattcaaggagatcaagacatagtgctagaatggctcaggcaactgtagatgcaaaaatccatgcaacttttgaggagtccggtagttcctttgattactccagttcggtgcgcgtctctggtacagctgatggagtcaatcaaccaaggtctgacaaagttacaacagcttacctcagaggcaagatgattcagccttttggttgcttgttggccattgatgagaaaaatcacatgcagacatgtaaggtcattgcatacagtgagaacgagcccgaaatgctgaccatggttagccatgctgtccccagtgttggtgaccaccctgcccttggcattggcactgacataaaaactctattcactgcaccaagtgtttctggattgcagaaggctctaggatgtgcggacgtttcgcttcttaaccccatacttgtccattgcaagacctctgggaagcccttttatgcaattgtccatcgcgtcactggtagtttgattgttgactttgagccagtcaagccttatgaagttcccatgactgcagcaggtgccttgcaatcttacaagcttgctgccaaagcaattacccgattgcaatcattgcctagtgggaacatggaaagactatgtgatactatggttcaggaagtttttgaactcacaggttatgatagggtgatggcttataaatttcatgaggatgatcatggagaggtgattcgtgagataacaaagccctgtcttgagccatatctgggtttgcactatccagccaccgacattccccaggcttcacgctttttatttaggaagaacaaggttcgtatgatagttgactgtcatgcaaaacacgtgagggttcttcaagatgaaaaactccaatttgatttgattttgtgtggttccaccttaagagctcctcatagttgccacgcgcagtacatggctaacatggattcaattgcttccctggttttggcagttgtagtcaatgacaacgaagaagatggggacactgatgctgttcagccacaaaagacggagagactttggggtttggtagtttgccataacactactcccaggtttgttccctttcctctaaggtatgcaagagaatttctgcctcaagtatttgccgaccatgtgcacaaagaaatagagttagaatatcagattattgagaagaatatcctgcgcacccaggcacctcttgtgtatggtgatgcgagatgcacccctgggaattgtgtcagagagccccaatataatggatctagttaaatgtgatggagctgccctcatatacaggaacaaagtatggagattaggagtgacaccaagtgaaccccagataagagagatagctttgtggttgtctgagtaccatatggattccacaggctttagtacagatagcttgtttgatgcagggttcccatcggctctttctctgggtgatgttgtgtgtggaatggcatctgttagagtaactgcaaaagacatggtattttggtttcggtcacacactgctgcagaaatccgatggggtggtgcaaagcatgaggctggagaaaaagatgatagtaggaggatgcatccaagatcatcattcaaggctttccttgaagttgtgaaggcaaggagtttaccttggaaggaatatgaaatggatgctattcattccttgcagataatactgagaaatgcattcaaagaagataccgagagtttggatttaaacgcaaaagcaattaatacaagactaagtgatttgaagattgaagggataaacgatttgaagattgaaaggatgcaggaactggaagcagtgacaagtgagatcgttaggttgattgacacagcaacagtgcctattttggccgttgatgttgatgggctggtcaatgggtggaacataaaaattgctgagttgacgggtcttccaattggtgaagctactggaaagcatttactcacacttgttgaggattcttcaactgatagagtcaagaagatgcttaacttagcactgctaggtgaagaagagaagaatgtccaatttgagatcaaaacacatgggtctaagatggattctggtcctattagtttggtagtaaatgcttgcgcgagcagggatcttcgagataatgttgtcggggtttgttttgtggcccatgatataactgctcagaagaatgtcatggacaaattcatccgtattgaaggtgattacaaggcaattgtacagaaccgcaatccattaatccctcctatatttggcacagatgaatttggctggtgttgtgagtggaatccagctatgatgaagttaactggatggaagcgagaggaggtgatggataaaatgcttttgggagagatttttggcacccagatggctgcttgtcgcctaaagaatcaagaagcttttgttaatttgggcgtcgtacttaataaagccatgactggtttggaaacagagaaggttccttttggtttctttgctcggaatggcaagtatgtagaatgcctgctttctgtgagtaagaaattggacgtagagggcctagttactggggtcttctgcttcttacagctagctagcccagagctccaacaagcattacatattcagcgtctatctgagcaaactgcttcgaagagattgaatgcattaagttacatgaaaaggcagatcaggaatcctttgtgtggaattgtattttcccggaaaatgttggagggtactgacttgggaacagaacagaaacaacttctgcgcactagtgctcagtgccagcagcagcttagtaaaattcttgatgactcagatcttgacaccatcatagatggttacttggatcttgagatggctgagttcaccctgcatgaagttctggttacctcccttagtcaagtcatgacaaaaagtaatggaaagagtatccgaatagtcaatgatgttgcagagcagattgtgatggaaactttatatggtgatagtcttaggcttcagcaggtattggctgactttttacttatttccatcaatttcactccaaatggaggtcaggttgttgtagcaggcactctaaccaaagaacagttaggcaaatctgtccatctcgttaagttagagctcagcataacacatggtgggagtggggtaccagaagcattactgaaccagatgtttggaaacaacgggctagaatccgaggagggtattagcctactgatcagcagaaagctgctgaagctgatgaatggagatgttcgctatctaagggaagcaggcaaatcagcttttatcctctctgctgaacttgcagcagcccataatttgaaaggttaaaagttttggaaaaaagaataaaagatgatgcaaccagcaaaacacaatctgttttgtacatcataaagagaacggagctagaaattaattgcatccaatgtaactctaatttgttcccacgtttctttaactgcttcttgtaacgtacgttgtagatatgtatgattaatcttcttcccattccttgaccaaaaaaaatagattaaaaaaaaaaggggggccccccgattagtgccctcttaacccggggattaattccgggacggttctctgggggcgtaacaatttccctaaagggggt

SEQ ID NO: 1112 - DNA, 527 bp, Glycine max
gttctggttacctcacttagtcaggtcatgacaaaaagtaatggaaagagtatccgaatagtcaatgatgttgcagagcagattgtgatggaaactttatatggtgatagtcttaggcttcagcaggtattggctgactttttacttatttccatcaatttcactccaaatggaggtcaggttgttgtagcaggcactctaaccaaagaacagttaggcaaatccgtccatctcgttaagttagagctcaggtaactcttccatgcccgaattcaaaattcatttatttaatttaagttagagctcaggctattagtattcccactttatatgtgatttaaatgccaggaggaaacaatgtgtgacatgaattgatgcatgatcaacacattgctcgcttgtgctatgcaaagaaacttgcattgtttatgcagtcttgctaaccagtggccttcctaaggacaccgataagggtcgacattaacattttcctttgtttttaaccaaaacataaagaaggaacttgc

SEQ ID NO: 1113 - DNA, 796 bp, Glycine max
cgtacgcgtgggagctaatgctgtaaaaacattggatgattcccaagctggaatggtgcaaatgaaatgcagtttgggttctgaggaagcctatgactctttgagggcatcaatatctaaaatcaaaactactggattaagggatcctctctttagtccagatgttgctcttaaggtccttaacggattgactaaaaatatcacaagcaccaaatatcatcttgggaaaagttctcaagagagtgtccttgatattttacccaattcaactaaggagaaactactagatcattgggtgtgcagtcaggaattgctgaggcacttttggtcttcatatccagtttcaacacaaaaccttgtcagtagcgtccgaagactgaaagattccatatcacaaatatattctaaacttgaggacataaaggtatctgctgagtcagacctgcggcaccatgtttcccttgttgtccatcctatgcagcaggctctgaatgctgccttgttacactatgaggctgacatcaggaaaagaaatgcaagaggacagaagcctaacggttatgtttagttggagaatgtttcgctctctgcactgcgagcatcatactataacaatttaggaatgtatattccatcaattttgccgtgaacacaaacccgaatggccatttatatcgtgatgaaaaaaatgaatttccatgagaattagtcagcaacagtcttaattgatagttaacatgtaacgttgaattacttgttaacactgtcccaagacaaaggacgagtgaattcacaa

SEQ ID NO: 1114 - DNA, 727 bp, Glycine max
gtttgtggaatggcagcagttagagtaactgcaaaagacgtagtattttggtttcggtcacacactgctgcagaaatccgatggggtggtgcaaagcatgaagctggagaaaaagatgatggtaggaggatgcatccaagatcatcattcaaggttttccttgatgttgtgaaggcaaggagcttaccatggaaggaatatgaaatagatgctatgcattccttgcagttaatactgagaaatgcattcaaagataccgagagtatggatttaaacacaaaagcaattaatacaagactaagcgatttgaagattgaggggatgcaggaactggaagcagtgacaagtgagattgttaggttgattgaaacagcaacagtgcctattttggcagttgatgttgatgggctggtcaatgggtggaacataaaaattgctgagttgacaggtcttccagttggtgaagctatgggaaagcatttactcacacttgttgaggattcttcaactgatagagtcaagaagatgcttaacttagcactgctaggtgaagaagagaagaatgtccaatttgagatcaaaacacatgggtctaagatggattctggtcctattagtttagtagtaaatgcttgcgcaagcagggatcttcgagataatgttgttagggtttaaaatgtggcccatgatataactgctcagaagaatgtcatggacaaatttacgc

SEQ ID NO: 1115 - DNA, 2323 bp, Glycine max
gaattccttctacgtactgccgtggtgctttcaccactgcttaccactaaccttcctctctctctctgccgctgcaagcttggtactctcaactcaattctccaccttattcttttcacttcttcagctcttgttttttcccaaatctactttcaaagtgcctgaattctgcaacagtaatattaacactcctctcttttgttcaggctttatttccccaatggccgcttgtggctatatatctgctgccaacttcaattatctcgttggcgccagaaacatatccaaattcgcttcttcagacgccacaatttcgttttcatttggcgggagcgactcaatgggtcttactttgcgacccgctccgattcgtgctcctaagaggaaccatttctctcccttgcgtgtcgtttgcgtcgattatccacgcccagagctcgaaaacaccgttaatttcgttgaagctgcttacttgtcttccacctttcgtgcttctccgcgtcctctaaaacccttgaacatcgttattgccggtgcaggattggctggtttatcaactgcaaaatatttggctgatgctgggcataaacctatattgctggaagcaagagacgttctaggtggaaaggttgctgcatggaaagacaaggatggagactggtacgagacaggcctacacatcttttttggggcttacccttatgtgcagaacctttttggagaacttggcattaatgatcggttacaatggaaagagcattctatgatttttgctatgccaaataagcctggagagtttagtcgatttgattttcctgaagttcttccctccccattgaatggaatatgggcaatattgaggaacaatgagatgcttacatggccagagaaagtaaaatttgcaattgggcttctcccagctatgcttggcggacagccatatgttgaggctcaagatggtctttctgttcaagaatggatgaaaaagcagggcgtacctgaacgggtaactgatgaggtgttcatagcaatgtcaaaggcactaaacttcatcaatcctgatgaactttcaatgcaatgtatattgattgctttaaaccgatttcttcaggagaaacatggttctaagatggcctttttggatggcaatccacccgaaagactttgtatgccgatagttgatcatattcagtccttgggtggtgaagttcatctaaattcgcgcattcaaaaaattgagctaaatgatgatggaacggtgaagagcttcttactaaataatgggaaagtgatggaaggggatgcttatgtgtttgcaactccagtggatattctgaagcttcttctaccagataactggaaagggattccatatttccagagattggataaattagttggcgtcccagtcataaatgttcacatatggtttgacagaaaactgaagaacacatatgatcaccttctctttagcagaagtccccttctgagtgtatatgctgacatgtcagtaacttgcaaggaatattatagcccaaaccagtcaatgttagagttggtttttgcaccagccgaagaatggatttcacgtagtgatgatgatattattcaagccacgatgactgagcttgccaaactctttcctgatgaaatttctgcagaccaaagcaaagcaaagattctcaagtaccatgttgttaaaacaccaaggtcggtttacaaaactgttccaaattgtgaaccttgtcgacccattcaaagatctcctatagaaggtttctatttagctggagattacacaaaacaaaaatatttagcttcaatggaaggcgctgttctttctgggaagctttgtgcacaggctattgtacaggattctgagctactagctactcggggccagaaaagaatggctaaagcaagtgttgtgtaacaaaaacaagaattgaaagagtcatggtagagtacaggagcatcatttcaactttggcattctttgtctgtggtcaggactcaggagaccttcaactttattagttcatacgaataaagaaaggctcagcttctgaaatttagctgcaccgtcgtcaactgtgtgcaataagctatacggaacaaacgacatgtgtcaactttaagtcagcccattgttttgttatcctccaattttctggatcaatgtttgtattggaaagaaatatgtcattattcaaacttgtttatatccactttttttatttatcaacatttgtcacaacctttcgttgagtaaaaaaaaaaaaaaaaagaattccattacatatatatatatgcattgtatatt

SEQ ID NO: 1116 - DNA, 280 bp, Glycine max
ctgccgtggtgctttctccactgcctaaaccgactctctctctctgcctctgcaagcttgttacttggctttgtttgattgattgccccaatggccgcgtgtggctatatatctgctgccaacttcaatcatcttgttggcgccagacacttatccaaattcagttcttcggatgccacaatttcgttatcatttggcgggagcgattcaatgggtcttagtttgcgacccgctccaattcgtgctcctaagaggaaccatttctctcccttgcgtgtcg

SEQ ID NO: 1117 - DNA, 2013 bp, Glycine max
tgtctttctctttctttatggaaaaagatgtaattaggtgcagcattttcctatcctggcaaatgcaaaaaaacaggtattggcaaacagaaacaccctttctagcatagggatttgatctctccaccttggtgaaagccttgtgacccataaggcttttacagaaggtgggattttgactagctgggtgtttggctgttgagtttatggagggccaagttccttgttgaacagtgtttgtgttgcctttatctgcagcttttaattgaaccaatcctaccctctttgtgaacatatgaaaagatcggttttttgtgattcctccgctcattgttgttgaagggtctcgtgaaatcaatctagttttgagacctgtttactggcagaggtgacggagtttcagttttgtaagtgcatgatcataataataaggtttttatagaaaagaaaagttgagaataagatgggggaagatggtaattcttggattaggaggacaaatttttcacacacagtgtgccatcgtttggatcctgctagattaggctctattcctatcagtgttcagtcagagcagaaatcaaggccttcctcaaaggctcagagacaccctatgacatacaagcagagatctttgtcaccattgcctgagacttatctttctgaggccttcagggaagctagacttgaacagaaaaggttctccacaccgaatccccggagggaaaagaggattatggggaagttgttgaacaaggattctcgggagactaaggaatcaagttcaaagtcaccttcgcgtagtccaaataggcaagtgaagtcaaagaaccgcaaggattcagcatggactaagcttttggacaatggtggaggaaagattactgctgtggaaacagctgaagagtggaatgttgacatgtctcagttgttttttggcctaaagtttgctcatggtgcacatagtcgactttaccatggtgtatataaggatgaggctgttgctgttaaaatcattatggtacccgaggatgatggaaatggagctttggcttctcgattagagaaacagttcattagagaagtcacccttttatctcgtcttcaccatcaaaatgttataaagttctcagcagcatgtagaaagccaccggtttattgtattatcacagaatatctggcggaaggatccttgagggcatatttgcataaattggaacaccaaactatttctctacaaaagctaatagcttttgctctggatattgctcgtggaatggaatatatacattctcaaggtgtcattcatcgagaccttaaaccagagaatatccttatcaacgaagacaatcaccttaaaattgccgattttggcattgcatgtgaggaagcatcttgtgacttattggctgatgaccctggcacctaccgttggatggcacctgagatgatcaaaaggaaatcctacgggaaaaaggttgatgtctacagttttgggcttatcttatgggagatgttgactggaacaataccatatgaggatatgaatccaatacaggctgcttttgcagtagtaaataagaattcaagaccgattattccatcaaactgccctcctgcaatgcgagctctaattgagcaatgttggagcttgcaaccagacaagaggcctgagttctggcaggttgttaagatattagagcaatttgaatcttcacttgccagtgatggaaccctgagcctggtgccaaatccttgttgggatcataagaaagggcttcttcattggattcaaaagcttggtcccttgcaccaaaatagtggccccgtgcctaaacccaaattcacatgaatctttcaagtgtcctggcttttattgtaacaccaggtccattgtaattaaaaatgaaaggtttgttttttcaggttctctggttgtagtcactttatgaaatttctatattgatttttaggcttgcaagtaaaaaaaaaaaaaaaaaaaaaacggaattc

SEQ ID NO: 1118 - DNA, 581 bp, Glycine max
aaagcaggttttggcaacaaaaaccccccttttaaccttggcaattggatctttccacctgggggaaagccttgtgaaacataaggtttttccagataggtggaattttgactagaagggatgtttggctgttgagtttatggagggtcaagctctttgttgaatagtgtttgtgttgcctttatctgcaacttttaattgaaccaatcctaccctttttatgaacatatgaaaagatcggttttttgtggttcctccactcattgttgttgaagggtctcgcgaaatcaatcaagttttgagacctgttttctggtagaggtgtaagtacaagatcttaataataaggattttgtacaaaggaaaagttgagaataagatgggggaagatggttattcttggattaggaggacaaaattttcacacactgtctgccatcgtttggatcctgctaggttaggctctattcctatcagtgttcagtcagagcaaaaatcaaggcctgctgcctcaaaggctcagagacaccccataacaaacaagcagagatctttgtcaccattgcctgagacttatcttt

SEQ ID NO: 1119 - DNA, 1978 bp, Glycine max
agtgggaatgaaagaccggtgtgggactcgtggcgactttgtggtaaataaaaatcgcacgcgtgcttggtgctgtttggaagaggaaaatacattacagcagcaaaggaaggttgtggtaagtaaatagtagtaacctaacccttgcgtttgcgagtgaggctgaggttgggtttggaaggcaaaggctggtgttgtcccaatccaagagagaagtaatggcgaacatagacatcgaagggatcttgaagcagcagcagccttatgatgggcgcgttccgaagacgaagatagtgtgtactttgggccctgcttctcgatccgtagaaatgaccgagaagcttctgagggcagggatgaacgttgctcgtttcaatttctctcatggcacccacgactatcaccaggaaaccctcaacaatctcaagactgccatgcacaacactggcatactctgtgccgtcatgcttgacactaagggacctgagattcggactggttttctgaaagatggaaaacctattcaacttaaagaagggcaagaagtcaccataactactgattatgacattaagggggatccggagatgatatccatgagttacaagaagctgcctgtccacttgaagcctggaaataccatactgtgctctgacgggacgattactctcactgtcttgtcttgtgaccctgatgctggtactgttagatgtcgttgtgaaaacactgcaacgttgggtgagagaaaaaatgttaaccttcctggtgttgtggtggatctacccacacttactgagaaggataaggaagacattcttggatggggtgtacccaacaagattgacatgattgctctttcatttgttcgtaaaggctcggatcttgttaatgtccgcaaggttctggggccacatgcaaagaatattcagttgatgtcaaaggttgagaatcaggagggagtcctgaattttgacgaaatcctgcgggagactgatgcattcatggtggcacgtggtgatcttggaatggagatcccagtagaaaagattttcctggcacagaagatgatgatatacaagtgtaatcttgttgggaagccagtggtgactgctacccaaatgcttgaatcaatgataaagtctcccaggccaacccgagctgaagcaactgatgtagctaatgcagttcttgatggaacagattgtgtgatgcttagtggtgaaagtgctgctggggcatacccagaacttgctgtgaaaatcatggctcgcatttgcattgaagcagaatcatcccttgactatggtgccatcttcaaagagatgataaggtctaccccattgcctatgagtccattggagagccttgcatcatctgctgtccgcacagcaaacaaggccaaagcaaaactcattgttgtgctgacacgtggcgggtctacagccaagttagttgccaagtataggccagcggttccaatattgtcggtggtggttccagtgttgagcacggactcatttgattggacctgcagtgatgagacgccagcaaggcacagcctgatatacaggggcttgattcctatactgggcgagggatctgcaaaggctaccgatgcagaatccacagaggtcattctcgaagctgctcttaagtccgcaacagaaagggccctttgtaagcctggtgatgcagttgttgccctgcatcgtattggagctgcctctgtcataaagatctgcatagtcaaataatgcatgctcaactcaacgtgccgccaactaatgcagggttatgttttgccttttatttctttctttctgctgtttatccgtatcataaaatggaggatttagttactagctgtagatcgagtgttttttggtatactctgtttatattgcggagtacttctaaatcagattatcatggaaataatactcttaccttttaaaatgtgattggttttgcggaaaaa

SEQ ID NO: 1120 - DNA, 394 bp, Glycine max
tccacgcgtccgggaaggttgtggtaaataggtaacctaacctaacccttgcgacttgcgacttgcgacttgcgagtgagactgaggttgggtttggaaggcaagggcttgtgttgtcacaatccaagagagaagtaatggcgaacatagacatcgaagggatcttgaagcagcagcagccttatgatgggcgcgttccgaagacgaagatagtgtgtactttgggccctgcttctcgctccgtagaaatgaccgagaagcttctgagggcagggatgaacgttgctcgtttcaatttctctcatggcacccacgactatcaccaggaaaccctcaacaatctcaagactgccatgcacaacactggcatactctgtgccgtcatgcttgacac

SEQ ID NO: 1121 - DNA, 499 bp, Glycine max
cccattcgtccgcccacgcgtccgcgcacagcaaacaaggccaaagcaaaactcattgttgtactgacacgtggcgggtctacagctaagttggttgctaagtataggccagcggttccaatattatcggtggtggttccagtgttgagcacagactcatttgattggacatgcagtgatgagacgccagcaaggcacagcttgatatataggggcttgattcctatattgggggagggatctgccaaggctactgatgcagaatctacagaggtcattctcgaagctgctcttaagtccgcaacacaaaggggcctttgtaagcctggtgatgcagttgttgccctgcatcgtattggcactgcctctgtcataaagatctgcatagtcaaataatatttcatgctcaactcatgcagggttattatgttttgacctttttctttctttctttctgctgtttatccatattatcataaaatggaggatttacttacta

SEQ ID NO: 1122 - DNA, 395 bp, Glycine max
tcgaaggcaagggcttgtcttgtcacaatccaaggtttgtctgtgtctgtgccactgtcctgtctttgtttatatatcttagtttcgtcggtgtttacttagatgtatgtgttgttgtagagagaagtcatggcgaacatagacatcgaagggatcttgaagcagcagcagccttatgatgggcgcgttccgaagacgaagatcgtgtgtactttgggccctgcttctcgatccgtagaaatgaccgagaagcttctgagggcagggatgaaccttccccgtgacaatttctatggtggccgcccactagtagcgggaggaccccctgaacattcggaagactgccatgcacaacactggcatactctgtgccgtcaagcttggacactaggggg

SEQ ID NO: 1123 - DNA, 931 bp, Glycine max
tactggaccggaattccggggtagacccacgcgtgggtgcgtgagggcagacgacagattggttgagcggcggggcagaggaaggggcagagttttggagtttgaaagagaaaatattgattgcagttgaggttctaatgagtaacgaatacgattacctgttcaagcttctcctaatcggagactcttccgttggaaaatcctgcttgcttctcagattcgctgatgactcctatgtcgacagctacataagtaccattggagttgatttcaaaatcagaacggtggagctggaagggaaaaccgtcaagctgcagatttgggatacagctggacaggagcgattcaggactataacaagcagttattatagaggagcacatggaattattattgtctatgatgttactgagatggaaagctttaacaatgtcaagcagtggttgaatgagattgatagatatgcaaatgacactgtatgcaagcttcttgtggggaataaatccgatctagttgataacaaggttgttgactcgctaacagccaaggcatttgcagatgagcttggtatccctttccttgagacaagtgctaaagactcaatcaatgtggagcaggctttcttgaccatggcagcagagattaagaagaagatgggaagccaaacaactactggtaagtcggcagaaagtgttcaaatgaaggggcaaccaatcccacagaagagcaactgctgtggttaggttctattctagttctactttctgttatatcaaaatagggagactctgttatgatatggatgtttcagtaactcttgaaatatcacctatcatctatttaaatccttggataatattattctgaatcccctgatggcttcccatgtttaaaatgaagggatgcaatttttccatgcatcttatattag

SEQ ID NO: 1124 - DNA, 1167 bp, Glycine max
ggcacgaggagagaactagtctcgagttttttttttttttttttttttttttttttttttttgcgaaatctgtcgagtacaagaaggaacagtgcagaaagcgatagaaaatggcttcccttttccccttttgtgctcgcaattgaccgtcgaatccaatcctgaaatcccccaataaatagagaagcgaagaaaccaaaccaaaccatcgagtgcgttgcgcccccaccgtaagtagagctatgtcgttgcgcaggcgaaccttgctcaaggtcattgttctcggcgacagcggggttgggaagacctcgttgatgaatcaatacgtgcacaagaagtttagtcagcaatataaggctaccattggagctgattttgtcaccaaagagcttcagattgacgacagacttgtcactctacaaatatgggacactgctgggcaagagcgattccagagtctcggggttgcattttatagaggcgcggattgctgtgttcttgtgtatgatgtgaatgtgatgaagtcgttcgatacccttgagaactggcatgaggagtttctcaaacaggcaaaccctcctgatcccagggcatttccatttattttacttggaaacaagatcgatattgatggtgggaatagtcgagtggtttctgagaagaaagcaaaggactggtgtgccgcaaaagggaatattccctactttgaaacatccgcaaaagaggattacaatgttgatgctgcattcctgtgtattgccaaagctgctttagccaatgagcatgaacaagacatatattttcaagggattcctgaggcggcagttccagagaatgagcagaggagtggatgtgcatgctgatctggagatgctgaataatttttatgcactccccttaatgctgttgttgaaactcttcaaattctttttggtcatttagtgtatactgtatgccttgattgtgcgtgtaaattgttattatgtaccttgaggtttccattttgataaattgtatcatttatttattgtagtcctgttttaggaaggacgaagcttgagaatgttgcacacgcagtaaaagcatgctctattgataaaccatgacctacgagatgaggcatggaccatggaatgtttaaataatttttgaactttttttccgttg

SEQ ID NO: 1125 - DNA, 275 bp, Glycine max
cacccttttccaaacccgagaaatctgattcgttcattgccattgccagggttggaaagacctcgttgatgaatcaatacgtgcacaagaagtttagtcagcaatataaggctaccattggggctgattctgtcaccaaagagcttcagattgatgacagacttgtcactctacaaatatgggacactgctgggcaagagagattccagagtctcggggttgcattttacagaggtgccgattgctgtgttcttgtgtatgatgtgaatgtgatg

SEQ ID NO: 1126 - DNA, 939 bp, Glycine max
agctcgagccgctcgagccgattcggcgagactgaagattgaagaacagtcgtcggctcctcgctcgcccttcgctgctgcgccatcaccgtgcccttctcaaagcgattttaacctaaccgcgttctttttttcttcagaaatcgagcataaggatttgaggattgaagtattgaacaccaaatcctttatacttgttgggcaagaagggagggaaaaaggagaaacacaaaaatgtttttccacatagtgctggagcgaaatatgcagctgcatccacgctactttggtcgcaaccttcgtgataatctcgtttccaagctaatgaaagatgtggaaggcacttgcagcggccgacatggatttgtggtggcagttacagggatagaaaacatagggaaagggctaattcgtgatggaacagggtttgtgacatttccggttaagtaccaatgtgttgtcttcagaccatttaagggagagatcctggaagctgttgttactatggtgaacaagatgggattttttgctgaagctggacctgtccaaatctttgtttcaaaccatttgattccggatgatatggagttccagtctggagacatgccaaattacactacatcagatggatcagttaagattcaaaaagatagtgaagtgagactaaagataattgggactcgagtggatgctacagaaattttctgcataggtaccataaaagatgatttcttgggtgtgatcaacgaccctgcaacagtttaaatacccctttctgtactcgtgtatcgtatatagtttgcatgacttggatttttacaccgtaatcctcttcagatattatgttgtcttactcgatcattgaaagtactaagtcgttgagtttttggttccagaattaattttcaactcccacaagtaattttgggtaatgccatc

SEQ ID NO: 1127 - DNA, 555 bp, Glycine max
ttatcttgttgcacgagacatcgaagaacagcactctggttgccgtgccaccatcttctccaaagttatcatattcgaagagaaaaaaggagtgactgtccaggttgggcaattagggacggaaaaggagaaacacgaaaatgtttttccacatagtactggagcgaaatatgcagcttcatccacgctactttggtcgtaaccttcgcgataatctcgtttccaagcttatgaaagacgtggaaggcacttgcagtggccgacatggatttgtggtggcagttacagggatagagaacatagggaaagggctaattcgtgatggaacagggtttgtgacatttccagttaagtaccaatgtgttgtcttcagaccgtttaagggagagatcttggaagcagttgttactatggtgaacaagatgggattttttgctgaagctggacctgtccaaatctttgtttcaaaccatttgattccggatgaatatggagttccagtctggagacatggccaaatacactacatcagatggacagttaagattcaaaaag

SEQ ID NO: 1128 - DNA, 867 bp, Glycine max
ccacgcgtccgcccacgcgtgcgtggccgagaagacggataggggggggagagaagttattagggtttttgagtgcggtgcggcgatccaaacactcttctctgcagcttttgcctacaactcccttcaccatggctgaacaaaccgagaaagcttttctgaagcaaccaaaagtgtttctcagcacaaagaagactgggaagggaaagagacctggaaaaggtgggaaccgcttttggaaatccattgggcttggatttaagactcccagggaagccatcgaaggaacctacattgacaagaagtgccccttcactggcaatgtttccatccgtggccgtatcttggctggaacatgtcacagtgctaagatgaacaggactattattgttaggaggaattatctccattttatcaagaagtaccagaggtacgagaaaaggcactccaacattcctgctcatatatcacctgctttccgtgtgaaggaaggagatcacgttattattggtcaatgcaggccactttctaagactgtgaggttcaatgtgttgaaagtgatcccagctggatcttctagcggtgcaaagaaggcttttactggaatgtgagctttgatttccagtttttattgaagataaatgttaccttattaattattatatctgatttcttttctggatgataacaaatatgaaaaccttgtcaattttggattttctttgaggtttcgttctggctttatgtttaggatcttgttataatacattatggttttcgaatcttatttgccttttaatttttgaaactatgcagactcttcatttgctttaccagtaatatatttagtttactcgggtttctaaa

SEQ ID NO: 1129 - DNA, 752 bp, Glycine max
gagggtttctggatgctgctagtttctgtctgaaagctattctccaccgtagccgcaagcttcgccgtttgaaacagtgcctcaaccatggcagaacaaacagagaaggcttttctgaagcaaccaaaagtgtttctatgctctaagaaaggtgggaagggaaagaggcctgggaaaggtgggaatcgcttttggaagtcaattgggcttggattcaagactcccagagatgccattgaaggaacatatattgacaagaagtgccccttcactggcaatgtttccattcggggtcgtatcctagccggtacttgtcacagtgctaagatgacaaggaccattattgtgaggaggaattatcttcattttattaagaaataccagagatatgaaaagcggcattcaaatattccttcacacatatcaccttgtttccgtgttaaggaaggagatcatgttattattggccaatgcaggccaatctcaaagacagtgaggttcaatgtgttgaaagtgatccccgctggatcctctaacggtgcaaagaaggcttttactggaatgtgagatttgaattttcagttctcattgaagggtagtgttaccttacaaagttagtagaagcctctgttcaaatacatcaaggttaagttaaagattgaatcaattttttgatatcttgtaatgctttgagtggttatatgttccagactttaattgttgaatagtagttgcagttatttctgttttcc

SEQ ID NO: 1130 - DNA, 806 bp, Glycine max
  unsure (1)..(806): unsure at all n locations
gaaattaataagggtttttaattcaggcggccaaaaaactcctccccggcaacctttggcctacaacaccccttcaacatggctgaacaaaccgagatagcttttctgaagcaaccaaaagtgtttctcagcacaaagaagactgggaagggaaagagacctgtaaaaggtgggaaccgcttttggaagtccattgggcttggatttaagactcccagggaagccatcgaaagaacctatattgacaagaagtgccccttcactggcaatgtttccatccgtggccgtatcatggctggaacatgtcacagtgctaagatgaacaggactattattgttagaatgaattatctccattttatcaagaagtaccagaggtacgagaagacggcactccaacattcctgttcataaatcacctgctttccgtgtgaaggaaggagatcacgttattattggtcaatgcaggcccctttttaagactgtgaggtttaatgtgttgaaagtgatcccagctggattttctagcggtgcaaagaaggcttttattggaatgtgagctttgatttccagtttttattgaagataaatgttaccttattaattattaaatctgatttcttttttggatgataacaaatatgaaaaccttgtcaattttggattttctttgaggtttcgttctggctttatgtttaggatcttgttataatacaaaatggcccccgaatcttattagcctttcaattttttaatgnaaaaaaaaaaaaaaaaaaaaacannncaagcggccgctctagaggatc

SEQ ID NO: 1131 - DNA, 392 bp, Glycine max
taacggtcagggattcccggctcgacccacgcgtacgaccacaaggggggacagaagggattacgggtgttgagtgccgcggtccacacactcttctctgcagcttttgcctacaactcccttcaccatggctgaacaaaccgagaaagcttttctgaagcaaccaaaagtgtttctcagcacaaagaacgactgggaagggaaagaggcctggaaaacgtgggaaccgcttttggaagtccattgggcttggatttaagactcccagggaagccatcgaaggaacctatattgactagaagtgccccttcactggcaatgtttccatccgtggccgtatcgtggctggaacatgtcacagtgcctagatgaacacgactattattgttaga

SEQ ID NO: 1132 - DNA, 352 bp, Glycine max
gggttctggatgctgacagtttcagtctgaaagctattccccaccgtagccaagcctgcaagcttcgccgtttgaaacagtgcctccaaccaaccatggcagaccaaacagagaaggcttctctgaacgcaaccaaatgtgtttctctgctctgagaatactgagaagggaaagagacctgcaaaaggtgggaaccgctttaggtagtccattgagcttggatttaagactcgcagggaagctatccaacgaacctacattgagaagaagtgtccctgcactgcgacggtggccatccgtagacgtatcttggctgggacatctcacaatgctaatatgaacaggactacta

SEQ ID NO: 1133 - DNA, 1362 bp, Glycine max
cgcccccgcctccgcccacgcgtccgaaaacactatagcaatagaaacatttgcttttgaaaaacccctcactcttcatcactacactagctagccacatacaatgtcgaccaaatttaaggtgtttcgtgaattcacaagcgatgactcattcctaaaccaagttatccctgaaaacatcaccgaattccaagtgactctgtccctcgctagagactacgatggcaacaactcaaccaacggaaagttcattccttactgggacactgaaaaggtcactcccgaagtgataaaaaaattcaagaaaaaatacgaacccaccgcactgagggttaaggttcttgtcagcattggaaacaaaaacaaacaatttcctttcaccattggctcggactcgaacagcgaagcatgggtctccgaggccactgcttcgctgaagagcatcattaaaacctacaaccttgatggcatcgatgtcagctacgaggacatcgccgccaacgaagccgactttgttaattccgttggggggcttgtgaggaacctgaagcagaacaagctcattactgtggcttccttcgcaacaagcgctgatgccgccaacaacaaattctacaatctcttgtacgcagaatatgctactttctttgacactgtggtgtttctgagctgggtagggtttactccttctcgcgccaacccagttgcgagcttggaggagaagatccttgccgtggccaacgagtataaggccgtgaaggcctttctggtcgcttacagcaccgttgctgaggattgggctaatttttcgccacctatcttctttatcactctccatggccttctgggtaactctgcggttaagggagcgtccattaaggtcattagtgacgccaccgcctcctttcccgccaagtggatccctgaaattttattgttggctgcctctaaatgaatgaggtatgacatgaagggtgaacacgtatctcagaagtgttatgtgatatgtatgatgtgtgaatcttgaaataatatcttaagggcaagaagttattagttaaaattattagaggtagttttatgaatgggtcataataataaatgctagctatatgtaccactatggaataagattgggtcataataataaagctagcttgctagctatatgtactatacgtaactatggaataagacccatactagtgctataggggcttgctatatgtatgtgtttcatctgcaaattaagagctgagacgcttgccatgcaaggcagacaactattatatatattatgttatgtgtttgaaaaaataatgcatgtgtgtgtcttgtgaataaaatatatttttaagttcc

SEQ ID NO: 1134 - DNA, 1635 bp, Glycine max
ggctcctcctcgaattcgcggccgcgccttacatcacatacttcactctcttgtttttccctttcctctcctcaaaatttcttctgattcatttaatctttactcatcaatggctctgagactgaaccctatccccacccaaaccttctccctcccccaaatggccagtctcagatctcccaggttccgcatggcctccaccctccgctccggttccaaagaggttgaaaatattaagaagccattcactcctcccagagaagtgcatgttcaagtaacccactctatgcctcctcagaagattgagatctttcaaatctttggaggattgggctgaggagaacatcttggctcatcttaagcctgttgaaaaatgttggcaaccacaagattttttaccggatccttcctctgatggatttgaagagcaagtgaaggaactgagagagagggcaaaggagcttccagatgattactttgttgttctggtcggagacatgatcacagaggaagccctgcctacttaccaaacaatgttaaatactttggatggagttcgtgatgaaacaggtgccagccttacttcctgggcaatttggacaagggcatggactgctgaagaaaacagacacggtgatcttcttaacaaatatctttacttgagtggtcgagtcgacatgaaacaaattgaaaagacaattcagtaccttattgggtctggaatggatcctcgaaccgagaacagcccctaccttggtttcatttacacttcatttcaagagagggcaaccttcatatcccacggaaacacagccaggcttgctaaggagcacggcgatataaagttggcccagatctgcggcatgattgcctcagatgagaaacgccatgagactgcatacacgaagatagtggaaaagctatttgaggtcgatcctgacggtacagttatggcgtttgccgacatgatgaggaagaagattgccatgccagcacacctcatgtatgacggccgtgatgacaacctgtttgataactactcttcggtcgcgcagcgtattggggtctacaccgccaaggactatgctgacatacttgagtttctggtggggaggtggaaggtggagcagctaactggactttcaggcgagggaagaaaggctcaagaatacatttgcgggctgccgccaagaatcagaaggttggaggagagagctcaagcaagagtcaaggagtcgtcaacacttaaattcagttggattcatgacagggaaagtactactctaaatgcaccaagggaggagcatggtgaaatcttccggcaataccgttctgagaaatgttgaatagttgaaaattcagtttgtcatttttatcttttatttttcctccttttttggtctttgttatatgtcactgtaaggtgaagcagttgttcttgcatggttcgcaagttaagcagttaggggcagctgtagtattagaaatggtattttttttttttggtttcgcttttctctgtggtagtgatgtcttgtcgaagtattaagtaaacgtttttttttctctggcaattttggatgataaagaaaatttagttcttcctgtggttgggtccaaagcggccgcgaattc

SEQ ID NO: 1135 - DNA, 438 bp, Glycine max
ccctttcgtccgcttgctcctcctctctccttctacattactctctcttctcctaaaaatttctaatgcttccattgcttcatctgactcactcatcaatggctctgagactgaaccctatccccacccaaaccttctccctcccccaaatgcccagcctcagatctccccgcttccgcatggcttccaccctccgctccggttccaaagaggttgaaaatattaagaagccattcactcctcccagagaagtgcatgttcaagtaacccactctatgcctccccagaagattgagattttcaaatctttggaggattgggctgaccagaacatcttgactcatcttaaacctgtagaaaaatgttggcaaccacaggattttttacccgacccctcctcagatggatttgaagagcaagtgaaggaactgagagaga

SEQ ID NO: 1136 - DNA, 3059 bp, Glycine max
  unsure (1)..(3059): unsure at all n locations
ccaaaccaaactctaagcaattattgtatacattctcttctctctcccttttctcatcacacactaacttgctttcgaggttttcttcttctttctcgaattttcacataccgaacttctcgtctttcacatctccaggtttgaaatgaatcctgagaagtttactcacaagactaatgaagctcttgcgtcggcccacgagctcgcgatgagttcaggccacgcgcaattgactcccatccacttggcccacgcgctgatttccgatcccaacggcatcttcgtgctagcgataaacagcgcgggcggcggcgaggaatcggcacgcgccgtggagcgagtgttgaaccaggctctgaagaagctaccctgccagtcccctccgccggacgaggtgccggcgagcaccaacctcgtgagggccatcaggagagcacaggcggcgcaaaaatcacgtggcgacacgcgtttggccgttgatcagttgatcctcggaatcctcgaagactcccaaatcggagacctgttgaaggaagcgggggttgcggtggcgaaggtagaatcggaagtggataagcttcgtgggaaggaagggaagaaggttgagagcgcttccggggatacgaatttccaagctttgaagacttatgggcgtgaccttgttgaacaagcggggaagctcgaccctgttattggccgtgacgaagagattagaagggttgtgaggattctatcacggaggactaagaacaacccggttctcgttggagaaccgggtgtgggaaaaactgcggttgtggaagggttggcacagaggatagtaagaggggatgttccaagcaaccttgctgatgtgaggcttattgcgttggatatgggggcgttggtcgcgggtgccaagtatagaggcgagtttgaggagcggttaaaggctgttttgaaggaagtggaggaggctgaggggaaggtgatactcttcattgatgagattcatttggtccttggtgctggtagaactgaaggctccatggatgctgctaatctattcaaacctatgcttgctcgcggccagcttaggtgcattggtgccaccacgcttgaggagtacaggaagtatgtggagaaggatgctgcattcgagaggaggttccaacaggtttttgtggcggaacctagtgtggttgataccattagcattcttcgtggcttgaaagagagatatgaaggccatcacggtgttagaattcaggaccgtgctttggttatggcagctcaattgtctaaccggtatataactgggcgtcatcttcctgacaaggcaattgatttggttgacgaggcttgtgcaaatgttagggttcaacttgatagtcagcctgaggaaattgataaccttgaaaggaagagaatgcagctagaagtggaacttcatgctctggagaaagagaaagacaaggctagcaaagcccgtcttgttgaagtgcggaaagaacttgatgacttgagggacaagcttcagcctttgatgatgaagtaccgaaaagagaaagagagggttgatgagattcgaaggctcaagaagaaaagagaagagcttctttttgctttacaagaggctgagagaagatatgatctggctagagctgcagacctgcgatatggagcaattcaagaggtggaaactgcaatacaacaacttgaagggagcactgaagagaatctgatgttgactgaaactgttggaccggagcaaatagctgaggttgtgagccgctggaccggtataccagttacaaggcttggccaaaatgaaaaagaaagattgattggacttggtgacagattgcacagcagagttgtaggacaagaccaagctgttaatgctgttgctgaggctgtgttgagatctagagctgggctaggaagacctcaacaaccaactggttcattcctattccttggtccaactggtgttggtaaaactgagcttgcaaaggctcttgctgagcaactatttgataatgaaaaccagttggtgagaattgatatgtccgaatacatggagcagcactcggtttcaagattgattggtgcaccaccagggtatgttggacatgaggaaggtggacaactaactgaagccgtaaggcgaagaccttacagtgtggtgctttttgatgaagtggaaaaggcacatacatctgtgttcaatactcttcttcaagttttggacgatgggaggttaactgatggacaaggccgtactgtggactttagaaacactgtaattatcatgacctcaaatcttggagcagagcacctcctcagtggactttcaggaaaatgtaccatgcaagttgctcgggatcgggtaatgcaggaggtgagaaggcaatttaggccagaattgctgaatcgacttgatgaaattgtggtatttgaccccctttcacatgaccaattgaggaaggttgcaaggctacaaatgaaggatgtagctagtcgtcttgctgagaaaggaattgccttggcagtcactgatgcagcactagactatatactttccgagagctatgatccggtgtatggtgctagaccaataaggaggtggcttgagaagaaggtggtgacagagttgtctagaatgcttgtaagagaggagattgatgagaattcaacggtttacatagatgctggacccaatgggggcgagttggtctaccgtgtagaaaagaatggaggggttgttaatcctacaactgggcagaagtccgatatcttgattcagatacctaatggacatgcacctaaaactgatgctgttcaagcagtcaagaagatgaagattgaggaaattgatgatgatgaaatggaagagtgaattttatgataaaatgtaattagtttgatggcgcaagctcctcttgaacttccttctttgtcttttatgtgttttgaatgggtgtgagtgaaaattgaagaagtcccttgtaacacctgctttttgtctgatcaataaattttctttctgtnnnnnnnnnnnnnnnnnnnnnnnnnnn

SEQ ID NO: 1137 - DNA, 1891 bp, Glycine max
  unsure (1)..(1891): unsure at all n locations
caagcacaatgcatcatctcaaagaaattaagagagttttttttgttcctcactgaccaagccatggcgatgagaaccaaactttctttagctatctttttcttttttcttttagccttattttcaaacctagcctttggcaaatgtaaagaaaccgaggtagaagaagaagaccctgagctcgtaacatgcaaacaccaatgccaacagccacagcaatacactgagggtgacaagcgggtatgcttgcaaagatgtgacaggtatcatcgtatgaagcaagagcgagagaaacaaatccaagaggaaactcgtgagaagaaagaggaggaaagccgtgaaagggaagaagaacaacaagagcagcatgaggaacaagatgaaaatccctacatttttgaggaagataaggattttgagaccagagtcgaaactgaaggtggcagaattcgggttctcaagaagttcactgaaaaatccaagcttcttcagggcattgagaacttccgtttggccattttggaagctagagcacacacgttcgtgtctcctcgccactttgattccgaggttgtttttttcaacatcaaggggcgagccgtacttgggttggtgagtgaaagtgaaacagaaaaaatcacccttgaacctggggacatgatacacataccagctggcaccccactgtacatcgttaacagagatgagaatgataagctcttccttgccatgctccatatacctgtctctgtctctactcctggaaaatttgaggaatttttcgggcctggaggacgagacccagaatcggtcctctcagcattcagctggaatgtgctgcaagctgcgctccaaaccccaaaaggaaagttagaaaagctttttgatcaacagaacgagggaagtattttcgcaataagcagagaacaggtgcgtgcgttggcccctaccaagaaaagctcttggtggccattcggtggcgaatccaagcctcaattcaatattttcagcaagcgtcccactatctccaacggatatggtcgtttaactgaagttggtcctgacgatgatgaaaagagttggcttcaaagactcaatctcatgcttacctttaccaacatcacccagagatctatgagtactattcactacaactcacatgcaacgaagatagcactggtgatcgatggcagagggcatcttcaaatatcatgtccacacatgtcatcaaggtcgtcacactcgaagcatgataagagtagcccttcataccatagaatcagttccgatttgaagcctggaatggtgtttgttgtccctcccggtcatcccttcgtcaccatagcttccaataaagagaatctcctcatgatttgcttcgaggttaacgctcgagacaacaagaagtttacatttgcagggaaggacaacattgtgagttctctggacaacgttgctaaggagcttgcctttaactatccttctgagatggtgaacggagtattcgaccgaaagggattcctcgaacggaaattgataggaagactctaccacttgcctcataaggaccgaaaggagagtttctttttcccttttgagttgccgagagaggagcgtggtcgtcgcgctgatgcgtgagaggtttagaacaatcaagaaaaggtgtgcatgtggctgaagatcacggggaatgtattaagcttcagagactctttaaattaaattttctgtattttgtgttatatgttactagttctttaaattagccagatggagtttatgtgtatctaaatgcagggatgctaatggaataaaatggccacttgtattgttaaaaaaaattcctttcatcaacgctnnnnnnnnnnnnnnnnnnnnnnnnnnnnnnnnn

SEQ ID NO: 1138 - DNA, 740 bp, Glycine max
tatgagtattattcactacaactcacagatctctgggtgatgttggtaaaggtaagcatgaggttgagtctttgaagccaacatcacccagagatctatgagtactattcactacaactcacatgcaacgaagatagcactggtgatcgatggcagagggcatcttcaaatatcatgtccacacatgtcatcaaggtcgtcacactcgaagcatgataagagtagcccttcataccatagaatcagttccgatttgaagcctggaatggtgtttgttgtccctcccggtcatcccttcgtcaccatagcttccaataaagagaatctcctcatgatttgcttcgaggttaacgctcgagacaacaagaagtttacatttgcagggaaggacaacattgtgagttctctggacaacgttgctaaggagcttgcctttaactatccttctgagatggtgaacggagtattcgaccgaaaggagagtttctttttcccttttgagttgccgagagaggagcgtggtcgtcgcgctgatgcgtgagaggtttagaacaatcaagaaaaggtgtgcatgtggctgaagatcacggggaatgtattaagcttcagagactctttaaattaaattttctgtattttgtgttatatgttactagttctttaaattagccagatggagtttatgtgtatctaaatgcagggatgctaatggaataaaatggccacttgtattgttagct

SEQ ID NO: 1139 - DNA, 528 bp, Glycine max
gtttgttgttcctcactgacctcaccatggcgaccagagccaagctttctttagctatcttccttttctttcttttagccttgatttcaaacctagccttgggcaaacttaaagaaaccgaggtcgaagaagatcccgagctcgtaacatgcaaacaccagtgccaacagcaacggcaatacactgagagtgacaagcgaacatgcttgcaacaatgtgacagtatgaagcaagagcgagagaaacaagtcgaagaggaaactcgcgagaaggaagaagaacatcaagagcagcatgaggaggaggaagaccaaaatccctacgtttttgaagaagataaggatttttcgaccagagtcgaaacagaaggtggcagcattcgggttctcaagaagttcactgagaaatccaagcttcttcaaggcattgagaatttccgtttggccatcttagaagctagagcacacacgttcgtgtccccacgccactttgattccgaggttgtcttgttcaacattaaggggagag

SEQ ID NO: 1140 - DNA, 1062 bp, Glycine max
  unsure (1)..(1062): unsure at all n locations
gatataaacaacgctaacgacacttgtgcctgacgcgattcaaacgcacactctctctcaccaaagccttcctagaacgaaaaaaaaaagaagagcaattttccctcaccaaagaagaagaagcaaacaatggccgatcaacttaccgatgaacagatctccgagttcaaggaagccttcagcttgttcgacaaggacggcgatggttgcatcacaaccaaggagcttggaactgttatgcgttcattggggcaaaacccaactgaggcagagctccaggacatgatcaatgaagtggatgctgatgggaatggtaccattgacttccctgagttcctaaatctcatggccaggaagatgaaggacactgattctgaggaggagctgaaagaggcattccgggttttcgacaaggaccagaatgggttcatctctgctgctgagctccgccatgtgatgaccaacctcggggagaagctcaccgatgaagaggttgatgagatgattcgcgaggccgatgttgatggcgatggccaaataaactacgaggagttcgttaaggtgatgatggccaagtgatcatcacattatggccacaaaaacctaaatgaagaaatgttgattaaaaggaaacgaccaaaaaaaggggtaggaggaaggccaagggtttgggtggtataacagtgatgtagtagtccttgacctttcttcttcctacatttttatttgatggtttttgaatccaaccttaaaatgtcaattagtggcaagtcctgctactaggctgtagtggaactgaaccttcttagtttgtcttgtaattttatccaaaaaaagggttgtaatgttaatgtctcttcactttctaccgctcattttttttttttgaaagatgacgaatattgtgatatttgacatgcatcgtagtttatttgaaaagccattgtgtgatatggattctcctaagatatggatgtgaatgagtagaactaattattccttggtcttttagtgcggnnnnnnnnnnnnnnnnnnnnnnnnnnnnnnnnnnnnnnnnnnnnn

SEQ ID NO: 1141 - DNA, 881 bp, Glycine max
  unsure (1)..(881): unsure at all n locations
gatggtaaagaagttggtggcatcgatataagaaaggcaagtttggtcggaataagattcaaaacgctgtttttttgcagtttcttcgattctctctttctctttcttcagaaaaattaaacccattcaaagaaagaaagaaagagcgatcatttccaatcacaatggcagatcaactcaccgatgaacagatctcggagttcaaggaagccttcagtttgttcgataaggatggcgatggttgcatcacaacaaaggagcttgggactgttatgcgttcgttgggtcagaatccaacagaggctgagctccaagacatgatcaatgaagtagatgctgatgggaatggcaccattgacttccctgagttcttgaacctcatggctagaaagatgaaggacactgattctgaggaggagctgaaagaggcgttccgagtgtttgacaaggaccagaatgggttcatttctgctgctgagctccgccatgtgatgaccaaccttggggagaagctcactgatgaagaggttgatgagatgattcgagaggctgatgtcgatggcgacggccaaataaactacgaggagtttgttaaggtcatgatggccaagtgatggtagtacaccatctccactaaattctgaactgatggaaaaaaatgacaaggttgaacttgtgatatagtacacctagtccttgcctaatgtcattactgtcttatttctagatttttatttgatgtttttgaattcaatctaaacgacatttagtggaaagctctgctgctaatggtaattgtggtggaatggtgtctttctaaaaaaccagatnnnnnnnnnnnnnnnnnnnnnnnnnnnnnnnnnnnnnnnnnnnnnnnnnnn

SEQ ID NO: 1142 - DNA, 498 bp, Glycine max
cccacgcgtccgtctctctcaccaaattcttattagaacgaaaaaagaaaagaaaagaaaaaagagcgatttttccctcaccaaagaagaaccaaaacaatggcggatcaactcaccgatgaacagatctccgagttcaaggaagccttcagcttgttcgataaggacggcgatggttgcatcacaaccaaggagcttggaactgttatgcgttcattggggcaaaacccaactgaggcagaactccaggacatgatcaatgaagtggatgctgatgggaatggtaccattgacttccctgagttcctaaacctcatggctaggaagatgaaggacactgattctgaggaggagctgaaagaggcattccgggttttcgacaaggatcagaatgggttcatctctgctgctgagctccgtcatgtgatgaccaacctcggggagaaactcaccgatgaagaggtcgatgagatgattcgtgaggctgatgttgatgga

SEQ ID NO: 1143 - DNA, 407 bp, Glycine max
ttcttgtgtccgcccacgcgtccgcttcgtttctgtctctctctctctcttcagaaaagcagaaagaaataacccattcaaaaaaagaaagagcaatcaattccaatcacaatggcaaatcaactcaccgatgaacagatctctgagttcaaggaagccttcagtttgttcgataaggatggagatggttgcatcacaacaaaggagcttgggaccgttatgcgttcgttgggtcagaacccaacagaggctgagctccaagacatgatcaacgaagtagatgctgatggcaatggcaccattgacttccccgagttcttgaacctcatggccagaaagatgaaggacactgattctgaggaggagcttaaggaggcgttcagagtgtttgacaaggaccagaatgg

SEQ ID NO: 1144 - DNA, 973 bp, Glycine max
ggaggaagagggtgttgtagggaatgaatatatatatatacatatatatcctcacgttcttgtttttccacattcatattttccttgcgtttccctttcattttccctcactttctcgctcgccaaacgcccctctctctcctccaatggccgaccagctcaccgacgaccagatcgccgagttcaaggaggccttcagcctcttcgacaaggacggcgatggttgtattactactaaggaacttgggactgtgatgcggtcactagggcaaaacccaactgaggcagaactgcaggatatgattaatgaggttgatgctgatggcaatggaaccatcgacttcccagagttcctcaacctgatggctcgcaagatgaaagacaccgactccgaggaggagcttaaggaggctttccgtgtgttcgacaaggatcagaatggtttcatctctgcagctgagctccgccatgtcatgacaaatcttggggagaagctgaccgacgaggaggtggatgagatgatccgtgaggccgacgttgatggtgatggacagatcaactatgaggagtttgtcaaagtcatgatggccaagtgaggaccattccaaccataacctaaatttgaaaagcatataaagagaagagggacagggcagataagttttgatgagaattctattcccattaggtccatcttgatttggggttattaggttttgttagttgagtgtctatttttcttgtttgctttaattgctactacttctctgctccctagttatcctacttgtttgctctgtcccttgtttttagtagcttcggtagctgtgtctcaccatgctttgttactctccgttttcatcttcttttggttattattattattattatgaacctagaacaattggatgcatttgtgttttttacatgtggttggctaatgctgttaatattttatatcttttgccatgtg

SEQ ID NO: 1145 - DNA, 949 bp, Glycine max
gaaaagagaagtcctcgttggtgtttgtaagagcatataaataacatagtcctcctcctttgtttttccacatcacacatcacatcgcagagaagaacagagagagatccatcgatcaattaatttccaatggccgatcagctcaccgacgaacagatctctgagttcaaggaagcctttagcctcttcgacaaggacggcgatggttgtattaccaccaaggaacttgggactgtgatgcggtcgcttgggcagaacccaactgaggctgagctgcaggacatgataaatgaggttgatgctgatgggaatggtaccattgatttcccagaattcctcaatctcatggcgcgcaagatgaaagacactgattcagaggaagagctgaaggaggctttccgtgtgtttgacaaggatcagaatggtttcatctctgcagcagagctccgccacgtaatgaccaatctcggtgagaagctgaccgatgaggaagtcgatgagatgattcgtgaggctgacgttgatggtgatgggcagatcaactacgaggagtttgtcaaagtcatgatggccaagtgaggaccaatcaaccataacaaaaacatttgaaagcacatgaacagaaaagggacagggcagataagttttgatgaaaattctattttcattaggacaatcttcatttggggtcattagtttttgttggtcggatttgtgtttgcttttatttattggtattgctcattagtattttctacttgtttgctctgtcccttgttttagtagcttggattagctgtgtctcaccatgcatttgtacttcacttttcatgttttttgggttactactatgaaactggaacaattggttgcaattagtgcttttacatatgggtgacttatactgttaaaaccgtctttatgctattatatgattgtttctgtgatc

SEQ ID NO: 1146 - DNA, 1401 bp, Glycine max
atttcttacctctgtaggaaaaatcaaactcacatacttaccggatgagtctgtttcttaccgaggacaagctttataagtgtctgagtcagtcttctggtgcaagcaaagcaaccagctagcgtggtctttgggtgggtggtgtgtggaaattggatattgatgagaacgcagactctacacacctccccatactccatactccatacccttttcaagtttgaattaatcccttcttgttttgtcccctaaacaccaaacccttccagctgtcaagattttctccgtattatactaatcaaattaaatatcatcatacattaaaaaatcattcagcgcatttaaaccatcgtgccccaccccatttgtactatactactatgtaacaattacaattacaatgtgattcttttttacacaataaagccacgagtatggcaacaaaatgcaagtcatatacttaatttgactcggtaaattaaaattttaaaagaaatcttgcaagactagctagctagcatcacctaagttctacaatatagcccagctaggattgagctatactcaactcaacacatcattctctctttccctctctatctctatctctctttctctgtctcttttctggttgaagtttgaaagacaaatacaccatggcagatatcctgagtgaagaacagattgttgattttaaagaggcctttggcttgtttgacaaagatggagatggttgcattactgtggaagaacttgccactgtcattcggtcattggatcagaaccccactgaagaagagctccaagatatgataagcgaagtcgatgcagatggcaatggaaccattgaatttgacgagttcttgagcttgatggccaagaaagtgaaagacaccgatgcagaggaggagctcaaagaagctttcaaggtttttgacaaagatcaaaatggctacatatcagctagtgagttgagacacgtaatgatcaatctaggggaaaaactaaccgatgaagaggtggagcagatgattaaagaagcagatttggacggtgatggccaagttaactatgaggaattcgtcaagatgatgatgaccgttcgatgaaacactctcacctaattaattggattggacaccaatttgttaattcaaaattcattggcttccaacctcccaatgaaataagtgttctttctttattattgtttgttgtattgtactattattctacttgtacttagtaatgaccaagcagtagattggcacccccattccatttgatccattccaaaattaaattactattcttgtaattttagttcagtacattttctatcctccgagagtaagaaacccaaggagcatatctacccattaattatgcatgacttttacc

SEQ ID NO: 1147 - DNA, 389 bp, Glycine max
tctctctgtccctctctatctctatctctctttctctggctctggtctggttgaagtttgaaagacaaatacaccatggcagatatcctgagtgaagaacagattgttgattttaaagaggcctttggcttgtttgacaaagatggagatggtgagcaagctttcttattcagttgaattcctctttagattgatgcaattctctcatctctatcatatatatatatatatatatgtgtatgtatgtatatgcatggtggtggttgtttatgaatattgggtgcgtcttcttaggttgcattactggggaagaacttgccactgtcattcggtcattggatcagaaccccactgaagaagagctccaagatatgataagcgaagtcgat

SEQ ID NO: 1148 - DNA, 2407 bp, Glycine max
aaaagaagccctcagaccagcagaggcaaaaaaaaaaaaaaactaaataaaataaaataaaatgaaatgaaagaaatgaattgccatagatgatgacatagctggcaagatgagaattgagaataatgctatctcaagcatagtcttgcttacactgcacaccagcttctgcagctcgacgaggtttgcttttacgcctgcttccattatgccgaaaaccattacactttgtcaactcatcagtatttgatccgtttacaacaacattaattttctcatcaattggttctattttctcctgtaaatttcgttttctttttctcccatgttttgtagtattcaaatttttcatctctttgctagacactacattcttaacgttgtcaccaccacaggcatcctcttctaatatttcctcaatttcttcttcatcaaagtcatccttaaacagtttttgtggcctccctcttcttttttgcttaggaaccttttcattcatcattccttccttcgaatccccaaacacacatcaatgccaaccaaaacctccactccaagttctcaatccccaaaactctctcatctccgccctcaatacattcccaaccacatccccgactcctcctacgtccgcatcttggacaccaccctccgcgacggcgaacaatccccgggagccaccatgacagcaaaggagaagctcgacatcgcacggcagctggtgaagctgggcgtggacatcatccagcccggcttcccttctgcgtcgaacagcgacttcatggccgtcaaaatgatagcacaagaggttggcaatgctgttgatgatgatggttatgtgcctgtcattgctggcttctgtcggtgcgttgagaaggacatttctactgcatgggaggctgtgaagtatgctaagaggccacggctttgtacttccatagctacgagccctattcacatggagcacaagctgagaaagagtaaagatcaggtgattcagattgccagggatatggtcaagtttgcacggagtttgggttgcaatgatattcagttcggtgctgaagatgctactagatcagatagagaatttctctatgaaattcttggagtagttattgaagccggggcaacaacagtgaacatagccgacactgtaggtatagtaatgccattggagttaggaaaattaattgttgatataaaagacaataccccaggaattgcgaatgttattatttcgactcattgccataatgatcttgggcttgctacggctaacaccatcgagggtgctcgtacaggtgcacggcaattagaagtaaccattaatgggattggtgaaagggctggaaatgcgtcgttagaagaggttgtgatggccttggcatccaagggagatcatgccttaaatggtctatatacaagaatcaatacaagacacatattagagacaagcaagatggtcgaagaatactccggtatgcatttacaacctcacaagcctcttgttggagctaatgcatttgtccatgcaagtggcattcatcaggatggaatgcttaaacataaaggtacatatgaaacaatatctcctgaggaaattggacataaaagaaccaccagaattggtattgtgctagggaagcttagtggaagccaagctttgagaaagagacttgaagagcttggttatgatcttaaggaagatgaagttgatagtgtgttttggcaattcaaagcaatggctgagaaaaaaaaggttgtaactgatgttgacctcaaagcattagtatcatataaagcttttcatgcagaatctatctggaagcttggtgatttacaagtgacttgtggaactattggtctttctacagcaacagtaaaacttgttaatattgatggtagcacacatgttgcttgttctattggtataggagcagtggattcaacttacaaggccattaatctcattgtgaaggaacctacaaaacttttggattactcattgaattcagttacagaaggcattggtgtaaatgtcacagcacgtgttgtaatttgtagggagaacaatcatacatctacttatgctttcactgaagatgctaattatccaacatttagtgggattgcagcagaaatggatgttgttgtttccactgttaaggcttatctggttgcactaaacaagttgttacgatggaaggaatcatttagatgtgcttaatgtattcaattttttattgaagagttttgaatttgtattattatcagggataatcatttatatttcatggtaacatgaaaaaaaaaaatgagaataataaggagtggcggtgcaagttccataaatccagctagtctcctctatatatactttgtacttgaataacaacatgtcaac

SEQ ID NO: 1149 - DNA, 1635 bp, Glycine max
gggatttagacgccattgtcaaacccttttcacttctctctagggttttagcactctctctctctctcgttttcgttcttcctttctgcctctctcagtcacacaccttctcgatgaccaacgacaacatcgccgtgacagatctcacttctgccctcaatgaagagaatcgcgccgacctagtcaatgctctcaagagcaagattcagagtctggctggggcgcattctgatgttctagagactctatccccgaatgtcaggaagcgtgttgaatctcttagagaaattcagggtaaacatgatgaactagaggcagacttcttgaaggagagagaagctcttgaagcaaagtaccaaaaactgtatcagccattgtacacaaagcgctatgaaattgtaaatggtgttactgaagtggaaggggcagcaaatgaatcaacagatgaatcagaagagaataaagagaaaggagtgccttctttttggctcaatgcaatgaaaaataatgaagtgttagctgaagagatttcagagcgtgatgaaggtgctctcaagtttcttaaagatatcaagtggagcaggatagaaaatcctaaaggattcaagcttgagttcttctttgataccaatccttacttttcaaataccgtcttgacaaaaacatatcatatgattgatgaggatgaacctatattggagaaagcaattgggacggaaattgaatggtacccgggaaaatgtctgacacagaagattcttaagaaaaagcctaagaagggttcaaagaatgctaaaccaattaccaaaactgaaaattgtgaaagcttcttcaatttcttcaacccaccgcaagttcctgaagatgatgaagacattgatgaagatgtggctgaggaacttcagaatcagatggaacaagattatgacatagggtcaacaataagagacaaaattatccctcatgctgtatcatggtttactggggaggccgctcagggagatgagtttgaagacctggaggatgatgaggacgaagaggaagatgaggacgaagatgaggacgaagaggatgacgaggacgaagacgatgaagaggaggatgacactaagactaaaaagaagaagagtggtaaggcacaggctggtgatggtgatggtgagcgacctccagagtgcaagcagcagtaattgtttgtttcttcggagtatcatgtggctgatgggtgtttttgaggtcctatggtgcctgacgggaaagtgggtttcaatttcatgcaatttttcatagtccttgattcattttcctccctagatccgatagtctgaatttattgagtcaatttctcctttttcccatattttgggagaatgtggttatatatttgtagtcagggatgctgtgatttgttactgttggaatttgtacgtcattccagacacttcacatatattataggttgtgctttgttactataaaaaaaaagctagtttatcgtgaggagaatatgaagttgtttgttttctttgttgctgcagtagttttggtagcatggccatgccatggcgcaggctaccaaaggttccctctccgaatgaaaactggctatggtgagcgttcttcggaggtaaaatg

SEQ ID NO: 1150 - DNA, 1308 bp, Glycine max
tctcgagccgattcggttcaaggaggaagaggaaaaagaggattggagggtcgccacgtttagcaataaccaaaccctctctactcttttttcttctccttctcttcgctagggttttagcttcttcctcttcacttcgttctttttcgcctctacaatgagcaacgacaaggacacattcaacgtcgccgatctcacttctgctctcaacgaggacaatagagcagaccttgtcaatgctcttaagagcaagatacagagtttggctggacaacactcggatattctagagtctctgtcgcccaatgtcaggaagcgtgtggaggttcttagagagatccagggtcaacatgatgaattagaggctaaattttttgaagagagagcagctctcgaggccaaataccaaaaattgtatcaaccactttacacaaagcggtacgaaatagtaaatggtactacggaagttgaagaaggggcagtgaaagaaacagcaccagatggtgaggaggatcaagagaaaggagtgcctgcattttggcttactgccatgaaaaacaatgaagtgttggctgaggagatttcagagcgtgatgaaggtgctcttaagtatctcaaagatatcaagtggagcaggatagaaaacccgaaaggattcaaacttgagtttttctttgacaccaacccttattttatcaattctgtcttgacaaaaacatatcatatgattgatgaggatgaaccaatattggagaaagcaattgggactgaaattcaatggcacccacgaaaatgcctgacacagaagattcttaagaaagcgcctaaaaagggttcaaagaatgctaaaccaattaccaaaactgaaaattgtgaaagcttcttcaatttcttcaacccaccgcaagttcctgaagatgatgaagacattgatgaagatgcggctgaggaacttcagaatcagatggaacaagattatgacatagggtcaacaataagagacaagattattccccatgctgtatcatggtttactggggaggccattcagggggacgagtttggagatctggaggatgatgaggatgatgaagatattgaagaggatgatgatgaagaggaggaggaagatgaagatgatgatgatgacgatgatgatgaggaagacagcaagactaaaaagaagtcatctgctgttaagaagagtggaagggcacaggctggtgatggtgagcgacctccagagtgcaagcagcagtaattgtttatttcttcggagtgtcatgtggctgatgggtgtttttgagg

SEQ ID NO: 1151 - DNA, 365 bp, Glycine max
cggtatttgaatggtacccgggaaaatgtttgagtcagaatgttttgaagaaaaaggcgtaataagggttcaaagaatgctaaaccaattaccaaaaccgagagctgtgaaagtttcttcaattttttcaaaccaccagaagtccctgaggatgatgttgacattgatgaagatttggtatgacagtctgtcccaataaacctaaggctaaaaatatgaagcttttgtctattgctataataacttaattttttcaacaggctgaggaacttcagaatcagatggaacaagattatgacattgggtatgcctaattgctaccttttgcttgtatgagctaccttatatatgagctaccttatatt

SEQ ID NO: 1152 - DNA, 318 bp, Glycine max
tcaaaccctgcttaccattttcacttctctctctctctttagggttttggctctctctctctctctccctccttagtccgttctacctctcacacccttctcaatgaccaacaacaacggcaacatcgccgtgacagatctcacattccgccctcaatgaagagtatcgcgccgacctagtctatgctctcaagagcaagattccgagtctggctggggctcattctgatgttctggagatctatcccccaatgtcaggaagcgtgttggatctcttagagagattcagggtaaacagatgaaatagaggcagattct

SEQ ID NO: 1153 - DNA, 1129 bp, Glycine max
ctttcgcgttcgcacactctctctttctctctctgcaaggcaaaacccatcacaattcacaacaacatacaaatcccaaatcctatcttttctcttctcatataaaagaacccttctttcgaatccttcccgctcttttccctctgatttaattcatgcgcagatccaaaccctaatccatctctccgagctctttgatttttgagttaataaaaaaaaaaaattagggtttgatggctgaccaaggattggaagggagccagccggtggatctacagaagcatccttctgggatcgtgcctacccttcaaaatattgtgtccacagtcaatttggactgtaagttggacctcaaaacaattgcacttcaagctcgtaatgcagagtacaatcccaagcgttttgctgctgtcattatgaggataagagatcccaaaacaactgcacttatttttgcttctggcaagatggtttgtactggagctaagagtgaacaacagtctaaattggcagcaaggaagtatgctcgtattatccaaaagcttggcttcccagccaaatttaaggatttcaaaattcagaacattgtcggctcttgtgatgtcaagttccccatacggctggagggtcttgcatattcccatggtgctttctcaagttatgaaccagagctgtttccagggctaatctaccgtatgaagcaacctaaaatagttttgcttatatttgtctctggaaaaattgttctaacaggagccaaggtgagagatgagacttacactgcctttgaaaacatatatcccgtgcttactgagttcaggaaaaaccaacaatgattgtaattcaagaaagagcaggagcagtggtttggcagagaagttcgtggaactgtaaatattaagacaaaggatataatctagattgatataaattaaagacagccgtttgtgttgccccttgactttgtttttttgatttgtcttgatgtagtaaagtggcagacgttgtctattgaattgacatttttgaaaaaaaaaaaagaggaaagaggattttgaggtgtcagaaatgaggaaaaaaaagtggagctaaatgggaaaagtagcacattgagtcctgacagtagctt

SEQ ID NO: 1154 - DNA, 504 bp, Glycine max
ctgttctctatatgtctctatttcttttctctctctataaataagcagccttacaactcttcttaatcccatcaaatcgaaccctttttaaacgctcaaatacaaatttctggcaccaaatccttcccactctcctcaattccattcatttcaactcaacaatctctcagatccgtcaaacaaaatataaaagatagaaaaccctagttctgtaaatatataaaggaaaaaagctttttgctggttttgaggcatagcattaaattggattttgattattcatggctgaacaagcattggaaggtagccaacctgtggatttaacaaagcacccttctgggattgtgcctacccttcaaaatattgtgtcaacggtcaatttggactgtaagttggagcttaaatcaattgcacttcaagctcgaaatgcagaatacaatcccaagcgttttgctgctgttattatgaggatcagggaaccaaaaactactgcactcatttttg

SEQ ID NO: 1155 - DNA, 447 bp, Glycine max
cccacgcgtccgctttccacacacacaacacaaatacctctctttctctctcttcttcgcattcttcggacatacaaaaactcacactctctctctctctcttcaaatcaaaacccctcacaaaattcacaacaacatacccacaaatcccaaatcctgtcttctcatataaaagaacccttctttcgaatccttcccgctctctctctctcttattctttttccctatccgattcaattcgcgcgcagttccaaaccctagtccccctctccgagctctgtgatttttgggttgataaaaaaaattagggtttgatggctgaccaaggattggaagggagccaaccagtggatctacagaagcatccttctgggatcgtgcctacccttcaaaatattggggccacagtcaatttggactggaagttggacctcaaaacaattgcc

SEQ ID NO: 1156 - DNA, 528 bp, Glycine max
ctcgagctcgagccgaaataagcagccttacaactcttctcaatcccatcaaatcgaaccctttttaaacgctctaatacaaatttctggcaccaaatccttcccactctcctcaattccattcatttcaactcaacaatttctcagatccgtcaaacaaaataaaaaagatcgaaaaccctagttctataaatatataaaggaaaaaaggtctgatagatacccattgtcaataagatctaattcttcacacacggatttccccacaatttcttaacgattataacctgattgcgggaaaaaaaaattgcccttttgttgatttttttttgtcaaaaacaattttgtgtgtgtataaaaccatccgtgatctgggttcttttaaaaattggttcttttgtgtattttgttacttttgtaaggaaaattgagggttttggtactgatcactgtggaacatggtggttttcgttgatgggcactttttgctggttttgaggcatacattaaattggattttgattattc

SEQ ID NO: 1157 - DNA, 285 bp, Glycine max
  unsure (1)..(285): unsure at all n locations
cacactctctctttctctctcttcaaatcaaaacccatcacaattcacaacaacatacaaatcccaaatcctatcttttctcttctcatataaaagaacccttctttcgaatccttcccgctcttttccctctgatttaattcatgcgcagatccaaaccctaatccatctctccgagggtttgatggctgaccaaggattggaagggagccagccggtggatctacagaagcatccttctgggatcgtgcctacccttcanaatattgtgtccacagtcaattt

SEQ ID NO: 1158 - DNA, 1811 bp, Glycine max
ttccgaaccaacgcaatgatggaatggaagggtcttgcgttcttctgcagttctgatagctagccatgttggcatgaagatttaagcgggaaaataataagacaacgtatataacgttttcacaaagtggcttttttttttattatcacaaggagtatgtgttgaatgattattgagttgcagcactgatcagttcttagaacatgaattcagcatccccgcagtttgtttccccgagaagtatgagtgtgtacgatccgatccaccagattagtatgtggggagaaggcttcaaaagtaatggaaatttaagtgcagccatgcctctaattgatgagacagacatgaagtttgatagtcagtcagaggatgcttctcatggtatactgggagaacctaataagtatgaccaagaagctaacaaacctactgataagatacaaagacgtcttgcacaaaatcgagaggctgctcgtaagagtcggttgaggaaaaaggcctatgtgcagcagttagaatcaagtcgtttgaagttgatgcagttggagcaagaacttgaacgtgcaagacagcagggaatgtatataggtggtgggttggattctaatcatctgggttttgctggatcagtaaattcaggaattacaacctttgagatggagtatggacactgggtgaatgagcaaaatagacaaatcacagaactgagaaatgctttaaatgctcatattggtgacgtagagctcaggattttagtagatggtatgatgagccactatgccgaaatgtttcgcatgaaatctgctgctgcaaaagcagatgttttctatgttatgtccggtatgtggaaaacaacagctgaaagatttttcctgtggattggaggctttcacccctcggagcttctaaaggttcttggtcccctgattgaacccctgacggagcaacagcgtttgaatatctataaccttggacaatcatgtcagcaagcagaagatgccctttcacaaggtatggacaaactccgccaaacacttgctgatagtgtagcagctgggcagttcatggaaggaacgtatattccacagatgacttctgcaatggagaagttggaagatctggtgagctttgtgaaccaggctgatcatcttcggcaggaaactttggagcaaatgtctcgaatacttacaatccgtcaggcagctcgatgcttgcttgctttgggggaatatttccaacgcctgagggctttgagctcactgtggtctaatagacctcgtgaacctgcttagtctcacaacaagattacaagagcgcaaactcataacatgaacgtgatgtgatgatgaatatgggtcagtttctttggcaaagagcatcaaaaccatgtgtcatgagaggtccaggttgctcacatttttcctgcagttttgcgttatggagaagttgtaaatatgactgctagctcattttatgcatacgggcttgtaaataaattgattttggacgcatggtgtatatcggattgttgcaaaaaatgaaatatttagaatctgccatgagtctgtgtggaagttggtcatgtaaaattcatataatgttatgttgggtgttttggaaaatgaatcaactctagactctcttagtggacgtaatttattttttgtgattgctaagagtagtttattaaaaatatcagttgttattagtttgttagaaagttgttaactctaataggctctatatttagagcattcatacagtcttattgtatctttattcaatcaactacaaaatgattttcttatgat

SEQ ID NO: 1159 - DNA, 396 bp, Glycine max
ttctgaaccaacacaatgatggaatggaagggtcttgcgttcttctgcggtttgatagatagctagctatgttggcatgaagatttgagcgggcaaaataataagacaacatacataacgttttctcaaagtggtttttttattttatgttgtttatcataagacggcagtttgcctgcactgatcagttcttagagcatgaattcagcatccccgcagtttgtttcctcaagaaggatgagtgtgtacgatccgatccaccagattagtatgtggggagaaggcttcaaaagtaatggaaatttaagtgcagccatgcctctaattgatgagacagacatgaactttgataatcagtcataagatgcttttaatggtatactgggagaacctaat

SEQ ID NO: 1160 - DNA, 1614 bp, Glycine max
agtagaagtgcttttcaaagatcagcactacaccaagactcctgaagaagctgcagccgtatccattctggcagggttggatttgaactgtggaagattatcttggccaatacacagaaggggctgtcaagcaagggcttttggatgaagcatccattaacaatgctgtcgccaacaacttcgccacgttgatgcgtcttggtttctttgatggcgatccaagcaagcaaccttatggtaaccttggtccaaatgatgtatgcacttcagagaaccgggagctcgcccgtgaagcagcaagacaagggattgtgttgcttaaaaatagtctgggatcattgcctctcaatgccaaagccattaaatcattggcagttatagggcccaatgctaatgctaccagggtcatgattggaaactacgaaggcattccttgcaactatatatcacccttgcaagcactaacagccttagttcctacgagctatgctgccggctgccccaatgtgcaatgtgcgaatgcagagttagatgatgccacacagatagcagcatctgcagatgcaacagtgattgtagttggtgcaagtctagctatagaggcagaaagtcttgacagaattaacattcttcttccaggacaacagcaacttctagtgagtgaagttgctaatgcatccaagggacctgtgattcttgtcataatgtctggtgggggcatggatgtgtcctttgctaaatctaatgataaaatcacaagcatcctatgggttggctaccctggcgaagctggtggagctgccatagctgatgtgatttttgggttttataatccaagtggaaggctacccatgacatggtatccacaatcatatgtaaacaaggtgccaatgacaaacatgaacatgagggcagatcctgcgacaggttaccctggtagaacatacagattttataaaggggaaactgttttctcttttggagatggaataagcttctcaaatattgagcacaaaatagttaaagcacctcaattggtgtctgttcctctagcagaagatcatgaatgccgttcctcagaatgcatgtcacttgatgttgctgatgagcattgccaaaacttggccttcgatattcaccttggggttaagaacatggggaaaatgagcagtagccatgtagtgttattgttctttactcctcctgacgtgcataatgctcctcagaaacacttgttgggttttgagaaagtgcacttgccaggaaaatcagaagcacaggttaggttcaaggtagatatttgcaaggatttgagtgtggttgatgaacttggcaataggaaagttccactgggacaacatctgcttcatgtcggaaacttgaagcatcaattaagtgtgagtgtttgaaacaagtcttcaaatcatcttcactattttttttttccttttttcctccctggtttccttaaaagaattcttctagggaaccagaaataagtcggaggaaactgtaacaaaattctctgatttgtattatcatattcaaatcacaaatttggaaacaaaatcaaattttgattagagcccacattatatgatttgacaacgtacc

SEQ ID NO: 1161 - DNA, 860 bp, Glycine max
ctctatataaaccctttaacctatctcttcttgtcacatagcatagctttgaatgcgcgtaacaaaacaaaaagtttacgttacaaatcgcataataaccgtcctaagtttattgagagaattttgcaagtgtgagaaacatggcatctcgtcaaaacaacaagcaagagcttgatgaaagagcaaggcaaggagagactgttgtcccgggtggaactggtggcaagagcctggaggctcagcaacaccttgctgaaggaaggagcaagggagggcaaacaaggaaggaacagctgggtacagaagggtaccaggaaatgggacgcaaaggagggttgagcactgtggacaaatcaggagaagaacgtgctcaagaggaaggcattggcatcgatgagtccaagttcaggactggtaataacaagaaccagaatcagaacgaagaccaggataagtgataatgtaacacccttcactagcatgtgtagtgtgttcttatgctagcttaaatgtgagtgtcaagtgttttaggaagtaggaaaagaataggttataaaaaataatgtttaggcaatagttatataggtcaaagtgtcatgtcatgtgtgtcgtgaaataattagctagcatgtttaggttgttttagggtttcttttgcatgtgtgtttctcttatgtgtgtaagtgatcagtgaggcatggctctatagctatccagaaattagcacaagcaagcatgtgcctccatttcactaatgtgtatgtatctatggtgtgaccacgttcaatactagaatgtaatggtctcaactcttatgttaacttatcgtggcacaaacaattacgtacgtactcaactta

SEQ ID NO: 1162 - DNA, 521 bp, Glycine max
attttgttctctatatacaccctttaacctatctcttcttgtcacatagcatagctttgaatacaaaaccaagtgatgttgcaatcgcataataataaccatccaaagtttattgagagaaatttgcaagtttgaaaagaaacatggcatctcatcaacaaaacaagcaagagcttgatgaaagggcaaggcaaggagagactgttgttccgggtggcactggtggcaagagccttgaggctcagcaacatcttgctgaaggaaggagcaggggagggaaaacaaggaaggagcagctggggacagaagggtaccatgaaatgggacgcaaaggtgggttgagcactatggacaagtcaggagaagaacgtgctcaagaggaagccattgacatcgatgagtccaagttcaagactggtaataaccaagacaagaaccagaacaagtgatcatgcaacacccttcactatcatatgtagtgtgttcttatgctagcttaaatgctagtgtcttagtgtttt

SEQ ID NO: 1163 - DNA, 885 bp, Glycine max
cgttgctgtcgccgttgctgtcgccgttgctgtcgctacatttcatcacaatcttcctcaatcatgtcttcagaaacaaaagcagaaacacaaactttgaccaccccctcttactcctcagatgttgacaatggtatagtgaaggatgtagtcctatggagaagaaagaaaataaatataagcgttcttgttgcggcaacagcggcatgggtgttgatggaagtgtttgaattcaacttcctcactctcatatcatgggtggccatactcggtcttgcttcaatattcctctatgccaatatgcttagacttttgggcaaggaaccaccgaacttgttggggttggaagtgagtgaaaaaacaacaacgagaatagcacacacagttcgagcatggattgaagaaggaataaggtggttgttccttgtgggcgcagagaaagagtggcccgtgtttgtgggggctgtggctggattgttatcactatcttatttaggaagttgcatggacctcctaacactagtttatatgggtacgttagtgggaatggcagttccattaacttatgtgaagaacgaggacaagattaagaggtttgtggagtggttgagggagaaacacaagagatattatcagattattgacgagaagaccattcagaagattaaaagcagaatcgtaaaggagaagaaaacagagtaattagctttttaagagaaatgtgcacggttatgctgtattatttaatgaatattaagagtctattatttgtttcgttatatttcggtaatgttatgaatagattagtataacgtaagaattgtaacttcgccctgaaaagttaaactcttaagttaatattattattacgagtgttcatcagca

SEQ ID NO: 1164 - DNA, 850 bp, Glycine max
ggtcttgaaaacccgcggcgggccacgcgtccggcaagagttgaaggaaatggctgaagcacaactacgagaccagcatggcaaccctgtcccactcaccgatcaatacggtaatccggttatcttaactgacgagcgcggtaatcccgtccaactcactggtgtcgctaccaccgctaccggcacagcaggttctgggtttgggtcctatggtaccggtgcttacggtggtggtgcaagtgcaaccaccgttgcagatcttttggcaacccaaccaaggagtggcagggaggctagagagcttcgtcgttcctccagttcaagctctagctcgtctgaggatgatgggcaaggtgggaggaggaagaagggagtgaaggataaaataaaagagaaactaccaggggtaggaggagggaataataataaggagcatgcacacacaacaactgctccaaccaccgccactaaccaccctgctgatcagcatgagaagaagggcataatggagaggatcaaagaaaaattgcctggccaccacacccactgaaaacctgcgttacattaccatatgtttgcgcctgtctgtcttatatatgtaacataaagtactatatatgtcatgggctgagtatcttgtgcaattatgctctttatattatgttcagaatatatatctgattatgtcactatcttgattcttttgaatcatgtatatggatgtgttccatcttctctttgtatgcaccttcgattaatatctcggcctcgatcgcatcagtgtgacttctgcttttattttatgataataacgcttctttataaaagaaagtagaaaagggtggccgcc

SEQ ID NO: 1165 - DNA, 403 bp, Glycine max
gaaggaaatggctgaagcacaactacgagaccagcatggcaaccctgtcccactcaccgatcaatacggtaatccggttatcttaactgacgagcgcggtaatcccgtccaactcactggtgtcgctaccaccgctaccggcacagcaggttctgggtttgggtcctatggtaccggtgcttacggtggtggtgcaagtgcaaccaccgttgcagatcttttggcaacccaaccaaggagtggcagggaggctagagagcttcgtcgttcctccagttcaagctctagctcgttttggatgaatgttttatagtctgaggatgatgggcaaggtgggaggaggaagaagggagtgaaggataaaataatagagaaactaccacgggtaggatgaaggaataat

SEQ ID NO: 1166 - DNA, 607 bp, Glycine max
ggaagcatatttgagactaactcggagagaaagagagagagagagagaaaaatggctgatacaagtggaggagatgcagtgagaccggtggtaatatgtgataacaagtgtggctgcacagttccatgcactggtggttccacttgcaggtgcacaagtgtcggcatgacaactggaggcggtgatcacgtgacatgctcgtgcggagagtactgtgggtgcaatccatgctcatgtcccaagactgcggcttctggaactggttgcagatgtggcacagattgctcatgtgcctcttgccgcacttaacatcataccttaattaagtctcaaacttcacaaatcttgaatgtgctttaaatctagctatgtactagatagtctcgttcaatgttagtgttcaaattgtggatgtgatttctaatattagtctactactctatatgtagaggcctttctttatgtggaataggtataacatgctgttatgcccgttttgtacttgaaaactatcttataatgaataagaatatgtgaattttgagtattaacaaactggtaaatcctactaataattaaattgcatctctatgttcataaacacgag

SEQ ID NO: 1167 - DNA, 465 bp, Glycine max
agaagacgacacgatggggaagcatttgagactaactcttagagagaaaaaaaatggctgatacaggtggaggagatgcagtgagaccagtggtaatatgtgataacaagtgtggctgcacacttccatgcactggtggttccacttgcaggtctcttaagttcatgatttcaacaaagtgcacaagtgctggcactgccacaggagggggtgatcacgtgacatgctcgtgcggagagcactgtggttgcaatccatgctcatgtcccaagattgcggctgctggaagtggttgcagatgtggcacagattgtgcatgtgcctcctgccgcacttagtatcacaccttaaggcttaaacttcacgttttattttatgtcttcaaatcttgaatacgttttctatatattagtcttgtttaaagttcaaagtgtggacgtggtttctacttagtactcaaacgta

SEQ ID NO: 1168 - DNA, 454 bp, Glycine max
tggggaagcatttgagactaactcttagagagaaaaaaaaatggctgatacaggtggaggagatgcagtgagaccagtggtaatatgtgataacaagtgtggctgcacacttccatgcactggtggttccacttgcaggtgcacaagtgctggcactgccacaggagggggtgatcacgtgacatgctcgtgcggagagcactgtggttgcaatccatgctcatgtcccaagattgcggctgctggaagtggttgcagatgtggcacagattgtgcatgtgcctcctgccgcacttagtatcacaccttaaggcttaaacttcacgttttattttatgtcttcaaatcttgaatacgttttctatatattagtcttgtttaaagttcaaagtgtggacgtggtttctacttagtactcaaacgtattagtaattggtatcaaaactgtccaaca

SEQ ID NO: 1169 - DNA, 1017 bp, Glycine max
ggctaagacaagctgagaagatatatacatatatacgagagagtgagtaatcgagaaagagaagaagcatatatatcaaaatggctgcagagatggagagggagtcattgataactgaagctcctaatgcaccagttactgcacagagaagggtcagaaatgacttagaaaattctctaccaaaaccatacttgccaagagcattgaaagctcctgatacgggtcacccaaatggaacagcaggccacaggcaccacaacttatctgttcttcagcagcattgtgctttttttgatcaagatgacaatggaatcatttacccttgggaaacttacatggggctgcgttctattggatttaatgttgttgcatctgttattatggctattgttatcaatgttggattgagttaccccactctacctaattggttcccttctctcctttttcctatctacatacacaacatacacaaagcaaagcatgggagtgactctggagtttatgacacagaaggacgttatgtgccagcaaatattgagaacatattcagtaagtatgctcgtacagtacctgacaagctcacacttggggagctctgggacttgacagagggaaaccgaaatgcttttgacatatttggctggcttgcagcaaaatttgaatggggggttctgtacattctggcaagggatgaggaaggtttcctgtctaaagaagctgttagaagatgctttgatgggagcttatttgaatactgtgctaaaatgcatactactagtgatgccaagatgagttgaaattggattatgcagtgtgcatagttacgtgtgatgtgtcgtttctgttagacatgttagtggtgtaatgtgaaaaaatagtaaaaaaataaacttattaggaactcgtggtctgggattgatcagcataataaagagtttactgtctctagcatatgttgttctcgagatgtaatcctttcctcacgtgtggaaagaagttactctggttcctaca

SEQ ID NO: 1170 - DNA, 700 bp, Glycine max
gagatggaacgctttgatataatatagaaagatagaaagagagagaagaagaaaagaagaacaaagatgcaatcctcaaaggagaagatgaaaaacatggcaagtgctgccaaggaacaagtcgacatctataaagccaaaatagacgagaaggcagagaaagcaacggcaagaacagaagaggagagggtgatagcccatgagcacgcaaaggcaaaggaagctggagcaaagatggagctgcatgaagctaaagcaaggcatgcagcagagaagctaagcgccaaccaatcacattatggtctccaccatggccacaacaaccctcccttagtaggaacaactcagactcactaccagcaagggcaccagcaccagccacttggggcagttcctatgcctggaaccacttatccatcttatccactaggaggaaaccctaaccctccaaggaacaaacatatataatagatctatctgtgttttgctgtagtacgtctacttcttgtgttattactcctaggagtttctctttgcagacatgaaataagaagggtttcaatttagtctgaatccttccatgtatatttgagagtggctttgatttcagtgaatgtttccccttttgtattaattcaacaatctttaaacttccaagatggtggtacttgtcccattggccatcatcattgacggtcca

SEQ ID NO: 1171 - DNA, 618 bp, Glycine max
agatctctatgatataatatagaaagagacagagagagagagacagacaagaagaacaaagatgcaatcttcaaaggagaagctgaaaaacatgaccagtgctgccaaggagcaagccgcctcctttaaagcaaaaatagacgagaagacagagaaagcaacggcaagaacagaagaggagagggtgattacccatgaacgtgcagaggcaaaggaagctgaagcaaagatggagctgcatgaagcaaaagccaggcatgcagcagagaagctaagcaccaaccaatcacattatggtctccaccatggccacaaccctcccctggtaggaacaactgagactcactaccagcaagggcaccaccagccacttggggcagttcctatgcctggagccatttatccatcttatccgctaggagcaaaccctaaccctccaaggaacaaacatatataatagatctatttgtgttttgcagtagtctctgtacataagtctgaataagaggggtctgattttagtctgaatccttccatttacatttgagagtggctttgatttcagtgaatgtttccccctttgtaataattcaacaatgtttaaacttccagatggta

SEQ ID NO: 1172 - DNA, 895 bp, Glycine max
  unsure (1)..(895): unsure at all n locations
gaaattaaatcgttcaacactggaactctttgatataatatagaaagagacagagagagagagacagacaagaagaacaaagatgcaatcttcaaaggagaagctgaaaaacatgaccagtgctgccaaggagcaagtcgacatctataaagcaaaaatagacgagaaggtcagcttttccatctctatacatccatatatttttgttccattatacaatgattcatttgtggcgtagctaggcatcaatatcatgaagttagaatcgtgatatatatttatatatgtatgtaacctcttcaacaagttttttttttttttttatgtcaaagcttgtcaaaattaatattatataatttatgtgtgcatcttgaagcaaagggtgaatatatgttaataatgacatgagaaatgaaggccgtgtaggggttgatatttgtgtagacagagaaagcaacggcaagaacagaagaggagagggtgattacccatgaacgtgcaaaggcaaaggaagctgaagcaaagatggagctgcatgaagcaaaagccaggcatgcagcagagaagctaagcaccaaccaatcacattatggtctccaccatggccacaaccctcccctggtaggaacaactgagactcactaccagcaagggcaccaccagccacttggggcagttcctatgcctggagccatttatccatcttatccgctaggagcaaaccctaaccctccaaggaacaaacatatataatagatctatttgtgttttgcagtagtctctgtacataagtctgaataagaggggtctgattttagtctgaatccttccatttacattngagagtggctttgatttcagtgaatgtttccccctttgtaataattcaacaatg

SEQ ID NO: 1173 - DNA, 805 bp, Glycine max
  unsure (1)..(805): unsure at all n locations
cggctcgagcggctcgagctcgagagctaccgaatccgcccgagagcaaaatgaccaagttcacaatcctcctcatctctcttctcttctgcatcgcccacacttgcagcgcctccaaatggcagcaccagcaagatagctgccgcaagcagctccagggggtgaacctcacgccctgcgagaagcacatcatggagaagatccaaggccgcggcgatgacgatgatgatgatgacgacgacaatcacattctcaggaccatgcggggaagaatcaactacataaggaggaacgaaggaaaagacgaagacgaagaagaagaaggacacatgcagaagtgctgcacagaaatgagcgagctgagaagccccaaatgccagtgcaaagcgctgcagaagataatggagaaccagagcgaggaactggaggagaagcagaagaagaaaatggagaaggagctcattaacttggctactatgtgcaggtttggacccatgatccagtgcgacttgtcctccgatgactaagaagttaaaagcaatgttgtcacttgtacgtactaacacatgatgtgatagtttatgctagctagctataacataagctgtctctgagtgtgttgtatattaataaagatcatcactggtgaatggtgatcgtgtacgtaccctacttagtaggcaatggaagcacttagagtgtgctttgtgcatggccttgcctctgttttgagacttttgtaatgttttcgagtttaaatctttgcctttgcggatnnnnnnnnnnnnnnnnnnnnnnnnnnnnn

SEQ ID NO: 1174 - DNA, 573 bp, Glycine max
cgtttacaaggttttcacataaaagcatattcctccaaacaccaaatgaatcaaagataaaaacaaaaataatgaaaaatcatgccatgtcatgtcgatatcattgttcacatacatacatacatgccacatgacgcaaccccttacatccccttacatgagtgtgtctcatccttactccctcgactcttcctctctttataaagcattccttccattttcttgttcctcaaaacacaaacaccataacatgggagagaaaaaagaagcggcgaagaatgaggccgataagaagcctgaatcaggagcaaagcaaaacgacgaaccagtacctgtcgttttgaaactcgacatgcattgcgagggatgtgtcaagaagatcaaacgcgccgttcgccatttcgaaggtgttgaagacgttaaggccgatctatcaagtaacaaactaacggttattggaaaactcgaccctgccgaagtgcgagataaactagcggagaaaactaggaagaaggtcgaactcgtttctcctcagcctaagaaggattccgccggcgataagccccggagaag

SEQ ID NO: 1175 - DNA, 1035 bp, Glycine max
  unsure (1)..(1035): unsure at all n locations
ggatgatcggagggattaaaaaaaaaacctattctcctgatatggtctactcttgtgggtggtgggtaggaacaattcccagtgttctcagattggaatcccattgactctaccatggccacgccctctgatccttccaaccaagaagctgttgtaagaaggagaaacaacggaccccctattaagttcctccttcctctcatatatgcccctgttctccctctaattcgtctatcgctgcggcataaacccgtcttgagagatcgcttgtttactgctgtgttggctggggcctttgctcatggcttctatttggtaacagatctgtatgatattgagagcaagtgattaagcagagcatgtttcagacatttcttcggcatcatttacatcacaacctcaggtcttcaataaatttcttcgaccactatttacagctaaacattctggtaatgccttaaatagcattggtcgattttcaagatgtacgaatatttttttcaattatattgacagattattatgttatgtacgccttatagttgcatcttgtattgcggattttgctttctctagaataactatggaattcggaggctgttctttgatcttttttttctctcttgatatcaatgctatttcttgtcagcttgatgttgatttctgtaataattagatggtctaagtggattcagaggatcaatatgcatgtcctttatcgccaaaaaaaaaaaaaaaaactcgctccagggggtgaacctcacgccctgcgagaagcacatcatggagaagatccaaggccgcggcgatgacgatgatgatgatgacgacgacaatcacattctcaggaccatgcggngaagaatcaactacataaggaggaacgaaggaaaagacgaagacgaagaagaagaaggacacatgcagaagtgctgcacagaaatgagcgagctgagaagccccaaatgccagtgcanagcgctgcagaaagatatgggagaccagagcgaggaactggaggagaangcagagaaa

SEQ ID NO: 1176 - DNA, 399 bp, Glycine max
caaacaacaaggttctgcagaatataaggtgggaatggaacttaccaaactatttggtaacggctcgagcatcctcctcatctctcttcgcttctgcatcgcccacacttgcagcgcctccaaatggcagcaccagcaagatagctgccgcaagcagctccagggggtgaacctcacgccctgcgagaagcacatcatggagaagatccaaggccgcggcgatgacgatgatgatgatgacgacgaaaaacacaaaaacaccataacatgggagagaaaaaagaagcggcgaagaatgaagcagataagaagcctgaatcaggagcaaagcaaaacgacgaaccagtacctgtcgttttgaaactcgacatgcattgcgaggggatgtgtcaagaagat

SEQ ID NO: 1177 - DNA, 2073 bp, Glycine max
cccacgcgtccgcaatttcgcacctccctcgtttccatcgacatccgcatcaaaagaccttctctttctcttgccatcatttcattccccatacgctccatccatcaccctttctttcattctgttgggaaatggaagtcacactttcagcgtgcaagtccattagctcgccttctgttcccgtcgcagctttatttgcggggaaagcaggaactaagagttcgcaatgcagttttttagctggagcaaacaaagtgaggtttcctaggcaagtcggtcaagttagccacgttcgcaaacagcgccaaacgcgtcactgtggtgctctccacgcgacttgcagcggtgacaagatcctgatcgcgaatagaggcgagattgcggttcgcgttattcgaaccgctcatgaattggggattccgtgtgtggctgtgtactccaccattgataaggacgcccttcatgtcaaactggctgatgaagctgtatgcatcggcgaagcgccgagtagccagtcgtacttgctgatcccgaatgttctgtcggctgctattagccgcagatgcacgatgttgcatcctggctatggttttcttgcggagaatgctgtgtttgttgaaatgtgcagggaacatggaatcaactttattgggcccaaccctgacagtattcgggttatgggtgacaaagcaactgccagagagacaatgaagaaagcaggtgttcccaccgttccaggaagtgatggccttttacagagcacagaagaagctattaggctggcaaatgagattggtttccctgtgatgatcaaggcaacagctggtggtggaggacgtggcatgcgtcttgctaaagaacctgatgagtttgtgaagttgttacagcaagctaagagtgaggcagctgctgcatttggcaatgacggggtttatttggagaagtacattcaaaacccaaggcacattgagttccaggttcttgcagataaatatggtaatgttgttcactttggagaacgtgattgcagcattcagaggcgtaatcagaaactgcttgaagaagcaccatctcctgccctgacccctgagttgcgaaaggcaatgggagatgcagcagttgctgctgctgcatctattggttacataggtgttggaacgattgagtttcttttggatgaaagaggttccttttactttatggagatgaacacacgtatccaggttgagcatcctgtgacagaaatgatttcctcaacagatttgatagaagagcaaattcgtgtagctatgggagaaaaacttcgatacaaacaggaggatattgtcctcagaggacattctattgaatgccgtatcaatgcagaagatgcttttaagggatttagaccagggccaggtagaattacagcatacttgccatctggaggtccatttgttagaatggatagccatgtttatcctgattatgtggttcctccaagctatgactcccttcttggaaagctgattgtatgggctccaacaagagaaaaagcaattgaacgcatgaaaagggcacttgatgacactattatcacaggagttcctactacaattgattatcataaacttatccttgacatagaggatttcagaaatggaaaggttgatactgcttttattccaaaacacgaggaagagttggcaatgcctccgcagaagatggtactcgctaacagggtgaacgaactagctggttcaactgcctgatgaatatgattgtgtgatgtcagaattgctttttgtaatcgccgtgttgtcagtgcctcgaagtgaatgttttaatgaaattttgataattagtctcgtacattccttttcttcacataattatattgtaaaatcaattaattcaagtttgatttcatcccgaatattattgcaaggaattaagaataggtccttgcatttttttcggaagtcatagttgtcacaatggttggtttagaggatcttgtattaagagctcgatgctagatacagtaataaaaacttaaccttatcctaatagactgggtttgttatatgtaac

SEQ ID NO: 1178 - DNA, 856 bp, Glycine max
atgttgttgtatttgttggtgttaatggtgttggaaaatctactaatctagctaaggttgcttactggcttttgcagcacaaggtcagtgttatgatggctgcttgtgacacatttcgatcaggggctgttgagcagctgcggacccatgctcgaagacttcagatccctatatttgagaagggctatgagaaagatcctgccgttgtggcaaaagaagcaagtcaagaagcttcacgcaatggttcggatgtggttctcgttgatacagctggtcgtatgcaggataatgaaccacttatgagagcactgtcaaaactcatctaccttaacaatccagatctagtcttatttgttggagaagcactggttggtaatgacgctgttgatcagctttcaaagttcaatcagaaattagctgaccttgcaacatcacctaatccaagattgattgatgggatcttgctcacgaaatttgacaccatagatgataaggtgggagctgcactttcaatggtttacatatctggagctcctgtcatgtttgtgggctgtggacagtcttatactgacctcaagaagctcaatgtcaaatcaattgtgaagactctccttaaatgagggcacaaagtggtttattttcccttgcaatcctgtttacctgtcatgtttgtttctgttgaatgatgaacttgttaatcctcgttgatcccattacttggtgaggaaaaaaactatgtggctttgacttttgaggcaatttggtttgtttagtttaaggaacttgttattttttttaatcagcaaatgttagcttttagtttttgttagcaaggagattcgaacttacggcaaaa

SEQ ID NO: 1179 - DNA, 2080 bp, Glycine max
acccgcatcaaaagtcactccattcccatcagaacacaaaacacagcatttcccttagcgtaggtaaagccatagtatccatcactcactctttcgcaagcattctttctgtttatatatttcactcaccaataccttcattgtgttaggaaatggaagtcacactttcagcctgcaagtccgttagctcgccttctgttcccgtcgcaggtttgtttgcggggaatggaggaattaagagctcgcaatgcagtttcttagcgggagcgagcaaagtgaggtttcctaggcaagtaggtcaagttagccaccttcgcaaacagcgccaaacgcgtcactgcggtgctctccacgcgacttgcagcggtgacaagatcctgatcgcgaacagaggcgagattgccgtccgcgttattcgaaccgctcatgaattggggattccttgtgtggctgtgtactccaccatcgacaaggacgcgcttcatgtcaaattggctgatgaagccgtttgcatcggggaagcgccgagtagccagtcctacttgctgatcccgaatgttctgtcagctgctattagccgcagatgcaccatgttgcatcctggctatggttttcttgcggagaatgcagtgtttgttgaaatgtgcagagaacatggaatcaactttattgggcctaaccctgacagtattcgggttatgggtgacaaagcaactgccagagagacaatgaagaaagcaggtgttcccaccgttccgggaagtgatggccttttacagagcacagaagaagctatcagactggcaaatgagattggtttccctgtgatgatcaaggcaacagctggtggtggaggacgtggcatgcgtcttgctaaagaacctgctgagtttgtgaagtttttacagcaagctaagagtgaggcagctgctgcatttggcaatgatggggtttatttggagaagtacattcaaaacccaaggcacattgagttccaggttcttgcagataaatatggtaatgttgttcactttggagaacgtgattgcagcattcagaggcgcaaccagaaactgcttgaagaagcaccatctcctgccctgacccctgagttgcgaaaggcaatgggagatgcagcagttgcagctgctgcatctattggttacataggtgttggaacggttgagttccttttggatgaaagaggttccttttactttatggagatgaacactcgtatccaggttgagcatccggtgacagaaatgatttcctcaacggatttgatagaagagcaaattcgtgtagctatgggagaaaaacttcgatacaaacaggaggatattgtcctcagaggacattctattgaatgccgtatcaatgcagaagatgcttttaagggatttagaccagggccaggtagaattactgcatacttgccatccggaggtccatttgttagaatggatagccatgtttatcctgattatgtggttcctccaagctatgattcccttcttggaaagctgattgtatgggccccaactagagaaaaagcaattgaacgcatgaaaagggcacttgatgatactattatcacaggagttcctactacaattgattatcataaacttatccttgacatagaggatttcagaaatggcaaggttgatactgcttttattccaaaacacgaggaagagttggcaatgccaccgcagaagatggtactcgctaacagggtgaatgaactagctggttcaactgcctgatgaatatgattgtgtgatgccagaattgctttgttgtaatcaccgtgtcgttagtgccttgaagtcaatgttttattgaaattttgataattagtctcgtacattcctatttcttcacataattatattgtaatatcaattaatttcatcccaaatattagtgcaaggaataaggaataactccttgcatttttcttccaaagttagttgtctaaacggtttagaggatctttgtcccaaggcttgtttgtaattcttgtattaagagctcgttgctagatacactaataaaaacttaatcttatcct

SEQ ID NO: 1180 - DNA, 280 bp, Glycine max
atcgatacccgcagcatgagtcactccattcccatcacgagacattacccagcatttcccttagcgtaggaaatggaagtcacactttcagcctgcaagtccgttagctcgccgtctgtgcccgtcgcaggtttgtttgcggggaatggcggaattaagagctcgcaatgcagtttcttagccggagcgagcaaagtcaggtttcccaggcaggtaggtcaagttagccaccttcgcagacagcgccaaacgcgtcactgcggtgctctccacgcgactt

SEQ ID NO: 1181 - DNA, 1294 bp, Glycine max
  unsure (1)..(1294): unsure at all n locations
cggacggaattcggcacgagagagagaaaaatgaagtctttccatctcacagtgactagctttgtgctttgtagtggttgtggttggagtgcttccactctccttagatgcacaactagatccctcgttttacagagacacgtgtcccaaggttcactccattgttcgcgaagtggtgaggaacgtttccaagaaagatccccgcatgcttgccagtctcattagacttcactttcatgactgttttgttcaaggatgtgacgcatcagttttgttgaacaacactgccaccatagagagcgagcaacaagctctgccaaacaacaactcactaagaggtttggatgttgtgaacgacattaagacagcagtggaaaaggcttgtcccggcgtggtttcttgtgctgatattcttacccttgcatccgaaatatcttctgttctgggtggtggtcctgattggaaagttccattgggaagaagagatagtttaacagcaaaccgaaaccttgcaaatcaaaaccttccagctccattcttcaacctatctcgacttaaagctgcctttgctgttcaaggtcttgacaccactgatctagttgcactctcaggtgctcatacattcggcagagctcactgcaatttcattcttgaccgattgtacaatttcagtggaactggcaaacctgatccaactcttgacacaacttacttacaacaattgcgccaaatatgccccaatggtggacctaacaaccttgtcaattttgaccctgtcactcctgataaaattgacagggtctacttctccaatcttcaggttaagaagggcttgcttcagagtgatcaagagctgttctcgacacctggtgccgataccatccccattgtcaacaggttcagcagtgaccagaaagttttctttgacgcctttgaggcttcaatgattaagatgggtaacattggtgtgctcactgggaagaaaggagaaatcagaaaacattgtaactttgttaacaagaaatctgttgaagttgatattgctagtgtggcctcagaagaatcatcaacagagggtatggttacctcaatctaaatggattaggatgaatagttttcacttaaaatggtgtgattagagaccacaaataaagaagctataggcacattcatgccatgtgcccgccactacttgttgtgtactgtgtttgtgttacactttctttttttaattttgaatcatgcagtgttcataaccaatttcctttnnnnnnnnnnnnnnnnnnnnnnnnnn

SEQ ID NO: 1182 - DNA, 512 bp, Glycine max
gcgtacgtaatctcctcgttctcgtcccgtgtaggctccatgtatcaggtatgttgaacaacaatgccaccatagagagcgtgcaacaagctctgccaaacaacaactcactaagaggtttggatgttgtgaacgacattaagacagcagtggaaaaggcttgtcccggcgtggtttcttgtgctgatattcttacccttgcatccgaaatatcttctgttctgggtggtggtcctgattggaaagttccattgggaagaagagatagtttaacagcaaaccgaacccttgccaatcaaaaccttcctgctcctttcttcaacctcactcaacttaaagctgcctttgctgttcaaggtcttgacactactgatctagttgcactctcaggtaagaaaatcttcccaattaaattcatcctatatatgttgcaaaatttaaaaaataacaatgataaataggaaaattcttgaaattcagggtaaggtaagatattggattcaaagggatat

SEQ ID NO: 1183 - DNA, 1271 bp, Glycine max
tcgacagcaacggcgacagcaacggaattccgttgctgcaagttgaatcaaacagtgaaagtaaaacattgtgcaattaatcatcaactgcaagtagccagtgcataagatcaatggcgtcaagacagcaattcaaggaagacagagccgaggcagctgcaaaactcgcagcgaaagacatcggcgacatcaacagaacaaacgagcgcgacgaggggtacgacttgcacgacgaagccaacttcaagcaagcacgagctgaagcagctgcaaagctggcggccaaggatctggaggacgctaacagattaagagacaacactttcaacacatggaaagagcaacatcagcatgatgagaacaaacccggtgtgatagggtccatgtttagagccgccaaggaagccgtggttgggaagcctcaccacgaggaagtttatgcaaaggaaacaaagatgggtgaatattcagattatgcgactcagaaggcgagggaaacgaagcagaaggctggggagtatacagactatgcggctcagaaagcaaaagaaaccaaagactatgctgctgagaaggctaagaatgctaaagataccactgtgcagaaagctggagagtacaaggattataccgctgagaaggctaagaatgctaaagataccactgtgcagaaagctggagaatacaaggattataccgctgagaaggcaattgaagggaaggacagtgcagtggggaagcttggggagctaaaggaatctgctgctgatgctgctaaaagggctatgggtttcttcaccggtggcaacaaagaccaaactagactgcatgtaactgtggtgcaggaggaggaggaggaaacgaggcggagtatgcaggaggtgagggtgcaagataaggagtatggaacgggacgtggtactggagagaagttggtgataaaaatggaagagtcgcggccaggagcggtggcggatgcgctcaaagcagcgaatagggccatggacggcgatatggaggaggaaggcgtgcttcatgtggagcgtcgtagggagaaaatgtgattctccttctcatccatcatcataataataataatcacatcttgtgttttgtaataataatgtagggttacctttttacttagtggatcctctttagctttcatcctcctaaaccttgtctttctttcatgccattttaatgtacgtgttactttttaatttttagaatgtattatgaaaaccggttttggtaaaaaataatgcaat

SEQ ID NO: 1184 - DNA, 461 bp, Glycine max
ctgctgagaaggctaagaatgctaaagataccactgtgcagaaagctggagaatacaaggattataccgctgagaaggcaattgaagggaaggacagtgcagtggggaagcttggggagctaaaggaatctgctgctgatgctgctaaaagggctatgggtttcttcaccggtggcaacaaagaccaaactagagaggaggaggaggaaacgaggcggagtatgcaggaggtgagggtgcaagataaggagtatggaacgggacgtggtactggagagaagttggtgataaaaatggaagagtcgcggccaggagcggtggcggatgcgctcaaagcagcgaatagggccatggacggcgatatggaggaggaaggcgtgcttcatgtggagcgtcgtagggagaaaatgtgattctccttctcatccatcatcataataataataatcacatcttgtgtt

SEQ ID NO: 1185 - DNA, 987 bp, Glycine max
atccggctgcataggcatagactagagagagagttgcaatggccgtttctttggcagtgaaccgtcctctgcttggtcttcacgagaatgtaccattagctgttgctcatccccaattcctcccgttcaaatggccacccaagtccaaactcccctccgtcgtcggaattcgatgctcctcctcccctttcaacgacaaaaccctcatttccatcacacctaacacttcccacctcaatcccaaccctctcgcttgtcgctttcacgcttcccagtttggagaacaggagagcaacaaatacgtggaagcctatgctgtaggacgaaatattcgtatgtctgctaataaagctcggagagtgatcgatcagattcgtggacgtaaatatgacgaaacacttatggtattagaactcatgccttatcgagcctgtgaagccattctcaaaatagtgttttcggctggagctaatgctagcaataatctgggtttaagcaaaggaagtttagttatcagtaaagcagaggttaatgaagggaaaacaatgaaaagggtaaaacctgtagctcgagggcgtgcccatccaattaaaaagcgcacttgtcatataaccatcacggtaaaaggcttacctagtgagtccgtcgtggaagcaaagcctgcttaatcctatttgagacaaaatgtatgccttattatgagttcccttcccccatttcatttcatgaaaatttctgcatttcgacattatgtagttcattttctacattgtgacttgtagaggagtaatgaacatgctatttgtgtacgtccatgtaagaactgtttaaatattcaatttaatttaagtcctgaatatgaaatgattttggattgaaattggaaagaaatttttgtaacttcagtaatacttaccatatatctatacagcatttagcacgtaagcaaaaaaaaaaaaaaaaaaaaaaaaaaagggggggccgccg

SEQ ID NO: 1186 - DNA, 488 bp, Glycine max
  unsure (1)..(488): unsure at all n locations
tagcagagagagtggtgtgttgcgaattgcaatggcagttaaccgtcctgtccctcgtgttcacgagaatctaccattagcattaactgttgctcctcaccaattcctccccttcaaattcacctccgttggaattcgctgctcccctttcaacgacaaaaccctcatttccatcaaacctaacacttcccacctcaaccacgacactctcgcttgtcgctttcacgctgcccacgtttgctgaacaggagagcaacaagtacgtggaagcctatgctgtggggagaaatattcgtatgtctgctaataaagctcgaagagtgattgatcagattcgtggaagtaaatatgatgaaacactaatggtattagaactcatgccttatcgagcctgtgaagccattctcaaaatagtgttttcggctggagcaaatgctagcaataatctgggtttaagcaaaggaagtntagttatcagtaaagcagag

SEQ ID NO: 1187 - DNA, 1644 bp, Glycine max
  unsure (1)..(1644): unsure at all n locations
ttctcttcttatttctatttctctctccccaaaagcttttgtttctttctgtatatggaaggcccttaaactttctttctctctctctctctgcttcactttctcgcttttgcattttcttgtgaaaaaaaaaatcctcagaaccaaaatcggtcttcttctgtctctgatctctcaaagcttcaaattctccttgtttggtttgtctgtgtgtttggagtgtgatgtcgccgccggcgctggtaacggaggaggaggggcggacaacgtgtcgaccgtggcgtccggttcttcgcaatccttggactgtttctctcagaatggtgctggattgaaagaacgaaattacttagggttatctgattgctcatcagttgatagcagtgcctctactgtgccaagcttgtgtgatgagaaaaaggagaacatgaatttgaaggctacagagttgaggcttggtcttcccggattccaatcgcctgaaagggaaccggatcttttctctttaagctcaccaaagcttgatgagaagccactcttccctttgcttcctactaaagacgggatttgctcgtcggggcagaaagctgttgtttctggcaacaaaagaggttttgctgataccatggatgggttttctcaggggaagtttgctggtaatacagggatgaacgcagtgctatcacctagaccttctggagctcagccttctgctatgaaagaaataccaagcaagttgcaagaaaggccctgttcaactaagaatggaaccggtcataaccatacaggtgcttccatcagtggcagcgcaccggcttctaaggcacaggttgttggttggcctcctataagatcatttaggaaaaactcaatggccaccacaactaacaagaacaatgatgaagtggatggaaaaccaggtgttggcgcactctttgtgaaggtcagcatggatggtgctccgtatcttaggaaggtagatctaagaaattatacaacgtaccaggaactgtcttctgcccttgagaaaatgttcagctgtttcactctaggtcaatgtggttcccatggagctccaggaagagaaatgttgagtgagagcaagctgagggatcttctgcatggttctgagtatgttctcacttatgaagataaagatggagattggatgcttgtaggggatgtaccatgggaaatgttcattgacacttgcaaaaggctgaaaattatgaagggttctgatgccattggtttagctcccagggccatggaaaagtccaaaagcaggatttagggtatcctggattgcttgttgtctaatcaaagttttattgttggatccggagagggaaaagcaaaggatgatgatatgactgaattcctggcattggtggtttaacgcccttccacttatttgttttcaagtccctcaagagtttgtcatggtcctgtgttaatttgttaccactgtaatatcatatgaaagctacaatgaaatattagtatttgtggagtctgtaatcattataggaatccgtttgttttggaagaattgaacatctgttacagccgccaccatacggttctaacactatatttgtgatttgcgtcacctgccaaaaaaaaaannnnnnnnnnnnnnnn

SEQ ID NO: 1188 - DNA, 1287 bp, Glycine max
ggtgtccaagcttatttgttgctttgtgcttaatggaaggcccttgagcttttctttctttctctgctctcttttcttttaggtttccactctcacacactctccctcttctctttctctgcaataatctctcttctcttcttcactctctcaactcctgccaaacccccatttccgcagttcttaaatttggagtctgatgtctccgccattgctggttaccgaagatgaagggcagtgccatgcctcgatggtagcatctgcatcttcaccatccctgaactgtttctccctaaatgaggccggatttaaagaatgcaattacctgggattgtcagattgctcttcggtggacagttctactgtcccgaatttgtctgatgagaaaaaggagaatctgaatttgaaggctactgagttgaggcttggccttccgggatcccagtcacctgaaagggagacagaacttttctcgttgagctcaacaaaacttgatgagaaaccactgttccctttgcttcctacaaaggatggaatctgctcattgtctcaaaaaactgtggtctcgggcaacaaaagaggttttgctgacacaatggaccctgagtttcctggcaatgcagggataaacatgatgctatcacctaaaccttctggagttcagcctaccacagtgaaagaaataccaagcaaggtgttacaagaacttccttcagcggcaaatggaactggtcataaccatacatcaggagcttctatcagtggcagtgcaccggctgctaaggcacaggttgttggttggcctcctataagatcatttaggaaaaactcattggccaccacttcaaagaataatgatgaagtagatggaaaaccgggtgcagcagcactctttgtgaaggtcagcatggatggtgctccctatcttaggaaggtagatctaagaaattatacaatgtaccaggaactgtcttctgcccttgagaagatgttcagctgtttcactctaggtcaatgtggttcccatggagctccaggaagagaaatgttgagtgagagcaagttgagggatcttctgcacggttctgagtatgttctcacttatgaagataaagatggagatctggactgcttgtagggggatgtaccatgggaaatgttcattgacacttgcaaaaggctgaaaattatgaagggttctgatgccattggtttagtttgcttaagtagatcttcttggctcacagctcccagggccatggaaaagtccaaaagcagaagttaggc

SEQ ID NO: 1189 - DNA, 683 bp, Glycine max
aatgatgaagtagatggaaaaccaggtgcagctgcaatctttgtgaaggtcagcatggatggggctccctatctgaggaaggtagatctaacaaattatacaacgtaccgggaactgtctgctgcccttgagaaaatgttcagctgtttcactctaggtcaatgtggttcccatggagctccaggaagagaaatgttgagtgagagcaagctgaaggacctcctgcatggttcagaatatgtactcacttatgaagataaagatggtgactggatgcttgtcggagatgtaccatgggatatgttcattgacacatgcaaaagactgaaaatcatgaagggttctgatgccattggcttagctcccagggccatggaaaaatccaggagcaggtgctagttggtattggaacatgaagagtgtggaaagagaacttatgatataaatgactgaatgccgggttttgatggttaactgctattcaagatgttgtctatggttacaagtatcataatagtgtcttggtcttttgtttgtgttacatttgtttctactataataccttatgaagctaccttgaatattagtaattgtggagcttgtaatctttataggaacatgtttgtttggataagttgaatgtatgttgcaatcagtgcaatgttttcagaaaattataagaa

SEQ ID NO: 1190 - DNA, 528 bp, Glycine max
gcacactccaaagcttatttgttgctttgtgcttaatggaagggccttgagcttttctttctctctttctttgctctcttttcttttaggtttccactctctctcacacacacactctgcaataatctctcttctcttcttcagtctctcaactactgcctaaccaaaccttccatttccgcaggcagtttcttaaatttggagtctgatgtctccgccactgctggttactgaagaagacgaaggacagagcaatgcctcgatggtagcatctgcatcttcaccctcctcggagtgtttcaccctaaatgaggctagattgaaagaacgcaattacctgggattgtcagattgctcttcggtggacagttctattgtcccgagtttgtctgatgagaaaaaggagaatctgaatttgaaggctactgagttgaggcttggacttcctggatcccagtcacctgaaagggatccggatcttttctcgttgagctcaacgaaactcgatgagaagccactgttctcttt

SEQ ID NO: 1191 - DNA, 354 bp, Glycine max
gctcccagggccatggaaaaatccaggagcaggtgctagttggtattggaactgttgacttcgttttgtttactaaggtgaagttgctggagatattatgagggtgtggaaagagaaattatgatataaatgcctgaatgctgggttttgatggttaactgctattcaagatgttgtctatgattacaagtcccagaatagttcctggtcttttgcttgtgttacatttgtttctactataataccctatgaagctaccttgaatattagtaattgtggagtctgtaatctttataggaccctgtttgtttggataagttgaatgtatgttgcaatcagtgtattattgttctc

SEQ ID NO: 1192 - DNA, 310 bp, Glycine max
ggtgcttaatggaaggcccttgagcttttctttctttctctgctctcttttcttttaggtttccactctcacacactctccctcttctctttctctgcaataatctctcttctcttcttcactctctcaactcctgccaaacccccatttccgcagatgaagggcagtgccatgcctcgatggtagcatctgcatcttcaccatccctgaactgtttctccctaaatgaggccggatttaaagaatgctattacctggtattgttagattgctcttcggtggacagttctactgtcccgaatttgtctga

SEQ ID NO: 1193 - DNA, 1489 bp, Glycine max
ggcatatgctatagcaatcagctcctgtgccagaaaggggatattactcaaaggtgggcatgttctggatgctctagctacttgtcatactgttgcctttgacaaaacagggacattgacaactggtggactcgtattcaaggcaattgagcccatttatggtcatcatgttagaaacaataaatcaaatgttccttcctgttgcattcccacctgtgaaaaagaactcttgctgttgctgcagctatggaaaagggtactactcaccctattggaagggctgtggttgaccatagtgaaggcaaagacctcccatctatttctgttgaaagtttcgaatactttcctggtagaggccttactgctactgttaacagcattgagtcaggaactggaggtgctaaactattgaaagcatcacttggatctatagatttcatcacctctttttgtcaatctgaagtcgagtcagaaaagatcaaggaagctgttaatacatcttcttatggaagtgaatatgttcatgctgccctttcagttaatcagaaggtaacattgattcatctagaggataggcctcgtcctggggtttctaatgttattcaagaattgcaagatgaagcaaagtttcgtgtgatgatgttaactggtgatcatgagtctagtgcaaggagagttgcaagtgctgtgggcatcaatgagtttcattgcaacctgaagcctgaagacaagctgagtcatgtaaaggatatctcaagagatatggggggaggcttaattatggttggtgaaggcatcaatgatgccccagcactagctgctgcaactgttgggatagttcttgctcaccgtgctagtgcaactgccatagctgttgcagatgtattgttgcttagagaaaacatttctgcagtgccattttgtattgccaagtctcgtcaaacaacttcactgattaaacaaaatgtggctttagcattgacgtccattgtcatggcttcccttccatcagttttgggatttctgccattgtggttaacggttcttttacatgaaggtggaaccttgcttgtctgtcttaattccgtacgtgctctgaatgaaccatcttggtcctggaagcatgatatatcccatttgattagcgagattaaatctagactcctgtctctcaagacaaatatcacgggctcaaacagtatcatgacggcgaaatttgtaaccgtagtgttgtagtgtattgcatatttatagtgtattgagaaaaatgtcaatatcccttttcttgtatatctgtaggcttctttttcactccagagaattgaacattccattctattggaggttagtttccctttaatcctcgttttcccattcaaatggaataagaaaaatgacattaagggaagaatatgcatatgcatttcggatttggcatttacaatataatgatataatgtttatatgacttaaaaaaaaaaaaaaaaaa

SEQ ID NO: 1194 - DNA, 1347 bp, Glycine max
tgcttcttgcaagaagtttctgagcttttatatcctctatatatagttctctggcaattaaggtctcatccaaataagcacaaatgggtagccagagttacttcaaggctttgattatttgccttatagcactaattggatcaactcaagctcaattgcagcttggtttctatgccaaaagttgtccaaaggctgagcaaataattctgaagtacgttgttgagcatatccacaacgctccatcactagcagctgctctcataagattgcacttccatgattgttttgtcaatggttgtgatggatcagtgcttgtggactcaacaccagggaatcaagctgaaaaggacgctattccaaatcttacactccgaggctttgggcttcattgaagcaataaagaggcttgttgaagctgaatgccctggtggtagtctcttggtgctgatatcttggctttggactgccagagactctattcatgccactggtggaccctattggaatgttccaacaggacgaagggatgggttcatctctagagcagcagatccgttacgccagccttcctgctccttttcacaacctcactacttaacccaacctaacactctttgggcaatgttggacttgaatgcaaatgaccttgtcttgcttgttggtgctcacacaattggtattgcccattgttcatcaatttcaacccgtctatacaatttcacaggcaagggtggacacagacccaacaatagacaatggatatgcaaaaaatctcaagaccttcaaagtgtaagaacattaatgataactcacttattgagatggaccctggaagtcgtgatacatttgatcttggatattacaaacaagtggttaagagaaggggtttgttccaatcagatgctgaattgcttactagtcctatcacaaggtctattatcgctagtcaacttcagtcaactcaaggattctttgcggaatttgccaagtctatggagaaaatgggacgaattaatgtcaagcttggatctgaaggagagaataaggaaacattgtgcacgagttaataactaagaatctctttgataatgaaaccatctaagtgcattttgtatgtctacttttctgtgtaacttattctatgctaaggcctatggtggtcttgatatatgagataccatatgatttgattgtttttccaagtgatgcgagaaagggttgggagtgattactaggtttgaatgggaaatcatgttatggtgttaataagaagtagaatcaagagagagagaatttattgtaatacacaattgcacaataaagtctcccttgctaaaaaaaaaaaaa

SEQ ID NO: 1195 - DNA, 3022 bp, Glycine max
  unsure (1)..(3022): unsure at all n locations
aaagagaccccactttgtatgttcagatacattgcacttgggaacgttcccattcagtgcactcgaatctgtttgcaataaaacgacctctctttcactaccccaagaccttcatttctctttccaccactttctctctctctctctgtttttttttttttttgccctatctcatagggtttcctccttctctccctctctctccatgcatttttgctctcacgagttcttctttgccgttgccctcttattctttgctgtatttggagccttcttttgtgtggaacagagcagatttcacctccctgggttttttgaaccgtgcccatgtctaaagttttcagctttaccggaaatgatgatttctaccatgggggccctatttatcctaacccgaaggaaccatgtctcttcttgtctcttggccgtcaagttgatgtttaccttcctcttcagaagaggtctcgcttcagtgttccatttgatatcagcggagaatggtttgagcagaagcagaagccaaagacatctattgaatctttgccagatgaatgcctctttgagatccttagaaggctgcctgcaggccaagataggagtgtctgtgcttctgtatccaagcgctggcttatgcttctgagcagtatttgcaagactgaaatccacagctacggaagtactggaaatgaaaaccaggaaattagtgacgaaggatacctatcccgaagcttggagggaaagaaggcaacagatgttagacttgctgccattgccgttgggacagcctctcgaggagggttggggaagcttacaattcgtggatgcaattcagatcgtggggtgactaatgtaggtctcaaggcaattgctcatgggtgcccttctctaaaggtttgctctctatgggatgttgctactgttggtgatgaaggcctgattgagattgctagtggatgccaccagttagagaagcttgacctatgcaagtgtcctaatatttctgacaagactttaattgcagttgcgaagaactgtccgaatctggctgagttatcaatagagtcatgtcctaacattggtaatgaaggtctacaagctattgggaagtgtcccaatctgaggtcaatctcaatcaaggattgctctggggttggtgatcagggagttgctggcctcttgtcttcagcttcttttgctctaacaaaggtgaagcttgagtcactgactgtttctgatctctctctagcagtgattgggcattatggtgttgcagttaccgatcttgtcctaaattgcctcccaaatgtcagcgagaaagggttctgggttatgggtaatggccacggactgcagaaactaacttcaatcacaatcaattgctgccaaggagtgacagatgttgggcttgaacctattggaaggggttgtccaaatgtgcaaaacttgaagcttcgtaagagtgcttttctgtcagacaagggattagtatcatttgccagggctgctccatcagttgagagcctgcaattggcaagagtgccacagaattacccaaattgggctctttggtgtcttttttaactgtggtgcaaaattgaaggttcttactctgattagctgctatgggatcaaagatctcaatatggatttgccagcaatatctccttctgaatcaatttggtcattaacaatccatgactgccctggatttggcaatgctaaccttgccttacttggaaagctgtgtcctcggcttcagcatgttgaattgagtggacttcagggagtaacagatgcagggtttcttccattgctggagagctctgaggctggtctggttaaagttaatctaaatggctgtgtaaatctttcagacagagtagttttgtccatggtcaactcacatggatggactctcgaggtgctaagccttgatggttgtaaaagagttggtgatgctagcttgatggcaattgcaggcagttgcccattgcttgctgatctcgatgtttccaggtgtgcaatcactgatacaggtatcgcagcccttgcacgcggaaagcagattaaccttgaggtactttctttggcaggttgtgcattggtttcagacaagagcgtgcctgccttgaaaaaaatgggctgttcccttgctggattaaatatcaagcgttgcaaaggaatcagcagccgctctgtcaacaagcttcaggaacatctctgcatgtgtgacatcctctactgaacaggaaatgcctcagcagcttttatagttagtgttgctcgttagtgtttttgggttcattcacgatggatcttggtcgtctaaagtagtcggttctctttttccagaggataacagttatatttaaacctcttttttgcaggtttccattaattggaaatctgttacaaattttttggcactccgttgatgagatgccacttttaaaatatggctgtttatctctgcgagcatagttaccgagttctggagttaggtatctttttttcctagtgttggcacctgatgtttttagctctgctttgtatcggttttgccaccatgtgtttccttgtcctcgtttctttgcagcagtacatttatcgagtctgtccagtggtgtttacccaatttttcacgtatttgagcttatgttctttacgtgatttttgggtcttaagttttagtcaaggggcatgttgaagttccagtttatgtggtgttgtcttggtttactttggcagttcttcagagttatgaagcctttgtcctcaggggcgttggtcatggcagcaagttatcctggtctgtcatcacaatcttttcccgttgggatgggttgttttttactaccaaagccctagctttttaagcttcattttttttttttgaacttgtcattgtaaccttctatatcatgtaatgatactgagatatgccctttgtactgttatgtttattttatgaaaaaataataaataaaaaattgtagtcccctgtccnnnnnnnnnnnnnnnn

SEQ ID NO: 1196 - DNA, 1984 bp, Glycine max
gctggatatggacttcagattggagcaattccgtgatcacgaacaccagtgcagtccttgatggatatggacttcagattggactgcactggtgttagtgatcacggaattgctggattgctttcttcagcttctttggttctatcaaaggtgaagctccaggcattgactgtttcagatctctctctagctggtattgggcattatggcaagtcagttactgatcttgtccttaattgcctcccaaatgtcagcgagagggggttctgggtcatgggtaatggtaatggattgcagaagctaaaatcacttacagttgcatcttgcaaaggagtaacagatattgggcttgaagctgtaggaaagggttgtccaaatctgaaaattgcacacctccacaagtgtgcatttctgtcagacaatgggttgatgtcattcgccaaggctgcttcatcacttgaaagcctacgattggaagagtgccacagaattacccaacttgggttttttggtgtcctttttaactgtggtgcaaaattgaaggctatctctttggtgagctgctacgggatcaaagatctgaacttggtgttgccaacagtatctccatgtgaatcacttcggtctttatctatcagtaattgccctggatttggcaatgcctccctctctgtattgggaaagctgtgccctcagcttcagcatgttgaattgagtggactcgagggagtgacagatgcagggcttcttccactccttgagagttccgaggctggtttggttaaagtgaaccttagtggttgcacaaacgttaccaataaagtagtttcgtccttggccaatctgcatggttggactcttgagaatctaaaccttgatggttgcaaaaacatcagtgatgctagcttgatggcaattgctgaaaactgtgcattgctatgtgatctcgatgtctccaagtgtgctatcactgatgctgggattgcagtcctggcacatgccgaacagattaatctgcaaatcctttctttgtcaggttgcactttggtctcagacaggagcttaaccgctctgagagaattgggccacacccttttgggactaaacatccagcactgcaatgcaatcaacagcagtacggttgacacacttgtggagcttctctggaggtgtgacatcctctcctgagctgaaagaaaaactaatctcactgcaatttaggccaggatcacatcatgcaggaagcttgttatgctcagtgttgcacagtagtttattttaggtccttaacaggtcttcatcgtccagcgacttggttcctttttaccggagtgtgcagtcatttagccctcatttttgcaggttccttcaatgggaagcctgttctttttggcatccattttgcccccttttaaatggctgcatatctgagaacatagctaccgggttctggagttaggaatctttgttactggtgttggcacctgatgtttttagctcagctttgcattggttttgccaccatgtgtgtcttagttttctaagtttttacagctacctgtaccactgtatcagtctttgtttaccaaatgtgtcatgtggttgaactatgttcttcacatgatgtttgggtatcagttttactcgaagggcaggttagaagtttcagtgtcatgtgctgttattagggtggttgcagttgtcaaggtcggtgtttatgaagtcttgtttttaggggcttggctgtggcagcaagctatataggtctgccataaccacaacctttttgtccctttgggaagggttgttatttttaccaagtcctagttttttaaggcttcatttttttgaacttggcaactgctcctcctatattgtctaatgatgttcatacctgccctttgttctgtatgttatgaaatgtaatgaaataaataaaattttcagtctcaaaaaaaaaaaaaaagggcggccgccgaatagt

SEQ ID NO: 1197 - DNA, 849 bp, Glycine max
ttgacgcgtgggttctttttctctctctttcctcctgttctttttttttgccctatctattagggttcccgcggattcaaaccttaattcttctattactctctttctctcatgcgttcttgctctcaacaacaatcacacaccgccatcgaagccttcgttcttttcttcttcgttctcctttttgctctcgttcgagggttctttcgtggggaacactgcagatttcaccacccgggtcttattcatccgtgcccatgtccaaagttctcggcttttccggagttgacgatttttgccctatgggatcaatatacgccaaccccaaggaagcaagtttcttcttgtcccttggccctcaagttgatgtatactttcctcctcggaagagatcgcgtgtcaatgctccattcgtttttgatggagaatggttcgagcaaaagcagaaaacctctgttgaagccttgccagatgagtgtctctttgagatctttaggaggttgccttctggggaagacaggagtgcatgtgcctgtgtttccaagcgctggcttatgcttctaagcagtatttgcaaaagtgaaatctctgttaacaaaaataccacagtagagaaccctgaaaaggagggtgatgatgtagaatttggaggtaagggatacctctctcgaagcttggaaggaaagaaggcaacagatgttagactggctgccatagctgttgggacttcatctcgaggaggattggggaagctctcaatccgtggaagcaacattgtttgtggggtgactagtcatggtctcaaggctgttgctcgtggatgcccttctttgaaggctctttctctat

SEQ ID NO: 1198 - DNA, 464 bp, Glycine max
agttcggaattcggctcgagcttctctgttctttttttttgccctatctaattagggttcccgcgatttcaaaccttaatttcttcgattactctctctttccatctcatgcgttcttgctctcaacaacaatcacccaccgccatcgaagtcttcgttcttttcttcttcttcactctccttttttctctcgttcgagggttctttcgtggggaaccctgcagatttcaccactcgtgcacatgtccaaagttctcggcttttccggagttgacgatttttgcccgatgggatcaatatatgccaaccccaaggaagcaagtttcttcttgcctcttggccctcaagttgatgtatactttcctcctcggaagagatcgcgtgtcaacactccatttcgttttcgatggagaatggtttgagcaaaagccgaaaacctctgttgaagccttgccagatgagtg

SEQ ID NO: 1199 - DNA, 322 bp, Glycine max
cggacgcgtgggcggacgcgtgggtttctttctctctcttttttttttgccctatctcatggggtttccaccctctctccccatgcatttttgctctcacgagttcttctttgccgttgccctcttattctttgctgtatttggagccttcttttgtgtggaacagagcagatttcacctccctgggttttttgaaccgtgcccatgtctaaagttttcagctttaccggaaatgatgatttctaccatgggggccctatttatcctaacccgaaggaaccatgtctcttcttgtctcttggccgtcaagttgatgtttacc

SEQ ID NO: 1200 - DNA, 3427 bp, Glycine max
tgattaccctcccactccacactctccgctgtctctccctcccaattccgatgagcaacaacgcctcccggaagcgcgcgccgccgcctccgtcccaacctccgccggcgaacaagccctaatgactcaggaagaagagttcatggacgaagacgtgttcataaacgaaaccctcgtctccgaggacgaagaatccctcattctccgcgacattgagcagcgccaggccctcgccaaccgcctctccaagtggacacgtcctcctctctccgccggctacgtcgcccaatctcgtagcgtcctttttcagcagctagagattgattacgtgattgcagagagtcacggggagttgctgccgaactcgtctggacctgtcgccattatcagaatatttggagttactaaggaaggacacagtgtttgttgcaatgttcatgggtttgaaccatatttctacatctgttgccctcctggaatgggtccagatgatatctcccattttcatcaaactctcgagggaaggatgagagaagccaatagaaacagtaatgtgggaaaattcgttcgccgtattgaaatggtgcagagaaggagtattatgtactatcagcaatccaattcccaaccctttctcaaaattgtagttgcactcccaacaatggttgccagctgccgtggtattcttgataggggtattcaacttgatggtctgggaatgaagagcttcttgacttatgaaagcaatgtactttttgcccttcgcttcatgattgattgtaacatagttggtggaaattggattgggattcctgccggaaaatataagaaaacagcgaaaagcttgtcttactgccagttagagtttgattgcttgtattctgaattgattagtcatgctccagaaggggaatattcaaagatggctccgtttcgcattttgagttttgacatcgagtgtgctggtcgtaaaggtcattttcctgagcctacccatgatcctgttatccagattgctaatttggttactttacaaggagaagaccagccatttattcgtaatgtgatgacccttaaatcatgttctcctatcgttggtgttgatgtgatgccatttgaaacagaaagagaagtcctgctggcttggagggattttattcgtgaagtggaccctgatattattattggatacaacatttgcaaatttgacttgccatatcttattgagagagctttgaacctgaagatagcagaatttccaattctgggtcgtatcaggaacagtagagttcgagtaaaggatacaactttctcatcaaggcagtacggaaccagggaaagtaaagaagttgcagtagaagggagagttacgtttgatttactccaggttatgcaaagagactacaaattaagttcttattcactgaattctgtgtcatcacacttcctttctgagcagaaagaggatgttcatcattcaattatatccgatcttcagaatggaaatgcagaaactaggaggcgccttgctgtgtattgtttgaaggatgcatatctccctcagcggcttttggataaattgatgttcatttacaattatgtggagatggctcgagtaacaggtgtcccaatttcttttctactttccagaggccaaagcattaaggtactttctcaacttcttaggagggcaaggcagaagaatctggtcattcctaatgccaaacaggctgggtctgaacaaggaacatttgaaggtgccactgtattggaggcaagggctggattttatgaaaaaccaattgctactttagattttgcatccttgtatccatctattatgatggcctataacttatgttattgcactctggtgatccctgaagatgctcgcaagctcaacatacctccagagtctgtgaacagaactccatctggtgaaacatttgttaaatcaaatttgcagaagggaatacttcctgaaatacttgaagagctattaacagcccgtaaaagggcaaaagcagacttaaaggaggccaaggatcccctggagaaggcagtgctagatggtagacagctagccctgaagattagtgccaattctgtgtatgggtttacaggggctaccattggtcagttaccatgtttagagatatcatcgagtgtaacaagctatggtcgacaaatgatcgagcacacgaaaaaacttgtggaagataaatttacgacacttaatggctatgaacacaatgccgaggtaatatatggagacacagattcagtcatggtacaatttggtgtttctgctgtagaagaagctatgaacttggggagagaagctgctgaatatattagtggaactttcacaaaacccatcaaactagaatttgagaaggtttactatccatatctcctgattagcaagaagagatatgctggtttgttttggacaaaaccagacaactttgacaaaatggacactaaaggtattgaaacagttcgaagagacaattgtttattggtcaaaaacctggtgaacgattgccttcacaaaatattgattgacagggacattcctggggcagtccagtatgtcaagaatgcaatttcagatcttctcatgaatcgtatggacttatcacttctggttattacaaagggtttaacgaagacaggagatgattacgaagtaaaggcagctcatgttgaacttgctgaaaggatgcgcaagcgagatgctgccactgctccaaatgttggagacagagtaccatatgttattattaaagctgcaaaaggtgcaaaggcatatgagagatcagaggatcctatctatgtgctagagaacaacatacccatagatcctcattactatcttgagaatcaaattagcaagccaattctgagaatttttgagccaattctgaagaatgctagcaaagagcttctccatggaagtcatacaagatctatttctatttctacaccgtcaaacagtggcatattgagatttgctaagaaacagctacctgcattggttgtaaagctttacttggcaagggttatcacactctctgttcacattgcaaaggaagggaggctgagctgtactgtaaaacagtatctcaagtgtctgagctggagatgctttttgggaggttgtggacacagtgtcaggagtgccaaggttcacttcatcaggatgttctctgcaccagtcgggattgtccaattttctatcgacgaaaaaaggcacagaaagatatgggtgaagcaaagttgcaattggacagatggaacttctaagttttgccaagaatttgaccttgcggatctcttcgaaccaatggacacaaatacaatctggtgtttgccacaatcctgacatttgtaatgtgagtaaaagcccacaatttgtttactg

SEQ ID NO: 1201 - DNA, 245 bp, Glycine max
ggaagacaaatttacgacagttaatggctatgaacacaatgccgaggtaatatatggagacacagattcagtcatggtacaatttggtgtttctgctgtagaagaagctatgaacttggggagagaagctgctgaatatattagtggaactttcactgtagtaatagttcattttgcgttttatttttttctttagtcattgtaagtttgagaccctggtttattgccccgggaaggggtggaac

SEQ ID NO: 1202 - DNA, 1261 bp, Glycine max
cgcgtacgtaagctcgcttgtagcattcagtgaaacactagctagggtattgggagctctcgttgtttcggagttagggaccttacgcagccatggccactgctacgaatgccgccgccgccccaccacgccagctctcccagaaggaagctgacatccagatgatgttggccgccgacgtccacctcggcaccaagaactgcgacttccaaatggaacgttacatcttcaagcgccgcaacgacgggatttacattattaaccttgggaagacgtgggagaagcttcagctagcagctagggttatagttgcaattgagaacccccaggatatcattgttcaatctgcaaggccttatgggcaaagagcggttctgaagtttgctcagtacactggtgctcatgctattgctggaaggcacactcctggtaccttcaccaatcagcttcaaacttccttcagcgagcctcgtctccttattcttaccgatccaagaacagatcaccagcctattaaggaagctgctcttgggaatattcccaccattgctttctgtgacaccgattcacctatgaggtacgtggacattggaattcctgccaacaacaagggcaaacacagcattggttgtctcttctggctccttgcaaggatggtgttgcagatgaggggtaccattcgccctggcctcaaatgggatgtcatggttgatctgttcttctatagagaaccagaggaggctaaacaacaagaggaggaggaagctccggcggttgattatgccatcacggatttcaatgcaggtgctattgctgctgatggccagtggcctggtacaattgatcaatcatggagtgatgcagttcctcaacctattccagcagtacctggtgtcaactggggggcacctgcagaagcacctgctgctgcaggaggagattggggggaagctgttccaccaccacaacaaatccctgtacctccctctggaattgatactgtccaaccatctggctgggattaaactagtgttttttgatgctatgattttgccccgtccctcaattttagtttacctgtctttctttgaagtaaaatatggatttttttttgtagcaaaggaacttgtttttctattttgttatgagtggcagaaatattattattaacatggtatattcgggtaagattttattatgttttgatgcagtcatgattcatgaatgtttggtaatgatattttggccccctcttttgtcc

SEQ ID NO: 1203 - DNA, 714 bp, Glycine max
ggttctagtgtgtgattgtttgttgttgtaactcgttcttcttcttttgttgttctgtgtttgtgtttgttttttctctcacctgaaaatgtcttgctgcggtggtaactgtggttgcggaagctcctgcaagtgcggcaacggctgcggaggctgcaagatgtacccagacttgagctacactgagtcaaccaccaccgagaccttggtcatgggagtggcacctgttaaggctcaatttgagggtgctgaaatgggtgtgcccgctgagaacgatggctgcaaatgtggaccaaactgctcctgcaacccctgcacttgcaagtgaggtgttgggagagcaagcttcaagcagagatagcccttaattaggaataatgataaactattaatgtgtagctaaaaacttatgtattatgtctgtgatggttttcgtgcactctggtgttttgtgttaaacaaacatccttagaataaagtggtcatgtcttgcctttcagcaagttcaagtgttttggacttgtgatgggtgtgttaagctcatggttgcttctttttttttttttttaatgtttggtaattggtcgcttctgtataaagttcggctaatctgaattatgaatctctgcttataatattaaatactattactggaaaaaaaaaaaaaaaaaaaaagaaggccccccgcccgctctagaggatccaagcttacgt

SEQ ID NO: 1204 - DNA, 725 bp, Glycine max
ctcgagggttctagtgtatgtgattgttgtgactcgttcttcttcgtcgttatcttcttcttttgttgtttgtgtgtttgttttttctctcacctgaaaatgtcttgctgcggtggtaactgtggttgcggaagcgcctgcaagtgcggcaacggctgcggaggctgcaagatgtacccagacttgagctacaccgagtcaaccaccaccgagaccttggtcatgggagtggcaccagttaaggctcaattcgagagtgctgaaatgggtgttcccgctgagaacgatggctgcaaatgtggagctaactgcacctgcaacccctgcacttgcaagtgaggtgttggagagctaaagcttcaagcagaaatggcccttagaaataatgataaaaactatatgtagtttcaaaacttcaaaattatgtagtatgtattatgttgcactctggtgttttgtgtctaaacaaacacccttagaataaagtggtcatttcttgcccttgagcaagttcaagtgttttggacttgtgatgggtgtgttaaggtcatggttgccttttttttatatatatatatatatataaatgtttggtaattggtcgcttctgtataaagttcggctagttaatctgaattatgaatctctgcttataatattaaactaggtcctattgctggaataaagtgtctattaatctgtttgttttctttgccaaagaaaaa

SEQ ID NO: 1205 - DNA, 729 bp, Glycine max
tgggagacgaggttctgatgtgaaggtaattttattgggcctgttagttaatctacaactaattaattgggcctgttatttgaccgacccttaacctaaacaacaaaagcccagtcacaaaacccattagggttttccacgatataatagaaactgaaagcctcttacggttgcagcaacagcagcattcactgaaagcactcagtagggtttgcggtttcagagtttgtgacgcacgcatccatggccaccaccaccaacgccgccgcagccccgccgcgccagctctcccagaaggaagccgacatccagatgatgttagccgccgacgtccacctcggcaccaaaaactgcgacttccaaatggaacgttacatcttcaagcgccgcaacgacgggatttacattattaaccttgggaagacatgggagaagcttcagttagcagctagggttattgttgcaattgagaaccctcaggatatcattgttcaatccgcaaggccttatggtcaaagagcggttctgaagtttgctcagtacactggtgctcatgctattgctggaaggcacactcccggtaccttcaccaatcagcttcagacttcgttcagtgagcctcgtctccttatcctcactgatccaagaacagatcaccagcctattaaggaagctgctcttgggaatattcccaccattgctttctgtgacactgattcgcctatgagg

SEQ ID NO: 1206 - DNA, 424 bp, Glycine max
gatcaatcatggagtgatgcagttccacaacctattccagcagcacctggtgtcaactggggggcacctgcagaagcacctgctgctgttgcagaaggagattggggtgaagctgttccaccaccacaacaaatccctgtgcctccctctggaattgactctgtccaaccaactggctgggaataaactagtgttttttgatgctatgattttgccctgtccttcaatttagttgtctttcttagaagtaaaatatggatcagtttttttgtagcaaagcaacttggttttttttttttctagtttgttatgagtggcaaaatattatttttaacatggtatattcggtaagattttattttgttttgatgcagtcatgattcatacatgtttggtaatgatattttggccccctcttttgtgt

SEQ ID NO: 1207 - DNA, 386 bp, Glycine max
  unsure (1)..(386): unsure at all n locations
ggctgcaaatgtggggctaacgtcaccttcaagccctgcgcttgcaantnatgtgttgcagagctaaagcttcaagcagaaatggcccttacaaataatgataaaaactatatgtagtttcaaaacttcaaaattatgtagtatgtattatgttgcactctggtgttttgtgtctaaacaaacacccttagaataaagtggtcatttcttgcccttgagcaagttcaagtgttttggacttgtgatgggtgtgttaaggtcatggctgccttttttttatatatatatatatatataaatgtttggtcaaagagaaaaaatgtatacatgaatatcattcactgaataccattccactgataccaaaaatattacaactacctggc

SEQ ID NO: 1208 - DNA, 412 bp, Glycine max
tcaaaacttcaaaattatgtagtatgtattatgttgcactctgggccatctctgttggagagctaaagcttcaagcagagatggcccttagaaataatgataaaaactatatgtagtttcaaaacttcaaaattatgtagtgggtattatgttgcactctggggttttgtgtctaaacaaacacccttagaataaagtggtcatttcttgcccttgagcaagttcaagtgttttggacttgtgatgggtgtgttaaggtcatggttgccttttttttatatatatatatatatataaatgtttggttaaaaaaaaaaattaaccttaattcttactacaaatattaaaacctttattatgcttttgaccaactatttaaaggtcttctttgcttattaaaaaaatttctata

SEQ ID NO: 1209 - DNA, 1871 bp, Glycine max
cacgtaaattctaagcggtggccaaaggaaaaaatggctctactatcatcagtcctaaagcaattgccgcatgagctaagttcaacccattacctaacagttttcttctgcatcttccttatacttcttcagctaataagaagaaacaaatacaatctgccaccatccccaccaaagatacccataatcggcaatcttcaccagctaggcacactgccacaccgctcctttcatgcactctcacacaaatatggccctctcatgatgttgcaattgggtcaaattccaaccctagtggtctcatcagctgacgtggccagagaaataatcaaaacgcatgatgttgttttctccaaccgccgacaacctacagctgctaaaatctttggttatggatgcaaagatgtggctttcgtgtactaccgcgaagagtggagacaaaagataaagacatgtaaggttgagcttatgagtctgaagaaggtgcggttgtttcattccattagacaagaagttgttacagagttggttgaagctataggtgaagcgtgtggtagtgaaagaccatgtgtgaatctgactgagatgctgatggcagcatcgaacgacattgtgtctagatgtgttcttggacggaagtgtgatgatgcatgtggtggtagtggcagtagcagctttgcagcgttgggaagaaagattatgagactattctcggctttctgcgtcggtgatttcttcccttcgttgggttgggttgactatctgactggccttattccggaaatgaaggccacgtttcttgcagttgatgctttccttgacgaggtaattgcagaacgcgagagcagtaacaggaagaatgatcactctttcatgggaattctccttcaacttcaagagtgtgggaggcttgactttcagctcgaccgagataacctcaaagcaatcctagtggacatgataataggtgggagtgacactacttcaacaactctagaatggacttttgcggagttccttagaaatccaaataccatgaagaaagctcaagaagaggtaagaagagtggtgggaatcaattccaaagcagtactggatgaaaattgtgtgaatcaaatgaactacttgaaatgtgtagtcaaagaaactttgagattacatccaccccttcctcttttgattgctcgagagacatcatcaagtgtaaaactaagagggtacgatattcccgcaaaaacaatggtatttatcaatgcatgggcgatccagagggatcctgaattatgggatgatcctgaagaatttattcccgaaagatttgaaactagccaagttgatcttaatggacaagattttcaattaattccgttcggtattgggagaaggggatgccctgcaatgtcatttggacttgcttcaactgagtatgttcttgctaatcttttgtattggttcaattggaatatgtccgagtctggacgtatattgatgcacaacattgacatgagtgagacaaatggactcactgtcagtaagaaagtaccacttcatcttgaaccagaaccatataaaacatgatcatttcacattatgcatgtttggcaacacctataaagagtatagatctggaagtacttcaatttagtaatggatgtaaaagctatacaataagaagtgctaacaagctaggatatgagcatttatggagtaacgagtgaggttccaaagagtctaattactcgtctcttgaacattgttatatttgttttcttgcagtttgttaatcttttgaatagttgtttcacatttatttttgtatggtttgttggtatgttgtggaaggcgttagtaaaaatttgtggtgtgttctt

SEQ ID NO: 1210 - DNA, 1863 bp, Glycine max
acgaggccagcaccatattttcagaccgaactcaacactcgcagcaccgccatgagtgccgccacttcctccaccctctccaccgtcaccgatgccaatcttcactccagatttcattctcgtcttgttccattcactcatcatttctcactttctcaacccaaacggatttcttcaatcagatgccaatcaattaataccgataagaagaaatcaagtagaaatctgctggacaatgcaagtaacctcctcacggacttattaagtggtggaagtatagggtctatgcccatagctgaaggtgcagtctcagatctgcttggtcgacctctctttttctcactgtatgattggttcttggagcatggtgcggtgtataaacttgcctttggaccaaaagcatttgttgttgtatcagatcccatagttgctagacatattctgcgagaaaatgcattttcttatgacaagggagtacttgctgatatccttgaaccaataatgggcaaaggactcataccagcagaccttgatacttggaagcaaaggagaagagtcattgctccggctttccataactcatacttggaagctatggttaaaatattcacaacttgttcagaaagaacaatattgaagtttaataagcttcttgaaggagagggttatgatggacctgactcaattgaattggatcttgaggcagagttttctagtttggctcttgatattattgggcttggtgtgttcaactatgactttggttctgtcaccaaagaatctccagttattaaggcagtctatggcactctttttgaagctgaacacagatccactttctacattccatattggaaaattccattggcaaggtggatagtcccaaggcaaagaaagtttcaggatgacctaaaggtcatcaatacttgtcttgatggacttatcagaaatgcaaaagagagcagacaggaaacagatgttgagaaattgcagcagagggattacttaaatttgaaggatgcaagtcttctgcgtttcctggttgatatgcggggagctgatgttgatgatcgtcagttgagggatgatttaatgacaatgcttattgccggtcatgaaacaacggctgcagttcttacttgggcagttttcctcctagctcaaaatcctagcaaaatgaagaaggctcaagcagaggtagatttggtgctgggtacggggaggccaacttttgaatcacttaaggaattgcagtacattagattgattgttgtggaggctcttcgtttatacccccaaccacctttgctgattagacgttcactcaaatctgatgttttaccaggtgggcacaaaggtgaaaaagatggttatgcaattcctgctgggactgatgtcttcatttctgtatataatctccatagatctccatatttttgggaccgccctgatgacttcgaaccagagagatttcttgtgcaaaacaagaatgaagaaattgaaggatgggctggtcttgatccatctcgaagtcccggagccttgtatccgaacgaggttatatcggattttgcattcttaccttttggtggcggaccacgaaaatgtgttggggaccaatttgctctgatggagtccactgtagcgttgactatgctgctccagaattttgacgtggaactaaaagggacccctgaatcggtggaactagttactggggcaactattcataccaaaaatggaatgtggtgcagattgaagaagagatctaatttacgttgacatatgtactgtggccatttttcttatacagaataatgtatattattattctttgagaataatatgaataaattcctagac

SEQ ID NO: 1211 - DNA, 1794 bp, Glycine max
cggctcgtgctttcaccaactctctctctctctctctgtcattctctaatagtagtatatatcaattcaacctgcctccaactcttccagcaggctccacaaaacatctcatcattcacccaacaaaatggctctgcttctgatagtacccatttcactggtaaccctctggctcggttacaccctataccagcggctacgcttcaagctccctcctggcccacggccctggccggtagtcggtaacctctacgacataaaacccgtccggttccggtgcttcgctgagtgggcgcagtcttacggccctatcatatcggtctggttcggttcgaccctaaacgtcatcgtttcaaactcggagttggccaaggaggttctgaaggagcacgatcagcagctggcggaccggcaccggagccggtcggcggcgaagttcagccgcgacgggaaggatctcatttgggccgattatgggccgcactacgtgaaggtgaggaaggtttgcacgctcgagcttttcacgccgaagcgcctcgagtccctcaggcccattagggaggacgaggtcaccaccatggttgagtccgtttacaatcactgcaccaccactgaaaatttggggaaaggaatattgttgaggaagcacttgggggttgtggcattcaacaacataaccaggttggcatttgggaaaagatttgtgaactcagaaggtgtgatggatgagcaaggagtagaattcaaggccattgtggaaaatgggttaaagctaggagcatctctagccatggcagaacacatcccttggcttcgctggatgttcccactggaagaaggagcttttgccaagcatggagcccgccgcgaccgactcaccagagccatcatggcagagcacactgaagcacgcaagaaatctggtggtgccaagcaacattttgttgatgccctcctcacattgcaagacaaatatgaccttagtgaagacaccatcattggtctcctttgggatatgatcacagcagggatggacacaactgcaatttcagttgagtgggccatggctgagttgataagaaacccaagggtgcaacaaaaggtccaagaggagctagacagggtaattgggcttgaaagggtgatgactgaagcagacttctcaaatctcccttacctacaatgtgtgaccaaagaagcaatgaggcttcacccaccaaccccactaatgctcccacaccgtgccaatgccaatgtcaaagttggaggctatgacattcccaaagggtccaatgtgcatgtgaatgtgtgggcggtggcccgcgacccggccgtgtggaaggatccattggagttccgacccgaaaggttccttgaggaggatgtagacatgaagggccatgactttaggctacttccattcgggtcgggtcgacgagtatgcccgggtgcccaacttggtatcaacttggcagcatccatgttgggccacctcttgcaccatttctgttggaccccacctgaaggaatgaagcctgaggaaattgacatgggagagaatccagggctagtcacatacatgaggactccaatacaagctgtggtttctcctaggctcccctcacatttatacaaacgtgtgcctgctgagatctaatctttcttttctttcccttggactactctttgttgcattaagaaaaatgccttgtggcactacttttatctttgtgtttatgtaactacatatgaaatcacaatttaaggaactaaggaaaaactcattgcgagggt

SEQ ID NO: 1212 - DNA, 1699 bp, Glycine max
tacggctacctagatctatcatcatggtcatggagcttcacaaccacacccctttctctatttacttcattacctccattctctttattttcttcgtgttcttcaaattagttcaaagatcggattccaaaacctcctctacctgcaaattgcccccaggaccaaggacactacctctcatagggaacatacaccagattgttggctcactgccggttcattactacttaaaaaatttggcagataattatgggccgctaatgcatctaaaactaggagaggtatctaacatcatagtcacttcacaagaaatggcacaagagattatgaagacacgcgatctcaacttctctgataggccaaaccttgtatcatctagaatagtttcttacaacggttctggcattgtcttcagtcaacatggagactattggaggcaactaagaaagatatgcacagtagagttactaacagcaaagcgcgtgcagtcttttcggtccataagagaagaggaggtggcagaactagttaaaaaaatagctgcaactgcaagtgaagaaggggggtccatttttaatctcacccagagcatttactcaatgacttttgggatagcggcacgagcggcttttggtaaaaagagcagataccaacaagtgttcatatcaaacatgcataaacaattgatgcttctgggagggttttctgttgctgatctctatccttctagtagagtgtttcaaatgatgggggcgacggggaaacttgaaaaagtgcatagagtgacagatagggtgttgcaagacatcatcgacgagcacaaaaatagaaacagaagcagcgaggagcgtgaagcagtggaagatctagttgatgttcttctcaagtttcaaaaggaatcggaatttcgcttgactgatgacaacattaaagccgtcatccaggacatattcattggtggaggcgaaacatcatcttctgttgtggaatgggggatgtcagaattgataagaaacccgagggtgatggaagaagcacaagcagaggtgagaagagtgtatgatagcaagggatatgtggatgagacagaattgcaccaattgatatacttaaagtccatcatcaaagaaaccatgaggttacatccacctgtgccattgttagttcctagagtaagtagagaaaggtgccaaatcaatggatatgagataccctctaagactaggatcattatcaatgcttgggcaattggaaggaatcctaagtattggggtgaaactgagagttttaaacctgagaggtttcttaatagctccattgattttaggggcacagactttgaatttatcccatttggtgctggaaggaggatctgccccggcattacatttgccatacccaacattgagttgccacttgctcagttgctttaccactttgattggaagcttcccaacaaaatgaacattgaagaacttgacatgaaggagtcaaatggaattactttaagaagggaaaatgacctctgcttaattcccattgctcgtcaaccttaaaatgtatgaacaattaatgtcataaactatttaagttttatcttttactacttccagcattttgtaattggacaatgactatgattaacttaagttacttccttatgattaacttgacatatgaatgaacatttctaagataa

SEQ ID NO: 1213 - DNA, 1676 bp, Glycine max
gaattgtataatgggtatccttgttcttctttctctattgtctatagtcatctccattgttctcttcattacccacacacacaaaagaaacaacactccaagaggaccaccaggtcctccacctcttcctctcatcggcaaccttcaccaactccacaactcatccccacatctctgcctatggcaactcgccaaactccacggtcctctcatgtcgtttcgcctcggcgccgtgcaaaccgtcgtggtttcatcggccagaatcgccgaacaaatcttgaaaacccacgacctcaacttcgcttccaggcctctcttcgtgggcccgagaaagctctcttacgacgggttggacatgggcttcgcaccgtacggcccgtactggagagaaatgaagaaactctgcatcgttcacctcttcagcgcgcaacgcgttcggtcctttcgaccaattcgagagaacgaggttgcaaaaatggttcggaaactgtcggaacacgaagcttcgggtactgtcgtgaacttgaccgaaactttgatgtctttcacgaactctttgatatgcagaatcgcgttggggaaaagttacggttgtgagtacgaggaagtagttgttgatgaggtactgggaaaccggaggagcaggttgcaggttctgctcaacgaggctcaagcgttgctttcggagtttttcttttcggattattttccgcctataggaaagtgggttgatagagtgacgggaattctatcgcggcttgataaaacgttcaaggagttggacgcgtgctacgaacgatcatcctatgatcacatggattcggcaaagagtggtaaaaaagataatgacaacaaagaagtcaaagatattattgatattcttctccagctacttgatgatcgttccttcacctttgatctcactctcgaccacataaaagccgtgctcatgaacatctttatagcaggaacagacccgagttccgcgacaatagtttgggcaatgaatgcactgttgaagaatcccaatgtgatgagcaaggttcaaggagaagtgagaaatctattcggtgacaaagatttcataaacgaagatgatgtcgaaagccttccttatctcaaagcagtggtgaaggagacattaagattattcccaccttcaccactacttttgccaagggtaacaatggaaacatgcaacatagaagggtacgaaattcaagccaaaactatagtgcatgttaatgcatgggccatagcaagggaccctgagaattgggaagagcctgagaaatttttccccgaaaggttccttgagagttcgatggagttaaaggggaatgatgagtttaaggtgatcccgtttggttctggaaggagaatgtgtcctgcgaagcacatgggaattatgaatgttgagctttctcttgctaatctcattcacacgtttgattgggaagtggctaaagggttcgacaaggaagaaatgttggacacgcaaatgaaaccaggaataacgatgcacaagaaaagtgatctttacctagtggcaaagaaaccgacaacgtagcacacgttggtacattcactataacacacaagaaagttgataatgacttgtgtatgcaactatgctctatgcactatgcactatgtttattgaccattaattactg

SEQ ID NO: 1214 - DNA, 718 bp, Glycine max
atttagttaaacttcaaattaacctaatatatatatctaataatatatttagattagcggtagaaattaaatcatgataaaatcaacatacaaaagtaactatttgttgcttagacttatgatgaatacgtgtaactcatcatgttaacaaacatgctataagaagttatataacctatttgaatagttagtagttgttgataataggtctattgatttaccttacctgtatttttagtcttacacgtacaaattttatgttctcattccataggataagaacgatgaatcagattttatattaattaatgtattttatttgttgaattaatttctggaattgagttaaataagaagtcatattcacatataaaacttggatacaattaattcaataagtagggccaggttatttaattatatttgtgcatatacgatacggtgtgcgtatacgtatacgcgcgtgcgagaacatctttatggcaggaacagacccgagttccgcgacaatagtttgggcaatgaatgcactgatgaagaattccaatgtgatgagcaagggtcacggcgaagtgagaaatttattctgtgaccaaaattggataaactaagatgatgtcgaaagccttggttgtctaaaagcactggtgacggagacattgagagtattccgaccttgaccactacctttgacaagggtgacaatggaaacatgcaa

SEQ ID NO: 1215 - DNA, 1855 bp, Glycine max
aaaaagaaaagaaaagatgattagtgcacaataatttctattatttagatgaatttggtcctcaggagggtcatgggcatggccatggatgctttccagcaccaaactctcatttccatcattctggccatgttagtaggcgtgttgatttatggcttaaagagaacacatagtggccatggcaagatctgtagtgcacctcaagcaggaggagcatggccaattattggccatttacacctctttgggggtcatcaacatactcacaaaacacttgggataatggcagagaaacatggaccaattttcacaataaagcttggttcatacaaagttcttgtattgagtagctgggagatggccaaggagtgtttcactgtccatgacaaagcattttctaccagaccctgtgttgcagcctcaaagctaatgggctacaactatgccatgtttggcttcactccttatggtccttattggcgtgagataaggaaattaactactattcagcttctatctaaccaccggcttgaactgctgaagaacacaagaacatctgagtcagaagttgcaataagagagctttataagttgtggtctagagaaggttgtccaaagggaggggttttggtagatatgaagcagtggtttggggatttaactcataatattgttctgagaatggtgagagggaagccatactatgatggtgctagtgatgattatgcagaaggtgaagcaagaaggtacaagaaagttatgggagagtgtgtgagtttgtttggggtgtttgtgttatctgatgctattccatttctggggtggttggacatcaacggatatgaaaaggccatgaagagaactgcaagtgaattggatcctctggttgaagggtggttagaggaacacaaaaggaaaagagctttcaatatggatgcaaaagaagaacaggataatttcatggatgtcatgctgaatgttctgaaagatgcagagatttctggttatgattcagataccatcatcaaggctacttgtctgaatctgattttagcaggaagcgacaccaccatgatttcactaacatgggtgctatctctgctacttaaccatcaaatggaactaaaaaaagtccaagatgaattggacacttatattgggaaggacaggaaggtggaagaatctgacataaccaagttggtgtacctccaagccattgtgaaggaaacaatgcggctgtatccaccaagtcctcttatcacccttcgtgcagccatggaagactgcaccttctcaggtggctatcacattcctgctgggacacgtttaatggtgaatgcttggaagatccaccgggatggtcgtgtttggagtgatcctcatgatttcaagcctggaaggttcttgacaagccacaaagatgttgatgtgaagggtcagaactatgagctcgtcccttttggttctggaaggagagcatgccctggagcctcgctggctctgcgtgtggtgcacttgaccatggctagactgttacattctttcaatgttgcttctccttcaaatcaagttgtggacatgacagagagcattggactcacaaatttaaaagcaaccccgcttgaaattctcctaactccacgtctagacaccaaactttatgagaactagattaaattaagctagttttctcccaaataaggggaggggtcctctaggtcctgaaatcgggtaataacaataacatggttaatgcagcttccatgtaggataatgattattcactcatgggtcaccttttaatggagcctcagtgtattataataactccaaacttgtgggtcacaatcccccc

SEQ ID NO: 1216 - DNA, 1884 bp, Glycine max
ttagaaggttgtgtcctcaggccaagagcttggaaaattagcctcacaaaagcaaagatcaaacaaaccaaggacgagaacacgatgttgcttgaacttgcacttggtttattggttttggctctgtttctgcacttgcgtcccacacccactgcaaaatcaaaagcacttcgccatctcccaaacccaccaagcccaaagcctcgtcttcccttcataggacaccttcatctcttaaaagacaaacttctccactacgcactcatcgacctctccaaaaaacatggtcccttattctctctctactttggctccatgccaaccgttgttgcctccacaccagaattgttcaagctcttcctccaaacgcacgaggcaacttccttcaacacaaggttccaaacctcagccataagacgcctcacctatgatagctcagtggccatggttcccttcggaccttactggaagttcgtgaggaagctcatcatgaacgaccttctcaacgccaccactgtaaacaagttgaggcctttgaggacccaacagatccgcaagttccttagggttatggcccaaggcgcagaggcacagaagccccttgacttgaccgaggagcttctgaaatggaccaacagcaccatctccatgatgatgctcggcgaggctgaggagatcagagacatcgctcgcgaggttcttaagatctttggcgaatacagcctcactgacttcatctggccattgaagcatctcaaggttggaaagtatgagaagaggatcgacgacatcttgaacaagttcgaccctgtcgttgaaagggtcatcaagaagcgccgtgagatcgtgaggaggagaaagaacggagaggttgttgagggtgaggtcagcggggttttccttgacactttgcttgaattcgctgaggatgagaccatggagatcaaaatcaccaaggaccacatcaagggtcttgttgtcgactttttctcggcaggaacagactccacagcggtggcaacagagtgggcattggcagaactcatcaacaatcctaaggtgttggaaaaggctcgtgaggaggtctacagtgttgtgggaaaggacagacttgtggacgaagttgacactcaaaaccttccttacattagagcaatcgtgaaggagacattccgcatgcacccgccactcccagtggtcaaaagaaagtgcacagaagagtgtgagattaatggatatgtgatcccagagggagcattgattctcttcaatgtatggcaagtaggaagagaccccaaatactgggacagaccatcggagttccgtcctgagaggttcctagagacaggggctgaaggggaagcagggcctcttgatcttaggggacaacattttcaacttctcccatttgggtctgggaggagaatgtgccctggagtcaatctggctacttcgggaatggcaacacttcttgcatctcttattcagtgcttcgacttgcaagtgctgggtccacaaggacagatattgaagggtggtgacgccaaagttagcatggaagagagagccggcctcactgttccaagggcacatagtcttgtctgtgttccacttgcaaggatcggcgttgcatctaaactcctttcttaattaagatcatcgtcatcatcatcatatgtaatatttactttttgtgtgttgataatcatcatttcaataaggtctcattcatctactttttatgaagtatataagcccttccatgcacattgtatcatctcccatttgtcttcgtttgctacctaaggcaatctttttttttttttgaatcacatcatctactataaactatcaatccttatattaattttgagttgccacatc

SEQ ID NO: 1217 - DNA, 2059 bp, Glycine max
agcacattgaagcagattgtcatttcttatgtatagggaaaccacttgcttcagcatggcttaaggaaccttgtgttgaaggaagttgcctcgtgggtttggaggaagagcttgaacaactcaggggtggaggcaacgacggttggcatggagccgaaggagagagagaataagaggccaagatcttggatagtaattaacctcactcaaactcgggatcacagaaaccaacaacagttcttgcactgaggtttcacgatgttgctggaacttgcacttggtttgtttgtgttagctttgtttctgcacttgcgtcccacaccaagtgcaaaatcaaaagcacttcgccacctcccaaaccctccaagcccaaagcctcgtcttcccttcattggccaccttcacctcttaaaagataaacttctccactatgcactcatcgatctctccaaaaagcatggccccttattctctctctccttcggctccatgccaaccgtcgttgcctccacccctgagttgttcaagctcttcctccaaacccacgaggcaacttccttcaacacaaggttccaaacctctgccataagacgcctcacttacgacaactctgtggccatggttccattcggaccttactggaagttcgtgaggaagctcatcatgaacgaccttctcaacgccaccaccgacaacaagctcaggcctttgaggacccaacagatccgcaagttccttagggttatggcccaaagcgcagaggcccagaagccccttgacgtcaccgaggagcttctcaaatggaccaacagcaccatctccatgatgatgctcggcgaggctgagatgatcagagacatcgctcgcgaggttcttaagatcttcggcgaatacagcctcactgacttcatctggcctttgaagtatctcaaggttggaaagtatgagaagaggattgatgacatcttgaacaagttcgaccctgtcgttgaaagggtcatcaagaagcgccgtgagatcgtcagaaggagaaagaacggagaagttgttgagggcgaggccagcggcgtcttcctcgacactttgcttgaattcgctgaggacgagaccatggagatcaaaattaccaaggagcaaatcaagggccttgttgtcgactttttctctgcagggacagattccacagcggtggcaacagagtgggcattggcagagctcgtgaggaggtctacagctgttgtgggcaaagatagactcgttgacgaagttgacactcaaaaccttccttacattagggccattgtgaaggagacattccgaatgcacccaccactcccagtggtcaaaagaaagtgcacagaagagtgtgagattaatgggtatgtgatcccagagggagcattggttcttttcaatgtttggcaagtaggaagggaccccaaatactgggacagaccatcagaattccgtcccgagaggttcttagaaactggtgctgaaggggaagcagggcctcttgatcttaggggccagcatttccaactcctcccatttgggtctgggaggagaatgtgccctggtgtcaatttggctacttcaggaatggcaacacttcttgcatctcttatccaatgctttgacctgcaagtgctgggccctcaaggacaaatattgaaaggtgatgatgccaaagttagcatggaagagagagctggcctcacagttccaagggcacatagtctcgtttgtgttccacttgcaaggatcggcgttgcatctaaactcctttcttaattaagataatcatcatatacaatagtagtgtcttgccatcgcagttgctttttatgtattcataatcatcatttcaataaggtgtgactggtacttaatcaagtaattaaggttacataaaaaaaaaaaaaaaaacatgcacatgtatcatctcccatttgtctttgtttcgtacgtaagacaatttttttttcccaaaaaaaaaaaaaaaaatttaaaagaaaaataaaaaataaaaaaaaaaaaaaaaagggcggccgccgac

SEQ ID NO: 1218 - DNA, 571 bp, Glycine max
cataaaaaatatgaagtttctatttaaggaaaaaaatagatcatactaataatggaattctcatctcattctataaacattacaatgtggtaactagaactcatattcgtaagcttctttccaggtgttggttcatcatcataatggttacccccctcaccattcgtgtccttttccatcttctttctggcaagtatcttattgatcttgtgcaaatcattattgagcttctggtccttgttttgctttcgggtcttccggccatcttgcatcttcacaccgaactggaatgcagcttttggcattgcttccttctgctcattgtaagttgcccattcctcttcagtttcaaagtcccatctatgaagacgaccctttgcccttccacccatatccattttggacaagtcgtcttcatcatcactgtccactatctcacggttatattcttgatatcctgggtaacattcagagtaactctctgagatgaagttgggatctttttcacgagcatctctctccctcagctgttgaagtctctggtcatctcgcttaaacactgatcctaaac

SEQ ID NO: 1219 - DNA, 583 bp, Glycine max
cactagtgcacaaaggagcgaggctgctggaattcataggggcaaaagctggggataagactctaaattggttgaaatcaaagaatgttgtggtgaaactagagcaatcagttgacttgaatgcattcaaagatggacagaagatatatcaaacttccaacggagagaccattgaagcagattgtcatttcttatgtatagggaaaccacttgcttcagcatggcttaaggaaactgtgttgaagaatgacttggatggtcaaggaaggatcaaggtagatgaaaaattaagagtcaagggcaaggacaacatttttgcaattggagatattacagatattccagaaatcaagcaaggttttttggcacagcagcaggctgaagtggttgtgaacaacttgaacgtgatattagacggaggaagacaatgtacgatggtaactcacaagccacattcagcaatagcaatagtttcacttgggaggaaagatgctgtggcacagttaccattcttgacaatcggtggaagaattcctggattcatcaagtctggagaattggttggttggtaaaacaagaaaac

SEQ ID NO: 1220 - DNA, 672 bp, Glycine max
caaggtcaaacctcaaccatagatacttactatcaagctcatggcatgggggcctttaccttactggaagtcggacccccttatatgaacgaccttctaacgccaccactgtaaacatgttaggcctttgaggacccaacagatccgaagttacttagggttatggcccaaggcgcagaggcacagaatccccttgacttgacccaggagcttttgaatggaccaacacaccatctccatgatgatgctcggcgaggctgaggagatcagagacatcgctcgtgaggttcttaagatctatggcgaatacagcctcactgacttcatctggcctttgaagtatctcaaggttggaaagtatgagaagaggattgatgacatcttgaacaagttcgaccctgtcgttgaaagggtcatcaagaagcgccgtgagatcgtcagaaggagaaagaacggagaagttgttgagggcgaggccagcggcgtcttcctcgacactttgcttgaattcgctgaggacgagaccatggagatcaaaattaccaaggagcaaatcaagggccttgttgtcgactttttctctgcagggacagattccacagcggtggccttctctagtttggttgaatttattaatcatgtgcacttcaatttgaatgaattccaataata

SEQ ID NO: 1221 - DNA, 328 bp, Glycine max
cccgtacagtgtcgtccactatgtggctataaaatggaagcattgaaggttgtttcctcaggccaagatcttggatagtaattaacctcactcaaactcgggatcacagaacccaacaacagttcttgcactgaggtttcacgatgttgctggaacttgcacttggtttgttctgtcttagctttgtttctgcacttgcgtcccacaccaactgcaaaatcaaaagcacttcgccacctcccagaccctccaagcccaaagcctcgtcttcccttcattggccaccttcacctcttaaaagataaacttctccactatgcactcatcg

SEQ ID NO: 1222 - DNA, 1669 bp, Glycine max
aaaccatctcattccctctctccctaaaatggccactctttcctcctacgaccacttcatcttcactgccttagctttcttcatatctggcctaattttcttcctcaaacagaaatccaaatccaaaaagttcaacctccctccaggaccccccgggtggcctattgttgggaacctcttccaagttgctcgttctgggaaacctttctttgagtatgtgaacgatgtgagactcaaatatggctcaatcttcaccctcaagatgggaacaaggaccatgatcatcctcaccgacgcaaaactggtccacgaggccatgatccaaaagggtgcaacctacgccaccaggccccccgagaaccccaccagaaccatcttcagtgaaaacaagttcaccgtgaatgcagcgacctatggccccgtgtggaagtcgctgaggaggaacatggtgcagaacatgctcagctcaacaagacttaaggagtttcgcagtgttcgggacaatgcgatggacaagctcatcaacagactcaaggacgaggccgagaagaataacggcgtggtttgggtgctcaaggatgccaggtttgctgttttttgcatacttgtggctatgtgttttggtcttgagatggatgaggagacagtggagagaatagatcaggttatgaagagtgttctcatcactttggacccgagaattgatgactatcttccaattctaagcccctttttctcaaagcaaagaaagaaagccttggaggttcgcagagaacaggttgagttcttagttccaattatagaacaaagaagaagagcaattcaaaaccctgggtcagatcacaccgccacaacgttttcctacctagacacactttttgacctcaaagttgaagggaagaaatcagcaccctctgatgcagaattggtgtctttatgctcagagtttcttaacggtggcacagacacaacagcaacagcggttgagtggggcatagcacagctcatagcgaaccctaacgttcagacaaagctgtacgaggaaataaagagaacggtgggagagaagaaggtggatgaaaaggacgttgagaaaatgccatacctacacgctgtggtgaaggagcttctaagaaagcaccctccaacacactttgtgctaacacatgctgtgactgagcccaccactttgggagggtatgacataccaattgatgcaaatgttgaggtgtacacaccagccattgctgaggaccccaaaaattggttaaaccctgagaagtttgaccctgagagattcatctctgggggtgaggaagcagacataactggggtcacaggggtgaagatgatgccatttggggttgggagaaggatttgccctggcttggctatggccacagtgcatattcacctcatgatggcaaggatggtgcaggagtttgagtggggtgcataccctccagagaagaagatggatttcactggcaagtgggagttcactgtggtcatgaaggagtctctaagagcaaccatcaaaccaagaggaggagaaaaagtgaagttgtaaaattttcctgcttctattcttctgggttttaaatttcacagacaacataaatattattgctattatcatcatcatatatgtatacatcatcatggttac

SEQ ID NO: 1223 - DNA, 1426 bp, Glycine max
tgttgttcttattatatatttaaacctcttcctcctcttcttccttttgcttcaaggtgtggtgttttgtgtttcacatttaaagcaacactgaaaagaaaggaaagtgaagttgagagtttgtttaggaagaacaagaaatgggggttggttcccaggatgccatcaagcagttccaggcattcattgaccaagttgaggagcctttgcgaacaacgtttcagaatgttcatcaagggtttgtcaccgaaactttaatgcggtttctaaaagcaagggactgggatccttgcaaggcacataaaatgttggttgactgtttaaattggagggtgcaaaatgagattgacaatatattatctaaaccaattgttcctgctgatttatacagagcggtgcgtgattcacaactcataggattatcaggttactcaagagagggtctgcctgtctttgcaattggtgttgggcttagcacatttgacaaagcatctgttcattattatgtgcagtcacacattcaaattaatgaatatcgtgagcgtataatcttgccttctgcatcaaagaagcaggggcgacctattaccacttgtataaaggttttagacatgactggtctgaagttatcagccctgaatcagattaagttgctaactattatatcatccattgatgatctgaactaccctgagaagacaaatacttattacattgtaaatgctccatacatattttctgcttgttggaaggttgtgaagccacttttacaagagaggacaagaagaaaaatacaggtgttaccaggttgtggacgagatgagctattgactatcatggattactcgtctctaccacatttctgtcgaagagaaggctctggatcatccagacattctgagagtggtagtgaaaattgctattccttggatcatcccttccatcaagagctctacaatcacatcaagcagcaagccagactccgtgaagctgttgaacccatcaagcagggatcatttcatgtagattttccagtacctccagatgatgaagttgagattgccaagactatagagtcagagttacataagtttgagaacggaaatggtgtctgatactttcttttaggatctactgtggagacctcaaaatcagagatcttttgctagtacaaccaatgtagaaggactccacatcagaattacttttatcaggattcggaagaattagttagcgttgtttatgtatgttaaaagagaaattaagggttagtcaatttaatgcaaatcccagctttacatcgtatcacaatgctagagatcaatgttaaatataatattttatccttgtgtttcctgtctcttgatcttttgcatgtttggtcttgatatttctttaccagttcaaatataagattataatttat

SEQ ID NO: 1224 - DNA, 268 bp, Glycine max
tataattaggagaaaatggaatttaaaaagagaaagaaagggtggaaattgtaggtgtggtgtgtttcacatttgaagtaacactgaaaagaaaggaaagtgaagttgagagtttaagaagaacaagaaatgggggttggttcccaggatgccatcaagcagttccaggcattcattgaccaagttgaggagcctttgcgaacaacgtttcagtggttaaggaactaaaaggataaaatagcactgcctataagatcatggaatgttc

SEQ ID NO: 1225 - DNA, 308 bp, Glycine max
agaacttggtgataggcccgcctttgttgaatcttcatttatggtctttctttctattagttgttcttgtttgcgatatctttaaacctcttgcttttgttttgcttcaaggtgtggtgtgtttcacatttgaagtaacactgagacgagaggaaagtgaagttgagagtttgaagaagatcatgaaatgggggttggttcccaggatgccatcaagcagttccaggcattcattgaccaagttgaggagcctttgcgaacaacgtttcagaatgttcatcaaggatttgtcactgcaactttaatgc

SEQ ID NO: 1226 - DNA, 2929 bp, Glycine max
cccacgcgtccgcttgttctgtttcgcgctccttgcctataaattaacacctcctccacttcattcttcattcattcatttcattttccccttcaccccttccttttttgcgttcattctgttttcataggcttcttttttctcttgttcgcagtgacgaacttctgaagaaatggcaaatcacgcctttgacacactctcactctttccgcgagaggtttcgatgaaactctcactaggtcacaggaatgaaattttggccctttatgtcaaggcttgaagccaagggcaagggaattctgcaacaccaccaggtggttgcagagtttgaagaaatccctgaggagagcagaaagaaaacctccaagatggtgtctttggagaagttttgagatccacacaggaagccatagtgctgccaccatttgtagctcttgctgttcgaccaaggcctggtgtatgggaatatctgcgtgtgaatgtgcacatgcttgttgttgatgagcttcgtcctgctgagtatctgcgtttcaaggaggagcttgttgagggaagttcaaacggcaacttatgtgcttgagttggactttgaaccgtttaatgcatccttccctgcgcccaactctgaacaagtccattggaaatggcgtcgagttcctcaaccgccacctttcggccaagctcttccatgacaaggagagcatgcagccactgcttgagttcctcaggcttcacagttataagggaaagaccatgatgttgaatgacaaagttcaaagcctggattctctccaacatgttttgagaaaagcagaagagtatctgatttcagttgctcctgaaacaccctactcggaattcgaaaacagattccgggagattggtctggagagggggctggggtgacactgccgagcgtgtcctcgagatgatccagcttctgctggaccttcttgaggcacctgacccttgcaccctcgagacattccttggaagagtccctatggtcttcaatgttgttatcctttctccccatggttactttgcccaagataatgtctgagtcgtaccctgacacgtggtgggcaggttgtgtacatcttaggtcaagttcgtgccttggagaatgagatgctcaaccgcatcaagacacaaggccttgatatcacgcctcgtattctcattattactcgtcttcgccctgatgcagtaggaactacctgtggccaacgtctagagagggtatactgatactgaatattgtgacattctcagagttcctttcagaacagaaaagggaattgttcgcaaatggatctcaagattcgaagtctggccatacctagagacttacactgaggatgtcgcccttgaacttgtcaaggagttgcaagccaagccagatctgattgttggaaactaacagtgatggaaacaatgttgcctctttgtttagcgcataaattaggagtaactcagtgtaccattgctcatgctctagaaaagaccaagtaccctgagtctgacatttactggaaaaaaatttgaagagaaatatcaatttctaatgccaatttactgctgatctttttgcaatgaaccacacagactttatcatcaccaggaccttccaagagattgctggaagcaaggacactgttggacagtatgagagtcacactggcttcacccttccaggactctaccgtgttgttcacggtattgatccctttgatccaaagttcaacatcgtctcttccggttgccgacatgagcataaacttcgcatacactgaaactgagcgtaggttaacagaattccactctgacattgaagagcttctttacagctcagtggagaatgaggaacacatatgcgtattgaaggaccgcaacaaaccaataatcttcaccatggcaaggcttgagccgttgtgaagaacatcacggggcttgtcgagtggtacgggaagaacgcacgcctccgcgagttggtgaaaccttgtggtggtggctggagacaggaggaaggagtccaagggacttggaagagaaggccgagatgaagaagatgtatggcctcatcgagacctacaagttgaacggccaattcagatggatctcctctcagatgaaccgtgtgaggaacggagagctctaccgtgtcatctgtgaacacaagggggtgcctttgtgcagcctgcagtttatgaggcctttgggttgactgtggttgaggccatgacttgtacggttgccaacgtttgccacatgcaatggtggtcctgctgacatcactgtgcatggaaaatctggttaccacattgatccttaccatggtgaccatgctgctgagatccttgttgagttctttgagaagagcaaggctgatccatctcactgggacaaaatctcccagggtggactcaagcgtattcatgagaagtacacatggcaaatttactcggacaggctcttgacactcactggtgtgtatggcttctggaagcacgtgaccaatcttgaacgccgtgagagcaaacgttacctcgagatgttccaagctactcaagtaccgcaaattggctgagtctgtgccccttgctactgaagagtaacttcatgtttgaagagaacatcaatggagacaccggcttttggtccgtttgaagtcttatggagctttcataaataacgccattgatttttgattgtgatctgtttttggatttaaagagtctaaaaaaaaaagtgtcgttgatttttgatattttgcgtaggttttgggtaaaaaaagtaaaaaaagaaagtcttttttttttttttaaaatccttttggtggtggcaatattgggtatgattggaaatctttaaattcgggttttccaccccatcaattcaatttaaagatatgccttcttccattcaa

SEQ ID NO: 1227 - DNA, 3203 bp, Glycine max
gctatgacgtccatgcaccctcctagcttggaattcggttgggacccccctttttttttggcgtcattctgtctcctgtgaattctttcctagccaatggccaccgatcggagacccgggtctacaggctagcgtgagaggcttgatgaaaccctcactgcccacaggaacgaaattttggcccttctgtcaaggatcgaagctaagggcaagggcatcctgctacaccaccaggtcattgctgattttgagcgaaatgcctcacgagaacagacagaagcttactgatggtgcctttggagaagtcttgcaatctacacatgaagccatacttttgccaccatgggttgctctggctgttcgtccaagacctggtgtgtgggagtacctgagagtgaatgtgcacgctcttgttgttgaggagttgcaacctgctgagtacctgcacttcaaggaagaacttgttgacggaagttctaatggcaactttgtgcttgagttggactttgaaccattcaatgcagccttcccccgcccaactcttaacaaggtcaattggaaatggtgtgcagttcctcaaccgccacctttctgccaaactcttccacgacaaggagagcttgcacccacttttggaattcctcaggctttacatcgtcaaaggaaagactttgatgttgaatgacagaattcaaaacccagatgcactccaacatgttctgaggaaagctgaggagtatctgggcacagtgcctcctgaaactctctactcagaatttgagtaaaagttgccaggagattggtttggagagagggtggggtgacaacgcagagcgtgttcttgagtcaattcaacttctcttggatcttcttgaggcccctgacccttgcacccttgagactttccttggaagaattcctatggtcttcaatgttgtcattctttctccccatggttactttgcccaagataatgtcttgggataccctgacactggtggccaggttgtttacatcttggatcaagttcgtgctttggagaacgagatgctccatcgcattaagcaacaaggattggacattgtacctcgtattctcattatcacccgtcttctccccgatgcaatcggaactacttgtggccaacgtcttgagaaggtgttcggaaccgagcactcccacattcttcgagttccctttagaactgagaagggaattgttcgtcagtggatctccaagattcgaagtctggccatacttggaaacttacactgaggatgttgctcatgagcttgccaaagagttgcaaggcaagccagatctgattgtcggaaactacagtgatggaaacattgttgcctctttgttggcacataaattaggagtcactcagtgtaccattgctcatgcacttgagaagaccaaataccccgaatccgacatttactggaaaaaattggaagagagataccacttctcttgccaattcacagctgatggtatgggccatgaaccacacagatttcattatcaccagtaccttccaggagattgctggaagcaaggacactgttggacagtatgagtctcacacagcctttacccttcctggactctaccggtgtagtgcatggtattgatgtctttgatccaaaattcaacattgtctcccctggaactgttctaaccatttactttccccacactgaaaccagccgtaggttgactataaacacatttgtctccaattagttgttgttttaatctattattgttgctacacgcatattttttcttgaggtccttattatgcctattatttttaccattgctagggtggatcgagtgaagaacatcacaggacttgtggagtggtacggtaagaacgcgaagctgaaggagctggtgaacccttgtgggttgttgctgggagacagggaggaaggagtcaaagggaccttggaaagaaaaggccgagatgaagaatatgtacagagctgatcgagacctacaagtcgaacggccgattcagatggattgcatagtatatgaaccatgtgaggaatggagagctttaccgagtgatctgcgacacccagggttgcctttcgtgcagcctgctgtatacgaggcttttggtttgacagtggttgaggccatgacttgcggcttgccaacattcgcccacatgcaatggtggtcctgctgagatcattgtgcacggcaagtctggcttccacattgacccttaccatggtgaccgtgctgctgatctccttgttgacttctttgagaagtggcaggcttgacccaacccactgggaaacaatctcaaaggctggtctccagcgtattgaagagaagtacacatggcaaatttactcacagaggcttctcactctcactggtgtctatggcttctggaagcatgtgtctaaccttgaccgccgtgagagccgccgctatctcgagatgttctatgctctcaagtaccgcaaattggccgagtctgtgccccttgctgttgagtaaactgaggatgaagagttggataaagaaatggaggaaccggcttttttctttctcatttggagtttgtcgcacttgagttctataaataatatgtccctgatgattctaattttgtgattaagctttcgataagagccagagagagagaaaaaaggaggccaaaaaaaaaaagccttttactttttttgttgttgcatgatttgaatcttgattggaaaagcttcgaattggggtagttttacccatcaattcaattttaagccgtgccttcttttggaagtcacaaacaagtttattttacatatatgtaacgttacatagaccctacaggatacaaggccatcgccatagcaacttcctacaaacgaaaaagtccgaacctcattgtgctgcctacatatcaaaaaccacccatatcagatataagcacacatcagttttccaaaggccatatttagaggccttcaatgaagttgaccccagtgttcttcaaccaaacattgccttggatgagttgtgctaccgtgaacttgctggcctcagctgcagttttgatgatatggtaaccaggccaattcactctcttgctggtaccggcaccggggccattattcatgtactctccataatacaacgtttgcaaaaagtctttactttgggcatcccattca

SEQ ID NO: 1228 - DNA, 1710 bp, Glycine max
tcattcttcttacataataggggaaggagaagaaaaaaaatgaaataagaaaaactcaactttgtaattcgtggagggaatacttttccattacgcacgcactttaattacagacgagaaaattataattaatagtaatacagacagcagcatgcgcccaccggttattctcaaaactaccacctctcttttggattcttcttcttcttcaccaccctgtgatcgcagactcaacactctcgctagacacttccttccgcaaatggcttctcacgacagcatctccgcttctccaacctccgcttctgattccgtcttcaatcacctcgttcgtgctcccgaagatcctatcctcggggtaactgtcgcttataacaaagatccaagtccagttaagctcaacttgggagttggtgcttaccgaactgaggaaggaaaacctcttgttttgaatgtagtgaggcgagttgaacagcaactcataaatgacgtgtcacgcaacaaggaatatattccgatcgttgggcttgctgattttaataaattgagtgctaagcttatttttggggctgacagccctgctattcaagacaacagggttaccactgttcaatgcttgtctggaactggttctttaagagttgggggtgaatttttggctaaacactatcaccaacggactatatacttgccaacaccaacttggggcaatcacccgaaggttttcaacttagcaggcttgtctgtcaaaacataccgctactatgctccagcaacacgaggacttgactttcaaggacttctggaagaccttggttctgctccatctggatctattgttttgctacatgcatgcgcacataaccccactggtgtggatccaacccttgagcaatgggagcagattaggcagctaataagatcaaaagctttgttacctttctttgacagtgcttatcagggttttgctagtggaagtctagatgcagatgcccaacctgttcgtttgtttgttgctgatggaggcgaattgctggtagcacaaagctatgcaaagaatctgggtctttatggggaacgtgttggcgccttaagcattgtctgcaagtcagctgatgttgcaagcagggttgagagccagctgaagctagtgattaggcccatgtactcaagtcctcccattcatggtgcatccattgtggctgccattctcaaggaccggaatttgttcaatgactggactattgagttgaaggcaatggctgatcgcatcatcagtatgcgccaagaacttttcgatgctttatgttccagaggcacacctggcgattggagtcacattatcaaacagattggaatgtttactttcactggattgaatgcggaacaagtttccttcatgactaaagagttccatatatacatgacatctgatgggaggattagcatggctggtctgagttccaaaactgtcccacttctggcggatgcgatacatgcagctgtaacccgagttgtctaaaacatgttgacaacagttttcaacatgctccctagtccctataggagaacttccattatttttgtttaataattgtcaacatcaacaatgaaaccttttatttgatgtgagatttttaaaggaaacttttctgcctaccgggctccatccagagatttagcattataacatttttattccgtttcccc

SEQ ID NO: 1229 - DNA, 1232 bp, Glycine max
ccgggtcgaccaacgcgtccacccacgcgtccgaaggggaaaggagttaaagagtaaaagcaccgtctccgtctccactctcggcttcttcttcgttgcgctttttcccaaaaccaattgcatcactctcgtccgttaccgccgctgccctagaccaccgcaagcgacgtcgcacaccgccttcatccgttagggcaaaaatgagtcgaggaagtggaggtggatacgatcgtcacatcactattttctcccctgaaggacgtctctttcaagtggagtatgctttcaaggctgtgaaggctgcaggaatcacctcgattggtgtccgaggaaaggattcaatttgtgtcgttactcagaagaaggttccggataagcttttggacaacacaagtgttacacacctctttcccatcaccaagtaccttggattattggctactggcatgacagctgatgctaggacactggtccaacaagcaagaaatgaagcagctgagtttcgctttacatatggatatgagatgcctgtagatgtattagctaaatggattgcagataaatcacaagtctatactcaacatgcttatatgagaccactcggagtagttgctatggttttgggtattgatgatgaatatggacctcagctatacaaatgtgatccagctggtcattactttggtcacaaggcaacaagtgctggattgaaggaccaagaggcaattaatttcttggaaaagaagatgaagaatgacccttcatttacatatgaggagacggttcagactgccatttctgccctgcaatcagttcttcaggaggattttaaggccactgagattgaggttggagtggtgcggaaggataatccagaattcagagttttaaccaccgacgaaattgatgagcacttgactgcaataagtgagcgtgactgagttcttgataaggatgtagttgttcaaactttctgatggtagagattatattatgtacttgtttctggaatcatcgaattgatttccttgtgatatttgagtggtgagttactcaagaatgatgttgaagatggtatttgatttcctattacaagtttacttgggaaaatatttcatgtttcgaccaatactttattttttattattaaaacaattgttaacaaaacgaagtcgtgtgtatacccataatactgttaaaatttgttgggccttgcgtagggatttaagctt

SEQ ID NO: 1230 - DNA, 503 bp, Glycine max
gctttaagaccaaaagcaccgtctccgtctccgtctccacctcctgtccttcgttgcacttcgctttttccaaaaccaatcacatcagcatcactctcgtcgccgccgtcgtcgaccaccgcaagagccatcgcactccgccgtcatccgttagggcaaaaatgagtcgaggaagtggaggtggatacgatcgtcacatcactattttctcccctgaaggacgtctcttccaagtcgagtatgctttcaaggctgttaaggccgcaggaatcacctcaattggtgtccgaggaaaggattcgatttgtgttgttactcagaagaaggttccggataagcttttggacaacacaagtgttacacacctctttcccatcaccaagtaccttggtttattggctactggcatgacagctgatgctaggacactggtccaacaagcaagaaatgaagcagctgagtttcgctttacatatggatatgaaatgcctgtagatgtatta

SEQ ID NO: 1231 - DNA, 1899 bp, Glycine max
tgacatcggacgcacgcgtacgtaaactcggaattctgctcgagacatgaatcgtgatttagcatttaccacaccaaaatcaatctgcggagtcagaaagccatggatccctacaagaatcggccatcaagcgccttcaattctcccttctggactacaaattccggtgctcccatctggaacaataactcatcgctgactgttggatctagaggtccaattctgctggaagattaccatctggtggagaagcttgcaaactttgacagggaacggatccccgaacgtgttgtccatgctcgtggagctagcgcaaagggtttctttgaagtcacgcatgacatttctcacctcacatgtgccgatttccttcgagcccctggagttcagacccctctcatcgtccgtttctccactgttatccacgagcgtggcagccccgaaaccctcagggatcccagaggttttgctgtcaaattctacaccagagagggtaacttcgaccttgtgggaaacaacttccctgtcttcttcgtccgcgatggcctcaagtttcctgacatggttcatgccctcaaacccaaccccaagtcccacatccaggagaattggaggatcctcgatttcttctcccaccatcccgaaagccttcacatgttctccttcttattcgacgacgttggtatccctcaagattacaggcatatggatggcttcggtgtcaacacctacacccttatcaacaaggccggcaaagcactctatgtcaaatttcattggaagaccacctctggcgaaaagtctcttttggacgacgaggccatcagggttggaggatccaaccacagtcatgccacccaggacctttacgattcaattgctgctggaaactatcctgagtggaaactctacatccaaacattggatcccgaaaacgaagacaggcttgactttgacccccttgatgttactaagacctggcccgaggacgttttgcccctccagcctgttggccgcatggtcttgaataagaacattgataacttctttgccgagaatgaacaacttgcattttgccctgccattattgtacctggtgtatactactccgatgataaattgcttcaaactcgcgtattctcctatgctgatacccagagacacagacttggaccaaattatctgcagcttcctgctaatgcccctaagtgtgcccatcacaacaatcaccatgatggtttcatgaatttcatgcacagggatgaagaggtcaattacttcccttcaaggtatgatcctgtccgtcatgcggaaaaggtccccgttcctcctcgtatcctaggtgggaagcgtgaaaagtgcatgattgagaaggagaacaacttcaagcaacctggggagagataccgatcctggccctctgacaggcaagaaaggtttgtccgccgatgggttgatgctttgtctgacccacgtgtcacccatgaaatccgtagcatctggatatcatactggtctcaggctgatcgttctcttggacaaaagatagcatctcacctgaacttgaagccaagtatctaagattggtggtggaaaccctagcttctaagagatgcagatgtaggaacaagtgagaagtttgtggcacagtattaatttgaaaggactggtccttttattacagtattgctatattgtatattgcttatttcatgaactcaacttcttgacttgtccacttaatactatatgtccattgtgataaggatgaggatctggacagttccatgattctctgtttacttgggcttaactcttcatttatatttcaaataaattttataatgtcagttatgatagtcatcgctgactgaaggagaaaaaaaaaaaaaaaaaaag

SEQ ID NO: 1232 - DNA, 312 bp, Glycine max
cacgcgtccgtccacgcgtccgacatattcgtgatataccatttaccacaccaaaaccaatcggatcgtttcctctgcggagtcagaaatccatggatccctacaagaatcggccatcaagcgccttcaattctcccttctggactactaattccggtgctcccatctggaacaacaactcatcgctgactgttggatctagaggtacggtatggtattcaatattattttctctacttcatgatcacattttttcatccagatgactctaacccaagactttacttaacaacttaagtcaggaccactcgg

SEQ ID NO: 1233 - DNA, 419 bp, Glycine max
  unsure (1)..(419): unsure at all n locations
ggggngactggataaaataaaactaagcccataaaataggatagagtgacagacagattcgggatttaccatttaccacaccaaaaccaatccgatcgtttcctctgcggagtcagaaatccatggatccctacaagaatcggccatcaagcgccttcaattctcccttctggactactaattccggtgctcccatctggaacaacaactcatcgctgactgttggatctagaggtccaattctgctggaagattaccatctggtggagaagcttgcaaactttgacagggaacggatccccgaacgtgttgtccatgctcgtggagctagcgcaaagggtttctttgaagtcacgcatgacatttctcaccttacatgtgccgattttctccgagcccctggagttcagacccctctc

SEQ ID NO: 1234 - DNA, 388 bp, Glycine max
cttctcctgcttttcagcccttccaaagaaagggtaaaatatgaacattcatgatttatccttgtaaggcggtgacaaaaaataatatagaaaagaagataccaactagaagtggaaacaaggaaaagcgggtggtgactgtatagtatagaataaaattgtgcccatagaaatagaatagtgacagacacactcgtgaatcgtgatttagcatttaccacaccaaaatcaatctgcggagtcagaaagccatggatccctacaagaatcggccatcaagcgccttcaattctcccttctggactacaaattccggtgctcccatctggaacaataactcatcgctgactgttggatctagaggtccaattctgctggaggattacca

SEQ ID NO: 1235 - DNA, 2000 bp, Glycine max
aaaaaaaatagtgagaaaagagggaaagtctttataaggcggtaagactcgccattaccacacgaactgatttagcgttgccattctcatcctcttctttctctctctccaccattgccatggatccctacaagcaccggccatccagcgccttcaattctcccttctggactacaaattctggtgctcctatttggaacaacaactcctctttaaccgttggagctagaggtccaattctgctggaggattatcatcttgtggagaagcttgcaaattttgatagggaacgtatcccagaacgtgttgtccatgccaggggcgctagtgcaaagggtttctttgaggtcacccatgacatttctcacctgacatgtgcagatttccttcgagcccctggagttcagacgcctgtaattgttcgtttctcaactgtcattcatgagcgtggtagccctgaaaccttgagggaccctcgaggttttgccgtgaagttttacaccagagagggtaactttgaccttgttggaaacaaccttcccgtcttctttgtacgtgatggcatgaagtttccagatatggttcatgctcttaaacccaatcccaagaaccacatccaggagaattggaggatccttgacttcttctctcactttccagaaagccttcacatgttcacctttttatttgatgatttgggtgttccacaagattacaggcatatggatggttttggagttaacacatatacgctgatcaacaaggctgggaaagcagtgtatgtgaaatttcactggaagaccactagtggtataaagtgtctattggaggaagaggccattaaggtgggaggagccaaccacagccatgccactcaagacctccatgattcaattgctgctggtaactatcctgagtggaaactgtttgttcagacaatagatcctgagcacgaagacaaatttgactttgaccctcttgatgttactaagacttggcctgaggacattatacccttgcagcctgttggtcgcttggtcctgaataagaacatagataatttctttgctgagaatgaacaacttgcattttgccctgccattgtggttcctggtgtatactactcagatgataagatgcttcaaaccaggatattctcttatgctgattcacaaaggcacagacttggaccaaactatctgcaacttcctgctaatgctcccaagtgtgctcaccacaacaatcatcatgaaggtttcatgaatttcattcacagggatgaggaggttaattacttcccttcaaggtatgatcctgttcgtcatgcagaaacgttccccatacctcctgctatctgcagtggaaggcgtgaaaagtgtggaattgagaaggagaacaactttaagcagcccggagagagataccgatcttgggcacctgacaggcaagatagatttgctcgccgatgggttgatgctttatctgacccacgggtcacccatgagatccgcagtgtctggatatcatactggtctcaggctgaccgttctctaggccaaaagatagcttctcatctcagcacgaggccaaatatttaatgttgttgccaactccagaatgattgttagagttgcagacgtgcaaagagtacgataaggatgtgattttggattacctgaaagaactaatccttttcttgcaatattatgttgtgtgtacccataactccatgaatgcaactcgttgacctatctcaataaatgccgtttgtatttgttagtatttatataccttttcggcatgtttcctgctgttatggtatatgttgcatcaatcttcacatgaaatcttcgctgatgcattctaataagagtaactatattacctagggtaaatatcttattgagacctatcatttctctttttgtttattctcttattacttaatattatttatcacattccttcaaaaaaaaaataatcatttatcacattaaaaa

SEQ ID NO: 1236 - DNA, 518 bp, Glycine max
caactttaagcagcccggagagagataccgatcttgggcacctgacaggcaagatagatttaatcgccgatgggttgatgctttatctgacccacgggtcacccatgaaatccgcagtgtctggatatcttactggtctcaggctgaccgttctctaggccaaaagatagcatctcgtctgagcatgaggccaaatatttaatgttgttgccaaccccagaatgattgttagagttgcagacgtgcaaagagtacgataaggatgtgattttcgatcaatttgaaagaacttatccatttcttgcaattttagttgtgtacccataactccatgcatgcaactcgttgagctatctcaataaatgccgtttgtatgtgttagtatttatatttatataccttttcggcatgtttcgctgctattgttgtggactatgtgttccttgtaatccaattaattaagaaagaaagtattaaattataaagtaacgagaatttgaaattattcaacatataat

SEQ ID NO: 1237 - DNA, 741 bp, Glycine max
taaatactaacaaataaaaacatagataatttctttgctgagaatgaacaacttgcattttgccctgccattgtgggtcctggtgtatactactcagatgataagatgcttcagaccaggatattctcttatgctgattcacaaaggcacagacttggaccaaactatctgcaacttcctgctaatgctcccaagtgtgctcaccacaataatcatcatgaaggtttcatgaatttcattcacagggatgaggaggtaagttaatgtttaatttcttatattttcttatttgttttctgtttgaaaatctggttgccttgttaactacttagtgctgttagattattcatgcacatgctgattgggtaatattgctgcctattcttttgtcattattcagtatcacatttttttcttgtgactgagctctgcaaatttataggtcaattacttcccttcaaggtatgatcctgttcgtcatgcagaaacgttccccatacctcctgctatctgcagtggaaggcgtgaaaaggttagttttgatcaattgcttaatatgaaaacgtggaacatctgttagggaaggaatccacctgccatgggtttcagtttagattgcagagttcatttcagtttttgtttgtctaagaaacctaaccacagattttagaattctaataaaaatttctaaaatgttcaaagcatttgacataatgtatatttctttgatatgcttttcta

SEQ ID NO: 1238 - DNA, 559 bp, Glycine max
aggttcctgttataaaatatgatatgatcaatgtgaaatgtgtttggtgatgtctaatgttgggttctttctgctggttttttactaatttgcaggcaagatagatttgctcgccgatgggttgatgctttatctgacccacgggtcacccatgagatccgcagtgtctggatatcatactggtctcaggctgaccgttctctaggccaaaagatagcttctcatctcagcacgaggccaaatatttaatgttgttgccaactccagaatgattgttagagttgcagacgtgcaaagagtacgataaggatgtgattttggattacctgaaagaacttatccttttcttgcaatattatgttgtgtgtacccataactccatgaatgcaactcgttgacctatctcaataaatgccgtttgtatttgttagtatttaaaaaagacaaagggccttacaaagaaagatgtatagtcgtttttgcgttttcaatgctccatataacagttcatgcaaccttatagctagatttataagtgtcacttaaagataatttactg

SEQ ID NO: 1239 - DNA, 248 bp, Glycine max
caagaaccacatccaagagaattggaggatccttgggattgggtttaagagcatgaaccatatcccaagaaccacatccaagagaattggaggatccttgacttcttctctcactttccagaaagccttcacatgttcacctttttatttgatgatttgggtgttccacaagattacaggcatatggatggttttggagttaacacatatacgctgatcaacaaggctgggaaagcagtgtatgtgaa

SEQ ID NO: 1240 - DNA, 1344 bp, Glycine max
  unsure (1)..(1344): unsure at all n locations
ctcagaagtgaccccaatatacttagccatatctttacttcccaaaacttgctctacaatgagtttccttcgttcttttgcaagaaacaaggatatatcaaaagtaggacgcagaggtatccattgcatgcagaaactatgtgcagaaaaaatatctcctgattcactagagaaggcccaaaatcgtgtgatagatgctgcactcacacttgttcgagaaaatacaaggcttaagaaagaactcgtgcatagtttgggaggtgctgtggcaacttcaactcttcttggagttcctttgggtcataattcatcgtttcttgaagggcctgcatttgcacctcctttcattagggaaggtatttggtgtggtagcgcaaactccacaactgaagaaggaaaggatttaaaggacttgcgaatcatggttgatgttggtgatatccctattcaagaaatgcgagattgtgggataggagatgagagactcatgaaagttgttagtgattctgtcaagctagtgatggaagaggatccattacgtcccttaattttgggtggtgatcactcaatctcatatccagttgtcagagccatatctgagaagcttgggggaccagttgatgttcttcattttgatgcacatcctgatctctatgatgaatttgaaggaaattattattcgcacgcttcttcttttgctcgaatcatggagggtggttatgctcgtcgactcttgcaggtcggtataagatcaataaacaaagaagggcgtgaacaagccaaaaagttcggggtagagcagtttgaaatgcgacatttttcgaaagatcgtccatttttggaaaacctgaatctaggagaaggtgctaaaggagtatacatttcaatcgatgtggattgtcttgatccagggtatgctgtaggagtgtcccactatgaatcaggaggtctttctttcagggatgttatgaacatgctgcaaaatctcaaaggtgacattgttggtggagacgtggttgaatacaacccacaacgtgacactcctgatcgtatgactgccatggtagctgctaagtttgtgagagaactcgctgcaaagatgtcaaaatgataactattaattctgcctcgtgtgtgtgacatttagtttacttcaatgcactcaacttttcaatttatagtgttgttgttatgaataaataatacatgcactattaccctgtttacactaacagtgtaaagatgatgtatgtgtataagactaagttttgttgtgttctattagaagtattaatcttgttaaaaaaaaatgtatttgtcatgtgaaggaaannnnnnnnnnnn

SEQ ID NO: 1241 - DNA, 1440 bp, Glycine max
atccaatccaaatttataaaagtagaactccaagtataatcagcaccacttccattctcacactacttactctctttctctctctaaaggtttccgctgttctcttccaacttccaagaaatgtcgattatatcacgcagaggcatctgttacatgccaagactagatgcagcaaaagtatctgctgctttgctagagaaaggccaaaatcgtgtcatagatgcttcacttacacttattcgagaaagagcaaagcttaagggagaacttgtgcgtgctttgggaggtgctaaagcaacttcaactcttcttggagttcctttgggacataattcatcgttccttcaagggcctgcatttgcacctcctcgcattagggaggccatttggtgtggtagcaccaactcaacaactgaagaaggcaaggaattacaagatgcacgagtgctaactgatgttggtgatgttcctatccaggaaattcgagattgtggggtagatgatcacagattaatgaatgtaattggtgaatctgtaaagttagtgatggaggaggatccattatgtcccttagttttaggcggtgatcactcaatatcatttccagttatcagagctgtctctgagaagcttggaggaccagttgatgttcttcatcttgatgcgcatcctgataactatgatgcctttgaaggaaacatttattcacatgcttcttcttttgctcgagtcatggagggtgactatgttcgacgtctcttgcaggttggtattagatcaataacagctgaagggcgtgcacaagccaaaaaatttggtgttgagcaatatgaaatgcgaacattttcaagggatcgcccctttctagagaacctgaaactaggggaaggtgttaaaggtgtatatatctcaatagatgtggattgtctcgatcccgcctttgctccaggagtgtctcacatagagccaggaggtctttctttccgtgatgttctcaacatcctgcacaatcttcaaggcgctgttgttgctggagacgtggtcgaatttaacccgcaacgtgataccgttgatggaatgactgccatggtagctgctaagctggtcagagaactggctgcaaagatttctaaatgatgatctcctgcctccccctgatctatacttcaacccacccgttccctaaaatgcacctgaaaggataactttccagaatggcatccaattttcactacatttaatttggagcattcatagacgaacatggtttataattcaaatgtttttttgtaggactgttggttttctgatgagttgcagttgtacttgtttttgcagtttcgaagttctgcaaggacttcgcaatcattccaatagtatcttttgcatgtttaagtttttgatataaagataaaaaagaatgattacatatgcagcaac

SEQ ID NO: 1242 - DNA, 1256 bp, Glycine max
cggtccaccacctagtaaatggaagggcacctgccaaacttctaaaaatttcacatgcaataataaaatcattggggctaagatttacagcgcgggtcgattttttagcaaggatgatccaaaatctgtgagggatatagatgctcatggcactcatgtagcatcaacagcggctgggaatccagttagcacagctagcatgttaggccttggtcagggaacatcaagaggtggcgtgacaaaagcacgcattgctgtgtacaaagtgtgttggtttgatggttgtactgatgcagacatacttgctgcatttgatgatgcaattgcagatggggttgacataataacagtttctcttggagggttcagtgatgaaaactactttagagatggaatagccattggagcatttcatgctgtgagaaatggagtattgacagtaacttcagctggaaacagtggtccaagaccttcctccctgtccaacttttcaccttggtcaattagtgtggctgctagtaccatagacaggaagtttgttaccaaggttgaattaggtaacaaaatcacctatgagggtacctcaataaatacatttgatctcaagggagaattgtatcctataatttatggtggagatgcaccaaacaaaggcgaaggcatagatggatcatcatcaaggtattgctccagcggttcgttggacaaaaaattagttaagggtaaaattgttctctgtgagagcagaagcaaagcactaggccctttcgatgctggtgctgttggggcattgatacaaggacaaggttttagagatcttcctccctctcttccattgcctggatcttaccttgccttgcaggatggtgcctctgtatatgactacataaactctacaaggactccaattgcaaccatatttaagactgatgagacaaaagatacaatagctcctgttgtggcttctttctcttcaaggggtccaaacattgttacacctgaaattctcaagccggatttagtggctcccggagtttccattctagctagttggtctccagcttcccctccttctgacgttgaaggtgacaacagaacattgaatttcaatattatctcaggaacttcaatggcttgtccacatgtttctggggccgcagcgtatgttaaatcatttcatccaacatggtctcctgctgctattcgttcagctctaatgacaacagctaaacaacttagtcccaagacccatcttc

SEQ ID NO: 1243 - DNA, 1480 bp, Glycine max
atattttatttgcactactactactactttatttaagcagaagcaggcgagtgaggaagagtgaagagcgaagagaatggctcccaagggtttaacctttctggctgtgttaatatgcgtttcagcactgtcactgagtccttctgttgcggaggaagggcaaaataatggccttgttatgaacttctacaaggaatcatgccctcaggctgaagacatcatcacagaacaagtcaagcttctctacaagcgccacaagaacactgctttctcctggctcagaaacatcttccatgactgtgctgttcagagttgtgatgcttcactgttgctggactccacaagaaggagcttgtctgagaaggaaacagatagaagctttgggttgagaaatttcaggtacattgagaccatcaaagaagctttggaaagagaatgccctggagttgtttcctgtgctgatatcctcgttctctctgccagagatggcattgtttcgctaggaggtccccatatccctcttaagacaggaagaagggatggtagaaggagcagagccgatgtggtagagcagttcctcccagaccacaatgaatccatttctgcagttcttgacaagtttggtgccatgggaattgacacccccggcgtagttgcattgcttggagcacacagtgttggtcgaacccattgtgtgaagttggtgcaccgtttgtacccagagattgatccagctctgaaccctgaccacgtccctcacattctgaagaagtgccctgatgccattccagaccctaaggccgtgcagtacgtgagaaacgaccgtggcacccccatgattctagacaacaattactacagaaatatattggacaacaagggcttgttgatagtggatcaccaactagccaatgacaagaggaccaagccttatgtgaagaaaatggccaagagccaagactatttcttcaaggagttctctagagccattaccttgctctcagagaacaaccctctcactggcacaaagggtgaggtcagaaagcagtgcaatgttgccaacaagcaccatgatcaggacccttgaattttcctccccttgtctatgatcgaggaagaaaatctgtaatatattatgcaaaaaataattaaggtcttttcctttaaatgggctggttcaatgaaccgagaccactgcaggttcatggggatgggaggattaagaggctatgttttttaatcttccgatgttactgttgttttttttttaatttcaataaggatattatatatgtagtactatgcaagtagcttagagttgggtagaagggcatgttcatggtgttaattatgttatgtatgcgtgtgagtgctgttatgatggcagtgacaatgcttatgatattcatactcataaagctaggttgttctttctaaataaataaatcatggcccatgggcattatacactgttagcact

SEQ ID NO: 1244 - DNA, 1523 bp, Glycine max
tgccgtaccgaaccggaagtttccggctcgaccgtacgcgtccgttcggatgagacaacacaagggggagcaagagtgaagagcgaagagaatggctcccaagggtttaatctttttggctgtgttatgcttctcagcactgtcactgagtcgttgtcttgcggaggataatggacttgttatgaacttctacaaggaatcatgccctcaggctgaagacatcatcaaagaacaagtcaagcttctctacaagcgccacaagaacactgctttctcctggctcagaaacatcttccatgactgtgctgttcagagttgtgatgcttcactgttgctggactccacaagaaggagcttgtctgagaaggaaacagatagaagctttgggttgagaaatttcaggtacattgagaccatcaaagaagctttggaaagggaatgcccaggagttgtttcctgtgctgatatcctcgttctctctgccagagatggcattgtttcgctaggaggtccccatatccctcttaaaacaggaagaagggatggtagaaggagcagagccgatgtggtagagcagttcctcccagaccacaatgaatccatttctgcagttcttgacaagtttggtgccatgggaattgacacccccggcgtagttgcattgcttggagcacacagtgttggtcgaacccattgtgtgaagttggtgcaccgtttgtacccagagattgatccagctctgaaccctgaccacgtccctcacattctgaagaagtgccctgatgccattccagaccctaaggccgtgcagtacgtgagaaacgaccgtggcacccccatgattctagacaacaattactacagaaatatattggacaacaagggcttgttgatagtggatcaccaactagccaatgacaagaggaccaagccttatgtgaagaaaatggccaagagccaggactatttcttcaaggagttttctagagccattactttgctctctgagaacaaccctctcactggcacaaagggtgagatcagaaagcagtgcaatgctgccaacaagcaccatgaggagccttaattgcttcccgcttaatttgggccttgaattttcttccccttctctatgtggaagaaatctgtaagatattatgcaaaaaataattaaggtgtttttctttaaatgggttggttgattggttcaatgaaccgatcaagaccacagcaggttcatggggatgcgaggattaagacgctttgttttttaatcttccgatgtcactcttgtttgttagtttgtttttttattttttatttcaataagtactgtgcaagtaggttagagttgggtagaagggcatgttcatggtgttaattactatgttatgtatgcatgtgagtgctgctatcgatggcaagatgtcaatgtatgcgtgtagtgctgttatcgatgagagtgaaaatgtttatgatatccacactaataaagctagcttgttcttgctacataataaata

SEQ ID NO: 1245 - DNA, 417 bp, Glycine max
  unsure (1)..(417): unsure at all n locations
atttccggggtcgatcccacgcccgtccgctccacgtcgtctcgtcccacgtcgtctcgtaccggctttgcgagaaagacccgacagaagggggagaagtgaagaagaatgggctcccaagggggtttaacctttctcggctgtgttaatatgcccgtttcagcactgtcacctgagcctccttctgttgcgggggatagggcccaaaataatggccctttgttatgaaccttctacaagggaatcactgccctcttggctgaagacattcatcaccagaacaaagtgcaatgctgtcttctgacgaagcgtcgcacagagagccacttgcttcttctgcctggctgcaggggacccatgcttccatgcagcgtgtgcttgttcagagagttgtgatgcttcagnctgttgctggac

SEQ ID NO: 1246 - DNA, 449 bp, Glycine max
cattgccagtcccatcataacaccactcacacgcatacataacatcattaacaccatgatcaggacccttgaattttcctccccttgtctatgatcgaggaagaaaatctgtaatatattatgcaaaaaataattaaggtcttttcctttaaatgggctggttcaatgaaccgagaccactgcaggttcatggggatgggaggattaagaggctatgttttttaatcttccgatgttactgttgttttttttttaatttcaataaggatattatatatgtagtactatgcaagtagcttagagttgggtagaagggcatgttcatggtgttaattatgttatgtatgcgtgtgagtgctgttatgatggcaaaaaaaaaaaaaaaaaaaaaaaaataataaattaattattataattataatatttaaataattttttttttttttttt

SEQ ID NO: 1247 - DNA, 3837 bp, Glycine max
  unsure (1)..(3837): unsure at all n locations
cttgaaaggccgtttaggtccaggcatgatgataacggttgatttacttggcggtcagcagttgtagcatcacccacttggaggtctatgagaatacagaagttaaaaaacgagtagccttatcaagcccatatgggaactggatcaaggaaaatttgcggactttgaagctcgggaacttcctttcagcctctgtgttggacaatgaggcagtattaagacaccaacaggcatttgggtactctagtgaagatgtccagatggtgatcgagagtatggctgctcaaggaaaggagcccacgttttgcatgggagatgatattccattggcagcattgtctcagaaacctcacatgctttttgattatttcaagcaacggtttgcacaggttacaaatcctgcaattgatcctcttcgagaaggattggttatgtctcttgaagtgaatattgggaagagaaggaatatattggaaactgggccagagaatgcttcacaggttatgttatctagtccagtattgaatgaaggggagcttgagtcattactaaaagactcatacttgaaaccacaagtattacctacattttttgatataagtaagggcattgaaggttccttggagaaagcattaaataagctttgtgaggctgcagatgaagctgtcagaaatggttcccagctgcttattctatcagaccattcagaagcactggaaccaactcatcctgcaattcccatactccttgctgttggtactgttcatcagcatctaatccagaatggcctgcgaatgtcagcttcaattgtagcagatactgctcagtgctttagcactcaccagtttgcctgtttaataggatatggtgcaagtgctgtgtgtccgtacttggcattggagacatgtcggcaatggcgtttgagtaataaaactgtaaatctgatgaggaatggaaagatgcctactgtatcgattgaacaggcacagaagaactattgcaaggctgtaaaagcaggtcttcttaaaattctttccaaaatgggcatctcattgctatcaagttactgtggtgcacaaatatttgaagtctatggattagggaaggaagttgttgatcttgcattcagaggaagtgtgtcgaaaattggtggattaacttttgatgaggtggcaagagagactttgtctttctgggtgaaggcattctctgaagatacagctaaaaggttggaaaattttggatttatacagttcagaccaggaggggagtatcatgcaaataacccagaaatgtcaaagttgctccacaaagctgttcgtcagaaaagtcaaagtgccttttcagtttatcagcaatatttggctaatcgacctgtgaatgttctccgtgatcttcttgaattcaaaagtgatcgtgctccaatacctgtggggaaggttgaacctgcttcatctattgtgcaacggttttgcacagggggcatgtcacttggagctatttccagagaaactcatgaagcaattgcaattgccatgaacagaataggtggaaaatcaaattcaggggaaggtggggaggatcctgttcgctggaaaccacttacagatgtcgtagatggttactctccaactcttcctcatcttaaaggtcttcaaaatggggatactgcaactagtgccatcaagcaggttgcttctggaaggtttggtgtcaccccaacattcttggcaaatgctgatcagttagaaatcaagattgcacaaggtgcaaaacctggtgaaggtggacaattgcctggaaaaaaagttagcatgtatattgctaggttgagaaattctaaaccaggagttcctcttatatctccacctcctcatcatgacatttattctatcgaggaccttgctcagttgatctttgatcttcatcaggtgaaccctaaggccaaggtgtctgtaaaactggtggctgaagctggaattggcactgttgcatctggggttgcaaagggcaatgctgacattatacagatttcaggacatgatgggggaacaggagcaagccctataagttccatcaagcatgcaggaggtccttgggaacttgggcttacagaatctcaccagacactcattgaaaatggacttagagaaagggttattctcagagttgatggtgggtttagaagtggagtagatgtcatgatggcagcaataatgggtgctgatgaatatgggtttggttcagtggcaatgattgctactggatgtgttatggcccgcatttgccacaccaataattgcccagttggtgttgccagtcagagggaagagttgcgtgcacgctttcctggtgttcctggggaccttgtcaactactttttgtatgtagctgaggaggtaagaggcatattggcacagctggggtatgagaagttggatgatgtgattggccggactgacttgtttcaaccacgagacatatctctagcaaaaactcagcatctagatctgaattatatcctctctaatgttgggttgcctaaatggagcagtaccgaaattaggaatcaggagcctcataccaatggtcctgttctggatgatgttttgctagcagacccagaggttgccgatgccattgaaaatgaaaaggtggttaataagaccataaaaatatacaacattgatcgtgctgcatgtggacgtatagctggtgtcattgcaaagaagtacggtgacactggttttgctggacagttgaatataacatttacaggaagtgctgggcagtcatttgcatgctttctgactcctggaatgaacattcgccttgttggagaggctaatgattatgttgggaagggcattgctggaggtgagttggttatcactccagtcgacaagaccgggtttgaacctgaggatgcagctattgtagggaacacttgcttgtatggtgcaactggtggacaggtcttcgttagagggagagctggtgaaagatttgctgtcagaaactcacttgctgaagcagtggtggaaggcgcaggagatcattgttgtgagtacatgactggtggctgtgtggttgtcttgggaaaagtgggtagaaatgtagctgctggtatgactggagggttggcttacattcttgatgaggacgatactttcatacccaaggtaaacagagaaattgtaaaaatccaacgggtgtcagcccctgttggacagatgcaactgaagagcctgattgaagctcacgttgaaaaaaccggtagtaccaaaggtgcggctattctgaaggactgggataagtatttatcactattttggcagctggttccacctagtgaagaagatacccccgaggcaaatgccaaatatgacacaactacggcagatcaggtcacttatcagtctgcttagggtaacaatctaaggttacattacattgattacgccaggctatggagccattgttgtgtccctgatttgtacaggaattggagaggctatcaattaggtggaaatgctagccaaaatatgggattaaactatcccttgaaaccatggtgctgcatgtattctcaagatcatttttgccagcagtatgaggaaccccgtatacatccatctgaagcattagcattctcttttgtatagccatgtgaaaggaaaaaagctgtatataaaatgcagttgattcgaatttgattgggacttttgtggacggtcaaaataaatagttggggcttgatatgcctgggtcccctttgctctcctgaattaatgaaaaattattgttttttccttgcacgnnnnnnnnnnnnnnnnn

SEQ ID NO: 1248 - DNA, 477 bp, Glycine max
cttcgacctgctaggtattgtcgaacatcagacaatatggtctatgttgcctctgaggtgggtgttgtgccagtggatgagtcaaaggttgtcttgaaaggccgtttaggtccaggcatgatgataacggttgatttacctggcggtcaggtctatgagaatacagaggttaaaaaacgagtagccttatcaagcccatatgggaactggatcaaggaaaatttgcggtctttgaagctcgggaacttcctttcagcctctgtgttggacaatgaggcagtattaagacaccaacaggcatttgggtactctagtgaagatgtccagatggtgatcgagagtatggctgctcaaggaaaggagcccacgttttgcatgggagatgatattccattggcagcattgtctcagaaacctcacatgctttttgattatttcaagcaacggtttgcacaggttacaaatcctgcaattgat

SEQ ID NO: 1249 - DNA, 401 bp, Glycine max
gtttgtttcttcaggtgcactcgcatgttgatgtggtggatttcagcagcaacaagtgggtagatcagattaaaatgccaaaggaaatggctcattcacatttgggcatagcatctgatgggaggtatatatacattatctcaggacaatatggtatccaatgcagtgggcctactaccgcatccttttcgttagacactgcaacaaagaaatggaaacctttccataatgacgttggcagtggaagcattttgatgtgaagctgaaggactctaagacccttttcttcggtgagaagcccgtcaccgattttggattcaggaaccctgaggaaatttcatggggtgaggttggagctgattatgctgatgagacaactggcgtattcactgacaaggaca

SEQ ID NO: 1250 - DNA, 854 bp, Glycine max
agaagactgttgatggtccttcaaacaaggactggagaggtggaagagctgcttcgttcaatataattcctagcagcactggagctgctaaggtactacctaattgttatatttaaaattatacatacattgctcctttagttggatggtgtaaattttattctaaagctttttgttctttattgaatgttgaatttgggataaacaacaggctgtaggaaaagttcttccagcgctgaatggtaaattgactcatatcgtccttccgagtccccactgttgatgtttcagttgttgacctaactgtcaggctagagaagccagcaacctatgagcaaatcaaagctgctatcaaggaggaatcagagggcaaactgaagggtattttgggatacaccgaagatgatgttgtgtctactgattttgttggtgataacaggtctagcatatttgacgccaaggccggaatttctttgaatgaaaactttgtaaaacttgtttcctggtatgacaacgaatggggttacagttcccgtgtgattgatttaattgcccacattgcatccgtggcttaaacagttgaggctgatcttggatatcatcgctaaaccgttccaaatttttatcttaatcgagtttattttagtgtgaattcggaataaacacatgtgttgctgtgtgtgatatcattgaaaaacacagtgcaatatttgtatttatatttttgagtttgatagacggccttaggtttttcctcctcttgtaagggacggttgactattctgtttcgtcatcacaatcataatataagcaacattttgttttcaaaaaaaaaaaaaaaaaaaaaggggggc

SEQ ID NO: 1251 - DNA, 906 bp, Glycine max
gacaggtttggcattgttgagggtttgatgaccactgttcattccatcactggtgagcctattgctcgcaatttgattggttgcatgccttttactgtgttacctattatgatatgtcttgcatatccggtttatgtttttgttttgtaaaccagctacccagaagactgttgatgggccatcagccaaggactggagaggtggaagagctgagttcatttaacatcattcctagcagcactggagctgccaaggctgttgggaaagtccttcctgctttgaatggaaaattgactggtatggcattccgtgttcccaccgtggatgtactctgtagtagacctcacggcgaggctggagaaggaagcctcatatgatgggattaaaaatgctatcaaggaggcatcagacggcaagttgaacggaattcttggttacactgaagatgatgtggtctccaccgacttagttggtgataacagatcaagtatttttgatgcaaaggctggaatcgcattgaataagaattttgtcaagcttgtctcttggtatgacaacgagtggggatacagttcacgtgtcaattgacctgcttgtaatcgttgccaagaagtctttttaaggttgtactgaaaaaaaagtagcttgtctagacattatgtgctggtgtctagctgcgatttagtgtcttcttgctcgtgcaaaaattgagaagtatgaataaatcggtttccggaaccagtgttgttaccctgttacgagcattaagctctttttttgttgcctcttctgtgtaggggatggagttttttggattcttatatacttgcagatgtactcggctctttgttgattctgattgcagacatttttgccctccatttttcatccaaaaaaaaaaaaaaa

SEQ ID NO: 1252 - DNA, 562 bp, Glycine max
atccttatctctcaccaacttccgctacttcctactccaaccactttcttttttcccgcagtcaacgggcaaggtcaagatcggaatcaacggatttaggaagaattggtcgtttggtggctagggtggctctgcagagagacgatgttgaactcgttgccgttaacgatcctttcattaccaccggttacatgacatacatgttctccaatacgacagtgttcacgggcactggaagcatcacgatgtcaccgttaaggatgagaagacccttctcttcggtgacaagccagtcactgtttttggacacaggaaccctgaagagatcccatggaagtcgactggagctgacatcattgttgagtccaccggagttttcaccgataaggataaggctgccgcacatttgaagggtggtgcaaagaaggttattatttctgcccccagtaaggatgcccccatgtttgttgttggtgttaacgagcacgagtacaagccagagcttgacattatttccaatgctagctgcacaaccaactgccttgccccgctcgccaggtta

SEQ ID NO: 1253 - DNA, 1394 bp, Glycine max
gaccaaatcacgctctaattacactttctatctcattcagcaatctcattttcgttcggttcaaacactctctctcatggcatcagataagaagagtaggatctggcatcaacgggtttggaaggattggccgtttggtggccagggtttgctcttcagaggaatgacgttgaacttgttgctgtcaacgatcctttcatcaccactgattacatgacatacatgttccagtacggcaacgttcaatggccagtgcaagaattttgatgtgaaggtgaaggactctaagacccttctctttggtgagaagcccgtcaccgtttttggaatcaggaaccctgaggaaattccatggggtggaggttggtgctgattatgttgttgagtcaactggcgtattcacttgtcaaggactaggctgctgctcacttgaagggtggtgccaagaaggttgtcatttctgccccaagcaaagatgcacccatgtttgctgttggtgttaacgagaaggagtacaagccagagcttgacattgtttccaatgctagctgcactaccaattgtcttgctcccctcgccaaggttatcaacgaccgatttggaattgtggagggtcttataaccactgttcatgccatcacagctactcagaagactgactgatggtccatcaaataaggactgcgttggtggaagagctgcttcccttaataataatcccaagcaacactggacctgctaaggctgtaagaaaagttcttccagcactgaatggtaaattgactggcatgtccttccgagtccccactgtagatgtttcagttgttgacctcactgttaggctagagaagccagcaacctatgagcaaatcaaatctgctatcaaggaggaatcagagggcaaattgaagggtattttgggttacacagaagatgatgttgtgtctactgattttgttggtgataacaggtctagcatatttgacgccaaggccggaatttctttgaatgacaactttgtaaaacttgtttcctggtatgacaacgaatggggttacagttcccgtgtgattgatttgattgtccacattgcatccgtggcttaaagaattgagtctgagcttggatatcatcgctacaccgttccaaatttttatcttaatcgagtttattttagtgcgaattcggaataaacactatgtgttgctgtgagaagatatcattgaaaaacagtgcactatgttgagttggtagacggccttataggttcttcctctcgcaagggacgattgactattctgtttccggtatcataatcatctagtataagcaacattttgttttccacgtctctttgttataattaagttaataatataatattgttaacataa

SEQ ID NO: 1254 - DNA, 1574 bp, Glycine max
ctaggagtcacgcacttcacttcgcccatttacctgtcattgcggtcttttactcttctcaataccttattaaaaccctatctcactcactcactcacaccgttccatttctcaacaacttctgctacttcctactccaaccgcagcttatgctccgcagttatcatgagcacaggtcaagatcggatatcaacggcatttggaaagaattggccgtttggctgaccacgagtcgctctgcagagaccacgatgttgaactctgctgccgctaacgacccttttcattaccaccgattacatgacatgacatgtttaaatacggacagtgttcatgggagcactggacagcatcacgatgtcatcgttaaggacgagaagacccttctgttcggtgacaagccagtcaggggggtgtggacacaggaaaccttaaagagattccatgggggtcaactggagctgatatcattgttgagtccaccggagttttcaccgataaggacaaggcctctcggacatttgaagggtggtgccaagaatggtattattgtctggccccagttaggatgcccccatgttcgttgttgggggtaatgagcacgaatacacgccagagcttgatattatttgcaacgctagctgctcatccaactgtcttgctccactcgccaaggttatcaatgacaagcttggcattgctgaaggttcgatgaccactgttcattccatcactgctacccagaagactgttgatgggccatcatccaaggactggagaggtggacgagctgcttcatttaacatcattcctagcagcactggagctgccaaggctgttgggaaagtcctccctgctttgaatggaaaattgactggtatggcattccgtgttcccaccgtggatgtctctgttgttgacctcacagtgaggctggagaaagaagcttcctacgatgaaattcaaaaatgctatcaaggaggaatcagagggcaagttgaagggaattcttggttacactgaagatgatgtggtctccaccgactttgtgggcgatagcagatcaagtatttttgatgcaaaggctggaattgcattgaataagaactttgtgaagcttgtttcttggtacgacaacgagtggggatacagctcacgtgtcattgacctgcttgtattcgttgccaagaagtctttttaaggtggtgtactgcaaagttgcttgtctacacattatgtgcttgtctagttgcgatttagtgtcttgctcgtgcaaaaacatgagaggtctgaataaatcggtttctggaaccagtggatttaccttgttaggagcattagctctattttggactttgcctcttgtggaggatggatggagtttttggatttttatatatttgctaatgtacttgtcgttattgattgttatagtagatatttggccgtcctctatttttccacgtggttctcgtatacttgtccatgttaagacagattccagtaatgacgtttcggtggtttatcgaaactaatggttacatggaccttttaattaaccttacactttcaat

SEQ ID NO: 1255 - DNA, 937 bp, Glycine max
  unsure (1)..(937): unsure at all n locations
agaagagtacgacgngcatgcacccggtacctaaggttcgccgtgaacctgatgataaacttgtatttctctccttaaaacccgacctcgacgtttgcctctctcagtctcagtctcagtttcagtttcggatctctctcttctctcacaccaatttccaggatttgaaacatggcagattcaaaatcaggattgaggaaaccagtgttcaccaaggttgatcagcttcgcccggggaccagtgggcacactttaactgtgaaggtggtcaatgctaagatggtgatgcagaaaggtcgttctgatggtcctcaatcccgtcaaatgcgaattgctgagtgctttggttggtgatgagactggaatgatcatattcaccgccagaaatgatcaagtggatacgatgacagagggagctactgtgatcctgcgtaacgccaaaattgacatgttcaaaggatcaatgaggcttgctgtggacaagtggggccgtgtggaactcacagaacctgctagtttcactgtgaaggaagataataacttgtctctcattgagtatgaactggtgaatgttgttgcggaatgacttattgggaatcctggaatttcttttgagaataaaacaaatccagcgaagaaatcttttgttttttgtctgagacatctcatcatgcccatcacattcaccttagtttaggaatagagatttgagcagctagtagtgccaacagttgcttcttacttttgcaacagactctggatcttgtagcttaaccactgaacagatggtcgctgtaattgcaacaagaaaatgggaattggcttccagatcatatgctttttgttttgctatctattgacaattttagattatgtgtatcagaattttatatatggcaggtgagtgtttatatttgacgtaatcctttttttagtc

SEQ ID NO: 1256 - DNA, 482 bp, Glycine max
  unsure (1)..(482): unsure at all n locations
cggaattgcagtttcgacctacacgtacgcgtacgcatgcgtgcacgcatacgaccggttgcgataagacaacatanggggcttctgagtcgcgtttgacttctctgcatgtttggatcgggttcacagacgaacaaggcatcatcgatctgttcgatgatgagagcctatggtgaagatgaagcctatgaggaggatgatgaggaagcgccgattgatgagacagatatccaagtagtgcgttaaacctaggtcgcctctgacgctattacaattgcttatgttgtcgaatgggacacccagttgttagtggcactggtttctcctttttgatgtttgatacattttgattggattcaagtagtctatgttcgtctgatgctattagctcataacaatgttggtactgcttttgcgaatcaacatgatctcctatttgcatctctaaaaaaaagatgaaataaaaaaaaagacttacaagg

SEQ ID NO: 1257 - DNA, 585 bp, Glycine max
gttcagttcgcgatgagagccaagtggaagaagaagcgtatgaggaggttgaagaggaagcgccgaaagatgagacagagatccaagtagtgcgttaatccaagtagttgatttccgcagtacttggatcgaatcctcttttacttctcagcagcttcggctagggttcagaaacgaaaaagggttcggtgttctgttcgcgatgagagccaagtggaagaagaagcgtatgaggaggttgaagaggaagcgccgaaagatgagacagagatccaagtagtgcgttaaacctagtttgtttccgttgcttttacaattgcttatgttgtcaaataggacacccagttgttagtggcactggtttctcctttttgatgttttgatacattttgttggattcaagtagtttatgttcgtcttatgttattagctcaaaacaatgttgttactgcttttgctaatcaacatgatctcctatttgcatctctgattttcttagggttattataatttcacattatatctgcttcaattttttatgatctaattgatattcttaattccaaaaaaaaaaataaaagggcg

SEQ ID NO: 1258 - DNA, 424 bp, Glycine max
cccacgcgtgcgcggacgcgtgggcagccgcctcggctagggttcggaaacgaagaagggttctgttttcttttcgcgatgagggccaagtggaagaagaagcgtatgaggaggctgaagaggaagcgccgaaagatgagacagagatccaagtagtgcgttaaacctagtttgtttccgttgcttttacaattgcttatgttgtcaaataggacacccagttgttagtggcactggtctctcctttttgatgttttgatacattttgttggattttatttcgtcttatgttcttagctgaaaacaatgctgttactgcgtttgcgaatcaacaggatatcttgtttgcatttctgtttctctctttgctactttgtctgtacattgcagccacattctcttatgttgattttgattttggatt

SEQ ID NO: 1259 - DNA, 478 bp, Glycine max
  unsure (1)..(478): unsure at all n locations
agcccacgcgtccgttacgctgccaaaaaacacaaaaagggaaacctccggtggttctcagccgcctcggctagggttcggaaacgaagaagggttctgttttcttttcgcgatgagggccaagtggaagaagaagcgtatgaggaggctgaagaggaagcgccgaaagatgagacagagatccaagtagtgcgttaaacctagtttgtttccgttgcttttacaattgcttatgttgtcaaataggacacccagttgttagtggcactggtctctcctttttgatgttttgatacattttggttggattttatttcgtcttatgttcttagctgaaaacaatgctgttactgcgtttgcgaatcaacaggatatcttgtttgcacaaaaaaaaaaaaaaaaaaaataaaaaaaaagttataaaatataantntattttaatttattatttttaatttttttttttttaatattattt

SEQ ID NO: 1260 - DNA, 686 bp, Glycine max
accagggctagggttcggaaacgaagaagggttctgttttcttttcgcgatgagggccaagtggaagaagaagcgtatgaggaggctgaagaggaagcgccgaaagatgagacagagatccaagtagtgcgttaaacctagtttgtttccgttgcttttacaattgcttatgttgtcaaataggacacccagttgttagtggcactggtctctcctttttgatgttttgatacattttgttggattttatttcgtcttatgttcttagctgaaaacaatgctgttactgcgtttgcgaatcaacaggatatcttgtttgcatttctgtttctctcaaaaaaaaaaaaaaaaaaaaaaaaaaaaaaaaactcgagtttttttttttttttttttttatgaactctttctacacaagcccaactgtgctttggtaattacaatctttgtagtggtataagttaatttcgtctgtacatctcaatatcaacgtgtgtcagtaaaatttacatatctaaaaaaaccagccctcactcaaccaaccataatgcaaaattttcaagcttctttttcatgtgctgggtttatcagccaagctaaaaacaccaactcctcgctcaaagtcgtggtcagctgtaaatgacaattatatagaatgcaagcatgtttgttgtctttctctttccaag

SEQ ID NO: 1261 - DNA, 358 bp, Glycine max
acggtttcgacactcgcgtctcagcctcagtttcggatctctcacttctctcaccaatttccaggtcgcattccaatcttcaatctcctttcccttttccttcaatctatttgtttccttttcactctcataactcgattttcatggaaaaaaaaaaacaaaaaaacttcgctctttattgttgggtttctcgaaatttttatagttttttttcccgtgaattttatttgaaatttctcaagtatgtttgatggaattggaaaattggtatgagtttggatcttatactctatccatgttactaacttgatattattatcaatatttgacaccgagatattgaaaatttcaaaacctt

SEQ ID NO: 1262 - DNA, 538 bp, Glycine max
gggcccgggcgggggagcctcctccttgggaacgaacccgggccgaaggtgtgccggtacgaacttgtccgtcttgggcggctgaggagagagcaagggcaagtccttgtcggggctggaaacaacggggagcgacaagagcggtgaaccggttccggttcggcccaggggtcggagcgagatcgcgtccgatcctggttcggaccgggggtggttgtgctggatcggggtcgccggtggtggttgttgctgttgcggttgcggggtggagggcgtgatgggtttgggagtgggtcgggttaggacgaggatgcggccatggggtttgttgggggcggagacggcggaataggaagcggaagaagaagagagagaaggattcttgttgtgtgggttggtggtgttggttttttcgtagatgtggttgaagttaatagaggcgtacttgttgttttttgccatccaccacctttccagaaagcacaccaacagatcgaaaaatggcttccgccagaggaaaatgaaatcaacaatcaat

SEQ ID NO: 1263 - DNA, 835 bp, Glycine max
tgcaccacccccaccaaagaagccctacaaatacccatctcccccacctccagtgaagaagccctaccctcacccacacccagtctaccactctccaccaccaccccctaagaagccctacaagtacccatctcctcctcctccagtgaagaaaccctaccctcaccctcacccagtgtaccactctcctccacccccaccaaagaagccctacaaatatccatcacctccaccaccagttcacacctaccctccccatgttcccaccccagtttaccactctcctccaccaccaccatacgagaagccttacaagtacaagtctcctcctcccccagtccactctccacctccaccacactactactacaaatcaccccctccaccttaccactactaggtagcactttctcttcacacccccacatggatgcatacagaaagtgtgaaaatgaaagtcatggagtgggaagatgcatctgcagcttgcagatccacaaagaagtataaatgtttgattattatttagaggactctatctagttaaaattaaatagttattgtgcttttgttttattagacagttgtaaggcactgtgttctacatgtgtttgcagttgtctgcatgcattgttattttcaaagtccgctttatcaagctgacacagtcaaataaattattccctctctttgctagtgggaatagatttgttcctgtatctgatcgaggttttttatataatcgtcataatataataacaatttacgttcatttgatgaacgtaaattgttattatattatgacgattataaaaacaatttacgttcatttgtt

SEQ ID NO: 1264 - DNA, 429 bp, Glycine max
  unsure (1)..(429): unsure at all n locations
cacgggaagcgacaagagcggtgaccggttccggttcggcccaggggtcggagcgagatcggtccgatcctggnttcggaccgggggtggttgtgctggatcggggattatttagaggactctatctagttaaaattaaatagttattgtgcttttgttttattagacagttgtaaggcactgtgttctacatgtgtttgcagttgtctgcatgcattgtaattttcaaagtccgctttatcaagctgagtcagtcaaataaattattccctctcattgctgctagtgggggaatagatttgttcctgtatctaatcgagcttttttatataatcgtctaaatataataacaatttacgtccaaaaaaaaaaattaaaaactcgggggggccgctgactagtgattccgtcgccccgggatttaattcc

SEQ ID NO: 1265 - DNA, 716 bp, Glycine max
gctcccactcgtccacacaatgggacatcacaaaccaaacaacttctaacacatacactactctctctctctctcttattgtatggccgccaattccagtagccgagggatcaccgccttagggaagcgagtcgccaaccggatctggacttccaacgcacctcctctcacttcaaggaggggagcatacagtagcggctcagtgtacgacaagaaccctgatgatgagatccagtctgggcaggtcccagacgatgtgatccaggcggcaacacaatccggcaaatactgggccccacatccacagactggggtatttgggccccccggaggaggtgaccaaactgcttctgccattcactctgatgcgctggaggagaaggcctggtttcgccccaccagtctcgaggatttcgagaagcctcacacccttccttaacaaccattggaggacatcatattataatactaaattaaataaacactgtgtcagcctctcaggtgtgtccttggtttccttcctccaactagctgtttaattactcctcagcttcaaactgcactgcatgctccgctgtaccggagcataccagtaacatgaactaccttatgcatcatgtatttctcttttcatgcaactttaatgttagacttattattattatcaagattattgctactaaaaaaaaaaaaaaaaagggcggccgccgggacgt

SEQ ID NO: 1266 - DNA, 902 bp, Glycine max
gaggtacgaaaagcgaagggtcatttgcacgatctgtctggtgtctacctccacccttcttctcattatttttgtgtataaatatatccattttgatctatcatgggacaaatcaaacaactactactactactgcacacactctctctctctctctcattgtatggccgccaattcgagtagccgagggatcaccgccttggggaagcgagtcgccaaccagatctggacttccaaccccccctcagctcctctcacttccaggaggggagcaatagcagctgcatacagtagcagcggcgggtcagtgtatgacaagaaccctgatgatcagatccactctggggcggtcccagacgatgtgatccaggcaacacaatccggcaaatactgggccccacacccacagactggggtatttgggccccccggaggagcaggagacgaagctgcatctgctcccacttccacttccacttccacttctgatgccctggaggagaaggcctggtttcgccccaccagtctcgaggatttcgagaagcctcacacccttccttaacaacccctttctttctttcaattaggacatcatatatattatacaaaattaaataaataaacactagtcagtagtagtgactagtgaccaagtggaagtggtgtcaggtgtggttgcttagctttccctgtgtatacttatttagtcctcagcttcactccatctgcagggttgcttggttggttggtgatgcatgcatgctcccctctagtacatagcagctagctactcatgaactaccttatgatgcatcatgtatttctcttttcatacaacaacttttatgtcagacttattattattattatgcttatgctactactactgcttatactactaa

SEQ ID NO: 1267 - DNA, 2094 bp, Glycine max
tcacactttcttccttaattttctagctcttgctacgtacttgaattcaattagttattaatggctgagattgagggttctcccggaagctccatgcatggagtaacaggaagagaacaaacatttgtagcctcagttgcttctccaattgtccctacagacaccacagccaaatttgctctcccagtggattcagaacacaaggccaaggttttcaaactcttctccctggccaatccccacatgagaaccttccacctttcttggatctccttcttcacctgcttcgtctcgacattcgcagcagcacctcttgtgcccatcatccgcgacaaccttaacctcaccaaaagcgacattggaaacgccggggttgcttctgtctccggaagcatcttctcaaggctcgcaatgggtgcagtctgtgacatgttgggtccacgctatggctgcgccttcctcatcatgctttcggcccctacggtgttctgcatgtcctttgtgaaagatgctgcggggtacatagcggttcggttcttgattgggttctcgttggcgacgtttgtgtcgtgccagtactggatgagcacgatgttcaacagtaagattatagggcttgcgaatgggactgctgcggggtgggggaacatgggtggtggagccactcagctcataatgcctttggtgtatgagcttatcagaagagctggggctactcccttcactgcttggaggattgccttctttgttccgggtttcatgcatgtcatcatggggattcttgtcctcactctaggccaggacttgcctgatggaaacctcggggccttgcggaagaagggtgatgtagctaaagacaagttttccaaggtgctatggtatgccataacaaattacaggacatggatttttgctctcctctatgggtactccatgggagttgaattaacaactgacaatgtcattgctgagtatttctatgacagatttaatctcaagctacacactgctggaatcattgctgcttcatttggaatggcaaacttagttgctcgaccttttggtggatatgcttcagatgttgcagccaggctgtttggcatgaggggaagactctggaccctttggatcctccaaaccttaggaggggttttctgtatttggcttggccgtgccaattctcttcctattgctgtattggccatgatcctgttctctataggagctcaagctgcatgtggtgcaacttttggcatcattcctttcatctcaagaaggtctttggggatcatatcaggtctaactggtgcaggtggaaactttgggtctggcctcacccaattggtcttcttttcaacctccaaattctctactgccacaggtctctccttgatgggtgtaatgatagtggcttgcactctaccagtgagtgttgttcacttcccacagtggggtagcatgtttctaccaccctcaaaagatgtcagcaaatccactgaagaattctattacacctctgaatggaatgaggaagagaagcagaagggtttgcaccagcaaagtctcaaatttgctgagaatagccgatctgagagaggaaagcgagtggcttcagcaccaacacctccaaatgcaactcccactcatgtctagccatagcacttcaatcaaagaagatcatgaaacataattactgagcagtattgggaatgaagaaccatgagttgaagaattttctaataagaaatcttgtaacatgtagacatagaatgttctggttctggtttgcgtgtggtgtaagagttgtctacttgtggtaagtcataagtatcataatcagtatgtcaatgcagatcttgatgctgagtatcaatagtatcaaaaaaaaaaatttgatttaaaatcaattttaccattgctggttgtgtttaattatccagtaattaggcccttttatttgactttctggcttactatatggttgtctacttgtggcaagtcataagtatcataatcagaatgttctggtttgtatattctgtacttgaaatggaatccccaatgaaattgatattgtactctttgcaagttgca

SEQ ID NO: 1268 - DNA, 461 bp, Glycine max
caacagtttcttccttttctatctcttgctacttcaatcctcttgcttagttctctgtggttaatgttccacggttattaagataaaatggctgagattgagggttctcctggaagctccatgcatggagtaacaggaagagaacaaacattcgtagcctcaattgcttctccaattgtccccacagacaccacagccaaatttgctctcccagtagactcagagcacaaggccaagattttcaaactcttctccatggccaatccccacatgagaaccttccacctttcttggatctccttcttcacctgcttcgtctcgaccttcgcagcagcccctcttgtccccatcatccgcgacaaccttaacctcaccaaaagcgacattggaaacgccggggttgcttctgtctccggaagcatcttctctaggcttgcaatgggtgcggtctgtgacctatt

SEQ ID NO: 1269 - DNA, 1057 bp, Glycine max
  unsure (1)..(1057): unsure at all n locations
taaattgtgaccctcgtcacgccaacgctttcgttgttcccctttctctctcgttttttctcagaaccttctgagagttaaagcaaaaaacaaagagagagagagagagaaaatgatgaagccatcgatgctcagatctctccactccgccgccacccgcggcgcctctcatctcttccgccgtgggtacgcctccgagccggtgccggagcgcaaggtagccgttctcggcgccgccggcgggatcgggcagcctctctcccttctcatgaagctcaatcccctcgtttcgagcctctccctttacgatatcgccggaactcccggcgtcgccgccgatatcagccacataaacaccagatctgaggtagtggggtaccaaggtgatgaagagcttggaaaagctttggagggtgcagatgttgttataattcctgctggtgtgcccagaaagcctggaatgactcgtgatgatctttttaacatcaatgctggcattgttaagacgctgtgtactgctattgctaagtattgcccccatgcccttgttaacatgataagcaatcctgtgaactccactgttcctattgctgctgaagttttcaagaaggcaggaacttatgatgagaagagattgtttggtgttaccacccttgatgttgttagggcaaaaactttctatgctgggaaagccaatgttccagttgctggtgttaatgtacctgttgtgggcggccatgcaggcattactattctgccactattttctcaagccacaccaaaagccaatcttgatgatgatgtcattaaggctcttacaaagaggacacaagatggaggaacagaagttgtagaagctaaggctggaaagggttctgcaactttgtcaatggcctatgctggtgccctttttgctgatgcttgcctcaagggcctcaatggagtcccagatgttgtcgagtgctctttcgtgcaatccactgctactgaacttcccttctttgctttccaggggaggctttggaacggtggggtggtggaaggtctggcttgnggc

SEQ ID NO: 1270 - DNA, 307 bp, Glycine max
tatcgagccgattcggctcgagtttctcctcgagtcgcgcgttttctcaaaacgttgcaagagtcacagcaaaaaccaaagtgcgagacactaattgatgaagccatcgatgctcagatctcttcactctgccgccacccgcggcgcctcccacctctcccgccgtggctacgcctccgagccggtgccggagcgcaaggtggccgttctaggtgccgccggcgggatcgggcaacccctctcccttctcatgaagctcaaccccctcgtttccagcctctccctctacgatatcgccggaactccc

SEQ ID NO: 1271 - DNA, 268 bp, Glycine max
gtgaccctcctcacgccaacgccatagttgttcccttttcgctcgagctctctcgttttttcccaaaaagttgcaagagctaaagcaaaaaccagagtgcgagagaaaacgatgaagccatcgatgctcagatctcttcactctgccgccacccgcggcgcctcccacctctcccgccgtggctacgcctccgagccggtgccggagcgccaggtggccgttctaggtgccgccggcgggatcgggcaacccctctcccttctcatga

SEQ ID NO: 1272 - DNA, 655 bp, Glycine max
  unsure (1)..(655): unsure at all n locations
gggcctcaatggagtcccagatgttgtggagtgctcattcgtgcaatccactgttactgaacttcccttctttgcttccaaggtgaggcttgggaagaatggagtggaggaagttctgggcttggggcccctctcagattttgagcaacaaggcctcgaaagccttaagcctgaactcaaatcatcaattgagaagggaatcaaatttgccaaccagtaattgaacatgttatcacatacatgtctggtaggttactggatattcctttaagaaccaaatcaaattttgcattctcagaaccattgatgtattgttgtcggcagtggtgtggcggttttgttgttttatttagtgtaggtatacgccatggtttaataattaaagtctgagagctgtttgttgccaaagggattgaacgatcttaaaaccaggtttaggatttggcattccattaataatggtcccttttaactgtgtatggtttcacttaatgtaattgcagggtgttgtaccctttattcccatttttttctccttctttcttatgacaggtttccccttttaactnnnnnnnnnnnnnnnnnnnnnnnnnnnnnnnnnnnnnnnnnnnnnnnnnnnnnnnnnnnnnnnnnnnnnnnnnnnnnnnnnnnnnnn

SEQ ID NO: 1273 - DNA, 1826 bp, Glycine max
  unsure (1)..(1826): unsure at all n locations
ccttcttgtccgcggacgcgtgggagcaaatagggctattttctagatgaaatgggggtaccaaaactaaccagcttttgcttctcacttctcttactgttaatcagatattagcttgatagcttcagctgtttttcattgcatgaggagttctcatatggagatttcatcaatcagagggctacctgaactggggataatagaggatcctaacttcctccatcagtggcagttaaactctattgatacaactagcttaaaaggtgctgcttttggagatattttgcaaaagcactcattctctgataactcaaacttcaaccccaaaacatccatggaaacatcacaaactggaattgaaagatatgcaaaacagctcggtgataacagctggaatcacaacaaaagtcaacaacagacaccagagacacaatttgcttcatgctcaaatcttctttcatttgttaatacgaattacacaagtgaattgggactagtgaagcctaaggtggagatggcgtgtcctaaaattgacaacaatgctcttgcagacatgttgatctctcaaggaaccttaggaaatcaaaactatattttcaaggctagccaagagaccaaaaagattaaaacacgtcctaaactttctcaacctcaagaccacataatagctgaaaggaagcgaagagagaagctcagccaacggttcattgctctatctgctcttgttccgggcctaaagaagatggacaaagcttcggttcttggagaagctataaagtatttgaagcaaatgcaagagaaagtgagtgctcttgaggaggaacagaacaggaagagaactgtggaatctgtggtaattgtgaagaaatctcagctatctagtgatgccgaagactcttcttcagagactggtggtacatttgtcgaggcactacctgaaattgaagcaagattttgggaaagaaatgtcctcataagaatacattgtgagaagaataaaggagtcatagagaaaacaatcagcgaaattgagaaactccatctaaaagtcatcaatagcagtgccttgacatttgggagtttcatcctggatataaccattattgctcagatggatatggaattttgcatgacagtgaaggatcttgtgagaagtttacgctcagctttttcatatttcgtgtgaagagttatgcatttttcggtcgtccccgaaaggtacatgaagaataggagtgcaatcaatttatatatagcagttccatatatcaactatattatcaagtttaagttcttcaataataattctgtttccaaggccggtctgcaatgtctgccatccacaccatgtttgctctgaggttcatttttgcagaagggttttttgtagcgatattttcttcttgcatggtcaacttgttgacagtgttatattgtcacactcacaccctactgtttcaagagtgaacgtagagcttgttaggcattttttggcaggaagttggaaagttcaactacctgttttccatctatttcttacctaaatcctgacagacaggcctttgttgagtgacttattatcttcttttttttttttcaagtgttctcgagttacttttttatttgaaacaaaatatgcttgtaaaagtttggttgaaattggtagtgatggaataatcgtacttttttatatcttgtgtatatgctcgacatgttgcatggcctcaacatgatattctgcaaaagcattaatgctaccaatttaagcatatgtaaattgtaggtggtggattaagcttnnnnnnnnnnnnnnnnnnnnnnnnnnn

SEQ ID NO: 1274 - DNA, 1474 bp, Glycine max
  unsure (1)..(1474): unsure at all n locations
aacgacatctgtttctggctttgcgggttgagcaatggccggaaaacaggtcggcgagggcttagcggcgaacctcgctggaatgtcgaagaatcagctctacgatatcatgtctcagatgaagaatctgatcgaacagaaccagcaacaggccaggcagatcctcatccaaaatcctatgttaaccaaagcgcttttccaggcacaaattatgcttggaatggtgcaagcacctcaagtggttccaaaagttcagccaatggtttcacagaacaatcagcagtcagtacaaccaacacaaaaaccaaatattcagcctgctccattattgcctgggcttggtggtgcacaggatcaagcaggtgtatctcaaacccagattcctctgaggaaacaccagaaccaaccttcagtgccagtttcatctgctgttcctgcattgagtcatcaatctcagcccatggctgcacaatctttgacaatgccacaacagcctaaaggacatctggctccccaagtggctctagcgtctcttccacaatcatcacaacttccaaacataccttcgccttctcttcattcattgtcacaacctcttcatccaactcaaatgtcaactgcttccagtcacttacagcatccattgctgacacctggatttccacatatgcctctgccaccacagattagacaacctgcaatgccaaccttccatcctcaatatccccctcaaatgggtgcaaacttaggttttcaacatgctggtgcttctcacaatctttcgcagtccatgtttcatccaggcacaaaacctcctgctagtgttggatccacattcccacaggggcttccaagtcaaaaatcatctcagccaccttatcaggttggaaatgttccttcagggcccgagtttggcaatcaagctggaaatgctatgcaagtggacagaggggcttctttgatgcccggtccctcagataccctagcacatctttctggtcctcctggaccaccatatgtagtttctggtcagatgggtgctgctaatcagcctcttcggcctcctgcgttgacaccagatatggagaaggcactgcttcaacaggtcatgagcctcacaccggagcagataaatctccttcctccagaacaacgaaatcaagtgctgcagctacaacagatgttgcgtcaatgatgcaatacgcatacacaccatggaagttaggcaatctttaatccttccagtttggcagagattgttgtgcatatatatccaaattattggcctgccaagttctggagaaattaatacaagttcgtgtaacaaattgtagacaatagcattattttcttctggaatttggctccaattaaatatcagcctttagttgttggagctatttgcaaaacttctcaccatattccatattttattgttaattggttnnnnnnnnnnnnnnnnnnnnnnnnnnnn

SEQ ID NO: 1275 - DNA, 605 bp, Glycine max
gattcatcctggtacaaaaccttctgtttgtgttgggtccacattcccacaggggcagacaccacttccaggtcaaccatcatctcagccaccttatcaggttgggaatatgcctttagggcccgattttggcaatcaagctggaaatgctatgcaagtagatagagggtcttcttggttgcctggtccctcagaaaacctagcacatctttctggtcctcctggtcagatgagtgctgctgctaatcagcttcttcggcctcctgggttgacaccagagatggagaaggcactgcttcagcaggtcatgagcctcacaccggagcagataaatctcctgcctccagaacaaagaaatcaagtgctgcagctacaacagatgttgcgtcaatgatataatacgcatatatactcaccatgaaagttaggcaatctttaaagtttaatcctagtttggaagaggttattatgtcgtatatattcaaaccgattggctgccaagttttatagaaattaatacaaattcatgcaactaattatagaccatattattcgtttcttctgaaatttggcacgactgcatcttctcttagttttgtataatg

SEQ ID NO: 1276 - DNA, 1909 bp, Glycine max
aggaattcggcacgagtattgaacctctgcaactgcaaagaggatgtaaggaaaagggttcatggaacgattgacaagtttgctgagcgtggactccgttctttaggtgttgctagacaggaagtacctgagaaatcaaaagatagtcctggtggaccatggcaatttgttggtctgctaccattgtttgatcctcccaggcatgatagtgctgaaaccattcgaagagctcttaaccttggtgtcaatgttaagatgattactggggatcagcttgccattggaaaggaaacaggccgaaggcttggaatgggaacaaacatgtacccttcatcggcattgcttggccaagacaaggatgcttctatttcagctcttccagttgatgagttgattgagaaggctgatggatttgcaggagtatttcctgaacacaaatatgaaattgttaagaggctgcaagagaggaagcatatatgtggaatgacaggtgatggtgtcaacgatgctcctgcattaaagaaagcagacattggaattgctgttgctgatgctacagatgctgctagaagtgcttctgatattgtcctcactgaacctggtctgagtgtcattattagtgcagtgctcaccagcagggcaattttccaaaggatgaagaattatactatctatgctgtgtcaatcaccattcgtattgtgtttggtttcttgtttattgcgttgatctggaagtttgattttgcacccttcatggttttgattattgccatactcaatgatggtaccattatgactatatccaaggatagagtgaaaccatctccacttcctgacagctggaagctgagggagatatttgctactggtgttgtgctaggaagttacatggcactaatgacagtagtatttttctgggtcatgaaggataccgacttcttctcggacaagttcggtgtgaggtctataaggaacagccccggagaaatgatggcagccctgtacctacaagtcagtataattagccaggctctaatcttcgtcacaaggtcccgcagctggtcttttgttgaaagacctggtcttctcctactaggtgcattttttattgctcagttggtggcaacttttatagcagtgtatgctaactggggctttgcaagaataaagggaatgggatggggttgggctggtgtaatctggctgtacagtgtggtaacctatatccctcttgatttactcaaatttgctatccgctatattctaagtgggaaggcttgggataatcttttggagaacaagactgccttcactacaaagaaagactatggtaaagaagagagggaagctcaatgggcggctgcacagaggacacttcacggtcttcagcctccggaaacttccaaccttttcaatgacaaaaatagctacagggagctttcagagattgctgaacaagccaagagacgtgctgaagttgcaaggcttagggagcttcatactctaaagggacatgtcgagtcagtggtgaagctgaaggggcttgacattgacacgattcagcagcactatacagtttaaggagcttggacaagtttcaagaagaaccgtgcttttttgagaaaaaatcacatataaagacgaagaaagaccatgttcaatttgtctttaagttacataaaaaaatgagtcctgtgaaaatttgaatggcctctctcactgtctccatcttttctaggagatactatgctctttacgcaccaaataacataattggtagggtttactatcatctttttatctggtagtatgctagtgttattgcttactaagataatattaaaagctcaatacattggtattgacaccgttgctcaatattgaactcaatcttactctattttcctcc

SEQ ID NO: 1277 - DNA, 603 bp, Glycine max
caaagaagagagagaagcacagtgggcaactgcacagaggactcttcatggtcttcagccacctgaaacaaccaaccttttcaatgacaagaacagttacagggagctgtcagagattgctgagcaagctaagagacgtgccgaggttgcaaggctcagggagcttcatactctgaaaggacatgttgagtcagtggtgaagctgaagggacttgacattgatacaatccaacaacattatacagtttaaggagtttagataattcatgcagaacccgctttggtgcttgtccaagaacaagaacaacaaatataatgaagaccgaagttaatccgtctataaattaggatgaaggtccttttgtcaaaatctgaatggtttactcttctattccatctatgccagtagctggaggagatgctatgctctttaggtaccaaataacgtggttgataggatttacttgcatcttattttgggaatgttaatgataccaaggtcactaaagctctatatatttttttgtctgccgaacacccctcaatatattttcaatcttgattaatgttgctcaataaatcaaggaaaatgaacagattcag

SEQ ID NO: 1278 - DNA, 1248 bp, Glycine max
  unsure (1)..(1248): unsure at all n locations
cccacgcgtccgcccacgcgtccgcccacgcgtccgcccacgcgtccgcccacgcgtccgcggacgcgtgggtaatcagcatcaagttaggagatatcattccggccgacgctcgtcttcttgagggtgatcctttgagtgttgatcagtctgctctgactggagaatctctccccgtaacaaagagcccctcggatgaagtgttttcgggatcaaccgttaagaagggtgagatagaagcagttgtgattgctactggggtgcacaccttttttggcaaagcagctcatctggtggacagcaccaaccaagttggtcacttccagaaagtgcttacagcaattggtaacttctgcatttgctccatcgcggttggaataatcattgagctcatagtcatgtacccgattcagcaccgcaagtacagagatgggattgacaacctgttggttctcttgattggaggaattccaattgccatgccaactgtgttgtctgtcactatggctattggttcccacaggctttctcagcagggtgccatcacaaaaagaatgacagctattgaggaaatggcagggatggatgtcctatgcagtgacaaaactgggactctcaccttaaataagttgagtgttgacaggaacttgattgaggtgtttgctaagggtgttgagaaagagtatgttatccttcttgcagcaagagcttctaggactgaaaatcaagatgccatagatgctgcaattgttggcatgcttgctgacccaaaggaggcacgaactggtatcagggaggtccactttcttccattcaatcctgtggacaagaggactgctctaacttacattgattctgatggaaattggcatcgatctagcaaaggggctcctgagcagatattgaacctctgcaactgcaaagaggatgtaaggaaaagggttcatggaacgattgacaagtttgctgagcgtggactccgttctttaggtgttgctagacaggaagtacctgagaaaaacaaggatagtcctggtgcaccatggcaatttgttggtctgctaccactttttgatcctccaaggcatgacagtgcggaaaccatcacaagagctctgaaccttggtgtgaatgttaagatgatcacccgtgatcagttggcattggcaaagaactggccgaggttgggatnggacaaacatntcccacttcttcatgttggcaaagnaggtgtgttttcacaggccc

SEQ ID NO: 1279 - DNA, 505 bp, Glycine max
agaagagagagaagcacagtgggcaactgctcagaggactcttcatggtcttcagccacctgaaacaaccaaccttttcaatgacaagaacagttacagggagctttcagagattgctgagcaagctaagagacgtgccgaggttgcaaggctcagggagcttcatactctgaaaggacatgttgaatcagtagtgaagctgaagggacttgacattgatacaatccaacagcattatacagtttaaggaatttggacaaccttcaagcagaacacactttggtgcttatccaagaacaagaacaacaaatgtaatgaagacctaagttaatccgtctttagattaggatgaaggtccttttgtcagtcaaaatctgaatggtttactcttctattccataccaaataacgtggttgataggatttacttttcgtcttgttttgagaatgttaatgatatctaggtcactttaaggctccacatatatattttttttttctgatg

SEQ ID NO: 1280 - DNA, 416 bp, Glycine max
ccaatagtagtttcatagaagaaaacaatgctggtgatgctgtttttgcactcatggctggtttggctcccaagaccaaggttcttagagatgggagatggactgagcaagatgctgcaattttggtcccgggagacatattcagcatcaagctgggagagatcatcccggctgacgcccgtcttctggagggtgatcctctgagtgttgatcagtctgctctgactggtgaatctcttcccgtgacaaagagcccctcggatgaagtgttttcgggatcaaccgttaagtagggtgagatagaagcagtggtgattgccactggagtgcacaccttttttggcaaagctgctcatctggttgatagcaccaaccaagttggtcacttccagaaagtgcttacagcaattggtaac

SEQ ID NO: 1281 - DNA, 351 bp, Glycine max
acgaggaagttgcaaggcttagggagcttcatactctaaagggacatgttgagtcagtggtgaagctgaaggggctggacattgacacgattcagcagcactatacagtttaaggagcttggacaagcttcgggaagaaccggctcagtgcttttttgagaaattttttttacatataatgacgaagaaagcccatgttcaatctgtctttaagttacataaaaaaatgagtcctgtgaaaatttgaatggtctctctcactgtctccatcttttcttggagatactatgctctctttacgtaccaaataacataattggtagggtttactatcatctttttatctggtaa

SEQ ID NO: 1282 - DNA, 1265 bp, Glycine max
cctcgcgtccgtcttggtacaaaacacggaaaataagaacatgggtagtctctcctggatctgaagatgtagctccgcgcatcctatttgatagatcttcagaagatgtgtactctgatcccggttctcctatgatgcggagaactcaagctgggacatacattattgccaggataaagaaggaaagtgatgaaggaagatatattatactgaatggaaatggtgctacaccagaaggaaacattccattccttgatctgtttgacataaatacaggtaaaaaaatggaacgaatctgggagagcgataaggagaagtattatgagactgttgttgctctaatgtctgatcaagaagaaggggatttgtatttagataaactgaagatactgacttctaaagagtcaaaaactgaaaacacccaatactactttgttagctggccagataaaaacatagttcaggttacaaatttccctcatccataccctcagcttgcatcattgcagaaagagatgatcagatatgaaagaaaagacggggttcaacttactgctacattatacctaccaccaggttacaatccatcaacagatggccctttgccatgcctggtttggtcttacccaggagaatttaagagcaaagatgctgctggacaagttcgtggttctccaaatgaatttgctggaataggctccacatcagcccttctttggctggctagaaggtttgcaattctatctgggcctaccattcctattattggcgagggtgatgaagaggcaaatgataggtatgtagaacaattagttgcaagtgcagaggctgctgtggaggaagttatccagcgtggggtggctgatccgaagaaaatagctgctggtggacattcctatggcgcgttcatgactgctaacctgctggcacacgcacctcatcttctctggcgtggaattgctcgttctggtgcttacaacagaacacttactccctttggttttcagaatgacgacagaactctttgggacgccactaatacttatgtagagatgagtccttttatgtcggctaataaaattaagaagcccatcttgcttattcacggggaagaggacaataatccaggaacattaaccatgcagtcagacaggtttttcaacgctctaaagggtcatggtgctctttgtcggctggtgattttgcctcacgagagtcatggttacactgctaaagaaagcatcatgcatgtcctttgggaaaca

SEQ ID NO: 1283 - DNA, 419 bp, Glycine max
agcaaagatgctgctggacaagttcgtggttctccaaatgaatttgctggaataggctccacatcagcccttctttggctggctagaaggtttgcaattctatctgggcctaccattcctattattggcgagggtgatgaagaggcaaatgataggtatgtagaacaattagttgcaagtgcagaggctgctgtggaggaagttatccagcgtggggtaagctttatttttactgtatggagaatatgaagtttttagtcagaaatatgatgactcgtgatattttgggttgtcacttgtcacatctaggtggctgatccgaagaaaatagctgttggtggacattcctatggtgcgttcatgactgcttacctgctggcacacgcacctcatcttttttgttgtggaattgctccttc

SEQ ID NO: 1284 - DNA, 795 bp, Glycine max
  unsure (1)..(795): unsure at all n locations
cgtccagttgctcgagcaaaagcgcttgttcaccaattaagctttcaagagacaaactgctttgaaaaatgggatccaaggttgttgcatccgttgcccttctcctctccatcaacattcttttcatttccatggttagctccagcagccactacgatccacagccccaaccttctcacgtcactgctcttattacacgacctagttgtccggatctgagtatttgcctcaatattttaggcgggtctctaggaaccgtggatgattgttgtgccctcatcggtggtcttggtgacattgaagccattgtgtgcctttgcatccaactcagggccctcggaatattaaaccttaaccgtaatttgcagttaatattaaactcctgtggacgaagctacccgtcaaacgccacttgcccccgaacctaagaacagaatatgtatggcactaattaccatattacttcgtatcatggtgtttgtttgtttgtctgtgtttaaagttaaggatgttatacccttcgtgcctgctacatatatatagtgggcactataatattaccaataaattaacgtccatatataagaataataataaataaataaatatttctatacaaataaaggttacgtaatgttgttgttctcgtggatggggatcttatcttcctcctcgctatctttgtttatcgtatttcagtgaaagttgttcaataaaagtcctttgttcaacaagtannnnnnnnnnnnnnnnnnnnnnnnnnnnnnnnnnnnnnnnnnnnnnnnnnnnnnnnnn

SEQ ID NO: 1285 - DNA, 493 bp, Glycine max
cggccaccaattaagctttcaagagacaaactgttttgaaaaatgggatccaaggttgttgcatccgttgcccttctcctctccatcaacatccttttcatttccatggttagctccagcagccactacgatccaccgcccccaccttgttacgtccctgctcctttaacaccaccaccatcattgtcaccaccaccgtcattgtcaccaccaccaccgtcaggacctagttgtccggatctgagtgtttgcctcaatattttagacgggtctcccgcggagggttgttgtgccctcatcgctgatcttgttgaccttgaagcctctgtgtgcctttgcatccaactcagggtcctcggaatagtaaaccttgaccttaatttgcagttaatattaaacgcctgtggaccaagctacccgtcaaacgccacttgcccccgaacctaagaacagaatatgtatggcactaatcaccatattacttcgtatcatg

SEQ ID NO: 1286 - DNA, 293 bp, Glycine max
gtagctaatggaacataggtatggtggcaaggagtttgtaacaagcccgggcaccagccttttgtctccaggcatcttctctatcaacattcttgtcatttccatggttagctccagcagccactacgatccacagccccaaccttctcacgtcactgctcttattacacgacctagttgtccggatctgagtgtgttcccgcggttgtgtgcattttgcttaggaaccgaggaaaatttgtgtgtctttctgccttgtcaatgcatcaaaaaaagaaaccaaggggggggcc

SEQ ID NO: 1287 - DNA, 1748 bp, Glycine max
  unsure (1)..(1748): unsure at all n locations
gtggttctaaatctggaaggggatttgaggcaacttatgaagtgttacctaggcttaatgaaatcaaatttggcagtggagtaattgatgaactattgtttctggacctgccacgtgaaatgagattcgcttctggtgcaatgatgttagaatatggaaaagcagttcaagagagtgtatatgagcagcttcgtgttgttcgtgaaggtcaacttcgtatcatattcactcaagacttgaagatattatcttgggagttctgtgcaaggtgccatgaggaacttcttcctcgaaggttggttgcaccacaggtcaaccagttagttcaggtagctaaaaaatgtcaaagtacaattgctgaaagtggttctgatggggtttctcaacaagacatccaaacaaacagcaacatgttgttgacagctgggggtcagcttgcgaagattttggagatgcaatcgctaaatgagttgggcttttctaaaagatacgtgagatgtttgcaaatttcggaggttgtcaatagcatgaaagacctaatagatatctgtgcagatcacaaaattggtgccattgagagtttgaaaaattttcctcgtctagcaacagcctcaaaggtccagatgcagaagatgcaggaaatggaacagctagcaaatgttcaaggtctgccaactgatcgaaacacactcaataagctaatggcactgaatcctggattgaacaaccatataaacaaccctcataatatggttaatcgtggtgctttgagtgggtcagcccaagctgctttagcactgaacaactaccaaaatcttctcatgaggcaaaattcaatgaactctagccctggctcacttcagcgcgaagggtcctctttcaataattcaaaccagagtccatcttcagctttgcaaggagctggtcctgctttaattccaggcccaatgcagaattcatctgttagtggtttcccaagcccccgtctacccccacagcagcagcaacaccacctacaacagccctcattaagtgcaaatgctttactgcaacaaaatcattcacagggttcccaaggaaatcaagctctgcagcagcagatgatccatcaactactgcaggagatgtcaaataacaacgggggagtgcaaccacagtctcttggtggacccagtgcaaatatggcaaagaatgcactggggtttgggggccattatccatccttaagtggaggttctgccaatgttacaggaaacaatggacctatgtcaaggaataatagcttcaaaacaactgcaaatagtgattcttctgctgctggtggcaacaatggattaaaccagagaacatctgagatgccacaaaatctacatttgcaagatgtggttcaggatattggcaatgaattcacggataatcccttccttaacagtgatcttgatgataacatgggttttggctggaaggcatgactaacacaatcttggacatgaaatcggcatatcatgtgttgatgaagtgtttatcttattatctttgtacaggacactttaaatagatgctgtttttttccttgtttttccctgttattttcttgatggaatttgtttggactcggactcggactcgagtaggtttttagagattttatttgagggtttttgtcctgcaagtgtaatctattggacaatttaatgaacagttagtttattatacggcactcnnnnnnnnnnnnnnnnnnnnnnnnn

SEQ ID NO: 1288 - DNA, 439 bp, Glycine max
atttttgttaatttgcacagatattatcttgggagttctgtgcaaggtgccatgaggaacttcttcctcgaaggttggttgcaccacaggtatgattctgcattcttgaatgcttttcacttctgcagccactctttgttttgaatagatgatggggctatttggtagaatatttctgtgaagtagatccttatttattgcctggttttaatcaaaagttgggactaacctggagttgtctactttgtatcttcagcatatttccgtcggaaattctgcatgtgcacattgttgtataattgactccttgcatgcatgtattcttccatcgtatttcttgtgattgtatgcacaattgaatactgccgaatggtgacaagtagtaatatggacatttgggtgtggaaattggtatgcatcagtgaaactttctttctta

SEQ ID NO: 1289 - DNA, 861 bp, Glycine max
aggaagcttacatggaagaagagaagaaagtcatatcagaagtttcagtgacgaaggttgttgaggaggcggatcataagaatgagagcattaaggagacaaatggagacctgccaagtgaagtagagaaagaagaggaagatgagaaagaggataatgaccagcctgttgatgagattgaagatagggcctatgagaaggaccaatatcgtgggagaagccctactagggaaagagacagggacaaaagacgtgatagtcatagacacagggaccgtgactatgacagagactatgatagagattacgatcgagagcggggacgtggccgagacagagacagagatagggaaagggaaagggacagggacagggtccgatatcgtctaagggaagaaaaagattatggtcgtgatagacagggtagggagcgggagagaagagagaaggatcgtgcccgtggaaggcgaaggagtcactcaaggagtcgaagtagaagtagggatcgcagggaacatgatggtggggactacagaaagagacatgctcggagtagtgtaagtcctagaagacatggagatggacttgaggatggtgagccaaagaagaagaagaagaaagaaaagaaagaaaagaaggatgatgggactgaccaccctgatccagagattgcagaagcgaacaagctacgagcagccctgggtttgaaaccactgagggtctgatctggcagagtggcatgaatttggtctgggtttgaaaccactaaataccgtgttaccttgtggctgcttgctttttctgtacatccctgattagctgttatcaagtcagaaggataagtttgtcatgtacgtttac

SEQ ID NO: 1290 - DNA, 545 bp, Glycine max
tcgatcttcaccactccatttcctattttcccaattgctttttttattattttcagattcgaacaatagtaaacattttctgcaagcaaaccaaagcaaagcaaagcaacttttcccagtcaatataaggaagcgaacatggaagaagagaaaaaagtcatatcagaagtttcagtgaacaaatgttgttgaggaggcggatcataagaatgaaagcattaaggagacaaatggagacctgagcaagtgcagttaagaaagccgacgacgagcatgcctttgatggagaattcattaaggttgagaaagaagagaatgtcattgatgataagtcccacaaaactgaaagaagctcagattctcctagcagagaatttctagaagcccaagagaagatacaggaactcgaggttgaactccaaagactaacagaatctttgaagacctctgagcatgaaaatgatcagctgaagggagagatctcagttacaaaagagaaattggaggagagtggaaagaaatatgaagagctcgatctgagtcac

SEQ ID NO: 1291 - DNA, 708 bp, Glycine max
  unsure (1)..(708): unsure at all n locations
ggagtcttgtgtttgagagattaagacctttttgcattgcaaatggctgctgcaactgctggagttgttggtggaaatggttcgtctgcttcttggatgcgattcaaaggcaaggaaaggaagcaaaccaagatgaacaagtcaaggattagttgctcttattcttcttctgtgatggatccttacaagaccttaagaatacaacgcggtgcctctgaatctgaggtcaggaaggctttcaggcagcttgctctgcagtaccatccagacgtgtgcagagggagcaattgtggggtgcagtttcgcgaaatcaacgaagcttatgatactgtgatggccaacttaagaggagaatcaaatgcgacagaatcgtatgaggcttattatgatgctggaattgatgagccactgaggggaatgaacgatccagattgggacatgtgggaagagtggatggggtgggaaggagcaggaatccgtgactactcgtctcatattaatcctcacatttgatagatttgttgataattattattagtcttttgaataatgattgtgcattagttaaagtggggtctggtatagagtctagacttacatacatgttcccacccaagtggctggtgttctttgtgtatagtccaagtgaatgtanagtgagtcctctctctctgcataattgaagatgaggaaatgactctttaatct

SEQ ID NO: 1292 - DNA, 639 bp, Glycine max
aaggaataccacgatcaccaccgcaaagcaatgggcgctatactttctgccttaactggcggtgccgcaacggcggcgacgtcttcgccggagagttctgcttctagggtccagtctttccactcttcggcgacgctggcagctccacttcaacgagctcaaaaaataccaataagctcgttgtgatagatttctcggcgtcgtggtgcggcccttgcaaattcatagagccagcgattcacgccatgtccgaaaagttcaccgacgtttggacttccgtcaagatcgacgtcgacgaattgccggatgtggcgaaggagtttaatgtggaggcgatgccgacgttcggtgttgtgtaagaaagggaaggaagtcgacaaggttgtgggcgcaaagaaggacgagctcgaaaagaagattgagaaacatcgatcgcaatcttagctctgtaatccaatttatccagttatttatctttcttttcaagagaaacaaaaataattaaaacagtgtttaaattgtttcatttggctatagtgttatgatgatgatggatggggttgtaaaatttaaacttgttcggttgcttcttcaggaaggtgtctgtttcatattttagcaaaaattgttgttatatat

SEQ ID NO: 1293 - DNA, 800 bp, Glycine max
gatattgaaggtgagttttggaaataataaattaatgtagatataaaaagaagggtgtattgaggaggaggataaacatttgggtctgtctccgccttggccaaatccctagcctcttgttgtttgattgagatgacgatggcgttgttagcgggtcagagctccatttccgcgcttccctttgttaacccaacttccttgagcttcaaacctctcgcctttaccaaatccctagctctcccttcagcacagaggccaacttcgctgaggctgaaatgcaagatggagagcgacggcgacattctgcgggggagcactcgcacggtgaccaccctgaatggactcgccttgttgctggtgaagaaggcggccattccagtgttgaacatcaacatcaacagcagcagcaacagcgtgtccacgatgggtgctttgttcttggcatctctgcgggaccgtccgagtgcgagtggggccctaaacacgccgctgacggttgtggcggcggggcttgggaagtggcttgacatatacagcgcggttttgatggttagggttttgctgagttggttccccaacatcccctgggaacgccagcctctctccgccatccgagacctctgcgatccttatctcaacctcttccgcaacatcatcccccctgtttttgacaccctcgacgtcagccctcttctcgccttcgccgtcttgggcactcttggctctattcttcagactgctatgtgaattcatctcttttagcttctcttctcgcttttcattttcgatttcactctttt

SEQ ID NO: 1294 - DNA, 955 bp, Glycine max
gttaactttacctaatacacaaaccccgttcctccgttcgggcactacctcaggctgggcgttctcttttactaaaggagcgcaacaatctctagaaccctctcagccaaaaaaaacaatgcagacccaccagaaccctcccacactggattccgacccgcagctcccgcagatcaaaatccaccacccctcctccccgcgccatcaccacccctcctccgccggcgccgcgacccccacccccaccgccggcgcgcgtcgcaaaatcggcgtggccgtcgacctctccgacgagagcgcctacgcggtccgctgggccgtgcagcactacatccgccccggcgacgccgtgatcctgctccacgtcagcgctaccaacgtcctcttcggcgccgactggggctccatcgacctctccatcaacaccgaccccaactccgacgaggatgccgtcagcgccgtcaacagtaacgaccacgccaacgccggcaacagcaaacgcaagctcgaggacgacttcgacgccttcacggcgtcgaaggcacgcggatctcgcgaagcgtacgagagaatcgcaaattccgttcaagatccatattgtgaaggatcacgacatgaaggagaggctgtgcttggaggtggagaggcttgggttgagcgcggtgattatggggagtagagggtttggcgctgtgaggcgtggcatctatgggaagcttgggagtgttactgattactgcgttcatcacggtgtttgtcctgttgtggtggtgcgttatcccgatgataaggatgcggtcgctgcggccacgacggctgagcccgtgttggcgttcaaggacggatactatggcgaggccgtcgtccagccggttccgcataagaattaggattagtttgagccagctcatcacttcaaccctatctctgaagagtgtttctgatccgaagagat

SEQ ID NO: 1295 - DNA, 834 bp, Glycine max
gctttcctttgatctattctattcttcaatatcttagggttccgacagattccccatcaattcaaccacttgccgtgttagttgatccattcttataaaaagatcaaagactcattatttatagccaaaggccttctgggtcgtcgtgaatctatcttgtgtttgagagattaagacaaaactttttgctttgcaaatggctgctgcaactgctgcaactgcttcttggatgcgattcaaaggcggcaaggaaaggaagctaaccaagatgaataaatccaggattaattgctcttattcttcttcttcttctgtgatagatccttacaagaccttaagaataaaacgaggtgcctctgaatctgaggttaggaaggctttcagacagctcgctctgcagtaccatccagatgtgtgcagagggagcaattgtggggtgcagtttcacgaaatcaacgaggcttatgatgttgtgatgtccaaattgagaggagaatcaaatgaggcagaatcgtatgaggcttattatgatgctggaggcatcgatgagccactgaggggaatgaacgatccagattgggacatgtgggaggagtggatgggatgggaaggagcaggaatccgtgactactcgtctcatattaatccatacatttgagaaatttgttaataattatattcctagccttttcaatcatgattgtgcatcatgtccccacccaaggtggttgctttggtgttctttgtatatactccaagtgaggcctctctgcataattcaagctgaggaaatcactctttaatccttaaagacgaatcataaagcttccatat

SEQ ID NO: 1296 - DNA, 935 bp, Glycine max
ggaattcggctagagctcgagccgattcggctcgagcttttccagtttcaaagaaagacgagtgctgacgcttgaagacagtgaaggaaaaagctaacaaattcgttaatttctagaaacctctcatcaaaagtgtctttgatccgtgagaacttaaactcagactcctaaaatagtttgatcactttcgcattgacctatataaccttttctctccggttaccagagccgtaagtcgctgaacatgaacccgcaatctctcggttacggcggaactgcgagcctccggttccgacgttctccccacggttcgcgctcacgtccggatcgcagcggaaaatcgcgaatgtcggtcgatctgagcgacgaactcgcctacgcggtgcgctgggcggtgcagaactacctgcgaccgggcgacgccgtgatcctcctgcacgtgcgtcccacgagcgttctctacggcgcggactggggctccgtggatctgagcgcggcggaggacgccgatgacggcggaggaggcgacgaggagtcgcggcggaagctggaggacgacttcgacaacttcacgtcgacgaaagcgagcgacctggctcatccgctggtggaggcgcagataccgttcaagatccatattgtgaaggaccacgacatgaaggagaggctgtgcttggaggtggagcggctcgggctcagcgccgtcattatggggagccgcggcttcggggcgtcgaagcgagccgcgaaggggaggctcgggagtgttagtgattactgcgttcatcattgcgtgtgtcccgttgtggttctgcgttaccccgaggagaacgataacggtaaaggtgacggtaacggtgctggtggtcttgttgtgcaggttggggaaccggtggagcttccgcctgtgccggaggaagagcatgaggtgtatc

SEQ ID NO: 1297 - DNA, 672 bp, Glycine max
tctcgagccgaatcggctcgagggcggctacccgctgagtttaagactatcaataagcggaagaaaagaaactaacaaggatatcccttagtaacggcgagcgaaccgggaaaagcccaccatgaaaatcggtcgccctcggcgtccgaattgtagtctggagaagcgtcctcagtggcggaccgggcccaagtcccctggaagggggcgccagagagggtgagagccccgtcgtgcccggaccctgtcgcaccacgaggcgctgtcggcgagtcgggttgtttgggaatgcagccccaatcgggcggtaaattccgtccaaggctaaatactggcgagagaccgatagcgaacaagtaccgcgagggaaagatgaaaaggactttgaaaagagagtcaaagagtgcttgaaattgtcgggagggaagcggatgggggccggcgatgtgtcccggtcggatgtggaacggtgagagccggtccgccgatcgactcgggacattgaccgacgcggattgcgatggtggcccaagcccgggctgttgatatgctcgtggagacgtcatcatcgcgattgtggatggcagcgcgcgcccttggcgtgcctcggcacctgcgcgctcctggcgtcggcctgtgggctccccattcggcccgtcttggaacacggac

SEQ ID NO: 1298 - DNA, 680 bp, Glycine max
gatataactgttgagaaaggaataccaagattaccaccacaaagcaatgggcggtatactttctgcgcttcttggcggcgacgcggcggcggcggcgtcgttcgccggaagagttccagttcctacggcctcctccttccactcgtcgccgcgctggcagctctacttcaacgagatcaaagataccgataagctcgttgtgatagatttctcggcgtcgtggtgcggtccttgcaaattcatagagccagcgattcacgccatggccgacaagttcaacgacgttgacttcgtcaagatcgacgtcgacgaattacctgatgtggcgcaggagtgtcaggtgcaggcgatgccgactttcgtgttgtggaagaaagggaaggaagtcgacaaggttgtgggcgcaaagaaggacgagctcgagaagaagattgagaaacatcgatcgtgatcttagctctagtaatcctattcattcagctatatatctttctttccaaggtgaaaagaatattaaaacagagtttaaatttgttatatttggctgtagtgttatgatgatgatgatgatgatggatggggttgtaaaattttaaactggttgggttgtttcttcaggaagatggtgtctgtttcatattttagcaaaattgttatatagaaattgaaaatactgtctc

SEQ ID NO: 1299 - DNA, 1012 bp, Glycine max
gacccaaaattgaacaagaagtcctgagaaggcatctagaacaaagctctgaatctgattttgaaaactggaacgcgtaaaatgaacggtacccctccctcataaataaaatctactactaaacgctcttctcttctgcaatcaatttgcaaaccagacacaacacaaggacaagaaccagatctctctttctcaaatcaccaagaatagttcgaaaatggggctgtctttcacgaagctgttcagtcggctctttgcgaagaaagagatgcgtattcttatagtgggtctcgacgccgccggtaagaccatcagtctctacaaactcaagctaggagagatcgtcacaaccattcccaccattgggtttaatgttgaaactgtggaatacaagaacatcagcttcactgtctgggatgttggtggccaggacaagatccgtcctctgtggagacactacttccaaaataccaagggggcttatcttggtggttgatagcaatgaccgggatcgtgtggttgaagctagggatgagctgcacaggatgttgaatgaggatgagttgagagatgctgtgcttctagtttttgcaaacaagcaagatcttccaaaatgctatgaatgctgctgaaataactgataagcttggtcttcattctcttcgtcagcgtcactggtatatccagagcacatgtgccacatctggtgaagggctttatgaagggcttgactggctctcaaacaacattgcaaacaaggcatagtgattatcggtcatgggttgcatcaaagttcatttgagtttagcggttgtgacttccaatgtttgatgtgcttaccctgtttagaatcttattttctctagcatgtattatttgtcttcgataaagaacagattgtctactacctaatatcaaaataatttgcattttttctccgtgtataaccaaaaggcatttgtcttacccatcgatttgtgaagtcaatttatcattgaaatttttaaaaaaa

SEQ ID NO: 1300 - DNA, 1848 bp, Glycine max
taaggtcctcgctgctgctaagtgcctccttcttcctcctatatatatatatatatacatatatgcacgtaaagcctcttcgcacaacttaaccctctctctctgagatggcaaagaatgtggggattctcgctatcgacatctacttccctcccacctgtattcagcaggaattgctggaggctcatgatgggtgccattaaagggaaatatactattggacttggtcaagattgcatggcgttttgtacagaagtagaagatgtcatctcgatgagtttgacagtagtttcttcccttcttgaaaagtatgcgattgatcctaaacaaattggtcgtctggaagtaggcagtgagactgtgattgacaaaagcaaatccatcaaaactttcatcatgcaaatctttaagaaatatggaaataccgatattgaggggcgttgattcaactaatgcatgctatggaggaactgctgctttgttcaattgtgtcaattgggtggagagcagctcatgggatggacgctatggacttgttgtctgcactgacagtgctgtctatgctgaaggacctgctcggcctactggtggagccgctgctgttgccatgctaattggtcctgatgctcccatttcttttgaaagcaaattgaggggaagtcatatggctcatgcctatgatttttacaagcctaatcttgccagtgaatatccagtggttgatgggaagctttctcaaacttgttaccttatggcccttgattcttgctataatcacttaagtcacaaatatgagaaacaagagggaaaacaattttctatttctgatgcagaatactttgtatttcactctccatacaacaagcttgtacaaaaaagttttgctcgtttggtgttcaatgacttcttgaaaaatgccagttttgtggatgaggctgccaaagaaaagctggaaccttttgcaacattatctggtgatgagagctatcaaagccgggatctagaaaaggcatcccagcaagttgcaaagcctcaatacgatgcaaaggtgcagccaaccaccttgataccgaaacaagttggcaacatgtacaccgcatctctttatgcagcctttatttcacttattcacaacaagcatagcacattggactcggtaagagggtaatattgttctcgtatggaagtggcttaacttccacaatgttctctttgctattacgtgaaggtcaacatccatttagcctgtcaaacattgataaaatgatggatgttgctgggaaattgaagtcaagacatgagtttccaccagaagaaatttgttgaaaccatgaagctaatggaacataggtatggtggcaaggagtttgtaacaagcaaggacaccagccttttatctccaggcacattctatctcactgaagttgactccatgtataggagattctatgcaaagaaaactagtgaaaatggtttggtcaccaatggtcactgacgttttacttagagaacgtgtaatacctggaaaccaggaattcaactgtgcttagcatttagaaggctgttctcgtttggattagtttcttcttaagggaagacaaacgaacaattatgaaatctgtaggagccaggtgttgttagttcaaaaactctccgaaactcttcaagtttaaatgatcccccccaaaattgtttctagcaattatgcttttgaaaatgtaaagccctgtaaaggattggacgttataagtttgagtccccggtattctgttaacgaagggggtcccagtttccagttactctgattatttcttttcatttcgtaaaaaagaaagacatccattatcc

SEQ ID NO: 1301 - DNA, 1016 bp, Glycine max
ctgcttcttcttcttgtaggttctctctctctctcgctctgcataagtttcttatcttctggactgcgagaggtgcttgccttagctatatactcattttcgcgtgtttgcttgctctagatctgattagcttttattcgagttctggttccttgtttcgtccctgcataatctgaattcaaatacttgccatcttgttacttgttacgctaccagatctgttttgaattaagagatgggcgttgtctttcaccaagctttttagccggctctttgccaagaaagagatgcgtattctcatggtaggtcttgatgctgctggtaagactaccatcttgtacaagctcaagctgggagaaattgtcacaaccattcccacaattggatttaatgtggagactgtggaatataagaatattagctttactgtatgggatgtgggtggccaagataagattcgtcctttatggagacactacttccaaaacactcaggggcttatctttgttgtggatagcaatgatcgtgaccgcgttgttgaggctagagatgagctccaccggatgttgaatgaggatgagttgagagatgctgttctcctggtatttgccaacaaacaagatcttccaaatgctatgaatgctgcagaaatcacagacaagcttggtcttcattctctacgccaacgccactggtatatccagagcacatgtgccacctctggggaaggactatatgaagggttggactggctctccaacaatataactaacaaggcttaagggacattttgtgaaatgccgctatcttcttgcatggctttacgattatattatcaggttaataggttgttgcatttctaataaagaattaaaatattttctgtttaacacattaaagtcttttctttttcttaattaaggtgtttaataataaatcaaaccaatcgtattggatcctgtaaaattttttcactattcatgaattcccccccaaacattgcccgttcatgtttt

SEQ ID NO: 1302 - DNA, 949 bp, Glycine max
ggggtaaacacgaattttggatcttagtccgcgttctataaatccggcaaggcctgcctgtgagaccatctcaatttcttttctctttgtcgcaaagagaagagatctgcctcctttttacgtcccaaatcaaatctaaggcttcttcaagaatagttgaaaatggggctgtctttcaccaagttgttcagccgactgtttgccaagaaatagatgcgtatactgatgggtgggtctcgactgctgcgggtaagaccaccattctgtacaaagctcaagcttggagagattgtcacaacaattcccaccattgggtttaatgtggaaactgtggaatataagaacatcagcttcactgtctgggatgttggaggtcaggacaagatcccgtcctttgtggagacattacttccaaaatacacaaggacttatttttgtggttgatagcaatgacagggaccgagttgttgaagctagagatgagttgcatagaatgttgaatgaggatgagttgagagatgctgtgcttctagtttttgccaacaagcaagatcttccaaatgctatgaatgctgctgagataactgataagcttggtcttcattccctccggcagcgtcactggtatatccagagcacatgtgccacatctggtgaagggctctatgaaggacttgactggctctcaaacaacattgcaaacaaggcatagagatttgttagttaaatgcaaggaagttgagcttacttcggccattatgatctccagtttctaattttcttgccctacttagattttcattacttgagcatgtatttttcttgaaaaagaacagcggtttgttactgaagaacaatttgaattttttttccatgtataaccaaatagcattgtttactatttgagcctgtgaatgcaattgaattatatgaaacctcgtattatgtc

SEQ ID NO: 1303 - DNA, 1740 bp, Glycine max
tgccaacctgcacactcttcactcgatcatacagacaatggcaaagaatcgtggggatccttgccattgacatctacttccctcccgcttgcgttcagcaggaagcattggagtctcatgatggtgccagtaaagggatgtataccattggacttgggccaagactgcatgtcattctgtaccgaagtagaaagatgtcatctcaatgaggtttgacagtggttacttctcttcttgagaagtatgggattgatcctaaacaaatcggtcgtctcagaagttggaagcgagaccgtgatagaccaaagcaaatccatcaagacattcctgatgcagatcatcgagaaatatggaaatactgacattgagggtgttgactcaactaatgcatgctatggaggaactgctgctctgtttaattgtgtcaattgggtggagagcaattcatgggatggacgctatggacttgttgtctgcactgacagtgcagtctatgctgaaggacctgcccgacctactggaggagctgctgctattgccatgctaattggtcctgatgctcccatttcttttgaaagcaaattgagaggaagtcatatgtctcatgtttatgatttttacaagcctaatcttgccagtgaatatccagttgttgatggaaagctttcacaaacttgttacctcatggctgttgattcttgctataagaatttctgtcacaagtatgagaaattcgagggaaaacaattttctctttctgatgctgaatactttgtatttcactctccttataacaagcttgtacagaagagttttgctcggttggttttcaatgacttcttaatgaattccagctctgtagatgaggttgccaaagaaaaactgggaccttttgcaactttatctggtgatgagagctaccaaagtcgggatcttgaaaaggcatcccagcaagtagcaaagcctctatatgatcagaaggtacaaccaactactctgattccaaagcaagttggaaacatgtacacggcgtctctttatgcagcatttgcctcccttattcacaacaaaaatagcacattggcaggtaagagggtgatattattctcatacggtagtggcttaactgccaccatgttttcgttgcaattacgagacagtcaacatccgtttagcttgtcaaacattgctagagtgatggatgtcgatggaaaattgaagtcaagacatgagtttcccccggaggagtttgttgaaaacttgaagttaatggagcatagatatggtgccgaaggaatttggtggcaagcaaggaaagtagcctttaatctccgggcacattctatctcactgaagttgactccaggtatcggagattctattcaaagaaaactaaagaaagcagtttgactcacgctgagaacggtgtgattgctaatggcgttgctaatggccactgatgttgagcatgtacaatcagcagtcagcttcgcctatactgaggaatggtattgttatttgcgaagttctgttggtaaactgcttctggggtggcaagtgttatcgatgcacacaattcactgtattcttttaagatgtagctacttactctagtctaagtcttgtacacacaaaaaaaaaaaagttactcaaatctaaattttatctttttctgtgtattttttgcattttagtgaatggaaattagtctttgaataaaaaaaagttgcaataactttt

SEQ ID NO: 1304 - DNA, 997 bp, Glycine max
gctctctcactctttctccgagaacaaaaaaaaataaaatttaaaaatccgcgattcgctcttctcttggaaaagtgaaaaccagaagtacgaacgaaagacatgagatcagcgatttagaagtgtgagaaagatggggttgtcgttcacgaagctgttcagcaggttgtttccgaagaaggaaatgagacattctgatggtaggtctcgatgctgctggtaagacaaccatctttgtacaagctcaagcttggagaaatcgtcaccactatccccaccatcggatttaatgttgagactgtggagtacaagaacatcagcttcactgtgtgggatgttggtggtcaagaacagattccgtcaactgtggaggcattatttccagaacactcagggtctcattttttgtgggtgatatcaatgatagagatcgagtgggttaggcaagggatgagctgctcacaaaggttgaatgaggataaactttagagatgctgttttgctttgtttttgccaacaagcaagatcttccttatgcaatgaatgctgcagaaataactgacaagcttggacttcattcactttcgtcaacgccactggtattatccagagcacttgtgcaacttttctgggaaaggtctcttattgtgaggttgacctggctttctaacaacaattgccagccaagcattgggacattttgaaaaaattttggttctttggctggtgattcaattgcagacctcttgcgttcttggaagaagatgcttatcttttctagcgaatgttgtaatagcagaatgcttgctagaagtattctcttcttttgtgtaacttgggtttgtatgattgcttaaattagctaatacttttagatataattgagaactctctccaccctcttgtgcgtgcgtgctgtgttgcttacatcttgtttgtttgatttttgattgaatatatttccatgcgttttgttaattaaaaaaaaaaaaataaa

SEQ ID NO: 1305 - DNA, 764 bp, Glycine max
cgcgagtggccgtgttcttcatagttcagtgtgtcgtttaaaaatgtcgcagttgctggataaagccaagaacttcgtgtcggagaaggtaaatgatatggccaagccggaggcgagtgtcactgacgtggacttcaagcgcgtgagcaaagataatgtcgagtacttggccaaggtctctgttcgtaacccttattcaacttccatacccatttgtgagatcaactactctttcaaaagcgcatccagggagatagcatcagggaaaattccagacccaggatcgttgaaggcaaaggacacaacaatggtggatgtgccagttaaggttccatacagcatattgatgagcttggcaaaggacattggtgctgactgggacatagactatcaattggatcttggtctggttattgatgttcctgtcattggcatcttcaccattcctctctctcagaaaggagagatcaagctaccaaccctctctaccatgttcgcctaatcgcatccacaaagcttaggataaaataaatgcattgcacactccatgatcgatgtgcatgttttacttttatgtaaattttggaccgttttagttctaccttttgttattcgtgtatgctctctaaaactatacatggctttcgtagtagtagtattacttatcatagttgtgaagaacatgttttaggatgtccatccatatactataatggataataaattccaataatagactaaaaaaaaaaaaagggggggccgcc

SEQ ID NO: 1306 - DNA, 1256 bp, Glycine max
cggacgcgtaacaaggggtcgaaagaagcaatgatgatgaatgtcatagggctgagtctgagtctggtgttaacttcactggcagcagcgagcaccatcgtcaaagaagggcacagagttgtcgtggttgaatacgaccaaggtggccatcagaacaccaaaatctcaatatcaccagaacaacctacgcatgctaatcttaaagatcccatttgcgacgcctatggaaaatgcaagcacaaaatcgtggatgcaatggagaagtctcaagaggtcatccatgagaagaaggacgagattgccgccaacaaggaggcagcacgccaagttgctggtaaaaccaaagagagagtgtatgataaagcccgtcatgtccacgaatacgcccaaaacactgtagaaacagccaagaaccatattgcctgtaacgtgtcaaacgccaaagatgcattcaagcgtctaatagcaggatctttggagaggcagagccttaattctttgatgggggtggctaacatgttggggttttccacggcttatgggatgtgtgtgtgggttacgttcatctccagctatgtgcagtccagggctatggcaaggcaacaatttgcagtggtgcagagtaaaatatatcctgtttatttcagggccatgtcttatagcatcggggtcgctttattcgcccatgtcttggcccatagaaacaccttgctctccaacaagtctgacttattgcaagcatataatcttctggcctcccttgtcacacttttcttcaattctctttacttggagcctcgggccaccaagttgatgttcgagaggataaagatagaaaaagaggaaggaagaggcagatcagaagatgtgagtagcagaactaaagagccagcttccacgaccgcagaccaggatgcagtcagaacaaggattatcaagctcaatgacaagctcaagaaactcaattcctactcctcattcctcaatatcctcaatctcatgtctcttacttggcatctcgtttatttggctcaacgacttccccatatttgctaaaccaaatactacgttccttttgtcttttctactaatcatttgttttctgtgtttcttttctgtttctatcatgtttgttgatatttgcaaatacttcagtctctagatttttgtatcttttagctttgggaacaatacagtgtttaccactccctgtatttaatttgtgttaagtgtaaaactcttgttactttgcttta

SEQ ID NO: 1307 - DNA, 919 bp, Glycine max
accaaacaaattagcggaacgttgaattgaacaagaagagagaagaatgatgatgaatgttttagggttgagtctggtgttaacttcactggcagcagcaggaatattctctcccaatcccagaacagagaagcatggagccagcaccattgtcaaagaagggcatcgagttgtggtggttgaatacgaccaaggtggccatcagaaaaccaaaatctcaatatccccagagcaacccacgcatcaccatgatcatgatgatgatttgatcaaagaagctgcctcggttctccctaacttatgccaaggcatttcttcatcttcacaatattcacaccaaccgcagatcaacatggatcatgggcctttaaatctgcatgctcctaatcctaaagagctcatttgcgacgcctatggaaaatgcaaacacaaaatctccgacgccatggagaaggctcaagaggccatccataagaagaaggacaagatttgtaaaactaaagagactgtgtatgataaagcccatgacgtccatgaatacgcccaagacactgtagaagcagcaaaggaggatatggccagtaacgtttcaaacgccaaagatgcattgaagcttctaataggaggatctatggagagcctgaattctttgatgggggtggctaatctgctggggtttgccacggcttatgggatatgtgtgtgggttacgttcatctccagctatgtgcagtccaggactatgccaaggcaacaatttgcagtggtgcagagtaaaatataccctgtttatttcagggccatggcttatagcattgcactggctttcttagcccatttcttagcccatagaaacaccaactctgacatgttgcaatcatataatcttctggcctcccttgccacacttttcctcaat

SEQ ID NO: 1308 - DNA, 529 bp, Glycine max
  unsure (1)..(529): unsure at all n locations
ctcactaccaccaaagactgagaagaggggttgaattaactgcttgcaagcatggcgaagagcaaggaagacataacctatgcaacatcacaagcaaggctttcagaagatgaagcagtgagagtggcctacgagcatggctcaccccttgaaggaggaaagattgctgactctcaaccagttgacttgttttcaagtgcacacaatatgccaaagagtggccaaacaacaatggattcaaacactagtgatcaatctcagatgcaacgtgatacacaagaagggggttctaaagaattcaccactggagctcctggatagccccaaaaggggctcctccagcaatgggtcataaattttgaaggcaataatatagacaaccttataaaatatgtttacttttgtgtgttttgttctgccctttgtttcttttttatggcatatcatcaatcatgtatggggatgactccctaagtttttcttcgtctaataaagttgaatattttttgtaaggggttaaaaaatanaa

SEQ ID NO: 1309 - DNA, 910 bp, Glycine max
  unsure (1)..(910): unsure at all n locations
gaagacgacagaaggggacaggtgtttgcaatactagcgatagctgataagagagataccaacaagaaaagaaaaaaagaagagttgagattccctttgaagaaaagatggcatcccataggcaaagctatgaagctggtcaaactaagggccgaactgaggaaaagacgaaccagacgatgggcaatattggagagaaggctcaagctgcaaaggagaagacccaggaaatggcccaagctgcaaaggagaagacccaacaaacagcccaagctgccaaggacaagacttgcgacacttcccaagcggcaaaggagaagacccaacagaatacaggagctgctcaacaaaagacctcagagatgggccagtccacgaaggaatcggcccagtcagggaaggacaacacccaagggttcctgcagcagacaggggagaaggtgaagggcgcagcccaaggtgctacagaggctgtgaagcaaacccttggcttgggcgagcatgatcaagacaaccgcagaaattactaatactataatttgaagtgctttcttgtagtagtggtttacgcagcatggctttttaaataagctgctattccctacactcctacctaaggagtgtactattatccgcagtttctattctctctagctactttcatgtatgttcaatgctatatatagccttgaattaatgtcaactatgttctaattaatgctatagcttcggtttgtgttaaaaaaaaaaaaaaaaaggggcgnnnnnnnnnnnnnnnnnnnnnnnnnnnnnnnnnnnnnnnnnnnnnnnnnnnnnnnnnnnnnnnnnnnnnnnnnnnnnnnnnnnnnnnnnnnnnnnnnnnnnnnnnnnnnnnnnnnnnnnnnnnnnnnnnnnnnnnnnnnnnnnnnnn

SEQ ID NO: 1310 - DNA, 786 bp, Glycine max
gttttgaggaatcagtgtctctgtctcagtgctagtgtcagtgtgagtccgtgacacacttatccacctactttcatttgagccactcttctcagtccaaaacagtttctcgttttctcatctgaaaaatgaggagcatctttgtccttctccttgttctgggtttgtttaagtatgcatttgctgaagaagggttttgctctgctccttcggaatcgaaatcaaagcctctttattggaaagtggataaccccactctctcacctatccaccttcaagatttgcctggattcacacgcagtgtttataagagtaatcatgctttggtatcaccagaaagtcatgtatatggcccattgcctgattggatcgacacgtcaggcgcatatttaatttcaccagaaatgggttcacactttgtaatgtacctagctaagttgaaagaaaaatcaaaatcaggactacccctgcctggtgtggagagatttatctttgtgctccaaggtgctgtcaccctcactaatgctgctggtgttagccaactactgaaggttgattcttatgcttattttcctccaaattttgagcattcaattgaatgtgatacacctgctactattgtggtatttgaacggagatattctccgctaccaaatcatatcccagagccattggttggttcaactgataagcagccactccttgagactccaggcgagatttttgaactgaggaagctaattccaacatctttggcatatgacttcaatatccacataatggatt

SEQ ID NO: 1311 - DNA, 336 bp, Glycine max
gatgtttctagctaagttgaaagaaaaatcaaaatcaggactacccctgcctggtgtggagagatttatctttgtgctccaaggtgctgtcaccctcactaatgctgctggtgttagccaactactggaggaaaataagcataagaatcaacctacactcctacctaaggagtgtactattatccgcagtttctattctctctagctactttcatgtatgttcaatgctatatatagccttgaattaatgtcaactatgttctaattaacacaaaccgaagctatagcattaattagaacatagttgacattaatgctatagcttcggtttgtgtt

SEQ ID NO: 1312 - DNA, 788 bp, Glycine max
cgttctagatcgcgagcgatgagaatataggaatataagaactaagatggattggatcggagcgtaccgcggaggccagagaagcagggactggtgcgacccttcatcaccattcactgatttgtgggaccctcgtcgtgtcggtgacgctgatgatatcacctcctctctcgcccatgctcacgttgactggcgtgagactgataaagctcatatcttccgtgctgatcttccaggggtgaagaaagaggatctgaaggtgcaggtggaggagaataagatcctgcagataagcggggagagggtgaaggagaaggaggaccagaacgacaagtggcaccgcgtcgagaggcagtgcggaagcttcctccgccgcttccggctgccggaggatgccaaccccaaccagatcagctgcacgctcgaaaacggggtgctgaacgtcaccgtgcccaaggtggagaagaagccggagaacaagaacgtgaggcagattgatgtggtttgatgatgatggagcatcatgaggacttgtaatgtttgaatgagttttatgttatgtgtgtgtgcgcaactgtgcatattactgtacaagttagtaactacgtgtctgccatatgaatcaatgtaagtttgatatgaatgggaggaaactttgtttgcatagtttgggaattttttttctttttcttttctttgttttcatcttattaattaaggtgggagttgtgcactgtggtctgtcttgatgcttgttctcttcaataaatggtcagtctgtctttcta

SEQ ID NO: 1313 - DNA, 2123 bp, Glycine max
  unsure (1)..(2123): unsure at all n locations
aaagaaatgatatttgtattgaagcaataataaaccaatgacaacagagttggggtagaactagaaagcatccctagcaaaagtcaaggttggccccttgcgtcaatcgccggcttcgaaatcgctgtcaattatggcatcacactgtgtaatggccgtgacgccctcaacccctcttctctccttcctcgaacgcctccaagaaacagccttcgaaaccttcgcccattccaacttcgatcccaaaacctacgtggacatgcctctcaagtccgccctcacggttaccgaggacgcgttccagaagcttccgaggaacgccaacgggtccgtgccggttgaggatttgaagcgtttcatagaagcctactttgaaggtgcaggggatgatctggtgtaccgggacccacaggatttcgttcccgagccggagggtttcttgcccaaggtgaaccaccctcaggttagggcctgggccttgcaggtccattcactttggaaaaacttgagccggaaaatatccggtgcggtgaaggcacagccagacttacatacgctgctccctctccctggttcggttgtcattcccgggtcgcgttttcgcgaggtttattactgggattcctattgggttattaggggcctgctggccagtcaaatgcatgacacagctaaggctattgtcaccaatctcatttccttgatagataaatatggctttgttcttaatggggctagagcttactacactaacaggagccagcctccccttttaagcgccatgatttatgagatatacaatagcacgggtgacgtggaattagttaaaagatctctacctgccttactgaaagaatatgaattttggaattcagatatacataaactgaccattttggatgctcaaggttgcactcataccttaaatcgttattatgcaaagtgggacaaacccaggccggaatcgtccataatggacaaggcatctgcttccaacttctccagtgtttcagaaaaacagcagttttaccgtgaactggcatcagctgctgaatcaggatgggatttcagcaccagatggatgagaaatccacctaatttcacaacattggctacaacatctgtaatacctgttgatttgaacgcatttctactcgggatggaacttaatattgccttatttgcaaaagttactggagataatagcactgctgaacggttcctggaaaattctgatcttagaaagaaggcaatggactctattttctggaatgcaaacaagaaacagtggcttgattactggctcagcagtacatgtgaggaggttcatgtttggaaaaacgagcatcagaatcaaaatgtatttgcttccaattttgttcctttgtggatgaagccattttactcagatacttcgcttgtgagtagtgttgttgaaagtctcaaaacatctggcctgctccgtgatgctggagttgcaacttctttgactgattcagggcaacagtgggactttccaaatgggtgggcgccgcttcaacacatgctagtggaaggactgctaaaatcaggattgaaagaagcaaggttattggctgaggaaattgccatcagatgggtcacaaccaattatattgtttataagaaaacaggtgtaatgcatgaaaagtttgacgtggagcattgtggagaatttggaggtgggggcgaatatgtaccccagactggttttggctggtcaaatggagttgtgttggcattcttggaggagtttggatggcctgaagatcggaacatagaatgttgatgtgcccagagatagaaaggtggaaaaaatttggtacgctgcaagaatttattcatgaaagctatttgcatgaggggttgaagaaaagtagttaataaatgcgtcaaaagccacttgttaaagcctataatgaaagttgagatgatttgagtttattactttatttgccatttgatgttttacttggaagtatgttcagaaaattcaacaaaagtgatggatgtcatcacatatcaatgctttggcacaaattgatgcataattggaccatttgatgtgagttgcttnatatactggcgtctgacgggattaaaga

SEQ ID NO: 1314 - DNA, 2057 bp, Glycine max
gaacaaacaggcacgagatgctctcttcttccattttccttctcaatccaccactctaaccctcgcacgcttcgttcaattacaaaaatggacagatcaactggccgtggtggtggtggaagtgtggacatgtttctccgaaattataagttgggaaaaacactcggcattgggtcctttggcaaggtgaaaattgctgagcatgtacggactggtcataaagttgctataaagatccttaaccgccacaagattaaaaacatggaaatggaagaaaaagttagaagagaaatcaaaattttaagattgtttatgcatcatcacattataagactatatgaggttgtagaaaccccaacagacatatatgttgttatggagtatgtgaaatctggagagctctttgattacatagtagagaagggtcggctgcaagaggatgaagcccgtcatttttttcagcagataatttctggtgtggagtactgtcacaggaatatggtggttcatagagacctgaagcctgagaatttactcttggactcaaaatttaacatcaagattgctgattttgggttgagcaacatcatgcgtgatggtcactttcttaagacaagttgtggaagccctaattatgcggctccagaggttatctctggaaaattgtatgctggaccagaagtagatgtctggagctgtggtgtaattttatatgctcttctctgtggcactcttccttttgatgatgaaaacattcccaatctcttcaaaaaaataaagggtgggatatacactcttcctagtcatctatcacctggtgctagagatttgataccagggatgcttgtggttgaccctatgaggagaatgaccatacctgagatccgtcaacacccatggttccaagctcgacttccgcgttatttagctgtgccaccaccagatacaatgcaacaggccaaaaagattgatgaggagatccttcaggaagtggttaatatgggatttgacaggaatcaattggttgaatctcttgggaacaggatacaaaatgagggtactgtggcatactatttgttattggacaaccgatttcgtgtttccagtggctatcttggagctgagtttcaagagaccatggattccggttttaatcaaatgcattccagtgaacttgcttcttcagttgttggaaaccgctttccaggctacatggaatatccaggagtaggatcgaggcaacagttccctgttgaaaggaaatgggcccttgggcttcagtctcgagcccatcctcgtgaaataatgactgaggtccttaaagctctacaagaattaaatgtttgttggaagaagattggacactataccatgagtgcagatgggttgctggcactgctggtcatcatgaaatgattaacaattctctgcatagtaatcattactttggaaatgattccggcattattgaaaatgaagctgtttctaagtcaaatgtggtcaagtttgaagtgcagctttacaaaactcgtgaggagaaatatctgcttgatcttcaaagggtccagggcccacagtttcttttcttggatctgtgcgctgctttcctttcacagctacgtgttctctagtgaagctcacaagtcgcaaaggagaccttgaggtgtcttgtgtggcatgtgaataagcttacgttgtacatatcaatgccctttcagtatgggtatatctatctgtttgtactttttagcatacccccagtttttatgggttatcatgattggggaaacctaaatatggaatttgctttccttaatcatggtgtctgactaggtctgtctttttaaaagtgaattgaattttcttgatcccgtgaaatccctgaggattttatgaaagcattcgcctccaacagagacatccatttatggtattgaaaaaaaaaaaaaaattgactacttatgtctgtcacttggaagccgaggggttgtttgcctaggctgcatcgaacatgagcttgcagataagcattttctccccgcttcctacttaattac

SEQ ID NO: 1315 - DNA, 670 bp, Glycine max
cccacgcgtccgcccacgcgtgcgcccacgcgtccgttccaacattattgagaatgaggctgtttctacttcaaatgtggtcaagtttgaagtgcagctttacaaaacccgggaagaaaagtatctgcttgatcttcaaagggtgcagggtccacagtttcttttcttggatctatgtgctgctttccttgcacagcttcgtgtcctctagagcgaagagcttaggctcaccagagacataaatatgccttgtgtttcatgtgaataagcttacattgtacatacaagtatcttttcggtccaagcttatcctctgttttctacccgtttatctgtgggtaaacattataatgagccaatcccaagtatgggatttgcttcgttaacaatggtgctcgactaggttttcctttctcttggtgattttaattttatcagtgtaatgaattatatggggaatgtcttaaaagaattagccccaactgacagtgatatatgtatggttatcaaccaaatgctgtaaacgactgttgccattggaagggatgtctaggctgcttctaacttttgcagattagtctttgttgtcctataaatgtaatttcatattactcgtgtatgaatgctatgtaacgactgtgttcatccgacgagccatttcgtagagtgc

SEQ ID NO: 1316 - DNA, 544 bp, Glycine max
acagaactcccatttgaagtagatgctctactttgtacaataaggcgtgtgctttttgccacctcttgtctgaaggagttacaccccctagcaccttaaggctgcttttcacctttggctaccccgggaaaaagtatattctttcttgagctgtgcatcaaacactgaaataattttccatgaaatctatggagtctcttgaattatcttggagccttatatacagataatgtgtatataacttatctggctgcctataccctttttgtactggtacctttaccttccttaaggtaacttatctcacaaatctaggacatacacataagctttcaattcctagtgcatgaggctccaacattggtgtggtctggcaggcttgatgtaggcaatgaattgaatccttagccctgtgcgtgtaaagggaacttcctctgccactagaaacagtgacattgaatcacatatttagaaatggatggaccagctggccgaggtggtgctggcctggacatgtttctaccaaattataaattgggaaaaa

SEQ ID NO: 1317 - DNA, 489 bp, Glycine max
agtcgcgcattagcataatcgctgacgcagatgcagaacatcgaaggagaacgcgatgttttgttcctctttggttcttcgtccccttcccaatcttcaactttagggttcctttaatctcgttattcctcttcactcccaaactccgttcactccaacaacactctgatttagaaatggatggaccggctggtcgaggtggtgctggactggacatgtttctgccaaattataaattgggaaaaacacttgggattggatcttttggcaaggtcaaaattgcagaacatgtattgactggccataaggttgcgatcaagattcttaaccgacgcaagataaagaacatggaaatggaagaaaaagtgagaagagaaatcaaaattttaagattattcatgcatcctcacattatacgactttatgaagtcatagaaactccaactgacatatattttgtcatggagtatgtgaagtctggagagcttt

SEQ ID NO: 1318 - DNA, 552 bp, Glycine max
ggcccttgagcttcagtctcgagcccatactcgtgaaataatgactgaggttcttaaagctttgcaagaattaaacgtttgtaggaagaagattggtcactacaacatgaagtgtaggtgggttgctggcattcacggtcaccacgaaggaatggttaacaacaatgtgcatactaatcatttctttggagatgattccaacatcattgagaatgatgctgtttctacttcaaatgtggtcaaatttgaagtgcagctttacaaagcccgggaagaaaagtatctgcttgatcttcaaagggtgcagggtccacagcttcttttcttggatctatgtgctgctttccttgcacagcttcgggtcctctagagcaaagagcttaggctcacaagagacataaatatgccttgtgtttcatgtgaataagcttacattgtacatataagtatcttttcggtcgaagcttatcctgtgttttctacccgtttttctgtgggtaaacattataatgagccaattctaaggcttcgttaacaatggtgttcgactag

SEQ ID NO: 1319 - DNA, 775 bp, Glycine max
  unsure (1)..(775): unsure at all n locations
tctcgagccgaatcggctcgagcggctcgagtttctatatagctaaagaaagtgatactattaagcataattaatataatggggtacatgtgcattaagatttcgttttgtgtgatgtgtgtgttggggttggtgatcgtgggtgatgttgcctacgctcaagattcagcagaagactacgtgaatgcacacaatgcagcacgagcagaggtgggttctcaatcaccaagacaaacagtgattgttccaagtttggcttgggatgatacggttgctgcttatgcagagagctatgctaatcaacgcaaaggtgactgccaactgatccactctggtggtgaatacggagagaatattgcaatgagcactggtgaactaagtggcacagatgcactgaaaatgtgggttgatgagaaatccaactgtgactatgattctaactcttgtgttggaggagagtgcctgcactacacacaggtcgtttgggctaactcggtgcgtcttggatgtgccaaagtgacatgtgataacggaggcactttcatcacttgcaactatgatccccctggcaactttgttggtgaaagaccctacaaactgtagctgctatctaccactttacatattatgaataacactgcaacaataataacaccaccaatttaggtgatcctacacttcaaattcatgcatgtaataatatatatacgtattaatactcaataacaataaaggatgttccttgtgtnnnnnnnnnnnnnnnnnnnnnnnnnnn

SEQ ID NO: 1320 - DNA, 1083 bp, Glycine max
gttagtgtgctctttggtgtatttcatataccgttgcatacttgcatagtagtaatggcgctctttgttttgtctctcttattcttctcattcttaatggggagttccgagagtcagcttcaagtaggtttctactccaacacatgtcctcaagttgactccattatccgtgccgttgttagagacgccgttctctctgaccccaatatggcggctgtcttactcagacttcattttcacgattgctttgctcagggatgtgatggttcaattctgattgagaatggtccacaatcggagagacatgcatttggacatcagggggttagagggtttgaagtgatagaaagagcaaaggcacaattggaaggctcttgccccggcttggtttcttgtgcagacatagtggctttggcagccagagacgctgtagtcatggcaaatgggccagcatatcaagttccaacagggaggagagatgggttggtttccaatctttcgcttgcagatgacatgccagatgttagtgattcgattgagctactcaagaccaagtttctcaacaaaggtctcacagtgaaagaccttgttcttcttagtggtgcacatacaattggaaccacagcgtgcttctttatgaccagaagactgtacaactttttcccaagtggtgagggatcagacccagcaattagacaaaacttcctccctcggctaaaggcaaggtgccctcagaatggagatgttaatattcgcctagctattgatgaagggagtgagcagaaatttgacataaacattttgaagaacataagggaaggttttgctgtgctagaatctgatgccagactcaatgatgacatagccaccaagaatgtcattgactcctacgtttctcccttcagtccaatgtttgggccttcttttgaagctgattttgttgagtcagttgtgaaaatgggccaaattggtgtcaagacaggtttccttggagagattaggcgcgtgtgttcagcttttaattgaagtaaatatgcaattaatgatcaattggtcataataaaaatgtatggcttctagata

SEQ ID NO: 1321 - DNA, 1303 bp, Glycine max
tctcacactagttgtgaatctcaaatatcaaactcatcgacgtgaacaaagatggctaggtctagtgcttatcctttgttcttgatttcttccattctgtttatttcacacatttatgcctcccaagtagaagccaagcccccagtagtgaagggactatcatattctttctattccaaaacatgccccaagcttgagtccattgtgaggaaacatctcaagaaggtgttcaaggatgacaatggccaagctcctgccttactccgcattttcttccatgattgttttgttcagggatgtgatggatcattgctgctagatgggagtccaagtgaaagagaccaaccagccaacggaggcatcagaactgaggccttgcaaaccattgatgacatcagagctattatccataaggagtgtggaaggatcgtttcttgcgcagatatcactgttttggcagcacgtgattcagttttcctgacaggaggtcccgattatgcagtgccactaggaagacgagatggcctgagcttcagcacatcaggaacaagtgatctccccaaacccttcaacaccaccggcgtgacccttgacgctttcgccgccaaaaactttgatgtcaccgacgttgtcgccttatccggcgcacacacctttggtcgtgcccattgcggcacattcttcaacaggctctcccctctcgaccccaacatggacaaaaccctagccaagcaactacaatccacttgccccgacgcaaactccggcaacaccgccaacttggacatcagaaccccgactgtgttcgacaacaaatactaccttgacctaatgaaccgccaaggggtgttcacctctgaccaggacttgctcaatgataagaggactaaggggttggtcaatgcatttgcgttgaaccaaacgttgttctttgagaagtttgtggatgctactataaagttgagtcaattggatgtgctcactggaaatcaaggtgaaattcgtggcaagtgcaatgtggtgaatgctaggaagtctttgttgacgtctgtggtggaagaggtggtgcaattggttgatcagttttgaatggagcaaaagtttgtaagttatgtgtagttcttcttgtgtggtgttgtttaattgctaaggatatgggtgtgttctattttggggattgttgtttcctgtttgacatatgactcatgtaataaggataaagtgttcagtattatgtgcttctattttgtcccatttctcttgcttattaagaaaataaatgccctaatcatgatcttcccat

SEQ ID NO: 1322 - DNA, 906 bp, Glycine max
gatagaaagcacatagaagagaaagaaagaaaacaaagaggagaaagaaagtagttgaggaagatacaaacaatttttgcagattgttgagaatgcctttcaagaagcctcatcacacctcagacaagaactacataacaggggacgacggaggcaagttcgagatacaacctagaggactcaacattgtgtggggaaatgattctcgatactggaaaattccagaacaaggtcctgcggagctgatccaagtttcatggttggaggtatccggcgtggtaaacttaccaggtgtcaagaaatatagggttgaattcgaagtgagagttaaagacgatgggttcggttggagtggcacggacgtgctagtgatggctaagattgggaaaacgggaaaatatacgtataaggtgacgaaactaaaccctggtgaaaccttgaatattccaaaatcaactgacccacttgagattcaagtgaacaagcaatctgaggaccttcactttggattatatgaagtgtggagcggaaaatggaagggaggccttgaaattgtcagagccctcatcaaacctttaacttaattgcatgcaactcatcataccatatatcgttttcttcatttgccaactttgacaagtggattaattgtttgtggtttaattattattattactttgtatttggcgttgagtactactgtatgatatatagatgataatatgtgtccatgctctgcactagctgaggcctggattattccaacttgcaagtgctgtgagaataacagtgtgttctggtcatgcatgcatgctgagagaaacaatgtatgtcggtcttaaaaagttcactgtatttgcataaactatatgtactaaataatggatttacaagtgtgtttttttt

SEQ ID NO: 1323 - DNA, 1225 bp, Glycine max
gctagtttcatgctctcctattagctccctcagaaaatctctcaagcaatttaattcttagttctatttatcttatctgagcaaaaccattttctcgcttcataagatcagaagagataactatggcaaagtcatctgagctggccattgaagagctgaagaagcttctcagagacaaggaggaatttgatgccgtggcggctgcaaaagttgaggagcttatagctgagttgcagggatgtggcccgcgtccatatgagcctgctgtgcaaagaatcgtagacggatttactcacttcaagatcaacaatttcgacaagaactcggatctgtacagccaacttgctaatggccaaagacccaagtatctggtgttttcttgttctgactctcgagtgagtgccactactatcctcaacttccaacctggagaagctttcatggtacgcaacattgctaacatggtccctccatttaatcagctaaggtacagtggagttggtgcagccattgagtatgctatcacggctcttaaggtgccaaacatcctggtcattggacatagtcgctgtggtggaatccaaaggcttatgagtcatccagaggatggttctgctccctttgacttcatagatgattgggtgaaaattggtttgcctgccaaactcaaggtcctgaaagaatacgaaggctatgatttcaaagaacaatgcaaattctgtgaaaaggagtcagtgaataactcactagtgaacctgaagacatatccatatgttgaaaagggaataaggaacaagaacatagccctgttggggggttactatgattttgtgataggagaattcaagctttggaagtatgagtctcacatcactgaacccatttccattcctctctgtacccattagtaatggacgactcaaacaaactttgctaccactcactaccagtttatcaaagttcttactaaaaagttgtgatgtacatgtgtgtgcttttatatccctaaataaatagcatctacttttgagattccaaaataatgtattttaagaattatcattactaaaaaaaaaaaaaaaaaaatacgtgcttaagtcaaatgccaggtcatttgtatttgagtcaaacaaacgatgatgagaattctagttttagatagatatgttatagtctagcagaacacccataatatatgacttctattttatgttaagtatatttt

SEQ ID NO: 1324 - DNA, 1423 bp, Glycine max
cccacgcgtccgttccactctatatccatcgtcaacagtgaagtgcgaatactcagcaactggagctggggaaccttgtctctactcgctctcgtccccgccggagatccaccatggccggcaaccccgccaccacttcctcctccgcattatctcccgagaaatttaatttcaatttctcccccgataacccctcccgaatcaccctcacttcggatcaggtcaaccactgcacccaagccctcaacattctgaaggagaagctccacgctcctaacgtgatcactcaggagttcgcacacttgcaggcgaacaggataacgccgagcgagatgaggagaagatgcaccgtcgcgtatgacgacgtcaatttgaggaaaaaccgatacaccgacgttctgccatttgacaagaacagggttgttctcaaatctagtactgattatagacctgaagcacaggggtatatcaatgcaagccttgtctcgacctcctcagctggaaacgtgtcccagtttatagccacgcaaggtccacttcaacatacttacgaggatttctgggaaatgatcatccaatatcactgccctgcaattatcatgcttactagattggtggataattacaagatggcaaaatgtggagattattttcaagctgaggataggcctagagaagttggtaatatttctattattggtaaatgggagaacacgactgaaacttcactcgtgctgcgccatttggaggtgaaccatagagaggtagaagatgcgccattatctgttttgcatattcagtatcctgaatggcctgaccatggagttcccaaagatacatttgctgtgcgtgaaattttgaaaagattataccatttaccaccaaactttggtccaatagtggtgcactgcagtgcaggtattggtagaactggaacatactgcacaattcacaacacaattcagagaatagttgctggtgatatgtctgctgtagatattgctaagacaatagctatgttcaggtcccagcgtattggaatggttcagacccaggatcagtacattttctgctataacgctatcatagatgaactggaagaccttgtatctcagcagcagtcggagtagaaggtgctggaacttggaaggatgttgaagctgcttgcctcattttgaagctaactatcaattcttcgaacgtttttatgttcctgcaatgctcatgttttccagcagctgaagtctgaaacattagcatctgggagattttatgaatttcaccgaattctgttattctcatgcttttttgtataattgcaggcagggaaagctgacaaatattaacatccttttgattatattgttagaattctattggggaacagaatggcataatgactacaataatgcattgtccctcc

SEQ ID NO: 1325 - DNA, 604 bp, Glycine max
gggggggctaccaactcccggcttgttcagtctttcttggaactttgttactctcacacatgtctcgctccgtgcctttggtttcaaccatttttgtcttgcttctgcttctggtggccactgagatgatggggccaacaatggtggcagaagcaagaacttgtgagtctcagagccaccgtttcaaggggccatgtttgagtgacaccaactgtggctctgtttgccgaaccgaacgtttcactggaggacactgccgtggcttccgtcgcagatgcttctgcaccaaacattgttaattttaaaaaattaattaagagtgctttgatagaagatgatagatctatcatctttctactcgtgttgttaattaaccactttgtgtttgagaataagggttacccattctactatgggtttctttgtttgcctcttattttatctagttagagatccttttatgaaacgagtgatcagtgtgaaggaattatgttatctgtgttgttaatttaatattattctagtaaattttattccgtcgtgactttttatattctgtttttgtttgttcggcagataaaaggattttattatgctacatcct

SEQ ID NO: 1326 - DNA, 2738 bp, Glycine max
tacgtacactgctatataaacatgaaggttgcacgggtttttttgatcaagtcagagattgaagagttattttgtgagttttgtcacttgagtgttttgtgagccactttgatgttaccctaacatcaagtgttggacctgagtgtgtagagttgatctctattgttcagagagcaatctctggtgtgtctttgatttgtttgtaaacacgggtgagtgattgagagggagtgagaggggttctcatatctaagagtggctcttaggtagaagttgcatgggtagtggataggtgagaaggttgtatacagtggctgttagatcttcgaactaatactattttagtggatccggtccctggcttggtagcccccagatgtaggtgaggttgcaccgaactgggttaacaattctcttgtgttagttacttgtttaatctgttcatacagtcaaacataatctgcatgttctgaagcgtgatgtcgtgacatccggtacgacatctgtcattggtatcagaatttcaattggtatcagagcaggcactcgaattcactgagtgagatctagggagataaattctgatgaacatggagaaagaaggaggaccagtgaacagaccaccaattctggatggaaccaactatgaatactggaaagcaaggatggtggccttcctcaaatcactggatagcagaacctggaaagctgtcatcaaagactgggaacatcccaagatgctggacacagaaggaaagcccactgatggattgaagccagaagaagactggactaaagaagaagacgaattggcacttggaaactccaaagctttgaatgctctattcaatggagttgacaagaatatcttcagactgatcaacacatgcacagtggccaaggatgcatgggagatcctgaaaaccactcatgaaggaacctccaaagtgaagatgtccagattgcaactattggccacaaaattcgaaaatctgaagatgaaggaggaagagtgtattcatgactttcacatgaacattcttgaaattgccaatgcttgcactgccttgggagaaagaatgactgatgaaaagctggtgagaaagatcctcagatccttgcctaagagatttgacatgaaagtcactgcaatagaggaggcccaagacatttgcaacctgagagtagatgaactcattggttcccttcaaacctttgagctaggactctcggataggactgaaaagaagagcaagaatctggcgttcgtgtccaatgatgaaggagaagaagatgagtatgacctggatacagatgaaggtctgactaatgcagttgtgctccttggaaaacagttcaacaaagtgctgaacagaatggacaggaggcagaaaccacatgtccggaacatccctttcgacatcaggaaaggtagtgaataccagaaaaggtcagatgaaaagcccagtcacagcaaaggatttcaatgccatgggtgtgaaggctatggacacatcaaagctgaatgtcccactcatctcaagaagcagaggaaaggactttctgtatgtcggtctgatgatacagagagtgaacaagaaagtgattctgacagagatgtgaatgcactcactgggagatttgaatctgctgaagattcaagtgatacagacagtgaaatcacttttgatgagcttgctacatcctatagagaactatgcatcaaaagtgagaagattcttcagcaagaagcacaactgaagaaggtcattgcaaatctggaggctgagaaggaggcacatgaagaggagatctctgagcttaaaggagaagttggttttctgaactctaaactggaaaacatgacaaaatcaataaagatgctgaataaaggctcagatatgcttgatgaggtgctacagcttgggaagaatgttggaaaccagagaggacttgggtttaatcataaatctgctggcagaataaccatgacagaatttgttcctgccaaaatcagcactggagccacgatgtcacaacatcggtctcgacatcatggaacgcagcagaaaaagagtaaaagaaagaagtggaggtgtcactactgtggcaagtatggtcacataaagcccttttgctatcatctacatggccatccacatcatggaactcaaagtagcagcagcagaaggaagatgatgtgggttccaaaacacaagattgtcagtcttgttgttcatacttcacttagagcatcagctaaggaagattggtacctagatagcggctgttccagacacatgacaggagtcaaagaatttctggtgaacattgaaccctgctccactagctatgtgacatttggagatggctctaaaggaaagatcactggaatgggaaagctagtccatgatggacttcgttatgtcaaggaataagatcgggctgcacaatgcacaaggcaagataaaatgtcaaatgaagaattgaagctgcaggatccatgatgtcggatacaatgtccaggacatcctgcccgaaaatactggagttgctgcacaatgcacaaggcaagataaaagaagtgaagctgcaggatccacgatgtcggatacgatgtccaggacatctggcccgaaaatactggacacataaatctgttatatctttaacagattattgtgcagttagcaacaggttagacgatctatctttaggaacgaactcttctagttccg

SEQ ID NO: 1327 - DNA, 2856 bp, Glycine max
ggcccagtagcaccttcgtaggagccttagacccttatctctctctctctctatctctcccgaattattgttcgttcgacccttttacttagtattccctgtttccggtattcgctccctttttttctgcattctggttttacttagatctctgtcccgcaccagatctggtgcagggtgagagggttgggttcattaattttgtatcaatcttccttctgagcggtaggcgtggggataccagagtcttttcgggaagcaagagagggttctctccgttttcaatagatctctcactgtcttcttttgagggggaagccggggcctcggcctcggcggctttcaaagcccccaccttcacagccctatcaacaaaaaaccctaaccctatttttttcttcattttctaattcttttttgatcgtcgccgccgccactagagatgcctgccctggcttgttgcgtggatgctgcagcacctcccggctatgcatttgccggtgacatctcttttccggcgccggtcgcccttactggcgtacctccggccacgacagacgacagcaacaacaaccgttggtcgccgtccctctccgctgcgctctacaacgtcgacggctggggcggcccctactttgccgtcaacaccgccgggaacatctccgtgcgcccacacggttccgacacgctgtcgcaccaggagatcgatttgctgaagattgtgaagaaggcctccgatcccaaatctcttgggggtctcagcctccagcttcctctcattgcccgcttccctgacgttctgaagaaccggttggagtccctccagtcggcgttcgattatgcaatccaatctggagggtacgagtctcattaccaaggagtttaccccgtgaaatgcaaccaggaccggttcgtggtggaggatatcgtgaaattcggttcacccttccggttcggtctggaggccgggtctaagccggaactccttctggccatgagctgtctttgcaaaggcaaccccgacgcgcttttgatttgcaacggcttcaaggacgcggagtacatttctcttgccctggttgccaacaaacttgccctcaacaccgtgattgttgtggagcaggaggaggaggttgatttgatcgttgaattgagcaagaagctctgtattaagcccgtgattgggcttcgtgcgaagcttcggaccaagcattccggccatttcggtgggacttcaggagagaaggggaagtttgggctgaccaccgctcagattcttagggttgtgaagaacctggacctcgcgggcatgctggattgcctgcaactgctgcattttcatattggttctcagattccctcaacagcgttgcttgctgatggtgtgggagaggctgcgcagatctactgcgagttggttcggctcggggcgaacatgcgagtcatcgatattggaggtggactgggcatagattacgacggttccaaatcgtgtgactctgatatttccgttgagtacagtctcgaggattatgcagtcgcggttgttcacgcggttcagtgtgtgtgcgaccgaaggtccgtgaaacacccagttatctgcagcgagagtgggagagccatcgtgtctcatcattcggtcttgattttcgaggcggttggcaccagcagcaccaccgggggaggagcttcccctgcattgtccgctcaatatctggcggaggagctgtcggaggattaccgcaatctgtcggagctggcttttagaggggaatatgaaacgtgtctggtgtacacggaggagatgaaggagcgatgcgtggaacagttcaagcaggggacggtgtgtatggaacagctggcagcggtggaaggattgtgcgagttggcgaggaaggcggttggggcgggggaatcggttcggagatatcacgtgaacctgtctgttttcacgtccgttccagacgcgtggggaattgaacaggtgtttcccattatcccaattcaccgtttggacgaaaagccttcggtgaggggtattctctcggacttgacttgtgacagcgacgggaagattgacaagttcatcaacggagagtccagcctgccgcttcatgagatggaaggaggaagaacttactatctgggaatgtttttgggtggggcttacgaggaggcgctcggtggagtccacaacttgttcggcggccccagcgtggtcagggtgtcgcagagcgatggccctcacagctttgcggtcacgcgtgccgtgccggggccatcctgtggagatgttcttcgagtgatgcagcaccagcccgagctcatgttcgagacactcaagcaccgcgcgcaggagtatgtcagccacgacaacgcagcagcgcttctggctgctggccttgctcgcacctttgacagaatgccttatctgctgtctctgtcttcctttgtggctgacgatgttgccgctgctgttcctgctgctcaagatctgggggagcagtggtcttattaatggatgtgcttcaattcaaatagtctcgcactagtcatcattccctttgtttctgttgcttgcttggttgttcttcttcttcttgttgatcgtcgtggtcgttgaggtcttcaattttttttttattattattccgttttcgctgtttttagttttgtcctggatgcaatgcaggataaagacagggtcagtcagttattgttctctgcattttgttcccaaatgaaatgtctatgactttcgtcgtcaagttctagggtaacaaattttattgttgccttgcttgttattattatacttagaataaaaatgttctcgcatggacaagttctttatgg

SEQ ID NO: 1328 - DNA, 411 bp, Glycine max
tttcgccttcgtaggagccttacctctctctctctctctctctctctctccattccgtagtatccctctgttcgacccttttacttagcattccctgtttccggtattcgctccctttttttttctgattctgtctggttttacttagatctctgtcccgcaccagatctggtgcagggtgagagggttgggttcattaattttgtatcaatcttccttctgagcggtaggcgtggggataccagagtcttttcgggaagcaagagagggttctctccgttttcaatagatctctcactgtcttcttttgagggggaagccggggcctcggcctcggcggctttcaaagcccccaccttcacagccctatcaacagaaccctaaccctatttttttcttcttgattttcta

SEQ ID NO: 1329 - DNA, 935 bp, Glycine max
gtgaagggagctccccaccggccacagtccacagcacatgttgtacatgtcaaatttatacagccgctgctaattacctcatatcagaaattaatcataattaataataatcaatatttcaaactaagaaaaaagagagagtgtggacggtgaaatggagatatatatccggaagtgttgttgggaaagtaaaagatagatatgatggaggagatagaccccagaagtggtttctgcagctccaattcaatcttctacagcaagcgtaagcccctcccactccctcccaacaacgccttagacgtcaccaccttcatctcctcccgcgcccaccgcgccaccacagccttcgtcgacgccgccaccgcccgccgcctcacctacacccagctatggcgttccgtggagggcgtggcagcctctctctccgtggacatggggatccgaaagggcaacgtggtcctcatcctctcccccaactccatccacttccccgttgtgtgcctggccgtcatgtccctcggcgccatcatcaccaccaccaaccccctcaacaccacccgcgaaatcgccaagcagatcgccgattccaagcctctcctcgccttcacgatctctgatttactccccaaaatcaccgcagctgcaccctctctaccaatcgttctcatggacaacgacggcgccaataataacaataacaataataatatcgtggccactcttgatgagatggcgaagaaggaaccggtggctcagcgcgtgaaagagcgcgtggagcaggacgacacggccacgctgctctactcctccggcaccacggggcccagcaagggcgtggtatcgtcccaccgcaacctcatagcaatggtccagatcgtgctgggtcggttccacatggaggagaaactaaccttcatatgcacggtccccat

SEQ ID NO: 1330 - DNA, 1178 bp, Glycine max
acgagcttcacttcctttcatccaaactcttttgcctctctctctctctctctctctctctctctgtcgtgtttttgatttgagaattgagatcgagtcttttgagacatggcatcctcgttggcaccagctaccaaagccgccactaatttgcgcctcacacactctctccgcttctctcctaaacccaacaacctacgctttgccaccaagcctggtaatacgctgttatgcacgagggttaaggcccaattaaatgaggttgcccttgatagttcctccaatgctacttctcctcctatgaaagccaaatcaaaggaggaaccacccgcaaagcctttagcagaaccatcttcttcagtgttggcaactcaagaatcggtctctcagtttattactcaagttgcaagtcttgtcaagcttgttgattcaagagacattgtggagttgaagctgaagcagcatgacgttgaagtaacaatcaggaaaaaggaggctatgcctcagccaccacctgctcctcaaccttctgtggtgtattcaccccctccaccagcgttgccaccaccacctgtaccagcatctactccagcacctactctagctcgtgcaacccctacaccaacttcagcccctgctgtgaagtcagctaaatcatcacttccgcctcttaaaagccccatggcagggacattctaccgaagtcctgcacctggtgaaccttcctttgtgaaggttggagacaaagtaaagaaggggcaagttgtatgcatcattgaggcaatgaaattgatgaatgaaattgaagctgatcagtcaggaactatagttgaaatcgttgcggaagatgccaagtctgtaagcgttgacactcccctatttgtgattcaaccatagagcgcagagtatttgaatagtagaggaagtgtaggaagattttgttctaaattggatgacacagttgagaagaattcttgtttacaatggatttattccttattgttcgcttctacatgattgcactatgttctagtgaactttttttttgtttcaactttcaggcaagttaatgtgtatgatattaacctcaagtagtctgtttttacttcttgttttgaaatggtgagggagcatttgaaccaaattatcgtgtttggataaaaaaaaaaaaaaaaaaa

SEQ ID NO: 1331 - DNA, 5534 bp, Glycine max
  unsure (1)..(5534): unsure at all n locations
cccagatttcccctcgacttgggcaccccccatcgccgaactccatcctccgactcaagcaccgcctcagagatttctcgcccattgaaccaaaccatcatggcggccgccaatgctccgatcgccatgagagaaactctcacctttccgaccattggcatcaatccgcaattcatcacgttcacgcatgtgacgatggagtccgataagtatatatccgttcgagaaacggctccacaggatagtgtggttatcattgatatgaacatgccgaatcaacctttgaggaggcctatcacggcagattctgctcttatgaatccgaattctagaagccttgctttgaaaacccaactccaaggaacaactcaagatcacctacaaatttttaacattgaatttaaatcaaagatgaaatcttatcagatacctgaacaggtgtctttttggaagtggattacccccaagttgttgggtattgtaacacagacctctgtataccattggtcaattgaaggtgactctgaacctgtaaagatgtttgagagaacagcgaatctgccaaacaaccaaataattaattatagatgtgatcctacagagaaatggttggtcttgattggtattctccatggttcccctgagaggccacaattggtaaaaggaagaatgcaactcttctctgtggaacaacaacggagccaggctcttgaagcacatgctgcatcatttgctcaattcaaagttcctgggaatgaaaacccatctactttgtttctttttgccacgaaccctaatgctggtcaaattataaccaagttgcatgttattgagctgggtgcacaaccagggaaccatcatttaccaagaaacaagcagatcttttcttccccccagattttttctgatgattttccagttgccatgcagatatcccacaaatacaatttgatttatgtgattaccaaacttggtctcctatttgtctacgatttggagacagctacagctgtatataggaacagaattagtccagatcctatatttttgacatcagaagctacatctgttggaggcttttatgccattaataggagaggccaggtgttgttggctactgttaatgagcaaacgatcgtgaattttgtcagtggtcagttaaacaatttggagctagcagttaatcttgccaagcgaggaaatcttcctggtgctgagaaactggtggtagaacgtttccatgaactgtttgcccaaacaaagtataaagaagcagctgaacttgctgctgagtctccgcaaggaatccttcgcacacctgatacagttgccaaatttcagagtgttcctgtgcaagctgggcaaactcctccactattgcagtattttggaacacttctaacaagaggaaagctgaatgcccttgagtcattggaattgtcaaggctggttgtgaaccagaacaagaaaaatcttttggagaattggttggcggaggataagcttgaatgcagtgaggagctaggagatcttgtaaagactgtggacaatgatcttgctttaaaaatatacatcaaagccagagctactccaaaagttgttgctgcttttgctgagagaagggagtttgacaagattctaatatactctaagcaggttgggtacacacctgactatctcttccttttgcaaacaattctccggacagatcctcagggtgctgttaattttgcattaatgatgtcgcaaatggagggaggttgcccagttgattacaacaccataactgatctgtttcttcagagaaatctgatccgtgaggcaacagcctttctgctagatgttctgaaaccaaatctaccagaacatgggtaccttcaaacaaaggtgttggagataaatctggttactttcccaaatgttgctgatgcaattttggctaatggaatgttcagccattatgaccgtcctcgtattgctcaactttgtgaaaaagctggtctttatgtgcgagctttgcaacattacacagagttgccagatataaaacgtgtgattgtaaatacacatgcaattgagccacagtcactcgttgaattttttggtactctgtcaagagaatgggcattagagtgtatgaaagacctattgctggtcaatcttagaggcaacctacagattattgtgcaggttgctaaagaatattgtgaacaattgggcgttgatgcttgcataaagctttttgagcagttcaggtcatatgaagggctgtattttttcctgggatcatatttgagctccagtgaggatcctgacattcacttcaagtacattgaggcagcagcaaagactggacaaatcaaagaggttgagcgtgtgactagagaatcaagtttttatgatcctgagaaaacaaagaactttctaatggaagctaagcttccagatgcacgacctctgattaatgtttgtgaccgatttggatttgttccggatctaacacactatctatacacaaacaacatgcttcgttacattgaaggttatgttcagaaggtgaacccagggaatgctcctttagtcgttgggcagcttttagatgatgaatgtccagaagattttatcaaaggcttgattctctctgttcgctccttactgccagtggagccccttgtggaggagtgtgagaagaggaatcggcttcgtttgcttacacagtttttggaacatcttgtaagtgagggaagccaggatgtacatgttcacaatgcactgggtaaaatcatcattgatagcaacaacaatccggaacattttctcactaccaacccatactatgattctcgggttgtgggaaaatattgtgagaaacgtgatcccaccttggcagttgtagcttataggcggggactatgtgatgacgagcttatcaatgtgacaaacaaaaattctttgttcaaactgcaagcaagatatgttgttgagaggatggatggtgatctttgggagaaagttcttaaccctgataatgcctacagaaggcaacttattgatcaggttgtatctacagctcttcctgaaagcaagagccctgaacaagtatctgcagctgttaaggctttcatgactgctgatctacctcacgaattgattgagcttcttgagaagattgtgcttcagaattctgcattcagtgggaactttaatcttcagaatctgcttattttaacagcaataaaggctgatccgtccagagttatggattatattaatagactggataattttgatgggccagcagttggagaaatggctgttgaggctcaattatatgaggaagcatttgcaattttcaagaagttcaacttaaatgtccaagcagtcaatgtcttgctagataatattcatagcattgatagagctgtggagtttgctttccgagttgaagaagatgctgtttggagtcaggtggccaaggctcaactaagggaagggctagtaagtgatgccattgagtcctttatacgagctgatgatgccacacaatttttagatgttatccgtgctgctgaagatggcaatgcttaccatgacttggtgagatacttgctgatggtaaggcataagacaaaagaacccaaggtcgacagtgagctcatttatgcatatgcaaaaatagataggctgagtgacattgaggagttcattcttatgcctaatgttgctaatcttcaaaatgttggtgaccggttgtacgatgaagcattatatgaagctgcaaaaatcatatttgcttttatatctaactgggccaagttggctatcacactggtcaaattacaacagtttcaaggtgctgttgatgcagcaaggaaagccaacagctcaaagacatggaaggaagtttgctttgcttgtgttgatgcagaggagtttcgtttggcccaaatttgtggactaaacattattattcaggtggatgacttggaagaagtcagtgaatattaccaaaacagaggttgcttcaatgagctcatatctctcatggagagtggtttagggttagaacgggcacatatgggcatctttactgagttaggagttctgtacgctagataccgccctgagaagcttatggagcatatcaaactattttcaacccgactcaatattccaaaactcataagagcttgtgatgaacaacaacattggaaagaactgacctatttgtatatacaatatgatgagtttgataatgctgcaactaccatcatgaaccattcacctgaagcatgggatcacatgcaattcaaagatgttgttgttaaagttgccaatgtggagttgtactacaaggctgttcacttctacttggaagagcatccagatcttatcaatgatgttctgaacgtccttgcacttcgtgttgatcatgcacgtgttgttgacatcatgcgaaaggctggtcatctccgtcttgtcaagccttacatggttgcagttcagagtaacaatgtgtctgctgttaatgaagccctgaatgaaatatatgttgaggaggaagactatgatagattgcgcgagtcaattgatttgcatgataactttgaccaaataggccttgctcaaaagattgaaaagcatgagcttcttgagatgagacgtgttgctgcttatatttacaagaaggcaggtaggtggaagcagtctattgctttgtcaaagaaggataacctttacaaagatgccatggagacagcctcccaatccggggagcgtgaacttgctgaggagttgcttgtttatttcattgatcagggaaagaaggaatgctttgcctcatgtctatttgtttgctatgatctcatacgggcagacattgttcttgaactagcttggatgcacaatatgattgactttgccttcccatatctcctgcagtttatccgtgagtacactggcaaagttgatgaactggtgaaggataaaattgaagcgcagaaccaagtgaaagctaaagagcaagaagagaaggaagtaattgctcaacagaatatgtatgctcagttgttgcctcttgctttgcctgcaccgccaatgcctggaatgggaggaggctttgcccctccccctccaatgggtggattggggatgcctccaatgccaccttttggtatgccacccatgggtagttactgacagataagttcggcaatgaactcaagtgtataccgagagcagtgtagcaacttgggagttttcaaacattttcttttggtgttttaatgcagtattctttccttgcttctaatggaagaggaggttcaggtcaaaataatttcaaatttctgttggggggtttgtgtcatattttggtaatatttttctatagttgaggcatattttggggctgtttgaacgagctagccgaggattttctgtatgtaaccacatttcttgttttaaatgatggtccaaaagaattattatacgaaatagaacccactttgactcnnnnnnnnnnnnnnnnnnnn

SEQ ID NO: 1332 - DNA, 771 bp, Glycine max
  unsure (1)..(771): unsure at all n locations
tctcgagccgaatcggctcgaggaagacgacgtggtcggacacgcaactatttctgactacgttttgctctacgcctctccctctctctcaaaaatcgttctcttcgattttagggttttgttttgctgctgcctccgttccccccttctcataaacaacgcgttttctcttctgcttcgtatctattctttgcttttggttttggttgattcaaggccttcacagcattcgttgcggcattttaatcgatttatccaagcaggactgaatgaactaatggagtctaaaggtgggaaaaagaagtctagtagtagtagtagtaaatcattgttctacgaagctcccctcggatacagcattgaagacgttagaccaaacggtggaatcaagaaattcagatctgctgcttactccaactgcgctcgcaaaccttcctgatatccatccagattgatagttcattgcatgcaaccatagttttattaggttttttcttctttgttttcaattaggtttttgctgctctccttcaaactccgtctttccgaatcctctctttgtgattgtgttctgttctgcttcctaccgcgatagtttctctcctgaacatgaactatgcctatttagatatggcatcgatcgatatagaaatgatctggtaatgtgctacccctgtctgtattaacgntatangatggcatgatctatcagaatcacangaatggccgaaaactaggtcaatanacacactgatatnatntcntattcnn

SEQ ID NO: 1333 - DNA, 1632 bp, Glycine max
ttttttttttttttttatatatatgctgtcagatttctcacttcacaaacaaagaacattagtgtctgcttcatataaccaaactcttcactctgcttctgcttctttggaaagcacttaaccaaactctctgtttcagcttcctctgttttttgggtacgaacagagtttctctgtttttgacgatggccataaaggcgattgaactgttgaaagggtgcggatcacaagaagaaataatggaagtgcttgctgcggtggcttcggatttgggggatgtgatcgatgatgtgaacaccttgcaggtgattccactgaatggtgcaatgaccaatgaggtttttcagataaactggccaaccaaaaatggtggtgagatcagaaaggttctggttcgtttatatggggaaggtgttgaagttttctttgacagggaagaagaaattcgaaactttgactgtatttcaaagcatggtcagggtccacgccttcttggccgattcacctctggcagagttgaggagtttattcatgcccgaactctctcagctgctgacctccgtgaccctgaagtatctgctttgatagcatctaagatgagagagttccataatcttcatatgcctggtgcaaagaaggttcagatttggcacagaatgaggaagtggctcggtcaagccaaaagtctgtgctccccaaaggatgaaaaaaattttggcttggacaatctggatgaggaaataaatatcctggagaagaagttatctgaaggatatcaagagattggtttttgtcacaatgacttacaatatggtaacataatgatggatgaagagacaagattaatcactataattgactatgaatatgccagttataatcccattgcatatgacctcgcaaatcatttttgtgaaatggtggcagattaccacagtgacacacctcatgttcttgactacacgaagtatccaggactagaggaacgtcaaagatttatccgcaactatctgagttctgaaggcaataaaccaagcaatgctaaagtgaaccagttagcgaaagctgcagaaaaatacactcttgcaaaccatctattttgggggttgtggggacttatttcgagttatgtgaacaaaattgattttgactataaggagtatgcaaggcagaggtttcagcaatactggataaggaagcctactttattggactcaccaagcatcgtttccctagatgaaactgtgaatggattgatgccatccttcacgtgattttgcttcagatttcttatagaatttttggagatgtagggtgcgataccaaacatgcatttactgaagtttagtcttagtatatatattaatatattaataacacctgaaggtatgatatcgagcatcatatatgtaaacaatatgtaatcactaacaatgtgtgatgagtttggaattagtaaggattgtttcccagtccctctcttttgggatggagttgggggataagagtgaggataagtagtttaaattgtttgcaatattgatgggataggcatatagcaaatagatagatttgttctcgcattttacttccccattaaataatgattgaggttgagatttgatattaatc

SEQ ID NO: 1334 - DNA, 1816 bp, Glycine max
tcggttcttttttgttttttttgtttgtagaagagatatgtttttttttttgcacgcaaacaaagtgatttattaatccattcgatgttcaaatggtaatagaaacaataaaggtctaaatgcccaaatggtctctaacagaagctaaaaaagacaacaaagaaaaacaataacgtatctggaaaaccagacttattttcacaaggacagaataataaagacacttaaggaaactactcttcctcatcttcctcattccagcactttagagttgatctaggtgaaccacagtcactagtcttcccgaatttttggtagacaacagaaccacccattccaagcccttcgtggctcctctcttcacgacagtatcccttaacatccagaaagcaggtctgctcaaacgacttgcttgcaccatccacatgaactgcaacagaaaactcagttgggaggaaacatgccaataccctctgaaccatttcgttcagattcaccgctttgaagtcataaccaacagtttcgaagcttgcataactgaaaccatcttctggggtaacatgaatcgtagaaacagcagcgccttcaacagagttcattgaataaccacatggttcaaagtcaaagtcacaaatctcggaatctggaagaatttttctaatgccggaattaacagtcatcatggcagctgaagcagattgttctttgtagaaaacctgtgctttctctctatccaggccagtcatgcacatctcaagagtgtaaacattgtcacattgagttacagaatctgcagaagcagagtagacatgccagttctgtgctttgtcttggccacccaaaatataagcattgcttcctgcaccaagtttgccaaagtagccatcaagaatagcaacttcctcagaaaagttgcgatggggatatggctgagcactggggaaaatgaaacttcccctggtgtaattcacagacttaacattaagggaaagcatttcagcgaacttcaatatgggtgggattgcaagcaatagcttagtagtaccacaggttttgatgatgatcttgtaggcataaacaaagaggctggactcagatagaacataggagtcgacattatcgtttttgagcgaagaaacaatggtgcaagcagctggtgttagaatctcacccaactgggattttgtaagagcccttagaccccttccttcagggtcagcaaaaagtcccggctggaaaaaggatatttccaaccttttctcgaaaccttcaaaaccaattgcggaaaccgccatggccatgtaacagtagagaaactatcgcagtaggaagcagatcaaaacacaatcgcaaagagaggatttggaaagatggagtttgaaggagagcaacaaaaaaacctaattgaaaacaaagaagaaaaaatcctaataaaactatggttgcatgcaacgaactatcaatccggatgtgtatcaggatggtttgcgagaacagttagagtaagcagcagatctgaatttcttgattccaccgtttggtctaacgtcttcaatgctgtatccgaggggagcttcgtaaaaaattgatttactactactactactagacttctttttcccacctttagactccattaggtcattcagtcctggttagataaatcgattaaaatgcagcaacgaattacgctgtgaatgccttcaatcaaccaaaaaccaaacgcaaagaatagatacgaaggagaagagaaaaggcgttgtttttgtgagaaagggggaacggaggcaaagcaatagcaaaaccctagaaattg

SEQ ID NO: 1335 - DNA, 1779 bp, Glycine max
cttctgtttctggattcatttgggtgtttggacacaattgcttaattatactttctgttgattgtgttgacgcaggactgaatgaactaatggagtctaaaggtgggaaaaagaagtctagtagtagtagtagtaaatcattgttctacgaagctcccctcggatacagcattgaagacgttagaccaaacggtggaatcaagaaattcagatctgctgcttactccaactgcgctcgcaaaccttcctgatatccatccagattgatagttcattgcatgcaaccatagttttattaggttttttcttctttgttttcaattaggtttttgctgctctccttcaaactccgtctttccgaatcctctctttgtgattgtgttctgttctgcttcctaccgcgatagtttctcttctgaagcatggccatggcggtttctgcaattggttttgaaggtttcgagaagaggctggaaatatcctttttccagccgggactttttgctgaccctgagggaatgggtttaagagctcttgcaaagtcccagttggatgagatacttacaccggctgcttgcaccattgtttcatctctcagaaatgatcatgtcgactcctatgttctgtctgagtccagtctctttgtttatgcctacaagatcatcatcaaaacctgtggtactacaaagctactgcttgcaatcccacccatattgaaatttgctgaaatgctttccctcaatgttagatctgtgaattacaccaggggaagtttcatctttcccggtgctcagccctatccccatcgcaacttttctgaggaagttgctattcttgatggctactttggcaagcttagtgcaggaagcaatgcttatattttgggtggccaagacaaatcacagaactggcatgtctactctgcttctgcagattctgtaactccatgcgacaatgtttacactctagagatgtgcatgactggcctggatagagagaaagcacaggttttctacaaagaacaatctgcttcagctgccattatgactgttaattctggcattagaaaaattcttccagattctgagatttgtgactttgactttgagccatgtggttattcaatgaactctgttgaaggtgctgctgtttctaccattcatgttaccccagaagatggtttcagttatgcaagctttgagactgttgggtatgacttcaaagtggtgaatctgaacgaaatggttaagagggtattggcatgttttctcccaactgagttctctgttgcagttcatgtggatggtgcaagcaagttgtttgatcagacgtgttttctggatgttaagggatactgtcgcgaagagaggagccacgaagggcttggaatgggtggttctcttgtctaccaaaaatttgccaagacttgtgactgtggttcacctagatcaactctgaagtgctggaaagaggaagatgaagaagagtagttttcttaagtgtctttattatgtccttgcgaaaataagtccggttttccagacagtgattgtttttctttggtgttttttcccttttatgttagaccattgttagggcgtttggaccttttattgttctactattaccatttgaacatcgaatggattttaataaatcactttgtatgcgtgcaaaatttgtgtgatgttgtctatgttcacactaatcttgcgctgtgtttgctatttcaagcgtgttttattcttcagaccaatggacgtgtttttcactttttgt

SEQ ID NO: 1336 - DNA, 1506 bp, Glycine max
cagttttcaatttctgagtttatggattccctttctccgtatgcatgtttcagctttgattactgagtctaacttaccctgccacagtttgccttgtttacctgagctctgtttttaactggtctttgatcaaggatggccataaaggcaattgagttgttgaaaggaagcggaaaccatgaagagatatttgaagttcttgcagcagtggctgcatctttgggggatgtaatagatgatgtgaacactttgcaggtaacacctttaaagggggcaatgaccaatgaggtttttgaggtaaattggccaaccaaaagtgatggtcatcaaagaagggttcttgttcgattatatggtgaaggtgttgaggttttcttcaacagggtggatgaaatccaaacctttgagtgcatgtcaaagcatggacagggtccacgccttcttgggaggttcaccactggcagagttgaggagttcattcatgccaaaacactctcagctgcggacctccgtgaccctgaaatatctgctttgatagcatctaagatgagggagtttcacaatcttcatatgcctggtgcaaagaaggctcagctttggcagagaatgaggaagtggcttagtcatgccaaaagtttgtgctcccctaaagaaaccaagaattttggcctggacaatctagatgctgaaataaatatgcttgtggagttgttatctcaaggaaatcaacagattggtttttgtcacaatgatctacaatatggtaacataatgatggatgaagatacaagagcaatcactttaattgactatgaatatgccagttacaatcctattggatatgatctggcaaatcatttctgtgaaatggtggcaaattaccatagtgacgaacctcatgttcttgactacagtaaatatcctggtctggaggagcgtcaaaggtttgtttataattatttgagttctgagggtaagaaaccaagcaatagtgaagtggatcagctagtgaatcttgcagaaaaatacactcttgcaaaccatctattttggggcttgtggggacttatttcgagtcatgtcaatacaattgactttgactacaaggagtatgcgaggcagagatttcagcaatactggttgaagaagcctactttattggactcaccaagtatcgtttcccaagatgggattgccaatggtgtgaaccattgacatggatgcttcttatgtatttagcatgttcagcttggtatgtgttgactaatatatagaaaggcatgatgtgatgcataaaatttgtaaataatatataactaaaaatgtgtgatttgagaatttttacaacagttatgttagtaatccctccttttgtgataagttgaggaatggaagtgagaattctaggtttggttatgtcttgtgatttccaatagatggtttattatcctgcaaaacaatttttttatggcattcataaagtgagaagaccatatacctccagct

SEQ ID NO: 1337 - DNA, 822 bp, Glycine max
cccacgcgtccgcccacgcgtccgcccacgcgtccgcccacgcatttccataaccttagtcatcttcttctttcatctttctccctaacggtatcgagggaaaaatatggcggaagaacacagatgccaggcaccgcgcttctgcgccaacaattgcggtttctttggcagccctgccacgcagaatatgtgctccaagtgctaccgcgatttccagctcaaggagcagcaatcttccaacgccaagatggttctcaatcagtcgctggttccttcaccgccaccggcggtgatttctcagccgtcgtcttcttcttcggccgcggtagatccgtcatcggcggtggttgatgacgcgccacgcgaggcggaggaggttaaggcgccgcagcagaaccggtgtatgacgtgcaggcggcgcgtggggctcacagggttcaagtgtcggtgcgggatgatgctgtgcgggacccaccgttacccggagcagcacgcgtgcgagttcgacttcaaggggatggggagagagcagatcgcgaaggcgaatccggtggtgaagggcgagaagctcgacaagatctgaaacgaatgaacgaagggtgttatggtaatttcgtgtttatcaagttggtggtgatggataacggatgcgaaacgcgggtcggatcattgacccgtaaaaggcggtgggtgagtgggtgagtttggtgggtcattgttatgtggttgcgttgtcattgtaaattaaaaaatttgaaaaacatttcaattgtcattcaccttctttctggttgaaagctgctactatttctaattctttaa

SEQ ID NO: 1338 - DNA, 580 bp, Glycine max
ggggttcctcattttgcaagctttctttggtttcacaccatttttctattgacttcatcacaatatcacagatcattagtgtcggtattatcaccaccatattcttttggacttcctctgctatttctaggtttcgttttatttggctttgattttcttctgcaaccttatctactgcaaagctttgattactgagtctaacttaccctgccacagtttgccttgtttacctggatcatcggttataatgttttctctcaatttggtcatcaagagctctgtttttaactggtctttgatcaaggatggccataaaggcaattgagttgttgaaaggaagcggaaaccatgaagagatatttgaagttcttgcagcagtggctgcatctttgggggatgtaatagatgatgtgaacactttgcaggtaacacctttaaagggggcaatgaccaatgaggtttttgaggtaaattggccaaccaaaagtgatggtcatcaaagaagggttcttgttcgattatatggtgaaggtgtagaggttttcttcaacagggtggatgaaatccaaacctttgagtg

SEQ ID NO: 1339 - DNA, 590 bp, Glycine max
acgaggttacagaatacaaacaaacaaatagaaaacccaaaataaccgagaaaagaaaattagatagagagaagaagaaagcgtatctggaattttcgtttcgttggtgtgtcgtgtgcgtgtggaggttcttttctttgagactttccttcaaattctagattgcttccctttcttttctttcccttataaccaccaacctctccctttcccccttttcatttcttcctcgattttccatttccataaccttagtcatcttcttctttcatctttctccctaacggtatcgagggaaaaatatggcggaagaacacagatgccaggcaccgcgcttctgcgccaacaattgcggtttctttggcagccctgccacgcagaatatgtgctccaagtgctaccgcgatttccagctcaaggagcagcaatcttccaacgccaagatggttctcaatcagtcgctggttccttcaccgccaccggcggtgatttctcagccgtcgtcttcttcttcggccgcggtagatccgtcatcggcggtggttgatgacgcgccacgcgaggcggaggaggttaaggcgccgcagcag

SEQ ID NO: 1340 - DNA, 621 bp, Glycine max
ctcattttgcaagctttctttggtttcacaccatttttctattgccttctgcacaatataaaagttcattagtgtcggtattatcaccaccatattcttttcgacttcctctgctatttctaggtttcgttttatttggctttgattttcttctgcaaccttatctactgcaaagctttgattactgagtctaacttaccctgccacagtttgccttgtttacctgagctctgtttttaactggtctttgatcaaggatggccataaaggcaattgagttgttgaaaggaagcggaaaccatgaagagatatttgaagttcttgcagcagtggctgcatctttgggggatgtaatagatgatgtgaacactttgcaggtaacacctttaaagggggcaatgaccaatgaggtttttgaggtaaattggccaaccaaaagtgatggtcatcaaagaagggttcttgttcgattatatgtgaaggggttgaggttttcttcacagggtggatgaaatccaaacctttgagtgcatgtcaaagcatggacagggtccacgccttcttgggaggttcaccactggcagagttgaggagttcattcatgccaaaacactctcagct

SEQ ID NO: 1341 - DNA, 664 bp, Glycine max
acgagagaaaacccagttagatagagagaagaagaaagcgtttctggaattttcgtttcgctggtgtatcgtgtgcgtctgcgtgtggaggttcttttctttgcaactttccttcaaattctagattccttccctttcttttctttcccttataaccaccaacctctccctttccccctcgattttccatcatccttctccctaacggtatcgagaaaaaaaaatggcggaagaacacagatgtcaggcgccgcgcttctgcgccaacaattgcggtttctttggcagccctgccacgcataatatgtgttcaaagtgctaccgcgatttccagctcaaagagcagcaatcttccaacgcgaagatggttctgaatcagtctctcgttccgccaccgcctccgtcggtgatttctcagccgtcgtcttcttccgctccggcagcagattcggcttcggcggtggttgttgacgcgccacgcgcggcggaggatcttaaggcgccgcagcagaaccggtgcatgacttgcagacggcgcgtggggctcacggggtttaagtgccggtgcgggatgatgctttgcgggacccaccgttacccggagcagcacgcgtgcgagttcgactttaagggaatggggagggagcagatcgcgaaggcgaat

SEQ ID NO: 1342 - DNA, 536 bp, Glycine max
  unsure (1)..(536): unsure at all n locations
tttcgcctacgcgtccggttagtcatcttcttctttcatctttctccctaacggtaataacaacacaaatctcaatctttctttctttttctgttttctctgcttttattttagggttttgaaatttgtgatctcaccggtggatcgcttccggtctcgtttcaggtatcgagggaaaaatatggcggaagaacacagatgccaggcaccgcgcttctgcgccaacaattgcggtttctttggcagccctgccacgcagaatatgtgctccaagtgctaccgcgatttccagctcaaggagcagcaatcttccaacgccaagatggttctcaatcagtcgctggttccttcaccgccaccggcggtgatttctcagccgtcgtcttcttcttcggccgcggtagatccgtcatcggcggtggttgatgacgcgccacgcgaggcggaagaggttaaggcgccgcagcagaaccggtgtatgacgtgcaggcngcgcctggggctcacagggttcaagtgtcggtgcgggatgatgc

SEQ ID NO: 1343 - DNA, 615 bp, Glycine max
ctggagcttgcaggcatttctttaacttatttgtagtatattggatgatttatttaatttgcttatgcactcttcagggtaggcacgaatgcaagccccccttatctcttcaacttcaatgttgacgtaattttaagatattgttttactgaccacagagataactcattaaagctttcaatcatgttagaaaaactgaagtcatatcttcaaaacgatgcttctgaatttcatacacgtttaccaattttaattcgaaacttgtgcacaggtaagaaaccaagcaatagtgaagtggatcagctagtgaatcttgcagaaaaatacactcttgcaaaccatctattttggggcttgtggggacttatttcgagtcatgtcaatacaattgactttgactacaaggagtatgcgaggcagagatttcagcaatactggttgaagaagcctactttattggactcaccaagtatcgtttcccaagatgggattgccaatggtgtgaaccattgacatggatgcttcttatgtatttagcatgttcagcttggtatgtgttgactaatatatagaaaggcatgatgtgatgcataaaatttgtaaataatatataac

SEQ ID NO: 1344 - DNA, 630 bp, Glycine max
gttagtgaaagctgcagaaaaatacactcttgcaaaccatctattttggggtttgtggggacttatttcgagttatgtgaacaaaattgactttgactataaggagtatggaaggcagaggtttcagcaatactggataaggaagcctactttattggactcaccaagcatcgtttccctagatgaaactgtgaatggattgctgtcatccttcacgtgattttgcttcagatttcttatagcctgtttggagatgtaggatgtgataccaaacatgcatttactgaagtttagtcttagtctctctctctctttatatatatatatatataacaccttaaggtataatatgcagcatcatatatgtaaataatatgcaatcactaccaatgtgtgatgagttttggaaattttaattaaggtttgtttatcaatccctctcgtttgggattgagtctcggggataaaactgagaataagtagtttatgttgtttgcaatatcgatggtgtatgcatttagaaagtagatagatttgtcatctcatcttcacttacacattaaataatggtttaggttgcaatttgattttttttttatcaatcaataacaacttagggtttttttttag

SEQ ID NO: 1345 - DNA, 452 bp, Glycine max
gaattagggaagaatatgtgcggtgttgcaacttgtgcatcttatcctgttgtggcttaaatgtatgcagagagatgtggtgcccgatatgcccgtgtaactgccccttgcacgtcatgcttcgtatcgtccatcttaaagggtgaaacattgtactgcgataaaaatttacagtatatgttgatgtttatctgtaaaataagtttggaattgggatgttcattctccttgagctgaatcacattacaaaatcgtactgtaaatcatttgtcacatagaggtatcatagaaattataaactgtgttatgctccccaatctctagcaatgtaaggatagcgtgctgtgtaaaatctgcgcacacttgagttatcctcagtcccaatggagtaaagtttatttggttaacaaaaagagtggacaatatggtaatgtcaaatatactaagctgat

SEQ ID NO: 1346 - DNA, 465 bp, Glycine max
gatggagtttgaaggagagcaccaaaaacacttaattgaaaacaaagaagaaacaatcctaataaaactatggttgcatgcaacgaactatcaatccggatgtgtatcaggatggtttgcgagaacagttagagtaagcagcagatctgaatttcttgattccaccgtttggtctaacgtcttcaatgctgtatccgaggggagcttcgtaaaaaattgatttactactactactactagacttctttttcccacctttagactccattaggtcattcagtcctggttagataaatcgattaaaatgcagcaacgaattacgctgtgaatgcagatacgaagcagaagacaaaaggcgttgtttttgtgacaaagggggaacggaggcaaagcaatagcaaaaccctagaaattgaagagagtgtgtgatttgaaggcaatcagaaagcggacgcgaaggcgaaa

SEQ ID NO: 1347 - DNA, 392 bp, Glycine max
cacataaccaaattctttactctcccctccctctgcttctgcttctttgcttcctctgttttttcggcacgaacagagtttcggctgtttttgacgatggccataaaggcgatggaactgttgaaagggtgcggatcacaggaagagataatggaagtgcttgctgcggtggcttcggatttgggggatgtgatcgatgatgtgaacaccttgcaggtgattccactgaatggtgcattgaccaatgaggtttttcagataaactggccaaccaaaaatggtggtgaggtcagaaaggttctggttcgtttatatggggaaggggtctgaaagttttctttgacagggaagaagaaattcgaacctttgagtgcatttcaaagcatggtcag

SEQ ID NO: 1348 - DNA, 1648 bp, Glycine max
ctgaaagtgaacaagcaggtagtgaggaaaatctgttaaactaccaagcaggtggtgtagaaaattctgcaaagaaccatgcagcagctggtgcaggagatcctccaaatgaccaagctgcagatggtgcagagaattctgcaaaaaacctatcagcacgtagtgcaggagatcctccacatgaccaagcagcagatgctatagaaaattctttaaacaaccaaacagaagctacagagaaacttgtaaaggatgaacagggtactgcagaaagttttgtagaagatgtagcagatgctgttgaaatgcctgaagacagccaaagaaatggtgttgaaacccctgtaagcaacaaagcagatcgcctcccagaagaagcaaaggagatactgaaatcattggcaagtaaatgggaggatgtacttgatgcaaatgcattgcaggtgatccctctcaaaggggcaatgacgaatgaggtattccagataaagtggccaactatgacaggggaattgtcacgaaaggttcttgttagaatgtatggtgagggtgtggacgtgttctttgatagggataatgagatccacacatttgaattcatgtcaaagaatgggcaaggtcctcgtctactaggacgatttacgaatggccgtgttgaagagtttatccatgcacggacattatcagcatctgatctacgtaatccatctatttctgctcttatagcagccaaaatgaaggagttccatgatctagatatgcctggtgaaaagaaagtccatctttgggatagattgcgaaattggcttagtgaagccaaacgtttatcgtcccctaaagaagttgaagctttttatttggatacaatcgacaaagaaatctctattttggaaaaggaactatcaggctctcaccaacaaataaaattttgccacaatgatttacaatatggtaacataatgcttgatgaagagacaaattctgtgaccatcatagactatgaatatgctagttataatcctgtagcatttgatatagcaaaccacttctgtgagatggctgctaactatcatacagaagagcctcatatccttgactacaataaatatcctgattttgaggagcgtcaaagatttgtgcaggcatatctgagtacctccggtgagcagcctagtgacagtgaagtggagcagctacttcaagaaattgagaagtatacacttgcaaatcatctattctggggcgtttggggaataatttcggcacaagtaaacactatcgactttgactacaaggagtatgctaaacagagatttcaagagtactgggcaaggaaaccttatcttctaataaactctgaagcgccttctccttataatgtgcctgagggtacaggagagctagcttcagcagtgcccactaaatcgaagaactctggtatctttaggaagatgaagagagttttgggtctcggcttgttcaggtctaagagctaggacaacaactctgctagctcttttttgtttttttcttattttttgcttctctttgactaagaatatcaaaatgagaaaagttaagaatagttacacataaataatgtactaagcaagcattaagttttggtattatattttatcattttttg

SEQ ID NO: 1349 - DNA, 1423 bp, Glycine max
ggcgaagagaaatgaaattgcctctttcaagaagcatctgagtgtttactattttgtactatattatatatatagtcactcaagcttctaggatttctgccagctacatgaaaatgggaagcaacttgaggtttttgagtctttgcctcttggcattgattgcatcaactcatgctcaacttcagcttggtttttatgccaagagttgcccaaaagctgagcaaatcgttttgaaatttgttcatgaccatatccacaatgctccatcactagcagctgcattgataagaatgcacttccatgactgttttgtaaggggatgtgatgcatcagtccttctgaactcaacaaccaatcaggctgagaagaatgctcctccaaatctcacagtaagaggctttgacttcattgacagaataaagagccttgttgaagctgaatgccctggtgtggtctcttgtgctgatatcctcactttggctgccagagacactattgtagccacaggtggacctttttggaaagttccaacaggtcgaagggatggggtcatctctaacttgacggaagccagaaataacattcctgctccatcttccaactttaccaccctacaaacactctttgccaaccaaggacttgatttgaaggacttggtcctgctctctggtgctcacacaattggtatcgctcattgctcatcattatcaaaccgcttgttcaatttcactggcaagggtgatcaagacccgtcactagacagtgaatatgctgcaaatctgaaagccttcaagtgcacggacctcaataagttgaacaccacaaaaattgagatggaccctggaagtcgcaagacatttgatcttagctactatagtcatgttattaagagaaggggtctatttgagtcagatgctgcattattgactaactcagttacaaaggcacaaatcatccaattgcttgaagggtcagttgaaaatttctttgctgagtttgcaacctccatcgagaaaatgggaagaattaatgtgaagacagggacagaaggagagatcaggaagcattgtgcatttataaatagctaagaatcttgtcttgttcatggatgaatcttgtatcatttattttttgggtttgattatttatgctatgccatgttttttgattagttatgctatgccatgtggtctctgtctacatacgtgtgatcccttatggtatggttgttgtatgtgtgttggaataagtgggctccattgttattcatatttccaactttgctggtagatcatgctcttgtaataagaagcagaatttcttgtgctacccacagcagagttaatgtatgtttagtcttttttttttgtattgatgtactttttcattgttattctcaatttaatgcatttttcctctcaaa

SEQ ID NO: 1350 - DNA, 1263 bp, Glycine max
tacgggggcggcacgaggagagagagagacggctaaaagctaaaaatcatcgaagtactcaaattagcatggctgtcacggttgcattcttgaatttgatcatcatgttttcagtagtctctacaagcaagtcactgagcttaaactactattcaaaaacatgccctgatgtggaatgcattgttgccaaggcagtgaaggatgccactgctagggacaaaactgttccagctgcacttctgcgaatgcacttccatgactgtttcgttcgggggtgtgatgcctctgtgctgctaaattcaaaaggaagcaacaaagcagaaaaagatgggccaccaaatgtttctttgcatgcattctatgtcattgatgcagcgaagaaagcactagaagcttcatgcccaggtgtggtctcttgtgctgacatccttgctctagcagcaagggacgcagtttttctgtcaggaggacctacatgggatgttcctaaaggaagaaaggatggtagaacatctaaagccagtgaaaccagacaattgccagcaccaaccttcaacttatcacaactgcggcaaagtttctctcaaagaggactgtcaggggaagacctggtagctctgtcaggggggcacactttgggtttctctcactgctcatctttcaagaacagaatccacaacttcaatgcaacacatgatgttgacccttcattaaatccatcatttgcagcaaaactgatctcaatttgtccactaaaaaatcaggcaaaaaatgcaggcacctctatggacccttcaacaacaacttttgataatacatattacaggttgatcctccaacagaaaggcttgttttcttctgatcaagttttgcttgacaacccagacactaaaaatctggttacaaagtttgccacctcaaaaaaggctttttatgaggcttttgcgaagtccatgatcagaatgagtagctacaatggtggacaggaggttagaaggactgcagaatgatcaattaataagtcttaaatcaattcaagttaaattgatgttccaaacaagttggatcaaatttcctagatgccaagaatattatgtctttttcctctattaaagaaatatgtatatttatctgaagttaataaaatctcaagcatgtcttgggaaattaatttagagctcaaaatagaaaaaaaaaataaaaaaaataaatttataatttaaataacataaattgaggtgaactctataaaaaaaaattgaa

SEQ ID NO: 1351 - DNA, 1178 bp, Glycine max
ggcacgaggctaaaaatcatcgaagtactcaaattagcatggctgtcatggttgcattcttgaatttgatcatcatgttttcagtagtctctacaagcaagtcactgagcttaaactactattcaaaaacatgccctgatgtggaatgcattgttgccaaggcagtgaaggatgccactgctagggacaaaactgttccagctgcacttctgcgaatgcacttccatgactgtttcgttcgggggtgtggtgcctctgtgctgctaaattcaaaaggaagcaacaaagcagaaaaagatgggccaccaaatgtttctttgcatgcattctatgtcattgatgcagcgaagaaagcactagaagcttcatgcccaggtgtggtctcttgtgctgacatccttgctctagcagcaagggatgcagtttttctgtcaggaggacctacatgggatgaacctaaaggaagaaaggatggcagaacatctaaagccagcgaaaccagacaattaccagcaccaaccttcaacttatcacaactgcggcaaagcttttctcaaagaggactgtcaggggaagacctggtagctctgtcaggggggcacactttgggtttctctcactgctcatctttcaagaacagaatccacaacttcaatgctacacatgatgaagacccttcattaaatccatcatttgcaacaaaactgatatcaatttgtccactaaaaaatcaggcaaaaaatgcaggcacctctatggacccttcaacaacaacttttgataatacatattacaggttgatcctccaacagaaaggcttgttttcttctgatcaagttttgcttgacaacccagacactaaaaatctggttgcgaagtttgccacctcaaaaaaggctttttatgacgcttttgcaaagtccatgatcaaaatgagtagcatcaatggtggacaggaggttagaaggactgcagagtgatcaattaaaaagtcttaaattaattcaagttaaattgatgtttcaaacaagttagaagtatgaacttgttggatcaaatttcctagatggcaagatattatgtctttttcctctattaaagaaatatgtatatttatctgaagttaataaatatatcattttgatatagaaaaaaaaaaaaaacgggcgcgccgccga

SEQ ID NO: 1352 - DNA, 1819 bp, Glycine max
ccgcgagcccactcgacagcacgcaattttcatttttctctctcccttagtcaaagggattcatcgttcttcttcccaggttatttagaaaagcaaaatggtgaagatttgctgcattggtgctggatatgtggggggtcctactatggcagtcattgcacttaagtgcccatccattgaagtcgctgttgttgatatctctaaatcccgcattgcagcctggaacagcgaccagcttcctatctatgaacctggccttgatggtgttgtgaagcaatgccgtggcaagaacctcttcttcagcactgatgttgaaaagcatgtctttgaggctgacatagtgtttgtctctgtcaacaccccaaccaaaactcagggtcttggagctggcaaagcagcagatttgacatattgggagagcgcagctcgcatgattgctgatgtttcgaagtctgacaagatcgttgtagagaaatccacagtcccggttaaaacagctgaagccatagagaagattctgacccacaatagcaagggaatcaaattccagattctatcaaaccctgaattccttgcagagggaactgcaatcaaagatctctttaacccagaccgtgttcttattggaggcagggaaaccccagagggccaaaaagctattcaaacattgaaggatgtttatgctcaatgggtccccgaagaaagaatactgaccacaaatctttggtcggcagaactgtctaagcttgctgctaatgccttcttagcacaaaggatttcatctgtcaatgccatgtcagcactttgtgaggctactggggcaaatgttcaacaggtgtcctattctgttggtacagactcaaggattggacccaagttcctcaatgccagtgttggttttggtggatcctgcttccagaaggatatcttgaaccttgtttacatctgtgagtgcaatggccttccagaggtggctgagtactggaaacaagtgatcaagatcaatgattatcagaagagccgatttgtgaaccgtgttgttgcatcaatgttcaacacagtttcaaacaaaaagattgctattctgggatttgccttcaagaaagacactggtgacacaagggagactcctgccattgatgtatgccaggggctactaggtgataaggccaacctgagcatatacgatccacaagtaactgaggaccaaattcagagggatctatccatgaacaagtttgattgggatcatcctatccacttgcagcccacaagtcctactactgtgaagaaggtcagtgttgtttgggatgcctatgaagcaacaaaggatgcacatggcctttgcattctaaccgagtgggatgagttcaagactcttgattaccagaagatatttgacaacatgcaaaaaccagcatttgtttttgatggcagaaacattgtggatgctgataagttgcgtgagattggcttcatagtttactcaattggtaagccactggacccatggctcaaagacatgcctgctgtggcataaaatagatcattgatcaagtacaatgcaatatcagtcaagtgttgaggcagtcagtttgattctttattattttttgtaagagtttttcttttcctctttaacgttctcataatagttgacataattggggtataaattgtgggaactggggagggtttatgttctatgttgttttgtactccaatcttttatgaatgtactggggaaacttgttttgtttgattaatcttctcttaatatcaaaaaaaaaaaaaaaaaataaaaaaaaacaagtttccc

SEQ ID NO: 1353 - DNA, 522 bp, Glycine max
gtgtttgcattctaactgagtgggatgagttcaagactcttgattatcagaaggtgtatgacaacatgagaaaaccagcatttgtttttgatggaaggaacattgtggatgtggagaagctacgtgagattggtttcattgtgtactcaattggcaagccattggatccatggctcaaggacatgccagctgtggcataagagagacatttcatctcaaggattttgaggcattattcagtttggttcaattttattactactggcaattgttttttggaacaattttcttggttgccatttttcactttcccatagtagttggcataaatgagtataaattttgggaaagtacgaggccatatgttttgtgtttccttgtactgcaagtcatcactactgtttggctgttataagtttataaggatttttttattttatttgattagtatggtgttactatctgtttgatgaatgttttggaaattcctgcatgagaaaaatttggacctactccaaccat

SEQ ID NO: 1354 - DNA, 467 bp, Glycine max
ctagagccggttcgtgaaccgcgtggtttcgtcaatgtttatcactgttgcaaccaacaagatcgcacttcttgggtttgcattcaagacggacactggtgacacaagggagacactagccattgatgtgtgcaaggatatcggcgacaaggcgcctaagcatatatgatccacaggtcactgaggacccaattcagagggatttatggacgaacaagtttgtctgggaccaccctattcacttgcagccaactagtcctacaactgagaagaaagtttgtgtggtttgggatgcttatgaggcaacaaaagatgcagatgggggttgcattctaacctggggggacgagttctagaagtttgctcttactatggagtgtgacaacatgtgaaaaccagcatttgcttgtgttggaaggaacattgcggatgggataacataaagttcgggtttccgatggcgttca

SEQ ID NO: 1355 - DNA, 335 bp, Glycine max
cttggaaccgttcttcgtgttctccattccctctctcactccttcatctacgtaatttccttccttcctttctttctttctttctttctttatcttctcatttttctcaatacaatttttctctttctttctcaagttttgctacttttctcttcttaaccatagttcacatattatatcatcacatatcatagtgatatcatatcacaatgtgtggcttacttgcggtgctgggttgctctgattcatctcaagccaaaagggtccgcgtccttgagctttctcgcagattgaagcaccgtggtcctgactggagtgggctccaccaatatggt

SEQ ID NO: 1356 - DNA, 1223 bp, Glycine max
gcaggatggcatagatgccatcgaagatgtgatctatcacattgagacatatgatgtgacaacaattagagcaagcattcccatgtttcttatgtctcgtaagatcaagtcattgggagtcaaaatggttatctctggagaaggatctgatgaaatctttggagggtatctatatttccacaaggcacccaacaaagaagagtttcaccaagaaacatgccgcaagattaaagcactccacaaatatgattgcttgcgagccaataaatcgacctttgcctggggtctagaagccagagtaccatttttggacaaagagtttatcagagttgcaatgaacattgatcctgagtgtaaaatggtatggatacagaatattgcaatgcaccatcacttaaaaaatgttacattttattaaagtggtttactacgtaatctgttcagataaaaaaggaagaagggcgaattgagaaatgggcactgaggagggcctttgatgatgaagaacatccttatctgccaaaggtactatgtgatttgaagcattgtagaactttgcaaaattaatttgttaaactaacatgttagactttaatttttatgcagcacattttatataggcagaaagaacaattcagtgatggagttggctatggttggattgatggccttaaagctcatgctgagaaacatgtaaaacttgaatgaaaccttttatcgctaaactctatttctttttttttattactctcgctatcaatggtcaggcatgacatttcatattgttaattattggattatgaaaattttctttaggtaactgacagaatgatgctcaatgctgccaacattttccccttcaacactccaaccaccaaagaagcataccactatagaatgatatttgagaggttcttccctcagaactcagcaaggctcactgttcctggaggaccaagtgttgcatgtagcacagcaaaagctgttgagtgggatgctgcttggtctaacaaccttgatccatcaggtagagcagcacttggagtgcatgcatcagcttatggaaaccaggtcaaagctgtagaaccagagaagatcatacccaagatggaagtttctccactaggagttgccatatagagcttgtatgagccatagcaaggactagtagttgccctagaaccagcatataatattattatactagtcatcataaaatgaaa

SEQ ID NO: 1357 - DNA, 960 bp, Glycine max
gaaattcgaaattccaatccaatttccctatctctctctgtctctatatctgtatttctgaattttgggaatagaaaaaccctaagcaaagcaaagcggtaaggatggggaacacggagaagctgatgaaccagatcatggaattgaaattcacttcgaaatcgctgcagcgtcaatcgcgtaagtgcgagaaggaggagaaatcggagaagctgaaggtgaagaaggcgatcgagaaaggcaacatggacggcgctcgaatctacgcggagaacgcgataccgtaagcgcacggagcagatgaactacctccggcttgcctcgcgcctggacgccgtgagtcgcccgcctcgacacgcaggcgaagatgacgacgatcagcaagtcgatgggcaacatcgtgaaatcgctggagtcatcgctggccacggggaacctccagaagatgtcggagaccatggactcgttcgagaagcagttcgtgaacatggaggtccaggccgagttcatggagagcgccatgtgccggatccacctccctctccactcccgaaggagaggtcaacagcctcatgcagcaggttgccgacgactacggcctcgaggtctccgtcggcctcccgcagcccgccgctcacgccgtccctgccaaggaggccgacaaggtcgacgaggacgacttgtctcgccgcctggccgaactcaaggctagaggttaattactctgtaataatactatcatcattatcgttgtttctcgattctcgtcgctgatgcagtggaatattatatatatatatatatatatatatatatattgtgtatatttaactgaattcagttggcacttgttatatgggctctccccttttaggggtttatggccttctcttcgtgttagtgttagtgtcattgcctgaatacttaatacattaattgaatgcttaaaaatgtcttttc

SEQ ID NO: 1358 - DNA, 2278 bp, Glycine max
cccacgcgtccgctttgaacccttctacgtgttctccattccctctctcactcctccatctacgtttcttcaatccattcccttctttctctctttctttatcttctcattttcctcattacactctttttttttttctctcaacttttctcttattaaccatagttcaacatattatatcatcacatatcatagtgatatattatatcatatcacaatgcggggcataccttgctgtgcttggttgctctgattcatttcaagccaaaagggttcgtgtccttgagctttcttgcagattgaagcaccgcggtcctgactggagtgggctccaccaatatggtgataactatttggcttattaaagtgttaagccatagtttgatccagtcttctggtgatcaacccctcttcaatgaagacaaaactgttgtggttacggtgaatggagagatctacaatcatgaagaactcatgaaacagttgcctaatcacacctttcgtacaggaagtgactgtgatgttattgctcacctgtatgaggagcacggagaaaactctgtggacatgcttgatggtatatttttcgttcgttctgctggatactcgtgacaacagttttatagtggcacgggatgcaattggggtcacttccttgtacattggttggggtttagatggctctgtctggatttcctctgaattgaaggggttgaatgatgattgcgaacattttgagtcttttccacctggtcacttgtattctagcaaagagagagcgttccgcagatggtacaatcctccatggttctctgaggctattccatctgccccttatgatcctcttgctttgaggcatgcctttgagaaggctgtggtaaaaaggttgatgactgatgtgccctttggtgttttgctctctggaggtttggactcttcattgggttgcagccgacacggttcgctacctaagcaggcacaaatgctgccaagcaatgagggaaccaaattacactctttctgtgtaggccttgagggtgcacgctgacctaaaggcagcatagggagtaggcagactacataggaactgtacatcatgaattgtcactacactgttcaggatggcatggatgccattgaggatgtgatctatcacattgaaacatatgatgtgacaacaattagagcaagcattcccatgtttcttatgtctcgtaagatcaagtcattgggagtcaaatgggttatatctggagaaggatctgatgagatctttggagggtatctatatttccacaaggcaccaaacaaagaagagtttcatcaagaaacatgccgcaagattaaagcactccacaaatatgatttgcttgcgagccaataaatcgacctttgcctggggtctagaagccagagtgccatttttggacaaagattttatcagagttgcaatgaacattgatcctgagtataaaatgattaaaaaggaagaagggcgaattgagaaatgggtactgaggagggccttttgatgatgaagaacattcttatctgccaaagcacattttatataagccgaaaagaacaattcagtgatggagttggctatggttggattgatggccttaaagctcatgctgagaaacatgtaactgacagaatgatgctcaatgctgccaacattttccccttcaacactccaaccaccagagaggcaataacactatagaatgatatttgagagggtcttccctcagaactcaagcaaggctcactgttcctggaggaccaagtgttgcatgtagcacagcaaaagctgttgagtgggatgctgcttgggctaacaaccttgatccatcaggtagagcagcacttggagtgcatgcatcagcttatggaaatcaggtcaaagctgtagaaccagagaagatcataccaaagatggaagtttctccactaggagttgccatatagagctagtatgagccatagcaaaaactagtagttgccctagaaccagcatataatattattatactagtcatcaatgactcattaatcatcataaaatgaaaattttgcttgctttgtagtttattcaggcaaggctatatataaatagataaggctctctatctagctgtcttaagtgttgtgccatccacatcttgtctttattttctatttatgtcacctgaacactatcataatgtactggatttccaagaaaatgttatcagttaaatttgaatgcatggttcactatttcagcctttcc

SEQ ID NO: 1359 - DNA, 2239 bp, Glycine max
tgtcgttcgcgattcatatgtggtgttgttactgctgctcttttctcttttcttttctctttagttctctcttccccccctttctttttcttttttcttttcttcttctgagccttgtttaagctcttgtctattatgatatccacttaacatagtattattcacaatgtgtggtattcttgctgttcttggttattctgatgactctcgagccaaaaagggtccgcgtgcttgagctctctcgcagattgaagcaccgtggccctgactggagtgggctccatcaacatggtgactgctttttggcacatcaacggttagccatagttgatcctgcttctggggatcaacctctctttaacgaggacaaatccgtcattgttacggtaaatggagagatttacaaccatgaagagctcaggaaacagctgcctaatcacaacttccgaactggaagtgattgtgatgttattgcacacctgtacgaggcatacatggagaagactttgtggacatgctggatggtatcttctcatttgttctactggacacccgtgacaacagttttatagtggctcgggatgctattggggtcacttccttgtacattggactggggattagatggctctgtttggatttcatgagaacatgaaaggcctgaatgatgattgtgaacacttttgagtgttttccacctggtcacttgtactctagcaaagaacgagggtttcgcagatggtacaatcctccttggttctctgaggctactccatccacccccttatgatcctctcgtatgtaaggcacacctttgagcaggcagtcataaacagattgatgactgatgtgccttttggtgttctactctctggaggtttggactcttcattggttgcattccatcacttcttcgctacttggccaacacaaaggctgctgagcagtggggcatcatagttacattcattctgtgtaggccttgagggctcaccagatttgaaggctgcaaaagaagttgctgactatctaggcactgtccaccatgagtttaccttcactgttcacagatggaatagatgccattgaagaagttatctaccatgttgaaacatatgatgtgactacaattagagctagcacacccatgtttctacatgtctcggaagattaaatcacttggtgtcaaatgggttatctcaggagaaggatgtgatgagatctttggagggtatttgtacttccacaaggcacccaacaaggaggagttccacagagaaacatgccgcaagatcatagcattccaccagtaagcattactagcgagccaataaatcaacatttgcttggggtctagaagcccgtgtaccatttttggacaaggcgtttatcaatgctgcaatgagtattgacccttggtggaagatgataaaaagagatgaaggacgaattgagaagtggattctgaggagagcctttgatgatgaagagcatccttatctgccagagcacattttatacaggcagaaagaacaattcagtgatggagttggctatagttggattgatggccttaaggcccatgctgcaaaacatgtgactgaaaaaatgatgcttaatgctggtaacatttacccccacaacaccccaaaaaccaaggaagcatattactacagaatgatctttgagaggttcttccctcagaactcagctaggctcaccgttcctggaggagcaagtgttgcatgtagcacagccaaagctgttgagtgggatgctgcttggtctaacaacccttgatccctcttgtagagcaagaacttgaagtgcacatttcagcctatgaaaaccagaacaacaacaagggtgtagaaattgagaagattatacctatggatgctgctcctcttggtgttgcaatccagggataatataaagctgtgacaaagaataatttgggcgccaatgaagataactaagctaaaggtgaatgaaaaatttgccctgcagtgtaatttcatctgggcaaagctttgtagtgtatagatatagatataaggctttctcaaaaagtgttgcgtattgtattatcttggaatgctgtgatttaaagtcttaataaaagtgtttcctttatcagttcataatgaatgcaaagtccattattttaggctgtattttatttcacttttaattagctgaagcaaaaaaaaaaaaaaaaaagggggggccgccgatt

SEQ ID NO: 1360 - DNA, 906 bp, Glycine max
gggaagatatattattgtgattgtgaacaaaaaagtgtagtgggaaatggcaggtgcgggtgcaggaggagggtatggggacgcgaaccagaggatagactacgtgttcaaggtggtgctgataggggactcggcggtggggaagtcgcagatactagctcggtttgcgaggaacgagttcagcttggactccaagtccaccatcggtgttgaatttcagacgaggactttggttatcgatcacaagaccgttaaggctcagatctgggacactgccggccaagaacgatacagagcagttacgagtgcatattacaggggtgctgtgggggcaatgttggtttatgacatcactaaacgccaaacctttgatcacataccacgttggttagaagaactgcgcaaccatgctgacaagaacatagtcatcattcttacaggcaacaaatgtgatcttgagaaccagcgtgacgtacccactgaggatgcaaaagaatttgctgagaaagaagggttgtttttcttagagacctcagcactagaagcaactaatgttgaaacagccttcataactgtcttgacagaaatatacaacattgtcaacaagaagaacctaactgctgatgaaaatcagggaaatgggaactcagcatctttgtctggccagaagattatcgttccaggccctgcacaagaaatccctgctaagaggaatatgtgctgtcaatcatcttgactttatttataatttgtttctatttagtgtatttcatggttgtgttcttattaccaaattttaaaggtttggcgcattgctttctttgtacatttaaatttaatttgtttgggttgctgagtaaaaactaaaatgaaagtagatacaaattgttttttttttctttgaac

SEQ ID NO: 1361 - DNA, 1172 bp, Glycine max
agctgtcaacatcattgcagcaatgtttcggttttcttgtttccatgctaatgcccaaggcatcaaggcaaagaaaacggttcaaccttctactgaagcaatggagaagggtttgcaagatggtacccaaaatcatggctgtaaagagtcatctaatcctccgagaacatattcatccccttcgaaagaacaagcacacaagcaaataaatatcacggagaatcatattagcaattgggattcagttgagtgcagttgtaggtcagaggatctgaatagcaagttttcctttgaaaatgaaagcaacgttcaccaaactaggcgtattaggaagagccagtctcttcaaagtgggcttgaccaaggcataagggaaggtgatgaagatcttgggttgtcttgtgatggtgccaaaagccagaatgagtcaacaatttctattagaaggtatcataatccaaatgttgagtttcaagtctgttcaggtcttctaaatgatggctcacttttttcaataggagacccaatgccttcagataaagatgcccatgaaatttctgatactccgttatctgttgaatttgctggtgacattcctgaccagacttttgttcctggtagcctatctctaaggaagtcacgttctttacccaatatcagagcttctatactttcttctgaaagagatgcttttaaacatgcattgtcaagatcttccgatgatcttcacgctttacgcatgaggcagaaagaggaattcatcactgagtttcatgatcaaataaggggagatcaagaaagagagaatgaaatggaaaaacctgaagatggtcatatggacaatttctttgatgatggttttgattcttatctgctttctggttcagcagaaaactgggtaatgccaattacagatgattcaagtgatgtcaaaacccttcaaggagattcctcagttcactgtgtgggtgaatttcctaagaaggattttaagattaggcgcattgaggattgggtagttggtttgcagcattgtggaccacctctagaggaaacaaatgaagatttgtctaaagttattgaacctttagttgatgttaacacagtaaatggcgtgacagctgccagtgtggataataaggtcactccaagaatggaagcagctaaaagat

SEQ ID NO: 1362 - DNA, 606 bp, Glycine max
ggttcccaaccatccacctttccctttccgaacccaatcaagcttatcaggagcagcacccaataacgtgccaccacctgtcacccaaacggcacggcactagtcgttttttcactttaacactcctccaaaaatcaaatctaaaccaaaaaccgttggttaagtatcacttaaactcaaataatcaaacaaacaaacaagctagatttgaaattgaaagagcaacaacaaatttagaactaagaagaagaagaagaagattgcattggagaacaatggctagtggaagaagctacggagacgcgaaccagaaggtagattacgtgttcaaggtggtgctaattggtgattccgcggtggggaagtcgcagatacttgcacgcttcgcgagaaacgagttcagtttggactcaaaggccacaatcggcgtcgagttccaaacgcgcactttggtcattcagcacaagagcatcaaggctcagatctgggacactgccggccaagaacgatacagagcagttacaagtgcatactaacaggggtgctgttgcggcaatgttggtttatgacatcacctaacgtcaaagctttgatcacatacctcgt

SEQ ID NO: 1363 - DNA, 442 bp, Glycine max
caacaatgtgcaccatactaggcatattaagatgagccagtctcttcaaagtgggcttgatcaaggcatcagggaagctgatgcagatcttgggttgtcgtgtgatggtgcccaaagccagaatgagtcaccaattgctactagcagaaggtatcatgatgcaaacccgcattgatcagtatggagataatccaaacgttgagtttcaagtcagttcaggtcttgcgaatgatggctcacttttttcaataggagacccaatgccttcagataaagatgcccatgaaatttctgatactccgttatctgttgaatttgctggtgacattcctgaccagacttttgttcctggtagcctatttctaaggaagtcacgttctttacccaatatcagagcttctatactttcttctgaaagagatgcttttaaacatgcattgtc

SEQ ID NO: 1364 - DNA, 356 bp, Glycine max
actgatttcactcccaaacaaacaaagaagaagttagatttgaaattgaaagagaaacaaacttgggatataagaagaatggctagtggaggaggctatggagacgcgaaccagaaggtagattacgtgttcaaggtggtgctaattggtgattcagccgtggggaagtcgcagatacttgcacgcttcgcgagaaacgagttcagtttggattcaaaggccacaatcggcgtcgagttccaaacgcgcactttggtcattcagcacaagagcgtaaaggctcagatctgggacactgccggccaagaacgatacagagcagttacaagtgcatactacaggggtgctgttggggc

SEQ ID NO: 1365 - DNA, 521 bp, Glycine max
gatcgagcagctcgagcggctcgagcgaaaaagagtgtgggcttttaattggttttagcattaaagcgaaagacacaccaaaacacgagacactatatatatgtatatgtatatgtaagtcagttgtggaggtgaaaaagagtggaaatggcaggtgcggttgcaggaggagggtatggggacgcgaaccggaggagagactacgtgttcaaggtggtgctgataggggactcggcggtggggaagtcgcagatactagctcggtttgcgaggaacgagttcagcttggactccaagtccaccatcggtgttgaatttcagacgaggactttggttatcgatcacaagaccgttaaggctcagatctgggacactgccggccaagaacgtacaacaagcctcagttcaaaaccgttgcctatcttgagatttagagcacgcagacagaagtcagaacaagctgcgatggactaatccgtgaaatggctgcatgggcaatctatgcaaatggttcatacttg

SEQ ID NO: 1366 - DNA, 2308 bp, Glycine max
gtaccatcacacgttgcacttcccactaccctttttaccacatgtcctccctcatgcaaaccccacctcttccaaaccgccaacgttaacccttcccttctcctttttaatcacacttccattcccatgcacaccccacacacatcctactaaaaaacattgcccttgttctttcaaagttaccaaacacaagtacacaacacaacagcaacatatggcgtctgaacaattggctcgcagagagaacaccaccaccgagaaggagattcacgttgagaaacacagggttcccaagatggccacccacttcgagcaccttgcggagcaagctaaagaatctgacatcaccgctgggaaggatactccgcagggtagcatagaagccttgcaagctggagagagggtcaaagatcatgcaggaaaagccatgggagatattggtggacgtgggaaagccagagagactcacgagctgggtgcacactttgaatccctggctgacaaagtaactgaccatgcagcagccaatgtagttggaaacaaagagagtcaaagagaagctcgtggtggtgttcgtgatgttgggaagttcgaaatgagaactgaagggggagaaaaaggaaacaaggatagaccagaactgaaaacacgaaccagagaggtaataggaagaacggagaaagaaagaggaagagaaagtggaggacaagtagtggcagagaaaggaagagaaacagaaactgcaaggggaagggttggtgctgaaaatgaaggtgcaagaacaaccgctgttataacttgcacgttggaaaaaggtggtggtactcagaaaccaataagagaagaagagagagagagtgaaagtgaaagatcagcgtgggaacagatttccaactacagtgatcaagccacacaaggtgtgaaggaaaagtacgagagagcaaagcaagcagcaagcgagacactgaacaccacaacacaaaccgcacaagagaaaagcgcacaggcaaagaatcttgcagcacaagcaaaggacgcaacgttagagaagggtcagcaaggctatgctgtgacaaaggacaccatttcaagtgcagcgaaaaccgcttcggagaaaactgcgccagtggcagagaaggccaaagactacactcttcaggctgcggagaaggccaagagtgcgggtggcacaacggcgagttacgtcggagagaaagcggtgcaggccaaggatgtcgccgtggagagtgggaagagtgcggctgggtatgctgccaaggtggctgctgatttgagggacaaggccaccgcggtggggtgggccgcggcccatttttcggcggaaaagacggtggaagggaccaaggccgccgcccatgttgtcgagggagcggccgggtatgccggacataaggccgcggagcttgcttcgatgtcggccggtgctgttaaagggctggctgcttctgctggtgagactgctaaggaatacaccgcaaagaagaaagaggaggcacagcgggaattggaggccaaaaaaccatctcaacctcaggaagctgaagagaggccatcagaaggaattggcgaaactgtgaggcagtatgcacaaaaaccaaagccaagtgaaagaaaccctcagaaggagggaaccggaagcatcgtgtttacagcaataggcgaaacagtaagcagtgccggtgagaaggtaaagaaaccgtttaaaaacactatgggaggagaaagtgaaggaggaggagggaaagaagaggggaagagtgtcattggtaaaagtttgaccagcattggtgagaagctgggtgatgcaaaacagagagaggagctgttagacaacgtcactggcaacatcaccgagggaggaggcgaggtgttgggagcagtaggtgaaaccgttgctgagattggacagaacatgatgaagccagcggagatagttcaggaacgcgctcacgttcgacaagcgggtggggtcttggatgccattggtgaaaccattgctgagattgctgaaacgactcgagtcatggtttctggagaggacgagagagtgctgaggcagagcgtggtgttggagactcgcgtaactggtcgtgccaagcatgaagaagggtcgcacggtgcttgagtctcttgagtgaacgctgtgttttttaaggtttatttctgttaatgtcatgtttagtctgtgtcaagtttcatgtttcgggtttgttgactttgttctatggaattgtaaccaataagaatctccttttttgagattatggaaaatagcaaaattgtgttt

SEQ ID NO: 1367 - DNA, 619 bp, Glycine max
gttgtttatggaattgcaggctcttctttttgtattagctcttattgtcagggctgcaaataggccaacagagtatgatagcgatgaagagtacattaatccaaggcagcaagctcgtcagcctttcctcaacagaccagcaggcccagtatcaggtgcaccagcaactggcacacttgatcagcgtccaagcagaaatgatgcttggagtacacggatgagggagaagtacgggctggatacttcagaatttacgtacaacccatcagaatcacacaggtaccagcaagtaaactctcagccaactgaagaaggaagccgctgtgccatcatgtgatcactttgcatttctccaaaaccacagcagattgaatttcaatgattgtttttgtgggaaaatggctcgagtctaagtttgtcagaaaacactcttccttttgcttagtttgtgtatcattcacactttactggatctccttcactttttttttcatgacatggcagcaacatcttcattgtgttgtgtgtaacattctgccgagtgaacataagaatttatttctctttgctatgttcataatgtattggagtaaatgaagttgtttttggttatggtgtg

SEQ ID NO: 1368 - DNA, 387 bp, Glycine max
accacctggaatggcttggtcccaaatttgatcaaattgatcaaaataataataaccttaacgaatgaatctaacataaaaatactagtcttcccaaactattcaaacggattattcaagacttaataccatggcttatggcaaatgtctacaagaatcattggattcagtctcaaacgggaatctaaggttcactcagcatgaacaacagttgtttatattgcaaattacattgatggcgtacaagaacatacaaatatcgacatcaacagttgtgagactagtcataaaaatacacgcaaaagcaagatgctaagctttatctttgtaaatattagattaaggtttcattatttttgggccttgtatttagggctccataatgta

SEQ ID NO: 1369 - DNA, 271 bp, Glycine max
caaacaaccagctcctggcgattggttcctccaactccaccgcgtcctcctggatcgaccgaaacgtcgtcgcttactacccccaaaccctcgtcagcggaatctccgtcggcgacgaggttctgaccagcgtcccctcctccgcccccctcattctccctgccctcgagtccctctacaacgccctcgtcgcctccaacctccaccaacaaatcaaggtctcaacccctacacgctgcttccatcattctcgaccctttccctccctctc

SEQ ID NO: 1370 - DNA, 445 bp, Glycine max
atggactcctaatattggattgcatcatgtaatggtttggttgttattgttgtttgacctgagtaggtcattactagtggaaaactgagagctctgagagccaagtccatgaaattcaaggatggataacatgatttacttttggacaaccagtcaaggattatattgactcagtagtgagacaccgtgctacttaaaataggggggctcttgggtatcaaggttaagatcatgctggattgggatcctaaagggaatcagagtcctaaaactccctttgcctgatcttgtcacgatccacactccataggaggaagaatacaagtagcctccagctgtattggcaaatgatattgagtgaaagcttgtgcaaagattaaagagtaaagtctgtggatctacatccaacaaaaccatgctgcttgacagttcatgttcaagaaag

SEQ ID NO: 1371 - DNA, 396 bp, Glycine max
ttgcttttgcgtccgcccacgcgtccggtgtaataatgtttaaggattgggatggacaaagtggtggaactattgtgtcagaaatatgtggcttcatcattgtgctctctggaacaataatgttgcatgcgactaaggacttcgagagaagctcttcttttagaggtagtgatcctttatcgcctacgctatctgcccgactttttaccggaaatggtgactcattacttaagcaagatgaggaaaatggatctcccgagagtaatatgcgctcaagaaggcaagaattgtattagatggttaaagatcttaatttatttaattgtagggggaagaagaagcctttccctggagaatctgaatgagatgcccatcagattatactacaccatgaag

SEQ ID NO: 1372 - DNA, 550 bp, Glycine max
gtccaatttatcatcgaaaatgctcctcagcttccctaagacgttgagtgtcatttcattgggcatttgcaaagctacaaagtcaaaacacttttgggtggagttccaaatctggccatggttgagagtgtgtacaatcagaagaactgcaggtagcaaatcatcttgaccgtatggtgtcaacccttcgaagaaatcctctgaaggttttggtgcaagtaaatacgagtggagaagaatccaaatctggtattgatccttccaactgtgttgagcttgcaaaacatgtgaaattgagctgcccaaacctagtgtactctggcttaatgacaataggaatgccagactatacctcaactccacagaactttcagagcctatcaaattgcagaactgaagtatgcaaggcacttgaaatgcccgaggaggaatgtgaactgtcaatgggcatgtctggcgattttgagttagcgattgagatgggtagtactaatgtaagaattggatccacaatatttggaccgagggagtatgcaaagaaacaataata

SEQ ID NO: 1373 - DNA, 486 bp, Glycine max
ggcgacgtgagccgttcgctgcccgcgacgttgtgagaagtccactgaaccttatcatttagtggaaggagagagaaagagaggacagaggcgaaggagagataaagcgaaagaggaagaggagaggaggaagaaggagaatctgaagaagaagaagaagaaggagaaggaggagagactgaagaagggagcggtgacgaattcttgggggaagtatggtgttattagagaaactgatatgtggaccaaacgaccagagttcactgcatggttggcagaacgtaacgcaggtgaatctggagaatatgtccaattgggaagaaccacagatgttcacagaattcatggaggatcacaacacagctacctttccttccacatagtactacaatcgtgatgcttactacacgcgtgaaatggatacggagatgaaataacgttttaagaacgtccaggcaacagagcgcactactttcaatgatgaag

SEQ ID NO: 1374 - DNA, 443 bp, Glycine max
ggtgaagtgttcggattgcggcgacgtgagctgttcgctgcccgcgacgttgtgagaagtccactgaaccttatcatttagaggaaggaagttcgagagggctagaggaaggaggaacagcagaggatttagagtttaagaagataacttggttctaattttttttacaagtgttcacttctgaaattcaactttttgctataggcgttggtgacaggttttatgatatatttctgttacaagacatcgtgagtcgttttacattgacgtgtactaaaaaaactagcattaggttttgattccccctattgaaaggctagtcattttttcgtgatctgcttgtcctccgattgattggctactctttataatgttgcaccccctgccctatctctttccaaaattctatttatatgtatttagtaagctatagattaatcata

SEQ ID NO: 1375 - DNA, 321 bp, Glycine max
attctccacatggtagcccagacaggaagtatcgctcgcggatctaggtgatgtttatcttagcattctactatttgaacaaggtaagcaaaaatttgttgactatatggtgctgtgactaccagtttgaccctatatacaatgtatacgtttattggtggaagctgctgttcctgtgtgactatcagtgtgccttttctcgaagtcacacagaaagttagagtggacaaaagtgtggaaatctgaatttgaagtatgtaagcatttgctatagggaattgagactctggcttaaaaaaattttctgtgtgcgtatgcctc

SEQ ID NO: 1376 - DNA, 604 bp, Glycine max
agggcgcagagacaggtctggtagctgaaatatcatacagatcaagccattcttttttaggatttgggggaagtcgtaaattgatcaaagggaaaatccttgactcatgattactcaaaggtctctgcgaagttgattgtcattgggataagatagttagagtgaaggatacaaatagtggagaagtgagagtgatatatgatgccaaagaagccatttcaggtctcaaaactcctattatcatatgatgtggagagtgtgtattcaaccgaatcagcccttgtttggagtgagttgagccaagccattatgaacaaagattgggaaagagcaagagaagcaaagcaagacgtggaagaaagacagaggaatatgttgagagacagagccatgaaaggagaaaactacaaaggatgctaaaggaagagaaaaagcaggaaccaaaggtcaaacaaagaagggtggtggtgaggaacatggaaaaagaagagaagaaacatagaggagaaacaaagaagttgtccaagagggaaagtagaggcagagaaagcaagaccaatggaagaaacaaactggaactaaaggagagaaaaagctgaaacca

SEQ ID NO: 1377 - DNA, 533 bp, Glycine max
cggacgcgtgggcggggaccagtactataacgagaagctgataacggaagtgcacgggttcggggtggaagtgggggccgcggaatggaacatttcgccgtacgaggggaagaagaaagtggtgagtggggagaggatagaaagtgccgtgaagaggttgatggatgatggagagaaagggaagagaatgagaagcaaggccaaagagatgcaggagataggcttggaaagctgttcaagaaggtggttcttcttacgacagtctcacggctctgattcatcatttcaagactcttgttgctaatcatgtgaatgggaatgggaatatcgatcactgaatgaatattacattgattcgagtttcatgtctttgattattagttatttatcaagtgaatgcatgaatgccataattttagggaatcttaatccgggtaactggctagctaccctaaatttcctaaatctatcatccttaatttgtaacaattgataataataaatcaataagatgtatgtcagtggattctgat

SEQ ID NO: 1378 - DNA, 1104 bp, Glycine max
cccacgcgtccgcccacgcgtccgcaaagtgagaaggacaagaagaaacaaatgactacagaagagaagaaggctttgaaggaagagaaaatgaaactagaggagaaatacatgtgggctattgttgatggtgttaaagagaaggttgggaattttagagttgaaccaccaggattgttccgaggccgaggagagcaccccaagatgggaaaattgaaaaaacgcattcatccaggtgatatcacaattaatattgcaaaggatgccccaattcctgaatgtcctattcctggcgaaaggtggaaggagataagacatgataatacagttacttggttagcctattggagtgaccctatcaatcccaagctattcaaatatgtgtttctggctgctagtagttccttgaaggggcagagcgacaaggaaaagtatgagaaagctaggatgttaaagaattatatagggaatattaggtctgcatacacaaaagattttaccagtaaagatattacaaagcagcaaattgctgttgctacttatcttattgataaattagctctgagggctggcaatgagaaggatgacgatgaagctgatacttgtggttgctgcacgttaaaagtagagaatgtgactagagaaccccccaacaaactgaagtttaacttccttgggtaagattctatcaagtatgagagatacagttgaggttgagcttcctgtttataatgcaattttgaagttccaaaaagataaaaagcctggtgatgatcttttcgatcagctggatacaagtaaattaaatgctcatctgaaggaactcatgcccggtctaacagcaaaagtcttccgtacattcaatgcatcgatcacattggatgttatgttgaataaggaaactaaagatggagaagttggggaaaagattgttgtttatcagcatgcaaataaacaggttgctatcatttgtaatcatcaacgcagtgtttcaaaatctcatactgcacaaatgtcaaagttaacttgaaaaaattgatgaacttcaggctgttctgaaagagctgaaaacggatttagacagggcaaggaaaggaaagcccc

SEQ ID NO: 1379 - DNA, 471 bp, Glycine max
gaatggtccggtgaagtgttcggattgcggcgacgtgagcggttcgctgcccgcgacgttgtgagaagtccactgaaccttatcatttagagggaaggaggagaagacaaattaaccacacaacaacagcagaagaaaataaaggagcaaactaaaatggcagcaaataaatacgttgcattgttgttggtggtgttccttatcgctggaagtgctaatgccagaccaaaagaagtcagctgcgcaagtatttgcatcgacaaagaatgcaaaagtgactttaacagttggtgtgcaatattcaattgtggtatcaaatgtgcactcataggaccacaaaagaaaactgaaacagttcaacgacaaatggtaaaagagcaaggactaacatcatcaaggaagattcaacaataaatgatgaaagaagacgcgaagcacaattggaaaaatacacctactcaagttttttaa

SEQ ID NO: 1380 - DNA, 825 bp, Glycine max
agctaaaattcactagtcataattcgtgaaattttggctccacaagttcaagtgaaatttgaatagaagttcaaatttccctccaattttgtgtgacacttaggctataaataaaggtcatgggtgtgcattttttcaactttgatcatttgaaaattatacttcaatgttcagacctcttttgaggcataaaattttgtgctccttctctccttctccttccactcatcttcttctaccttcaagctcttatccatggcttcctatggtggtgagcttcttcttgactcatcttctccttgaagtggcgtctcctctcaaatcctcttcttctccattccactgcaatcagacctcacgaagcaaaggaatccattgatgaagaagatccaaggtgatgcaatcctaccccgcaagggcattggatagaaaactccaagtagattgggccagagatgcaagagaaggccctagggttcttatgaagccttagggtaaattttaggttcatgggctaagtatgagcccacttatctttgtacatattagattaaggtttcattattttttgggccttgtatttagggctctatactgtatggatgataccctagtaatatatgattttttaacccttgtatattatggcacctatactagtttttgtattaggggtagttttgtaatttcacatacactaagtggatatttgatgtgtgtggttggaaataaatttaattgaattggtagaagcccaatccaattaaattttataaggggaaaggtaaccatttgcttactacgccccattgccacatcatatat

SEQ ID NO: 1381 - DNA, 719 bp, Glycine max
catgattgacggtgcccttattaattggtccctctcctccaaaccccaactgggtatcgcaaagtttccaaattgaatgcaaaaacagaaacttcttcctcaaatgccttctgggtcgctcttctttctatccagattacgaagatttcggtcgccagtaaggtctgtgattcaagtgctattttagcattttttttttttttcctggacggtgagggtcaacttgcatgcacatgttagtgaaaaaccacaataagggggatggatctaagtccctcgccgatacactggcgaaatggaaagaatataatgcttggctggagtctaacaatgaagctgagaagccggctaggaaggtccctgccaagggatcaaagaaagggtgtatgaaaggaaaaggagggcccgagaactcacgctgtaactacagaggagttaggcaaaggacttggggaaaatgggttgctgaaatccgagagccaaacagaggaagtaggctctggttgggtacttttcccactgccattagcgctgctctcgcttatgatgaagcagcaagggcaatgtatggttcctgtgcgcgcctcaactttcccaacgttcaagtttcaactttgtctgaggaaacgtcgagagattctccagctgctgctaaccggtccggaaattctccagctgctagtcaatccggtcatgcgttggatgatattagagagttc

SEQ ID NO: 1382 - DNA, 515 bp, Glycine max
ttcagcgttcacccagagaagcagcagaaggaaaaagtgactgcagagaggtatcgaaaaaagtaactcggaaatagtttcactctgatcaaaatcaaactgaggtagtgttcaatttctctctcatcgctataatagatcatcgaattacagatctttgaagattccatttagtgtcgaataacaacggaatcaaatcaaatcaaatcaaatcaatctcgattggaattttaggaatcgaggaaggaattagggttagggtaaggattgagaaggcatataggagaagaagtagtagaagaagaagtcaattcaaaatgccggaagaggatttggtggacatcaaatttaggttgtacgatggttctgatatcggacccttcaggtactcctccgctgccaccgtcgatatgcttaagcaaaggattgtctccgattggcccaaaggtaaaaccgtcgtgccaaagtcagctaatgaagtgaaattgattagttctggtaaaatcttggaaaac

SEQ ID NO: 1383 - DNA, 965 bp, Glycine max
ctttttaggggtgtcgagggaaggagactagagtatgaagaacctcgggatttgaggtcaaatcctttccaaggtggaggggatgatgcaatcgtaccccccaagggtattggatagaagactccaagaggcttgggctagagctactaaagaaggccctagggttctcatgaaccttagggtagatttttgagcccatggttcaaggttggatctgctcttctttgtaaatattagaataggattttccttcttttgggccttgtattttggccattctagtagtatagggttttagccttgtatttcagggcattttgagtagtctttgtagtagggactttttttttttgtattttcatgtattttgtcatggatgtgagcccagctataatagggggggggaagttaagtccaacctccccttcccaggaggttaagtttagctattagagaggtatgtgtagctaagctctagcttctttaggagtcttcttaaggaagcttctcaaggaggtgagcttagttatgagaggggtgtgtgtagctaagctctagcttctcaaggaagttttctcaaagaagcttttcaaggaagttttctcaagaaagcttctcaaggaagctacctagtctataaatagaagcatgtgtaacacttgttgtaactttgatgaatgaaagttttatgagatacacttcaaagttccacttctttcccttttttattccttcaatttcgtgctaccccccttctctctttcttttcctccattaaagcatcctcttcaagcttcttatccaaggcaattcttggtggtgaagctccttcttccttggcttattccctagtggatggtgcctcccctatcctcttctcctttgccttccgctgcatctccatggtgaaaaatcaccattgaaggacctcattgaagctcaaagatccagcctccatagaagct

SEQ ID NO: 1384 - DNA, 1020 bp, Glycine max
gaatggtccggtgaagtgttcggattgcggcgacgtgagcggttcgctgcccgcgacgttgtgagaagtccactgaaccttatcatttacaggaagacgacgatgacgaggaggaagatgaagaagaaatggaggacgaggaacttgaagctggtattcagtctgttgatagtctgtcaagcactctcactggagtggaaacacctgatgttattgacctccggaagcaacagacgaaggagcctgagaggcctctttatcaagtactcgaagagaaggaagaaaaaattgctcctggaactttgcttggaaccactcacacttatgttgttggcactggcacacaggactcgtcatcgtgctaaaaaggttgatctgcttagaggtctgaacacagatatagtaaatgtcacattacaccctgaaaagttggaagccatggaaaatgttttgcccgcgaagtacgaagaagcaagggaagaagagaagttgcgtagtcagcgtgaagatttcagtgacatggttgcagagaacgagaagaagaggaaaagaaagatgcaagaaaaggagggcaagtcaaagaagagagacttcaagttttagggtgcgcctagttcgtttcttttgctggaagatgggggggctgctaccctttttctactgggcaagttctaacattccatgagccatgagttgagaatttgttgttagcaggggtctcaattgataagaatatataattatatccgccatatatataatccaatgaagcctccatgcagagaacgtggtagtcaagctttagttgaaaattcaatacgatgaatcctaccaaggctttacggattctggccgacatgaatgcatgttacttagaggaataagttattctcactactatatttgtagttttcatttccttttgttctttaaatgacattttatggtaatattttctgttttcttttggaagacaaaaacttttgaatcaagagtggtaaaatctgtttttttctttct

SEQ ID NO: 1385 - DNA, 981 bp, Glycine max
ggacaactgacaaggaggcagttccttctacaaacaaaatagtatatggggcggtagatagataggctacaagtaaacgaagcaagataatttcttcctacttaacaaaaagatagtaagagccatacggtatcttatcccataggtcaccatgatccttccattagaagttgcaataacgtgatagaaatggctttgagatacactttcttttatggttagctatatattctgaacccgatcccccctcacaagacttttaaatcacacaattcttttttttatttcttggtggaaaacagattgtgcatctaattccaaattcacccataaaaatacttccttttgctcaccagccatatgtgtatgatggaaggagatgagaatattcaagcatcaacaaagggaaaaaatgtggaaagcttcaccagcttggaggcaccaaggaagaaaagcaagaggatagaaaacaagaggaggtttagtgatgaacagttaagatcactagaatgcatatttgagtcagagtcaaagcttgagccaaggaagaagatgcaactggctagagatcttggcctgcagcctcgccaagtggctatatggttccaaaacagaagggcaaggtggaaatcaaaacgaatagagcaagagtaccgaaaactcaaagatgaatatgacaatttagcatcaaggtttgagtccctaaagaaagagaaggactctttgcaattagagttgcagaaactaagtgatttgttggaggcatgtcaagatgatggaagggaagacaaggctggcaaagaaaacagcatagaagatggtggctcaggcagtggatacagcagttggaagcctgaagcaaaaaaaacaaggttttcaaatgatgagggttcagaggagagataggggtgtgtactcagatgaccaaaatgagaatagcatcataggggctgttgagaaatctgaggacaaaggacacca

SEQ ID NO: 1386 - DNA, 1293 bp, Glycine max
ttggtaaggaatccaagtaacttctaagaactaggaatcagcaatcagcatagtatgaaaagataaataagtgggaatacactgaagaacacagctacagatattttccagcactcacaggagaagtttcatacaaacaaactcaaaatcctcctattgttatgtggacagcacgagactgaggtgagcttagttattagaggggtgtgtgtagctaaggtttagcttctcaaagaagcttctcaaggaagttttctcaagaaagtttctcaaggaagctacctagtctataaatagaagcatgtgtaacacttgttgtaactttgatgaatgaaagtcttatgagacacacttcgaagttccacttctctccctcttttattccttcaatttcgtgctcccccctctctctttctctccctctttctttacctccattgaagcatcctcttcaagcttcttatccaaggcacattctttgtggtgaagcttcttcttccatggcttattccctagtagatgacgcctcctctcacctcttctcctttcgtcttctgctgcatctccatggtggaaaatcaccattgaaggacctcattgaagctcaaagatccagcctccatagaagccccacaagcaagcttccatcaaagtacctcaaaccgagctttttaattcattctatgtacccgtggtggtccacattttgtttcatgtatttttattctcattttcattcgctttttatacccccttttgacgtgcttaagccatttatttaagtcattttctcgcctaataaaaaaataaaataaatttccaccgatcatttgaattgtaatattcattaatttcttttaaaatgaaatccgaccgttcggtcgtgccgtaaaccacgttggaaatcaaaagaagaggtaaaaaaataatataataatcaaaaaaatatcttttagtaaaataaaccaaaaaaaatcaatcggacgttttctctttgggatttctcattcttaattgaattgactaataactaaagtgaaactaaggctaaaatcaactcgcctagtcaagctcgtctgcaaaaaaaatcactaaaaaggattttaaggttcgatacctcagtttttctcactaagtaaaaatggataattttaagggtcaaccacctttaaatgatcacgctttcaagtaaaaagaatcacttgattcacgcatatgaaagaactacgtaggtctgatttcctctccaaaggagggcccgtaggagcaagagccccacttttgtcgaccccc

SEQ ID NO: 1387 - DNA, 956 bp, Glycine max
cgtgaagtgttcggattgcggcgacgtgagcagttcgctgcccgcgacgttgtgagaagtccactgaaccttatcattcagaggaagtaaagtcgctggtaggatcatcatctctttgagttgccattgaagaagaagctcagatcggaaaaattcacctctccaatcccaatcccatcgttgcaaatggttccttcgttcatcattctattccctctttcgctccataattacaataataatctcttcgttccaatatttcttttttccattctaaaattcgttttcctcttttccgcattcgcagatccgattcattctgttgcagaacaggcagggcaagacccgtcttgccaaatactacgttcctctcgaggactccgagaagcacaaggtcgaatacgaggttcatcggctcgtcgtaaacagagaccctaaatacacaaatttcgtcgagtttcgtacgcacaagataatatacaggcgatatgctgggttgtttttctcaatctggtgttgatatcactgataatgagttggcgtatttagagtgcatccatttgtttgtggaaatattggatcacttcttcagcaatgtctgtgagctcgatttggtttttaacttccacaaggtctatcttatacttgatgaattcattctagcgggtgaactgcaagaaacaagcaagaaggctatcattgagagaatgggggaacttgaaaaactagaatgaaaaattacttttcagcagtcatatcaatttggagatttcgatgacttactcatgcccttggcttaattcttgtatttcaattgtgatacagaattttgaaaatcttttccgttgagccatgtattcaatgccctttaccttcgcttcttattcggcttatgtttatatttgtaagacatttataaaatcagggtttttcagtagccctttctgtcaaaaaaa

SEQ ID NO: 1388 - DNA, 1358 bp, Glycine max
cccgaagctcaaacccaaaacccgaacctccgctatcggatcctaatccagtaatccctgatgggaacggaatgctacacttacatggggcgcagtttgagcgaactccgcatcaacgacgattcctcttcctccgccttcagcgactgcaacagtgacagatctcgcgaattcgccaccgcttcttcgcaaacgcggcggtttctcatcgcctgcgccatcgtaaattctgacgacttgatccgccaactcgtcgccgatctcgactcctcctccatcgaactatcagaaacaagccgccatggaaatccggttactcgcgaagaacaagccggagaatcgcatcaaaatcgcgaaagccggcgcaatcaaaccgctaatttctctcattttgtcttcggacctccagctccaggaatacggcgtcaccgcgattttgaacctctcgctctgcgacgagaacaaggaggtgatagcctcctccggcgcgatcaagccgctggtccgcgcgctgggcgcgggaaccccgacggcgaaggagaacgcggcgtgcgcgctgctaagactctcgcaggtggaggagagcaaggcggcgatcgggcggtccggcgcgattccactgctggtgagcctcctggagagtggcgggttccgcgcgaagaaggacgcatcgacggcgctgtactcgctgtgcatggtgaaggagaacaagatcagggcggtgaaggcggggatcatgaaggtgctggtggagctgatggcggacttcgagtcgaacatggtggacaagtcggcgtacgtggtgagcgtgctggtggcggtagcggaggcgagggcggcgctggtggaggaaggaggcgtgccggtgctggtggagatcgtcgaggttgggacgcagcggcagaaggaaatcgtggtggttattctcttacaggtttgcgaggacagcgtggcgtatcgcaccatggtcgctcgcgaaggtgcgattcctcctttggtcgctttgtctcagtccggcaccaatcgtgccaagcaaaaggcggagaaactaattgagcttctgcggcaaccaagatccggctacggcgctgctcgaagtacatcagaagtgctggcgtagacgccagcaataataaaataaatttattcagcttggtggtgccccacctcaccgtgcgtgagtgtgtacaaacaccacgtttaaaaattgtgaatttggttaaaacacaacgtgcgtcctccaagagagacggagagtttaaacctttgtaaatatcttcttaacggagaagaagctttgtaaagtttgtggtacaaaatgatacgagtttcagcttggtttgctttctgggctttgc

SEQ ID NO: 1389 - DNA, 1398 bp, Glycine max
tgctggctgacgacaagagaaaataaaaaaccgcatctgttccgtgtaaggagaagtcacaaaatttctcagctcctgcctgtatacttcacatggcctaatcccacagtcgcacactcttccaccctgccatcaccatctcatcaacacaacgcccattacctatttaaaaatccttaatatattattattcttcgtccatcgctttttcttgaagactacttcatccttcttattagtttctttttatttcaatctttctcactcgcacgcacgcacgcacagtctctagtggtaccgtgccggttcatttgcttcatccaccacctcattttcagagatttcgtgcactcaacaaactctcatccacccatggcgtcatcactatcaacaatagctctattcctgccccaatcgctctatattaagccccgcctggcgccacggcctcttcctccccctcaattccgctcccttttcctaacctcaccggcgggtgctcgtactgctactgtcgatgcctagaagggcggcggtcatcgtgtcggcggcgacggcggagacgccgaagcagaagggcgaatcgaaagggttcgtggaagagatgaggttcgtggcgatgaggctgcacacgagggaccaggccagggagggcgagaaggaggtcaagcagcccgaggagaaagccgttaccaagtggggacccatcggtcgaagggtaactgaaatttcttgtggacagtaagctcgtttatgacacgctggagaaaatcgttcatgaggctcctcatcctttttatgctgaattcagaaacactggattggaaaggtctgcaagtttggtagaagatttggattggttcaaggagcaaggttataccattcctgaaccttcttctcctggtcttacctatgcacaatatcttaaggagttatctgtgaaggatccccaagcattcatttgccatttttacaatatctactttgctcattcagctggtggtcgaatgattgggaaaaaggttgctgaaaagttacttaacaacaaggcgttggagttctacaaatgggatgatgaccttccacgattgttgcagaatgtgagagacaagttgaataaagttgctgaaccttggagtcgggaagaaaaggaccactgtctggaagaaacagaaaaatcattcaagctctctggagagattctccgtttgattttatcatgataatagatgccctgctatctgtgtaattatgggtattaaagtgcatggcggaagccaacaacattaccatatgtgaattattcttatttccaatacgcaaaggaataatagaactgatgtttgattaacttgcttttctctaatgtggcttagattcctttgtggctgtgaatat

SEQ ID NO: 1390 - DNA, 733 bp, Glycine max
ggggcctgagaggcggtggtttaccctgtggcggatgtcagcggttcgagtccgcttatctccaactcgtgaacttagtcgatacaaagctatatgatagcacttccatttttccgattcggcagtttgatctatgctatgatttatcattcatggacgttgataagatccttccatggagcaggagccttaggatggcatagccttaaagttaagggcgaggttcaaacgaagaaaggcttatggtggatacctaggcaccctattagacgaggacagggcgtagtaagcgacagaatgcttcggggagttgaaaataagcgtagatcgcggggattcccggtatagcgtcaacctctcgaactgctgctgaatccacgggcaagcaagagaacaaccttgggttgggaaaaacctttggggaaaaaaaaaccccccaaaattttttcctttagtagccagagaaaagaagcaaaagcgattcccgtagtagcggcgagcgaaatgggagcagcctaaaccgtgaaaacggggttgtgggagagctatacaagtgtcgtgctgctaggcgaagagcagagaatcgctgcaccctagatggcgacagtccagtacccgaaagcatcactagcttacgctctgacccgagtagcatggggcacgtggaatcccgtgtgaatcagcaaggaccaccttgcaatgctaaatactcctgggtgaccgatagtgaagt

SEQ ID NO: 1391 - DNA, 797 bp, Glycine max
cccacgcgtccgcccacgcgtccgtacaattcgctctgtgcagtttcctcgctctcttttctgcaattttcttttttgttccttctctgcagttatatccacctttgagcatcaatggcggacgctgaaacattcgcattaccaggctcagaccaaccagctgtctaagatctcatctatcaacacatgtctgacagcaacaaggagctattcttgcgtgaactcatcagcaatgcttctgcatgctttggataagattcgattcgagagcttaaccgacaagagcaagctcgatgctcagccagagctcttcattcgtcttgtgcctgacaaggataacaagactctttccattattgacagcggcattggaatgaccaaagcagatttggtgaacaacttgggtaccattgcgaggtaccgggaccaaggagttcatggaggcgttgcaggccggtgctgatgtcagcatgatagggcagttcggtgtggggttctactctgcttgccttgttgcagagaaggtcattgttaccaccaagcacaatgatgatgaacagtacatttgggagtctcaggctggtggctctttcactgttactagggacactgatggcgagcaactcggaaggggaaccaagatcaccctacttcctcaaggaagatcagttggagtacttggaggagaggagaatcaaggatcttgtgaagaagcactctgaattcactagttatcctatttacctttggactgagaagacaccgagaaagagatcagcgatgatgaagatgatgaa

SEQ ID NO: 1392 - DNA, 1595 bp, Glycine max
gactcttcaaattaaaccagcaaaatcttatcttagctgccccatcacaacaaccacgatactatttctcatactctattaggcaaaaacaccaccaaatgggagaggttagttttagtttcatcatcatgtatattcgtcattcattcattcctttttcagtagtatattcagattcttgcaattccctttaacacttatcatcacgcgtttctaattaaaactcgtgtcgtttatggcaggaaaaggagcagcctaagaatgacaccgagaaaaagcccgaggaggtagcccccaagaaagacgacggacccatccctgtcgtttacaaactcgacttgcattgcgagggatgcgtcaagacagatcaaacgcacctgtcgccacttcgaaggtgtggaaaccgttaaggcggatctatcgtcgaacaaggtgactgttaccggtaaaatggacgccgagaagctgcgagataagattgccgagagaccaaagaagaagggttgatatcatatcagctccgccgaaaaaagaagccgccgttgcggaataaccgccggagaagaaggcagaagacaagaagcctgaggagaaaaaaccagaagaaaaacctaaagagagtaacggtggttttgaagatcaaactacactgtgacggttgcattgcgaaaattcgaagaatcattcttaggttcaaaggtgttcaattggtgagcctcgacggaagcaaggacttggtgacggtgaagggaacgatggacgtgaaggagatgttgccgtacctgaacgagaagctgaagcgaaacgtggaagtggtgcctcctccgaagaaagacgacgataagaaagagaaagaaggcggcggcggcggcggcggcggcgagaagaaagcaggcggtggtgagaagaaagagtaagaaggcgacggcgagatgaaagagaaagacggtgcggcggcagcggctgcggaggttattaacaaaatggagtatatgcaccggatggcacctccttcgttctggtacgacggaggacactttcccggtcaaacaagttacgctatggaggttcatccagggtatggtgctagtgctaataatcatacacgtggagccagggtacgtgaaccagggttatcctctgcagccacctctaccgtactacatgcacccgcacgctcctcctccgcagatgttcagcgatgaaaaccccaatgcatgttcaatcatgtgatgatcggtgattaattttcggtgtacacttacacacgtacgggatacggatacggaatacgcatggtgtaatttgtaaataaaaaaaaattgacgtgcgtgtaaaaattgaggggtggataatattccgtgttattaaaatttaattaatatagagagtttttataatatggtaggattttgatataataatatatcatatgtgtaggttgttgttttagagaatagagatagagaatggccggctggctggagaatcctgtccagaactcacatcacatgagctgttctttgttttgtttatttttttaatatcagaataaatggtttactattatttcaatgaaatttgttgatcttatt

SEQ ID NO: 1393 - DNA, 496 bp, Glycine max
ttttagcatactaagcatagtatgtaaagataaataaattggaacacacagaagaatatcagctacatgtatttcccaattcccagcactcacaagagaagtttcatacaaacaaactcaaaatcctgcctattgttatgtggacagcacgagacttatcctcaatacgtcagcagcgggaatgaaaagaaagattatacattaatgtcttttaacaaatggaaggaacacgtcctatcctataatataatgcgttattccaatttgctagcccattgcatacttctgagtccagctcctagcagttgtctcatacttggacctgtctgtcttgtacatatgagcaatttcaggcaccaagggatcatctgggtttggatccgtcaatagggagcaaatggagagcacacaccttagatattgtcaatgctgggctccagctgctcctgtgtaagagtatcaagagcaaatactacccccattgctgttgatattt

SEQ ID NO: 1394 - DNA, 1503 bp, Glycine max
cttatcttagcaatagctacccctatcacaacaatactctattaggcaaaaacaccaaatgggagaggttagttttttgtttttagtttcatcatgtatgttgttcaccatagtatattcagattcctgaaattcctttttttgctcctcagtttctaattaattaaaactcgtgtggtacgtttatggcaggaaaaagagcagcctatagaatgaaaccgagaagaagcccgaggaggccgccgcagcccccaagaaagacgacggaccccatccctgtcgtttacaaactcgacttgcattgcgagggatgcgtcaagaagatcactacgcacatgtcgccattgtcaaagtgtggaaaccgttaagggagatctatcgtcgaacaaagtgactgttaccgggcaattgggatgccgaaaagctgcgagataagatcgccgagagaaccaagaagaaggttgacatcatctcagcttcgcccaaaaaagaagccgccgccacggaaaatccaccggagaagaaggttgaagagaagaaacctgaagagaaaaaaccagaagaaaaacctaaagagagtatggtggttttgaagatcaaactgcactgtgacggttgcattgcgaaaattcgaagaatcattatgaggttcaaaggtgtacaatcggtgagccttgacggaagcaaggacttggtgacagtgaagggaacaatggacgtgaaggagatggtgtcgtacctgaacgagaagctgaagcgaaacgtggaagtggtggcctcttcgaagatagacgacaatatgaaagagaaagaaggtgacggtggcgaaaagaatgagaaagagaaagactgtgctcatgagaataatgataaagacgttgctgcagctgccgatgttattaacaaaatggactatatgcaccagatggcacctccgtcgttctggtacgacggaggacactttccaggtcaaacaaattacgctatggaggttcacccaggatatggtgctagtgctaataatcattacgtggagccagggtacgtgaaccagggttatcctctgcagccacctctaccgtactacatgcacccgcacgcacctccgccacagatgttcagcgatgagaaccccaatgcttgttccatcatgtgataatcagtgattaattttcgttttcggtgtactcttacacacggacggaatacgggatacggaatatgcacgcacgttgtaatttgtaaataaaaaaactggaaaaaaaaatcgacctgcgtgtaaaaaatgaggggtggataatatatcaatattccgtgttattgaaaattaatatagagaaattttatgatatggtagaattttgatattataataatgttttagagaatagagatagaggatggccggctggctggagaatcctgtccagaactcacatcacatgagttgttatttgttttgtttatttttttaatatcagaataaatggttactattgtttc

SEQ ID NO: 1395 - DNA, 989 bp, Glycine max
acccacgcgtccgcccacgcgttcgctccagatttaagaagaaacttaatcgatcatcacttcacgttcagtaatacatcatggcagacgagacccagaacacagtatgagagctctgaggttgaggtccaggatcgtggtgtttttgactttctcggtaagaaaaaggatgaagaagacaagcctcatcctcaggaggaggtcatcgccaccgagtttcaaaaagtcactgtctcagaccaaggcgagaacaagcacagcctcttagaaaagctgtcaccgatctgacagcagctctagctcttcaagtgaggaggaaggagaagatggagagaaatggaagaagaagaagaaggaaaagaaagggctgaaagagaagatcgaggagaaaatagagggtgatcatcatcatcacaaggatgaggacacaagtgtccctgttgagaaagttgaggttgatgaaacagcacatgctgaggaaaagaaggggttcctcgacatgattaaggagaagctaccagggcgacaagaagacagaggagagccacagctactactcctcctccaccaccacctgttgcatcattggagcgtggtgaaggtgctcatcatgaaggagaggccaaggagaagaaaggtatattagaaaagataaaagagaagcttcctggttatcactccaagacagaggaggaaaatcgaaaaggaaaaggagagtggtgctcattgatatttaagattgagacaaggcttttttgtttggttggagatccatgattgtggcgtagctttggttttcatttcatcatatgacagccttgtgggtttctttggtgtttcttgatgcatacttaatttacttaataaatggggaattaatctcttccatttacaaaaaaaaaagtttgtgtaggtttccttctttgaagtaaaaagaaattaaatatgtactgaaaatggaataatagtgtgttttatttgtgttttat

SEQ ID NO: 1396 - DNA, 674 bp, Glycine max
agacgacagaaggggatcaaattgatgaactagtgtgacattagagaagaaccaatttaagagaagagcagcggagctaaagagcgggagaggagagaggagaagagaagctaaagaaagaaaggagatgtggagtggataagcagttgttgaggtcttgcaccggtccgaaagccaattcccggtcagaacgtaaccgttcactgcactggtttcgggaagaacggtgacctttctcagaaattctggagcacaaaggatcctggccagaaccccattcactttcaaaatcggctcaaggttcttgttatcaaaggatgggatgaaggtgtgctatggcatgcaaattggtgaagttgctcgtctccggtgctctccggattatgcttatggtgctggtggctttcctgcttggggaatacggcccaactctgtctttggaatttggaatcggagtcctgaattccccattgaaaacctttggtagtctggtctctggtcccccctaagaataaaatcatcatccatttccatggacttgtattatggtatccccactttgtgactcgtgagtgatatctacagtggttgagttgttcaactgaaatactaaataactttctgaatgatctcaaaccctctaatattatattgggtagcctttactttcttcc

SEQ ID NO: 1397 - DNA, 969 bp, Glycine max
gattcctcaagaactagggtttgcagtcactgctctgtttcaccgagtttgggcgtttagatcagaaccaaatcgtgttctcttcttccattggcaaacatggcaactcaaatgagcaagaagagaaagtttggttgcggacagagtgttctttgccgaactgaacgaggttctgacacgtgaagttggcggaggacggttactccggcgtcgaagttagggttacgccgatgcgcaccgagatcatcatcagagccaccagaaccccaagccggtctaggtgagaatggaaggagaatcagggaacttacaccagtggtgcagaagaggttcaaattccccgaaaacagcgtcgagcttaatgctgagaaggtctacaacagaggcctgtgtgcaattgctcaggccgagtcggctcgctacaaactttctcggtggcctcttcgttcgcagggcttgctatggtgttttaagatttgtgatggaaagtggtgccaagggttgtgaggtgattgttagtggaaagttgagggctcagagagccaaatccatgaaattcaaggatgggtacatgatctcttctggacaaccaggtcaaggattacattgactctgcagtgagacatgtgctactaagacagggtgttcttggtatcaaggttaagatcatgcttgattgtgatcctatagggcaactggttcctaaatctcaactttctgatcttgtcacgattctcacaccaaaaggagaggaagaatatgcacagcctgctgctgttttggcaactgatattgaggtccctgttgcttgaaaatgttttatttgttcttgagtagaaattcatagcacctgagtacctagtatgcagtgttcatttgcttagacctggtcagattttttgaagtgtcttatcttttcaagaatttttatactccagtacaaggatccaagcataaattatgttatat

SEQ ID NO: 1398 - DNA, 1024 bp, Glycine max
ggtgtcggcctctacctatatattccactcactacccagaaactacgtgtttagtcgccacgactccaatcgtagcgcgtcgggactctgtcgctttctgcgccgtctgccgattccccgacaatgggcgaaccaaaataagcaaaaaaaaaaatttcgtacctgatggattgttcttccctgaactgaccgctagtgctgatcagagagttggtcgagtgtacatttactccggcgtggaactctcggcgacggctatgtgcagcgagaatcataattagagccaccagaaccctagctagttctcggtgagaagcgtaacgagaataagggaacttacctctgtggttcagaagaggttcaagtttcccgagaacagtgttgaactttatgctgaaaaggccaacaatagggtgctttgcactatagcacaggctgagtctatccgctacaagctccttggtggcctagctgagcgcaaggcttgctatggtgtcttgagagtttgttatggagagtggcgctaagggatgcgaggtcattgagagtggaaaattgatagcccatacagccaaatctatgaagtttaagggatggggacatgaattcctctggggaaactgtccaaagataaaatggattccgcaatgagacaatgtgctcctggagacaaggtgttcttggaataaaggtgaagatcatgcttgattgggatcctaaggggaaacagggtcctaaaactcccctgccctgatcttgtcacaatccattgctcaaaggaggcagaagaatacatccagcctgctccagttttagctgctaataatgatattgaggtccctgtccctgtcgcatgaaatgttatacactggagcagtaattcatagtagctgagtgcctagtttttcttgtgtgcaatgtttgttgtcaaagacatgttcaaaattttgtagtttcttgaattttgaacaaattgttacactcagttacaagtattctaagttatttgttttatctttttcat

SEQ ID NO: 1399 - DNA, 3362 bp, Glycine max
ataaccgcacaaaacaaaaacaaaacaaaacagtgtctttgattacgagagagagagaacaaaacaatcaacacaatggcttctgagcaaatgcctcgcagagagaacaacagcaatagggtgatagagagagaggttcacgttgagacacacagaaaagagtccctccctgataagggaagggttgtgatagagagtgagaagaaggagaaagagagagagttggcttctgatagatgccatgtctggaaatatagttaaggaggacaaagaggttgaagaaggaagaagaggaaaagaaagtggtggtggtggtggtgtatcagcatcagaggtagtttgaaacgaaagttgaagagaagaagggttttggggaaaaggctgaactcgagggaatagcaagagtggtggtgggaagagagtgcagcaaagaggagaaacaaggaagaacaagagagaaagtagaagcagagaaagcaagatcaatggagaaaactagagatgaagctaaagcgaagagaacaagctgaaaccaaaggtcaaaccaagaagggtggtggtgaggaacagggaagaagaagagaagaaataggagaagaaaataaacaatgccagcctcgaagagatttctgaaatgcagagctgaagctgaagagaaagttaaggagagaaaggagagatcaaaacaagcagcaagtaatgaagctgccaaagagagaaacaagcaggcaaataaggaggcaacaaaggcaaaagatgtcacaagagagaagggtcaacaaggcaatcttaaaacaggaaatgagacacaagacattggccaaaaggcttatggtggagcaaaggataccattggtagagtggacaacattactacaccacttgctaaaaaggctcaagttgctggtagcaccactgttcagtatgctggagagatatcagcacaagccaaagatgctacggtaggatcaatggagaaaactacaaaggatgctaaaggaagagaaaaagcaggaaccaaaggtcaaacaaagcagggtggtggtgaggaacaaggaaaaagaagagaagaaacaggagaagaaaaacaatccagcctggaggagatttctaagcacagagctgaagctcaacaaaaagcaatgagttcaattgaagagtgctaaggagagatacgagagagcaaaacaagaagcaagtaaagcttccaaagagagaaacattcaagcaaataagagggctgaagaagacagaagaaaagcagaaagtggtaggggtgttcatgtcgataagtttgaagagaagaaggattcagtgctgaaagcagaactcgagagaagacacaagagaggtagagggaagagagtagaacaaagaggagacacaacgaagttgtccaagcgggatcgtagaggctgagaaagcaagaccaatggaagaaacaaaactggaagctaaaggaagagaaaatgctgaaaccaaagagggtggtggtgaggaaaaaggaatgagaagagaagaaataggagaagaaaataaacaatccagcctggaagagatttttaagtacagagctgaagctcaacagaaagttaaggagagaaacgagagagcaaaacaagcagcagaagctgccaaagagagaaacaagcaggcaaataaagggcatgaagaaggcagacgagacagagaaagtggtgggggtgttcatcatgaggctaagtttgaaactaaaggtgaaacaaagaaggatttggtgggaagagagcggaacaaagaggagaaacaaagaagcagtccaagaggaaaagtagaggcagagaaagcaagaccaatggaagaaacaaaggtggaagctaaaggaagagaaaaagatgtaaccaaagagggtggtgttgaggaacaaggaagaggaagaaaagaaaatgaacaatctagcttgaaagacatttccaagtacagagctgaagctcaacaaaattcattcaatgctactgaagctgctaaggaaagatacgagagggcaaaccaagcgacaagtgaagctgccaaagagagaaacaagcaggcaaataaggtaggcaacataaggcaaaagattttacaagagaatatgaccaacaaggcaatcttaaaacagaaaattgtaggcatgacaatgacgagaagggttatggtggagcaaagtacaccattggtagtgtggaccacattactacaccatttattgtagaggccaatcttaaatcagaaaatcagatacaagacaatggccaaaagggttatggtcggagcaaaggacacaattggtagtgtagaccacattactacaccacttgctgaaaaggccaaagctgctggtagcaccactgctcagtatgttggggagaaagcagcacaagccaaagatgctactgtgcaaactggcaagagtgctgcaaaagttgcctcagatttgagggacaaggctttggccacagggtggagtgccgtgtcattattctactgagataactgtggagggaaccaaggctgcaacaaacgttgttaagggagttgctgagtatgcaggacagaaggcttctgagcttgcagctatgtcagtggatactgcgaaaggtttagctgctgctgcagctgcgggagaatgccaaggagtacactgcaaggaagaaggtggaagcctttggagatggatttggaggccaaaagggaagctcaaaatcaggaatcgaaggagtggccatcagcaaaatccaccactgagagcattcaaagaggacaaggacaacaagaacagcatgagcaaggagaaaaatgggaacatggtgcacaaaggactaataagccacatgaaagcaacattgtggaaacctttgaggaaaacctaggtgggattggggaaaaaagggaacaaaaaccacttggaagcatcattggagagagctttcaaggagatcaagaaaaagggagtgaagtgatggcaagcattggtgaaaaactgggaagtgctgcacatacattagtgaagaagccattggataaggccactgagggagggagagaggtgttgggagctgtacgtgaaactgtggttgagattggtgaaaacatggtgaaaaaaccagcacagaaagtgcagcagcatcaaggtgaaggtggaggaggggtgctgaatgccattggtgaaaccatagcagagatagcagagacaactaaggtgattgttgctggagagggagaaaaggagataatagtaaaaacacatgaatttgaatatggagacttgaaacttgattagtgaattgctgcattgcatggatgttcatgacaagttggtttatggaaggaaatctatcatg

SEQ ID NO: 1400 - DNA, 2448 bp, Glycine max
gtgaaccctctctataaaagcgcttccttctcatttggaacctattccattctctaaaccctaaacgactctatctctcttcgttttgttcttccttgcgctcctcctcgttcgttcgttcgttctccctcgcgtagatcggcaatggcggagaccgagacgactctgctttccaggctgagatcaaccagctcctcagtctcatcatcaacaccttctactccaacaaggaaatcttccttgcgttgactcatcagcaacgcctctgatgctttggacaagattagatttgagagtttgacggacaagagcaagctcgatgctcagccagagttgttcattcatattattcccgacaagactaacaatctcgctgaccattgttgacagtggcattggcatgaccaaagctgatttggtaaacaacttgggtacaattgctaggtctggtaccaaggaattcatggaagccttggctgctggtgctgatgttagtatgattggacagtttggtgtggggttctactctgcatatcttgttgccgaaaaggtcattgttacctccaagcacaatgatgatgagcagtacgtttgggagtcccaagctggaggttcattcactgtcaccagggatacctctggtgaggttcttggcaggggtactaagatcactctcttcctcaaggaggatcagctagagtaccttgaggagcgccggttgaaggatttgattaagaagcattctgagttcattagctacccaatttctctttgggttgagaagactaccgagaaggagatttctgacgatgaggatgaggaagagaagaaggatgaggacggtaaggtgcaggatgttgatgaggagaaggagaaggaagaaaaaaagaaaaagaagatcaaggaagtgtcacatgaatggtccttggtgaacaagcagaagcctatttggatgaggaagcctgaggagatcacaaaagaggagtattctgctttctacaagagtcttaccaatgactgggaagagcatttggctgtcaagcacttctctgttgagggtcagttggagtttaaggctatactctttgttcccaagagggcaccttttgacctctttgacacaaggaagaagcctaacaacattaagctctatgtccgccgtgtctttattatggacaactgtgaggagttgattcctgagtatttgggctttgtcaagggtattgttgattctgaagatctcccactcaacatttcaagagaaatgttgcaacagaacaagatcttgaaggtcatccgtaagaacttggtcaagaagtgccttgagctcttctttgaaattgcagagaacaaggaggattacgagcaagttctatgaggctttctctaagaacttaaagcttggtatccatgaggattcccagaacaagggaaagattgctgaattgctcaggtaccactccaccaagagtggtgatgagctgacaagcctcaaggattatgtgaccaggatgaaggaaggtcagagtgacatctactacatcaccggtgaaagcaagaaggctgttgagaactccccattcttggagaagttgaagaagaaagggtatgaggttcttttcatggttgatgccattgatgaatatgctgttggccatcctcaaggaaatttgagggcaagaaagcttgtcttttccaccaatgagggtctcaaacttgacgagagtgacgatgagaagcagaagcaagaggagttgaaggagaagtttgacaacctatgcaaggtgatcaaggatgttttgggtgacaaggttgagaaggttgtagtctctgaccgtgttgttgattcaccatgctgtctggtgactggagaatacggttggactgcaaacatggaaaggatcatgaaagctcaagccctaagggacaacagcatggcaggatacatgtcaagcaagaagacaatggagatcaaccctgagaacccaatcatggaggagctcaggaagcgtgcggatgctgacaagaacgacaaatccgtgaaggaccttgttctgttgctgttcgagactgctcttctcacttctggtttcagccttgacgaacccaacacttttggaaacaggatccacagaatgttgaagcttggactgagcatcgacgaggatgcagctgaagctgatgctgatatgcccccactggaggaggaggctgaagctgatgctgagggcagcaaaatggaggaggttgattaaacttttatatcatgcggaacggagttggctatgttttttctcttttttttcctttcggattgctctgcccgtgtttaatggataattagctaattagcaaaaattaagtggttctattcgcgagttgttggttgtagcttttttttttaagttggatttctggcgttttctgaaattcatgataattttctgg

SEQ ID NO: 1401 - DNA, 2506 bp, Glycine max
ccatttttctctaagcgttccttccttttcgttctgttttcgcatcttcgctgcaactctctaccttccctctttttccgaatctgaatagaaatggcttcggagactgagacgttcgcttttcaaggacgcgatcatccagctcctcagtctaattatcgacaccttctacagcaacaaggaggtctttcttcgtgagctcatcagcaatgcctgctgcatgactttggacaagattcgatttgagagtcttacagacaagagcacgcttgatgctcagccagagttgatcattcacattattcctgacaagaccaacatctcattgtctatcattgaccagtggtattggcatgactaaggctgatttggtgaataacctcggtactattgcaaggtctgggaccaaggaattcatggaagccctggctgctggtgctgacgtgagcatgattgggcagttcggtgttggtttctactcggcttatcttgtgagctgataaggttattgttaccacaaagcacaatgatgatgaacagtatgtctgggagtcccatgccggtggctcatttactgtgacaagagatacatctggtgagaaccttggtaggggaacaaagataactattgcttcttaaggaacatcgacttgagtatcttgaggaacgccgtctgaaggatttgataaagaagcattctgaattcattagctatccacatttctctctggattgagaagactactgaaaaggagatttctgatgatgaggatgaggaagagaagaaggatgaggagggtaaagtatgaagatgtgggatgaagataaggagaaggaggagaagagaaagaagaccattaaggaggtatctcatgacgtggtcatatggtgaacacagcagaagctctatttggatgagtgaaacgctgaagagtatcacaaaacgacgaatatgcttgctttctacaagagtcttaccaatgattgggaagagcatttggctgttaagcacttttctgttgagggtcagctggagtttaaggctgccctctttatccccaggagggcaccttttgatctttttgacactaagaagaagcctaacaacatcaaactgtatgtccgccgtgttttcatcatggacaactgtgaggagttgacgccagaatatcttagctttgttaagggtattgtggattctgaggatcttcctctcaacatttctagagaaatgctgcagcagaacaagatcctgaaagtcatcaggaagaacttggtcaagaagtgcattgagatgttctttgaaattgctgaaaacaaggaagactataacaagttttatgaagccttctctaagaacctgaaacttggtattcatgaggattctcagaacaagacaaagctagctgaattgctcaggtatcactaccaccaagagtggtgatgagatgaccagcctcaaggactatgttaccaggatgaaggaagggcagaatgacatctactacattactggtgaaagcaagaaagctgttgagaattcccctttccttgaaaagcttaagaagaaggggttcgaggttctctacatggttgatgctattgacgagtatgctgttggtcagcttaaggaatttgagggaaagaagttggtctctgctactaaggaaggcctgaaacttgacgagagcgaagacgaaaagaaaaagaaggaagaattgaaggagaaatttgagggtctcctgccatgtgatcaaggatgtgttgggtgacaaggtggagaaagttgtggtgtctgatcgtgttgtggattctccttgctgtctggtgacaggtgaatatgggtggacagccaacatggaaaggattatgaaagcacaggcattgagggacagcagcatggctggatacatgtcaagcaagaagacgatggagattaaccctgagaaccccatcatggaggagctgaggaagcgagcagatgctgataagaatgacaagtctgtgaaggatctcgagctcttgctctttgagactgctcttctaacttctgggttcagccttgatgatcccaacaactttcggtaacaggtattcacaggatgctgaagcttggactgaggagttgatgaagatgctggtgaagcagatgctgacatgcctcctcttgaggacgccgatgctgatgccgatgctgagggtagcaagatggtaagaagttgattaaatcggacttaattattgatttgcctttgtgtttttagaaacaatgattggagaaacagtctttttactatgttttatgttttttgaattttccaaaattttggaatgttggctagttaggtcccgtttcctggattagtagggtatttagtttctatatggaaaatttgtgtcagctttctggccaatgaatttgtgcttttcttcgtattatcgtgaatatggtgattgcagaagtttcagcccggaatcaaaatgttttgcctttttagttatccgg

SEQ ID NO: 1402 - DNA, 2502 bp, Glycine max
ggatctagaaactttagtagtgaaccctctctataaaacctctgccttctttcattcggtgcctattcccattttcttcctctaaaccctaaacaactctttctcttcttccttcgctcggtggttctccctcgcgtagatctacagaggcgggtgtacatatacatttgctttcccaggctgagatcaaccagctcctcagtctcatcatcaacaccttctactccaacaaggagattttccttcgtgaactcatcagcaacgcctccgatgctttggacaagattcgatttgagagtttgacagataagagcaagctcgatgctcagccagagttgttcattcatattattccagacaagactaacaatacacctgaccattgttgacagtggtattggcatgaccaaagctgatttggctgaacaacttgggtacaattgctagatccggtaccaaggaattcatggaagccttggctgctggtgctgatgttagtatgattggacaagtttggtgtggggttctactctgcatatcttgttgctgagaaggtcattgttacaaccaaacacaatgatgatgaacagtatgtttgggagtctcaagctggaggttctttcactgtcaccagggataacactggtgaggttcttggcaggggtactaagatcactctctacctcaaggaagatcagcttgaagacaccttgaggagcgtcgcttgaaggatctgatacagatgcattctgagttcattagctacccaatttctgtttggattgagaacactactgagaaggagatctctgatgatgaggatgaggaagagaagaaggatgaggagggtaaggtggaggatgttgacgaagagaaggagaaggaagaaaaaaaagaaaaagaagattaaggaagtgtcacatgaatgcgtccttggtgaacaagcagaagcccatttggatgagaaagcctgaggagatcacaaaggaggagtattctgctttctacaagagtctcaccaatgactgggaagagcatttggctgtcaagcacttctcagttgagggacagttggagtttaaggctatcctctttgttcctaagagggcaccttttgacctctttgacacaaggcataagcctatccatattaacccatatgttcatccagactcggtcgagggacaactgtaacgaattgattcctgaatatttatgctcatccaagggtattgcggattccgaagatcctaacaattcaacatttcaagagaaatgttgcaacagaccaagatcttgaaggtcatcagaaagaacttggttaagaagtgccttgagctcttctttgaaattgcagagaacaaggaggattacaacaagttctatgaggctttctccaagaacttgaagctaggtatccatgaggattcacagaacaagggaaagattgctgaattgctcaggtaccactccaccaagagtggtgatgaaatgacaagccttaaagattatgtgaccaggatgaaggaaggtcagagtgacatctactacatcacaagtgaaagcaagaaggctgttgagaactcttcattcttagagaagttgaagaagaatggatacgaggttctttatatggttgatgccattgatgaatatgctgttggtcaactcaaggacatttgagggcaagaagcttgtctctgccaccaaggaagggctcaagcttgacgagagtgaagatgagaagaagaagcaagaagagttgaaggagaagtttgacaacctctgcaaggtgatcaaggatgttttgggtgacaaggttgagaaggttgtggtctctgaccgcgttgtagattcaccatgctgtcttgcgactggcgaatacggttggaccgcaaacatggaaaggataatgaaggcccaagctctaagggacaacagcatggcagggtacatgtcaagcaagaagaccatggagatcaaccctgagaacccaatcatggaggagctcaggaagcgtgctgatgcagacaagaatgacaaatccgtgaaggaccttgttctgttgctgtttgagactgctcttctcacttctggtttcagccttgacgagcccaacacttttggaaacaggatccacagaatgttgaagcttggactgagcattgacgaggatgcaggtgaagctgatgctgaaatgcccccactggaggaagccgaggctgatgctgaaggcagcaagatggaagaggttgattaaaattaaatatgatgcgtttcttgttagtagcgtctctaatgccttttttggctatgtttttttctcctttttttattttggattgatgacagtgttcgatggatattttagctaattagctataattccgcgggtctatttttgagttgttggttgtagtagcttttttggtagttggatttatggcgttttgtggaattcatgataattttcaatctgcagtgttgacaacaattgcactc

SEQ ID NO: 1403 - DNA, 1725 bp, Glycine max
gatgttaagacttgagagtgagagagagagtgagagagtgagtgagatagagagagacgcttcgcaaatctcaatcgaatctcagaaaaatgagagaaatcatcggcattcacataggtcaggccgggctccaggtaccgtaactcctgctagggaactctactgcctcgaacatgggcatccagcccgacggcaatgatgcccaagtgactcctccttcggtgtgagcctcacgacgccttcaacaccttcttcagcgaaaccggatctgagcaagcacgtgcgccgtgctgtcttcgtcgacctcgaacccaccgtacatcggacgaagtccgttagtggcacttaccgtcaactcttccaaacccgaacaactcatcctccggcaaggaagatgccgtcaacaactgtgccagaggccactacaccgttggcaaagagatcgtagatctgtgcttggatcgcgtccgaaagctcgcagacaatctgcactggtccttcagggctttcctcgtcttcaacgctgtcggcggtggcaccgggttccgcgtctcggatctctcttcatcgagcgtctctccgtcgattacggcaaaaagtccaaattagggttcaccatttacccttcccctcaggtttcaaccgcagtcgtggagccctacaacagcgtcctctccacccactcccttctgcaacacaccgacgtggctgttctcttggacaacgaagccatctacgacatctgtaggagatctctcgacatcgagaggcccacctacaccaacctcaacaggctcatttcccagatcatttcgtccctcaccacttccttgaggttcgatggtgccatcaatgtggatatcactgagttccagaccaaccttgtgccctaccctaggatccacttcatgctttcgtcctatgctccggttatctctggccgccaagggcctacgcacgagcagggtgtcggtgccagagatcacgaatgccgtggtttgagcccgcgagcatgatggccaagtgtgatcccaggccatggcaagtacatggcatgctgcttgatgtaccgtggtgatgttgttcctaaggacgtgaatgctgctgttgccaccatcaagactaagaaggactgtcaggtttgttgattggtgtccaactggattcaagtgtggtatcaactaccagcctccttctgttgttcctggtggtgaccttgccaaggtgcagcgggctgtatgcatgatcagcaacaacactgcagttggttgaggtgttctctcgcattgaccacaaatttgatctgatgtatgccaaagagggcttttgttcactggtatgttggtgagggtatggaagaaggggagttttctgaggctcgtgaggattctgcctgctcttgagaaggactatgaggaggttggggctgaaggagcggaagatgatgaggaaggagaggactattgataatcgaaggctttttttttgttatcaatgtaattgtttccgagttaaaagggtatatgcttcgttacattaccctgaaccattattgttcgttcttttttgtttttgctcctgctgtgtgatatagttctccattattcaaactgtgaagtgatatcatcattatgcttctattttggtggtttaggacctgttgtttgcgatcctcagtcatgtattcagaattgtccatgtcaaaagttgatttcttatgtttac

SEQ ID NO: 1404 - DNA, 629 bp, Glycine max
acccttccgtccggttgcaaaaaaacaacagaggggggatccaattcctttggtttgcagtaatgggtgctctggatcacatatcggaactctttgactgctccagtggcagttccaagcacaagaagcgcaagcaattgcagacggtggaggtgaaagtgaagatggactgcgaaggatgcgagaggaaagtgaggaaggcggtggaggggatgaaaggcgtgaaccaggtggatgtggagcgtaaggccaacaaagtcactgtggtcggctacgtcgaggcctctaaggtggtcgcccgcatcgctcaccgcaccggcaagaaagcagagctctggccctacgtcccctacgacgtcgttgctcacccctacgcacccggagtctacgacaagaaagccccctccggttatgtccgcaacaccgatgatcctcactattcccatctcgcacgtgccagctccactgaggtccgctacaccactgctttcagcgacgaaaacccctccgcctgtgtcgttatgtgaaactattctctttatttgttatcttcgctttcattctatcttgtttttcccctcatgccgtattttttctctgttgaatgataccccttcgcctttacctcc

SEQ ID NO: 1405 - DNA, 740 bp, Glycine max
aactcgagcgattcggctcgaggtaacttctaatagatgaggcacaccaaagtagtaacgctatagtagcaaccagcaacaatattcaatctcatacacagaaaaatgggtgctttggatcacatctctgagctctttgactgctcccacgccagctccaagctcaagaagaaacgcaaacaattccagacggtggaggtggaagtgaagatggactgcgaagggtgtgagagaaaggtgaagaaatcggtggagggaatgaaaggggtgacagaggtggaggtggatagaaaggccagcaaggtaactgtttccggctatgtggaaccctcaaaggtggtttctcgcatcgctcaccggactggtaagagagcggagctatggccatacttgccgtacgacgtcgttgcgcacccttacgcgccaggtgtctacgacaggaaagcgccatctggctacgtgcgaaacgctgatgtagaccctcggctcaccaacctcgcacgtgccagctccactgaggtcaagtacaccaccgctttcagcgacgacaaccccgccgcatgtgtcgttatgtgattattcattttctctcttgtatcatagtagcaaagaaaaacatcaaatgttcacgtggggaacgcttttggcacaatggacatgtatcctttaaagtgatgttcggaaatttgatatcttaagatggtaattaattaatgattctgattttataaatctataac

SEQ ID NO: 1406 - DNA, 417 bp, Glycine max
caacaatattcaatctcatacacagaaaaatgggtgctttggatcacatctctgagctctttgactgctcccacgccagctccaagctcaagaagaaacgcaaacaattccagacggcgccccgcgcaccccccagatggactgcgaagggtgtgaaagaaaggtgaagaaatcggtggaaggggtgacagaagtggaggtggatcgacagggtagcaaggtgagtgcttcggggtacgtggaaccctcaaaggtggtttcacgcatcgctcaccgcaccggccttacgtgaaatcgttatgtgaatctgatgtgaacaccacaccacaccacaccttatcctgtcttattggttagtttctctttccctttggtgttctttttcttggatcatatcgtagtaaccaaaaagaaaaa

SEQ ID NO: 1407 - DNA, 661 bp, Glycine max
ctcgagcgaatcggctcacaaagaatcaaagaaaggggtggtggctgcttcgaaagcttaataatttgtttatttccagaacatcatagttttcgcagcagcaaactaacaaattactcatatcatataataagatggcccgttctctctcgcaagccaaacgtattggtgtccttgttgctcaatctatctccctaattcccgttcatcggcgaggttacgcagtggcatccgatgtatcggtaagagttggattgggtaatattgggcgaaggaatggaatcgtgggaggtgtagaagagaagcctgatacaagagatggttcaaaagcctactcaactgattgggccccagacccagtaacaggttactataggcccattaaccacacccctgaaattgacccggtggagcttcggcataggttgctccgatcacctccactagagcctagaggagttgctggacacccatgacatgcccaaattttacttaggatttggtttggtttggtttggtttggtagggtaaccttgtgttgttgttccaaaaaataaaaggttttgttaaagttaaactacttcctatgtaccctagaatctacttttaaggttatggttcttattattagtgcaataaaattggttgagatgactaaaaa

SEQ ID NO: 1408 - DNA, 1086 bp, Glycine max
ttttcgcgtccgctcgatcaactcaacacaaaccaaaactcaagctaaaattctcactctctctctcatctcgagatcatagtatcatattcaatatcatttcataccaaacacatggctttggaagctctcaactcaccaacaacaaccgctccatcttttccctttgacgacccaactattccatgggcgaaacgaaaacgttcaaagcgttctcgcgaccatccttctgaagaagagtacctcgccctctgcctcatcatgctcgctcgcggcggcaccaccaccgtcaacaaccgccacgtcagccctccaccgccgccacagccacagccacagccgacaccagatccttccaccaagctcagttacaaatgctccgtttgcgacaagagcttcccctcttaccaagcgctcggtggacacaaggccagtcaccggaaactcgccgccgccgccgaagaccaaccccccagcaccaccacttcctccgccgccgccaccagctccgcctccggaggtaaggcccatgagtgctccatttgccacaaatccttccccaccggacaggcccttggcggacacaaacgttgtcactacgaaggtaacggtaacggaaataacaacaacagtaacagcgttgtcaccgtcgcctcggaaggcgtggggtccacccacactgtcagtcacggccaccaccgcgacttcgatctcaacatcccggcctttccggatttttcgaccaaggtcggagaagacgaggttgagagccctcaccctgtcatgaagaagcctcgcctcttcgtcattcccaagatcgaaatcccccaatttcaatgaactcgttgaatttttagtttatttttcgactatatattttggagaattttgagagttactataatttgattttgtacatagtacttggaagttttgttggaccgtaccggacccagttctctggttgaggttgtactttcacaacagtggcagatttgcaattcaattcaatttatttgtttattttaaaaaaaaaaaaaaaaaatgaaaattgaaattaaaaaaaaaaaaaaaaaaactcgagac

SEQ ID NO: 1409 - DNA, 1018 bp, Glycine max
agaaggggactcaaaattaaccacaagcataagcacaagcacaagcacaagcacttctctaattccctttcacactctattacagatttcacaagtgcttacacttcaaatggctttggaagctcttcaatcacccaccacagccactccatcgtttagtccctttgaagaaaccagtctcagttacttagagacaccgtggacgaaaggaaagcgttctaagcgtagccgcacggagcaacaactgcaacacccttcatgcaccgaggaagagtacctcgctctttgtctcatcatgctcgctcgcggcggcgccggcagtgtctccaccgccaaacccgctgtctccgacaacaattctgcgccgctatccgccgccaaactgagctacaaatgttcggtctgcaacaaagccttctcctcttaccaagcactcggtggacacaaggccagccaccggaagctcggcggcgagcaccactcgacctcctccgccgtgacaacgagttcggcgtcgaacggcggtgctaggacccacgagtgctccatctgccaaaagacgttcccaacaggacaggccttgggaggacacaaacgttgtcactacgaaggcggtaacagcgccgtaaccgcctctgagggagtggggtccactcacacaggaagccaccgcgatttcgatctgaacctcccggcttttccggacttttcaacaaggttcttcgttgatgacgaggttaccagtcctcatccatccaagaaatcccgtctcaatttgaccatacccaagattgaaatccctcaatactgatgatccatagatccaaaaaatattcagtgtttttttcttctttcttttttaaagttatttgagattaatttgttcttgtacatatatagtacttggaccttattcgctagttttagcttttagattgtagtcattgtacttttgacagtggcaattcaattcaattcaattcatttatttatatttgtaagaatgtaattgatttct

SEQ ID NO: 1410 - DNA, 400 bp, Glycine max
cccaacccaacccaaaactcaagctaaattctcactctcacaacttcaatctctttctctctctctctctctctctctctctaccaaaaaaatggctttggaaactctcaactcaccaacaacaaccgccccatctttccccttcgacgacccaactattccatgggccaaaagaaaacgttcaaagcgttgttcacgcgaccacccttcggaggaagagtacctcgctctctgcctcatcatgctcgctcgcggcggcaccacccgccgcgtcagcactccaccgccgcaaccgactccagatccttccaccaagctcagttacaaatgctccgtttgcaacaaaagctatcgctcttaccaagcgctcggtggacacaaggccagtcaccggaaactc

SEQ ID NO: 1411 - DNA, 373 bp, Glycine max
actcgagcccattcggctcgagagttcaccaaaagcaaccacaacaagcacttctcttattccctatcacaccctattacagattcacaagcgcagacacttcaaatggctctggaagctcttcaatcacccagaactgccactccatcgtttagtccctttgaagaaaccaacctcagttacttggagacaccgtggaccaaaggaaagcgttctaagcgtagccgcatggagcagcaactgcaacactcttcatgcaccgaaggagaataacctggtctctggcttatcatgctcggttaagggcgcgcccgccgtgttcccggcggcaagcctgctttcttcgacaacaatttcgcgccggttcccggcg

SEQ ID NO: 1412 - DNA, 258 bp, Glycine max
tcgtcatcgacgaagaaccttgctgagaagtcccgtttcaatttgaccatacccaagattgaaatccctcaatactgatccatagatccaaaaaaattattcagtgtttttttatatatttttttaagttatttgggattaatttgttcttgtacatatatagtacttgggccttattcgctagttttagcttttagattgtagtatacttttgacagtggtgattcaattcaattcatttatttttatttgtaagat

SEQ ID NO: 1413 - DNA, 1769 bp, Glycine max
  unsure (1)..(1769): unsure at all n locations
gataataaatcacattcggctaccttggctatagtttacgtgttcagagggagagagagagaggaaacaaaatgcagaagcatggttttgcatcaaagcgtaacgtgttgccgtatcaaacgccgaggctaagggaccactacgttctggggaagaagctgggacaggggcaattcggtacgacgtacctgtgcacccacaaggttacagggaagctctacgcgtgcaaatcgatcccgaagaggaagcttctatgccaggaggattacgatgatgtgtggagggagattcagatcatgcaccatttgtcggagcatccaaacgttgtccagatacaaggcacgtacgaggattccgtgttcgtgcaccttgtcatggaactatgtgccggcggggagcttttcgacaggatcattcagaaggggcattacagcgagagagaggctgccaagttgataaagaccattgttggggtggtggaggcgtgccactctcttggggtcatgcatagggatctcaagcctgagaatttcttgtttgatacccctggcgaagatgcccagatgaaggccaccgattttggcctctctgtcattctacaagccagacaagcctttcatgatgtagtaggaagtccctactatgttgccccagaggtgttgtgcaagcaatatggacctgaagtggacgtatggagtgctggtgttatcctatacatcttactgagtggggtgccacctttctgggctgaaaccgaagcaggaattttcagacagattttaaatggagatcttgattttgtttctgaaccgtggccaagtatctcagaaaatgctaaagaattggtaaaacagatgttggatagggaccctaagaaaagaatttctgctcatgaagttttatgtaacccttgggttgttgatgacattgcacctgacaaacctctggactctgctgttttgacacgcctaaagcatttctcagcaatgaataaacttaagaagatggcattacgggtcatagcagagaggctttcagaggaagaaataggtggattgaaagagttgtttaaaatgattgacacagacaatagtgggacaataacttttgaggaactgaaggaggggttgaaaagtgtgggctctaatctcatggaatctgaaattaaatcacttatggaagcggctgatatagacaacaatggatcaatagactatggtgaatttcttgctgctacactgcacttgaataagatggaaagagaggagaatttggttgctgctttcgcctattttgataaagatggtagtggttacatcaccattgacgagcttcaacaggcttgtaaggacttcagcctaggtgatgtgcatctggatgagatgatcaaagagattgatcaagataatgatgggaggattgattatgcggagtttgcagcaatgatgaaaaagggtgatccaaatatgggtagaagcagaaccatgaaaggcaatttgaacttcaatattgcagatgcatttggaatgaaagactcttcttgatatgctacctgaattcttttgtacagttggatgcatgatggtagaagaaaaatcattgtcaaaatttcttatccgcgtggttataatctgttttgtattggaactttgtttactttctcaagctatgctttaatcccttaactttagaaaccttcagtgaagttgaatatattcagcatatatatgatataaattggcttgaatgnnnnnnnnnnnnnnnnnnnn

SEQ ID NO: 1414 - DNA, 601 bp, Glycine max
gggcaggattgcaaagacttggctcaaagcttactgaaactgaagtgcgacacttatggatgccgctgatgtagatggaaatggcacaattgactacatagaattcatcactgctacaatgcatagacacaggttagaaacagatgagcatctttacaaggccttccaatattttgacaaagatggcagcgggtatatcacaagagatgaactggaaacagccatgaaggagtatggtatgggcaacgaggccacaatcagggaaattatatctgaagttgacacagataatgatggtagaatcaactatgatgaattttgtacaatgatgaggagtggaacccaacaacaaggcaagctattctaatgtctctagattgagtgtcctgcagccaagatggggtgcttgcttcagagaaaggcttccaaaagttaatattcatcttaggcatgtaaagcttgtagtttagatttgttttgagttatatgctccgcgtgatttgttgtcaactcttatttctctttatggtttccatttcactttgaattttattattgagtcctcatgtaatttattaggtacaccaataataaatggact

SEQ ID NO: 1415 - DNA, 489 bp, Glycine max
gtcaagtttgctgaactcttgaccaagattgacaggcgatctggtaaggaacttgagaaggagcccaaattcctgaagaatggtgatgctggtttggtcaagatgattcccaccaagcccatggtggttgaaaccttctccgagtatcctccacttggtcgttttgctgtgagagacatgcgtcaaactgtggctgtgggagtcatcaagagcgtcgagaagaaggaccctactggagctaaggtcaccaaggctgcacagaagaaggccaaatgaattgtgctggatggtttatcaaggaaactctattattatgactacaataaatggtttcttgttcgtagtacttcattttttcgtgtagggaacttgtttatcagattttgtgtcaggtttgctccgtcatctcgcaacttttgttcccagaactgggttcttgatcgacggtggcaaggctatttctttttcattgttatgctttgtttctat

SEQ ID NO: 1416 - DNA, 733 bp, Glycine max
aaataactttatcttatgtacaactagcatttatcccattttttttaatacattctttctctttcaccctctttcaaggctccacttttataattccttgtacatttcttcatcaaagtatcaaacttgtcttgtatctctcttttcactccctctgcatatatgatatattcttccataattctcataatgatttacttacaggtttctgatccaaggtttaagacgttatagtttccttgaattctcgtctgggttcaacctgtttgatgtttagactgaatcagtttgaattagtggagaatatctgataccgaaaaaaagattcagctctttttcttgtttctttgtcacaatacttggatttttgagaatctggagacatgggttgttgtgtaagtaaagattcagagccacaacacaatggttacagacattgtggaactggtggagtgcacaaccagaagactcatgaacctttagtcaaccaatcaagagcacctgcaaatcaaccttatcatttacctgaaaagcatgctgcatccactgctcagacagtggctcagaatatgtcatggaaggcttctggtccggcccttagtcctaaacctgttgttagtgttaggcaagacacaactcttgggaagcagtttgaggatgtgaaggagctctacacactcgggaaggaattgggtagagggcaatgtggtgtgacatatctgtgcactgagaa

SEQ ID NO: 1417 - DNA, 2432 bp, Glycine max
gaatgaactccaccttatgtactactagcatttatccctttttttttttttttatacatactttctcttccaccctctttcaaggctccacttttataattccttgtaatttacttcatcaaagtatcaaacttgtcttctctctctctccttttacttcctctgcatatatgatatattcttccaaaatcctcatctaagggttaattttgttccggacaagtttttattattattattattattttttaaatttcagaatgatttacttataggtttctgatccaaggtttaagatgttatagtttccttgaattctcatctgggttcaacctgtttgatgttttgactgaatcagtttgaaatagtggcgattatctgataccaaacataaaagattcagctctttttcttgtttctttgtcacaagacttggattttgagaatctggagacatgggttgttgtgcaagtaaagagtcagagccgcaacacaatggttacagacatgctgggactggtggtgtgcacaaccaagaagactcatgaacctttggtcaaccaatcaagagcacctgcaaatcaaccttatcatttacatgaaaagcatgctgcatccactgctcagacagtgcctcaaaatatgccatggaagcctcctggtccagcccttagtcctaaacctgttgttggtgttaggcaagacacaattcttgggaagcagtttgaggatgtgaagcagttccacacacttgggaaggagttgggtagagggcaatttggtgtgacatatctttgcactgagaattcgaccggattgcagtatgcctgcaagtccatttccaagaggaaacttgcgagcaaatctgataaggaggacataaagagggagattcagattatgcagcatttgagtggtcaacccaacattgttgagttcaaaggggcttatgaggataggagctcagttcatgttgtgatggagctgtgtgcaggtggggaactttttgataggattattgccaaggggcattacagtgagaaggctgctgcttcaatttgcagacaaattgtaaatgttgttcatatctgtcatttcatgggtgtgatgcatagggatctgaaaccagagaattttttgctatctagtagggacgaaaatgcacttctcaaggcaaccgattttggcttgtcagttttcattgaagaaggaaaggtatatcgggatatagttggtagtgcttactatgttgctcctgaagttctgcggcgcagatgtgggaaggaaatagatatatggagtgcaggagtcatattgtatatcttacttagtggagtccctccattttgggctgagactgagaagggaatatttgatgccatattggaaggtcacattgattttgaaagtcaaccatggcctaacatctcagacagtgccaaggatcttgttcgtaagatgcttatacaggatccaaagaaacgcattacctctgctcaagttcttgagcacccatggattaaagatggaaatgcttcagacaagccgatagacagtgcagtcctttccagaatgaagcaatttagagcaatgaataagctaaagaaacttgccttgaaggtcattgctgagaatatgtctgcagaagagatccaaggtttgaaggcaatgtttacaaatatggacactgacaagagtggtacaatcacctatgaagaacttaagtcaggattgcatagacttggctcaaagcttacagaggctgaagtgaagcaacttatggaagctgctgatgtagatggaaatggctcaattgactacatagaattcatcactgctacaatgcatagacacaaattagaaagagatgaccaacttttcaaggccttccaatattttgataaagacaacagtgggtttattacaagagatgaattggaatcagccatgaaagaatatggtatgggtgatgatgcaacaatcaaggaaatcatatctgaagttgatacaattatatctgaagtggatacagatcatgatggtagaatcaactatgaagaattctctgcgatgatgaagagtgggaaccaacaacaaggcaagctattctaaatcacaccatctaaccagtctgagggcctggtatccaaaacccctctagaggagggggtttatacctctgagaagtacttccaaacagtttgtatcactcataggcatgtaaagcttctatttagaatgtttttgagttactatgctcctcatgactgttagtcaactccctttttttcatttctgggaccttttttttgcttttcactgagattccatttccgagtcctctttgaatttgttttggacactaaaatataaaatcacatagaaaaaggtgatatctcaataagattatactagtttgtttttgctcttga

SEQ ID NO: 1418 - DNA, 1814 bp, Glycine max
gggcggacgcgtccgcttcgttcactcttcttctcttgcggggagggttttagcgcagcttcttctacatttagggaggattggtaaggaggggggtcacatcagtattgtggttattggccatgttgactctgggaagttcactaacaatgggcaacctgatctacaagcttggaggcattgacaagcgtgttattgagagaatttgtgaaggaagctgctgagatgaacaagaggtctctttttcaagtatgcctgggtgcttgataagcttaaggctgagcgtgaaagacgaatcacacattgatattgccttgtggacgtttgaaaccaccctgtactattgcacagtcattgatgcccctggacacagggatttcatcaagaacatgatcactgcgacatcccaagctgactgtgctggtcttatcattgattccactactggggggtctgaagctgggatgtcaaaggatggacagactcgtgaacatgctctgctttcattcaccctcggggtgaaacaaatgatttgctgccgtaacaagatggatgctactacaccaaagtactgcaaggccaggtgtgatgaaattgggaaggaagtttcttcctatttgaagaaagtaggatacaaccccgacaagattccttttgatcctatatctggttttgagggagacaacatgatcgagaggtccacataccttgactggatcaagggtactactctgctagatgcacttgaccagatctctgagcccaagaggccttctgacaagcccctcaggctaccccttcaggatgtgtacaagattggaggaattggaactgtgcctgtgggacgggttgagactggtgtcttgaagcctggaatggtggtgacttttgcaccaactggactgacaaccgaagttaagatctgtggaaatgcaccatgaagctctcacagaggctcttcccggtgataatgttggattcaatgttaagaatgttgctgttaaggatctcaagcgtgggtatgttgcctcgaactcaaaggatgatcctgccaaggaggctgctaacttcactgcccaggttatcattcatgaaccatcctggtcagattggaaatggctatgcccctgttcttgactgccacactttccacattgctgtcaagtttgctgaactcatgaccaagattgacaggcgatctggcaaagagcttgagaaggaacccaagtttttgaagaatggtgatgctggttttgttaagatgattccgaccaaacccatggtggttgaaactttctctgagtaccccccacttggtcgctttgctgtcagggatatgcgtcaaactgttgctgtgggagtcatcaagaacgtggagaagaaggatcctactggagccaaggtcaccaaggctgcccagaagaagaagtgaatcgtgcggtttggttcatcaggggatgtcgtttcttatggttacaataaatgttggtttcttgcccatgtgatcttcgtttctaggtagcttgtttttcggacatagtttgaagtctccaccatcatctcgcaacttttgttcccagaattgggttcttgatcgacggtggcaagactccttttatcattctgttttagatgtgttgtgtttgtgagaaccccctgattaccatttttgttaagcgcagcgagttttagggctttgccgttgcgttgttggtttgctttttaaatgtcaactttatatttgtgttcaatttttgcttggtttgcttttaaaaaatcaaatttatgtgtcaaattttggctttggatatttt

SEQ ID NO: 1419 - DNA, 1850 bp, Glycine max
cccacgcgtccgcctcgctctatttctcagtctctctgatttgcggctgaggattccgaacgagtgaccttcttcgtgtctcgcaaagtttaagtaatcgtgggtaatgacaaggttgacatcaacattggcgtcatgggacatgtcgactcttggaagtgaacttacacatggtcacttgatctacaagcttggaggtattgacaagcgtgtgattgaaaggttcgagaaggacgctgtcgagatgaacaagaggtcattcaggtgatgcctgggtgctctacaagctcaaagctgagcgtgaaagaggaattcaccattgatattgctttgtggaagtttgaaaccaccaagtaaccctgcacggtcattgatgctcctggacatcgtgactttatcaagaacatgattactggtacctcccaggccgactgtgctgtccttattattgactccaccactggtggttttgaagctggtatttctaaggatggacagacccgtgagcatgctcttcttgctttcaccctgaggtgtgaagcagatgatctgttgctgtaacaagatggatgccactaaccccaagtactcttcggctaggtatgatcgaaatcgtgaagcgaagtctcttcttactatgaagaaggttggttacaacccagacaagcattccctttgttcccatctctggtattgagggtgacaacatgattgagaggtccaccaaccttgactggtacaagggaccaactcccccttgaggcccttaaccaaatcaatgagcccaagacgccctccgacaagcctctaaggcttccattgcaggatgtctacaagattggtggtattggtactgtgccagtgggacgtgtagagactggggttgtgaagcctggtatggtggtgacttttggtcccatctgttctgacaactgatgttaagtctgttgagcatgcaccatgaggctctcacagaggctcttccaggtgacaatgttggatttaatgtgaagaatgttgcagtcaaggatctcaagcgtggttttgttgcatctcaactccaaggacgaccctgccaaggaagctggcaacttcacatcccaagtcattatcatgaaccatcctggccagattggaaatggatacgcaccagtccttgactgccacacttatcacattgctgtgaagttttctgaaatcttgaccaagattgacaggcgatctgggcaaggagcttgagaaggagcccaaatttttgaagaatggtgatgctggtatggttaagatggttcctaccaagcccatggtggttgaaactatctctgagtatgcctccccttggtcgttttgcttgtgagggacatgcgtcagaccgtacctgttggagtcatcaagagtgttgagaagaaagaccccaccggagccaaggtcacaaaggctgccgccaagaagaagtgattgcattttggcatttttgctagcacatgtgatcatcaacgtggtttcataaaaaacttgttcctttacagtagtttatctttgcagagtcttaggtgtttgttttaccagtatatattttgaagtgccgaccgatttcatgtagcccgtagccttctaaactgggttcttgatcggcggtaacattttcgttgctgtatgtttttgatgagtactgttttttttgtttttatcgttaaaagtcttaaattttcaaattcacaagcagccatagggttttagtccatttcctttgctgctgaggagggatgtcttaaatttgcatttaatttataaggaagttttgttaaaaaaaaaaaaaaaaaaaaaaagggcggccgctcgcgataaag

SEQ ID NO: 1420 - DNA, 1898 bp, Glycine max
aattctcatcaaatccaatcattttagtcaaagaaagcttagatttattataccttgttacagcagcagatcatctgcttcacaccaagggtgaaagcaagaagagcatgctcacgagtctgtccatccttagaaataccagcttcaaaaccaccagtggtggagtcatgggtaaggaaaagactcacatcaacattgtcgtcattggacatgtcgactctgggaagtcaactaccactggtcatttgatctacaagcttggaggtattgacaagcgtgtgattgagaggttcgagaaggaggctgctgagatgaacaagaggtcattcaagtatgcctgggtgcttgacaaggctcaacgctgagcgcgaaagaggaattaccattgatattgctttgtggaagtttgaaaccaccaagtactactgcacagtcatcgatgcccccggacatcgtgactttatcaagaacatgattactggtacctcccaggctgattgtgctgtccttatcattgactccaccactggtggttttgaagctggtatttctaaggatggacagactcgtgagcatgctctttttgctttggggccttggggtgaggcagatgatctgctgctgtaacaagatggatgccactaccccgaagtactctaaggctaggtatgatgaaattgtgaaggaagtctcttcctacttgaagaaggttggttacaacccagacaagatgtccatttgtgcccatctctggtttcgagggtgacaacatgattgagaggtccaccaaccttgactggtacaagggactcaactctgcttgaggctcttgaccacgatcaatgagcccaagaggccctcagacaagccactcaggcttccattgcaggatgtctacaaaaatgggtggtattggtcaccgtgccagtgcggacgtgttgagtactggtgtccgtgaagcccggtaaggtggtgacttttggtcccactgggctggaaactgaaggtaagtctgttgagatgcaccatgaggctctcacagaggctcttccaggtgacaatgttggctttaatgtgaagaatgttgcagtcaaggatctcaagcgtggttttgttgcatccaactccaaggatgaccctgaatgaggaagctgccaacttcacatctcaagtcattatcatgaaccaccctggccagattggaaatggatacgcaccggtgcttgattgccacacttctcacattgctgacaaagtttcgtgaaaacttgaccaagattgacaggcgatctggtaatggagttggagaaggagcccaaatttttgaagaatggtgatgcaggtatggacaagatgataccaaccaagcgcatggtggttgaaactttctctgagtatcctccccttggtcgttttgctgtgagggacatgcgtcaaactgtggctgtcggagtcatcaagagtgttgagaagaaagaccccaccggagccaaggtcaccaaggtatcctgccaagaagaagtgattgcatttgggcaattttgctagcacatgtgatcatcatcgtggttactcctttatagtagttttatccttgcagagtcttaggtgttttgtactaagttatatttttaagtttctgccgatttcactgaagccgaaacttgcagaactaggttcttgatcggcggtggtcaattttcattgctgtttgtttttgatgagtactggttttttgtttttgatgggaagaaagaggtctgagatatttcgaatttcacaagcagctatagggttttagtccatttcctttgctgctgagggatgttttaagttgcatttaatttataacgaaaaaaatataaaaagtttatggtttaaaggctattattctttaa

SEQ ID NO: 1421 - DNA, 1863 bp, Glycine max
gcgtacgtagctcgaatctcgctcgagcacctttgttcactcttcttctcttgcggctagggttttagcgcagcttcttctagatttaaggaagatgggtaaggaaaaggttcaccatcagtattgtggtcatttggccatgtcgacttctgggaaatcccacttaccactggtcacctgatttacaaagcttggaggccattgacacagcgtgttatttgagaggttttgagaaaggaagctgctgagatgaacaagaggtctttcaagtatgcctgggtgctggacaaacttaaggctgagcgtgaaagaggaatcaccattgatattgctttgtggaagtttgaaacaacaaagtattattgcacagttattgatgcgcctggacatagggatttcattaagaatatgattactgggacatcccaagctgactgtgctgttcttatcattgattcgaccactggtggttttgaagctggtatttccaaggatggacagactcgtgagacatgctctgctttcattcaccctaggtgtgaaacagatgatgagctgctgtaaccaaatgggatgcaactacaccccaagtatttccaaggccaggtatgtatgaaattgtgaaggaagtctctttctacttgaagaaagtatgattcaaccctgacaagattccttttgttcctatctctggttttgagggagacaacatgattgagaggtccacaaacacttgactggtacaagggctcaactctgcttgatgcacttgaccagatttagtgagcccaagaggccctctgacaagcccctcaggcttccccttcaggatgtgtacaagattggaggtattggaactgtgccagtggtacgtgttcgataccggtgtcttgaagcctgaaatggtgggtgacttttgcaccaactggtgtgtatcactgaagtcaagtctgtggagattgactatgaatctcttacagaggcacatcctggtgacaatgtgggattcaatgttaagaaatgttgctgttaaggatttgaagcgtggttatgttgcctcaaactcaaagggatgacccttgcaaaggaggctgttaacttcacagcccaagtcgatcatcatgaaccaccctggtcagattggaaatggctatgcccctgtcctcgactgccacacttttcacatttgctgtcaagtttgctgaactccatgaccaagattgacaggcgattcgcccaaagagcttgagaaggagcccaagttttttgaagaacggtgatgctggttttgttaagatgattccaaccaaacccatggtttgttgaaactttctccgagtatcctccacttggtaggtttgctgttagggacatgcgtcaaactgttgcttgtgggagtcatcaagaatcgttgagaagaaggatcctaccggagccaaggtcaccaaggctgcccagaagaagaagtgaatcgtgcgggctggttcatcaggggatgtgtggttacaataaatgttggtttctttttctgaactcttgtgtcttcttttctaggaagcttgtttttcggacaaagtttgaagtctccaccatcatctcgcaactgttgttcccagaactggggttcttgatcgacgagtggcaaaattgcttttattctatctgtggttttaatgagatagtgtatgatgggaaacccctgattacatttttgttaagcgcagcgagttttcaggcactttgctgccgctgtgttgctctggtgttattaaactgtcaactttctatttgtagtgttcaatttttggcttggtttgctttttctttataatttgtgttcaaattttggcttggtttgctttt

SEQ ID NO: 1422 - DNA, 760 bp, Glycine max
  unsure (1)..(760): unsure at all n locations
gacgtcagacgcacgcgtacgtaaactcggacagctcaataccaaaatgaccaagcttacaattctcctcatcgctcttctcttcatcgcccacacctgctgcgcctccaaatggcaacagcaccagcaagagagctgccgcgagcagctcaaggggatcaacctcaacccctgtgagcacatcatggagaagatccaagctggccgccgcggcgaggacggcagcgacgaagatcacattctcatcaggaccatgccgggaagaatcaactacatcaggaagaaggaaggaaaagaagaagaagaagaaggacacatgcagaagtgctgcagcgaaatgagcgagctgaaaagccccatatgccagtgcaaagcgctacagaagataatggataaccagagcgagcaactggaggggaaggagaagaagcagatggagagagagctcatgaacttggctattaggtgcaggttgggacccatgatagggtgcgacttgtcctccgatgactgaaaaaaaagtactactaacacatatatgtgttagtttatgctagctagaagaacgtataagctatctccgtatgttgtatattaataaaaagatcatcactggtgaatggtgatcgtgtatgtaacgtagtgggcaatggaagcacttagagtgtgctttgtggccttgccctctgttttgataactgagacttttgcgaataccgttcgtttttcccttcaaaaaaagttttctgcttnnnnnnnn

SEQ ID NO: 1423 - DNA, 943 bp, Glycine max
ctaattctatataagcaaccttctccagcaattcttctaccacatcaactcatcaagggttgtgaaagcagagaagtgagatacactaagttatcctcataaatacactctaattaggtggcaagataagtgtctaaccttagtaacattgccacatattgtgttcattttggaattgtgccactaaaattctattcaattcatctatggctgcctcttcttatgctatgcaatcaatcctggcaaaccctttgatccgcatttccagcgggtctagggtgaaccaatttggcgttcctgctttgcacatgagaaggaatgttggcctgagagttaggtccatggctaaggaagaacaaccaagtgagcctgcaaccccagttacaccgccaccatcagtagaacccaagccacagccagtctctgctccttcaccaaaggtgagcactaagttttctgatgtgttggcattcagtgggccagcacctgagaggatcaatggaaggttggccatgattgggtttgtggctgcaatggcagtggaagtagccaaagggcaaggtgtgttagaacaaatatccaatggtggcatcccatggttcttggggacaagtgtggtccttacccttgcttccttgattccactcttccaaggtgtcagcgtggagtctaagtccaaagggttcatgtcctcagatgcagaactgtggaatgggagatttgctatgttgggtttgattgctctggcttttactgagtatgttaagggtagtactttggtataattcagtcatgaaggcacaccacaatggacttaatctcctttgtgattagagagaccaatgtttatttgtacttcgtgtgtttatttaatctacatatcaaaattatttcgttaatcataaccaaacttcttcacattgaattgctgtttgcctcgtgt

SEQ ID NO: 1424 - DNA, 1419 bp, Glycine max
gtttataatgatgccattctttgctcggactcattccaaagcatgtatactcaaatgctatgtggcctcattgagcgccaccatgtcctccgcctcggcgccgtcttcgcctccgggctcctccgtgcaatccggttcctccaactcaattggcccgaacttgcccatgatatccaaaccggaaccttaaattctcggatcaccgacccggcaattaggagttacatggacaaggtgctaaaatccgacccggaattggcccaatttgtggacacaacaatgttccaaggacaattgggaaggaatcatcacaaggatttggcccaacacaaaatacttggacgtcatcgtaacgggtgccatggcccaatacattcccactcttaactactacagcggaggagggttgccacttgcatgcaccatgtacgcttcatcagagtgttactttggactcaaccttaatccgatgtgcaagccctctgaggtttcatacaccattatgccaaacatggcatatttcgaattccttccccacgatcctaagcctggctccaccagttcaaaactagtggagttggcggacgttgaagtggggaaggaatacgaactggtgatcacaacctatgcgggactctatcggtaccgtgtgggcgacatcctccgagtcaccggtttccacaactcggcaccacaattccacttcgtgcgcaggaagaacgtgttgctgagcattgactcagacaaaacagacgagtcagagttgcaaaaggggattgagaatgcctcaaagcttttatcagagttcaatacaagcgttgtggagtacacgagttatgcagacacaacaacgattccgggtcactacgtgatttattgggaattgttgaccaaggactcgacgaactcacccagtcacgaggtgttgaatcggtgttgtttggagatggaggagtgcttgaactcggtgtatagacaatgtcgtgttgctgatcattccattggcccattggaaattcgtgttgtgaggaatgggacctttgaggagcttatggattatgcaatctcaagaggtgcgtccataaatcaatataaggtgccaagatgtgtgaatttcacacccataatggagttattggactctagggttgtgtctgtgcattttagccaggaattaccacattggacccctgaaaggaggaggtgaggttcttcgtatgtggcttattgggcttgagtcaaacatgtagatgtagattttatttgttgttttttttgctaaggttttgtattttttgggtagtgtgtaggactcatggtgagtctacatggagatgttgaattaggatgtctcttggttggattaattatgtatttcggttcgattaacttgtgtaaaagatgtgacttttttttttt

SEQ ID NO: 1425 - DNA, 659 bp, Glycine max
ctttgaggagcttatggattatgcaatctcaagaggtgcgtccataaatcaatctgcaaccccagttacaccgccaccatcagtagaacccaagccacagccagtctctgctccttcaccaaaggtgagcactaagttttctgatgtgttggcattcagtgggccagcacctgagaggatcaatggaaggttggccatgattgggtttgtggctgcaatggcagtggaagtagccaaagggcaaggtgtgtttgaacaaatatccaatggtggtatcccatggttcttgggaacaagtgtggtccttacccttgcttccttgattccactcttccaagggatcagcgtggagtctaagtccaaagggttcatgtcctcagatgcagaactgtggaatgggagatttgctatgttgggtttggttgctctggcttttactgagtatgctaagggtggtaccctggtgtaatccagtcatgaatgcacgccaaaatggtcttaagtcattcgtggttagaaaggccaatctctttttgtacttggggcctttatttaatcagcatataaaattatcatttttttttatcaaaaaatattaatcattagtattttattaatttttgttaataaaagaaattcaactagtaatctttatcttc

SEQ ID NO: 1426 - DNA, 460 bp, Glycine max
  unsure (1)..(460): unsure at all n locations
agagctatgacgncgcatggacgcctacgtcagcttcgaattccgcttcgaagcatctaagtgagatacacagtagttaggtagcaagcttaagtgtctaaccttagaaacatatctgctacatatcgtgtgcattttggaattgtgccactaaaattctattcatctatggctgcctcatcttatgctatgcaatcaatccttgcaaaccctatgatccgcatttccagcgggtctagggagaaccattttggtgttcctgcttatcacatgagaaggaatgttggcctgagagttaggtccatggctgaggaagagcaaccaagtcagcctgcgaccccagttacaccaccaccagcagaacccaaaccacagccagtctctactccttcaccaaaggtgagcaccaagttttctgatgtgttggcgttcagtgggccagcacctgagaggatcaatg

SEQ ID NO: 1427 - DNA, 1330 bp, Glycine max
ccacgcgtccgcccacgcgtgcgcttctttaaccgcaattacacggttcaatgaaaagtcggtgataaacaaacgaagtctctgcaaaacgcgatcgattcttctgtcgagagatgaagctcactgcactgaattctacggttcgccgcgctctgctcaatggccggaaccaaaacggtaaccgcctcggttcagcggcgctgatgccgtatgcggcggcggaaacgaggctcctctgcgccggaggcgcgaacggatggttcttctactggaagaggacgatggtttcgccggcggaggcgaagctgccggagaaggagaaggagaaggagaaggccaaggccgagaagagcgtggtggagtccagttattgggggatttcgaggccgaaggttgtgagagaggacggaacggagtggccttggaactgcttcatgccgtgggagagttatcgttcaaacgtgtccatagatcttactaagcatcatgtgccaaagaatgttctggataaagttgcttacaggacagtgaagctcctgagaattccaacagatttgttttttaagagacggtatggttgccgtgcaatgatgctggaaacagttgcagctgtccctggcatggtaggagggatgctgttgcacctcaggtcactccgtaagtttcagcaaagtggtggttggatcaaagcattgctggaggaagcagagaatgagagaatgcacctaatgactatggtggaacttgtgaagcctaaatggtacgaaagactgctggttcttgctgtacagggagttttcttcaatgcgtttttcgtgctttacatactctccccgaaggtagctcatagaatagttgggtatcttgaggaggaggctatacattcttacactgagtacttgaaggatcttgaaagtggtgcaattgaaaatgttcctgcccctgccattgcaatagactattggaggcttcccaaggatgccagattgaaagatgttataacagtcattcgtgctgatgaggctcaccatcgagatgtgaaccattttgcttctgatatccactttcaaggtaaagaactacgggaagcaccggctcctattggttatcactagtctttattgccacggatatgaaattacccctttggtgtgaaattagaaacctagaagtacgattgtatgcttagtacagaattcctttaattcaatcttgctgttggatataacagttatactatataccaatgattctataatacaacctcatctgagaaccatgtttaatgtgatacgataacaatttagttaagtactttttccgcaaccgg

SEQ ID NO: 1428 - DNA, 1229 bp, Glycine max
cgctagaaagtctcgagacagcaaaggctagatatcggtttgataaaatattgtacacataaatctagctccaattcctaatcacctggttaatttcttcacatagagctatcaagatccaacgttaacatgaagaatgttttagtaaggtcagctgcgcgagctctgcttggcggcggtgggcggagctactaccgccagctctcaacggcggcgatcgtggaacagagacaccagcacggtggcggcgcgtttggaagcttccacttgcggaggatgtccactcttccagaggtaaaggatcagcactcagaggagaaaaagaacgaggtcaacgacaccagtaacgccgtcgttacgagttactggggaatcacaaggcccaaggttcgtagggaggacgggacagagtggccgtggaactgcttcatgccatgggatagttaccactctgatgtgtcaatagacgtgaccaagcatcatacaccaaagtcattaacggacaaggttgcttttagggctgtcaagtttctaagggttctctctgatatctacttcaaggaacggtatgggtgccatgctatgatgctggaaacaatagcagcagttccaggaatggtgggagggatgctgctgcacttaaagtctctgaggaagttccagcacagtggtggatggatcaaggcactgctcgaggaagcggagaatgagaggatgcacctgatgaccatggtggagcttgtgaagcccagctggcacgagaggctgttgattttcaccgcgcagggtgttttcttcaacgccttcttcgtgttctacctcctctcgccaaaggcggcacatagatttgttggttacttggaggaagaagctgtgatttcatacactcagcatttgaatgccattgagagtggtaaagttgaaaatgtccctgcccctgccattgctattgactactggaggcttcccaaggatgcaactctcaaggatgttgtcactgtgattcgcgctgatgaggctcatcacagggatgttaaccactttgcttctgatattcatcatcaagggaaggaattaaaagaggctccagctcctattggttatcactgagtcattgttgtaaattttttaacaaaacgatatctagcctttgctgtctcgagactttctagctatttttaccatctggttcaataaaatttattttcagcgagcactttaaaaaaaaa

SEQ ID NO: 1429 - DNA, 570 bp, Glycine max
caaggatgcaactctcaaggatgttgtcactgtgattcgcgctgatgaggctcatcacagggatgttaaccactttgcttctgtaagtttccttttcgtctcataatggacaacaacaaaaattgttaggaacacattcttcaacatattttttttaaagaaatttaacatattttcttattagttggaatataatttattgaaaactataagatcccaaaataagttcattaaatatcacctgagatccacgaaatactttcaatagttccaactaataagaaaaagtatcttgttagcatttttcatcaaacacttctaattttgtaccttttcattgggtttgtttcactttgctctgattcagtcttctgaatgctttgtgttcttcttcgtgcaggatattcatcatcaagggaaggaattaaaagaggctccagctcctattggttatcactgagtcattgttgtaaattttttaacaaaacgatatctagcctttgctgtctcgagactttctagctatttttaccatctggttcaataaaatttattttcagcgagcacttt

SEQ ID NO: 1430 - DNA, 1141 bp, Glycine max
  unsure (1)..(1141): unsure at all n locations
gatcagcaactacaacgtgagaaacatggcttccttaagctccttagtgctgctccttgcagctctaattctatcccctcaagttcttgcaaactatgagaatcccccagtgtacaagcctcccactgagaaaccaccagtttataagcccccagttgagaagcctcctgtttacaaacctccagttgaaaaccccccaatttataagcctccagtagagaagccaccagtgtacaagcccccagttgagaaacccccagtgtacaagcccccagttgaaaaaccaccagtgtacaagcccccagttgagaaaccaccagtgtacaagcccccagttgaaaaacccccagtttacaagcccccagttgaaaaacccccagtgtacaagcccccagttgaaaaaccaccagtgtacaagcccccagttgagaagcccccagtttacaagcccccagttgagaagccaccagtttacaagcccccagttgagaagccaccagtatacaagccaccagttgagaagcctccagtgtacaagccaccagtagagaagcctccagtttacaagccaccagtagagaaacctccagtttacaagcccccagtggagaaacctcctatttacaagccacctgttgagaagcctccggtctacaagccaccatatggaaagccaccatacccaaagtaccctccaactgatgacacccatttctgaaggatgtcaagaggtgtattgagtatatgctaaataagaggtgctcaaaatgtagttatagattacaaattattgcaagggttgctcttagcttcttcatttcaagcttttgtttacactttgcagtgctatggcaaagataagagtatcatggatggaaaaagggggggaaaaaatgttgctttgtactccaaattatgaataatagaactttatattatttatcaaaaaaaaaaaaaaaaaaaaaaaaaaaaaaaaaaaaaaaaaaaaaaaaaaaaaaaaaaaaaaaaaaaaaaaaaaaaaaaaaaaaaaaaaaaaaaaaaaaaaaaaaaaaaaaaaaaaaaannngggggggccccccccttgttgggctcccccccccctgaattaatttgggacgcgccccccggggtttcccttttt

SEQ ID NO: 1431 - DNA, 1135 bp, Glycine max
  unsure (1)..(1135): unsure at all n locations
cggacgcgtgggtttctaacttgccataccatcttacttttactttgttttcacaacatagccatgggtatctccaccatcgcttctccttttgactccatcatcttcgatttggacgacaccttgtacccctccagcaccggaattgacaagtgcgtcaagaaaaacatccaactctttctcatccagaaatgcggattctcagaatccaaagccttgacccaacgagttgagctcttcaaaacctacggaagcacccttgccggcttaagagcacaaggcctcgatatcactgcagaggactaccacggtttcgtgcacggaaggctaccttacgactccatcgacactgatcatcagttacggaacctcctcttgagcatcaaacaaagaaaaattgtttttactaattctgacaggattcacgcgatgagggcgctggataggcttggggtcaaggactgtttcgagcaaatcatatgcttcgagactataaacccgaaccttccctattcaacccgacccgacgaattccccatcctccttaaaccttcgctcgacgccttcaagatcgcgcttgacgctgccaacgtggatcctcgtcgtacgttgtttctggatgacagcgttcgcaatattgccgcgggaaaagaaatgggtctccacactgttctggttgggaagacagagaaaagcaaaggagcagactatgcagtggagtgtgtgaatgacttggcacaagtgatcccagagatatgggcaaacgaaatggacggtgaggatcaaacgatgacacgtaccaagagtgaattggaggccgtactcgcgtgtgctgtggttggagcttgaaaagtgtttggatgtggaggaggataaggcctgacgttgtacaatgtacattcccaaaccaacccaactatttaagcaattaaaataatagcagcaagtactatcagaacaccaacaaccaagacaataacaataagtaacatgggcccctaagcaattatttgcgacatcatgttaatcatgtcaatattgtaagatatttagtagtattatttgtacgtattatcaatcgtctttacnataccatcaaattgtctctcagagaaaaataaaaaaaaaaaaaaaa

SEQ ID NO: 1432 - DNA, 915 bp, Glycine max
caaaatcgtgattgatttcaataactgaacttgatccaagttaaattagacccaaatgtctcggataaaattttggattctaattttataataaaataatggtgattaagggaaaactctattaaaattagtcaaccaaattttcctacaaaaattatcataaaattaatcgtgcacaaaatcaatcctatgagtatggttataaaaaatagtcaacaaacgaaacgggtcgtcacttccttgtttcggcgatgttgttttttgacagtgaaacccaaattagattattatttaaggaaatgttagaaaggatcgtttttaattttttataagaaatcattgtgatggataatgattttctagattttatgctatatattgcagttgtttctggatgacagcgttcgcaatattgccgcgggaaaagaaatgggtctccacactgttctggttgggaagacaatgaaaagcaaaggagctgactatgctgtggagagtgtgcataacttggcacaagtgatcccagagatatgggcaaacgaaatggacggtggtgatccaacgatgacacgttcgaagagtgaattggaggccgtactcgcttgtgctctggttggagcttgaaaattgacgttgtacaaaaatgtacattcccaaccaacccaactatctatgcaattaaaaataatagtacagtagtataaatagtatcagaccaccaatagcgaagacaataacagtaagtaacgtggaccccctaagcaattatttgcgacatgtgaatattgtaagatattaagtattatcaatcgtctttcaaataaaatcaatgtgtctctcagggatatcaattgcttaataataaagttgagttattgtcattattttcattatcaaaaaaaaaaaaaaaaagga

SEQ ID NO: 1433 - DNA, 681 bp, Glycine max
gggcttccataaccatgggtatctccaccatcgcttctccttttgactccatcatcttcgcaccggaattgacaagtgcgtcaagaaaaacatccaactctttctcatccagaaatgcggattctcagaatccaaagccttgacccaacgagttgagctcttcaaaacctacggaagcacccttgccggcttaagagcacaaggcctcgatatcactgcagaggactaccacggtttcgtgcacggaaggctaccttacgactccatcgacactgatcatcagttacggaacctcctcttgagcatcaaacaaagaaaaattgtttttactaattctgacaggattcacgcgatgagggcgctggataggcttggggtcaaggactgtttcgagcaaatcatatgcttcgagactataaacccgaaccttccctattccacccgacccgatgaattcctcatcctccttaaaccgtctctcgacgccttcaagatcgcccttgacgctgccaacgtggatcctcgtcgtacggtaagacaagacgaccaagtcaacaacctcaacctatacggccattgatttgaatgaaactaaacttcatccaagagaaaatacactcaaatctaagtgtgttagataaaactttgaattcaaattatataaatagaaaaaacgtgatt

SEQ ID NO: 1434 - DNA, 733 bp, Glycine max
cgttgcgtgggctttctaacttgccataccatcttacttttactttgttttcacaacatagccatggccatctccagcaacgcttctccttttgattccatcatcttcggtgagtacttcatcctctctctttctctcctcaatttctaattcccccctctgaattaaacagatttggacgacaccttgtacccgtcaagcaccggtattgacaagtgcgtcaagaaaaacatccaactctttctcatccagaaatgcggattctcagaatccgaagccttcaccctccgagttgatctcttcaaaacctacggaagcacccttgccggtttaagagcactaggccatgatatcaccgcagaggagtaccatggtttcgtgcacggaaggctaccttacgactccatcaaccctgatcatcacttacggaacctcctctgcaccatcaaacagagaaaaattgtttgttactactccggactggatattttctttattattattgtattctaatcatcctaatatttttgcttttatcaggtttttactaattctgacaggattcacgcgatgagggcgctggataggcttggggtcaaggactgtttcgagcaaatcatatgcttcgagactataaacccgaaccttccgtattcaacccgacccgacgaattccccatcctccttaaaccttcgctcgacgccttcaaaatcgcgcttgacgctgccaacg

SEQ ID NO: 1435 - DNA, 591 bp, Glycine max
gtatctccaccatcgcttctccttttgactccatcatcttcggtttgtacttcatactctttctttctttcttttcctttacaactctttcttaattatcttctccattaatcagatttggacgacaccttgtacccctccagcaccggaattgacaagtgcgtcaagaaaaacatccaactctttctcatccagaaatgcggattctcagaatccaaagccttgacccaacgagttgagctcttcaaaaccctacggaaagcacccttgccgggcttaagagtcagtaataattaacaccactacacaattccgatcacctaattttctaaccacgccaataacataatcaatcttctcaacttgggttcactttgcaggcacaaggcctcgatatcactgcagaggactaccacggtttcgtgcacggaaggctaccttacgactccatcgacactgatcatcagttacggaacctcctcttgagcatcaaacaaagaaaaattgtttttactaattctgacaggattcacgcgatgagggcgctggataggcttggggtcaaagactgtttcgagcaaatcatatgct

SEQ ID NO: 1436 - DNA, 722 bp, Glycine max
  unsure (1)..(722): unsure at all n locations
catgagtaacatgacttccttaagctccttagtgctgctccttgcagctctaattctattccctcaagttcttgctgactatgagaagcccccggtgtacaagcctccccattgagaagccaccactttacaagcccccaattgagaaacctcctgtttataaacctccagttgagaaaccccccatttataagcccccagtagagaagccaccagtgtacaagcctcctgtagagaaacccccagtttacaagcccccagttgaaaaaccaccagtgtacaagcccccagttgagaaccctccagtttacaagcccccagttgaaaaaccaccagtatacaagcccccagttgagaaacctccagtttataagccaccagtagagaagcccaccggttgagaagcctccagtctacaagccaccatatggaaagccaccatacccgaggtaccctccgtctgatgacacccctttttctgaaggatgtcaaggggtgtattgagtatatgttaaataaaaggtgctcaaaatgtagttatagattacaaattattgcaagggttgcttttagctttttcatttcaagcttttgtttacactttgcagtgttatggcaaaaataagagtatcatggatggaaaaagggggggaaaaaatgttgttttgtactggggagttatggatattggaaatccccctctctgtttnaagtgngttttg

SEQ ID NO: 1437 - DNA, 406 bp, Glycine max
ctaaacatgaggaatatggcttccttaagctcctcattagtgctgctccttgcagctctaattctatcccctcaagttcttgctgactatgagaagcccccaatttacaagccacctgtttacacaccgccagtttataagcccccagttgaaaaaccaccagtgtacaaacctccagtttacaagcctccagttgaaaaaccacctgtttataagcctccagtttataagccacccatttacaagcctccagtgtataaacctccagttgagaaaccaccagtagacaagcctccagtgtacaagcccccagttgagaaacctcccgtttacaagcccccagtggagaaacctcctatttgcaagccacctgttgagaagcctccggtctacaagccaccatatg

SEQ ID NO: 1438 - DNA, 834 bp, Glycine max
acgcgtcagcagtatacaagcccccagttgagaaacccccagtttataagcccccagttgagaaaccaccagtgtacaagcccccagttgaaaaaccaccagtgtacaagcccccagttgaaaaaccccccgtgtacaagcccccagttcatcagccatccagtgtacaagccctccagtgggggagcccccagttttacaagccccacagtttgagaagccaccagttgacaagcccccagttgagaagcctccagtatacaagcccccagttgagaagcctccagtgtacaagccaccagttgagaaccctccaggttacaagcccccagttgagaaacctccagtttacatgcccccagtggagaaacctcctgtttacaagccaccagtagagaagccaccggttgagaagcctgcagtctacaagccaccatatggaaagtcaccatactcaaagtaccctccaattgatgacacccatttctgaaggatgtcaatgagtgtattgagtatatgctaaataagaggtgctcaaaatgtagttatagattacaaattattgcaagggttgctcttagcttcttcatttcaagcttttgtttacactttgcagttatatggcaaagataagagtatcatggatggaaaaagggggggggaaaatgttgctttgtactccaaattatgaataatagaacgttctattattcatcagattattaatcctaaattactttagagtgatgtttattatgaaagtaaaaccacacgaattgtacgaaatataaaatggacgattaacgttataattttttaaaatacatattgatt

SEQ ID NO: 1439 - DNA, 1400 bp, Glycine max
  unsure (1)..(1400): unsure at all n locations
acgncgctggcacccgtccgtaagctcggattccggctcgagcggctcttcgtttgctacctaaaccctagtctccatacatcaacttgggaggttaaagagacggcaacgttgtgctgtccgccttgaccgagccagagcttcgtcttggccctcgattttgccctgtaaaactaatcccagtcacaacagaaataatcaatggcaccgaaacagaccaaggctgagaagaagatcgcttacgatgcgaactgtgcgacctaatggaggagtacggccaaatcctcgttgtaaactccgacaacgtgggatcgaaccagctccagaacattcgcaagggtctccgcggcgactctgttgtcctcatggggaagaacaccatgatgaagcgctctgtcaggatgcacgctgagaaaaccggaaacaatgcctatctcaaccttatccccctccttgtcggcaatgtgggattgattttcaccaagggtgacctgaaggaggtcagtgaggaggttgccaagtacaaggttggagctcctgctcgtgttggtttggttgccccaattgatgttgttgttcctcctggcaacacagggctcgatccctcccagacctctttcttccaggtgctcaacattcctaccaagattaacaagggtactgttgaaatcattacccctgtggagctcattaagaagggagacaaggttggatcttctgaagctgcattgcttgccaagctaggcataaggcccttctcatatgggcttgtggttctctctgtttatgataatggttcagtgttcagccctgaggttcttgatcttactgaggatgacctcattgggaagtttgctgctggtgtctcaatggttacttcactttcattggctatttcatatccaacacttgctgcagcaccacacatgtttgtcaatgcctacaagaatgttcttgctgttgcggttgagacagattattctttcccggaggcagacaaggtcaaggagtatctgaaggacccaagtaaatttgccgttgccgccgttgctgctcctgctgctgcatctggtgctccagcggctgcagccaaggaggaggaaaagaaggaagaaccagctgaagagtctgacgatgacatgggtttcagtctgtttgactaaattaagtaatacttttgttgagtttgctttgttagaattgatgaagttgtttgtctttcattttaggtgctattttagtttgctgtcttttcaattcatgttacattgcaactagtttttaaatcccatagttaattaaagctttaacatttttgtctcttatggttttaaatcaagatacctattgtcttctctgtgaagatgggaaaagtgatgatatgataaaataatggcatt

SEQ ID NO: 1440 - DNA, 1083 bp, Glycine max
ttttcgcgtccgacattgccaacaaggagcgggataaggttgagataggcgttgtgggattgattttcaccaaaggtgacctgaaggaggtcagtgaggaggttgccaagtacaaggttggagctcctgctcgtgtgggtttggttgccccatttgatgttgttgttcctcctggcaacacaggcgctcgatccctcccagaccctctttcttccaggtgctcaacatttcctaccaagatttaacaagggtcctgttggaatcatttacccctgtggagctcatttaagaagggagacaaggttggatcttctgaagctgcatgccttgccaagctagggataaggcccttctcgtatgggcttgtgggtctttctgtttatgataatggttcagtgttcagccctgaggctcttgatcttactgaggatgaccttattgagaagtttgctgctggtgtctcaatggttacttcactttcattagctatctcatacccaacacttgctgctgcaccacacatgtttgtcaatgcctacaagaatgttcttgctgttgcggttgagacagattattctttccctgaggcagacaaggtcaaggagtatctgaaggatccaagtaaatttgctgtcgctgctgttgctgctcctgctgctgagtctggtgctcctgctgcagccaaggaagaggaaaagaaggaagaaccagctgaagaatctgatgatgacatgggtttcagtctgtttgactaatttatgtaatgcttttgttgagtttatttggttagaattgaagttgtgtttgcctttcatttcaggtgttattttagtgtattcatgttacattgcaactacttttaatttccatagttaattaaagcttcaacgtttctgtctcttgtggttttaaattgtgatacctgataaatttacaattccccatctttgtgaagatggcaggagtgatgataagatgcctaattgcattaaacttcaacctcaaatgtcttgaagcaagcaatgttgctctagctttcgcgattacttcccgctatgaaatgagatctctaacaatgcctcg

SEQ ID NO: 1441 - DNA, 458 bp, Glycine max
tgacttcgcttcttttcctaacctaaaccctactcattctccatacctcaacgaagaggttaaagagacggcaacactttgctgtccgccttgaccgagcagagcttcgtcttggccctcgattttgccctaaagtactctcagtcacaacagacaccgtcgtcgtcgtcgtcgtcatcaatggcaccgaagcagaccaaggctgagaagaagatcgcttacgatgcgaactgtgcgacctaatggaggagtacggccagatcctcgttgtgaactccgataacgtgggatcgaaccagctccagaacattcgcaagggtctccgtggcgactccgtcgtcctcatggggaagaacaccatgatgaagcgctcagtcaggatgcacgctgagaaaaccggaaacaacgcctatctcaaccttatcccgctccttgttggcaatgtgggattgattttc

SEQ ID NO: 1442 - DNA, 1562 bp, Glycine max
gagaaattttcataaggaaaaaggaagcagaagtgaagatcgaaacggtgaagaagcctaacagcagcaaagagcgttagagctgatcgcttgagataaggtcaatttgcagttgcacgcttcccaattcgcacacccatatcacatcacatctttctccacacgcaacgcaacctttttataatcaatcatcctcactcgcatttgaagacgcagcaatctttcccgtgaaaagggaccatggaggcaaattcaggtgccagcgaccgaatttcgagaatcgccggccacctccgcccccagagagaggatgatgtttgtttgaagcgtagcgcattgccgtgcaaaaggtggggtctccggattcaaggtggccatattgggtgccgcaggaggcatagggcaacctctggcgatgttgatgaagatgaatccactcgtttcacttctccacctctacgatgttgttaacacccctggcgtcacttctgatataagtcacatggacaccggcgctgttgttcgaggatttttggggcagcagcagcttgaggatgcacttataggcatggacttggtgatcatccctgctggtgttcctcgtaaacctggaatgacaagagatgatctcttcaatataaatgctggaattgttaaaacattgtgtgaagcaattgcaaagtgctgtcctaaagccattgtcaatgtgataagcaatccagttaactccacagtcccgattgcagccgaagttttcaaaagagctggtacttacgatcccaagagacttttgggagtcactatgcttgatgttgttagagccaatacgtttgtggcagaagttctgggtgttgatccaagggatgtggatgtcccagttgttgggggacatgctggaatcacaattttacctcttctttctcagattaaacctccttgctctttcaccccaaaagaaattgagtacctgactggtcgcatacaaaacggtggaactgaagttgttgaggccaaagctggagctggttctgcaacactatcaatggcatatgctgctgttaaatttgcagatgcatgccttcatgccctgagaggagatgctggcatcattgaatgtgcatatgttgcttcacaggtgactgaactcccattctttgcatcaaaagtacgacttggccgagttggggtggaggaaattcttcctcttggtcccctgaatgattatgagagggagagtttggaaaaggccaagaaagagttagcagcaagcattgagaagggcatttctttcatcagaaaatgagtagttgatgatagtacgtcccgaaaataaatggttagattgtgctgtgtccattgtgagatcatatagatttataattagttatgtgatatgtatgaatatcgagttctatctagaaacatgtaaatgtaataattggaataccgaattccatttattattccgtctcgagttatccccgtgaagtttgagtttgagtctaaaaatcaattcagatttttgtattatctatagacgaatataaacctgcccaattgag

SEQ ID NO: 1443 - DNA, 1004 bp, Glycine max
caaaataaatgccgtctaggttattttaaaaaaaaaaccgttgcgtcgacgtgagagagattgtgaagtagaaatcggtgcaagaaattctccactttatctaaaaaaattcggtgagtttgtgaagacaaaaaatcactagctactcaaaaatggccacagtaggaaggaacgttgcagctcctttgctgtttcttaacttgatcatgtattttattgttcttggctttgctagttggtgcctcaacaggttcatcaatggccaaacttaccaccctagttttggtggaaatggtgcaaccatgtttttcttaaccttctccatactagcagctgttctgggcatcgtgtccaaacttttgggtgggaatcacatgaggacatggaggagtgacagtttagcatctgcaggagccacatcaatggttgcttgggcagtcacagctctagcatttgggttggcttgcaagcaaatacacttaggagggcatagagggtggaggctgagggtagtggaggcattcataataatactaacattcacacagttgttgtacctgatactgatccacgcggggctatatagcagcagatatggtcccgggtaccatgacactgactatggtcatggacatggtgtgggagggactacaggagatccaatgcacaagcctgctactgcaggaactcgtgtctaagtgccactgcactgcaccacctttgttaatttcttctcttcaatcatgttctactttaccttttgttggaactttctttttttcattgtctttggtttagatcacttggattgtgtaatgtctttgttggcttgttgttttcttacacatgatagtcactttgtagcatgacattgtgtggtgtatatgaatggctgtaattgattttgtatcagccctctatcatgtgtatctatgtttgtggttccacatctcagacatgaatttttcatgcttactgagaagttaataaatttcttagacgta

SEQ ID NO: 1444 - DNA, 2140 bp, Glycine max
gacaaaataaaataatctgtggccaagttaccatctactgtactacttgttctatataaattctacccatcccttgctctcatgtcacattgtatttgcactacgaccatttcaggaagaaagaagtgcaatggacatcggaacctatggctatcctacaccagcagtgaaaaagattgagtcttactatgatgtgccagagggagtggatattcggggaagatatgatgcagagtttgcaaaaatcctcacaaaagatgctttgaaattcgttgctgacttgcaacgtgagttcaggaaccatatcaagtatgcattagagtgcagaagagaagcaaagaagaagtacaatgaaggggctcttccagagtttgatcctgccacaaggtacatcagagagcaagagtgggtgtgtgcacctgttccaccagcagttgctgatagaaaagttgaaatcactggccctgtggatagaaagatggtcatcaatgctctcaactctggagctaaagtctttatggctgattttgaagatgcactgtcaccaggctgggaaaatcttatgagaggccaagtgaacttaaaggatgctgtggctgggaccataagcttgcatgacaaagcaagaaacagggtttacaagctcaatgatcaaacagcaaagctttttgtgcgaccaagaggttggcacctaccggaggcacatattctgattgatggtgaacctgcaactggttgccttgttgattttggcctctatttctaccacagctactcagcattccggcgcactcaaggtgctggctttggccctttcttttatcttcccaagatggagcattcaagggaagctaagatttggaacaatgtgtttgagaaagctgagaaggtagcaggcatcgaaagaggaagcataagggcaactgttctgatagaaacacttcctgcagtgtttcaaatgaatgaaattttgtatgaactgaaggaccattcagtgggtttgaactgtgggcgttgggattacattttcagttatgttaagaccttccaagctcatccagatcgcctcttaccagatagggtcctagttggcatgactcaacacttcatgaaaagttattctgatcttctcatcaggacgtgccacaggcgcggcgtgcatgctatgggaggaatggcagcgcagattccaatcaaagaagatccagtggctaacgaggtagcactggaacttgtaaggaaggacaagcttagagaagtgaaggcagggcacgatggaacttgggctgcgcaccctggtctcattccagcctgcatggagattttcaacaacaacatgggcaatgcttccaaccagatagacacagtgaaacgcgaagatggggcaaacatcaccgagcaagacctcttgcagataccaagaggagcccgcaccatggaaggtctcagattgaacacaagggtgggaattcagtacgtggcggcgtggctcaccggaagcggttcggtgcctctatacaacctcatggaggatgctgccactgctgagatcagcagggtgcagaattggcagtggctcaagtatggagtggagctcaatggggatggtcttggagtgaaagtgaacaaagaactttttggtagggttgttgaagaagagatggctaggattgaaaaggaagtggggacagagaagttcaagaagggaatgtacaaggaggcttgcaagatcttcactcgccaatgcacgtcaccaatgcttgatgattttctcactctggatgcttataattacattgtcgtgcatcacccgagggaaacatcaaagctttgaagtttgaactaaggaagtggttctttattatgcataataattgggtcctttagattctgtcttgtttgttctcctaagttgtctttgtctttttaccatcacttcatcgtttcatgaagggcctgggacgtcatataattgtgcgtggaagagaagaataaagttcgtcattgtagctatattttgaatgatataacttgccttatgtttactagcaatgaaaacaattatactagaaatttgatatatatatttataacatctcgtagtactacatagtattgttgcaacaactacacatgaaac

SEQ ID NO: 1445 - DNA, 794 bp, Glycine max
cagtggaggaaattagctctgttcctattcagagacatgataaagacactatgttgtggttggctgaacctaatggacagtacactactaagtcaacttataggttatgcatgaaccccagcacaacaagttcagataggaagatctttaagacaatttggaagctgaaaatcccccctcgggtagtgatcttctgttggagacttcttaaaaatagactccccactaaggacaatcttttaagaagaaatgtcattactcaggaagctaactgtcctttgtgtggatgtgtgcaggaggatgtgggtcatcttttcttcaattgtaatctgacaaaaggcttgtggtgggaatccatgagatggatccgggtagtaggtcctcttccaattaccccagtttgccattttactcaattctgtgatggttttggggcagctgtgaatcatagtacaaggtgtgggtggtggattgccttaactagctttatatggcagcataggaatcaattgattttccaaggaaaatcttttgatccctataaagtcatggatcatgctatctttttagcttggtcatggttaaaggctaaagagaaagactttaatattagcttcaaccattggtcttccaatatatcgaatttctttggctagtttggttgggcttgtttgtttttgttgtattagtttgggttgtttttatggagggcagcactttggtgccttgtaacttctatctgtggtaccactggtactggtttatctattaataatatatatcttctgccttcc

SEQ ID NO: 1446 - DNA, 1221 bp, Glycine max
tgtatttttttttttttttttttgatgatagaaccatatgggaattgaaagaagagaaaaaaagacaaatgaagtttcatgtatacaaacattataaaaacacatagccctaagcttcctttgctagcgttgatacagtcacaattactcatttctttggaaagggaggatgaaaacgcacaggcaggcaaaaagcataatggagagaaaaataagagggaaaaaaaaaaaactaaatacacattcatgtgcaaagcagagctataagctctgaagcctaacccactatatctgcagttaatttgtccaaaatgttcagcccagtctgagaagcaattacaactgtgcatgggattttagaaacaacaccatggtccacaacaccatcaactttatcaaggctttttgctacttcagcgaggttttctattggagatgtaaagataacatcaagaatattatgtccttctttggtgactactgggaagtcacctcctagtggacctgcttgccctatagatggtcttctccagacctcagcatcacccagaaacatatcatcaatctcttcagcaattgtcatccagttgagagactgaattaaaactggaatagaaccttccagacctcctttgtactggttttcttcgataatgaacacacatttattggcagaatttattatagacttttcctggattatggattccccaccttgcaatttccggcgcccaatgatagcaacaagtgttccttcttctataacatcagcatcatcaaatgcaaaatcaatttgagaacttccttggtaggtatccaatggaatcccagcctttgctgcctcacttgcacttgaaacagacatgggaatccctactatatccttcaaattaccagtgcgaagctggctacccaaatgctgaatggccataccagaagcatgaccagaccccaatcctacaaccatgccacttttcacgtatgtatccacagtgtgttgcgctgctcggaggagagcagagctgtcatcgagacaggagcgagtcaccatcctcagaaaattgggtctgcatcttcttctgcatactagaggtgtgtgtgaatgcagaagaagccttgtagaaaatgatgatgatgaagctactgaagccattgctcttcaattcccactctctgcaatttcatcaaagtctttgctagtgataatggataaggaactat

SEQ ID NO: 1447 - DNA, 507 bp, Glycine max
gcagggtgcagaactggcagtggctcaagtatggagtggagctagatgaagatgggcttggagagaaagtgaacaaagacctttttgatagagtggttgaagaagagatggctaggattgaaaaggaagtgggaacagagaagttcgagaagggaatgtacaaggcggcttgcaagatcttcactcgccaatgcacgtccccaactcttgatgattttctcactttggatgcctataattacatagttgtgcatcacgccaaggaaggacccgtcaaagctttgaactaaggggttctttattgcctaatagttggatcacttggactctgtcttgtgtacttctagttgctgatgtgagaaaatcacaaatgcacgatggtgtcattgtgtctatgacttagtgattatcgacttatcgttattcaataaaaagaaaaaatatatatttttcgttcttataaaatattcaaaatttagttttcgtcaaaaaaaaaaactcaaaggg

SEQ ID NO: 1448 - DNA, 346 bp, Glycine max
cctaatttgtgtaccgtgcctttgctctaatgccacactcgtgactacggtcactgcaggaagagagaaaggcgatggacctcggaacctatgaagtgccagaaggagtggacattctaggaagatacgatgcagagtttgcaaaaatcctcacaaaagacgctttgaaattcgttgctgagctgcaacgtgagttcaggagcgatatcaagcatgcattagagcagctaccagggcacaagaagacagaggaggtcacagctaatactactcctccaccacgactgttgcatcattggagcatggtgacagtgctcatcatgaaggagaggccaaggagaagaaa

SEQ ID NO: 1449 - DNA, 479 bp, Glycine max
catcgcgtccgccctcgcgtccgcccacgcgtccgcccacgcgtccgattctatatgagctgaaagagcattcggtgggtctaaactgtgggcgttgggattacattttcagttatgttaaaaccttccagactcacccagatcgtctactaccagacagggtccaggttggcatgactcaacatttcatgaagagttactctgatctcctcatcaggacatgccacaggcgcggtgtgcatgctatgggaggaatggcagcacagattccaatcaaagatgacccagttgcaaatgaggcagcactggaacttgtaaggaaggacatgcttagagaagtgaaggcaggccacgatggaacttgggctgcacatcctggtctcattccatcctgcatggaaggttttcaacaacaacatgggcaatgctcccaaccagatagacacagtgaaacgcgatgatgctgcaaacttaactga

SEQ ID NO: 1450 - DNA, 550 bp, Glycine max
  unsure (1)..(550): unsure at all n locations
cttccggtttaacaagttttaggctttatgggtggttagaatttggctatgtagtatgaaaaactaagatacaggtggttaaatacttttgatattattctctgatttaaattagagtttcatcttggtagtctcattaaaagtttgtatttaaaatcagcataattatgttatagaggaaaatgtctaattttcatcggacaacattgctaaaaaacatcaaagcaagataaatctaaattttgccttatattatagaattgtaatagaattgtaatgtaaaaatcttgccttattcagctgaaaattctaatgttagtttatactatggaattgtaatataagagaaccttataattgacagggaagctaagatttggaacaatgtgtttgagaaagctgagaaggtagcaggcatcgaaagaggaagcataagggcaactgttctgatagaaacacttcctgcagtgtttcaaatgaatgaaattttgtatgaactgaaggaccattcagtgggtttgaactgtgggcgttgngattacattttcag

SEQ ID NO: 1451 - DNA, 863 bp, Glycine max
aatttcaaccatgcttttgctctaatgccacactctgtatttcgctcgtgactacgaacattgcaggaagaaagaaagaaaggcgatggacctcggaacctatgaagtgccagaaggagtggacattctaggaagatacgatgcagagtttgcaaaaatcctcacaaaagacgctttgaaattcgttgctgagctgcaacgtgagttcaggagcgatatcaagcatgcattagagagcagaagagaggcaaagaagaagtacaatgaagggactcttccggggtttgatcctgccaccagtcacattagagaccaggagtggctgtgtgcacctgttccaccagctgctgctgataggaaagtggagatcactggccctgtggacagaaaaatggtcatcaatgctctcaactctgcagctaaagtctttatggctgatttagaagatgcactgtcaccgacctgggaaaatcttattagtggccttgtgaacttgaaggatgctgtggctgggaccataagcttgcatgacaaagcaagaaacagggtttacaagctcaatgatcaaacagcaaagctttttgtgcgaccaagaggttggcacctaccggaggcacatattctgattgatggtgaacctgcaactggttgccttgttgattttggcctctattgttatccagttgagagactgaattaaaactggaatagaaccttccagacctcctttgtactggttttcttcgataatgaacacacatttataggcggacatggttaaaggctaaagagaaagactttaatattagcttcaaccattggtcttccaatatatcgaatttctttggctagtttggttgggc

SEQ ID NO: 1452 - DNA, 377 bp, Glycine max
agggaatgtacaagaaggcttgcaagatcttcactcgccaatgcacgtccctaacacttgatgattttctcactttggatgcctataattacatagtcgtgcatcaccccaaggaaggaaccgtcaaagcttcgaactaattaaggggttcattattgcctaatggttggatcacttggactctgtcttgtgtacttaaagttactgttgtgagaaaatcacaagtgcacggtggttatcgtattcacatgattatgtgtatgactttgtgattatcgttattcaataaaaaggagaaaaatggatttttcgttcctataaaatgatcagaaatcagtttatgttcttccaaaaaacatgtctggttttgatttctc

SEQ ID NO: 1453 - DNA, 1489 bp, Glycine max
gcgaccacctttatattacccttttgatcagagtttaaaatggtgttgtgattttacgagggtcttgcatgcccctttgagtttcaagtttcaagtttgagccccctttctgtaatccataaccatagctttggttgagttgagggatttgattatggataagtatgaggctgtcaaggatttgggagctgggaattttggggtggctaggctcatgaggaacaaggagaccaaggagcttgttgccatgaaatacatcgagcgtggccaaaagattgatgagaatgtggcaagagagattatcaaccacagatcccttcggcaccccaatataattcgcttcaaggaggtggttttgacccccacccatttagccatagtgatggagtatgcggctggaggagagctctttgagaggatatgcaatgctggcaggttcagtgaagatgaggctagatatttctttcagcagctgatttctggtgtacatttctgtcataccatgcaaatatgtcacagagatttgaagctagaaaatacccttttagatggaagccctgcaccccgcctgaaaatttgtgactttggttattccaagtcatctttgctgcattcacgaccaaaatcaactgttggaactccagcttatatagcaccagaggttctttccaggagggagtatgatggcaagttggctgatgtatggtcatgtggagtgactctttatgtcatgctggttggagcttatccctttgaggatcaggatgaccctaggaattttaggaaaacaattcagcgtataatggctgttcaatacaaaatccctgattatgttcacatatctcaagactgcagacacctcctttctcgtatatttgtagcaaatccattaaggaggatctctcttaaggaaattaagagccacccatggtttttaaagaatcttccaagagagctgactgaatcagctcaagctgtctattaccagagaggcaatccaagcttttcaattcaaagtgtggaggagatcatgaagattgtgggagaggcaagggaccctcctccagtatctagacctgtcaaaggttttggctgggatggcgaagaagatgaaggggaagaagacgtggaggaagaggaggacgaagaagacgagtatgacaagagggtcaaagaggttcatgcaagtggagaatttcaaatcagttaagcactataataattcttgtgtacttggttaaagtattttttttaatgctagaagtcatctatttatgtgtactataatttataataactactactataaaccatcgaggcagcctaacttatggcactgtccatgtaatgtgttagtattttttacctgtatcatcatcgaagccgtgtatgagaacagtagttatctgataacttcaaaattactcatgcctgttataacccgcatagttaaagcttaaaatgctttttaatagtaatatagtagatg

SEQ ID NO: 1454 - DNA, 1611 bp, Glycine max
ccgaaacgcagttctcaaagatccaatagcaaccaacacacactcactgctcaaatacctgtgaatgattcgattattaatggataaagtaacactcgaaactgacaaacataaccgataaaccaagtggcagcgccacttacacaattcctttcaccgaactcactcttttgattttgataccccttattattatttatttccataccctctcttcacttcttcctcaccaattttctgaccactgacactcttctctccttaaagccaccacattctgatacccttttgatcaatcaaagtgaagatcagcatagaatgtttgtttgattctatttcattgctatggataagtacgaggctgttaaggatttgggagctggcaattttggggtggctaggctcatgaggaacaaggtcaccaaggagcttgtagccatgaaatacatcgagcgtggccccaagattgatgagaacgtggcaagggagattatgaaccacaggtcccttcggcatcccaatataattcgttacaaggaggtggttttgactcccacacatttagcaatagtgatggagtatgcagcaggaggagagctctttgagaggatatgcagtgctggcaggttcagtgaagatgaggctagatatttctttcagcagctgatttccggtgttcatttctgtcataccatgcaaatatgccacagagatttgaagctagaaaatacccttctagatggaagtcctgcacctcggttgaaaatttgtgacttcggttattccaagtcatctttgctgcactcacgacccaaatcaacagttggaacaccagcttacatagcaccggaagttctttctaggcgagagtatgacggaaagttggctgatgtatggtcatgtgcggtgactctttatgtcatgctggttggagcatatccctttgaggaccaggatgaccctaggaattttaggaaaacaattcagcgtataatggctgttcaatacaaaatccctgattatgttcacatatctcaagattgtaggcacctcctctctcgtatatttgttgcaaatccattgaggagaattactattaaggaaattaagaatcacccatggtttttgaggaatcttccaagggagctaactgaatctgctcaagctatctattaccagagagacagcccaaactttcaccttcaaagtgtggatgagataatgaaaattgtaggagaggcaagaaatccacctccagtatctagggctctcaaaggttttggctgggaaggtgaagaagatttggatgaagaagtggaggaagaagaggatgaagatgagtatgataagagggtcaaagaggttcatgcaagtggcgaatttcaaattagttaaagccctcaaattcttgtgtactttgttgaaatattgtactttttagaagtcacccttttttgtgtacacgaagtcacctatttatgtgcattataattatggctctgttgttgtaatatagtaccgggtatcatcaaaatggttgctatgtatgagaatagtagttgtctaattacgttctaaatcgacatgagaaccatagttgtctgattacat

SEQ ID NO: 1455 - DNA, 1425 bp, Glycine max
cgaagacgcagaagcgtgtgacacttgaagctctcagccctcggagactgaaggttcccttgagacacagaaggaggaatctgatgttgagccgaatgtctttgatgcaaaacctgcttgtgatgaaattggcattgatattttcattgaaatctatgccaatgaaaaggatgcaaaaccaacagcagcagaaggaatggggagaataaattttctcaaagagattgaggatcatgaagataatagcaagtcaactgaggataatggcatagcagccaagtgaggagggtgtcatgcaaatcactacttcaagaagtattggtaattgtattccttctccctctatatctgagattgatcttgaagaggatttgaaaaaatccttagataatgttgcaattgaagtagataccaaaggaagctctctcctagaacaaaatgaaggaggtgcagatgaagattaccaatctattgtctggtctcatgaagaaatgagcatgggaagttactgcagtgatggggaacaagacatgggggatgttgacatggatgactcggattccaaaacctttgacatggagtgggaggaggagcggttgcacggattcgatcacgaagaggatgctgattcttctgtgtactcagaggaggacaatgactcaaaagttgagtcctcatcagggagttctcatgatgtatcagtgacatggttagatgatatccttggtggctattatgaggactttcttgttgatgaaacacacaaagaagcaaattcagaagaaagaacctactttgaagaacaacctagtggcactagttcttctgtccttgaagacacaaatggaagcactgaaactcaagaaaacctgacgaatacacaagataatggtggagaagatgaaaaacataaggatgatgatgaggccagttgcaacacaaagccacttgatgaagagacaattgacaacactcaatgtcagaagatgagtggaacttgcaaaattgaagagacaaatgaaaatggatactcaatcagtctagagaacaatgtgatgagagcaacaaaggggagagccaaattgagttggaggatgtgtctgaaaaagaaagtaacatagcttctcaagatcaagatttgttggacaaagaccaaggcaaagctatagggttgcaacaaagcacaagttgcataagtgctgaagaggaaagcacgagcaagaattggaaagatggcattagaagaaagaagggtgttgaagatgatgatgatgaaatgagaaagttcaacccaaaagagccaaattttctgccattggttcctgagccaggacaagagaaggttgacctgaggcatcaaatgatggatgagagaaagaactcagaggattggatgcttgattgtgctctaagacaagttgtgac

SEQ ID NO: 1456 - DNA, 365 bp, Glycine max
taccagttttttaaacgggcatcagaaggggatgccaccaaattttgattttccatagcactcatgggaatccaagatagcgaagaatctttgaaaccacaagagtggagaaaaactctctgctgctgttggttttgcatccttttcattggcatagatttcaatgaaaatatcaatgccaatttcatcacaagcaggttttgcatcaaagacattcggctcaacatcagagtcctccttctgtgtctcaaggggaaccttcagtctccgagggctgagagcttcaagcttcgcacgcttctgcgtcttcaaaagctgcctcctcgcggacacgaagctcttcaacggtggcaaatcagcatggg

SEQ ID NO: 1457 - DNA, 629 bp, Glycine max
caaaaagacagagggttaattgtggagtattttggaaggatgtcttacgttgctcataacgttaatcagccccaagagaaagatttaatatcaaaggaaaaatttccctctaacaaatcttctcttttgattttgataccccttattattatttatttccataccctctcttcacttcttcctcaccaattttctgagcactgacactcttctctccttaaagccaccacattctgataccctggtgatcaatcaaagtgaagatcagcatagaatgcttgtttgattctatttcattgctatggataagtacgaggctgttaaggatttgggagctggcaattttggggtggctaggctcatgaggaacaaggtcaccaaggagcttgtagccatgaaatacatcgagcgtggccccaaggtttcttcttttatacaatcacttcatcaatttatgatttatcccaacccttttgtgtgtttattattatattaagcagttaaagagatggtagaacttgatgcagaactgaacaaagacttatgtttgttaattattctcctatgatttgtgaagtttatttctatgtaccggtttacgctcaacccatcagaaatcatatgacttt

SEQ ID NO: 1458 - DNA, 366 bp, Glycine max
gttgagcactagtactgcacattaatgaattatttgctgttttggcttcttcgatgagatgttgattttgcaggtggctttgactcccacacatttagcaatagtgatggagtatgcagcagggggagagctctttgacaggatatgcagtgctggcaggttcagtgaagatgaggctagatatttctttcagcagctgatctccggtgtccatttctgtcataccatgcaaatatgccacagagatttgaagctagaaaatacccttctagatggaagtcctgctcctcggttgaaaatttgtgacttcggttattccaagtcatctttgctgcattcgcgaccgaaatcaactgttggaacacc

SEQ ID NO: 1459 - DNA, 1318 bp, Glycine max
ggaagaaagagagagagagagagagagagaagtgtgtagttggtgaaggtttttgagaagaaagatggaacgaagtggcggaatggtaactgggtcgcatgaaaggaacgaacttgttagagttagacacggctctgatagtaggtctaaacccttgaagaatttgaatggtcagagttgtcaaatatgtggtgataccattggattaacggctactggtgatgtctttgtcgcttgtcatgagtgtggcttcccactttgtcattcttgttacgagtatgagctgaaacatatgagccagtcttgtccccagtgcaagactgcattcacaagtcaccaagagggtgctgaagtggagggagatgatgatgatgaagacgatgcttatctagataatgagatcaactatggccaaggaaacagttccaaggcggggatgctatgggaagaagatgctgacctctcttcatcttctggacatgattctcaaataccaaacccccatctagcaaacgggcaaccgatgtctggtgagtttccatgtgctacttctgatgctcaatctatgcaaactacatctataggtcaatccgaaaaggttcactcactttcatatgctgatccaaagcaaccaggtcctgagagtgatgaagagataagaagagtgccagagattggaggtgaaagtgccggaacttcggcctctcagccagatgccggttcaaatgctggtacagagcgtgttcaggggacaggggagggtcagaagaagagagggagaagcccagctgataaagaaagtaaacggctaaagaggctactgaggaaccgagtttcagctcagcaagcaagggagaggaagaaggcatacttgattgatttggaaacaagagtcaaagacttagagaagaagaactcagagctcaaagaaagactttccactttgcagaatgagaaccaaatgcttagacaaatattgaagaacacaacagcaagcaggagagggagcaataatggtaccaataatgctgagtgaacataatgtcaaaagatggcagagaaaacttatagatggaatagatttagaaagagagaatacattagccagaaagagaaaaaaaaattggacattagttgatgattctttctaggtgtgcgtttggaatacaatgaagtaaaggatgaaccttaagacatgctttatcctaaaatagtgtgatctgatattccattgttaatgagtaatgtaattatcatacaaacaatttgtagtctcattttaattaataattattaaactacttgattacttatggtt

SEQ ID NO: 1460 - DNA, 1293 bp, Glycine max
gcgggaacaacaacaactgcagaaagattcagagtgagagagagagaggtgtgaagctcgtgtacgtttatgagatggaagatggaacgaagtggcggaatggtaacggggtcgcatgaaaggaacgaacttgttagagttagacacggttctgacagtgggtctaaacccttgaagaatttaaatggtcagatttgtcaaatatgtggtgacaccattggattaacggctactggtgacctctttgttgcttgtcatgagtgtggcttcccactttgtcattcttgttacgagtatgagctgaaaaatgtgagccaatcttgtccccagtgcaagactacattcacaagtcgccaagagggtgctgaagtggagggagatgatgatgacgaagacgatgctgatgatctagataatgggatcaactatggccaaggaaacaattccaagtcggggatgctgtgggaagaagatgctgacctctcttcatcttctggacatgattctcatataccaaacccccatctagtaaacgggcaaccgatgtctggtgagtttccatgtgctacttctgatgctcaatctatgcaaactacatcagatcctatgggtcaatccgaaaaggttcactcacttccatatgctgatccaaagcaaccaggtcctgagagtgatgaagagataagaagagtgccggagattggaggtgaaagcgctggaacttcagcctctcggccagatgccggttcaaatgctggtacagaacgtgctcaggggacaggggacagccagaagaagagagggagaagcccagctgataaagaaagcaagcggctaaagaggctactgaggaatagagtttcggctcagcaagcaagggagaggaagaaggcatatttgattgatttggaaacaagagtcaaagacttagagaagaagaactcagagctcaaagaaagactttccactttgcagaatgaaaaccaaatgcttagacaaatattgaagaacacaacagcaagcaggcgagggagcaatagtggtaccaataatgctgtgtaaacttatagatggagtagatatagagagagagaaagaggaaagaaattaaacattcgttgatgattctttctaggtgtgcgtttggaatacaatgaagtaaaggatgaaccttaagacatgctttgtcctaaaatagtgtgatctgatgtaccattgttgatgagtaatgtaattatcatacacagttttttacagtctcattttaattaataattatcaaactacttgatt

SEQ ID NO: 1461 - DNA, 368 bp, Glycine max
tactgaggaaccgagtttcagctcagcaagcatgggagaggaagaaggcatacttgattgatttggaaacaagagtcaaagacttagagaagaagaactcagagctcaaagaaagactttccactttgcagaatgagaaccaaatgcttagacaagttcattcatgttatcattgtcatcatcataacgttatatatacatgtctctagctcatcactgtcaccatgatgatgcaattgttctttaagtgggctgcctgatcttatttactttcgataaaattgacacaccaaaaccttttaaaatggaatcatgactaactcttgtctattgttgacttgtactctaaaaatttgttttagaaagga

SEQ ID NO: 1462 - DNA, 1049 bp, Glycine max
  unsure (1)..(1049): unsure at all n locations
acatatggccgccatgttcttaaccagaagcgcgctttttcgcttttcaaagtctctcccttatgccccttcactctcccttaaaccctccatggtcaccttctcctctactcccaattcaggctggagaaatgcagcagaaggaggaagaagagacggaagaaccaattggacgtatgattctgccgaggcaagacgcgaggcagatgaaatgtctgagagtgccaaagaaacgatgaatgaaggctatgacagggccaaggatcaagcgcgggaagccaaagacagaacaaaggatttcgcacacgacgcaaaggagaagacgaaggacgctgcggggtcgatgagggacagggcggagagtgcggcggagaagacgaaagagtatgcttacgacacaaaagagagtgccaaggacgcggcgggaacggtggcggacaagagtagggagggggctgagaggacgaaggagaagacggaggaggtggcggcgtcggcgggggaggcgctgaagaacgtgggggagaaggcgaagcagggcgtgcaaggggcgtgggagacggcgaaggacactacgcagaagatcaagggagacggtggttggcaaggatgatgatgatgatgatgatcatggtgatggtcatggtggtcttaaggatgatgatgttgtggagatgaggaggagagttggtaagagattaccatgagaagggttattagagaacacagaatcaatggcttcatttagtacttccatttcttactattatgccgtatctatgtatttatgtttctagtgatgtttttttctttttttttttcaacatgcggataacttggggatatcaaggttgttagttaatatgggcataatctttttgtccagccatgatatcctcttggaataaaagtttatatattaatcatannnnnnnnnnnnnnnnnnnnnnnnnnnnnnnnnnnnnnnnnnnnnnnnnnnnnnnnnnnnnnnnnnnnnnnnnnnnnnnnnnnnnnnnnnnnnnnnnnnnnnnnnnnnnnnnnnnnnnnnn

SEQ ID NO: 1463 - DNA, 797 bp, Glycine max
tggacgcgtggtatccccatctcccatctttgtttgttccattgatttcttgcttctagcttttatttcttgctttctttcttcaccatgtcacttgctgggaaaatcaccactgaaatcggggttcatgcaaccgctgcaaagtggttcaacctcttcgcaacacaactccatcatgttcaaaaccttactgatagagtgcatggaaccaagctgcatcaaggtgaagactggcatcacaacgagacagtcaagcactggacttataccatagatggtaaggttacaacatgtctggagagtattgaatccattgatgaacagagcaaaacaatcacctacaagctcttcagtggtgacattgatcataattataagaactttaagttcatctttcaagccattgatgataatgatcatggcggtactattatcaaatggaccgttgaatacgagaggcttcgtgaggaggttgatcctccatatggccacattgaatacctgcacaaatgcactaaagatattgatggtcatcttctcaaagcatagctagctataaacaatataattaaaaagaaataatggactttgccttattatctttataatcgagaaggatatgcttgctaagtccttcgattgtatgaaataaatttggatatgcgtgtcggtgatgtcaactgaagtgtgttgaattatatgttaaagagctccatgtgatgctgatgcatataaatgaatatttccactttaagaaatatatatttttatgttgtgttcaaaaaaaaaaaaaaaaa

SEQ ID NO: 1464 - DNA, 799 bp, Glycine max
agagcatgacgtcgatgccgcgtacggagctcggaattcgggttggggttcttttcttaaccaggtcattggctgggaaaatcaccactgaaatcggggttcatgcaaccgctacaaagtggttcaacctcttcgcaacacaactccatcatgttcaaaacctaactgatagagtgcatggaaccaagctgcatcaaggtgaagactggcatcacaacgagacagtcaagcactggacttataccatagatggtaaggttacaacatgtctggagagtattgaatccattgatgaacagagcaaaacaatcacctacaagctcttcagtggtgacattgatcataattataagaactttaagttcatctttcaagccattgatgataatgatcatggcggtactattatcaaatggaccgttgaatacgagaggcttcgtgaggaggttgatcctccatatggccacattgaatacctgcacaaatgcactaaagatattgatggtcatcttctcaaagcatagctagctctaaaagttatgcactaaaaaataatgggcttgacctttggataagtgcttatatgtataataaaatcggtgtgaagtttgacgagaagaatgcttagttatgtagatccttcctttgtatggaaaataaacttggatatgcatgtcggtgatatcttgaagtgtgttaaattatatttggaagtgctcaatgtgatgcatgggaatattattaatgaatggatgtttatgattttcgtgagtaaaaaaaaaaaaaaaaaaggggggcc

SEQ ID NO: 1465 - DNA, 407 bp, Glycine max
gccgcccccaaatgttttgttttgaagaaggacaaaccctatttgtctccccttcaagtaatggaacacacttccaaatttattccatgcaaaacgaacgatctaggtaagcatctttctcgatcgtcaaacatcacaccgattatactgataactagacaagcactatatattctaaggccaagccaattatttcttacttattaattattttcaagctattgacgccgatcatgggggtgttattatcaaatggaccgttgaatatgagaagattgatgagaatgttgatcctccgtatggctacatcgaatacctgcacagtggcagtaaacagattgatggccatcttctcaagccatagctccaaaagttatgcagaaaataattatttccccacgcgtccg

SEQ ID NO: 1466 - DNA, 886 bp, Glycine max
cacgcgacgtaagctcggattcggctcggcttgtaacttgtttgttcctttgctggcttcttaatttcttgatcatgtcgcttgctggtaaaatcagcactgaaattggggtgcatgcaaccgctgcaaagtggttcaacctctttgcaacgcagctccatcatgttcaaaaccttaccgatagagtgcatgaaaccaagctgcatcatggtgatgactggcatcacaacgagtcgatcaaacactggacttgtaccatagatggtaaggttacaacatatcacgagagtattgaatccgttgatgaacctaacaaaacaatcacttacaagatcttcggtgaagatatcgatcaccagtataaggtctttaaggtcatctttcaagcaattcataaggatcatgggggtgcattcatcaaatggactattgaatatgaaagggttggtgaggaagttgatcttccatttggcttcatcgaatacctcaacaaagggagtagagatgttgatggtcatcttctcaaggcatagctccaaaagttatgtagaaattaaataaaaaaaataaagaaataatgggctgggcttgaggataaagtgcttatatttactatcggtgtgatgtttgacgagaaggatgcttatgtgttgatcctttcttttgtgtggaataaacatggatatgtatgtcggtgatgtcttgtgtgtgttaaattatatatgtggaagtcgtcaacgtgatacatatgaatattaatgaatgtcttatgatcgattttgctaagtaaaaaaaaaaaaaaaaaaaaaaaaaaaaaaaaaaaaaaaaaaaaaaaaaaaaataaaaaaagagggaggatgcccgatcaaagcgggtgtaggtctgg

SEQ ID NO: 1467 - DNA, 425 bp, Glycine max
  unsure (1)..(425): unsure at all n locations
ctcggagttcggctcgacctcgagccggttcggctcgagcctgcttctatatattacttgcttcttttcttgatcatgtcccttgctggtaaaatcagctctgaaattggggttcaggcaaccgctgcaaagtggttcaacctcttcgcaacgcagctccatcacgttcaaaaccttactgatagagtgcatggaaccgagctgcatcatggtgatgactggcatcacaacgagtcggtcaagcactggacttgtaccataggtaattatataaacttctattaactatatttatactcaaacacaaatcggnagattattattatttatcctaattttgaatatatttttagattttataattaattctctttgttttagttttaattctcatattataaaagtttacttttgagtttctagct

SEQ ID NO: 1468 - DNA, 1186 bp, Glycine max
cccacgcgtccgaaagttaagcattctcttcctcctagtcttatccttcagttctgtactcgcagagctatgcaacccacaagacaaacaagccctactccaaatcaagaaagatcttggaaacccaaccactctctcctcatggcttctaaccactgattgctgcaacagaacatggctaggtgtttcatgcgacaccgacacccaaacataccgcgtcaacgacctcgacctctccgatcttaacctccccaaaccctactctattcctccctccatagccaaccttccctacttgaattttctttccattagcaggaccccaaccctaatcggtcaaatcccctcagccatcgctaaactcacccaactccgttatctttatatcacccacaccaatgtctccggccctataccagatttcttgtctcaaatcaaaaccttagtcaccctcgatttctcctacaacaccctctccggcaaactccccgcctcgctctcttcgctgcccaatctcgtcggaatcaccttcgacggcaaccaaatctccggcgccatcccggactcgtacggctcattctcgaagcttttcacgtcgatgacgatctcccgcaaccgcctcacagggaagattccggcgacgttcgcgaatctgaacctggcgttcgtggacttgtctcggaacatgctggagggtgatgcgtcggtgttgtttgggacggagaaaaacacgcagaagatacttctggcgaagaacatgcttgcttttgatctggggaaagtaggcttgtctaagaacttgaacggcttggatcttaggaacaaccgtatttatgggacgctacctcagggacttacggcgcttaagtttctgcacagttttaatgtgagcttcaatgatctttgtggtgagattccgcagggtgggaacatgcaacgttttgacgtatcttcttatgccaataacaagtgtttgtgtggctctcctcttccttcctgcacttaataacaagtgttttattttcaaccctagcttggattaataagaacggatgggattaaacgttataatagagtcatattcaaaaggtaaatacccaaagtattactgtggcgtgcttggactactttgctaatactattttagattattcattaataaaaaaaaaaaaaaaaaaccaactcg

SEQ ID NO: 1469 - DNA, 1849 bp, Glycine max
gaacaaacgtccataatgtgttggcacgagctagcattattgatcgtttgtgtgggtgtgtctgttttcgttgtttcccactttccaaatcacatccaacgtgaatccgtcattcaacttgattgaagtatccaacgaaaattcaaacacacactaaccttactgagtgtgttcattgggaactggttcattccacacattttatttaagccaaaaaaacccacaatttctcttagtgtgtgctttttggttgaaattgttgtttcttcctctgagttccaactttcacctcagccaaatacacaacaaaatggggtttcagaagataagggtgggcaaccccatcgtcgaaatggatggggatgaaatgacccgagtgatttggaaactgataaaagataagcttattttcccttatttggagctggatattaagtattttgaccttggccttcctcatcgcgatgccactaatgatagagttactattgaaagcgctgaagctacactcaagtataatgtagctatcaaatgtgctactataactccagatgaagctcgtgtcaaggagtttaacttaaaacaaatgtggagaagtccaaatgggacgatccgaaacattttaaatggtacagtttttagagagccaattatctgtaagaacattcctcgtcttgtttcaggatggacaaagccaatatgcattggaagacatgcttttggagaccaatatcgggcaactgatacagttataaaaggcccaggaaagctaaaattggtttttgcacccagtggaaatgaaggcattaaagagctagaggtctataactttactggtgctggaggcatagctttgtccatgtataatactgatgagtccattcgagcttttgctgaggcttcaatgaactttgcttaccagaagaaatggcctctctatcttagcactaaaaataccattttaaagaaatatgatggaagattcaaggacattttccaggaagtttttgacacccaatggaatcacaagttcaaagctgcagggatatggtatgaacaccgtcttatagatgatatggttgcttatgctctcaaaagtgatggaggttatgtatgggcctgcaagaattatgatggtgatgtgcagagtgatttcttagctcaaggatttggttcacttggcttgatgacgtcagtactggtttgcccagatgggaaaaccattgaagcagaggcagcccatggcactgttacccgtcattatcgggttcatcagaagggaggtgaaaccagcacaaacagtattgcttcaatttttgcctggtcgcgaggtcttgcacataggccaaaattggatggaaatgctagattgttggacttcacagagaaactggaagcagcttgcattggaacagttgaattgggaaagatgacaaaggatcttgcacttcttgttcatggacctaaggtttctagatcccagtatttgaatactgaagagttcattgatgccgtagccgaggagctgcgaacaagattatcttcacaatcgaagctgtaatgttcaaaatgagtgtgcccaataaatgttctccatttccttcatttttcctttttctttcttgaaggagggaaattctattgcttgagttaaacattttagagcaataaggtccccctaaattcagatgcatcacttattgcaggttgcttccttcagccataagaactcaacatttgaagaactcataccatgtaccacaaaatcaatactatcttttcattgccaaaacaacagtgctactttggaagtccttacaacaatattaaagacatgtaaaaaaaaaaa

SEQ ID NO: 1470 - DNA, 607 bp, Glycine max
tgattattgaaaattaagttcaattggggggtctcatcctcagagaatttggcttttgaatcatatgatttttccataggggatgaaatgacccgagtgatttggaaactgataaaagataagcttatttttccttatttggagctggatattaagtattttgaccttggccttcctcatcgcgatgccactaatgatagagttactattgaaagtgctgaagctacactcaagtataatgtagctatcaaatgtgctactataactccaggatggacaaagccaatatgcattggaagacatgcttttggagaccaatatcgggcaactgatacagttataaaaggcccaggaaagctaaaattggtttttgcacccagtggaaatgaaggcattaaagagctagaggtctataactttactggtgctggaggcatagctttgtccatgtataatactgatgagtccattcgagcttttgctgaggcttcaatgaactttgcttaccagaagaaatggcctctctatcttagcactaaaaataccattttaaagaaatatgatggaaggacattttccaggaagtttttgacacccaatggaatca

SEQ ID NO: 1471 - DNA, 306 bp, Glycine max
ctctcgagccgattcggctcgagcggctcgagtagcattataaattactgttggtgcaggcctgcttaatctagacgtgtttgacttttactgactccaacattccaaatcacatccaacgtgaatccgtcattcaacgtgattgaagtatccaacgacaattcatacgcacactaaccttactgagggtgttcattgggaattggttgattccacacatcttatgtgtctcaataaaagacacaaacacacgacccagttaacccagggagaggtagaaattggtgtggcatcctctctgagctc

SEQ ID NO: 1472 - DNA, 1291 bp, Glycine max
gcgagaagacgacagattgggggagtggaagtagtagcaagtacgtcgtatatgtggttgatcttttgctggttgtttgttttgttccttccaattgtcagatctgaatcaccggactcactcttcacactcactcacactgaatggcttctgaaggcgaccatcaccaccaccaccaccaccatcaagatcacgatcatcatcatcatgatcatgatcaccatcatcatcacgatggagagggagagaccaactcatgggtaggtaaggatgggaaggtgtaccatagccacgatggtctggcgccgcattctcacgaacccatttactcccccggctacttcaccagaagagctccaccgcttctcaacagaaacttcaacgaaagagccttcaccgtcggaatcggtggacccgtcggtactggcaaaacagctctcatgttggccctttgtgaactcttgcgcgaaaactacagtctcgcagctgtgacaaatgatatattcactaaagaggatggtgagttcttggtgaagcacaaagcacttcctgaggaaaggatacgcgctgtagaaactgggggttgcccacatgctgctattcgggaggacatcagtattaatcttggaccgctggaggagctttctaacctcttcaaagcagatatacttctttgtgaatctgggggagataacctggctgccaatttcagcagggaattggctgactatattatttacataatagacgtgtctggcggtgataaaattcctcggaaaggtggtcctggaatcacgcaagctgatctccttgtgataaacaagactgaccttgctcctgcaattggggctgatttggcagtcatgcagcgggatgctctgcggatgagagatggagggccatttgtctttgcacaggtgaagcataagattggagtagaagaaattgggaatcttgttttgcaggcatgggaagcagccacagggaataagcgtcattaacatttctttgaaaaacggtttcctttgtgttgtatattttcttagcatgtttagtaataactccagaaacatgatgttcacgacgtggattcgagttcttatgttgtgtctgttcctgcatgtcacagcatcaagttcataaacatgttactacttggacctaatctgtatgggagactcatctttttctctgtttttttgttaaactccatgatggtgcacttgtttagaaaggaaaaaatgtactatgaaaccgacccttattccatgcttggtaagagttagttcct

SEQ ID NO: 1473 - DNA, 1699 bp, Glycine max
ctataactcttttcccttcaaataatttcattcttcagcttcttattactttgtatctctgtgtatatttgaaaatgaagaatatgaatatgaaactaaacaccattgcattgataattgccattgcattttctgtgtggtcttcaagctgcacagcagcacgtgtcagccactggaggaaactgaaagctgctgcatctgctacttcttttaatgtgttagactatggtgctaaaggtgatggacatgcagatgatacaaaggcctttgaagatgcatgggcagctgcttgtaaggtggagggttcaacaatggttgttccatctggttctgtatttttggtgaaaccaatctctttctcaggccctaattgtgagccaaacattgtttttcagttggatggcaaaatcattgcacctacaagctctgaagcttggggctctggtaccttgcaatggcttgaattctcaaagcttaacacgatcacaatcagaggcaaaggtgtcattgatggtcaaggctcggtttggtggaacaatgactctcccacttacaatcccacagaagtgatgctggaaagcaatggaagacttcctagcacaaaaccaacagcactcaggttctatggaagtgatggtgtaacagtcacaggcataacaattcagaatagtcaacaaacccatctcaagtttgactcttgcacaaatgttcaagtctctggcattagcgtttcatcacctggtgatagccccaacactgatggaattcacttacaaaattctcaaaacgtggttatctatagcagcacacttgcttgtggtgatgactgtatctctatacaaactggttgctcggacatatatgtacacaatgtgaattgtggacctggccatggaatcagcattggaagtcttggcagagagaacactaaagcctgtgttagaaatgtcaccgtccgagatgttactatccaaaataccctcactggtgtcagaattaaaacatggcagggtggctctggttcggtccaaaatatcatgttctcgaacgttcaagtttctggggttcaaactccaatttccattgaccaatactattgtgacggtggaaggtgcaggaatgaatcatcagctgtggcagtttcaggcatacattatgtgaatgtaaagggaacatacactaaggagcctatctattttgcatgtagtgacaacttaccttgcagtggcataacccttgataccatacaactggaatcagcccaagaaactaaaaattccaatgttccattttgttgggaagcatatggggagttgaagaccacaacggtccctcctgttgaatgtcttcagagaggaaacccatcaaaagaaggtggaatcaattctaacattgattcttgctgaatttatcaacacaatgtccgggatatatagattaacattatgatatatacataccatggaaagttgttactagttagttatcatgatatcttaaaattagttcacattcatgtaatataatgctcgattcagtggattgtaataccgtgtgccgaaaagatgttgggggagaagatttactagcctccatactgcttagattgaaaaatgtatctagtggaaagagtgtattagccttatgtaatatatcaatttttttcccaaaaaaaaaaaaaaaaaaattttactttttt

SEQ ID NO: 1474 - DNA, 2690 bp, Glycine max
cccgtccttaagctcgaatttcggttccaagtagtggtggtggcggcggcgtacagcggtggtggcggcgaagagtggaaacaacaactggcagcattattgttgctgtatgtcagtggaatattattgcagtgggatttactacgctgagcttgctaaccctctccaatggccacagctcaggaaaaaacgacgccatgttgcgccacccaaaataacaacaaggtcgcactcgcagcacctccaacttcttcttcttctgcgccacaacaacaatcacaatcacaacaacggccctctgttgccaccttcatttccgccatcgattctcctcccaaaaccgcttctgccaaaggtatcactgtcatggtgagagctcaaaccagccaccctttggatccactaactgctgctgaaatatcagtagctgtagcgaccgttcgagcagctggggcaacacctgaggtgagggatggcatgcgctttattgaagtagacctggtagaaccagaaaagcaagttgttgcattagcagatgcatatttcttccctcctttccaaccatcactgctccctaggacaaaaggtggacctgtgattccaactaaacttcctccaaggaaagcaagactagttgtttacaataaaaagtcgaatgagacaagcacatggattgttgaacttagagaagttcatgcaacaactcgaggtggacaccataggggcaaagtgatttcatctacagttgttcctgatgttcagcctccaatggatgctgtggagtatgctgagtgtgaagctgttgtaaaggactttcctccctttcgtgaagcgaatgaaggaagaggagggattgaggatatggatctcgtgatggtagatccctggtgtgctggatatcacagtgaagctgatgctcctagccggagacttgctaaaccactaatcttttgtaggactgaaagtgactgccctatggaaaatggctatgcccgtccagttgagggaatccatgtacttgttgacatgcaaaatatggttgttcttgaatttgaagatcgtaaacttgtcccccttccacctgctgatccactaagaaattatacttctggtgaaacccaaggaggagttgaccgaagtgatgtgaaacccttgcagattattcagcctgaaggtccaagttttcgtgttaatgggcacttcattgaatggcagaagtggaattttcgtattggattcactcctagggagggtttggttattcattcagtagcctatattgatggaagtcggggacggagaccagtggcccatagattgagctttgttgagatggtggtcccatatggagatcctaatgatcctcactataggaaaaatgcttttgatgctggggaagatggcttgggtaaaaattctcattctctgaagaagggctgtgattgtttaggctatatcaaatactttgatgcgcatttcacaaacttctatggaggtgttgaaacaattgaaaactgtgtttgtttgcacgaagaagatcatggtattttatggaagcatcaagattggagaacaggtttggctgaagttcgaaggtctagaaggctgacagtttcttttatatgcactgtggctaactatgagtatggatttttctggcacttttatcaggatggaaaaatagaagcagaggtcaagctcacaggaattctcagcttaggagcattgcaaccaggtgaaactcgaaaatatggcacaaccattgcacctggactatacgcgcctgtccaccaacatttttttgttgctcgtatggacatggcagtagattgcaagcctggtgaagcatttaatcaggttgttgaggtgaatgtcaaagttgaaaagccaggagacaataatgttcataacaatgcattttatgctgaagaaaaactgcttaaatcagaaatggaagcaatgcgtgattgtgaccctttatctgctcgtcactggattgttaggaacactaggactgtaaaccgaactgggcatctaactggttacaagctagtacctggctcaaattgtttacctttagctggctcagaggccaagtttttgagaagggcagctttcttgaaacacaacctttgggttactccttatgcacgcgatgaaatgcatcctggaggagagttccctaatcaaaatccacgtgttggagagggtttggctacttgggttaagcaaaatcgatcactggaggaagctgatatagttctttggtacgtatttggagtgacacacattcctagattggaagactggcctgttatgcccgtggaacgcattggtttcatgcttatgccgcatgggtttttcaattgctcgcctgctgttgatgttccaccaaaccaaagtgatttggatgacaaagagaatggcctgccagccaagcctattcagaatgggctaattgccaagctttgaaaggataaaaaatgaggaggatctgcctctctacgtggttatgttcaaattattaaataaaatattcaatacaactgtttgtgctggtttcaacctggctggatatttaagaaacgcctattactgtaatttgtactgtataacttgtatgtacgtttgttgcatggtaatgcttggtaacttaaatgttcatttgatttaaaaaaaaaaaaaaaaaa

SEQ ID NO: 1475 - DNA, 1408 bp, Glycine max
ggttgttgttgttgttacccattgattcgctcgccaaaaccctaatcgaggttctctcctcctcactatatattgcttgtgtcgctggagtccatcgcttagaaaccaaaaggctctctcacgcagtcgcagtgagtgaaaaggaaaaccctaattgcggtattctcagtgccttcgagagaaagaaaaaatggcagataatctcgttctccgtggaaccatgcgcgcccacaccgacgtcgtgacggcgattgccactcccatcgacaactccgacatgatcgtgacggcgtcgcgcgacaaatccatcattctctggcacctcaccaaggaggacaagacctacggtgtcccccgccgccgcctcaccggacattctcacttcgtccaggacgtcgtcctctcatccgacggtcagtttgccctatccggctcctgggacggcgagctccgcctctgggaccttgctgctggcacctccgctcgccgctttgtgggccacaccaaggacgtgctctccgtggccttttccattgacaaccgtcagatcgtgtctgcctctcgtgaccgcacgatcaagctgtggaacaccctgggagagtgtaagtacacaatccaagacggcgatgcgcattctgattgggtaagctgcgtccgtttcagccctagcacccttcagcccactattgtttctgcctcgtgggaccgcaccgttaaggtttggaacctgacaaactgcaagttgaggaacacgcttgctggacacaatggttatgtgaacactgttgctgtttcccctgatggctctctgtgtgccagtggtggcaaagatggggttattcttctgtgggatttggctgagggtaagcgtctttactccctcgatgctggttctatcatacatgcgctctgcttcagccccaacaggtactggctctgcgccgccaccgagcagagcatcaagatctgggatttggagagcaagagtatcgttgaggatttgaaggttgacctcaagactgaggctgatgccacctccggtggtggtaacgccaacaagaagaaggttatttattgcacaagtttgaactggagtgcggatggaagcactttgtttagtggctataccgatggtgtggtcagagtttgggctattggacgttattaggttaagctttttagtgttttcagatgcgaatctgtttttgagttttgggacaaagttagttactgctttactgtagaattgatttttatgttgaagaccgtggcactgaggccttttatttatttttaaaacgttcgttttggttatttacttgttacatggatatttcaacatctttgtttttctccggttaccaatattatctttacttcagaatatggttgagatataatctcaatt

SEQ ID NO: 1476 - DNA, 468 bp, Glycine max
cggctcgagattgattcccaaaaccctaattgaagttctctcctccacactatatattgcttgttcttgagtgagtctatcccttaaaggctctctcttgcagtcgcagaggaaaaccctagctagtagtctcagttcgtttgagagagaaaaaatggcagagggtctcgttctccgcggaaccatgcgcgcccacaccgacgtcgtgacggcgattgccactcccatcgacaactccgacatgatcgtgacggcgtcgcgcgacaaatccatcattctctggcacctcaccaaggaggacaagacctacggtgtcccccgccgccgcctcaccggacattctcacttcgcccaggacgtcgtcctctcatccgacggtcaggtcgccctctccggctcctgggacggcgagctccgcctctgggaactcgcggctggcacctcttcccgccgcttcgttggccacac

SEQ ID NO: 1477 - DNA, 351 bp, Glycine max
cccacgcgtccgcccacgcgtccgcccacgcgtccgcccacgcgtccgcccacgcgtccgtggcaggcgcagaggaaaaccctagctagtagtctcagttcgtttgagagagaaaacatggcagagggtctcgttctccgcggaaccatgcgcgcccacaccgacgtcgtgacggcgttttgccacctccctctcgacaactccgacatgatcgtgacggcgtcgcgcgacaaatccatcattctctggcacctcaccaaggaggacaagacctacggtgtcccccgccgacggctcaccggacattctcacttcgtccaggacgtcgtcctctcatccgacggtcagttc

SEQ ID NO: 1478 - DNA, 284 bp, Glycine max
ctctcgcagtcgctgaggtataccctagctagtagtctcagttccgtttgtggagagaaatagcggcagagggtctcgttctacggggaaccatgcgcgcccacaccgacgtcgtgtctgtgtttgacatctcaatatgagaacttgaagatgatcgtgacagtgtctcgcgacatatacatatttctatgcggccttatcaggaggacatgatctactgatgtctccgacgacgtctcaccgtgcattctcactttgtgcaggacgtcgtactctaatacgac

SEQ ID NO: 1479 - DNA, 477 bp, Glycine max
gttctaactcctcttgtgctatataaagaagtagaaaagtcaccacagtgtttatcactgtttccactttctccaaaaatcggaacgatcaccatgctgcgacaaggtgggtttaaagaagggaccgtggacgccagaggaagatcagaagctcttggcttatattgaagaacatggccatggaagctggcgtgctttgccagcaaaagctggacttcagaggtgtggcaagagttgcaggctaagatggaccaattatcttaggcctgacattaagaggggaaagttcagcttgcaagaagaacaaaccatcattcaactccatgccctcttaggaaacaggtggtcggcaatagccacacacttgccaaagagaacagataatgagatcaagaactactggaacactcatcttaagaaaaggttagacaaaatgggcattgaccctgtgacccacaagcccaagaacgatgccct

SEQ ID NO: 1480 - DNA, 502 bp, Glycine max
gtacctctctctgacacaagaattaagttgtgagatggagagaagtagtgaagaggagatgttaataacgaaaggtccatggacagagcaagaggattctcttctcttcaattacatcactgtccacggcgaaggtcactggaactctgtcgctcgctacacaggtctaaaacgaacgggcaaaagctgcagattaagatggttgaactacttgcgtccaaatgttcgacgtgggaacataaccctccaagaacagctcttgattcttgacctccattcccgttggggcaacaggtggtcgaaaatagctgaacatttaccgggaagaacagacaacgagataaagaattattggagaacgagagtggtaaagcaggctaagcaactaaaatgtgatgtgaacagcaagcaattcagggacacgttgcgttttgtgtggatgcacgtatgctagagcggattcgggctcaggcctcatcgatcggccaagcccaccaaagca

SEQ ID NO: 1481 - DNA, 315 bp, Glycine max
gagaaattgagaagatgggaagaaaggccaactgtgacaatcaatatgctatgaacagaggtccttggtctgctgaagaagacaaaattcttatgaactacgttcaagtccatggagaaggaaaatggagagagctttccaaaagagcaggcttgaaaagatgtgggaagagttgtagactccgatggctgaattatctcaagccagatatcaagagaggaaacatttcttcggatgaagaagatctcatcatcaggctacatagcctcctagggaataggtggtctcttattgcaggacgattacccgggcgaa

SEQ ID NO: 1482 - DNA, 416 bp, Glycine max
gctcctttatatattgtttccgtgtttttctctctctgtgtttttgtgaggcccaaactaactttataagcaatttacgtgtttgaaattaatatcttgtgtgctagctagcttcttcatcatggcaaagtcttctactgagaagaatggactgaagaagggtccatggactccagaggaagatcagaaactcatcgattacattcagaaacatggacatgggaagtggagaacccttcccaaaaatgcaggactaaaaagatgtggaaagagttgtcggcttcgctgggctaactacttgaggcccgatataaagagagggagattctcattcgaagaagaagaagccatcattcagttacacagtgttttgggaaacaagtggtctacaattgctgctaacttgccaggaagaa

SEQ ID NO: 1483 - DNA, 537 bp, Glycine max
gcttcagtacttgctacctttctataaaggtagagagaagagaggacccttctcttgcatagttcaagtgagtgagagtgccaaaaaatgggaagggctccttgttgttccaaagtggggttgcacaaaggtccatggactcctaaagaagatgcattgcttaccaagtatatccaagctcatggagaaggccaatggaaatcactacccaaaaaagcagggcttcttagatgtggaaaaagttgtagattgagatggatgaactatctgagaccagacataaagagagggaacatagcaccagaagaagatgatcttataatcagaatgcattcacttttgggaaacagatggtccctcatagcaggaaggttaccagggagaacagacaatgaaataaagaactactggaacacccatctaagcaaaaagctgaaaattcaaggaacagaagacacagacacacacaaaatgttagagaatcctcaagaagaggctgcaagtgatggtggcaacaacaacaaaaaaataaaaata

SEQ ID NO: 1484 - DNA, 1966 bp, Glycine max
cacaatcacacacggtcctaagtgtacctattgtgattccaacacctctatttatgttccaaacattattattcaaacccgttcatgttagcataggagggttgagtagttcttcatcatagtcttaaacattaaaccttagcaaaactcaacaatgctagacatcaaaggctacctcgtactcttcttcctatggttcatatcaaccattctgatacgttccatcttcaagaaaccacagcgtctaagactcccaccgggtcctccaatttcaatacccttgctgggacacgcgccatatctccgttcactgctccaccaagcattgtacaagctatcactgcgctatggacccttgatccacgtcatgatcggttcgaagcacgtggtggtggcgtcgtcggcggagacggccaagcagatcctcaaaacctcggaggaggcattctgcaaccgtcccttaatgatagcgagcgagagcctaacctacggcgcggcggactacttcttcatcccctacggcacatactggcggttcctgaagaagctctgcatgacggagcttctgagcgggaagaccctggagcatttcgtgagaatccgcgagagcgaggtggaggcgttcctcaagagaatgatggagatttcaggcaatggaaattacgaggtggtgatgaggaaggagctcataacgcacacgaataacatcatcacgaggatgataatggggaagaagagtaatgcggaaaacgatgaggtggccaggttgaggaaggtggtgagggaggtcggggagttgcttggggcgtttaacttgggggatgttattgggttcatgaggcctttggatctgcaagggtttgggaagaagaacatggaaactcaccacaaggtggatgcgatgatggagaaggtgttgagggagcatgaggaggctagggctaaggaagatgctgactctgataggaagaaggatctttttgatattttgttgaacctcattgaagctgatggtgctgacaataagctcactagagagagtgccaaagcctttgctctggacatgttcatcgccggcacaaacggccccgcaagcgtcctagagtggtcactggcggagctggtgagaaacccccacgttttcaagaaggcaagagaagagattgagtcagtggtaggcaaagaaaggctggtcaaagaatcagacattcccaacctaccatacctacaagcagtgctgaaggaaaccctaaggctgcacccgccaaccccaatattcgcaagagaagccatgcgaacatgccaggttgaaggctacgacattccggaaaattccactattttgatcagcacatgggccattggtagggatccaaattactgggatgacgcactcgagtacaagccggagaggttcttgttctccgacgacccgggcaagagcaagattgacgtgagggggcagtactatcagctcctgccctttgggagcgggagaagaagctgccccggagcctcgctagcgttgcttgtcatgcaagcaacgctagcgagtttgatccagtgcttcgactggatcgttaatgatggtaaaaaccatcatgttgacatgtctgaggaagggagggtgactgtgtttttggccaagccactcaagtgcaagcctgttccgcgtttcactccgttcgctgcctgaagactgtgaatggaatggtttctctagttgtgtgtgctttacctactctatatttttaccttatttttgcttactttgtggcactagtatttgttttgggaagtagcgttgcttctgtaaacttggtggcaggggtatattatttatggaaataagtggtggcttggtagttattcccgtccatttctctaatgctgcctaataatttaaaggagttaatcaggccaatgaatacagaatgctgcctactaaaactttttgttttttatt

SEQ ID NO: 1485 - DNA, 838 bp, Glycine max
atccaagagagtacttcctctgaagaaaatgcacataatactgctgtagtgaggtgctccaaactgccactgcagcagctataaaaccctaagcattgacactcacgtcagtgactgtacatacagcaaccccaaggagaactagagaaatgcaaagttttgtgtcccttgaatgtcgcacattatccaagataacttccaggaaacaagatactggaatcatactcagcttagcaatctgatagaaaccgacagaattccacatcaaactcacgttcatgccgacaatagagaaatttgcaaataagacaaatttgatgagatcaggtaagggaaggtgagaggtttggacatatcccagccacttaagaaagactgtcagcaaggttgttgtggcaaaatgcagaccagtcaacgttgtagcaaagctgaaaccatatgtagccatgagggctttattcacaaggattattcccacagatgtgactatattgaacatccatgatgccacatcaagtgcagtcttcctatcacccttggttgctgaagacatgttcaatggctttattttgcttcttcttcttctctctttgtttgtttgactcgttgcgcttgaatttagggcactctgtttggctcttgaaaaatcgtgtgcgcttttgtaacgtcctttttcttcactcagtgaggaagcaggaacagcagcgtaaacaatgtcatgaagaacaatggtcaattttatgcacaccgccactaacgttgcattgtacgtggtagcaacacaaagtttgatatcttaatcattaaggcaatgaaatgaaaagtagtactatgtgta

SEQ ID NO: 1486 - DNA, 1690 bp, Glycine max
ctcgagccgctcgagccgcggaagcaaacgcagcattgggagatagaaagagagagagaaagagagagagagaaagacccttacccttctctatcgctcgctttcctttgacgcttctgacccttgctttgtctgcgtcttccttctttctttctttctttctctgtgtgtcgtaatggctctcccagactcttcttcccgtcgcaactccctgatcccctccttcatctactcctcttcctccaaaacgctccctctccaccacatgctcaacaccgcctccgctgccgccgccgccgctccctccccgccgccggccaatctcgacgccggatcgcgtggcctcatgattccctctcccagcgagtcacgcaagatcgagttgtactcccccgccttctacgccgcctgcaccgccggtggaatcctcagctgtggcctcactcacatgaccgtcactcctcttgacctagtcaagtgtaatatgcagattgaccctgctaagtacaagagcatctcgtctggttttggagttttgcttaaggagcagggattcaggggcttttttcgtggctgggtgcctaccttgcttggttatagtgctcagggtgcttgcaaatttggattttacgagttctttaagaagtactattctgatattgctggcccagagtatgcaagcaagtacaagaccttgatctaccttgctggttcagcatctgctgaggttattgctgatattgctctttgcccatttgaggctgtgaaggtccgtgtccaaactcagccaggttttgcaaggggtttgtctgatgggctcccaaaatttgtcagatctgaaggaaccttagggctgtacaaggggttagtgcctctctggggacgacaaattccatacacaatgatgaagtttgcttcttttgagaccattgttgagctgatctataagcatgccatcccaacaccaaagaatgagtgcaccaaaagcctgcaacttggtgtcagttttgctggtggatatgttgctggtgtactttgtgcaattgtgtctcatcctgctgataatcttgtctcttttctgaacaatgcaaaaggagcaacagttggtgatgcggtgaagaagcttggtttgtggggtctctttacgcgtggtctccccctccgaattgttatgattggaactcttactggagcccaatggggaatatatgatgcattcaaagtcttcgtcggattgccaaccactggtggtcctgctcctgcagctgctccagctcctggttctgagctagcaaaggcatagaatgtccaatgatgacaagcaacaatgttgtacgaaacttagaaagccagtgaatagggaccataaataaatagaggactgctgaatgaagttgcttgagtggaactcaagcttggttggataatattcttttaaagttcagacattgtttccatttttcttatatttaagtattttgaatttttgggaggatggttttgctctcatccttccacttgctgaaaactttgtaggtaggaatgatataattttgcatgttaggttctctacatgccaattgtcaaacgggaacacatttgttttcttgtctgtgcataagcaccgacacatatgcaatgcctagattgagatcatttattactccctttacttgattattttttttgg

SEQ ID NO: 1487 - DNA, 444 bp, Glycine max
ctcgaaccgaatcggctcgagacccttttccttctctctggctttcctttgacgcttctgacactgctccttttctttctctccgtgtcctaatggctctccccgactcttcttcctgccgcaactccctgatcccctccttcatctactcctcttcctccaaaacgctccctctacaccacatgctcaactccgcctccgccgccgccccctcccagccgccggaaaacctccacgccggatcgcgcggcctcatgattccctctcccagcgagtcacgcaagatcgagatgtactcccctgccttctacgccgcctgcaccgccggtggaatcctcagctgtggcctcactcacatggccgtcactcctcttgacctagtcaagtgtaatatgcagattgatcctgctaagtacaagagcatctctttctggtttggagttt

SEQ ID NO: 1488 - DNA, 782 bp, Glycine max
actcgagccgctcgagcggctcgaccggctcgagatctgggaacaacacacacaaaccattcccttttctcactacggcaatgaccacccaagcttccaccttcgccgtcgccgttccctccgtcgcaacccctttccgccgccaccggaatcccttcgttgttcgagcccaagcggaaccttcagataaatccgttgaaattatgaggaagttctcagagcaatacgcccgtaagtcaggaacatacttttgtgttgacaagggggtcacttctgttgttatcaaggggttggctgaccataaagatacgttgggtgcaccactgtgcccttgccggcattacgatgataaagctgctgaggttgcacaaggattttggaattgcccttgtgttcccatgagagagaggaaggagtgccactgcatgctatttctcacacctgataacgattctgctggcaatgaacagactatcaccttggaggaaattaatgaatcaacagccaacatgtagcacagattattgtgtattgagttactggtccgttgttacgggctgtatgcttggaaagacaagtgagacgaaaagtgtaacgataagtaggtaatatatttgtatttaccgaaaatgagatgtattttttctaactgcattcctactttactctattacaaatctcattcacctcttcttttcttaacatacagcctgtaacatcggacaagtcactcaatacacaataatctgtgctacatgttggctgaccataaagatacgttg

SEQ ID NO: 1489 - DNA, 397 bp, Glycine max
aaccaaaaagaaattcttctactatttcatgttcccttcttgtgtgttttctaaaataaataagaagttgaataatggccttgcaacaattttttatagaatattctaaagcaactaaagcttttctgtcaacaattcaagtatcatacttcatatcgtaccaattctcctactgcaatttcatgtttcttgtgtgttttctgtgtcattcacagtcgcttttttatgtccaccccaagtccgtatcctatcttcggcaagggaggcctcttcgttccaattagttttgtaaatcagcaccaaaagaacacatgtttggaggatagtccctgatatcattcctaaccagattcccttgactccccagtcaagcttgtaacccaatacaagacccaca

SEQ ID NO: 1490 - DNA, 377 bp, Glycine max
ctgttgttaacatttaatgttattaactaaaataaccaactttctcaaacgatttgaattagttaaaaaaatattccagggacgaaagtaataataaattctcgtatctagctccagccagttaacctatttaaacaaataatcaaggaaacatttgtttcgatgtatgaaattttaagaaaagatacaatttcaaatccatgcggggaatagatactgaaactaaagggctttcttcacttgaaagaagtcgggacggtccttgttggccgtatctacatcctctggagatgccactgcaaccacaacccctttatccttaactgcttccatagcatccataaaaattttgaagtccttcaaactagtagataata

SEQ ID NO: 1491 - DNA, 671 bp, Glycine max
tacttgcccattcccatgcctctctatatgaaagtatgtcacattaatcaaaccacaaacacagaaacactaaccactgaataaggctcagaagaacagtcattgtatttttacatagaccacgaaggacaatcaagcaccgtacagcgagtccatataataaaatacaaaccacaattatttaagtccttaaaacataaatacttcagactccagtaactggaccataatataaggtactacacttattagaactgaaacgtaacatggcaagcaatatttagttcataatcactacgaatttgttcatcatagccttgttgctggagagcaaggcattcatgtgaaccagccaccatggcacgctgagtgcttgggctaacagcatcaacttcctcaagtaattgaggcttgacattcatttcaaccgatgatgtaatggcttgaaaaacaagagcagtgacttctagaagcctctcttcagagagggaaacctcagcaagaagcctccaagcattggcttcagatgcctcctcatagtccttcttcctcttcagcaccatgtgcccactaatttcccacacagcaggattcacttgggtctccagaagctcaggactcacttctccaagggcttgtttctctgcatagcactgtggtaagagaaatat

SEQ ID NO: 1492 - DNA, 885 bp, Glycine max
ctcgagccgttccaaatttccatggcttctgcggatgttgaataccgatgctttgttggtggagtcgcgtgggccactgacaacgtgcgatggttacaaagccttctgtgagtgcggctacttcattgaatcgaaggtccgcatctcatatgatctgacacaattcggatccggaatttctccatcccgttctgatctgtgatctctgatctattttcgttacttgttctatgatatgatacttgtgttactatatgattcttatattactcactccaatatgttctttcatcttcatctttttgccaaagaagaagatcgatcggtttctattcggttctggattttgttttcgagctgttttgcttttcatttcaatttgatgaatccgttgtggttttatgtgtagattatcaacgatcgtgagactggaagatccaggggatttggatttgttaccttcgcctccgaggattcaatgagggatgcgatcgaagggatgaacggtcagaaccttgatggacgcaacatcactgtgaacgaagctcagtcccgcggaagccgcggtggaggcggtggcggttacggaagtggcggtggatacaaaccgcagtggtggtgctggaggatacggtggccgtcgggaaggtgcatataaccgtaacggtggtggttatggcggtgacagagaccatcgttacggaccttacgggcgacgtggatcacgctactctcgtggtggtggtgatggaagctgcagaaattagggcttaatgttgtagattagtgtttattgctatgtttgtgttccgtaattttaggtgttacggtttggtaatttgtcttggtttggggctcctggatacggttttttacctatatatc

SEQ ID NO: 1493 - DNA, 973 bp, Glycine max
cccacgcgtccgcccacgcgtccgcccacgcgtccgctcttagtcccaattttctagggttttattcattttccgatggcttactgcagatgttgagtaccgttgctttgtcggtgggctcgcttgggccactgacgaccatgccctcgagagagccttctctcagtacggcgaaatcgttgaaacgaaggtctgtttgttgcaggcatcacatctgatctcacacgattcggattcggaattttctcgatcccgttctgatctgtgatctctgatctgtttgcgttacttgatcttatgatcacttgtgttactatatgattcttttattactctcacgccaatagattatcaacgatcgtgagactggaagatccaggggttttggatttgtgaccttcgcctcggagcagtgccatgaaagacgccatcgaagggatgaacggccaaaaccttgacggccgtaacatcactgttaacgaagctcagtcccgtggtggcggtggcggcggatgcggtggaggtggtggatatggtggtggtcgcggtggtggatatggtggtggtggtcgcggtggtggagggggatacaaccgtagcggtggcggtggaggctattggcggcggcggtggatatggcggtggcggtggcggtggctatggcggtggcagagaccgtggttatggtggtggtggtgaccgtggttactctcgtggtggtgacggtggtgatggaggctggagaaactagggcttgatgtcgttgattagggtttatgattatgctccagtaattttagttgtgtttgagtttgagtaaccttatggttttgtgtcgaccgtggttcttgtttttgaccaatatatatggttgcctatcactcgatttaatgaaatgataatcagaaattggagtatcgaagttctaatgatttttactatttgtgcgctggatgtggaaaatctctgtttc

SEQ ID NO: 1494 - DNA, 816 bp, Glycine max
caataaagattctggccaaattcttataacccataacataaaacatttattaatatacaaacatttattacaaagggaaaccagaaatacagcaagggaagatttcatcccttaagaactactacaagggacaaccagataactgaattaattatttctcagagtcaagtcaagcattatgatacatcataccccaaaacaccacatacagtactcaggtgagcagttattacatcgtactttcacatgaacgcgtcataaaggcaggataaaagcaaatacgtacaacacaggaccttaaggctcaagcacagcacaatacggtggtgacttgtaacggtgacacaatttattcaattatttttaaagcactacggatttgctgaatttgttcataattttagagccttgtttgtgtagaatcacacattcttgtgaaccagctaccaccacagtaggggtgttcgcttgtgctgactgcatcaacttctttgacactttcaacgttgacatcctccaattcaccacagccaatggcttcaaaaataagatcattgacttcttgaaacctctcttgagagagggacacctctgcaagaagcctccaagcattgccttcagatgcctcatcatgcatccttcttcctctttagaaccatgtgcccactaatttccgtacacagcaggattcacttgtgtgtcaagaagctcgtcatccacttctccaagagcttgtttctcgtgcgtaacactgtggtaacagatagcacttgctttccacagtcagagataagaacattgaaaggtatgttgttg

SEQ ID NO: 1495 - DNA, 744 bp, Glycine max
ctcgagccgaatcggctcaagctttatcccatttttctagggattaatacattttccgatacgcttctgcagatgttgagtaccgttgactttggtcggtgcggctcgctaggtcgcatgacgaccatggcctcgagagagccttctctcagtagggcgaaaatcgttgaaacgaagattatcaacgatcgtgagactggcagatccaggggttttggatttgtgaccttcgcctcggagcagtccatgaaagatgcgatcggagcgatgaatggacagaacttggcacggccgtaatatcactgtcaatgaagctcagtcccgcggtggcggctgctgtggctgttcgaggaggaggaagatacaatcgtggtggcggtggatatggtggtcgtagtgacggtgacggtggcggtggcggtggtggataccgtagccgtgacggtggttatggcggtggctatggtggtggtggtggtggtggttatgacggtggcagagaccgtggttagcgtctcgtggtggtgatggtcgctgatggaggctcggagaaactcgaggcttgatgtcgtcaattagggtttatgattatgccccgtatttttagttgttgtggtttgagttcgagtttcttaatggtttcgtgttaccgtggttcttgtttgtgtccaatatatctgggtgtttaaagtcgacttaattaaattgataatcagtacttggagtatcgagttaaaaaaaaaa

SEQ ID NO: 1496 - DNA, 1068 bp, Glycine max
cttatccctctaatcactctagctgttgcaaatttctactatctttcaatggcttctgcagatgttgagttccgttgctttgttggtgggcttgcttgggtcaccggcaacgatgccctcgagaaagccttttcaatctacggcgacatcgttgaatcgaaggtccgtttgatgcaggcaccgcaactgatctcacacgattcggattcggattttttctcgatcctcttctgatctgtgatctctgatctatttgcggtacttgatctatgatatgatacttgtgttactatatgattcttttattactcacgccaataggtacgttcatcttctggcctttcaccaaaggcgaagagcgatcggtttctattcggttctgtcgttagttttcgtgtgttttcttttgctttggatctgatgcatcgtgtttttgtgtgcaggttatcaacgaccgagagactggaatgtccataggattcgagatttgtgaccttacgcctactgagcagtccatgaaagatgcgatcgccaggaatgaacggcccaggaccttgacggtcgtaacatcacttgtcaacgaagctcagacccgcgccaaccgtggtggtggtggaggcggtggtttcggaagtggtggtggatacaaccccggtagcggtggatatggtggtggtggtgccggcggcgaatacggtggtcgtcgtgaaggtggatacaaccgtaatggtgggggtgaagatgaaggatacgccggtggtagagaccgtggttacggtggtgatggtggttctcgctactctcgcggtggggaaggcggtggatccgatggaaactggagaaattaggcatatgaccctgtaaattagggtttatgattaagttcaattattttaaggtgttgtctgtgtgtggtttaagtttcggtatctgtgttggtttcgtttcgtgttcctgtggttttcgtttttgacctacaattctagttgtgtttatagtcgatcgaatgaaatgatagtaagaaattatcgcatcaaatttctatggattttgctatctgtttgctgg

SEQ ID NO: 1497 - DNA, 1024 bp, Glycine max
ggggggaaattcttaacccttaacgtttactaatatacaaacataacatttattacaaagtgaagccagaaatacagcaagtgaaaactttcatccttaagaactacaactacaaggacaaacagttacctgaatttattatttctcgcagcatgaaagccacgatagacagtcaagtcaagcattatgatacatcagaccccaaaataccagacaacactactcagctgagcagtttttatatcgtactttgacatgaaagtgtcataaaggccgataaaagcatatacattcaacacacacgaccataaggctcaagcacaaggcaatagtatgacttaaacggtgacacatttcagcaattattcttaaaacactgcagattttctgaatttgttcaaaatacaagagccttgttactgtagaaccacacattcttgtgaaccagccaccaccaccacagtaggggtgttcgcttgtgctgactgcatcaacttcttttttgacactttgaacattgacatcctccaattcaccacagccaatggcttcaaaaacaagatcattgacttcttgaaacctctcttgagaaagggacacctcagcaagaagcctccaagcattgccttcagacgcctcatcataatccttcctcctctttaaaaccatgtgtccactaatttcccacacagcaggattcacttgggtgtcaagaagctcagcattcacttctccaagagcttgtttctctgcataacactgtggtaacagatacacttgctttccacagtcagagataagaacattgaaaggtatgttgttgttgtgaagacatatacatgcatctgaaacaacgtttgatagatcttccagccatttcgccgccctcaaagacaaagcctctaaccggatacttcaacagttcagatatcttcaccccaccatttacacttgcaattctcttagtgggggccttctcaattgggaagagcagagccagataataagcctgcgaacgcgtggg

SEQ ID NO: 1498 - DNA, 1181 bp, Glycine max
cgtaacatgcacgcgtacgtaagctcagaattaggctcggggccaaacaaaccaggcagtattataatagaaagaggacacaaagtgaaagagaagggagctatagccataaggagaaaaactttcaaagaggtgaaagcaaaagagttcttcttttccttttttatatatacttgggtgctaagctgtgtgagttcattgacaagcctgaaatggcaactatgctgacaaaggagcatggtctgaacctcaaggagaccgagctttgcctcggtttgcctggtgggggaggcggcggcggcggcggcggcgtggtgaggtggaaactccaagggccactgggaagagagggttctctgagactgttgatctgaaacttaatcttcattccaaggaagatctgaatgagaatctgaagaatgtctcaaaggagaagaccctccttaaggatcctgccaagccaccggctaaggctcaagtggttggttggccaccagtgaggtcatacaggaagaacatgatggcagtacaaaaggttagcactgaggatgtggcagagaagacaacaagcagcactgctaattctggggcatttgtcaaggtttccatggatggagcaccttacctgcgcaaggtggacctcacaatgtacaaaagctacaaagacttatctgatgccttggccaaaatgttcagctccttcaccatgggtaactatggggcccaaggaatgatagacttcatgaatgagagcaagttgatggatcttcttaacagctctgagtatgtgcccccccatcaagatacggatggtgactggatgctcgtgggtgatgtcccatgggagatgtttgtggtggtcatgcaaccgcctggcgaaattatgaatggatcagaagcgattgggccttgcgcccagagcattggaaaaatgcaaaagcagaaggggaagctggcccaatacaacgttctacgagagatcccgtacgccactggacctatggaacaaattatatcacccacttcagctacactatggagcggaatgttgttggttgaatgtgtctggtgtttggcgttttgttcgtataaagattgtgtagtgtaaaacaacggtgccttaacctatacggtctggcgtgtttaggatgtgatcgtccaggctgtccggatggtatttg

SEQ ID NO: 1499 - DNA, 931 bp, Glycine max
  unsure (1)..(931): unsure at all n locations
gtttccatggatggagcacctaacntgcgcaaggtgnacatcacaatgtacaaagctacacaagagttatctgatgccttggccaaaatgttcagctccttcaccatgggtaactatggggcccaaggaatgatagacttcatgaatgagagcaagttgatggatcttcttaacagctctgagtatgtgccaagctatgaagataaggatggtgactggatgctcgtgggtgatgtcccatgggagatgtttgttgagtcatgcaagcgtctgcgaataatgaagggatcagaagcgattgggcttgcgccaagagcaatggaaaaatgcaaaagcagaagctgaagcgggcctaatacaatgttcaatgaaatcccgtaccaaagtggacctataaagacctatatatatatatatatgaagcacttcagcgagactatggagcggagtgttgttagcttgaatgtgtctggtgttttttgttttgttcgtatatagattattcaacttttaattttaaggagccgatcgatggggcatttgtaatggacaagaagcaataaacttaacctatatagtctggcttgtttattatgtgatccttccatgctgtcatgattgttgtgtgctaaataccttgaattttaatgcatactttattgcctcaaagagattcttcatatatcatttattttgattttttgttttaattaattgtgtatgtcctgcaaaatgatcaatgtctcagctggatgaggaaggtattcaatttttatatggttcacaagtgagcaaggggaacaagcccatgtgcatgttgatggagtttcgtttatggccattagttttatagtctttgtcatctagttttgtaatatcaaatgggtattaactaggtggctgaaatgttaggggtggtaaaaaaaaaaaa

SEQ ID NO: 1500 - DNA, 1728 bp, Glycine max
  unsure (1)..(1728): unsure at all n locations
cccacgcgtccgcccacgcgttcgaccacgcgtccgcccacgcgtacgtccacgcgtccggccatatctctttctcacacagcacagtctcttcttcttgctattccttcctcgttatggagtcgcgagtgctgtcacgcgccggaaccttgtcctccctccctcacctccgcaagccgccgcgggaggccgtctccagcgcctccctcgtcgccgtgaaggccgtgggctccgtcgcggacggcggaaacctgatttgggggaggcagctgcgcccggagctctgctcgccggtgctgaagaaggaggctgtcctcctccggccatgcctcgccgccgcctcctcgccggccgagggtagtgattccgccggagaagcaaaggttgctccggcggggttcttcgacaagtacccggctctggtcaccggatttttcttcttcacgtggtacttcttgaacgtgattttcaacatcctcaacaagaagatctacaattacttcccctatccatacttcgtatcggtaatccatttattcgtgggagtggcgtactgtttggtgagctgggccgtgggccttccaaagcgtgctcctatagactccaacctactgaagttgctcattccagtggctgtgtgtcatgcattaggccacgtgaccagcaatgtctcatttgctgcagttgctgtttctttcactcataccattaaagctcttgagccattcttcaatgctgctgcttcacagttcatacttggccaatcaatccccatcactttgtggctgtcactggctcctgttgttattggtgtgtccatggcatctttgaccgagctctcgttcaactgggtcggcttcataagtgctatgatttcaaacatttccttcacgtaccgaagcatctattcaaagaaagccatgactgatatggacagtaccaatatctatgcctacatttccatcattgctctaattgtgtgtataccacctgccgtaattttggaagggcccacactgttgaagcacggcttcaatgatgctattgctaaagtaggtttggtcaagttcgtctcagatctcttctgggttggtatgttttaccatctctacaaccaggtggctaccaacacactggagagagtggctcctctcactcatgcagttgggaacgtactgaaacgtgtatttgtcattggattctctattatagtcttcggtaacaagattagcacccaaactggtattggaacagccattgcaattgctggtgtggcactctactcgttcatcaaagccagaatggaggaagaaaagcgacaagcaaaagcagcataagaggaaagtcgtcaacctggaggatgtcttgcactgtaaatcaccacaaatttccttcaaaataattgagtgactggttcagtgttgtactatccttgtgatagcgcccttttatttttccttctatttttgtcaaatattttctttttcctttttttcctttttctctcttcattcagaaaacaatgtctcgctgctgattatcagtcttctcgtgttgactggaaaatgtcgtacccttgattcccataaagagctattgaaactattatattagctgacaaaacgaactttacaacaaatgaacaaacttnnnnnnnnnnnnnnnnnnnnnnnnnnnnnnnnnnnnnnnnnnnnnnnnnnnnnnnnnnnnnnnnnnnnnnnnnnnnnn

SEQ ID NO: 1501 - DNA, 501 bp, Glycine max
gccaaacaaaccaagcaacattataatagaaagaggacacaagagaaagaagggggagctatagccataaggagaaaaactttcaaagaagtgaaagcaaaaaagagttgttcttttcctttctgctgataagctgtgtgagtgagttcattgacaagcctgaaatgacaactatgctgacaaatgagcatggtctgagtttgaacctcaaggagactgagctttgcctcggtttgcctggcgggggctctgaagtggaaactccaagggccactgggaagagagggttctctgagaccgttgatctgaagcttaatcttcagaccaaggaagatctgaatgagaatctgaagaatgtctcaaaggagaagactctccttaaagatcctgctaagccgccggctaaggctcaagtggttggttggccaccagtgagatcatacaggaagaacatgatggcagtacagaaggttagcaatgaggaagtagctgagaagacaa

SEQ ID NO: 1502 - DNA, 562 bp, Glycine max
gagtgtttgggaattttgtataatgtcacagacagtgagtcactgacagtgtttgtgtgtgtctaagagagagagagatggcatcgttttgtgctgcaaggactttcaacattccggcgatgaacgccggcgttcttcgccgccgggcatcgtgggccgccggaatagtcggagcctcggtggccggcgctgcacttttgcgctcttgttcgtctaagcgctctgcgccattcgcttgcatgagcctctctactgataccagtttaaaggaagctgttcaaactgaaaaggccccagcggcattggggccatactctcaagcaatcaaagccaacaaccttctgtttgtgtcaggtgttcttggccttattcctgagacagggaagttcatctctgataatgttgaagatcagacagagcaggttctaaaaaatatgggagagatcctaaaatctgggggtgccagctattcatcagttgttaagacaactattttgttggctgacttgaaggacttcaagaaagttaatgagatctatgctaaatacttcccttcaccagc

SEQ ID NO: 1503 - DNA, 598 bp, Glycine max
cgatcaaacaataataaccggtttttctcacttttctttttcttttgggctttcagtttcacataacaaaccgtttgcagaacatcccataaaagcttagcttgtattcagtttctcttctcccaacgtttttgtcgctagtaacagaatattacaaagtaacggctttctcagtggagcgcttgatttgggttggtgggtcaacttcaagtttcaatttttttttcatttttgtctggtcgattgagaaggctcagttgcagagacggtgggggtgggaaggttatggctttttgcccaattttttgttgcggaaatagttcggatcgcaaaggacgagggaagaaacaacctccatggcgggtgttttctttgaaggaattacactccgctacaaataatttcaactatgataacaagctcggcgaagggggattcggcagtgtgtactggggccagctctgggatggatcgcaaattgcagtgaaaagattgaaagtttggagcaacaaagcagacatggaatttgctgttgaagttgagatgttggctagagtacgacacaagaatcttctcagtctacgtggctattgtgctg

SEQ ID NO: 1504 - DNA, 402 bp, Glycine max
ggtgtttcttctgttttgaaatgtgcaaccagctggaagaagacagaagacttggcttacacaccagcaccatcattcgcatctcatctattctactcgatcaaacaataataaccgattattcccacttttccttttctttttcttttgatttgggctttcggtttcacgtaacataacgcaacgtttgcagaaaagccaagcttgtcttcagtttctctttgtcgctagtaacagaatattacaaagtaacggctttctgagtggagcgcttgatttcgtttggtgggtcaacttcaagtttcgattttgttcatttttctctcgtcgattgagaaggctcagttgcagagacagtgggggtgggacggttaggcctttttgccaaatttttggttccga

SEQ ID NO: 1505 - DNA, 637 bp, Glycine max
ggtgaagtgcgtccttttattgcttgctcttgatgtatttaattcagccggtggcggattgttcaggagttgatgaagatgtgcacttgtctcttgcacatcaaatgtacaagactggcaattataagcaagccctagaacacagcaacactgtctatgagagaaatccgctccgtactgacaacttactactcctgggtgcagtttattatcagttgcatgattttgatatgtgtgttgcaaaaaatgaagaagcactgaggattgagccacactttgctgagtgttacgggaatatggcaaatgcatggaaggagaaaggaaacattgaccttgcaattcgctactacttgattgccatagagctccgtcccaattttgctgatgcatggtcaaatctagctagtgcatacatgcgtaaaggaagactcactgaagcagcccagtgttgtcgtcaagcacttgctataaatcctctaatggttgatgcccatagcaacttgggtaatcttatgaaagctcaaggcttggtgcaagaattcgatacagatatgaagttgttgtcttcaagccagggctcagatgatggttgctcttgttgtaacttccatctccaagactgcaaatagtcagaatc

SEQ ID NO: 1506 - DNA, 589 bp, Glycine max
gatatgtttaacagaaacgaagcgaagccccaaaagaggagagaaagaagaataaacactcgagaaatttctcacttagggtttggatttttcgagtaatcttctctctccgtcacttcatctcacgcgatctcgttccgatcgcacgcgttttaatgatcgtcgtcttccgcggcctctgattcggctctgatcttcctcgccgcacctctccgcacctctccgccggaaccatgatctccgtgcagggcgaccaccaccgccaccaccaccactaccaccaccagccgcagcttcccggctccgccgacacctctcggcagcagttcaccgcggatcgcgtcgagcccttctccgtcaagcaggaacccgcgtcgctcactcttctgccgttacgcggtcatgattctagtgaagttgatgaagatgtgtacttgtctcttgcacatcaaatgtacaagactggcaattataagcaagccctagaacacagcaacactgtctatgagagaaatccgttccgttctgacaacttactactcctgggtgcagtttattatcagttgcatgattttgatatgtgtgttgc

SEQ ID NO: 1507 - DNA, 458 bp, Glycine max
cccacgcgtccgaaaaaaaataaaaaagaaagacagaaaataatgtcaatggaaatgatggcaaccgaacgtgtttgttatgttcactgcaacttctgcaacaccattctggcggttagtgttccatacagcagtttgctaaccatagtgacggttagatgtggacattgtgccaatttgctatcagttaacatgggagcgtcacttcaagcatttccccctcaagaccctcagtcacagaaacagcttctaagctttgaagaaccaagcagctgcaaggaactgggatcatcatcttcaaaatgtagcaaaatagcgccatttcacgaggcagtagagcatgaactacctaggattccccccattcgtcctacagagaagagacatcgcgttccttctgcttataatcgcttcattaaggaggaaattcaaaggattaaggctagtaatccagatat

SEQ ID NO: 1508 - DNA, 383 bp, Glycine max
gcacgattcatttatctatctgcttctcttctctttgctcaacacaatctatatctatctcactcattcagacaccaacacatcctcatgtgtctaattctaccttgcttgtatttgtagcgctattactccttgctgtgtaaatggcacatgttgatgttattcgattacagtttcagccctttcggttctcctcttcctctttcttcaccccctcacctttctctgctaagatcctattctctcctctcgcctattcttcttctaggccagcgccaccagctactcttgctttcccccccagaaagcatttgctttctttcaaggtatctgcaactgttggtgaaacagggtagccaaattggtgggaaaagaatgcacca

SEQ ID NO: 1509 - DNA, 697 bp, Glycine max
tacttagcctccgaaatccggctcaaggaattctgaggctgctaaagcattagcagtgcaatcagacattttggagaaggaacttggtgaaattcaacaggttttactagcaatgcaggaacaacagcgaaaacagcttgatctgattcttgcagttgggaaagctagtaagctatgggaaagcaagcaagaaaccaatgaacgacatgatacgttagaattgtctaattcagctgaggatggggtaaaacaggaggtgcaccaaatatgaagattgggttaaaataaggggaaattcctgaaatttgaaagtgacaaatcgtggtgcaatatttttgttttttttttccgtgtacactgtataatcgattgttacacaaaatcaaaattaccagaattttatcagcacataaataatgattattcgtttttctagagtacctcaaatttgatgtggatacaggtgagaagagattacacgagagtcaagacaaactaatgtggaggcttttgttgaactctgtccagttatagggtaaaagttcagcaacgtatctgttgggttctttgtgcttgtgcatgtacactctgaattcaagtttgtaagctgttatccatcaattttctttctacatgcttaagttggtagttataaaggcttggtaaaacctttttttttttcttaaaaaaaaatata

SEQ ID NO: 1510 - DNA, 912 bp, Glycine max
gtctgtcccctaccactctttcaaaataatattcttttttatctcatgcggtggaacactcttctccaccagtaccaccatccttcttcttcttcttctctccaccatatatagtatttgactatttgtaatattcatcatgttcattgtgcagtggtgaattgaagtgtttgagtttggcatcttctgatggtgctttatttataattattgtcatcaagtttcagactcattctggatcactgagttgattctcttaatgtcaagataaaaaaaataaaaggtagatgatgcatggaagcttgagaaatgcaaataaaagtagaaaagcctctagcagagaaagaaaattggctttgcagcaagatgtggatacgttgaagaagaagctaaggcatgaagagaacattcatagagcattggagagggctttcaacagacctttgggagctttgcctcgtcttccgccttacctccctccctagataccagcccttctggctgaagtggcagttttggaagaagaaattgtaagacttgaagagcaggttgtgcatttcagacaggatttgtaccaggaagctgtctacatgtcatcttctatgaggaaattggaaaattcagtttccgctcctcctaacaagtcaaatccaacaatggatagtcccaagttggataaattgaagtctcttacccaaacaactggtaattcaacagcaacatctgcaactaagcctaccacaacactccctgatgataatagacaagggaaagagaaccaatcctgtactaattcttccaagagcaggcagcaatcctccaaccaaacgaacaaaactccaattaaaaaaattaacaatcaatcactgcagaaaaagttggatcatccaaaaaagaaggtgtgtcatgtga

SEQ ID NO: 1511 - DNA, 427 bp, Glycine max
  unsure (1)..(427): unsure at all n locations
aattcctttgttcagagacaaagaacaacaacaacaactgtaaccatgcttgtctaccaagatcttcttacaggtgacgagcttctctctgactcattcccgtacaaggaaactgagaatggaatgctgtgggaagtggaaggaaagtgggttgttcaaggagcagtcaatgtagatattggtgctaacccttctgcagaaggtggggatgaggacgagggagttgatgatcaagctgtcaaagtagttgatattgttgacacttttaggcttcaggaacaaccaccctttgataagaaacaatttattacttatatgaagagatatattaagttgctgacggccaaattagagggtgagcagcaagagttgttcaagaagcacatcgagggagcaactaagtccctcctatcaaagctcanagacc

SEQ ID NO: 1512 - DNA, 544 bp, Glycine max
ttgagggggaagcacaagagaagagaagagaagagaggagagggggggagaaggggttgcagagagagagagagagagatgtcatcatcttcagacctggacaggcaaatagagcagttgaagaggtgtgagcctcttaaggagtctgaagtgaaggcgctttgcctcaaagccatggaaatccttgtcgaagagagcaacgttcaaagggtcgacgcccctgtcaccatatgtggtgatattcacggtcagttttatgacatgaaggagcttttcaaagtaggaggggattgccccaaaactaactatttgtttctgggggattttgttgatagagggttttactcggttgaaacgtttctgcttctgctcgctcttaaggtgaggtatccggatcggataacactcattaggggaaaccatgaaagccgtcagatcacccaggtgtatggattctatgatgagtgccttcgaaaatatggttcagtcaatgtctggagatattgtaccgatatattcgactacttaagcttgtccgctctaa

SEQ ID NO: 1513 - DNA, 251 bp, Glycine max
gaggaaaggaagggagtagggagtgagtaattttgaaaataaagaggaaagcttgaagcagaagagagagatgtcatcatcttcagacctggacaggcaaatagagcagttgaagaggtgtgagcctcttaaggagtctgaagtgaaggtgctctgcctcaaagccatggaaatcctcgtcgaagagagcaacgttcaaagggtcgacgctcctgtcaccatatgtggtgatattcacggtcagttttatg

SEQ ID NO: 1514 - DNA, 654 bp, Glycine max
aaaagcatcgccttcgtaaggcattaggtcagacagctgactggtttaggagagcattggctgttgagcctgtcaaggggaacctgcggttaagtggatattctgcgtgtggacaagatggaggtgtgcagcttcctcgtggatatattgaggagggtgtctctgatgccgacttggttcttttggtgactacaagacctacaactggaaatacacttgcctgggcggtggcatgtgaacgagatcaatggggtcgtgctatagctggacatgttaatgttgctcctcgtcatttgacagctgaggcagagactttgctttcagctactctgatacatgaggttatgcatgttcttggttttgatcctcatgcctttgctcattttagagatgaaagaaaaagacgccgtaataaggttaccgaacaagtaatggatgaaaagattgggcgaatggtaacacgtgtggtgcttcctcgtgttgtcatgcattctcgacatcattatgcggcattctcaagaaattttactggcctagagttggaagatggtggaggacgtggcacatcagggtctcactgggaaaagagacttctgatgaatgagatcatgactggttctggtggatacagattcgtagtttcaaaaatgacat

SEQ ID NO: 1515 - DNA, 436 bp, Glycine max
  unsure (1)..(436): unsure at all n locations
tagaagaaaatgtngacagaaaggataatgcatgaatgcatcaagaagttattgggtcaggatcaggatccggatgaagaagatatttgaagctttgccaacctgatgaactcttttgggggagaatatgcatcttcccagaccccgaggaacatatggatgcgtattttgaaatgatgagatcattatcaaacaacatgaatttatcttctagggtgaggttcatgttgaaggatgtcattgatttgagaaagaataaatggcaacaaagaagaaaggttgaaggtccgaagaagattgaggaggtgcacagagatgcttctcaagagaggctggcccaagctagtgagccgggtcgtggtccaggcaacaatccacctcgaaagatccctatggattttggtccaagaggatcatcaatggtatctcctaatgc

SEQ ID NO: 1516 - DNA, 524 bp, Glycine max
gttaaacaagtgccaggaagaatttgagaggggtgaaagagagcaagaagaagctaataaggttgatgagggtgaggtcaagctgtctaatggggaaagagaagagagacgtgccaaggctagaagacgcatgttgggtaacatcagattgattggagaactatataagaagaaaatgttgacagaaaggataatgcatgaatgcatcaagaagttattgggtcagtatcaggatccggatgaagaagatattgaagctttgtgcaagctgatgagtactattggggagatgattgaccatcccaaagccaaggaacatatggatgcatattttgaaatgatgagatcattatcaaacaacatgaatttatcttctaggttgaggttcatgttgaaggatgtcattgatttgagaaagaataaatggcaacaaagaagaaaggttgaaggtccgaagaagattgaggaggtgcacagagatgcttctcaagagaggctggcccaagctagtaagctgggtcgtg

SEQ ID NO: 1517 - DNA, 497 bp, Glycine max
caaaaaccagagagacctgtgttgtggttcaatctagcatagatcgatcgatcattcatctgtgaataaaaaggtgtaactgtgactgtaatgtttctgaatcgaagctgaaaatgatgacgccgttcaaacgcttacacttagttcggacactctatcgttcatctcagattggagaatcttcgtcgtatctgctcggcagctgcaagagttattcctctgctctatcaaacggttctgagggtaatttcaggagcttccattcccatttgttaaagggccaagatggttttccctttgctggtgtaaaatctttgacgcttcgatctacaatggctgctgagttgtccattttcatgaacaataggaggatgttaagtactcaagtcaaagcctcagcacaagcgcgacaagtgggacaacaaatatccctatcaagtcctggatttatctatgaaccttatgaacctcgtgataaaatcccattttggaagaga

SEQ ID NO: 1518 - DNA, 519 bp, Glycine max
ctcgagccgctcgagccgctcattgcttctgtgttttccaatctgattttcagttccccagagacgaagatgtctctccggcgtggagtccctctttctctgttggtcctcttcctcctcctggtatctccggcggcgaccttggccttccgcaagaagcacaagatcccggggccgatcaaaaccatagtggtgatagtgatggagaaccgctccttcgaccacgtcctcggctggctcaaatcctcccggcccgacatcgacggtctcaccggcagcgaatccaaccctctctccgtctcctccccctcctccgccacaatccccgtcactgacgacgccctcttcatcgacgccgaccccggccactccttccaggccattcgcgagcaaatcttcggttccaacgacacctctgcagaccctaccccaatgaacggcttcgcccagcaagccgagtcaatcctcctgggcatgtccaaaaccgtcatgagcggtttcaaaccccacaccctcccc

SEQ ID NO: 1519 - DNA, 581 bp, Glycine max
aagggcagagaatcgaggaggcgcaagagtaggacgcggggaatcctgaacgccaaagactgaggcgaatatttagctgaaaataaattcacaccacagcccaacacaaacactttctctttctttctctcttcaattttgatcctattttttttcttctctcttccttcctttggaattgaattcagcatcagcatgaacagcaggtctcaggatcaacgctcaagacctgccaagccagccacaatccatggctgcgccctctccggcgacctcgttggactccagaggctacttcgagacaacccttctcttctcaacgagagaaaccctgttatggcacagacaccacttcatgtctctgctggtcacaataggactgagatagttaaatttcttcttgattggcaagggacagataaggttgagatggaggccaagaatatgtatggagaaactccattgcacatggcagctaagaatgggtgcaatgaagccgcacaattacttcttgcttgtggtgctactgttgaaaccagagcaaataacgggatgacacctttacatcttgctgtttggta

SEQ ID NO: 1520 - DNA, 394 bp, Glycine max
cccacgcgtccgctcttcaatcgttaaccttttttttttttttttttttcctttctttcgctcttctttcctttggtaattgaattcagcagcatgaacaacatcaacaacaacaggtctcaggatcaacgctcaagacctgccaaggcagccactatccatggctgcgccctctccggcgacctcgttggactccagagactacttcgagacaacccttctcttctcaacgagagaaaccctgttatggcacagacaccacttcatgtctctgctggtcacaacaggactgagatagttaaatttcttcttgattggcaaggggcagataaggttgagatggaggccaagaatatgtatggagaaactccattgcacatggcagctaagaatg

SEQ ID NO: 1521 - DNA, 471 bp, Glycine max
gccaatctctaggtgtttctgccagcaccttgacaaatatatttaattgctccagtgctcgctgttggagtagtgatgcttacaacccagttcctgggctgatggaaggggtgccctcgtcaggggattataacggagggtttgcatccaagcttatggcaaaagacttgaatctagcagtagaatcagctaagctggctggatgtaaatacccactaacatcacaagcgcaaaagatatatactgagctctgcagcgttggccatgaagccaaagacttttcatgtgcttttcgccattattactctggaattgacgaacctcatgatcagtaaattaagacgttggttgtatgcataaaactgttgtgatcccatgcctagtatatatggcaagaagatcaattgagctcaatgaagttgtagaaacagttgcaacttattgcaaatagtgagattccgcaagacaagc

SEQ ID NO: 1522 - DNA, 643 bp, Glycine max
gctcaaccgccgtgtcgtcccacgcgtgcgcccacgcgtccgcccacgcgtccgcccacgcgtccgataaaatcaactttcattccgtctcgcccttccttgccctctgccaaattttacattaaattacatgacatggcattacacacaccacaccaccctctctctctatatcacaccctacccctcagattcagacagaaacccaattgcttcttcttttattttcctgtaatccaggaaatgaaattgctagcttaatattgatctgtagagaagacaagggaacttgcttgctatggcaactctgagcaattcaactaatatcttttggcaagattgtcaagtaggaaggcttgaaaggcagaagctacttaaccaaaagggatgtgttgtatggattactggactcagcggatcaggaaaaagcacattggcatgttccctaagcagagaactgcactcaaagggaaagttatcttatgtccttgatggagataaccttcggcatggactaaacaaggatcttggtttcaaagccgaagatcgcgctgaaaatattcgcagaactggagaagtggcaaaactcttcgctgatgctggcttaatatgtgttgctagtctgatatctccttacagaaga

SEQ ID NO: 1523 - DNA, 431 bp, Glycine max
gggtgttgtaactgaaggaacatgaaagggtacaaggtttggaactcaaccttcatacctttcaataataatctctccccaaattaccccttaaccccttcctcctatactgcttcaaactacaccccatccttccaaaaccaaagaccaaaacttaaagctcagaatttcaaaccccacattcttctatgcgcctctctgcccagtccgcaggcaagcagtgcttccacggctcaagctgaggagcaagaggttgaaattgcaaggggttacactatgacacaattttgtgacaaaatgatagatttctttttgaatgaaaaaactatatcaaaagaatggaagaagtacctgatatttagagaggagtggaaaaactacagtgatagatttttaggtaggttgcaaagaagggcagacatggaaaagga

SEQ ID NO: 1524 - DNA, 1716 bp, Glycine max
ctattattttctctttttcattttgtttgtgagcttagcaccacaccagacctcacctatggcaaatccaattctctcctttctcttgttggccctcctctgcatcctcgccttggctcacgccgattcccatttcgaaggctttgaagccgaagacgatgacgacctcgaagactcttccatcgatcccgcctctctccgatcaccgcccctctccgaccctactcccctcaccaccgatcccaccccccaacctcctgcttcagatctccccaaatcccctcccgccaccaccttcgatttctgggacgacgaagaattcgaaggcgtccccgtcgaacaccccgcccccgagcctccctccgatcccaaatcccccgaaaactccaccaccactcaaacccctccaaccctcacccctccgcgctccttcaccgtagagatcgtctgcggaagctttcttattatgttcgcaatcaactacttcactgggaagcgcgagaacgagaacatcgcgctgtcgtgggcggcgcagttcgcggcgaaggattcgatcttcgagaagaatttcagcctcttggggatcggcgacgggggcgaggaggaagcgccactgctgctgaaggaaggccagacgacgttcaagttctacgcgagcgggagaaggtactgccaggggttgctggccactctggagttgaagagcaggcacgatctcatcgccaggatctacaatatgatcgttccctgcagggacgagatcgccttcgaggtctacatgaacgacgacgccatggatcatgtcgttttcgccatggccaagaagaaggccgccaaggccatgcataaggatgtcagggatttgcagaggttcgctacccttctctcgcccctcccactgccactgcctgctgcccgtaagtgggtcgctgatgacctcgctgtcatttctgagtccaaagaggtcgctaatgatttcatcactgatgccgtcattgatcaggtttttggtgagaaagcttttgagaaatttggaaaaggtttaatttcattgcatttctccgaccagcaccctggtatacacaaaaagatattgttgttcaagtttgtgcttccagctgctaaggacatggctgatatgactcgactggtggctcttgttccgtattatattgacttgatcggacgatacaaattaagttctcaggctcggtctaagacagaggctgcgcgacaaaaggctgctgtagaagcacagaaagaactccgaaatgcacagcaagaggccatgcagagaagaaaggcagagaggaaaaagatggtggaggaggctgaggcaaagctcagtgcagaggctattcgaaagaaagaagcaaaagagcgtgctcgtcaaatgaagaaggcaatgccaaggatgaaaatggctcgtggtgcctaattcttgaattgatgattcgtttgccagtagaattgaaggccttccccgcccccagcgtacgttgtattgtagttggccttttgtagaatttacggcaatgtacgttttcagttggcatttcctgctacactagctagataggcgtgaccacgtcttaggcggattttgaatgtaccaaaatttccattttagagacatttatgagctcttgataacaagttaaatctctttattctggcttctatttgacaatgttgtaatcccattttctatttgtc

SEQ ID NO: 1525 - DNA, 377 bp, Glycine max
ccctcgctttcggcaggtttttggtgagaaagcttttgagaaatttggaaaaggtttaatttcattacatttctccgaccagcaccctggtatacacaagaaggtattgttgttcaagtttgtgcttccagctgctaagaacatggctgatatgactcgactggtggctcttgttccgtattacattgacttgatcggacgatacaaattaagttctcaggtgggggagtcatgttgccaagtatgcttggcttgtaatttatgaactttttatacatggtccttaattgatttttgttcataattcaggctcggtctaagacagaggctgcgcgacaaaaggctgttgtagaagcacagaaagaactccgaaatgc

SEQ ID NO: 1526 - DNA, 489 bp, Glycine max
cctttgtcaattattttttctggttgctgagattttttttttggattctctatgtcactttagttgttcttcgaggacagtacccgcaacatacaagctggaaaacgtgtggggcttcacactgtgctggttagtcattggaatctttgttatttagtagaaacttacttgcttctagaaactattattggttgcattttaatttgtccaaatccaccaatgtactattttttttttgtacaatgatcgtactcaggtttggtttgaatctacgatcgcatgtatatttctccaaactacctcatgcatgttattgatggttgtattttaatttgtctaaatccactaatgcatttttttatttagtatacaatgatcgcattgaggtttgaatttaggattacatgtatatttggccaaagtccctgaggcatgttattataggttgcattttaatttgtccaaacccaccaatgtaccaatttgagg

SEQ ID NO: 1527 - DNA, 504 bp, Glycine max
accaggggaatgccaaactaccagaggcacttcctgaagggaaagctttacattcatttctcagtggaatttcctgataccctgagtcttgatcaggtgaaggctttggaggctgttctgccatcaaagccaacatcacagttgtcagacatggagctggatgagtgtgaggagaccacactccatgatgtgaacatggaggaagagacaaggaggaggcaacaagctcagcaggaggcatatgatgaggatgaggatatgcatggtggtgctcagagagtgcagtgcgctcagcagtaatgagccacaggagcgctagagtagacatgtgatgatctcgatcatcttattttttagccgtttgtgcgggtctaaacatatttagtgtttgatatctcagacgattttagcaaccaaacactgtagcattattgtccaagaaattatttcacaagacatcctaatacaattttttgtccttctgatggcattggtgtttctttc

SEQ ID NO: 1528 - DNA, 461 bp, Glycine max
tccttcaataacttataacttagcattgtattgtgttcaaactttgtttcttccataccctcttcttctttggccttaaccgtcatatttggctttgaaatggagttcgaggaccgcttcagacaccaggttcagagaccaaaatatgattgccttctttttgatttagatgacacttagtatcctcgtaaatctggtctggcaaaatcatgtctccaaaatattaaacactacatggttgagaagcttggcatagaccctagcaaaattgatgacctgtccaacctcctttacaagaattatggaactactatggctggtctaagggcaattggatatgactttgactatgatgaatatcatagctttgttcatgggagattaccttatgagaacctaataccagacccagttctgaggaacctgttgctgagcctaccctataggaaacttatcttcac

SEQ ID NO: 1529 - DNA, 1218 bp, Glycine max
cttgcttctttcaacaacttatcattgtattgtcttcaaactttgcttcttccatactttcttctttttccttagccatcattgattgttgcctttcttggctttaaaatggagttcgaggaccgcttcagacaccaggctcagagaccaaaatatgactgccttctttttgatttagatgacactttgtatcccctcaaatctggtcttgcaaaatcatgtctccaaaatattaaagactacatggttgagaagcttggcatacaccctagcaaaattgatgacttgtccaacctcctttacaagaattatggaacaactatggctggtctaagggcaattggatatgactttgactatgatgaatatcacagttttgttcatggaagattaccttatgagaacctaaaaccagaccaagttctgaggaacctgttgctgagcctaccctatagaaaacttatcttcacaaacgcagacaaagttcacgcggcgaaagcgcttaacaggcttggattagaagactgctttgaaggaatcatatgctttgagacccttaatcccatccacaagagcattgtttctgatgatgaagatgatattgagtttgtgggttcaaggaccaccaatccaaccaccacttgtaatggttcaggcacctctcaaatctttgacatcatagggcattttgctcagctcaatcccagtgcagtcttgccaaagacaccaattgtttgcaagccatcagaaaatgccattgaactggccctcaatatacccaatcttaacccacaaagaaactttgttctttgaggacaatacccgcaacatacaaactggaaaacatgtggggctttacactgtgctggttggtccatcacaaagatgtaaaggagcagattatgccttggaaagcattcccaaccttagggaggtctgagcctgaactatgggaggctgatataaaatcagaagttgcataccctggaaagctagttgtgcagacatctgtcactgcttaagattattattaagtgcatgaaattaattaagtcccttcaaaattgttcatttaatcaaaattgaaaatccagccaccaacaacaaaaaaaaaaacgaacaaaagagagaagaagcccgcgggaattcccccaacttcagatgtagcagttgtagttgatgtagatgctttgtaagataacaataaaatagtcattc

SEQ ID NO: 1530 - DNA, 1185 bp, Glycine max
ctcgagccgctcgagccgaaattaatctaatattatagccatataagccaatggtgcatgtgtccatactataaatactcatcattgccttagcttttttcctgccgctcctcctttcatctttcaatacaatattgctctctaagctttgattcttcttaatccacaccctttcccacaccctttcattgtcgtgcgtctggttttctgcctgaactggagtacatgaaccagagaccaaaatatgattgccttctttttgatttagatgatactttgtatccactaagcactggtcttgcaaaagcatgtggccaaaacattataagactatatggccgaaaagcttggcatagagaaaagcaaaattgatgacttgtccaacctcctctacaagaactatggaacaactatggctggtttaagggcaattggatatgactttgactacgatgaatatcacagttttgttcatgggagattaccttatgagaatttgaaaccagacccagctctgaggaacctcttgctgagcctaccctataggagactgatcttcacaaactcagacaaagtccatgcagttaaggcactaagcaggctaggattagaagactgctttgaaggaatcatatgctttgagacccttaatcccatccacaaaagcactgtctctgatgatgaagatgcacattgaatttgtggggggttcaggcacaaccaatccaaccacaaaaaaaagatgctagcagctttcaaatctttgacatcattggccattttgctcaacccaatccccacacagttttgccaaagacaccaattatttgcaaaccatcagaaaatgccatttgagttggccctcaagatagccaaccttaatccacaaagaactttgttctttgaggatagtgtccgcaacacacaacgctggaaaacgtgtgggtactcacactgtgctggttggaaaatctcagagaattaacaggagcagattatgcattagaaagcatccacaaccttagggaggcagtgccagaactatgggaagatgacataaaatcagaagttgcttatcctggcaagcttgctgtggagacatctgtgactgcttagatcattgatgaacaaaaaaataaaataaaaaaataagaaaaagagagagaaagagagaagtcctttgtg

SEQ ID NO: 1531 - DNA, 1125 bp, Glycine max
ggcgtgttaataagggaagatgagacggtagtaggccaagtgttttgcataggccgtgactgatcatcagaggcaatggcgagcaggtactgggcagtgtctcttcccgtccacaactcggcatcatctcagctctggaaccaattgcaggaacgaatctccaagcattccttcgacacacctctctacagattcaacattcccaacctccgcgtcggaaccctagactctctcctctccctcagcgatgacctcgccaagtccaacaattctcgtcgaaggtagtcatgcgcacaagatcaggcgccagattgaggagctcgagagagtttccggcatcgacagcggcgccctcaccgtcgatggcgtccccgtcgattcctacttgaccaggtttgtttgggatgaggcaaagtacccgaccatgtcgcctttgaaggagatcgtggatggtattcacagtcaagtggcaaagatcgaggatgatctcaaggttcgtgtttctgagtataacaatatccgcagtcagcttaatgctatcaaccgaaagcaaactggaagcttagcagtccgtgatctttccaacttggtaaaacctgaggacattgtaacttcagaaaatttaactaccctccttgcaattgtttccaagtattcacagaaggattggctctcaagctatgaaacattgataaattatgtggtccccaggtcttctaagaagttgtatgaggataacgaatatgctctttatactgtaacactcttcagtcgtgttgcggataattttagaactagtgcacgtgaaaaagggttccaaattcgtgactttgaatacagtccagaaacacatgagaaccgaaagcaggagttagataaattggtacaagatcaggaaagattgagggcttctctgttgcaatggtgctataccagctatggagaggttttcagttcctggatgcacttttgtgctgtgcgtttatttgctgagagcattctgagatatggtctgccaccatctttcttggcatgtgttttagctccttctgtaaaatccgagaagaaagtacgttctatccttgaagggttgactgatagcacaaacagtgcatactggaagac

SEQ ID NO: 1532 - DNA, 1563 bp, Glycine max
gagtgaattagaatccaccttggcctagccagctagcgcttcttctctcgacattccgtggagatctagtgcttctgctgcaagacctggctggggattagggtttcgattcggaggtagactaagatgttcggaaggcgctccgaagaaaagcgacagtaccaggtactacgacatcctcggcagtttccaagaacgcttcgccggatgacttaaagaaggcttacaagaacagccgccattaagaaccatcctgacaaaggcggggatcccgagaagtttaaagagcttgctcaagcctatgaggttctgagtgaccctgagaagcgcgagatttatgatacatatggagaagatgctcttaaggaaggaatgggtggctggctggcggtggccatgatccatttgatatcttcagttcattctttggtggaagtccgtttgggtcaggtggtagcagtagaggacggaggcagaggcggggagaagatgtggttcatcccctgaaggtctctctggaggatctttacctcggaacttcaaagaaactctctctttcacgaaacgtgttgtgctcaaaatgcaatgggaagggctcacagtctggggcttcaatgacctgtgctggttgccagggtactggcatgaaggtgtctattaggcaccttggtccttctatgattcagcagatgcagcatccttgcaatgagtgtaagggtactggagagacaatcaatgacagagacaggtgccaacagtgcaaaggagagaaagttgttcaggagaagaaagtacttgaagttgttgtggagaagggaatgcagaatggacagaagattacattccctggtgaagctgatgaagcacctgatacagtcactggggatattgtctttgtcctacagcagaaggaacacccaaagttccaaacgaaaggccgatgacctttttgtagaacacacattgtctcttactgaggcactgtgtggcttccagtttgtgctggctcacttggatggccggcagcttcttatcaaatctaaccctggggaggttgttaagcctgattcatacaaggcaataaatgatgagggaatgccaaactaccagaggcacttcctgaagggaaagctttacattcatttctcagtggaatttcctgataccctgagtcttgatcaggtgaaggctttggagactactctgccactaaagcctacatcgcagttgacagacatggagctggatgagtgtgaggagaccacactccatgatgtgaacatggaggaagagataaggaggaggcaacaagctcagcaggaggcatatgaggaggatgaggatatgcatggtggtgctcaaagagtgcagtgcgctcagcagtaatcagagcctgtaatgtcatttgatgatctcgattatgctattttttacccgcttgtgcgggactaaacataattagtgtttgatcaaaatgattttgacaagcaaacactgtagaatttattgtccaagaaattccctcgcaaaagacatcttaagtaccattttaatttttcttat

SEQ ID NO: 1533 - DNA, 1650 bp, Glycine max
aagctcggaattcggctctagctcgagttgttttagccgctcgagccgttctaggcccgacttaaccaccacaccacggtctctgctattcttctacctttcaagtttttaaagtattaagatggcagagacattcctaattaacctcagagtcagtgaacgagggacaccctgacaagctctgcgaccacgatctccgatgccgtcctcgacgcttgcctctgaacaggtaccagacagcaaggttgcctgcgaaagcatgcactaacaccaacttggtcatcgccttcggagagatcaccacccaggcccaacgttgactacgagaagatcgtgcgtgacacctgcaggaacatcggcttcgtctcaaacgatgtgggacttgatgctgacaactgcaaggtccttgtaaacattgagcagcagagccctgatattgcccagggtgtgcacgggccaccttaccaaaagacccgaggaaatcggtgctggagaccagggtcacatgtttggctatgccacggacgagaccccagaattgatgccattgagtcatgttcttgcaactaaactcggtgctcgtctcaccgaggttcgcaagaacggaacctgcccatggttgaggcctgatgggaagacccaagtgactgttgagtattacaatgacaacggtgccatggttccagttcgtagaccacactgtgcttatctccacccaacatgatgagtctgtgaccaacgacgaaattgcagctgacctcaaggagcatgacgatcaagccggtgatgccggagaagtaccttgatgagaagaccattttccacttgaacccctctggccgttttgtcgattggaggtcctcaaggtgatgctcgtctcaccggacgcaaggtcatcggtcatacttaaggaggcgggggtgctcatggtggtggtgccttctccgggaaggatcccaacaaggttggtaaggagtggtgcttacattgtgagacaggctgctaagagcattgtggcaagtggactagccagaaggtgcattgtgcaagtgtcttatgccattggtgtgcccgagcctttgtctgtctttgttgacacctatggcaccgggaagatccatgataaggagattctcaacattgtgaaggagaactttgatttcaggcacggtatgatctccatcaaccttgatctcaagaggggtgggaataacaggttcttgaagactgctgcatatggacacttcggcagagaggaccctgactttacattggaagtgggtaaagcccctcaatgtgtcataagacctaagaccattcattccaccgttctttgctggtagttttttgagcgttgccccttataatgtctattatttgtttcatgtcacttacttactccgtgtgtgcttctcctcctcccccccttctattttgtttctcatgcctttcatttgtaattttttacatgatcaactaaaaaatgtactctctgttttccgaccattgtgtctcttaatatcagtatcaaaaagaatgttccaagttaaaaaaaaaaaaaaaaaaaaaaaaaaaaaaaaaaaaaaaaaaacaaaaagaaaaaaaatgaatttaagcacctaattgggctgtaaagtgaattggtttcag

SEQ ID NO: 1534 - DNA, 2349 bp, Glycine max
cttgagatctcatatatcatggctacctccatggtgaagcttatgcttttctctgctctcatactcttgtccgtggcaagcagttgtgtctgtaacaccaccggattttcaacatccactagaccccttaaccaaacaagagataagtcttgtccaaaccatagtccaaaacaagtacccaagctcaagtaacaggttgagcttccactacattggactcacacgaacctgaaaaggatgccatcctcaaatgggaatccatcaaaccaactgttataacgtgtacctcgcaaagccttggccattggtataatcaacagacaaacccacgagatcttaatctgatctaaaggcaaggcgaattgtcctcggacaatattcactccgggaatggcttccctaccctttccgttgatgaacaagtcgttgccatagagctgccactgaaatacggagctcctcattgagtcagtgaacaagagagggcggaacctgcgctgatgtggtgtgttccacattcacaatgggcatagtttggagaaaccaaggacagaaggacagtgagagtggaatgcttcatgagaggaaagcagccccaatatctgggtgaggcctatcagtggactgcacaatggtggttgaccttgaactcatgaagatcgttcagtatcacgacggtggcattataccagtaacaacttgccgacaacactgaatacctgtttttcacatcagaacccaccattcggtccaagacaacatagtctagcaacccatcaaccacagggtccaggcttccaaatcaacggacacagtattagttgggccaactggaagttccatattggatttgatccacgtgccggaattgtaatatcactggcatccatctacgacatcggcaacgcacaaatctcgtagagtgttatacaaaggttacatttctgagctgtttgtgccataccaagacccaacagattgattttaataataggacttcctttgatgctggagagtttgggtttggtctctccacggtctcattggtgcccaaccgtgattgcccatcgaatgctcagttcctagatacatatgttcacgctgctgatcgtactccgttactcatcaagaacgcaatctgtgtctttgaacaatatggcagcatcatgtgggcgtcacaccgaaacaggcattcccaatgaatcgttcgaagaaacgagaacggaagtcaacttagtggtaagaactgttgtttaccgtggggcaactacgataacatcattgattgggagtttaaaacaagtggctcaatcaaaccctcgattgctctctcgggtatattggaaattaagggagtggatattaagcacaagagtgagatcaagagcgatcaacatggtatcttggtgtcggcaaacagcattggtgtttaccacgaccacttctacatttaccatcttgaccttgacatttgatggtgttgccaactcttttgagaagacaagtttgaagactgtaagagtgacagatgcgagttcgaagaggaaaagctattggacaactgaggttgaagctgccaagactgaaaatgatgcaaagataatacttgggttgagccctggtgagctttcagtggtgaatcctaacaagaaaacctctgttgggcatgatgtgggataccgtttgattccagcaatcccagctcatcctcttctcacagatgacgattatccacaaatacgtggcgcttttaccaatttcaatggtgtgggtcactccatacaataggactgagaagtgggctgttggactctacgttgatcacagccatggagatgatactttagccgtttggaccaaaaagaatagagacattaacaacaaggacattgtgctgtggcacgttgtgggaattcatcatgttccagcaccgggagactttccccataatgccattattgagcactgcattcgagctcaggccaaccaatttcttcgagaggaatccggttcttaaaacactttctcccccggatgtccaatggcctggttgccccaagtaaaactagctagccagccatttccattatattagtgtgcttcgagtgctacaactagatgtgttccttggataatgtgaaatgcgatctgcttattgcatgtgcaagaataatgatttgatatgtcttcgcttattattatatcaatgagaagtttacttgagacttgacaccgacaaactccgcgtcggaaacctaagatctctcctctccctcagcgatggcccgccaagtccaacaatttcgtcgcaggagtcacgcacaagatcaggcgccagattgaggagct

SEQ ID NO: 1535 - DNA, 1746 bp, Glycine max
gcagacttaacaacagcacaaagcgggttactgtctgttcaagctaccatctctctctctcttgtcttcagtgccctccttgccaagtgctgccactctctctttctctctcttcatccttctgttgggttggttgtggagtgttgttttctgttgtgcacgtgttgtcattttttgacccttcgccgacagatctgaagtgcttcaagatttggattttagtgtgcatctggaagttaaaatggcccaagaaactttcctattcacatctgaatcagtgaacgaggggcaccctggacaagctctgtgaccagatctccgatgctgtgctcgatgcatgcttggagcaggacccagtacagcaaggcagttcgtgtaaccagtaccaagaccaacatggtgatggttttcggagagatcacaaccaaggccaacgtggaactatgagaagattgtgcgtgacacatgcaggaacattggttttgtctctgatgatgttggtcttgatgctgacaactgcaaggtcctcgtcaacattgagcaacacgagtcctgatattgctcaaggtgtgcacggtccacctcacagaagagtgcctgaggagaaattggtgctggtgacacaaggtcatagtgttcggctatgccacttgacgagagctcccgagctcatgcccttgagccatgtcctctgccacgaagctcggtgccaagctcaccgaggtttggaagaacaggaacatgcccttggctgagacctgatggcaagacccaaggcactgttgatgtactacaatgacaagaggtggccatggtatccatatgcgcgtccacactgtgctcatctacacacagcatgatgagactgccacaaatgatgagattgcagctgatcttaaagaatcacgtgattaagcctgtgattcctgagaaggtcccttgatgagaagaccattttccatttgaacccttctggcaggtttgtcattggagggccgcatggcgaatgctggtctcaccggccgcaagatcatcatcgacacctatggaggatggggtgcacatggttggtggtgccttctctgggaaggatcctaccaaggttgatagggagtggtgcctacattgtgaggcaagctgcaaagagcattgttgcaaatggacttgctaggagggcaattgtgcaagtttcctatgccattggtgtgcgctgagcccttgtctgtgtttgttgacactgatggcactgggaagatccctgacaaggaaatcctcagcattgtgaaggagagttttgacttcaggtctggcatgatctccatcgaccttgagctcaagaggggtggaaatggcagggtttcttgaagactgctgcatatggacaatttgggcagagtatgaccctgaatttcacatggggaagtggttgaagccactcaagggggagaaggtacctgtttaactaaaaggggttccaacactcttggcaagggacttttgcactacaactggcttcttattatctgattgctaaaattttctctatgtttccttccctcttactcaaatctgtttttttttttttctgtatttttttatgaatttcccccttttttttgtgaacttggattgagacccatcagaacatatatattttgtatgatgaaacaaaaaaaaatgttctctcaagatttatgctagaaatatgtaacaatctcaaattatagagagtatacaatttttctt

SEQ ID NO: 1536 - DNA, 1829 bp, Glycine max
  unsure (1)..(1829): unsure at all n locations
ggaataacaggttcttgaagactgctgcatatggacacttcggcagagaggaccctgacttcacatgggaagtggtcaagcccctcaagtgggagaaggcctatagccatctcgagccgctcgagccggtaaatagtaaatataaataccaacgctggagtgatggtagtttaaggcggtgttactccttctctcgttgattcggatctagagtctttttttcactcttcagttctcgttgttgttcttcgctttcctgaaactagggttttcagatttcgattctttcgttacatccacacaagatctttcggagggcaccgaagaagtagcgataatacgaggtatcacgaaatcctcggcgtctccaagaacgcttcgacaggatgatctgaaaaaaggcttacaagaaagccgccatttaagaatcacccttgacaatggcggtgatcccgagaagtttaaagagctggcgcaagctctatgaggttctgagtgaccctgagaagcgtgagatatatgatcagtatggtgaaagatgcgcttaaggaaggaatggggtggtggccggtgggccatgatccatttgatatcttttcatctttcttttggcggtggggagttcctttggatcaggtggaagtagtctaggtaggtaggcattaagcactcgataagacgtggttcaccctactcaaggtctctttggaggacctttatcttggaacttccaagaagctctccctttctagaaatgttatatgctccaagtgcagggggaagggttctaagtctggtgcttcgatcaccccgtgctggttgtcaaggaactggtatgagacgtttctataagacatgcttggcccgtccatgtttcagcagatgcagcatgcttgcaatgaatgtaaaggtacttggataaactattaatgacagatatcgcttcccacattgcaagggagaaaaggttgtgcacgataaaaaagtcctttgagctattgtggaaaacggaatgcataacgggcataacattacatttccttgctaaacttattaaactccatacacaattactggggatattgtctttgtccttcagcataagtgaacaatccaaattcaaaaaaaagggctgaagatcttttggtagagcacattttgtcccttactgaagccttatgtggcttcgcaatttgtgctgactcacttggatagccgtcagcttcttattaaatcaaatccccggngaagttgtgaagcctgattcatacaaggctataaatgatgagggaatgcccatgtatcagaggccattcatgaaaagggaaactttacattcacttcactgtggatgtttccagatcctctaaaccctgatcaagttaaggccttggaggctgttctgccaccaaagccttctttcacaattgacagacatggagctggatgaatgtgaggaaactacactccatgatgtcaacatggaggaggagactaggaggaagcagcaacaagctcaggaggcatatgatgaggatgatgacatgcctggtggtgcacagagggtacagtgcgcccagcagtaatgactttgtgtggaagctagattcagaattgatgaaaatgatgatatgatgataatactgttgatgtttccgtaaccgtagtgtgtgtggactaaagataagtagtgtttgatcaaatgattgtgagaaagtgaacagtgtattgcttgcttttttatgattgtcgaagggataatttccgatctgacgtcctaaatactttactatatttcgttgttctttttaatcatctccgttttggtt

SEQ ID NO: 1537 - DNA, 1820 bp, Glycine max
ccgactcctttgaaatctaacggcgacacctcaggttccggtgtccggtcatgtggggattgatgactataaatagcgagacagcgtcctttgctgattcccacatcacagcaaaggagtgatttggagtttggagcgactgaactaatcattaatttgcactcgctgtttcagcttcatcacccttcttttgcatcatttatatctcttgagaaatggcacaagaaacctttctattcacatcttgaatctgtaaacgagggtcagccccgacaagctgtgcgaccagatctctgatgcagtgcttgatgcgtgccttgaacaggaccctgacagcaaggttgcctgtgcagacatgcaccaagaccaacatggtacatggtcttcggagagatcacaaccaaggccaacgtagactatgaaaagattgttccgtgacaccatgccgcgaaattgagattcatctctgatgatgttggtcttgatgctgacaaatgcaaggtgtctggtcaacattgagcaacagagcccggtatatcgcccagggtgtgcacggccacttcaccaagcgcccagaggagggttggtggctggtgaccagagacacatgtttggctatcgccactgatgaaacccctgagtacatgcccctcagccatgtccttgcaaccaaactcggtgctcgcctcaccgaggttagggagaattggcacctgtgcttggttgaggcaagatggtaagacacatgtaaccgtcgagtactacaatgacaatggtgccatggttccagttcgtgtccacactgtcctaaattccacccaacatgatgagactgtgagcaatgatcaaattgctgcggaccttaaagagcatgttatcaagcctagtcattcctgagaagtacctggatgagaagaccatcttccaccttaacccttcagcgccgttttgtcattggtggccctcatggtgatgctggtctcactggaagaaagatcactcattgatacctatggtgggtggggacctcatggtggtaggtgccttttcagggaagagaccctaccaaggttgacagaagtggtgcctatatcgtgaggcaggctgcaaagagtgttgtggcaaatggccttgcccaaaaggtgccatggtccaggtttctaatgccattggtgtccctgagcccttgtcagtgtttgtggacacttattgaaactggaaaaattcttgccaaggaaatcctcaaaattgtaaaggaaattttcaacttaaaacttgaattgatcaccattaacttggacctctaagacgggtggccataggttcctcaagacagctgcttatggacactttggaaagggatgatgcagacttcacctgggaagttgtgaagccactcaagtcagaaaaagcctaaagctaaagagtcgtgttaagtcaatcactcccttcacaggatgtctagctgggtgtggatgaataatttgcgtgtatcatgactacttctaactactactactactccattcaatgtctaatgccatctcatcaattcctaaactgttttttttttttccttttctccttttactcacaatttattttttggttatgcaatgttaccgttttgatgcaatggaaattttatcaaaattttgtaccaattgattgcattttgagagggtgaaaaaggtctctgcaatgtattctttaacgaaattgaaaaattgtttcctttgatcctcccaagcaaaccgacattgaccttggggaggagttcaagttcaactcagttgcgcaggtcacattgaccggtttga

SEQ ID NO: 1538 - DNA, 1632 bp, Glycine max
aatgacaccacctacccccttctccctataaatggcaactcaatgccccccttagaactcgcagcgcttgatttgaggccaggcaagccccactcaaccaccacacctctcctcgttcacgcacatccctttctgctcttcttcacacctttcaagtttttggaagtatagaaaatggcacgagacagttcctatttaccttcagagtcaggtgaacgaggggacacttctgacaaggctcttgtgaccaaatctctgatgctgtcctcgagcgcttgcctcgaacaggacccagacagcaggagttgcctgcgacacatgcgagcaaaaccaactttggtcatggtcttcggagaaatcacgaccaaggccaaacgttgacttacgagaagataatgggttgaaaccggcaggaacattcggcttcgtctcaaatagatgtgggactgggatgccgaccacctgcaagggtcctcgtcaacattgagcagcagagccctgatattgctcagggtgtacacgggcacccttaccaaaaaacctgaagaaattggtgctggtgaccagggtcacatgtttggctatgccactgatgaaacccctgaattgatgccattgagccatgttcttgcaacaaaactcggtgctcgtctcaccgaggttcgcaagaacggtacctggcctttggctgagtgcctgatgggatagacgcaagtgacccgttgatgtatacaatgacaatggtgccagggttcctattcgtgtacacaccgtgctaatctccacccaacacgacgagcactgtcaccaatgacgaaattgctgctgacctcaaagagcatgtgatcaagcctgtgatcccagagaagtaccttgatgagaagaccattttccacttgaacccttcaggccgttttgtcattggtggccctcatgggcatgctgatttaaccggttcgcaagatcattagcgatacttatggaggatggggtgctcatggtggtggtgctttctccgggaaggacccctaccaatgttgataggagtggtgcttacattgtgagacaagctgctaagagcattgcggcaagtggacttgccagaaggtgcattgtgcaagtgtcttatgccattggtgtgcctgagcctttgtctgtgtttgttgacacctatggacactgggaagatccatgataaggagattctcaacattgtgaaggaaaactttgatttcaggcctggtatgatctccatcaaccttgatctcaagaggggtggaaataacaggtttttgaagactgctgcctatggacactttggaagagaagaccctgacttcacatgggaagtggtcaaacccctcaagtgggagaaggcctaaggccattcattcctcaccgctgtgtgctgggagttttttgagctttgcccttataatatgtttaatatccataactttccacgtctcttactctgtgtgtttctctcctcttcctcctattttgttatttgtatgttctttggtaattttttacgggatccccctaaaaacatgtactctctgtttgtatgtatgccccaccaatgtgtcttttaatatcaatatcaaaaagagagtgttcaagttaatg

SEQ ID NO: 1539 - DNA, 581 bp, Glycine max
cttacgtttggcagctgctttgtatgtgttgcggtgctcagcctcagcctcagcctcaggcagcaccgtttatgaggttcccattttggaattcagttcatccaaagaatccaacaagtgtagtaagggtgcaagcagaagcagcagatatgaatatgaattcaatcccacacgtgctgagtgttgctgggtctgattctgggggtggtgctggaatccaagctgatcttaagacttgtgcggctcgccgtgtctactgttccactgtcattactgctgttactgctcagaacactgctggggttcaaggactcaacattctacctgaggattttgtggcagaccagttgcactctgtgctctctgatatgcatgttcatgtcgtcaaaacaggcatgctgccctctcttaatatagtcaaggtcctttgtcagacccttaggaaatttcccatcaaagctcttgtggttgatcctgtcatgatatctaccagtggggatgtacttgttggtccttccgttcttgctggatttctggaggagctgcttcccatgactgacattgtaaccccaaatataaaa

SEQ ID NO: 1540 - DNA, 1812 bp, Glycine max
tacgaactcgcaagcgcagcaatgaaagcaataagtccctccttcctctgccttataattcttgtgacccttttggctggtagcattgaaagtgcaccagcaaacgtgaagccaagccattatgctgcacccttcaataggagtgtttttccttctggttttctatttggaataggctctgcagcttaccagatagaaggagcagcagctatagatggcagaggaccaagtatatgggacacctatactaaacagcaaccagggaagatttgggatcatagtgatggaagtctagcaattgatttttatcaccggtacaagagcgacataaagatggtgaaagaagttgggttggattcatacagattttccatctcatggtccagaatattccccaagggcaagggagcagttaacaccttgggggtcaagttctacaacgatctcattaatgagattatagcaaatggcttaaagccatttgtcacgctgtttcattgggacctcccacaagctcttgaagatgaatatgggggatttctcaaacctgaaatagtggaggacttccgtaactatgctgacttttgcttcaagacatttggtgatcgggtgaagcactgggtaaccctaaatgaaccatatggctacagcgtgaatggctacagtggtggaaattttgcaccaggtagatgttctaactacgttggaaaatgccctgctggtgattcttccaccgagccctacattgttaaccaccacttaatacttgctcatggagcagcagtcaattgctacaagaacaaataccaggctcatcagaaaggacaaattggagtcaccatagtgactttcttctttgaaccaaaatctaatagtgatgctgatcgcaaggcagcaaggcgagctctggactttatgtttggctggtttgctaatcccattacatttggtgactatcctgagagtatgagatctttagttggttctagactccccacattcaccaaagctcaatctgaaagtctcaaaggttcatatgattttcttggtataaattattacacctcaaatttcgtggaatatgctccaccaaccaccactaacaagacctatttcactgatatgctagccaaactttcttcgaccaggaatggtgtacccattggcacaccgactcctctgagctggctctttatctatccggagggaatttataagctcatgacatacataagggacaactacaataatccaccagtgtacattaccgaaaatggcgttgcggaatcaaagaatgactcacttgcaatcaatgaagcccgaaaggatggtattcgaattagataccatgatggccatctcaaatccctgcttcatgcgatcaaagatagagttaatgtgaagggctactatatatggtcattttcagatagctttgaatgggatgctggttacacagctcgatttggcatcatatatgtggattacaagaacaatttgagtagataccctaagtcctctgcgttttggctgaaaaaattccttctcaagtgatctaaatctattgttcctttggcatgcatgcccagtttttcttcttgtttgtttcctggatatcacagacatgcagtgtgtatcacttgctcttcgattcggatcaatgtaatcaagtcatcgttgatatcaaataaataatggcatgccagagaatggaataaattatcttttcaacaatgtgttcgagttgttgcatcaatgcctatatatatttaataattaaaaaaaaaaatatatttattttttttttttttt

SEQ ID NO: 1541 - DNA, 350 bp, Glycine max
ctcgagccgtattattttaacatcacacaagttttgtaaaatatttgctttatttgttgtcatttaaatgtaccatatatatatatataggctcatcagaaaggacaaattggagtcaccatagtgactttcttctttgaaccacaatctaatagtgatgctgatcgcaaggcagcaaggcgagctctggactttatgtttggctggtttgctaatcccatcacatttggtgactatcctgagcagtatgaggtcctttagttgcgttctagactccccaccattcaccaaaagatcaaatgaaccttttaggccttcaaattgaacggacgggttggtccgccccggta

SEQ ID NO: 1542 - DNA, 357 bp, Glycine max
ttctcgagccgattcggctcgagcttaaaaccatttgtcacgctgttacattgggacctcccacaagctcttgaagatgaatatacggggatttctcaaacctgaaatagtgtaaataaatactcaattatatatgattcactatagtatttttaaataatgaaaaagaaaatatagtaaatgtttatggaaaaataaaaatagggaggacttccgtaactatgctgacttttgcttcaagacatttggtgatcgggtgaagcactgggtaaccctaaatgaaccatatggctacagcgtgaatggctacagtcgtggaaagtttgcaccaggtagatgttctaactacgtttggaa

SEQ ID NO: 1543 - DNA, 669 bp, Glycine max
gaaaaaacatggaccatgcgtactacctttcctgaatatgtcgttgctcttgccactattgttggatctgtgctttttgctatatttggtggtgttggtattgcctgtcttccattgggacttatattttcattctttcggcgtccaaaggctgttatcactcgttcacagtatatcaaggaagccactgaactgggtaaaaaagcaagagaactaaagaaagcagctgaggcacttcatcaggaagaaagaagtggttcaaagggtagaaagtttcgtaaaaatgtgaaggaagttgagaaggagttgtttcaattagaagaagatgtaaagcttcttgaagagatgtatccacaaggggaaaaggctgagacaacatgggcactaacagttcttggttacctggcaaaatttgttttgggaattttagggttgattgtttcagtggcgtgggtcactcatataattatctacctattaattgatcctccactttctcctttcttgaatgaagttttcattaagctagatgatgtctggggtcttcttggcactgctgcatttgcatttttctgcttctaccttctccttgctgtgattgctggtgccatgatgcttggactgagactagtattcattactatactcccatgaagtggggaggaatct

SEQ ID NO: 1544 - DNA, 766 bp, Glycine max
ctttcgcgtccggtttgggatgcgaaaagaaaaggttggggtagaagggactgaatccagtggtagatgaggtgaaatgagagcattggtgagagttgagagagagtgagttatgttatcaatgttatggtgaaagtgaaaccacaagcaaagctgaaagagaagctattcagtgattttgattcagatcgtgtctgtgtctacaaccatgtacagcggctccagcgacggcgaaagccatgacgctcctcaaaatcagaggaaaattccgcctgcatcctccatgctatgggtccgcaatcttcgccgtttcatcggatccggcgccggtctcggatccgaagccctgatggagcttgaaactaagagaattttgctcgacatttttaaggaaaagcagaagaaaaccgccgaagctgctacaattcccactttctacaagaagaaacctgaagatggatcaatcagtcatagagttcagagattggcaaagtatcgctttctaaggaaacaatccgatcttttgctgaatgctgatgatttggatgcaatgtgggtgtgcttaagagagaactgcgtcattgatgatgctactggtgcagaaaagatgaattatgaagacttttgccacattgcctctgtatgtacagaacaaataggtcctaaatgccggcggtttttcagtccttcaaactttatgaagtttgagaaagatgagcagggaagaattgccattctacccttttacctttatgtgatgcgaacg

SEQ ID NO: 1545 - DNA, 545 bp, Glycine max
  unsure (1)..(545): unsure at all n locations
atgaaagaaaaaaaataatagtactgtaattacggtgcgaggcgaaaagaaaagaaaaggtggggtaaaagggatccaatccagtggtagatgagatgaggtgaaatgagactggatcatagcattgatgatagttgagagtgagtgagttaatatgttatcattgttatggtgaaagtgaaaccaaacaccgaagctgttgagtgattttcattgatccagatcgtgtctgttctacgtacgatgtacagcggctccagcgacggcgaaagccatgacgcccctcagagtcagaggaaaattccgccggcatcctccatgctttgggtccgcaatcttcgccgtttcatcggatccggcgccggcctcggatccgaagccttgatggagcttgaaactaagagaattttgctcgacatttttaaggaaaagcagaagaaaaccgccgaagctgctacaattcccactttctacaagaagaaacctgaagatggatcaatcagtcatagagttcagagattggcanagtatcgctttctaaggaa

SEQ ID NO: 1546 - DNA, 819 bp, Glycine max
caacatttcacgcttcctctgtttgctcgcacacgtcgtttttttctttttgttgcttcggagccaactcaacaacaacgccgtgcctaatccttaagaataacgaattacaacaaccaaccatgttgcattgtctcaacacttcctgttcggacatcacagtcttggaaagacaacgggaagcaaccatcaagtgccagaaccaccaaccaccctacttaacggactttaacgccgtcttcccttcttcttcttcttcttcttcttcttcctcttcttcttctcatagtcagggcttgctcatgatgtgctcggattcctcgctcggccaggtcctaactcactccgtcaaacccgatccgggcgtctggcccgaattcggttttctacccgccatttcgagaacttgtagcagagacggagacttggtttcgcccaaggaaaacatggccagtgggaaagaaaatgctaagaagagaaagcctcagaactccaaggttgttgcggagattgataataacaaggacaaggacaagagagtcaaagtaactggcgaggaaggagaatccaaagtaaccgagcaccataccagaaacaagaatgccaaatccaacgcaaataagaacaacagagaaacctctgcggacacttccaaaggctccgaggttcaaaatcagaaaccagactacattcatgtccgagcgcgtcgtggacaagccacggatagtcatagcttagctgaaagagtaaggagggagaagattagcgagagaatgaagtatttgcaagatttaataccgggttgcaacaaagttgcag

SEQ ID NO: 1547 - DNA, 564 bp, Glycine max
caatgatattccacatcctctgacgtcaacgttacctcaaaaccgttgcgtcgtctttattccgtcaaacccaacgccgcccgataaaccacctctccgttctcctctcccccaaaattcaaattccaaatacctaagattcgctaaaatcccttccccgtcgccacatcgcatgaacccttgaattccgattcggataggcatgtccggagcggccttgtcgccgccgacgaattcgaagtcgctgacgcagacggtgagcgggtcgcacaagttcgtgatcgagggctattcgctggcgaaggggatgggagtggggaagcacattgcaagcgacgtgttcaccgtcggaggtttccactgggcgatctacttctaccccgacggcaagaatcccgaggacaattccgcctacgtctccgtcttcatcgccttggccagcgaaggcaccgacgtcagggccctcttcgagctcacgctcctcgaccagagcggccaggggaaacacaaggtccacagccattttgatcgctccctcgagaccggtccctacacgctcaagta

SEQ ID NO: 1548 - DNA, 406 bp, Glycine max
cccacgcgtccgctccacccaacaaaccacctctccttcctctcccccagagtttgtgagcgaaggtcaaattccacattcctcagattcgcaaaaatccctttctgcgtcgtcgcattgtatgagcctcgaattccgatcccgattggcatggccggagcggcgttatcgccgccgacgagttcgaagtcggtgacgcagacggtgaacgggtcgcacaagttcgtgatcgagggatactccctggcgaaagggatgggagcggggaagcacattgcgagcgacgtgttcacggtgggagggttccactgggcgatctacttctaccccgatggcaagaatcccgaggacaattccgcctacgtctccgtcttcatcgcgttggcgagcgaaggcaccgacgtca

SEQ ID NO: 1549 - DNA, 729 bp, Glycine max
gaagcttctttcttcttcgccaattcagatcgcagacagacacagagagtgagagagggagatggggagcgacagcgatggcagagaagtcggtgcagaaagagaaggagaagaagaagatgttggccctggctcccattgctaaacctcttgctgggaagaagctttgcaagcgaaccctaaaacttgttcgtagagctgccgaacacaaatgcttgaaaagaggagtgaaggaggtcgttaaaagtataaggagaggtcataaaggattgtgtgtgattgctgggaacatatcaccgattgatgtcatcactcatgttcctattctttgtgaagagtctgacattccttatatttatgtcccatctaaagaagatcttgcaggcgcaggagcaacaaagaggcctacttgctgtgttctggtacagacaaagcctgcaaagggtgaaatagagcaaggggaacaagagaaactaaagtcagattatgatcaagttgtagcggaagttactgagcttacaacttcactcttttgaaacaagcacacatgtatctgtacagtgtgctccagctgaattaacattggcagcaacctgggcctatatgttgtaatttttattcagagagcaaagaaccaaatgaggtgccatgaactagttatttagtgtataactcacaatgcagacaagcaagttggcgaagaaattttgcaccatcattttgtcaaaa

SEQ ID NO: 1550 - DNA, 424 bp, Glycine max
agtgataaacatttgataagtcacgcgcggcgccatagcgtgtgatcctaaattaaaccctagctagaggagagggtttaaagctctgaagcttctttcttcttctccaattaagatcgcagagagagatggggagtgacagcgaggcagagaaggagaagaagaagatgcttgcgctcgctcccattgctaaaccccttgccggaaagaagctttgcaagcgaaccctaaaacttgttcgtagagctgccgaacacaaatgcctgaaaagaggagtgaaggaggttgttaaaagcataaggagaggtcataaaggattgtgtgtgattgctgggaacatatcgccgattgatgtcatcactcatcttcctattctctgtgaagactctgacattccttatatttatgtcccatcgaaagaaga

SEQ ID NO: 1551 - DNA, 401 bp, Glycine max
ggtagactcgaatcctaaaaaattaaaccctagctagagagagagagagagagggtttaaagcttctttctggcgcaacgcaattcatagcaaaaacagagagtgagagagggagatggggagcgacagcgaggcagagaagtcggtgcagaaagagaaggagaagaagaagatgttggccctggctcccattgctaaacctcttgctgggaagaagctttgcaagcgaaccctaaaacttgttcgtagagctgccgaacacaaatgcttgaaaagaggagtgaaggaggtcgttaaaagtataaggagaggtcataaaggattgtgtgtgattgctgggaacatatcaccgattgatgtcgtcactcatgttcctattctttgtgaagagtctgacattc

SEQ ID NO: 1552 - DNA, 423 bp, Glycine max
cagatatgatgtttcatgaggatgaagaatttgaaagccagtgtgctaaggagatccaaagaagaaaagaagttgaagaacaattggcaagggaaaagcaagaagtacagaaaatgaagaatcagcgagatgaaatacttgaagaattgcaaatggtccaagaccaaaattcagcacttatgaaccaaatttctgagtcccagtgtacggaaacagagttggaggagaagatcatatcagctgtggacctcttgataagtttcagggaacagagagataggcttaggatagagcatgcaaatgcacttagggaagtcaaagtgctgagaagatttggggaagcaggtacttccttctcgtatcgggtagaattccctgcattttcttttgtggagatcaatgaggcaacatgattttgatcca

SEQ ID NO: 1553 - DNA, 451 bp, Glycine max
ctttttcatttcacagatcagagaggagcagcagcggaaagagcagaggaagaacaaaggagaagagaaaaaatggtgggtaatgaaatagtagtaccaatggacgacaaagcgaagaggatgcgagatctgctatccagtttctactccctagacccttccatctccaacaccacctccaaacacgcttctctcgacgacatcaattccacctccttcgatcccgatcagtacatgaacattctggcacacaagtccaatttggaaggccttctacaacgccacgttgcaatggctgctgaaatcaagaatctcgacaccgacttgcaaatgctagtttacgagaattacaacaagttcatcagtgccacagacactataaagaggatgaaaagtaacatttcggggatggagacgaatatggagcagcttcttgagaaggtaaccgtag

SEQ ID NO: 1554 - DNA, 4877 bp, Glycine max
agagcatgaccgcccatgcgcgccgtccgtaagctcggaattcggttcgagataaaatttttttcattctaatcatacactatagggcggtggagataaaatatttgaaacacactaaatgaaattttgtaaaaggtactatagggggggttacagaagttcctataaaaatgggaaatgccctacctttgagtgcggtttgaactattgatttacgtaattggaagtaaccaactaggtttacggcgaaacctagaaatcgatcactgatccaattggagtacctctacaggatagacctcaacagaaaactgaagagtaacggcagcaagtgattgagttcagtagttcctcatataaaattattgactctcgagatatagtaatatggagaagacaaaattgtttcaagcaccgacagaaccggaagcaccctttgtttcaaagtttcaaagaggggaggacgggttattcacatttcatttgatggtcagaggcgaattgaaagctaagctgtggtaattctaaggattccccccgggaaaaatagagatgtctcctacgttacccgtaccatgtggaagtagcgacgtaatttcatagagtcattcagtctgaatgctacatgaagaacataagccagatgaaggaacgggaagacctaggatgtagaagatcataacatgagtgattcggcagatttggattcctatatacccactcgtgcggtacttcattgtatgatctatatctatatatctatatctatatatctatctatagatatatagatatataagatccatctgtatagatatcatcatctacatccagaaagccgtatgctttgtaagaagcttgtacagtttgggaagaggttttgattgatcaaaaagaagaatctactttaaccgatatgcccttaggcacggcaatacataacatagaaatcacactcggaaagggtggacaattagctagagcagcaggtgctgtagcgaaactaattgcaaaagaggggaaatcggccacattaaaattacccttctggggaggtccgtttgatatccaaaaactgctcggcaacagtcggacaagtgggaaatgttggagtaaaccagaaaaatttaggtagagccggatctaaatgttggctaggtaagcgtcctgtagtaagaggagtagttatgaaccccgtagaccatccgcatgggggtggtgaagggagggccccaattggtagaaaaaaacccgcaactccttggggttttcctgcacttggaagaagaagtagaaaaaggaagaaatatagtgataatttgattcttcgtcgtcgtactaaatagtagagaaaatagaaattgtttcttcgtctttacaagaaaaaggagtaattaactgtgacacgttcactaaaaaaaaatccttttgtagcgaatcatttattaagaaaaataaataaacttaacacaaaagcggaaaaagatataataataacttggtccagagcatctaccattatacctacaatgattggccataccattgctatccacaacggaaaagagcatttacctatttatataacagatcgtatggtaggccataaattaggagaattttcacctactctaaatttccgaggacatgcgaaaaatgataatagatctcgtcgttaacgttaattttaacataaatttttaaatcgtaatttataactaaatattacaaaatggaattcttattaaaatgaaattcaaatcatttcttttataaaaaaaaaaaaaattctttaattaaatatttaatgaaattaaatatttaaattaataaaattagtcgtgttttattcgattttttgaattggtttttttttacagtagctaatgctagtcaccgaacttagtcaatgagctagaatgggttataaagatatctatagatatatatagatatatttatctatagatatctttagaaaaaaaaaaagaaaataaacaaataagacgtatcattttatgtatagtagtggggaattatgggacaaaaaataaatccgcttggtttcagacttggtacaactcaaagtcatgattctatttggtttgctcaaccaacaaattattccgagaatatacaagaagataaaaaaatacgagattgtatcaaaaattatatacaaaaaaatataagaatatcctctggtgttgagggaattggacagataaagattcaaaaaagaattgatcttattcaagttataatatatatgggatttccaaagtttttaatagagggtaagtctcaaaaaatcgaagaattacagacgaatatgcaaaaaaaactgaattgtgtgaatcgaaaactaaacattgctattgtaaaagttgcaaatgcttataaacaccctaatattattgcagaatttatagctggacaattaaagaatagagtttcgtttcgtaaagcaatgaaaaaagctattgaattaactgaacaggcgggtacaaaaggagttcaagtacaaattgcaggacgtatcgacggaaaagaaattgcacgtgttgaatggatcagagaaggtagagttcctctacaaaccattcgagcgaaaatcgattattgttgctatacagttcgaactatttatggggttttagggatcaaagtttggatattttctaaataaagaaaaatatattattctttatcttaaatgtgctatattttatcttaaatgtgctatatttttttttagaaaacaaaaaatgaaaaattactcgatttttatttctccaaaatgatcaattttataagattgaatcgactaaaaaatgaaatgaatcatttcatattgatagtattgctatgcttagtccccaaagaaccagatttcgtaaacaacatagaggaagaatgaaaggaatatcctatcgagggaatcatatttgcttcggaagatatgctcttcaagcacttgagccagcttggataacatctagacaaatagaagcgggacggcgggcaatgtcacgaaatgttcgccgaggtggacaaatatgggtacgcatatttccagacaaaccggttacagtaagacctactgaaacacgtatgggttcaggaaaaggttctcccgaatattgggtagctgtcgttaaacctgggaaaatactttatgaaatgggtggggtaccagaaaatatagcaagaaaggctatttcaatagcatcatccaaaatgcctatacgaactcaattcattatttcagggtaataaattagaaccaaaggaaagaggtctttaagatgaaaacaaaaaatgcaaatgtaggttcctttttttgaacacaaaatatttttacttccattttttgactgaaagaataaaaaaatgatatgattcaacctcaaactcatttgaatgtagctgataatagcggagcacgcgaactgatgtgtattcgaatcctaggagctagtaatcgacgatatgcttatattggtgacattgttgttgctgtaatcaaacaagcagtaccaaatacgaacttagaaagatcagaagtgatcagagctgtaattgtacgtacttgtaaagaactcaaacgtagcaacggtataataattcagtatgatgataatgctgcagttgtcattgatcaagaaggaaatccaaaaggaactcgaatcttttgtgcaatcgcccgggaattgagacagttaaatttcactaaaatagtttcattagcacccgaggtattataagacgaaactgtgctatggatacattatttttttgtgaaatagattaattaatctattttatctaacatatatcccttttgtagtaattattagaatttgtagtaattattataagtattagaagcagcaattcttatttatttcagattaatacttgataacctaaacaatatatctatatatagaatatagatagatatatatataatagaacgtaaaaaaaaaaaaagaataataaatagaaaaaggagcatgttgattatatagaaagtaaagggcaacaatcatttttgtttaccatgggtaaggacaccatcgctgacataataacctatataagaaatgctgacatgaataaaaaaggaatggttcaaataccatttactaacataacagaaaacattgtaaaaatacttttacgcgagggttttgttgaaaacgtcagaaaacatagagaaaacgacaaatattttttagttttaactctacggtatagaagaaatagaaaaggatcatataaaagttttttaaatttaaaacggatcagtacacccggtctacgaatatattctaattatcaacgaatccctcgaattttagggggcatggggattgtaattctttcaacttctagaggtataatgacagatcgagaggctcgattagaaagaattggcggagaagttttatgttatatatggtaatctttctaacacccgaattatatgagaaacttcgatccatttttggtaaaaaaaaaaagaaagagaaaacgcaagtttctaatagaacttccccctttatgtatatttgtgaatgtgataagggatttaactggaattaaaaaaaggggggattcacgaagatttaattactaaatgaataacttacccatgaatcatttccccggggtatgtttcaagttcccttatataattaatgcaaattggattttgattataggatatgtttccaaaaagattcaacgtactttttatgggtatacgataaggaaagaaaaaaaataggggtctccccggtcaatttgggtgtttttcaacctcaacatttttttatggggaagaccacaattagaagtcaaaacgtaag

SEQ ID NO: 1555 - DNA, 1967 bp, Glycine max
ctaatattatcgcagaatttatagctggtcaattaaagaatagagtggttataagcatttgcaacttttacaatagcaatgatcataaacaccctaatattattgcagaatttatagctggacaattaaagaatagagtttcgtttcgtaaagcaatgaaaaaagctattgaattaactgaacaggcgggtacaaaaggagttcaagtacaaattgcaggacgtatcgacggaaaagaaattgcacgtgttgaatggatcagagaaggtagagttcctctacaaaccattcgagcgaaaatcgattattgttgctatacagttcgaactatttatggggttttagggatcaaagtttggatattttctaaataaagaaaaatatattattctttatcttaaatgtgctatattttatcttaaatgtgctatatttttttttagaaaacaaaaaatgaaaaattactcgatttttatttctccaaaatgatcaattttataagattgaatcgactaaaaaatgaaatgaatcatttcatattgatagtattgctatgcttagtgtgcgactcgttagttttttagaacggttccaatttaacaaatttataaaccggttcatcgtataaatgaattaaaaaagaactaataaccaacgcatcgcttcggattatctagatctaaagaactagtcaaaacaaaaaaaaatataaaaaaagatatattatagcaactgaactattgtgaagcataaaagaacaaaaatcttatttagttgtaaagcaataaaaatatacagataaatgaagaggtgaaagaaagagagaaaaaaaatcaatgatatagaattctaatatgtaaaggtctatgggttatctcataaaaggtagtgtaataaagcatcaatctaaatcaattcatatctatttatatatgaattaatttataacgtaaacaaattaagagctctgaatcaataaaaactgagaatattgattcacgaaaaaacaaatcaatattcgaaaaaaaaaaagattattaattttaagatatgagaaaggctccattgtcgaattcagacctaaccattaatcgagaagtgatgggaacgacgaaacctgcaaatacttaagattttattaaaaacaaatcttaatgattcattaggtgggatggcggaagaaaccaaaaagcaatcctttttttaggagttgtgccctacattacatctgaatttgattgataataaaagagtaaatattcgcccgcgataattttgattttattgaattttttttttatttttgccaattctatttattctttctaataataaaaaatattctaataactaataataaaaaggaaaataaagattcattagaatattataaaataacaaataatagaacaaaacaagattctttagttatatatgtaaaaaaaaaatggtttatttataagaatacatattccattctatatcaaaacaaaatataaaaatttggaatagattctatgaaatctcaaaaaatcccgctattcaattattcattaaacatatgaatattagtgcatattattttatcgattagattaaatagattatctatatatatagatagatatctatttgaattgcttcattcgcgaggagccgtatgaggtgaaaatctcatgtacggttctgtaataaagatggaattgagaaacaaccatcaattataacccccaaagaaccagatttcgtaaacaacatagaggaagaatgaaaggaatatcctatcgagggaatcatatttgcttcggaagatatgctcttcaagcacttgagccagcttggataacatctagacaaatagaagcgggacggcgggcaatgtcacgaaatgttcgccgaggtggacaaatatgggtacgcatatttccagacaaaccggttacagtaagacctactgaaacacgtat

SEQ ID NO: 1556 - DNA, 785 bp, Glycine max
gcaagggctatgacggcgcgcgcacgcgagcgtaagactcggaattcgagacaagctgcagtatttacagacaaaagtattcggttattggggaaaaatcaatatacttttaatgtcgaatcgggattaactaggacagaaatcaagcattgggtcgaactcttctttgatgtcaaagtaatagctatgaatagtcatcgactcccggtaaagggtagaagagtacgacctattatgggacatacaatgcattacagacgtatgattattacgcttcaaccgggttattctattccacctcttagaaagaaaaaaacttaaatcaaaatacttaatagcatggcgatacatttatacaaaacttctaccccaagcacacgcaatggagccgtagacagtcaagtaaaatccaatccacgaaatcatttgatctatggacagcatcgttgtggtaaaggccgtaatgccagaggaatcattaccgcagggcatagagggggaggtcataagcgtctataccgtaaaattgattttcgacggaatgaaaaaaacatatatggtagaatcgtaaccatagaatatgaccctaatcgaaatgcatacatttgtctcatacactatggggatggtgagaaaaaatatattttacaccccagaggggctataattggagataccattgtttctggtacagaagttcctataaaaatgggaaatgccctacctttgaccgatatgcccttaggcacggcaatacataacatagaaatcacactcggaaaggg

SEQ ID NO: 1557 - DNA, 791 bp, Glycine max
ctactggatgcacgccaatgggacccgccctccaataagtctatcggatttttgttcaagaatgaaatcttattggaactgtccagttcaccctttggaaccatatcacatcccggatatgatgaaataggatgaattgagacggtattttgtaagtacataattatcttgaataaattcactatttctttattttccgatcgcctggaaagaacaagatgtttcttttgttctttcttcaacaatttctgatctctagtagacctctcagtaggattcgaactcagatgaagttctgaccatctgtcagagaaaaaagaacgagtagctctgtatcaatggaatctcatcatccatacataacgaattggtgtggtatattcaaatcataacatatgaacagtaaaaactagtattttaattgagactagaactcatagggaagaaaatagatttatgaatggaataaaatatgcagtatttacagacaaaagtattcggttattggggaaaaatcaatatacttttaatgtcgaatcgggattaactaggacagaaatcaagcattgggtcgaactcttctttgatgtcaaagtaatagctatgaatagtcatcgactcccggtaaagggtagaagagtacgacctattatgggacatacaatgcattacagacgtatgattattacgcttcaaccgggttattctattccacctcttagaaagaaaaaaacttaaatcaaaatacttaatagcatggcgatacatttatacaaaacttttaccccaag

SEQ ID NO: 1558 - DNA, 340 bp, Glycine max
  unsure (1)..(340): unsure at all n locations
ggttgagccacgcgnccgaatgcgagcgaccacttttttttttttttttttttctatcctttctctaaaatcataacttgtttactgcatgtgatttattttcttcaatcattctttaacttccacaaggtttgggtaatcaatgagtatatacaaacttaaatcaaaatacttaatagcatggcgatacatttatacaaaacttctaccccaagcacacgcaatggagccctagacagtcaagtaaaatccaatccacgaaatcatttgatctattgacagcatcgttgtggtaaaagccgtaatgccagaggaatcattaccgcagggcatagagggg

SEQ ID NO: 1559 - DNA, 404 bp, Glycine max
tgcatacatttgtctcatacactatggttacgattataccgtagaagtgattttcgacggaatgaaaaaaacatatatggtagaatcgtaaccatagaatatgaccctaatcgaaatgcatacatttgtctcatacactatggggatggtgagaaaaaatatattttacaccccagaggggctataattggagataccattgtttctggtacagaagttcctataaaaatgggaaatgccctacctttgagtgcggtttgaactattgatttacgtaattggaagtaaccaactaggtttacggcgaaacctagagcatcgatcactgatccaattggagtacctctacaggatagacctcaacagaaaactgaagagtaacggcagcaagtgattgagttcag

SEQ ID NO: 1560 - DNA, 541 bp, Glycine max
aaaaaaaaaattctttaattaaatatttaatgaaattaaatatttaaattaataaaattagtcgtgttttattcgattttttgaattggttttttttttacagtagctaatgctagtcaccgaacttagtcaatgagctagaatgggttataaagatatctatagatatatatagatatatttatctatagatatctttagaaaaaaaaaaagaaaataaacaaataagacgtatcattttatgtatagtagtggggaattatgggacaaaaaatgatacgtctcgtttgttgtatattttctttgtggtttgctcgaccatcaaattattccgagaatatacaagaagatagaaaaatacgagattgtatcaaaaattatatacaagaaaatataagaatatcctctggtgttgagggaattggacagataaagattcaaaaaagaattgatcttattcaagttataatatatatgggatttccaaagtttttaatagagggtaagtctcaaaaaatcgaagaattacagacgaatatgc

SEQ ID NO: 1561 - DNA, 541 bp, Glycine max
caaaaaagaacacaggaaaaacagagagagagaaatcttctcaaaccatcttgcaggtgtgtctttcattgtatgttctactgctgggtaattggaaggctaaccaggagctgcttcattcctcaattattcttcaaactttctaagaagttcatattcttcagtgttctctagtgtcatcaccaaaatcagggaatgctgaaagatgtgcttgatagttaagaattccttcactgaggctaatgagtccgtgcctccatctgagctagccttgttcaaccttgatgacattggatgtttagtccactgcccatatctattttgtgctcgagcgactgaggtgcccagaaatctcagccattgtacaatttccaaacatgatgtttgtgaagacggttgagctttgaatttcttgagtggcagtttcctgcttctggtcgcgtgattgcctgtactgcattggttttcacaaaaacgtgtttctagaaatggagcaaaaaagaggtgtgcttatgcaacgatatgaactggggagattatt

SEQ ID NO: 1562 - DNA, 954 bp, Glycine max
ctgcggttgtgttgcgagttacaacttacaacattaacttaacaaaacatgtgtcatgtggcgtcgtttattctcttgaatcgaggaaagtaggagggagcaatttctgagcacagtgccattcatggagggatccatcttgatgcatcaaaatgctccctctccatccattttccaaatctagcattcttctttggatcaaacgccatttttctctcttcactcttcacctctaaacaaaataaagaaacacaacactcactcccacctctaaacaaaataaagaaacacaacactcactcccacctctgtccctcttcttcttcttcttcttcttttttctttctcttcccatttcagttttcacctatgtgacttgctccatctttatgcaaaccgttaaagttaaacttgctctctgactagcttctcttctctctctatttctctttagtgggtttgcttctgtcgcagagaaatcagcctttcaggtgttcttggctaggttgccaccatgataaagcaaattcttagcaaattgccaaagaaggtgccaaaatctgactcatcagattctgcaaggagtgattctagcaataccactacttttgggaatgtttttcagtgtacaaatgttggaagtaccatttcaagcaaattaaatgttgtgaagcgggtatcatccgttgttttcccagcaagcatgagtgctggagtggaagcagttgacccttgtctgtccttcaaagatgtttcaaatacacagaagcaaagcctgttcattagtaagttgaatctttgctgcaaactttatgacatgagtgatcctgataagaacaccacagagcaagatctcaaacgaaaaacgttgctggagcttgttgattatgtttgttctggatctgttaagttcacagaaccagcaatcgccggattgtgttaaatgtgtgcaac

SEQ ID NO: 1563 - DNA, 500 bp, Glycine max
atggtgttgtgttgcgagttacaagttacaacatttagcttaacaaaacatgtggcgtcgttatttctcttgaatcgaggaaagtagaagtagaaggtcggagggagcaatttctgagcacagtgccattcatggagggatccatcttgatgcgtcaaaatgctccctctccatccattttccaaatctagcattcttctttggatcaaaatcaaacaccatttttctctcttcactcttcactctcacctctgtccctattcttctttttttctctctcttcccatttctttcacctatgtgacttgctccatctttatgcaaaccgttaaagttaaacttgttctctgactacttctcttctctctccctctctttctcttgagtgggtttgcttctgtctcacagaaaaattatcagacccagatctccgttttacccacccactattgctgcttctgtaaagtctttaattttgcctttcaggtgttcttggctag

SEQ ID NO: 1564 - DNA, 6070 bp, Glycine max
  unsure (1)..(6070): unsure at all n locations
ttatcgagcgaatcggctgacagcaatctagtatttaatacattcctaaaataatgattcttaagagcggattcatcttcggtcattttattttgtataataaaagaaagataataaagagaataatcatattaaatattaaatagaaaaaatggcccgatcatttatcaaaggccaatcttcggtagaagagaaggttcctttggaacacttatttctatttcagtataccgggtctctttctttcatttcaaaaaatttatagaatttcgattttgaaatgaaagaaaagtgtggggataaatataaatgacaaaaagatattggaacataatcttggaagagatgatggaagcaggagttcattttggccacggtactagaaaatggaatcctaaaatgtcaccttatatatctgcaaagcgtaagggtattcatattataaatcttattagaactgctcggtttttatcagaagcttgtgatttagtttttgatgcagcaagtgagggaaaacaattcttaattgttggtacaaaaaaaaaagcagcggatttagtagcacgggctgcaataagagctcggtgtcattatgttaataaaaagtggctcggcggtatgttaacgaattggtatactacagaaacacgacttcaaaagttcagggacttgagaatgcaacaaaagacggggagactcaatagttttccaaaaagagatgccgctatattgaagagacatttagctcatttggaaacatatcttggcggcattaaatatatgacggggttacctgatattgtaataatcgtcgatcaacaagaagaatatacggctcttcgagaatgtataactttggaaattccaacaatttgtttaatcgatacaaattgtgacccggacctcgccgatatttcaattccagctaatgatgatgctatagcctcaattcgattaattcttaacaaattagtatttgcaatttgtgagggccgttctagctatatacgaaattcttgattaataataaaataaaaaaattattggatttagttggaggggttcatagatttagggaatcgattactatactagtaataaattgtacaaaaaataaaaatataaataatataaatataaaaagaacaaacacaaattttatgtgattagtcgcggtatttaaaataaaaaatgaaagtagacaaataaaaaaggaaaggagatgtttgaataaaaataattccccttcaagttcttattttttgagaggacaggacaatatgaatgttttattatgctctatcaacacattaaaaagattatatgatatatctgctgtggaagtaggtcaacatttctattggcaaatagggagtttccaagtacatgcccaagtacttattacttcttgggttgtaattgctctcttattggtttcagccattctaattattcgaaatctgcaaaccattcccgctttcggtcagaatttctttgaatatgttcttgaattcattcgagacgtgagcaaaactcaaattggagaagaatatggtccgtgggttccttttattggaactttgtttctatttatttttgtttctaattggtcgggggctcttttaccttggaaaatcatacaattacctcacggggagttagctgcacccacaaatgatataaatactaccgttgctttagctttacttacatcaattgcatatttctatgcgggtctttcaaaaaaaggattagcttattttaataaatacatccaaccaaccccaatccttttaccgattaacatcttagaagatttcacaaaacccttatctcttagttttcgacttttcggaaatatattagctgatgaattagtagttgttgttcttgtttctttagtacctttagtagttcctatacctgtcatgttccttggattattcacaagcggtattcaagctctcatttttgctactttagctgcggcttatataggtgaatccatggaaggccatcattgaccagttttctacaaaatagtccttttcgtttagcttgccgcacatatattgcggctcaatataatctacttagtaaacatctatatctatctacctatatctatatagatataggtagatagatatagatagatattcgattagcatatattagcatatattagtatatattggatattcaaaaaaaaaaataataaataaaaaaattaagagccataattagaattctgtatgatatttacgtttacggcgtgtgataaaaagatactatatagaactaaaggagattcccgtttcagttacattcaattcaacgattgaccaaaagagaattcaaaaaataacatttagatcacccaaattccaatatttctatgaaacaataattaaatctaacgaatttatttcgattgattgtatccatatggggtaataataaaagggggaggagagcttaaaaaaacaagataacaaataaagtataagtgcggggggtcaaactgggtgtatataatcggatcactataagacaactctttcttttgaggtttcaaagaatgattttcgaattcgattgaatctaaaacacaaaagaattggtttacaggatagaagaaacccacgtatatgtgataggatattctatatgaactagttatatatgaactaaccatatccatatatattatataaaataactaatattttatatctaaaattgccccgctactactgtaaatttcgatagggattaaaaaacaaagcctttccgtttcatctcgaattgtgaattgaatattcaatgactaaaaaaatggaataaaaaaacgaagaattcaaagaatgattccaaattgaaggtaggataagaacaaaggttctacatattcacaaaaaaaaactatgtatgtaggtagagacgaaaaaataaatctcgaagtaattcgtagagttcaataactattattattttcaattcggaattcttattaattactttaaaccgaataaatcttgataattgaaaaattaagtcataatttattggttgattatatcattaactatttctttattttatatttaggttacgaggaaattatcatgaatccaattatttctgctgcttctgttattgctgctgggttggccgtagggcttgcttctattggacctggggttggtcaaggcactgctgcagggcaagctgtagaagggattgcacgacaaccggaggcagagggaaaaatacgaggtactttattgcttagtttggcttttatggaagctttaacaatttatggactggttgtagcattagcacttttatttgctaatccttttgtttaatcctaaaaaaatagaaatacatatccttttttccgtggacttgctttaccggtcttgctttttcgaattctatttatattaatatttcactcctataattctttatccgttcggacaagaacacaggggaaggactaattgaaaggtgaagaattcacatactgattcgccctctttcttctcttttttagtccaatgacccccccttttttttaagataatttttctcaagtgttaaaacttgagagattttgcaatggatataagaactggtatctaattcgaataagtatcattcttttagggaatcttccaattgattgaccaatccaaataatatatggatatatatatatagatagatctatctatatatatatctaactaatataggaatcttagaaagataattagtctattcataagaggagatgagatcatatgaaaaatataaccgattctttcctttgtttgggctactggccatccgccggaagtttcgggtttaataccgatattttagcaacaaatctaataaatcttagtgtagtgttaggtgtattggttttttttggaaagggagtgtgtgcgagttgtttatttcaaagaatagattggatccaaccaaactgcactttttagttataactaagaaaatgtgcataatcccgcgaattacttctgaaaattacttctgaattaatgaaattttttcaataatttaagaaaaaatatttaagaactatagcatttcgcgatttattggtaatccactttgattctctattaaccaataattttggactattaccatggttaaagtgaatagtttgaagtctagacgcagtgtagtactctttctaccactatgttaatacagaaatgaaatggtttcgataaaattattagatttttttttcgatatagaacactcatgtcgataaaatggcttgaatcctatttacttacggcaagaaattgaaaaacgggttaatttaaccctcccttttgtacaatgcgtaatcgatgacctatgtataaatgaataagaattctttggatttgaagaaaaaaaacaactttgctgacatatatttgtttggtcagaagagtcctccgaatattctggtcttatattggtaattgttttcaatattttaaaaataaaaatagcgaagagaggataggctcattacataaaaaattggtaaatttcccataagtaattgagtgtgagagccaaatgaatcgaaagattcatgtttggttcgggaagagatcctagacattttgaaatgaatggaaagagagtctactttcattaagtgatttattagataatcgaaaacagaaaatcttgagaactattcgaaactcagaagaattacgggaaggggccattgaacagctggaaaaagcccaagcccgcttaaggaaagtcgaaacggaagcagatcgttttcgggtgaatggctattctgagatcgaacgagaaaaattgaatttaattaattcaatttatacgactttggaacaattagaaaattacaaaaacgaagccattcattttgaacaacaaagagtgattaatcaagtccgacaacgggttttacaacaagccttacagggagctctaggaactctaaagagttgcttgaacaacgagttacatttacgtactgtcagtgctaatattggcatgtttgggacgatgaaagaaaaaataactgattagtctttctattataaaatagagtataggcattatttttttcttctaaaaaaataaaattaagaaattttcatggtaaccattcgtgcagatgaaattagtaaaattatccgtgaacgcattgagcaatataatacggaagtaaaaattgtaaatacgggtaccgtacttcaagtaggcgacggtattgctcgtatttatggtcttgatgaagtaatggcgggtgaattagtggaatttgaagagggtactataggcattgctttgaatttggaatccaaaaatgttggtgttgtattaatgggtgatggtttgatgatacaagagggaagttcagtaaaagcaacaggaagaattgctcagatacctgtaagtgaggcttatttgggtcgtgttataaatgccctggctaaaccaattgatggtcgaggagaaatttcagcttcggaatctcgattaatcgaatctcctgctcccggtattatttcgagacgttccgtatatgagcctctccaaacaggacttattgctattgattcgatgatccccataggacgtggccaacgagaattaattattggagacagacaaacgggtaaaacagcagtagccacagatactattctcaatcaacagggacaaaatgtaatatgtgtttatgtagctattggtcaaaaagcatcttctgtggctcaagtggtgaataccttacaagaaagaggagcaatggaatacactattgtagtagctgaaacagcggattctccagctacattacaatacctcgccccttatacaggagcagctctggctgaatattttatgtaccgtgaacgtcacactttaatcatttatgacgatctctccaaacaagcacaggcttcatcgccaaatgtctcttctattacgaagaccacctggtcgcgaacttatccaggggatgtctttatntacattcacgtct

SEQ ID NO: 1565 - DNA, 624 bp, Glycine max
atgacccccccttttttttaagataatttttcttaagtgtgaaaacttgagagattttgcaatggatataagaactggtatctaattcgaataagtatcattcttttagggaatcttccaattgattgaccaatccaaataatatatggatatatatatatagatagatctatctatatatatatctaactaatataggaatcttagaaagataattagtctattcataagaggagatgagatcatatgaaaaatataaccgattctttcctttgtttgggctactggccatccgccggaagtttcgggtttaataccgatattttagcaacaaatctaataaatcttagtgtagtgttaggtgtattggttttttttggaaagggagtgttaagtgatttattagataatcgaaaacagaaaatcttgagaactattcgaaactcagaagaattacgggaaggggccattgaacagctggaaaaagcccaagcccgcttaaggaaagtcgaaacggaagcagatcgttttcgggtgaatggctattctgagatcgaacgagaaaaattgaatttaattaattcaatttatacgactttggaacaattagaaaattacaaaaac

SEQ ID NO: 1566 - DNA, 375 bp, Glycine max
gagaaagagaatggcgtggtctagctgtcggatcccgtagtccagctctggaaacgatgacgacgtcgcagcctcgaatcctggcaggaaccaacgcgatggatctgtgaggccttgaatcccaacagcgctatcgtcgcaataccgacagtgagaccgagaccacagtgacaacgagtagagtgagagtgaggagttgaaccgccatggagagtgagaaagtgagagcgacagtgagatgacactgacaatgagagtgagaaccgccatggaaaaaacacaacattcatttttacacgaaactgatccaacatctttcaagtccgacaacggattttacaacaagccttacagggagctctaggaactctaaag

SEQ ID NO: 1567 - DNA, 453 bp, Glycine max
ctatatacgaaattcttgattaataatttttttattttattattaatcaagaatttcgtatatagctagaacggccctcacaaattcttgattaataataaaataaaaaaattattggatttagttggaggggttcatagatttagggaatcgattactatactaataataaattgtacaaaaaataaagatataaataatataaatataaaaagaacaaacacaaattttatgtgattagtcgccgtatttaaaataaaaaaagggaggagggaaataaagaaggaaaggagatgtttggataaagggaagtccccgtcgagttcggaggttttgagaggacagggaaggaggggatgttttattatgctctaggagagacagtaagaagattatatgagatatctgctgtggaagtaagtcaacatttctattggcaaatagggagtttcc

SEQ ID NO: 1568 - DNA, 546 bp, Glycine max
gcttaaggttgccaatgaagtttggaaaccatagaggctttgcttttgtagagtatgttactcagcaggaggcacaaaatgccctcaaagcactttcaagcacccatctctatgggaggcatctggtgatagagagagcgaaagaagctgagagcttggaagaactgcgggctcgaacagctgcccaatttagtgatgaacagaatggatttcaaagtgctatgaaattttccaagaataggaagcaggttgacttcttggatgaagggaagatgaagtttggaagaatggctgactagtacagctccaaagatttaaacagtattttgcgtatgtcctggaaattctgggatcacaattttgtcataggtttccaagtttatataaacatgccatgttgcttcttatcatcaagtgttaaaataacttctctaagtttaggtttgtattcttcatccataattctatctcccgtaaaattgtgttcacctatttacactaaacttttatattcccatcattgtaattccattttatcattttttt

SEQ ID NO: 1569 - DNA, 1730 bp, Glycine max
gtcgatatttccaattaaatcttctagttcctgtgagggtgctataaaaaaaagggctatgtgctttttggtataggaccttcacgaaaggtcggaacataaggcggggaagagttagtttcttctctcttcgatggaaggcggggaagaggttctcccttcggccactgccacctccgccgccaccggcaatcccaccgcttcgcctcctccgctcgctgatcttgtcggtgctcccgatctcgctgctgcctcggacgacgtcgttacccaacctgaaattcacgcgctgatttcagacgaagagcacgatcacgagcatgaacatgacgatgacctcgagcacgagcacgatcagcatgagcatgaccaccaccacgaggaccgcgatgatcacgccgctgtggccgctgtctccttggaagatctcaaactcaagatcattaagcaggcggagtattatttcagcgatgaaaacctgcctactgataagtatctgttgggtttcgtcaagaggaacaaggaagggtttgttcctgtatcagtaattgcttcttttagaaaaataaagaagctcacgcgagaccatgcatttattgttgctgcactgaaggagtcttcactgcttgttgttagtggtgatgggagaagggtcaagcggctcaatccacttcgtttcaatgaatctagagatcataagttatatactgttttggtagagaatttgccagaggatcattcaaagaagaacattcaacaaatattccatgaagctggaaatataaagaggataaccattcatgacccacattctacttcagagtctgcaaaacaacataacaagcaagaaatgctaattagtaataagttacacgctcttgtggaatatgagactatggaggctgctgagaaagcagtggctatgttaaataatgaacaagactggagaaatggcatgcgggttaaacttctcaagggaatggggaagtatggacacaaaaaacaagcttggaaaggacatcattctgagaagaatagctcaaggcctgaacaaacaggagatgaggagaatcatggctctaatgagcatcgtgaagatgcacatgaggaagaagatggggatcatctgtcgaaggacaaaggtgggcagaggtatagaaatcaaggaagatcaagaaaacataaatatcgtgctggaaatggaatgggccatggaagtacaccatcaactcatgctgccgaagcatcgaagccaccccctggaccaagaatgccagatggaacacgtggcttcgcaataggacgaggtcggtttcctgtccctgcttcgaattagcaaagattggacgccacaaatgagggattgtatttagcagtattatgtgtccgatgctttagtgatgtactagtttttacttgggtccctatgcgtgttcgcttgagtcaacatgggtttgttggactggtaaattatgtatctcaatctttggaagtgagtgttggtggtgaagtacatacccattttaagattattaggctgggaaacatagaactgttctagttgtggtaatcctcaccttacgaggaatctgtgtaacaaaatcatatcgagaaatttgttaaaggggatgaaagaaagctgtgtttgataaccaattgaaaataatataacttaataaaaagggggccccccgacaatggacccatgccccccgggatttattccgggg

SEQ ID NO: 1570 - DNA, 532 bp, Glycine max
ttgggagaccgaaagaccggaacataaggcgggcaagagagtttgtttcttctctcttcaatggaaggcggcgaacaggttctcccttcggccaccaccgtcgccgccgccggctatcccaacgtctctcctcctccgctcgctgatcctgtcggtgcttccgatctcgctgctgctgcctcggacgacgttgttgcggaacctgaaattcacgcgctgatttcagacgaagagcacgatcacgatcacgatcacgagcatgagcatgagcatgaccatgacctcgagcacgatcacgagcatgagcatgaccaccacgaggaccgcgatgatcacgccgccgtggcagctgtctccttggaagatctcaaactcaagatcattaagcaggtggagtattatttcagcgatgaaaatctgcccactgacaagtatctgttgggttttgtcaagaggaacaaggaagggtttgttcctgtatcagtaattgcttcttttagaaaaataaagaagctcacgcgagaccatgcat

SEQ ID NO: 1571 - DNA, 430 bp, Glycine max
tgaccatgacctcgagcacgatcacgagcatgagcatgaccaccacgaggaccgcgatgatcacgccgccgtggcagctgtctccttggaagatctcaaactcaagatcattaagcaggtggagtattatttcagcgatgaaaatctgcccactgacaagtatctgttgggttttgtcaagaggaacaaggaagggtttggtccgggatctgtatctgctgcatgttggaccaatttgattatgacttgtggaattttcacagtttgggctgcgatttatttattgcctcactgatttgcatgtgttgcgtattccatttaaaataggttgttgccaagatgactatgttagtctgaagtgctgaataatctgggttatgtataatatattttggagcatatcctaagggaagataaatattagatcttg

SEQ ID NO: 1572 - DNA, 419 bp, Glycine max
gtacaaaggggtgatcaagcctctattattggtggcaccattaacttcgtgaaggagctggagcagcttctgcagtgcatgaagggccagaagaagagaacaaaggagggtagtggcttctctgactcttcacccttttctgagttcttcatgttcccccagtactcgacacgtgccacacagagcagcagcagcagcagcagcaaaggctaccctggcacgtgcgaggccaataacaacatggcacggaacccttcatcatgggccgtggcggacatagaagtgaccttggtggatggccatgccaacatgaagatactctgcaagaaacgaccagggatgcttttgaagatggttgttggtcttttaagtcttggtctcagcattctccaccttaatgttaccactgttgacgatat

SEQ ID NO: 1573 - DNA, 1408 bp, Glycine max
  unsure (1)..(1408): unsure at all n locations
tcgcatttacgtacgcgagcgatggagattttcaccaaaacgagcgtggtgaggctgtgtagccacctggacaagtaccttgtggaaccatacactgtgatcatgaatggaagaggacagtttaaattgttcccttgcttctaaattcatcaacacaaccctaccccaatgccaacttaaaggtggtgaagaatgtgcccctcagattcttcatgtggagccaaacaagacctatagaatcaggattgccagcaccactgccctagcttcactcaacttagccatttcgaatcacaaacttgtagtggtggaagctgatggaaattacgtttcaccttttgcggttgatgatattgacatctattctggggaaagttattcagtgctccttcgcacagaccaagatccaaacaaaaattattggctatcaatcggggtgagaggaagaagggcacccaacaccccacaaggcctaaccattctaaactataagcccatttctgcctcaattttcccaatttctccaccacccatcactcccatttggaatgattttgagcgcagcaaagcgttcaccaagaaaatcattgcgaaaatggggaccccacaacctccaaaacgctctgatcgtacaattttcctcctcaacacccaaaatcggcttgatgggttcaccaaatgggccattaacaatgtgtccctaacattgccaccaaccccttacttgggttctatcaagttcaaaataaagaatgcctttgacaaaacacccccaccagttaccttcccacaagattatgacatctttaaccctcccgtgaaccctaatgcatctattggcaatggggtgtacatgttcaaccttaatgaagttgttgatgtgatcttgcaaaatgcaaaccaattatctgggagtggtagtgagattcacccttggcacttgcatgggcatgacttttggattttggggtatggagaagggaaattcaaaccaggtgatgagaagaaattcaatttgacacatgcaccgctgagaaacactgcagtaatatttccatatggttggactgctttgaggtttaaggctgataacccaggagtttgggctttccattgccacattgaaccccatttgcacatgggaatgggtgtgatttttgctgaggctgttcaaaaagttgggaaaatcccaagagatgcactaacttgcgggcttacaggaaagatgctaggaaatagacactattgaaactagccacaatacacacatcaaaagaatgttgaatagtgtttatttgattaaaatttgaatgttgaattgatattatgttttnnnnnnnnnnnnnnnnnnnnnnnnnnnnnnnnnnnnnnnnnnnnnnnnnnnnnnnnnnnnnnnnnnnnnnnnnnn

SEQ ID NO: 1574 - DNA, 882 bp, Glycine max
ctcgagccgctcagatctatatatttcagttcattttgttctccaataatagcttcttcttcggctactttagagaccttgctgcaaaggttctctcttagcatggtaacaatgggtttgaaagcactttttgtttggtgcataatatggttggcgtttgcacagttgtcactaggaggaagagtgaggcattacaagtttgatgtggagtacatgatcagaaagccagattgcttggaacacgttgtgatgggaatcaacggccagtttccaggcccaactattagggctgaagttggtgacatccttgacattgctctcaccaacaagcttttcaccgagggaactgttattcactggcatggaatcagacaggttggaactccttgggcagatggaactgctgccatctcacagtgtgctataaacccaggagaggcttttcattacaggtttacagttgacaggcctggtacatatttctatcatggacaccatggtatgcaaagatcagctgggttgtatggttcattgatagtagatttgccaaagggacaaaacgaaccgtttcattacgatggtgaattcaaccttcttcttagtgatttgtggcacaccagctcacatgaacaggaagttggcctctcttccaaaccattcaagtggattggtgaagctcagactctgctcatcaatggaagagggcaattcaattgttctcttgcatctaaattcatcaacacaaccctaccccagtgccaacttaaaggtggtgaagagtgcgcccctcagattcttcatgtggagccaaacaagacatacaggatcaggattgctagcaccactgccctagcttcactcaacttagccatttcgaatcac

SEQ ID NO: 1575 - DNA, 291 bp, Glycine max
ggcaatggtaccaccaatccaaatcctcgatcctctatacctattctttcaatttgttcatcaatagcttcgttctactacttgataccttcctgttatattgctaattaggctttctctgatcaaaattaattaagaatgagcttgaaagctctttttgttgggtgcataatatggttgggtttggtagaattgtcaatcggaggaatagtgagacactacaagtttgatgtggagtacatgatcagaaaaccagattgcttggaacacgttctgatgggaatcaacggg

SEQ ID NO: 1576 - DNA, 1698 bp, Glycine max
  unsure (1)..(1698): unsure at all n locations
cgtcacagtgatgaaaacatagcccctctgacgcacagaatgacgaagacaaaaagcggattcctttcctatataatataataatagacaatgagcaccgtgcaatcagcaaccaaaatgactcaagcccagattcaaccagttaaacttggaacccaaggctttgaggtttcaaaattgggattcggatgtatgggccttactggagcgtacaatgaccctctccaagaacaggatggcatatctgttatcaagtatgcgttcagtaagggaatcacattttttgatactgcggatgtttatggagccaatgctaatgaacttttggttggaaaggctttgaagcagctgcccagagaaaagattcagatagccacaaaatttggtattgcttcacgaggttttcctgatatgaagatcaagggttcgcctgaatatgtgcgatcatgctgtgaagctagcttgaagcgtcttgatgttgaatacattgatctctattatcagcacagagtggacacatctgtacctatagaggaaacagtgggtgaacttaagaaattggtcgaagagggtaaagtcaaatatattggattatctgaagccagcccagatacaataaggagagcacacgcaattcatcccatcacagctgtgcaaatagagtggtctttgtggactcgtgacattgaagaagagatagtccctctctgcagggaacttggtattggaattgtaccatatagtcctcttggtcgtggcttttttggcggcaaaggagttgtggaaaatgtgcctacaaatagctccctgaaagcacatccacgctttcaagccgagaacttagacaagaacaagaatatatatgaacgaattgaaggccttgctaagaagcatcaggccactcctgcccagttggcattagcatgggtacttcagcaaggcgaggatgttgtacctatccctggaacaactaagattaagaacctggatcaaaacataggtgccttagcagtgaaactgtcagaaaaagacctgagagaaatttctgaggcggttcccattggtgatgtagcaggtggtagatactacaatggattggatcacttttcatggaagtatgctaacacacctccaaaagattcaaaaatctcaacctgacgcacccaaccaaccctttggttagggaatctaccaagtcatcatgaattgagggtaacaaggctggcaaaggctaatatcaggatgctatttaaatatcaataatgtagcccttcttgatgttggacttcctagatatttggttggttaaaatttttaatttagactgtaatactattttatatgcaacagataattatgagcagtttcgaaggcatgacttgagtttaggatgggtcaaacatggtttttgcattcaccaagatgtttgaatctgcgttagaaacatgattttaaattatggactcaagtctcattgaagtatttggaatcagtttttgcatcacccttgacttgagtcattaatttgttccaagtataattctgtttaatattgatattggcatgataaatagcaagaaaaaacatatttttttagttgnnnnnnnnnnnnnnnnnnnnnnnnnnnnnnnnnnnnnnnnnnnnnnnnnnnnnnnnnnnnnnnnnnnnnnnnnnnnnnnnnnnnnnnnnnnnnnnnnn

SEQ ID NO: 1577 - DNA, 629 bp, Glycine max
cccacgcgtccggacgacagaagggggcaatcagcttccaaaatgactcaagcccagattcaaccagttaaacttggaacccaaggctttgaggtactattaactacattacttgctcttattttgataattgatacaattaatctcattctaggtttcaaaattgggattcggatgtatgggccttactggagcgtacaatgaccctctccaagaacaggatggcatatctgttatcaagtatgcgttcagtaagggaatcacattttttgatactgcggatgtttatggagccaatgctaatgaacttttggttggaaaggctttgaagcagctgcccagagaaaagattcagatagccacaaaatttggtattgcttcacgaggttttcctgatatgaagatcaagggttcgcctgaatatgtgcgatcatgctgtgaagctagcttgaagcgtcttgatgttgaatacattgatctctattatcagcacagagtggacacatctgtacctatagaggaaacagtgggggatttcttcctctcaatgattttgatcatagtagactttatatatatacctgtgaaaatttagtaatataatgatattatctggcttatctcactag

SEQ ID NO: 1578 - DNA, 441 bp, Glycine max
aaattttagcggtccattggtatgacagtgtaatctcatgattggtcctttatgaagatgtacaccctcaaaattcaaaatctcacctacgcacccaccacctttggttaggaatctccaagtcatcatgaattgagggtaacaaggctggcaaaggctaatatcaggatgctatttagatatcaataatgtagcccttcttgatgttggacttcctagatatttggttggttaaaatttttaatttagactgtaatactattttatatgcaacagataattatgagcagtttcgaaggcaaaaaaaaaaaaaaaaaaaaaaaaaaaaaaaaaaaaaaaaaaaaaaaaaaaaaaaaagaaggaagaattaaaggataaaaaaattaataactctattaagggacgtaatatttttggtatagagttatggatattcattca

SEQ ID NO: 1579 - DNA, 295 bp, Glycine max
ctgcaactacaaactaagattagagaataaagaaatgggcgcaacgaagagtggacgagttaaacttggagcacaaggccttgaggtttcaaagttgggattcggatgtctgggtcttactggagcgtataatgagcctctcccggaacaggatggcatagtctattatcaagtatgcattcagtataggaatcacattttttgataccgctgatgtttatggagccggtgctaatgaaattttgcttggaaatgctctgaagcacctacctagagaagagatccagcttccccc

SEQ ID NO: 1580 - DNA, 704 bp, Glycine max
gtgaaaataactataaatacgatctttcttattggaataccctctgaaaactgaaaagtaaaggcgaaagactttaggtttggaattgggaattagggttgttcgcgtggcgaagatgattgaggtggttttgaacgatcgattggggaagaaggtgcgcgtgaagtgcaacgacgatgataccatcggcgacctgaagaagcttgtggcggctcagactggcacaagagccgacaagatccgcatccagaagtggtacaccatctacaaggatcacatcactctcaaggattacgagatccatgacggcatgggtctcgaactctactacaactaaacacaacaggtgtgttttatgcataatatattactatgatctgggaatgggatgaggcgccaaatgtaattttgacttgcgaaagtccctatgatttgaataatgtacatccccaaatgatattgggtattacataccgatgacagcttaagttgctttgttatatataacctatctgatgacttgttgctaagcttcattaatctgatcggtggaagtgtttgatcatgtccaattgctttttaaattatttgatttccgataaacgattttgcgtaattttatttaaatccaccccaatggatgttaaagcttaggacatgaatcgcaagttcaaatggctgtaccagttcaatgcatctgaaat

SEQ ID NO: 1581 - DNA, 503 bp, Glycine max
cggctcgagggccgggctacccgctgagtttaagcatattaataagctgaggaaatgcgtccacccgcccgaaggactttaggttgggatttgggaattagggttattcgcgtggcgaagatgattgaggtggttttgaacgatcgattggggaagaaggtgcgcgtgaagtgcaacgacgatgataccatcggcgacctgaagaagcttgtggcggctcagactggcacaagagccgacaagatccgcatccagaagtggtacaccatctacaaggatcacatcactctcaaggattacgagatccacgacggcatgggtctcgaactctactacaactaaacacaaggtctatacccatctcataaggggttgttctattgcgcaatatactattttgctgtgtaaatgggagtaaacgcttaaattctaatttatgaacttgcgaaaagtatcgcattgattttgaaaaaaattattcatttttccaaaattaatatttg

SEQ ID NO: 1582 - DNA, 390 bp, Glycine max
gctctgaaaactgaaaagtaaaggcgaaagactttaggtttggaattgggaattagggttgttcgcgtcacgaagatgatcgaggtggtgttgaacgatcgattggggaagaaggtgcgcgtgaagtgcaacgacgatgacaccatcggcgacctgaagaagctggtggcggctcagacgggcacaagagccgacaagatccgcatccagaagtggtacaccatatacaaggatcacatcactctcaaggattacgagatccacgacggcatgggtctcgaactctactacaactaaacacaaggtctatacccatctcaattcctccttttatagatactagctaggggtttgttttttagggtccccaattttgatttgtttttcggc

SEQ ID NO: 1583 - DNA, 255 bp, Glycine max
tttcaatataagattttgtttaatttatagaaggtacaaaatcttgtgttaatagcaattgggtggcgaagatgattgaggtggttttgaacgatcgattggggaagaaggtgcgcgtgaagtgcaacgaccgatgataccatcggcgacctgaagaagcttgtggcggctcagactggcacaagagccgacaagatccgcatccagaagtggtacaccatctacaaggatcacatcactctcaaggattacgag

SEQ ID NO: 1584 - DNA, 643 bp, Glycine max
tccaagctcaagccgctcaagccggctttaaaccgcccctgacccgacccagttcgcacaaatcatgttttaccattttgttctatccaacgtcgacgacaaaaacagaatcaccaacctttttatcgtttcacttgcgaactagattacgttatttcccatatttattagcttcagatctaatcgattcactcttttttttttctctttaaattatttttacttcaatttagttatcagtgtttcgcacgctctctgtttcctcgataagcatgattttttcaaggattgcacgctccgtttcgcggtcgtctcgcgctagaaatttattacacggtgatgggagattgggaacccatgtcggattgccacggacgaatgcgtgttctgaaggagccgaaggggtattagggtttgttaggggctacgtatcttctgccagagctcgcagtaatggcctcgtttccaatttgcctgattttaaatctgttgcagcaaaccctaggattcgccgattgttttgcagcatagctccaaagaagaagaattatgagaacttctatcccaaggaaaagaaggaagttccgaaaggaaacgacaaaaaatacgagtccaaagataactcgaacgcaaacacagagga

SEQ ID NO: 1585 - DNA, 976 bp, Glycine max
aatggttttcgtcggtctggtttatctgtttgtatacaatgggtgaagagcacccaaacccagcccatttaattttgcagaaaacaacagggaaagaaatttctgaccctaaccgcgtgtcgttaaaatcctcaaacgcagagtagacatagaattatcaaaaagcggggaaagggagattgaattcgatcctgggacgttaacgttgtttcaattcaattgtggtcctgtcggtgccctatctcagacgacgatgtcatctttatatagaggggaatccaggaggtacaacaataaaccaagaggacgtcataatttgacaacgcagaagaagcaagagattaaggaagcctttgagttatttgatactgatggctcaggtactattgatgccaaggagctgaatgttgctatgagggcccttggatttgagatgacagaagagcaaatcaatcaaatgatagcagatgtggacaaggatggaagtggagcaattgattatgaagaatttgagtacatgatgacagccaaaataggagaaagggacactaaagaggagctcatgaaagctttccatattattgatcatgataaaaatggaaagatatccgcattagacatcaagcgcattgcaaaagagctaggtcaaaatttcactgacagagagattcaggagatggttgaggaagcagaccaagataatgatcgagaggttagtgcggaggagttcatcacgatgatgaacagaactcgcttccatcactagtcttatctatatgggggcagttgatatctttgtttggctgcactactagtataggaaaattaaaaataaaataaaaacaaccgaagctatgtactctcttcctattgttgtacaagttgtatgaatgattcctatgctatgtgtgggtattgcctatgaataacattggtgtatgtccatattttggtttaattcgactcatttcatttt

SEQ ID NO: 1586 - DNA, 629 bp, Glycine max
gtgagtctctgtctcatgtttgtttgtcaggggtttatgtctggtctggtattgtgacgcatgttgttgcagttgcacaacacaaacaaagatacatagattcattcatattagtattagatctctctctctctttctctgaatttcactcaagttatcaatagttttcgttcatagaaactagaaagatgtgtgaaagtagtagtagcagagtcacatgggaaggttgcagcgtcttgctcgacatcaacgacggtgaccgtctcgttttcgctcgtctctcccccgctgcaaaattgaagattgggaataagaactgctctctgcaaccgttaattggctgtcccttcggtactgtttttcaagtcgatggacctttcctctctcccgcacaagttaatggtaataatgctgaagaagtaagagatggtcaagtaagtgtcgagtccagggacaaagttcataatgataataatcctgaagaagtgagagatggtacgagcaaatgttgattcgagggacaatcgtgccttggttgacaataacacggcacagagcctgactggtgaggatatagaagccatgcgaagacaaggtgcgggaggtaatgaaataaatgaagctctcat

SEQ ID NO: 1587 - DNA, 669 bp, Glycine max
aagccaaaacccattcaatttcattttaaacggaaagaaatttcggaccctaaccgcgtgtgtatttaaaatcctcaaaagcggggaaaggaagattggattctgggactttgacgttgtttcaattgtggtcgtgtcggtgcccgatctcaaacgacgatgtcatctttatatagaggagaatccaggaggtacaacaataaaccaagaggacgtcataatttgacaacgcagaagaagcaggagattaaggaagcctttgagttatttgatactgatggctcaggaactattgatgccaaagagctgaatgttgccatgagggcccttggatttgagatgacagaagagcaaattaatcaaatgatagcagatgtggacaaggatggaagtggagcaattgattatgaagaatttgagtacatgatgacaaccaaaataggagagcgggacagtacagagggaaagatatctgcatcagacatcaagtgcattgcgaaagagccaggtcaaaatttcactaacagagacattcaggagatggttgacgacgcagaccaagatagtaagttattccaatcttatccttgtcaacattctaattttacgcaacacttttacttctaatactgtggatccttattctgagagctactaggtgtggatgca

SEQ ID NO: 1588 - DNA, 1298 bp, Glycine max
aactgattgaagtgataacagcatcatgtctttcagaaaatggggctcatgtgaatagtaaatcaatagatcgtggcctagttaagtatcagagtgggacaaagccagagatactatcaaacatatgtgacttgctatgcttttgtatcttacaccacccatacaggataaagtgcaactttcttcctaataaagtaattgataaaattttgttactgacacggagaagagagaaatacctcgttgttggcgctgttcgatttgttcgtactattctatcacgtcatgatgagcatctggtagatcattttgttagaagcgactttctcaaaccaatagtagatgcctttgttgctaatggtaatcgctacaatctgctcaactctgctgttcttgaacttttcgagtatattagcaaggagaatctgaaattattattgaagtatttagttgattctttctgggaccagttagtgaaatttgagtatttggtttccattcattcactgaaagtaaaatatgagcagtgtttggataatgatggggcaaaaggtactgctattatgattgaccttcgaagacgacttgatgagcgtgctctggagaaagaagaggaagactactttaatgacagtgacgaggaggatacaacctctgcgtccatttcacataatcagcgagtgcagcaacaacaacccgcattatccaatggtgttgctgcaagctactcagagctaagtccaaggtctggtggactggttgactatgatgatgatgatgatgaagattacaggcctcccccaaagaagaagccagaagcttctgaagaggatgaagggacaatggagtctctcagtcggaaaagaaaattgccttctaagaaccctgagcttgcaaagaagttgtccaaaaaattcaaaatcgaaagatagtgtttttgctgccttgtgttcaacattgagccaggctgtgctgcctggtaagaaaccttcaatcaacgttcataccgatccttgtagagaagacaataaagaaaaggaaccaaatgtttctagaaattgctgtgagaatagcgatgcaacagctgaagcgaaccatgtagagaaagaaacttctgcctatagaaatttttctgatgggctgtacggcacttcagataatggacagttgggtggtgaggaacatacattggtttcaccgaaatcctccccagagatggccgtaaatggatcttaagattttcaaaccatacagaggaaggcagattgtttgtgttatttgacctatggatttgttgg

SEQ ID NO: 1589 - DNA, 465 bp, Glycine max
ggagaagaagagcacgtccaacgccaacggaaattcctgctctttgattcgtagacaaagacagacctggtggtatttccaacgattgatagatggatcaagggaggcaggtattcacagtggaccttcttgaacgatatgctgcaaaagggcgtggagttatcacttgcatggctgctggaaatgatgtcattgtgattggaaccagcaaaggatgggtcatcaggcatgattttggggttggcaattcaaatgagattgatctctctgtgggtcgtcccggagaccagtcaatccatagggtttttgttgatcctggagggagtcactgtattgccactgtagtgggtcctggaggagctgaaactttctatactcatgccaaatggaccaagccacgaattttaagcaagctgaaaggtcttgttgtaaatgctgttgcatggaacaaacaacagataactg

SEQ ID NO: 1590 - DNA, 1727 bp, Glycine max
cggacgcgtcgctttctctcttcgcctggtcttggcatctccgcagcaccaccacccaccaccctgcttagaccaggtcctctctctctctagagagaaagagaaaaaagaaaaaaaaaaacaactaacattaagcttttaatagtaagacatggctcaacccagttccaacggggatctgaataataaccagcagcagggtcaggttcagcaacaacagcagcagggtcagtgggcggcggcggcgcagccgcatcagtatcagcagcaatggatggctatgcagtacccggccaccgccatggccatgatgcagcaacagatgttgatgtacccgcagcattatatgccctatgctcaccctcattacccgccgccgacgccgccttcctcctcctcccaccaccaccaccaccacaaacaggccgcggcctcctccgacgagatcaggaccgtctggctcggcgacctccaccattggatggacgagaactacctccacaactgctttgctcacaccggcgaggttgtgtcggccaaggtcattcgaaataagcaaactggtcagtctgagggatatggattcgtggagttctattcacgagcgacggctgagaaagtcttgcagaactataatggcacgatgatgcccaatacagatcaggcattccgtctgaattgggccacattcagtgcgggggaaaggcgttcttccgatgctacttctgatctctctatatttgtgggggacttggccattgatgttactgatgctatgctgcaagagacttttgctggccgatattcatctattaagggagcaaaagttgtcattgattctaatactggccgctcaaaaggctatggttttgttaggtttggtgatgaaaacgagagaacgagggcaatgaccgaaatgaatggcgtttattgttctagtaggcccatgcgaataggtgttgcaactcccaagaaaacttatggcttccaacaacaatattcttctcaagctgtggtattggctgggggacactcagctaatggtgctgtggcccaaggttcccattctgaaggggatataaacaacactactatatttgttggagggcttgattctgataccagtgatgaggatctcagacaaccatttttgcaatttggtgaggttgtctctgtgaaaattccagttggtaaagggtgtggatttgttcaatttgctgacagaaagaatgctgaggaagcaattcagggattgaatgggacagtaattgggaagcagacagtgcgtctttcttggggtcgcagtccaggaaataagcattggagatctgattccaatggaggccattatggtggtcatcagggttatggtggccatggatttgctgtgagacagaatcaggatatagccatgcaacctgcaactgcaattcaaggtgcttcctaacggggcttattagcagaactgtgtgttgaagtaggatggattttattgctctcccctaaactgtagtattatttttaaatttgtagctgggttaaggtatgccaggttcttaagattgtattaaaatgtctgaaattttggattgaacccgaccatataatatatgattcgggtatttttgttttttttttaaaccctcaaaacatattggtagcagacagctaagattatttaaatacttatctttacagtacaatgttactgcttgcaaaaactaaaa

SEQ ID NO: 1591 - DNA, 561 bp, Glycine max
ccaaccctaccaatttgcgccccttctctctttttttactctttctctctttgtgtcgcctggtcttggcatctccgcagcaccacccaccctggaccaggtcttcaacagagagaaagagaaggaagaacacacacacacacacacacacgttaaactaacattttttattagtaagaagacatggctcaacccagttccaacggggatctgaataataaccagcagggtcaggttcagcaacagcagcagcagtgggcggcggcgcagccgcatcagtatcagcagcaatggatggccatgcagtacccggccacagccatggccatgatgcagcagcagatgatgatgtacccgcagcattacatgccctacgctcacccccattatccgccgccgccgccgccgccgcctcctcagtcgtctcaccatcaccaccacaaacagggccgcagccgcggcggcggctgcggcctcctccgacgagatcaggaccgtctggctcggcgacctccaccattggatggacgagaactaccttcacaactgctttgctcacac

SEQ ID NO: 1592 - DNA, 480 bp, Glycine max
gacaatcaaattaaaataaacctgagagatcagatacaaagagatcgagcaatggcattagtgtcttcactttctcctgcgaccccttcttcggttcaaaccaacactttgaacccattgggttggactgatgatcagatcctggagaaggtttacattacccacgtccacaccgctgaaaggtacgatgtggaatcgcttttcaacgttactgcaaacatcatcaagcgttctactgcacttgctgacagtgttgctgttaagactggcacacccgttggtcttattgaagacaaggttcctttgtccactttcgacccaccgttcctaaaacttaagcatattgcttctcagatgatgaacacaccgcacggtgagcatcatgcacacagcacagcaatgtcgatccttgaccagctgagaacgtacacatgggatggaaaagcgatattggttctggcggctttggctttggagtat

SEQ ID NO: 1593 - DNA, 574 bp, Glycine max
atatttactgcgtaagcgcgagtgtgagtgttagtgtgagtgtgagtgtgagtgtgttgttctctctgcgaaatgcgaatgtgattcgaagaagctcgatgagaatgcgagagttagggtttcaggaacgaaggtcgtggaggcggagaggcggcgacaccagccccgactccgtcatcttcactctcgaatccaacttgagcctcttctcctccgcctccgccagcgtcgaccgctgctccttcgcctccgacgcgcacgaccacgactccttagcctccgaaatctcactccatttggcagcacaggatcatgacggtgatttcgctcatagcgaaagctggagcggtccagatccggatctggatccgaataaacgacaacaacaacgacatccacgacatgcagatacagattcagatgcagcacacacgaagcatcgccgaaatcgtttctccgggaaaggagagaaagcgaaagttcaaaaggaagaagacagtgacggtggtgacactgaggacggaaatcaacacttggaatttgattcggccagaaactctttctctctggctct

SEQ ID NO: 1594 - DNA, 341 bp, Glycine max
ggctccagctcgagtatactctctctatatctaaaccccctaaccaattctcgcactcgagaatttttccggaaaatctcaccctcatttctcagccaagagaaagactaacaacaaaaacactcgaattccttcttaattctttcccgattcgaaggatagagaaagagaaaagaaaagaaaaaaagttaatggcatcactgggatctccgtcttcatcattctggtgctaccgctgcaaccgcatcgttagggttccacaaaaccacgccgttctcctctgccccgattgcaactccggcttcctcgaagagctccaaacccctccccactcgcgccga

SEQ ID NO: 1595 - DNA, 1695 bp, Glycine max
ttccacgcttacggggacgcgtgggagtaaacaaccatcaaggatggcttgggtgtttactatgtgaagctgacagaaatattttggatatcgtcaagtcatctgtatcatgcatatgcttggttcaagctctttttattacaaaaaagcttcaataagaatctgagtcagaaggatctgcaattaattgcttcatctgtcgttctggctgcactttcagtgcctcctcatgatcgaacccatggtgcatctcatttggaactggagcatgaaaaagagagaaatttgagaatggctaatctcattggctttaatcttgaaactaaacctgaaagcagagaaatgctatcaaggtcatcacttcttgctgaactggcatccaagggtgtgatgtcttgtgtaactcaggaagtgaaggacatttaccatcttttggaacatgagttttatccctcagatcttgcattaaaagcactgcccttaataactaaaatctcaaagttagggggcaagctttctactgcgtcatctgttccagaagtgcaattagctcagtatgttccagcactggaaagactggctaccatgaggttgctgcaacaggtgtctaatgtgtaccaatctatgaagattgaaaccttatcggggatgatccccttctttgatttctctcaagtggaaaaggtttcggtagatgctgttaagcagaagtttgtatcgatgagagttgaccacatgaaaaatgctgtgattttttgcaaaaagagtcttgagtctgatggcttaagggatcacttggccaattttgctgaacaattaaataaagcaagacagatgatttatcctcctgataggagatcatcaaaacttggagctttacttccctctttgacagaggttgtggccaaagaacacaagaggcttcttgctcgaaaatcaattattgagaaaaggaaagaagaacaagaacgacagcttcttgaaatggaacgggaggaggagtcgaagaggctaagactgctgaaaataactgaagaagcggaacaaagaaggcttgccactgagtatgaacagagaaagaatcagaggatccttagggagatagaggagagagaaaatgaagaagcacaagctttactccaggaagctgaaaagcgtattaaaaagaagggaaagaaaccaatcatagagggggacaaaataaccaagcagaccttgatggaattgactttgaccgagcaactccgggaaagacaggaaatggaaaagaaactccagaagttagcaaaaaccatggattatttggaaagagccaaaagagaagaggctgctcccctgattgaagctgcgtatcaacagcgtctagtggaagagagacttcttcatgagcgtgagcagcagcaagaggttgaactgagcaaacagaggcatgagggagatctcaaggagaaggagaggcttgttcgaatgatgggcaataaggaagtatatcaagcaagggtggttagtcaccgccaagcagagtttaacagattgagaagagaacgggaagagcgaatctctaggattttacagtccaggagacaggagagggaaaaaatgaggaagttgaagtattatctcaagttagaagaagagagacaacaaaaattgcgtgaggcggaggaagctcggaaacgtgaagatgctgaaagg

SEQ ID NO: 1596 - DNA, 606 bp, Glycine max
gagctttccagttctgtaagcaatataagcggacaacagagttccgcagactgtgcgaaatcattagaaatcatttggctaatcttaataaatatcgtgaccaacgagaccgacctgatctttcagctcctgaaagcttgcaactgtatcttgatacaagatttgagcagctgaaaattgctactgaacttggactctggcaggaagccttcagatcagtggaggatatacatggactgatgtgcttagtcaagaaaacacccaagccatccttgatggctggttattatgtgaagctgacagaaatatgttggatatcatcgagtcatctgtatcatgcatatgcatggttcaagctctttttattacaaaaaagcttcaataagaatctgagtcagaaagatttgcaattaatagcttcatctgttgttctggctgcactttcagtgcctcctcatgatcacacccacggtgcatctcatttggaactggagcatgaaaaagagagaaatttgagaatggctaatctcattggctttaatcttgaaactaaacctgaaagcagagaaatgctatcaaggtcatcacttcttgctgaactggcat

SEQ ID NO: 1597 - DNA, 2510 bp, Glycine max
acccagcgaatgccccttctgccctcccaacccatatacttaaaaaaacccaaaaaaccaaaaataccataaaatttttcagcttctccgccgccgtacagccaccacctccgttcggatctccggcggacctactatccctactactctatttacacggaagaacaaaaaaactatcccacaaaaaaaattccaaaagcggttcggttagggtttagttttttttttatattatttcgtgtatctaatttttcatcagtaatattatttttgaggcggcgagatggcgcagattcaggtgcagcatcagagtccggtgtcggctcctcctccgaacggcgtggctaacgcgccgaacaacccgaaccagttcgttacgacgtcgttgtacgtcggcgatcttgagcagaatgtcaacgacgcacagctatacgatctgttcaaccaggtcgtccaagtcgtttcggtgcgcgtttgcagggaccttacgacgcgtcgttcactcggttatggctatgttaatttcagtaaccctcaggatgcggcgagggcattggatgtgctgaatttcactccacttaacaacagatctattaggatcatgtattctcatcgagatcctagtcttaggaagagtggtactgcgaatatttttatcaagaatttggataaggctattgaccacaaggccttacatgatactttttcttcttttggactcattctttcttgcaaaatagcaactgatgcttctggtctgtctaagggctatggttttgttcaattcgacaatgaagaggctgcacagaatgctattgacaagttaaatggcatgttgatcaatgataagcaggtctatgtaggccattttctgcgaaagcaagatagagagaatgctctcagtaagacaaaatttaataatgtctatgtgaaaaacttatcagagtcaaccacggatgaagagttgatgaaattttttggagaatatggtaccattactagtgcttgtataatgagggacgcagacggtaaatcaaggtgttttggctttgtcaattttgaaaacccagatgatgctgccaaagctgttgaaggacttaatgggaagaaagttgatgataaggagtggtatgttggaaaagcccagaaaaaatctgagcgtgaacaagaactgaaaggacggtttgagcagagtataaaggaatctgctgacaaatatcaaggtgtgaacctgtatctcaagaacttggatgatactatcagtgatgaaaaacttaaggaaatgtttgctgaatatggtacaataacttcatgcaaggttatgcgagaccccactggaatcggtagaggatcaggatttgttgcattttcaactcctgaggaagcatctcgtgctctcggtgagatgaatggtaaaatgattgctggaaaacctctgtatgttgcccttgcacagagaaaagaagagagaagagcaaggttacaggcacaattttcacagatgaggcctgttgcaataacgccttctgttgcgccccgtatgcctctctaccctcctggtgctcctggtcttggacaacaatttttgtatgggcaaggacccccagccatgatgcctccacaagctggatttggttaccagcagcaactagttccgggaatgagacctggtggtggtcccatgccaagcttctttgttcccatggttcagcagggccaacaagggcagcgcccagtgggccgccgaggaacaggtcctgtgcaacaaccccaacagccaatgccaatgatgcagcagcagatgcttccaagggggcgtgtctatcgttaccctcctggccgcaacatgcaagatgtcccacttcaaggtgtagctggtggaatgatgtcagtcccttatgacatgggtggtctgccaatccgcgatgctgtgggacagccaatgcccattcaagctttggccacggctcttgcaaatgctccccctgaacagcagaggactatgctcggtgaagctttatacccgcttgtggatcagctggaacacgatgctgcagcaaaggttactggcatgcttctggagatggaccagcctgaagttttacatctgattgagtcaccagatgctctgaaggcaaaagttgctgaagccatggatgtgttaagaaatgttgctcaacagcaaactaacccagctgatcaactagcttcactctctctcaatgacaatcttgtgtcttagattcctttagtcttttgactggaatctgctttccagttattcctattccgtatgcttccccccagtttatttgcaggtgtcttagatgttttgttttagtcagagtactaaggaagtttatgttcttggtacttttggtttcactttttttcgtatctgaattgctgtaggatggattagcataacttgttggatttattagatatgcatttgcggtttggattattttcctccattgttctattatattggtcgtgtgaacttcttt

SEQ ID NO: 1598 - DNA, 497 bp, Glycine max
gacccacgcatccagccccttctgccctccccagccattaactgaaaaaaaaaaccaaaaaaccaaaaatactacaaatttttttcagtttctccgccgccgcacaaccaccacctcctccgttcggatctccggcggacctactatccctactactactctactctatttacacggaagaacaaaaaactatccccctcccccaaaaaaaaccccaaagcggctcggttagggtttagttttgtaccatttcgtgtaatctaatttttcatccgtaaaaatctaattttgaggcggcgagatggcggagattcaggtgcagcatcagagtccggtgtcggcggctcctcctccaaacggcggcgtggcgaacgccccgaacaacgcgaaccagttcgtgacgacgtcgttgtacgttggcgatctagaccagaatgtcaacgactcgcagctctacgatctgttcaaccaggtcggccaagtcgtttcggtgcgcg

SEQ ID NO: 1599 - DNA, 408 bp, Glycine max
tcggtttttccaacccatatacttaaaaaaacccaaaaaaccaaaaataccataaaatttttcagcttctccgccgccgtacagccaccacctccgttcggatctccggcggacctactatccctactactctatttacacggaagaacaaaaaaactatcccacaaaaaaaattccaaaagcggttcgattcaggtgcagcatcagagtccggtgtcggctcctcctccgaacggcgtggctaacgcgccgaacaacccgaaccagttcgttacgacgtcgttgtacgtcggcgatcttgagcagaatgtcaacgacgcacagctatacgatctgttcaaccaggtcgtccaagtcgattcggtgcgcgtttgcagggaccttacgacgcgttgttcactcggttat

SEQ ID NO: 1600 - DNA, 937 bp, Glycine max
ctcgagccgaatcggctcgagggcgttctatatattattgaattgacaatgaggcctgctcttgctttgcttcctcttctatttgctttcttgttagctgccactacagaatcaagaaaagatccaggggaatattggaaaatgatcatgaaagatcaggaaatgccagaaggacttcaaggtcttgtttcatttcaatctgaaaataaccctaagactcaagagcagcttggtaaaggttccaaaaaccattgtgaagagtctctagttacaaatacacaagttaacagtgacttcgaacccataccaagtgttaccaaatatgatgatttggaattcaagtcaagcattatcaagaacgatgattttgaatcgagaccaagtgttactaagtatgatgattttgaactcaagtcaagcgttaccaagaacaatgattttgaaccgagaccaagtgctaccaaatatgatgattttgaactcaggtcaagcgttaccgagaatgatgattttgaaccgagaccaaatattagcaagtatgatgactttgaactcaggtcaagcgttaccgagaatgatgattttgaatcgagaccaagtgttaccaaatatgatgatttagaactcaaatcaagcattaccaaaaacgatgattttgaaccgagaccaaatattagcaagtatgatgactttgcatccaggtcaaataccaagtacgattctgaacctaaagcaagtgctaccaagtatagtgattaaatgaaaatcaagtaattgtataatacagtcgaagaaaatcgtgctccatatcaatgtatcctatgaataaatagggtgtgaagtattatagattttgaataacttcggctatgttgggctaaaagttggaaaaataaaaatatatatttgctttaattaaaaaaaaaaaaaagggggg

SEQ ID NO: 1601 - DNA, 1055 bp, Glycine max
gatggagtgacaatgggaaagcaaaacattcgtcaccgcttgcgattccttcacgtggggaggtcctataaagggcaaactcacttgaattgaatgtagacgccattctgcaccgagattcattcttcaccaaaacttcgcaaagaaacactacacatccatggcaactgctggcgtgcaagaagttcgtgttccccctctaacttccacctctgagccaccttctctctttgacggaaccaccaggttgtacatcagttatatttgtccctatgcgcagcgtgtttggatcactcggaactataagggactacaagacaagatcaaactggttcctattgacctacaaaacaggcctgcttggtataaggagaaagtctaccctgaaaacaaggtgccatcattggagcacaatggaaaggtcttgggtgaaagtctcgatttggtcaaatacatagatgacaactttgaagggccgtctctagttcccagtgatcctgccaggaaaaggtttggtgaggagttgatctcccatgttgatacattcaccaaagagctgtattctgcattgaaaggagatccaatacattaagccggtcctgcctttgattacttagagaatgctcttggtagatttggtgatgggccattctttcctggtcaattcagctgggtgggtattgcttatgttccatttggtgaaagattccagctcgtctttgctgatgtgttcaagcatgatataactgaaggaagacctaaacttgcaacatggattgaggaagtgaacaagattagtgcttatacacagacaagagctgatccaaaggaaatcgttgatcttttcaagaaacgttttttggctcaacagtgaaaatttggttgcagtgggtatcctctaagttgtagattgttgtcaataaagtgttgtgtgtttatcggatgcttctttagtcacatgttgttttgtcactttgtctgctagagctgcaaataatttgatttcagggtcggtgatgtttatgtaccagcttgtctgatgtcagactaataaa

SEQ ID NO: 1602 - DNA, 582 bp, Glycine max
cccttgcgtccggttagctttttactacggaatcaagaaaagatccaggggaatattggtaaatgatcatgaaagatcaggaaatgccagaaggacttcaaggtcttgtttcatttcaatctgaaaataaccctaagactcaagagcagcttggtaagggttccaaaaaccattgtgaagagtctctagttacaaagtcactgttaacttgtgtatttgtaactagagactcttcacaagttaacagtgactttgaacccataccaagtgttaccaaatatgatgatttggaattcaagtcaagcattatcaagaacgatgattttgaatcgagaccaagtgttaccaagcatgatgattttgaactcaagtcaagcgttaccaagaacaatgattttgaaccgagaccaagtgttacaaagtatgataactttgaacccagaccaagtgttaccaaatatgatgattttgaactcaggtcaagcgttaccgagaatgatgattttgaaccgagaccaaatattagtaagtatgatgactttgaactcaggtcaagcgttaccgagaatgatgattttgaat

SEQ ID NO: 1603 - DNA, 916 bp, Glycine max
tccagaataatgtctccaatggagtttcatagcattaccaagtttcacaatatcccacttgtgtcttcttctcttgtgattttatgtattgctaccactatactgaataaccctgcaatggccacaaagcaatattattgtgatttccctgccatctttaactttggtgcctcaaacgctgacactggtggcttggctgcttcattttttgttgctgcaccaaaatcaccaaatggagaaacctattttcatagacctgctggaaggttctctgatggtcgactcattattgatttcttagcacagagttttggactcccttatctgagtccatatcttgattcgctggggaccaacttctcccgtggcgcaagctttgcaacagcaggatccacaatcataccccaacaaagttttagatccagtcctttctcccttggagttcagtactcgcaattccaacgttttaaacccactacacagttcattagagagcaaggtggggtatttgcaacactgatgccaaaagaagagtattttcatgaagctttatacacatttgatataggccaaaatgatcttacagctggattttctggtaacatgaccctactgcaagttaatgcttcaatacctgatataatcaaaagtttcacatcaaatataaagaacatatacaatatgggggccagatcgttttggatacacaacacaggacccattggttgcctccctttaattttggccaattttccatctgctgaaagggatagctatgattgtgcaaaggcatataatgaggtggctcagtcttttaaccataatttaaaggaagccttagctcagcttcgtacgaagcttccattggctgcaattacatacgtagatatctactctgcgaagtacttgcttttca

SEQ ID NO: 1604 - DNA, 2418 bp, Glycine max
gggaaaactcgagccaagcagtattacgcaaatgacgtggatagaacgaagaacatgggtgtgttgattcatggagatggaagttttgctggacagggtgtggtctatgaaaccctgcatttaagtgctcttccaaattacactactggtgggacgattcacatcgtgtttaacaatcaggttgcatttacaactgatccgacttctggcaggtcttcacaatattgcactgatgttgccaaggctttggatgctcccatctttcacgtgaatggtgatgatgttgaagcagttgttcatgcctgtgaacttgctgcagagtggcgccagactttccactctgatgtggttgtcgacttggtgtgttaccgtcgatttggccacaatgagattgatgaaccatctttcactcagcctaaaatgtacaaggtaatccgaagccatccatcaactcttgagatctatgagaagaaccttttggaatcaggggagttgacacaagaagaaattgataggatccacaagaaggtcacatcaattctaaatgaagaatttttggctagcaaagaatacattccaaaaagaagagattggctttcagcgtattggcttggtttcaagtcacctgaacagctttcacgtatccgaaacactggtgtgaaaccagagatcttgaaaactgttggaaaagcaatcacaaccatccctgaaaatttcacacctcatagagcagtgaagaggatttatgaacaacgggcccaaatgattgaaactggggaagatattgactggggatttgcagaggcgcttgcttatgctaccttgcttattgaaggtaaccatgttcgattaagtggtcaggatgttgaaagaggaacttttagtcaccgccatgctgtagttcacgatcagacaacaggagagaaatattgtcccctggacaatgttataatgaaccaagatgaagagatgtttaccgttagcaatagttcactttctgagtttggtgttcttggatttgaattgggttactcaatggaaaatcccaattcattgataatttgggaggctcagtttggtgattttgctaatggtgctcatgtcatatttgacaatttcttggcttctggtgaggctaagtggctccgtcagactgggcttgttgtgttacttcctcatggttatgatggccagggcccagagcattcaagtgcaagattggaacgctttcttcagatggctgatgacaaccctcatgttatccctgagatggatccaaccctccggaagcagattcaggagtgtaatttgcagattgtgaatgtcacaactcctgctaattttttccatgttctaaggaggcaggtacatagagattttcgcaaacctctcattgtaatgtcccctaagaacctgcttcgtagcaaggcttgcagatcaaatttatctgagtttgatgatgtccaaggccacccaggctttgacaaacagggaaccagattcaagcgcctcataaaagatcaaaatgagcacaaagatgttgaggagggtattagacgtttagtactttgctctggaaaggtttactatgaacttgatgaacatcgaacaaaggttgatgcaaaggatgttgcaatatgtagggtggaacagctttgtcctttcccttatgaccttgtccaacgagagcttaaacgatatccaaatgccgaggttgtttggtgtcaagaagagccaatgaacatgggtggatacacttacgttttaccccgacttatatcttcaatgaaagctgtgaataggggaggttatgatgatgtcaaatatgttggtcgtgctccatctgcggccacagccactggtttcctcaaggttcaccagaaggagcagactgagattgctgaaaaagcccttcaacaggaaccgatcgacttcccattttgaaaaggcatttgcacatgcatccatcttttttgagagtgataataatgcatttagtttaatttatccaccacgtaaggagctatagttggaaggaaggtgacttcatacatttgctttcgagttttgaccttttatgatcttttggttccttgcaaaaagtcagttaagctgaatttcaacatgcctatgctgaaatatttttatttccttgcgatacgcaaaggcgtggttgccttactggttggaattgatcccttggtacttaccattttttttgaattagactgtctaatttggaaaagcatcttcaataatttgtgactatgtaattccattttccagaggcgtgccttggtagtatagcctcgggatcatggccaacagtttctcgtaattttttttctcaaatatgctttttaataccatcaattcaaagccaactttgatatggttcttgaatcaaaaaaaaaaata

SEQ ID NO: 1605 - DNA, 209 bp, Glycine max
atttgtgactatgtaattccaaattattgatgctgcttttccaaattatacagtataatttggaaaagcatcttcaataatttgtgactatgtaattccattttccagaggcgtgccttggtagtatagcctcgggatcatggccaacagtttctcgtcatcttttttctcaaatatgctttttaataccatcaattcaaaaccaaaaa

SEQ ID NO: 1606 - DNA, 482 bp, Glycine max
gtctcgactcacgactcaaaaaaaccaaggcatcaaatcaaaccctcaaaagttctctctctctctctctctctccttttatatcatcatgttcttgtattgctctagtctcctctgagagaccttggagatttttccaccaacgcaaggcttcaacctccgctacgaaagcatgaggctcgccggttgaagtactctgaaggataagttccaagtgatcgacgctgattccagagtgaagcgctttctttctttccaccatggtttcgctagggttttgtcctcgcttcgtttgaactctggacgttgttcaggggctaggttgttttctcttatggtcttgtctctggaaccgagcactgaaggatgtcgtaccacgttgtgccaaagtcgaagttgtgcgcggtgcattgcgcgaacatcaagttcttctcagagcttgatttggctgctcttgccttcgatgtcgattataggagcat

SEQ ID NO: 1607 - DNA, 701 bp, Glycine max
gccttatctatctgcatgaacatattgggatggaccatcatggtatcctttggaatgaacgcagccgtaagtgtgagggtgtcaaatgaattaggagcatctcacccaagaacagcaaagttttcacttcttgttgctatgatcacttcgactctgatcggtgtcatgctctccatggtgctgatcatcttccggaaccattaccctttctttttctcaaatgattcagaagtgagagcgatggtggtggagctcacacccatgttggccctttgcattgtcatcaacaacgtgcaacccgttctctaaggggttgctgttggcgcagggtggcaggctttggttgcttatgtgaacattgcttgttactacctatttggtattcctttgggccttgttttgggatacaagcttgacatgggtgtcatggtgatttggtctggaatgctgtcaggaactatcttacaaacttgtgttctattcttccttgtctatagaacagattggaataaagaggcatcccttgcggaagatagaataaagcagtggggtgggcatgaagattcataaacgcacgctatagggaagaataatggtcaataaacatgaaattctgtttctctttcttaggatcaggtgaacgatcctgcattcattgtttttccttaaaaagtaaatgagcaatattatgttttctgaat

SEQ ID NO: 1608 - DNA, 575 bp, Glycine max
gcgtccgcgtgaattgaggagagagagagagaggatgagaggggtgaagagagcaatgtttgtaggcagagccctgagaagcaattccaacagcggcgtgtctgcccatggccatggctgcttgaccccatcaaatccaaatccaaatccaaatccttctgtttctgttactgggttcagatacctttctgcttatgctgctgccacgtctcttgtccaagacgctctgaccaaggccgtcaaacccaaagaacttgcctctttcaatactaggcctggccattctgcaacaagcgtttctggactattatgatattccattcaaagcgggtgaggtgaatcccatctacaagaaggagatcaagtggtccgactacaagaaggtgcctatcctcaccgttgatggtcaacaaatggtcgactcttcagacataattgataaattgatcaaaaggatacatccagattatgacctatatgcacaagatgagaacaagttgcgatactatgttttgcttattatacttcgactacttggttgcatacacacatcgggttacatctgatgtcattat

SEQ ID NO: 1609 - DNA, 801 bp, Glycine max
tcaagttatatcctgttgtggttgtcaaagggttgtgtgacggtgaattgggtagaagaagatgagaggggtgaagagagcagtatttgtaggcagagccctaagaagcaattccaacaccgccgtgtacggtgttggtgccacccttcatcgagatcgaatggctccccatggctgcttaaccccatcaaatccaaatccttctgtttctgttactgggtttagatacctttctgcttctgctgctgccacgtctcttgcccaagacgctcagaccaaggccttcaaacccaaggaacttgtcctctttcagtaccaggcctgtccattctgcaacaaggttgcagcgtttctggactattatgatattccattcaaagtggttgaggtgaatcccataaacaagaaggagatcaaatggtccgactacaagaaggtgcctatcctcaccgttgatggtgaacaaattgttgactcttcagacataattgataagttgatcaaaaggatacatccagattatgacctaaatgctgaagaagagaagaagtggcgacagtgggtggataatcacttggtgcatgtcttgtcaccgaatatatatcggaatgttcctgaagctcttgaatcatttgattacatcaccacccaaggaaatttcagtttttctgagagattagtggcaaagtatggtggggctgcagctatgtattttgtgtcaaagaaattgaagaagagacacatcgtcactgatgagcgtgcagcactgtatggagctgccgaacaatgggttgatgcttt

SEQ ID NO: 1610 - DNA, 853 bp, Glycine max
ctaacacctacaatttttctttaatattttctcgtccctgaggcagagaaaaaaagaaaaaactaccgaagaagttgatgaattaatttaatcggaattcgtaaatattttttctctttctctttccaacctcaaccccacccttaagcctctctctctctctctctctctctcgctctctctctctctattctattgcttccttttttccgctattttctggaacaaatggctggagtgacaaaggaggaagagaggggtagtcctagttggggtgcttcattttttacgcagacaacagaggatgtggctagagctgttgccactgctatgaattctcagaggccatctgtggtatattcattgaaaaatgatcatggtggcagccaacttcaaaggctgcagtatcaagttacgaaaatgataaaaggattttctagccctccagaagttaaatatacaaattacaatccggaaatcttgacaactcagaagcgtcaatgggctgcaaactttcagttgcagtacacggaccataagtcttggaaggagccaacaaagctgtttgaaagcatggtggttgctggacttcatcctaattgtgatattcaggcactgcaaaggcaatgttttttaagaaagtctgaaggccctggtaaattgagaagtgcacttggttatcagaatcagtcccgtgtggaagtggaacccaatctagaacctcaggttttatttgttaccctcgagaaaaacagctgcctcttaaaggcaaggatcttctctctttctgcttacctggaggcttagaggttaatgctgttgagagaacccttccatgagtgagttgaacgaa

SEQ ID NO: 1611 - DNA, 593 bp, Glycine max
agattttcctttttcttctatctttctgttccatcgatcacctccaaatccaattatatatttatatttttcactccgcaacccaacactacctgaaccaacttcttcatcaatttattctccctaaagcttcgccaacggccaccccaactctctgctttccagcttcttcctttcttttgctatttcgaggcacagatgactggaatttcaaaggaagaagggtcagctagtccaagttggggtgcttcattttttatgcagacaagagaggaagtggctagagctgttgcagctgctgttaaccctccaatgtcgtcaaaagatgataatagtggtagccaacttcaaaggctgcagtatcaagttgcaaaaatgttaaaaggcttttctcaccctcctgatgttgaaaccacaaattacaatcctgaaatcctgactagtctgaagcgtcaatgggctgcaaactttcagttgcagtacatggaccataggtcttggaaggagccctcacgactgtttgaaagcatggtggttgttggacttcctcctaattgtgatgttcaggcactgcaaaggaaatatgttgatag

SEQ ID NO: 1612 - DNA, 436 bp, Glycine max
cctgtttgtgcttttcggtttgtggaacagagtagaacatgaaacagaagatagttatggtgtagctttgaagaagctatgagaacaaatggctggagtgacaaaggaggaagagaggggtagtcctagttggggtgcttcattttttacgcagacaacagaggatgtggctagagctgttgccactgctatgaattctcagaggccatctgtggtatattcattgaaaaatgatcatggtggcagccaacttcaaaggctgcagtatcaagttacgaaaatgataaaaggattttctagccctccagaagttaaatattcaaattacaatccggaaatcttgacaactcagaagcgtcaatgggctgcaaactttcagttgcagtacacggaccataagtcttggaaggagccaacaaagctgtttgaaagcatg

SEQ ID NO: 1613 - DNA, 1926 bp, Glycine max
gaaatgatggagaggtggtgaatgattttgatgccaccaaacacatgtcctttggatccaacgagaacaattattttctcccttcaactttctctctttctcctcattctttcattcaccctccttatccttctttttttctttcctaacaacactcttgaagtgttgttaggaaagaaaaaagtgttgtagtcttgctttagtaacttgcatcaatgggagctggttgttctaaattgtgtctatgctggtgcccctccaactccaaacccaatcttcatgacttacctgataatgagaatgagaaggaggagtcttgggttggcttcaccgagttcaccttggatcaactgagaagtgccacatcgtcattttcacccgacaacatagtctcggaacacggtgagaaggctcccaatgttgtctacaaaggaaggactgaagatgataggttggttgctgtgaagcgcttcaacaagtctgcttggcctgatcctcgacagttcctagaggaagcaagggcagtggggcagctgaggaatgagcggttggctaacttggttggttgttgctgtgaaggggaagagagattgcttgttgctgagtttatgccaaatgaaactctctccaaacatctctttcactgggagagccagccaatgaaatgggcaatgaggctgagagtggccttgtatttagcacaagcattggagtactgcagcagtaaaggaagggcattgtatcatgatcttaatgcttatcgagttttgtttgatcaggatggaaaccctaggctctcttgttttggactcatgaaaaacagcagagatggcagaagctatagtacaaatttagctttcaccccacctgagtatttgaggacaggaagaatcacccgagaaagtgtaatatacagttttggcacactcttgcttgatcttctgagtggcaagcatattccacccagtcatgcacttgacctaatacgtggcaaaaactttctgatgctggtggactcatgtttggaaggtcatatttcaaatgatgatggaactgagatagtgagattagcttcacgctgtttacagtatgaacctcgtgagaggccaaacgccaagtcgcttgtgactgctctagctcctcttcagaaagaaacttcagttccatcacaagttttgttgggcataccagatgagattaccccatcaaaggaagcagttccactgacaccttttggtgaagcttgttctagaagagatctcacttcaatatatgaaattttggaaacggtggggtacaaggatgatgaagatgtagcaaatgagctttcgttccaagtgtggacagaccaaatacaagaaacactaaattctaagaagcaacgagattctgctttccatgccagagacttctctaaggccatggactgctatacacaagtaagtcagttcattcgatggcggaacgatgtatcaccaactgtgatgcatagcgctgctttggttacctcttgatctacatgctacaagaagcactgggagatgccatgcaagctcaatcagtatcccccacatggccaattgcattctatcttcaagcagtggccctcttcagcctcgggatggaccatgatgcagaggaaagtcttaaagatgcaacaactctggaaaccagaaaacatagaaactgaagtgtacatagctttttgttttctttcttccctttcttttggttccctttcatttctcaaggaaatgttacaagcattagctgtatgtatctttgtctgtccattatttccttcaacagttttgaaactcttattgtctatgcctcctaggattttgttttcctaaaaaaaagctgtgaaattgccctagttcgtataaaaatattatatacaataacttaaacattcaatattca

SEQ ID NO: 1614 - DNA, 981 bp, Glycine max
tgtttacagtatgaacctcgtaagaggccaaacgccaagtcgcttgtgactgctctagctcctcttcagaaagaaacttcagttccatcacaagttttgttgggcataccagatgagattaccccatcaaaggaagcagttcctctgacaccttttggtgaagcttgttctagaagagatctcacttcaatatatgaaattttggaaacggtggggtacaaggatgatgaagatgtagcaaatgagctttcgttccaagtgtggacagaccaaatacaagaaacactaaattctaagaagcaaggagattctgctttccatgccagagacttctctaaggccattgagtgctatacacaagtaagtcagctagaaatacgtggagcatgaatccattatgaatctcccaaaatagcatgcagatttcacacttttgtacaaactacataacctttggttatcaacttcatggcagacaaagttcatctttactctattgaattttatgtgttactacttactgttatttggctaaaacagtgaatgattagttggtaacgtaaaggggtcaatgctttagaattatcaattaacctttcattactcacaaaacatgctaaataaagaagactagactgttatgcacctcccaaactaaaagagtattttcttgtactccttttttctctcgagagaattcctacttgcttgttttgtgtagttcatcgatggcggaacgatggtatcaccaactgtgtatgcaaggcgctgcttttgttaccttatgatcaacatggtacaagaagcactgggagatgccatgcaagctcaatcagtatcccccacatggccaattgcattctatcttcaagcagtggccctcttcagcctcgggatggaccatgatgcagaggaaagtcttaaagatgcaacaactctggaaaccagaaaacatagaaactgaagtgtacatagcttttt

SEQ ID NO: 1615 - DNA, 432 bp, Glycine max
agctggaaatcgggttggagcaaaggaagagtggatataaagaccgagcaaccttacccaaaacccacgcatccttcttctctggtcatttccccacactctctttccctccatgagcgccatggatttctcttccatctatggggtctcacacaaacccttcctcaccctcttccttctcttccttctacctctccattctcactctcacaactctacaacctcagctcagattaactctaactccatcctcgtcgctcttctcgattcccattacaccgaactcgccgaacttgttgagaaagcgcttcttctccagcagcttgaagacgccgtcggcaaccacaacatcaccatcttcgccccccgaaaccaagcccttgaacgcgacttagaccctgaattcaagcgtttcttgctcgagcctcgcaa

SEQ ID NO: 1616 - DNA, 292 bp, Glycine max
gaccgagcaaccataccccacacccacgcatccttcttctcttgtcatttccccacactctctttccctccatgagcgccatggatttctcttccatctatggtgtctcacacaaacgcttcctcatgctctgcgtgctcttcctgttcaacgcagatcggtgtcgtgctcgccatgatgctgatcatcttcagggatcagggtggtttcaataacgcaggttcttcagaaatggaatgtagtatctgtgaaacgcaaacgggagtgggaccttgacagtggccagaaatac

SEQ ID NO: 1617 - DNA, 433 bp, Glycine max
cagagactcagcaacctttctaccttcttctcttctctgctcttgggttctcttctcttcttcactgccatttcatttccccactctatccttccctccatgagcaccatggattcctcttccatctatggtgtctcacacagacacttcctcaccctcttccttcttttccttctgccactccattctcactctgcattctctcataactcttcttcctcgtctcaaattaactctaattccatccttgtcgcgcttctcgattcccattacaccgaactcgctgagcttggtgagaaagcgcttcttctccagaagctagaagaagccgtcggcaaccacaacatcaccatcttcgcgccgcgaaaccaagccctggaacgcgacctagaccctgaatttaagcgattccttctcgagcctcgcaatctta

SEQ ID NO: 1618 - DNA, 948 bp, Glycine max
tctcgagccgctcgagcggctcgaggtagaactgcgctcgcgaccgcgcatagtgtggtaccagcagcagagcttgtatacgtcgccgcttcagcgtagcaacatgatcattcccgagaagaaccgtaaagagatctgcaaatacctcttccaagagggagtttgctttgcgaagaaggacttcaatctggcgaagcacccggagattgatgtgccgaatctgcaggtgataaagctgatgcagagcttcaaatccagagagtacgtgagggaaacatttgcgtggatgcactattactggttcctcaccaacgatggaattgagttccttaggacttacctcaaccttccatccgaaattgtccctgccactctcaagaagcaggccaagcccgccggaagaccattcggtggcccacccggtgatcgccccaggggcccacctcgctttgacggagagaggagattcggcggtgaccgtgatggataccgtggaggtccacgcggacctggcggtgatttcggtgacaagggtggagctcctgctgactacaggccttcttttgggggtggtcctggcggaaggcctggcttcggtcgtggttccggtggttatggggcaccgactagttcaaacattccttcttaaatataaattatatgtgctctagtttttgcagttttggctgtcattggagttaatagaagttcccctctcccaaaagttgtttgttctgtctgacaatttacttattcggttatttatgcaatgaagattttgaattaagtgtttttgttataggttgacaatattgtttatgttggatgattgatggtttagaaagtgaaaaatagctgggaaaagcctttatttttaaataaaaaagtaactttattttgggatgttttaaaaaaaaaaaaaaaaaaaaaaaggggggccccccgatt

SEQ ID NO: 1619 - DNA, 1232 bp, Glycine max
gtttgattaagaaaatagaagccttattttgctctctgttctttctctcaacaatcgttccaacaaatcaagctacgtttctaccactcaggtttgtttctccgaacgcgaaaatctaatacttcttttagggtttgtgatggatgatctacgagaatctatgttctatccgacttcatttatctcagtgaagcttagggttcctttcaatttatttatttcggggttttcataaggatcggcaataccctaatttggggttttgggagagtctctattgacgttgctgatcagggttaaattattggtctttgatccaagtcttcaatggattttgatattgatgttgttgatcttcctcgatcaacatagttttgtttctgttcatcacttgctttacgattgttattttgggaatggaaaatttgggagccaaaaggttttgggttttggatgaagaattaagtctatggctgggatttaatcattgagttaatgactgaaagcatgagccatggagaattttattgataggatgcagtacctgatctgggatgtcattacaatgccatgtttgttttttagaatatcatggatacaaagtttgcacgaaggactgagcgcattggtagaacaacatgctcttattggagagctggaaaatgtaacagccacgcgtccggatttgtgcacatagagacaccatctccacctgctgctggtggttatggcaatactgcatatagctacggaaaaaagccccattcctcctctgagaataccccgaaatatggttcaaagaaagcattgcttggagataatggagatagaggagatgcaacaagggttgctaaggctttcaagaaatcatcaccaaggatatgtaaatactggatcaacaacaattgtgcacatggtgaacaatgcctgtatctgcattcatggtttcgtggtgatgggttttccacagtaacgaaacttcatgaacataagaaggttatcactggcatcgcacttcctgttggatccgacaaactttattctggcagcactgatgggacagttaggatatgggactgccatactggtcaatgtgctaaagtcatcatcttggtgctgaggttacctctttgatcagtgaggggccatggatttttgttggtctgcaaaatgctgtcaaggcttggaacatccagaccattacagagtttactcttgatggacccaaaggc

SEQ ID NO: 1620 - DNA, 286 bp, Glycine max
gaaaatacaaaccttgttttgctctctgttctttctctcaacaatcgttccaaacaaatcacgagacctgaattctgaagctttcgctacgtttctaccactcagagtatcatggatacaaagtttgcacgaaggactgagcgcattggtggtccagcatgcgcctattggagagctgggagatgtaacagaaatccttgcagatttttgcacatagagactccatctccacctgctgcttgtggttatgtcaatactgcatatagatatggaaaaaagccccatt

SEQ ID NO: 1621 - DNA, 402 bp, Glycine max
ctcgagccgagaaaatagaagccttattttgctctctgttctttctctcaacaatcgttccaacaaatcaagagagttgaattctgaagcttttgctacgtttctaccactcaggtttgtttctccgaacgcgaaaatctaatacttcttttagggtttgtgatggatgatctgcgagaatctatgttctatccgacttcatttatctcagtgaagttttctgcgcttccacgatgcaaatatagggtttcgcgtttagggttcctttcaatttatttattatcggggttttcataaggatcggcaatatcctaatttggggtttggggagagtctctattgacgttgctgatcagggttaaattattggtctttgatccaagtcttcaatgggttttgatc

SEQ ID NO: 1622 - DNA, 424 bp, Glycine max
  unsure (1)..(424): unsure at all n locations
aagcttctccaatccccatttcgcaaattcacaatcgccaccattcccaaccctaaccctaaccctaaccctaaccctaacccttctcaaacaatggtagtcgccctgggccccgggaaattctacggcaccagccttccccgccctcgcatctacaccgacgtcaagttcaacgaccaccgcgtcgacccacccgttcccgtcaacgacccactcatgtcatgggccgaagaggcccactggtccatgggcggcctcagtttcaagcgcctccgcctccagggcaaaatcgaaggcaacgtcganaggctccgctcccagcgcgagaagatccaggcccgaagcgcaagcccaccggcccgctccgatcttcgcagatccaaaagagctgcctcccctctgactcaacgggtccggtcatgac

SEQ ID NO: 1623 - DNA, 1171 bp, Glycine max
tggacccgaacctcgttatgcgcaacacaataaaaggcgacaccgagcgcatagcacgctactactacctgccctcagcaccagccgaaagccaagaaaaagctttcgatccctgtaactgcgttcgactatttagggtttttttcggagacaatggcggatgaatcggagcacacggcggcgccggctgccggcgaatcgctgctcgacaagatcgccgagaagattcacggccacgacgactcttcctcttcctccgattccgattcggataaaaaggaatcttcgtcgattaaggagaaggttttccgcctctttggaagggagaagccagttcactccgtcctcggcggtggaaaacctgctgatgtgctcttgtggaggaacaagaagatatctgctagtgtacttggtgtagccacggctgtttggatcttttttgagttgcttgaatatcacctgcttactctagtttgtcacatttcgattctggtgcttgcagttttgtttttgtggtccaatgcccatacctttattcacaaggcaccacctcgcatcccaaccgttcatctccctgaagaaccaattcgccaattcgcatctgcattgacaattgaaatcaaccgtggatttgctgccttgcatgctattggttctggaagagatttgaagacatttctcattattattgttgggacgtggattatatcaattgtggggagctggtgcaatttcttgaccttgttctacattgtctttgttttgttgcatacggttcctgtcatctatgacaagtatgaggataagatagaccctctggcagagaaggcactcatcgagttcaagaagcagtatgctgtgtttgacgaaaaggtcttgaataagatcccgaaaggcccattgaaagggaagaagttagcttagtgtttaagcatttgtattctcaagaacaaaaataggaggctccacttgagtcttttctattttctagagcctcgtttcttttaaaccatacaccaagcattgttttggattttcttttaggcgggtgtggtattcatggttttagcttcaagatgtaaccttttgattttgctacaagcatgtcgattttgctgattacattgtttgttagacttgtactcttcaatgggtaattaatttgtaagcg

SEQ ID NO: 1624 - DNA, 580 bp, Glycine max
ggaagaaaaaaaggaaaaaagaaaaaatcttacgccctaatctgtgtccgattttatcaatcacagactcaaaggtgtgcagttattattattattatctacatatttttgcaaagctgcttcatctgtattattacgcagatcagattcaggtctctatcaccaagatccaacaacttctcaaccacaacgagttgctattcccttcgattcacgaacccagaaaattaaaacattaaaaaagatatcaagtatcaaaatctaaacggcatcagcaaacatgtctcaacaccatggtgatgaaatggagtatgcggcagatgataatgaaatggcagaggtagaagaggatatgtatttccgtggcagggcatttggtgaatcagattcggatgatgacgacgactacgaatatgaccctttggaaaaccgaatatcagataccactgctgctgaagctaggagggggaaggatatccaaggtataccttgggataggttgagcattagtcgtgagaaatatagacaaactagactagagcagtacaaaaattttgaaaacataccacaatcaggggaa

SEQ ID NO: 1625 - DNA, 462 bp, Glycine max
aaaaaatcttacgccctaatctgtgtccgattttatcaatcacagactcaaagattcaggtccttatcaccaagatccaacaacttctcaaccacaacgagttgctatttccttcgattcacgaacccagaaaattaaagaattaaaaaagatatcgagtatcaaaaacggcatctggaaaacatgtctcaataccatggtgatgaaatggagtatgcggcagacgataatgaaatggcagaggtagaagaggatatgtatttccgtggcagagcatttggtgaatcagattcagatgatgacgacgactacgaatatgaccctttggtttgttttgactcataagcaaaaccttgtttgctcattttaactgtgaaaattcaatgttgtgtgtgggctcatgtgtccatgtattatttgcatatgtagttgctgccttctggttttatgggcaactttagc

SEQ ID NO: 1626 - DNA, 511 bp, Glycine max
attcaatcggagactttttccttcttttttattctttcttaactagctaaataaccttctatatcagagttgatgtcttgattatgatataaataaaaggcatcgaagagagacaagagaaagaatggatgtgaggaacattgctgtggtggtggaagacgtggatgctgctagaactgcactactctgggcacttgacaacatcattcgctctggtgacataatcacactgctccatgtctaccctttatcaagatccaaaagcaaaagcaaagctcgtcttcttcgactcagaggcttccagttagcactttccttccaagacatttgcaacaacttctccaatacaaaggttgagattgttgtcacggaagagaacaaagaaggaatgaaaattgtggctgcggtgcgagagattggagcttcaatgctagtggttggacttcatgatcaaagttttctttacagcttggcaatggtccatagcaacatagctaactactttaactgt

SEQ ID NO: 1627 - DNA, 1458 bp, Glycine max
acgagtaacgatccacgcaatttcatgcaacaagcaaacgtgcactgcgcttattgcactggttcatatgaccaagttgggttccctggcctcgagctccaagtccacagctcttggctcttcttccccttccatcgatggtatctctatttctatgaaaggatcttggggagcttgatcaatgatccaacctttgcccttccattttggaactgggatgctcctaagggcatgcaacttccttccatttacgcagaccctaaatcacccctttatgacactctccgcaatgccaatcatcaacccccaacactcgtagacctcgacttcaatctcgaggatcctatttccaatggcaaaatttccaacaacctcaccataatgtataggcaagttgtgtctaacgggaagactcctacattgttccttggaaatccttaccgtgctggggatgagcctgacccgggtggtggctcagtagagagcgttccacatggtcctgttcatctatggaccggtgatatcaaccaacctaacattgagaacatggggaatttatatgcagctgcaagagaccccattttttattctcatcattcaaacattgataggatgtggtccatatggaaaacacttggtgggaaaagaagggattttactgattcagattggttagaatctgcgtttctcttctacgatgagaacaagaaccttgtgcgtgtgaaggtcaaggattctcttgacactagaaaactagggtatgtttaccaagatgttgacattccatggttaaattctaagcccacgccgcgtaggtcaagggttcagaaggtagcattagcacaaaattttggtgttggtgcagcacatgctgctgagacttcaaggaatgtgaagttcccactggtgttggattcagttgtgagtacagtggtgaagaggccaaagaagtctaggagcaaaaaggagaaggaagagaaggaggagattctggtggttgaagggattgagtttgagagcagcacacctgtgaaatttgatgtgtttatcaatgatgaagatgataagcagattcgaccagataatacagaatttgcaggaagctttgtgagtgtgcctcattcacatatgcacaaaaacaaggacatcattacttgtttgaggctgggacttacggatttgttggaagaattggaagcggaagatgatgacagtgttagggtgacgctggttcccagatatgggaaagggcgtgttaaaatcagaggcatcaaaatagagcttctttcggattgaaaattatctatatgcttcaactacttatatatgtgtgtgtggtaatacatatatggttactagtttccaataaagtgtgtaactcataaagagatattatgtatttcctatcatatgctgattcatttaatacttgattaataaaataattgattatgtatt

SEQ ID NO: 1628 - DNA, 633 bp, Glycine max
gcgcatcgctcttccatggaaaaccatttcttgctggaaagcagcctgagctaggtggagggaccgtagagcttggtcctcatactgctgtccaccgttggaccggtgatccaagacaacctaacaaagaggacatggggaggttctattctgctggaagagaccccgctttctattctcaccatgccaacgtggatcgtatgtggaatatatggaaaacaataccaagtggaaaaagaagggatttcaaaaaccgtgattggttggaaacctcctttttcttctacgatgagaacaagaaccttgtgagtgtgaaagtgaaagattcccttgactcgaaaaagatggggtatgtttaccaagatgttgacattccatggctccagaaaaggcctaaacccaaaagaactagaaaggctaagaaggtggcgttcgcacaacagtttggcggcattggtgcagcaatcgctgctgagactgggccaagttccaagtttcctctcactttattggactcaaaggtaactctacttgttaaaaggccaaagcagttgaggagcaagagggacaaggaggaagaggaagaagtgttggtgattgatgggatcgagtttgatggggatgatgatgtga

SEQ ID NO: 1629 - DNA, 1610 bp, Glycine max
atacttctgagttcaacttcgaacccacccaccaatcatttgttgctcaagttccctaattgaaggcaacagacaaaaccttgctccaattcaaacaccactattgagcatgctttaatgagccaggaagaactgtgtgggaaggatttgatactggtaccagagctgctgctgctggtggtgtaaccacagtggttgacatgcctctgaacaattaccctacaactgtgtctaaggaaaaactgaaacttaagcttgatgctgcagaggataaaatctatgttgatgttggattttggggaggcctaatccctgaaaatgcacttaatacaagtattcttgatggtctcttaagtgctggtgttcttggtgtgaagtcttttatgtgtccttcaggaatagatgacttccccatggctactattgaccatatcaaggcaggattgtctgtgttggcaaaatatagaaggcctatagttgtgcatgctgagattcaacaagattttgaaaatcatttggagcttaatgaggataaccttgatccacgtgcttacttgacctatctcaataccaggccaccttcatgggaggaggcagccattaaacaacttgtaagtgttacgaaggacacaagaaaaggtggccctttagaaggagcacatgttcacatcgtccacttgtctgattcaagtgcttccttagatctgattaaggaagcaaaaagtcatggtgacagcataagtgttgagacttgtcctcattacttagctttcacgtctgaagagataccaaatggggatactcgttttaagtgttccccacccattcgtgatgcatacaacaaagacaaattatgggaggctgtattagagggacacattgacctattaagtactgatcattcaccaactgtgcctgaactcaagcttatggaggagggtgacttcttaaaagcttgggggggcatatcatctttgcagtttaatcttccagtgacgtggtcatatgggaagaaatatggacttactctggaacaattgtctttattgtggagcaagaaacctgcaacactggcggggttagaatcaaagggggccattgcagttggaaaccatgcagatattgtagtttggcaaccagagctggagtttgacctggatgatgattatcctgttttcatcaaacattctgagctctctgcttacatgggaagaaggttatctggaaaagttttggagacttttgttagaggaaaccttgtgtttaaggatgggaagcatgctcctgcaccgtgtggtgttcaaatactagccaaatgagttagttaaatactgacaggtttctttcagatgctagttacgttgggacctaaataagagatggaagtagatgctggcatcgaccactgacctagcattctccttctcatagactagtgcattaccaaatgtattattatcgtttgaatgtttggacaatgacataatgttgttcttttcttgaatgcgtatgtaggttacaattgtacaaattctcaagtccccctcttcgcataccatttcatgaaaagaacatgcatgtttcctaactaagaaacataataatgacat

SEQ ID NO: 1630 - DNA, 611 bp, Glycine max
atgatatacagtacctttttcttgaggaagatatgatataccatagaagttaaaatcatgtatgtgagtaaccccttagttttcagtgtcatctaacagagaggagaagagagtgccttgtaataatcatagcataaattcataaagaagagagagcataatagtgagagtgggagatggatcagtttttgtggagggtgttgcctttgcttacaatccttgtttcctttggagtgttcttctacttgcaggattcttacacagcacagttatttcctctcataaagttaccgcgggataagtgcagccttcttccccatcgccacttctggatatccagcaaacgtattgtgaccccacaagggatcatttctggttcagtggagataaatgatgggaaaataatatctgtcgttgagggacatgctattcaggggaagcctaagcaagaagaagtaattgattatggagatgctgttatcatgcctggcttgattgatgtgcacgtacatcttaatgagcctggaagaactgagtgggaaggatttgatactggtaccagagctgctgctgctggtggtgtaaccacagtggttgacatgcctctaaac

SEQ ID NO: 1631 - DNA, 572 bp, Glycine max
gtcttaagctgacatctgtactcttctgcagtaaccataccataggcataaataatcgaactatcaaagaaaagagagcagaatagtgagagtgagagatggatcagtttttgtggagggtgttgcctttgcttacaatccttgtttcctttggagtgttcttctacttgcaggattcttacacagcacagttatttcctctcataaagttaccgcgggataagtgcagccttcttccccatcgccacttctggatatccagcaaacgtattgtgaccccacaagggatcatttctggttcaggttttgcttttttaaaccttgattattattattattattattattgagtagtgcgatctagtaggaatgttgctaacacgaattgttacgaattcaaaaacagacaatcaaattaattgtattaacatccaggtagagagcggataataactatctgcaataaattttagaatccttacattttgtgcagcttggtatgataactgttcgtactaaactactaattatcatcatccttttgttttactcttttcattttgttccgtgag

SEQ ID NO: 1632 - DNA, 905 bp, Glycine max
tgttggggtaataaaaatagcagataattaggtgccctctgctggtacttcttcttcttctccatcgttttcttcaatccttcattcgttccaatggcgctagggtttcatctcaattagaggcaccgaacgctccaaacggaaccatgaatctctcgttggcagctccttcggcatttcgcgggaatctcctcgttcctctgtcgcgctgcacctcttgcttcaaacttgatctccgttttcagcattccgacggttttcgccattcgcgttgtcgtcggagtttgttcaagctgattcgggatccgagatcgagcaggaggagagggattgcttgtagtgttaccgagccagataacggtagcgacgagaaggagaaagaagcagataaaaatggagaaacgctacgtgtggaagattcctctgagcaaagtatccctccacctgtagatgcagaacaactaaatgagtttagtgatgaaaataagggtcaaagtgatgtgcagaatatggatgatagcaatgaagttgccagtggatcacctctgccaggtgtgaagcctcagaaactggatgaagcaataaaaattcccaaggaaacaattgaaattcttaagaaccaagtttttggctttgacacttttttcgtaactagccaagatccttacgagggtggagtgctgttcaaaggaaacttgcgagggcaagctgctaaaagttatgataaaatatcgaagagattgaaagataaatttggagatgaatacaagcttttccttttagtaaatccagaggataatatgccagtggctgttgtggttccaagaacaaccttacaaccagagacaactgctgtacctgagtggtttgctgctggatcttttggactggttacaggttttacc

SEQ ID NO: 1633 - DNA, 1391 bp, Glycine max
ctcgagccgctcgagcctttcttctgcgcttcttctctggtctctggcttccttggtacgggaagaactcaatcttgtccatttccctttggtttttctctcttcgatctcttcaccttccattcgaccaccctcttatcacagctcgcgttaacttaagccctctccgttgagggtttctccaggtgtggtttgattttcagtttctgatgctgaagaaataaaaaagcttgaaggctttgctcttctgtgtgaaaaatgttggaaggtggtgcgaaattcccaggaataatagatctcaacaaaaataataacaactactatgatttctctcaaggcttttaccataagcttggggagggtaccaatatgtcaattgacagtgttgggagcttgcagacaagtaacggcggaggatctgttgcgatgtctatcgataatagcagtgtcgggtccaatgattcccatactcgcatgttagaccaccaagggttgcggaggcgtgccaatgataactactctgttgcacatagtgccaatcgtcggggaagagtcacccatgctttgagtgatgatgctttagctcaagctctaatggacaatagttctccgactgaagggcttgacaattttgatgagtggacaattgatttgaggaaactgaatatgggtgagccttttgctcaaggagcttttgggaaactctaccgaggtacttacaatggtgaagatgttgcaatcaaaatcttggagaggcctgaaaatgatccagcaaaggctcaattgatggaacaacagttccagcaggaggtcacaatgttggccacactaaagcattctaacatagttcgtttcattggtgcatgccgcaagccaatggtatggtgcattgtaactgagtatgccaaaggtggttcagttcgacaatttttaatgaagcgtcaaaaccgctcagttcccctcaaattggctgtcaaacaagctttggatgttgcaagggggatggcttatgttcatggccttggatttatccacagggacttgaaatctgataatcttttgatttttggtgacaagtcaattaaaattgctgactttggagttgcccgtattgaggtgcaaactgaaggaatgacacctgagactggaacataccgttggatggctccggagatgatccagcataggccttacacacaaaaagtggatgtatatagctttgggattgttctatgggaactcatcactggtatgcttccatttcagaacatgacagcagtacaggccgcatttgcagttgtcaacagaaatgttcgcccaatcatacctaacgatggccgtttcattggtgcatgccgcaagccaatggtatggtgcattgtaactgagta

SEQ ID NO: 1634 - DNA, 644 bp, Glycine max
ctggaacataccgttggatggctccggagatgatccagcataggccttacacacaaaaagtggatgtatatagctttgggattgttctatgggaactcatcactggtatgcttccatttcagaacatgacagcagtacaggccgcatttgcagttgtcaacagaaatgttcgcccaatcatacctaacgattgcctagcggttctccgtgacatcatgacaagatgctgggatcccaaccctgatgtcaggccaccatttgctgaaattgtaggaatgcttgagaatgcagagaatgagatcatgacaacagttcggaaggctcggttcaggtgttgcatgacccatccaatgactgctgactgatctgatcctctgtgaaagcaaatgcaaaaaagtcataaaaacatagactggaaaatttgggggcaagatgaaactctggtagtgaagggtgactatattatagctttgtgtatctgtgtgttttatttatttatctggagaccttttgcttattcggtatctgtttactgaatgtctgttctgaattagtaaagagaagacggtgtatgtaatacatgcatgttttacagttatgtatagcttgagttctgaaggcaacataaaatgagatcatgggcg

SEQ ID NO: 1635 - DNA, 493 bp, Glycine max
atccgtttttttttcttctgcgcttcttctctggtctctggcttccttggtacgggaagaactcaatcttgtccatttccctttggtttttctttcttcgatctcttcaccttcctttcgaccactctcttatcaccgctcgctttcttaactagagccctctccgttgagtgacgagttcgtgaatattcgcttgagatttgactgcgaactggttttagagggtttctccaggtgtggtttgatttacagtttctgatgctgaagaaataaaaaagcttgaaggcttttgctcttctgtgtgaaaaatgttggaaagtggtgcgaaattcccaggaataatagatctcaacaaaaataataacaactactatgatttctctcaaggcttttaccataagcttggggagggtaccaatatgtcaattgacagtgttgggagcttgcagacaagtaacggcggaggatctgttgcgatgtctatcgataatag

SEQ ID NO: 1636 - DNA, 455 bp, Glycine max
tacccaacgattgcctacctgttctccgtgacatcatgacaagatgctgggatcccaaccctgatgttaggccaccatttgctgaaattgtaggaatgcttgagaatgcagagaatgagatcatgacaacagttcggaaggcccggttcaggtgttgcatgactcaaccaatgactgctgactgatcctgtgaaagcaaatgcaaatgcaaatgcaaatgcaaaaaagtcataaaaacatagactggaatatttgggggcaagatgaaactctggtagtgaaggggtgactatattatagctttgtgtatctgtgtgttttatttatttcttctgaagaaaaaaatgaaaatcttatctggagaccttttgcttattcggtttctgtttactgaatgtctgttctgaattagtaaaaagaagatgctgtatgtaatacatgcatgttttacagtt

SEQ ID NO: 1637 - DNA, 984 bp, Glycine max
aattcccggctcgacccacacgtcagaagacgacagaagggggcgtacacagcctcaacaaccctaacgcgtgcatagcagagtcagagacagagacgcagccatggggcggagacctgcgaggtgttataggcaaattaagaacaagccataccccaagtcacggttttgccgtggtgttcctgatcccaagatcaggatttatgatgttggtatgaagaagaagggtgttgatgagtttcctttctgtgtccatctggttagttgggagaaggaaaatgtttcaagtgaggccctggaagctgctcgtattgcttgcaacaagtacatggccaaatttgctggaaaggatgctttccacttgagagtcagggtgcacccattccatgttcttaggatcaacaagatgctttcgtgtgctggagctgataggctccaaactggaatgagaggtgcttttggaaagccacagggtacttgtgctagagtggctattggacaggtccttctttctgtccgctgcaaggacagcaacagccatcatgctcaggaggctcttcgccgtgccaagttcaagttccctggtcgtcaaaagattatagttagcaggaaatggggcttcaccaagtttagccgttctgattatctcaagttcaagtcagagaacagaattgtgcccgatggtgtgaatgcaaagcttcttgggtgccatggaccattggccaatcgtgaacctggaagagcctttttggatactgctactagttcttagtctgtcttttaatttggaaatactagacttttggataacattagttttgcaagagtgaatttgagttattttgtcagcacattccatttacttaaattttgtttgcgaacctcttcgatttggttattttaatgttatattctggtatgatgcacaatttctccttattactattgatattctattttccgtctcttaaaaaaccaacaaga

SEQ ID NO: 1638 - DNA, 1661 bp, Glycine max
caaacccttgaacactatcctcttctcagtctcatacaccaaaccaaaaacctcactttccaatggcaatttcttgggcagcagcaacaacctcaaagctcgcataccctcctcatgtccacttctctccttcaccctcctccaattatctcttccttaaaacccacaaaccctccgccacacacctctcctcttccttcatccaccccaccacaatcctccacctcgccgctgccaacaccaccacccgccgccgctccttcaccgtccgcgccgcccgcggcaagttcgagcgcaagaagccccacgtcaacatcggcaccatcggccacgtcgaccacggtaagaccaccctcaccgccgccctcaccatggccctcgcctccctcggcaatagtgcccctaaaaaatacgacgagatcgacgccgccccggaggaacgcgcccgcggcatcaccatcaacaccgccaccgtcgagtacgagaccgagaaccgccactacgcccacgtggactgccccggccacgccgactacgtcaagaacatgatcaccggcgccgcccagatggacggcgccatccttgtcgtctccggcgccgacggccccaatgccccaaaccaaagaacacattcttttggccaaacaagtcggcgttcccaacattgtcgtcttcctcaacaaacaggaccaggttgatgacgaggagcttcttcagttagtagaattggaggtccgggagcttctttccaagtacgagttccccggagacgatgttccgattatctccggttccgctttgctgtctttggaagctttgatggccaaccctgccatcaagcgcggcgaaaaccaatgggttgataaaatttacgagctcatggaagctgtggatgactacattcccatccctcagcgccaaactgaacttccctttttgctggccattgaggatgttttcaccatcaccggtcgtggaactgtcgccaccggaagggttgagagaggtactattagggttggagagactgttgatattgttggtgtgaaggagactaggaacaccactgtgactggggtggaaatgtttcagaagattctggatgaggctttggctggggacaatgtggggttgttgcttaggggtattcagaagactgatattcagagagggatggttttggctaagcctggaaccattactcctcacaccaagttctcagcgattgtgtatgttttgaagaaagaagaaggtggtaggcattcacctttctttgcagggtataggcctcagttttacatgaggaccaccgatgtgactgggaaggttacgtctatcatgaatgataaggatgaggagtcgcagatggtgctgcccggtgaccgtgtcaagatggtggtggagctcattgtgcctgtggcttgcgaacagggaatgaggtttgctattagggaaggtggcaagaccgttggtgcaggtgttatccaatccatcattgagtgaaaattgcctcacttcatttttaattaattaatttttgccgttttatacagcttctctactttgcttgccctttttcttatactttaattgcacttgtaggatgcctattattggataataatatttttctatcccaaatgaaaatgtctttgtttgtt

SEQ ID NO: 1639 - DNA, 1061 bp, Glycine max
gccgtcctcaccatggcccttgccgtgttcggaaacagcgcccctaagaagtacgatgaggtcgacgccgtcccctcaccgtgcgcgccgacgctgcaagttcgagcgcaagaagccccacgtgaacatcggcaccatcggccacgtggaccacggcaagaccaccctgaccgccaccgccgagtacgagaccgagaaccgccactacgcccacgtaggactgccccggccacgccgactacgtcaagaacatgatcaccggcgccgcccagatggacggcgccatccttgtcgtctccggcgccgacggccccatgccccaaaccaaagaacacatcctcttagccaagcaagtcggtgtccccaacatggtcgtcttcctcaacaagcaagaccaagtcgacgacgaagagcttctccaactagtcgaactcgaagttcgcgaccttcttacctcctacgaattccccggtgacgatacccccatcgtctccggctccgcactcttagccctagaagcccttatggcgaaccctgccatcaaacgcggcgacaacgagtgggtcgacaaaatctacaaactcatggacgaagtcgacgactacattcccatcccccagcgccagaccgacctcccattcctcctcgccgtcgaagacgttttctccatcaccggccgtgggaccgtcgccaccggccgcgtagagcgtggcaccgtcaaagtaggggaaactgttgaccttgtaggattgagagagacaagaaacacaacggtcacaggtgtggaaatgttccagaagattctagacgaagccctcgccggggacaacgtggggctgttgctgagaggggttcaaaagacggacatccagagagggatggtgttggcgaaaccaggcacgattacgccgcacaccaagttctcagcgattgtttatgttttgaagaaagaagaaggtggtaggcattcacctttctttgcagggtataggcctcagttttacatgaggaccaccgatgtgactgggaaggttacgtctatcatgaatgataaggatgag

SEQ ID NO: 1640 - DNA, 942 bp, Glycine max
  unsure (1)..(942): unsure at all n locations
ggtacgcagcttcatccctaacgcgtgcatagcagagtcagagacagagacgcagccatggggcggagacctgcgaggtgttataggcaaattaagaacaagccataccccaagtcacgtttctgccgtggtgttcctgatcccaagatcaggatttatgatgttggtatgaagaaggagggtgttgatgagtttcctttctgtgtccatctggttagttgggagaaggaaaatgtttctagtgaggccctggaagctgctcgtattgcttgcaacaagtacatggccaaatttgctggaaaggatgctttnccaacctttttgnaaaggnaaagggttttnccaaaaaaanggggggggggtttttgggggcccacccattccatgttcttaggatcaacaagatgctttcgtgtgctggagctgataggctccagactggaatgagaggtgcttttggaaagccacagggtacatgtgctagagtcgccattggtcaggttcttctttctgtccgctgtaaggacagcaacagtcatcatgcacaggaggctcttcgtcgtgctaagtttaagttccctggtcgtcagaagatcatagttagccggaaatggggtttcgccaagttcagccgtgctgattatctcaagtacaagtcagagagcaggattgtgcctgatggtgtgaatgctaagcttcttgggtgccatggaccactggcaaaccgtcaacctggacaagcttttctatctagtgctactgctactgcttagatatggcttgttacttggaaccagtgggctttgaccacaatagttgtgttcgactcaattcgagtttcttatttgctccactcgtagtattaaactattaaactatgttgagtttatctcatcttttgtgagccctcttgaatggaattactgtcatatttggtttgcc

SEQ ID NO: 1641 - DNA, 412 bp, Glycine max
ctgaaaagaagggtttgtaagagaaagaaaaaagaggcgcaagatgagtggtagggtttctgggaaggtgaagtggttcaatgatcagaaggggtttggattcataagccctgacgatggcagcgacgatctcttcgttcaccaatctcagatcaaatctgacggtttccgaagcctcgccgaaggagagtccgttgagttcgccattgaatctgaatctgacggacgcgcgaaggctgttgatgtcactggccccgacggcgccagggtccagggaaccagacgaggcggtgatggtggccgaagctatggcgggggacgaggaggtggtggaggtggctacggtggaggcggcggctacggtggtggcggtggctacggtggaggcggtggttacggtggtggtggaaga

SEQ ID NO: 1642 - DNA, 539 bp, Glycine max
ctcgagcgaatcggctcgagaatacacaatttttacattactcaatacactacactaacacaatccccttccctcttctctttctatccaaattctccaccagccatggcagtttcttcagcaacagcttcctccaaactcatactattcccccatgcatcatcatcctcttcccttaattccacacccttccgctcctccaccaccaacacccacaaactaacccctctctcctcctccttcctccaccccaccaccgtcctccgccgcaccccttcttccaccaccaccccgcgtcgcaccttcaccgtccgcgccgcccgcggcaaattcgagcgcaagaagccccacgtgaacatcggcaccatcggccacgtcgaccacggcaagaccacccttaccgccgccctgaccatggctcttgccgccctaggcaacagcgcccccaaaaaatacgaccagatcgacgccgccccggaggaacgcccccgaagcatcaccatcaacaacgccaccgtggagtacgagaccgataaacg

SEQ ID NO: 1643 - DNA, 564 bp, Glycine max
  unsure (1)..(564): unsure at all n locations
acggaagacgacagaaggggattagatttcggccttccctcttccgtgcacagcttgaacacaccgcgtttcggagagagacgtcgcaatggggaggaggcctgcaaggtgttatcggcagataaaaaacaagccataccccaaatcacgcttttgccgtggtgttcctgatcctaagatcagaatttatgatgttggtatgaagaagaaaggtgttgatgagtttcccttctgtgttcatctggttagctgggaaaaagaaaatgtttcaagtgaagcattggaagctgctagaattgcttgcaacaagtacatggccaaatttgctggaaaggatgctttccacttgagagtccagggtgcagtacatccattccatgttcttaggatcaacaagatgctttcgtgtgctggtgttatccaatccattattgagtgaaaattctgtcactttatttttaattaattaattttttccgttttatacagcttctgtactttgctntccctttatcttatactttaattgcacttttaggatggatattattggataataatatt

SEQ ID NO: 1644 - DNA, 396 bp, Glycine max
gaaactgtatgacatatagattgagtgttgctgatgtatattggtaacattgaagttgggaatgcgtttgagggcgtttctgaatgaaattcgtattgtgcattcaattagcacttttccctagttattttaactgcctgtagttggcctctttaacttataatttcctttgtgttatcttgcagcttcttgggtgccatggaccattggccaatcgtgaacctgggaagagcctttttggatactgctactacttcgtagtcggtcttttaagcgcgacggactagacctttggataacattagttttgcaagagtgaatttgagttattttgtcagcacattccatttacttaaattttgtttgcgaacctcttcgatttggttactttaatgg

SEQ ID NO: 1645 - DNA, 363 bp, Glycine max
  unsure (1)..(363): unsure at all n locations
cccacgcgttcgaggaaatggggcttcaccaagtttagccgttctgattatctcaagttcgggtcagagaatagaattgtgcccgatggtgtgaatgctaagcttctgggggcccatggtccattggccaaccgtgaacccggaaagggcctttttggatactgctcactggttcttagtctgtttggttaatttggaaatactagactttggattactttagttttgcaagagtgaatttgagttattgtcagaacattccaattacttaaattgcttgcgaacctcttcaatttggctattttaatgctatattttgttatgaagcaaagacaccaacacccttnnccgggaaaggaaggg

SEQ ID NO: 1646 - DNA, 436 bp, Glycine max
tttctctcttccgtacacagcttgaacccaccgcgtttcggagagagagacgtcgcaatggggaggaggcctgcaaggtgttaccggcagataaaaaacaagccataccccaaatcacgtttctgccgtggtgttcctgatcctaagatcagaatttatgatgttggtatgaagaagaaaggtgttgatgagtttcccttctgcgttcatctggttagctgggaaaaagaaaatgtttcaagtgaagcattggaagctgctagaattgcatgcaacaaatatatggcgaaatttgctggaaaggatgctttccacttgagagtcagagtacatccattccatggttctaggatcaacaaaatgctttcatgtgctggagctgataggctttagactggaatgaaaggtgcaattggaaagccacaaggaacatgtg

SEQ ID NO: 1647 - DNA, 253 bp, Glycine max
ccccggcccgtcgagccgcctcgaacaaccctaacgcgtgcagagcagagagagacgcagccatggggcgaagacccgcgaggtgttataggcaaattaagaacaaaccataccccaagtcacggttttgccgtggtgttcctgatcccaagatcaggatttacgatgttggtatgaagaagaagggtgttgatgagtttcctttctgtgtccatctggttagttgggagaaggaaaacgtttctagtgaggc

SEQ ID NO: 1648 - DNA, 242 bp, Glycine max
tctcgagccgcaatctggctacgagcgctctacacgcgatgcagccgcgcagggggcgacgcagccatggggcgaagacccgcgaggtgttataggcaaattaagaacaaaccataccccaagtcacggttttgccgtggtgttcctgatcccaagatcaggctttacgatgttggatataagaagaagggagatgacgagattccattcagagaccaacatgatagattggagaaggaaaa

SEQ ID NO: 1649 - DNA, 921 bp, Glycine max
ggggcttatgaaaaccaaggttgggtccggcccttttagggtttcgtctgagttataaaatacctaattcattgtcctctgtgccgttttcttcttcatcatagtcgtggccgtgtcgcagcaaaaccaagccacccactaacttgtttggtccaagacatggctctgatcctgcatgctaccaaaacaaacaagaatgccttcaagactctgattgcggcagagtacagtggcgtccaagtggaattggcccctaatttcgagatgggtgtctctaacaaaactcctgaatttctcaagatgaatcctattggaaaggttcctgttttggaaacgcccgatggtccagtctttgagagcaatgcaatcgctcgttacgttgctcgactaaagggtgacaacgctttgttctcatcttctgccattgataatgcccacattgaccagtggattgatttttcatccttggagatcgatgctaatctcatgaaattgctcctaccaagacttggatttgccccataccttcctccagttgaggagggtgcaaattctgcgttgaagagagcatttgaggccttgaacactcatcttgcctccaatacttaccttgttggccattctgttacccttgctgacatcataacaacatgcaacttgtatttaggattcagccagctcttagttaagagcttcacctctgagttccctcacgttgaacgatacttttggaccttggtcaaccagcctaacttcagaaagattctaggtcaggttaagcaaactgaggctgttccacctattccatccgctgcaaagaagccttcccagcctaaggaatctaagcccaagcctaaggatgaaccaaagaaagcggctaaaccagagcctaaacaagaagcagaaccagaggaggaggca

SEQ ID NO: 1650 - DNA, 379 bp, Glycine max
ccctcgcggcagactttgctggtgaagcgaattttgtttcctagtcgttggcctttcactgtctctctctccttctcctcttatctgaatcatcctctctctgtgagtgaggtgactcgttgttgtttgtgacccggcgattcgttcctttgactccattcgaagcaaccctttgtctttcttaagcagtttcctgtgatgggctttggatttttcttttggattccctgtgatcacctgggaactgggttgttcaaattgaattttttgtgaggtatgctgtgtttggggtttgacatgggtgacgttgactctgaaagatttaaacttgagagtagaagagtggggatttggctgaaaattgcatgtgggtggttgg

SEQ ID NO: 1651 - DNA, 665 bp, Glycine max
ttttaaattattttttttttactaatttcttactttgaggaggatcattgatactctctagcttgcttgcaaaacctgaaacaaaatttgcaatagcatgacatcaatggaggaatcatggactagttggctttgtgacatggaaccagatgattacagtttcatgggtcaatcggacataaaagtggatgatgtgaatggatctttagcatctcctcatgatgtagccactgcattattagagaagaaccagcaaagctcattttccacagtagagagtctctcttcagcggctgagagtggcttggagaggcctttcaagttaccaaagatagaacaactctcacaaaagacagcttccagttccactccctcctcctatattctctcctttgacaacacaaatccaccaccggttacggttgaatcagcctcaaagccaggaaccaaggttttgaatcttgagaaagttttgccttcaaagaatgaaccaagacgagtagttactcagcagaacaagaaaatggggtcatttgccggatcttctcatcacacacaagatcacatcattgctgagagaatgaggagagaaaaaaattagccagaagttgattgccctctctgcccttattccagacctcaaaaagatggacaaggtgtccgtg

SEQ ID NO: 1652 - DNA, 1580 bp, Glycine max
ggtaccggtcaggaattcccgggccgacccacgcgtcagagacgacagaaggggatcatcacaaatatggaagaagaagctcctccagtgccacctgcaccgcccatagtggccatgctgccatcccctggcatgggccacctaatcccaatgatcgagttcgccaagcgagcggtgcgctaccataacctggccgtcaccttcgtcatccccactgacggcccaccttctaaagcccaaaaggccgtcttccaggccctcccggactccatttcccacaccttcctccctccggtcaatctctccgactttccaccgggcaccaaaattgaaaccctgatctcccacaccgtcctcctctccctcccttccctccgccaagccttccactccctctcctccacattaaaccttggcggccgtcgtcgtcgacctcttcgccaccgacgccttcgacgtcgccgccgaattcaatgccttcccctacgtcttctacccctccacagccaccgtcctctccatcgccctccacctccccaccctcgacaagcaggtccagtgcgagttccgagacctcccggaaccggtcaccatccccggttgcattcctcttcccgtcaaggactttctagacccggttctggagcgcaccaacgaggcctacaagtgggtgctacaccactccaagcgctaccgagaagccgagggaatcatcgagaacagcttcgccgaactcgaaccgggcgcctggaacgagctgcagagggaacaaccgggacggcctccggtttatgcggtcgggccgcttgtgagaatggaacccggtcccgccgactccgagtgcttgaggtggttggacgagcagccacgtggcagcgtgttgtttgtttccttcggaagcggtgggaccctctccagcgcccagatcaacgaactggctctcgggttggaaaatagccagcaacggttcttgtgggtggtgaagagcccaaacgatgcaatagccaacgcgacttacttcaacgcggagagccacgaggatcccttgcagttcttaccagaagggttcgtggagagaacaaaaggaaggggctttttggttaagtcatgggctccgcagccacaggttctggcccatcaatcaacgggaggattcttgagccattgcggctggaactctatactggagagcgtggtgaacggcgtgcctttaatagcctggcctctgttcgcggagcagatgaccaacgcgtttatgctcatgcataaagtcaaggtggcgctgaggcccaaagttgccgagcacactggacttgtccagagccagaaaatagccagcgttgtcaagtgcctcatggaaggccatgaagggaagaagcttcgttaccgaatcaaggatctcaaggaggctgcggctaaggctctctctccaaatggttcctccaccgcccatatctccaatttggttctcaagtggaccaacaaaaccaccatctctactagtggctagcttttatttttcttcttcttcttccggtaattttattatctgcacttataaaatgtcgctttatgtattt

SEQ ID NO: 1653 - DNA, 1871 bp, Glycine max
ccgaaattgaagctcaagagcaattaatagagcctcctttgtgcgtgtgtgtatatatataagctctctcttgttccttcatcatcacaagaaacaacaagggatttccatggaagtctcaaaagaagaagctcgagtggcacccgcaccggccctagtggcgatgctgccatcccctggcatgggccacctaatcccaatgatcgagttcgcaaagcgagtggtgtgctaccataacctggcggtgagcttcgtgatccccactgacggcccaccttcaaaagcccaaaaggcagttctggaggcccttccggactcaatttcccacaccttcctccctccggtcaatctctccgacttcccgccggacaccaaaatcgaaaccctgatctcccacaccgtcctccgctcccttccttccctccgccaagcattccactccctctccgccacaaacaccctctccgccgtcgtcgtggacctcttctccaccgacgccttcgacgtcgccgccgaattcaatgcctccccctacgtcttctaatccttccactgccaccgtcctctccttgttcttccacctccccaccctcgaccagcaggtccagtgcgagttccgagacctcccagaaccggtcagcatccccggttgcattcctcttcccggcaaggacctgttggacccggttcaggaccgcaaaaacgaggcctacaagtggatcctacaccactgcaagcgataccaaagaagccgaggggataatcgggaacagcttcgaggagctcgaaccgggagcctggaacgagctgcaaaaggaagaacaagggaggcctccggtttacgcggtgggaccgcttgtaagaatggaagcaggtcaggccgactcggagtgcttgaggtggctggacgagcagccacgtggaagtgttttgtttgtttccttcggaagcgactgggacactctcgagtgcacagatcaacgagctggtctctcgggttggaaaaaagtgagcaacggtttctgtgggtggtgaagagcccaaacgaagaaatagccaacgcgacgtacttcagcgccgagagccaagcggatcccttgcagttcttaccggaagggttcgtggagagaacaaaaggaagagggtttttggttcagtcttgggctccgcagcctcaggtattgggccatccatccacgggtgggttcttgacccactgcggctggaaactctattcttggagagcgggggtgaacgggtgtgccctttcatagccctgggcctctgtttcgcggagccagaagaccaaacgcctttatgctcacgcatgacgtcaagggtggcgctgaggcccaacgttgcagagagtggcttggtggagagacaggagatagccagccatagtcaagtgcctcatggaaggtgaacaagggaagaagcttcgttaccgaatcaaggatatcaaggaggctgcggctaaggctctcgctcaacagggttcctccaccaccaacatctccaatttggctctcaagtggacccacatattcaactagtagcttcttcctttcaattatctgcacttaacttatcaaatgtcacttggcatacatgacattaataaaataattgggtaagtgtacgtaaatctcaaatccacatcccgacgatgttcaatggctagacctctaacttgtagtatatgtttcaaaatgcctttcaaccttaaattactaagttctatggctgcctggctaattaattaacgtcaatttcttcagtttggtaaatgccttcaaccagaaaaggagtacggtatatcctttgatcaatcatcaaggattaagcactagtttttagaatctgcttta

SEQ ID NO: 1654 - DNA, 1971 bp, Glycine max
tggtaccctgtcgtacgctgcggaatcccgaggtcgaccagccgtcggtacgctgccaaaagaacaacaaaagggtcacaatcaaacgggaaaaggcgtcttcaaaaacgcggcccaaaacttctcctacccttttattcattcaattcgtttctagggttcttcttttctttgccgagaaaaatgagagattgcatttacgatccacattagccaggccggtatccaggttgcgaaacgcctgcttgggaactctatcgccttgaacacggcattccagcccgatgcggcagattcccaagtgacaagaccgttggcggaggagacgacgccttcaacacatttttcagcgagaccggcgccggaaagcacgtgccccgcgccgtcttcgtggatcttgaacccaccgtgatcgacgaagtccgaaccggtgcgtaccggcagcccttccacccggagcagctgatcagcggcaaggaagacgccgccaacaacttcgcgcgtggccactacaccatcgggaaggagatcgtcgatctctgcctcgacaggatccgaaagctcgccgacaactgcaccggtctccagggtttcctcgtcttcaacgccgtcggtggcggcaccggttctggcttgggctcgcttctcttggagcgtctctccgttgactatggaaaaaagtcaaagctcggtttcaccgtttatccatcccctcaggtttcgacctcggtcgtggaaccctacaacagcgtcctttcaacgcattctctcctcgaacacaccgatgttgctgtgcttctcgacaacgaggctcatctacgacatttgcaggagatctcttgacatcgaacgccctacctacaccaacctgaaccgtctcgtttcccaggtgatatcatccctcactgcctctttgaggtttgatggagcactgaatgttgatgtgactgagtttcaaaccaacttggttccttacccaaggatccatttcatgctttcctcgtatgcccctgttatctctgccgagaaagcataccatgagcagttttttctgttgttggatcaccaacatgtgccttcgagccatcctccatgatggcaaagtgagaccctcgccacggcaagtacatggcgtgttgtttgatgtaccggggcgatgtcgtgcccaaggatgtgaattcttgttctggccaccatcaagaccaagagaaccatccagtttgtggattggtgccccactgggttcaagtgtggtataaactatcagccctcctactgttgttcctggaggtgaccttgccaaggtgcagagggctgtgtgcatgatttcgaactccactagtgtggctgaagtgttctccaggattgatcataagtttgacctcatgtatgcgaagagggccttcgtgcactggtatgtgggtgaaggtatggaagagggtgagttctcagaggctcgtgaggaccttgctgctcttgagaaggattatgaggaggttggtcccgagtctggtgatggagatgatgatggtgaaggagatgatgatcatctagagtgtctgaaatatcgtgtgtttgatgtctactttttcgtcttctgtcggacatgtgtggtttttgaatgatgattgttatcccatatatgtgctatgtatagcacagaagtttctatatatctgttcccttctattaccaatattttcggtcttgtctcttcggtgttttggtgatgcatcgtttaattaattgttgctaattgttttagaaaatgggtggtctgctcgtgccatctttgttaagtattagtggcatatctctttttttttgggcccactaatagtcattctatctgaattgcgagttacctagttagtggcaagataacggaatgttataaagaaagtctagctcatgattgaatagacttagtgaatgttataaagttctggtcctatatttgaccctccatat

SEQ ID NO: 1655 - DNA, 1732 bp, Glycine max
gatcctacgaacgctcctcacttgcagaattcaaagacggcgtctctcataaacgcctttcttctccgtttccgtttccttacccggaattcgatttttcatctctgaaaatgcgagagtgacatctcgactccacattggtcaggctgctatccaggtcggaaatgcttgctgggagctctcactgcctcgagcacggcatcgggcccgatgggcaaatgccaagtgacaagacagttggcggctggtgatgatgctttcaatcacgttcttcagcgcagactggtgctggaaagcacgtgccacgtgcagtgtttgtagatcttgagcccactgttattgatgaggtgagaaccggaacttaccgccagctttttccaaccagagcagctcatcagcggcaaagaagatgccgccaacaacattgccccgtgggccattataccattgggaaagagaattgtgatcttgtgcttggaccgcatcagaaagcttgctgacaattgcactggactccaagggtttttggtcttcaatgccgttggtggaggaactggttctggacttggttcccttctcttggagcgtctctccgttgattatggcaagaaatcaaagcttggtttcacagtctacccctctcctcaggtgtccacctctgttgttgagccatacaacagtgtcctctccacccattctctcttggagcacaccgatgttgctgtcctcttggacaatgaagccatttatgacatctgcagacgctctctcgacattgagcgtcccacctacaccaacctcaaccgccttgtttctcaggtgatttcatctttgactgcttccttgaggtttgatggtgcccttgaatggtggtgtgactgaattccagaccaacttggtcccatatcccagaatccatttcatgctttcctcctacgctccagttatctctgctgagaaggcctaccatgaacagctttcagtggctgaacttaccaacagtgctttcgagccatcgtccatgatggccaagtgtgaccctcgccacggaaaagtacatggcgtgttgcctgatgtaccgtggtgatgttgtgcccaaagatgtaaacgctggctgttgccaccatcaagaccaagaggaccattcagtttgtggattggtgccctactggtttcaagtgtggtattaactaccagccacctaccgttgttcctggaggcgaccttgccaaggtgcagagggcagtttgcatgatttcaaactccaccagtgtggctgaagtgtttggccgcattgatcacaagtttgatctcatgtatgccaagcgtgcttttgtccactggtacgtgggtgagggtatggaaaaaggtgaattttcagaagcccgtgaggatcttgcagccctcgagaaggattatgaagaagtgggtgctgagtactggtgagggccaggaagaggatgaagactactagaatctacttcagattcttgttcttgtggtctgttttctgttgatgtgtttgatgttcagatgtgtaccagtaccgttgtgggttttaatttggatgcattgtttttatgcttcgctgcttctgttacagacccaatccccatggcaatatatattttgaccattgtctgaactactattttgttttagctgtgttaattattgactttttttcttttcgattaagtgtggtacttttttcgaaaaaaaagagtagact

SEQ ID NO: 1656 - DNA, 1797 bp, Glycine max
gatatcgaaaaacaagcgaatccagccacagcacagcactctttgcgacacaacaaaaaatgacaacacagagagaagcgtcttaataaacgctacctctctgaaaacccccatttcgtttcgtcgttcgtcgtctcgttcgtttcgattctcgtcgatcttcgatcttcgtcgctgaaaatgagagagtgcatttcaatcaacatcggccaggccgagaattcaggttataaacgcctgctggggagctttacgggcctcgacacacgagcattcagcctgatggctcagatgcccagtgataagactgtttggtggaggtgatgatgctttcaacaccttcttcagtgaaactggggcaagaaaagcacgtgccccgtgcgattttttttttatgacatctcgagcctactgtgaagtgatgaggttaggactgggacataccgccaactattttcaacctgagcagctcaattcagtggaaaggaggatgcagcaaacaactttgcccgtggcccactataccattggaaaggagattgttgagctttgcttggatcgcatcagcaaagcttgctgacaactgcactggtctccaaggttttctggttttcaatgctgtgggtgggggcactggctctggtcttggttcccttttgctggaacgtctttcagtggactatggcaagaagtccaagcttggtttcactgtctatccttcaccccaagtttcaacctctgttgttgagccttacaacagtgtcctctccactcattcccttcttgagcacactgatgtggctgtcctgctcgacaacgaagccatttatgacatctgcagacgttcacttgacattgagaggccaacctacaccaaccttaatcgtttagtttctcaggtgatttcctcactgaccgcttccctgaggtttgatggtgccttgaacgttgatgttaatgaattccagaccaaccttgtgacataccccaggattcacttcatgctttcatcttatgctcccgtgatttcagctgagtaaggctctccatgagcagttatcaccttggtgaaatcacaaacagctgcttcgagccatcatctatgatggccaagtgtgcatcctcgccatggaaaatacatggcttgctgtctcatgtaccggggtgatgttgtgcctaaagatgttaatgcagctgactggaattatcaagaccaagcgcactattcaatttgttgactggtgccccaccgggttcaagtgtacgaatcaattaccagcctccgactgttcgttccaggtggtgatcttgccaaagttcaaaagggcggtgtgcaatattctccaattccaccagtgttgttgaggtcttctctcgcatcgaccacaaatttgacctcatgccgtcgcaagagggcttttgttcattggtatgttggtgagggtatggaagagggagagttctctgaggctcgtgaagatcttgctgccctggagaaggattataaggaagttggtgcaaaggcaaattgaagaagatggtgatgaaggagaagattattgattagaagtttgcactgtaatgttactttggctgtgttgttttttttttcctcgtgctctgtgtatggaagttcttttcgtggaacttgccttgttccggcacttttggagcttaatgtgaagtgtggtgaaaacatttatttgaaattgcttggtaaacttttagagttttaaatggatttggaaacgatttttccaaaaaaaaaaaaaaaaaaaaaaaaaaaacagcgcgcgc

SEQ ID NO: 1657 - DNA, 409 bp, Glycine max
cagaaacccacaaggacctgagacatgaattgaacggtactgaggtttacttataccaccctcaacctcaaccctcgttctctttctttcagtctgagaattccaagttctgttctgagaagaattcacaacaaccacccttctctgttttattttattccttcactctgtgaaaacaaaacatcatgtctcagaaccagaatggcaagtgggtgcgaattgccccagaacaagttcgaggctcctccaatggacacgtggaagtgggaggttccaacaggctctgcataaaccctcagaaagatcacaagtccgaaagctatgaggaccttcaattggagttcaaccctcttgtgttcagctctctggagcagtatttgcctcctcacatgttgaacctctcacgtga

SEQ ID NO: 1658 - DNA, 408 bp, Glycine max
aaccaagagacccaagttaaggttttttgcaatcttcccttctaaaaagaaatggccggaaaaggagagggactcgccatcggaatcgacctgggcaccacctactcctgcgtcggagtctggcagcacgaccgcgtcgaaatcatcgccaacgatcagggcaaccgtaccacaccctcttatgtcgccttcaccgataccgaaagactcatcggagatgccgctaagaaccaggtcgccatgaaccccatcaacaccgtcttcgatgcgaagaggttgattggtaggagagttagcgacccttctgttcagagtgatatgaagttgtggccattcaaggttactgctggtgctggtgaaaaacccatgattggtgtcaattacaagggtgaggaaaagcaattcgct

SEQ ID NO: 1659 - DNA, 1803 bp, Glycine max
gccgtggtcactgttcccgcttacttcaatgactcccagcgccaggccacgaaggatgctggagtcattgcgggtctcaatgtcatgcgtatcatcaatgaacccaccgctgctgccattgcttacggtcttgacaagaaggccaccagtgtgggtgagaagaacgtgttgatttttgacttgggtggcggtacctttgatgtctctcttctcaccattgaggagggtatttttgaggtcaaggccactgccggagatactcatcttggaggagaagattttgataacaggatggttaaccattttgttcaggaattcaagaggaagcacaagaaggacatcaatggaaaccctagggctcttaggaggttgaggactgcctgtgaaagggcgaagaggaccctatcatctactgcacaaaccacaattgagatagattctctttatgagggtgttgacttctacaccacaatcacccgtgccaggtttgaggagctcaacatggatctcttcaggaagtgtatggagcctgttgagaagtgtttgagggatgccaagatggacaagagcactgtccatgatgttgtccttgttggtggatccactagaattcctaaagtagcagcaattggtgcaggatttcttcaatggcaaggagctttgcaagagcattaaccccgatgaggccgttgcttatggagcagctgtacaggctgctattttgagtggtgagggcaacgagaaggtgcaggatttgctgttgttggatgttacacccctttctcttggtttggaaactgccggcggcgtcatgactgttctcattcccaggaacacgactattcccaccaagaaggagcaagtgttctctacttactcagacaaccaacctggtgtcttgattcaggtgtatgagggagagagagctagaaccagggacaacaacttgttgggtaaatttgagctttctggcattcccccagcacccaggggtgttcctcagattactgtctgctttgatatcgatgccaatggtatcttgaatgtctctgccgaggacaagaccacaaggcatgaagaacaaagatcaccatcaccaacgacaagggtagactatcgaaggatgagattgagaagatggtccaagaggcggagaagtacaaggccgaagatgacgagcacaagaagaaggtcgacgcaaagaatgctttggagaactatgcctacaacatgaggaacaccattaaggatgagaagattgcatcaaagctttctgatgacgacaagaagaaaatcgaagatgccatcgagagtgctattcagtggttggatggaaaccagctagcggaggctgacgagttcgaagacaagatgaaggagcttgagagcatttgcaacccaatcattgccaaaatgtaccagggtgcaggtgctcccgacatggctggaggcatggatgaagatgttcctccatctggatccggtggtgctggccccaagatcgaggaagttgattaaattgtttcattatttagatgggatgggcttgtgttggatctattccgtttttgtttcctttattttatttggtctagaatattggcccattattttggttactaacaccaggtatggtgattggtaattctttttttttggttttgaatagtttatccagatttcacctcgatggagacttgtttaaaaatttttgccaaagaaaacaattttatgggccgttcctatttaatgttttcttaaattttgatgtttgatatcaaaaaaaaaaaaaaaaaaggggcg

SEQ ID NO: 1660 - DNA, 1607 bp, Glycine max
gtacttttgatgtctctttacttaccattgaggagggtatctttgaggtgaaagccacagctggggacacccatcttggaggtgaggattttgataacaggatggtcaaccactttgttcaggaatttaagagaaagaacaagaaagatatcagtggcaaccccagagcacttaggaggttgaggactgcctgtgagagggcaaagagaactctatcttcaactgcccaaaccaccattgaaattgattctctctatgagggaattgatttctactccagcattactcgtgctagatttgaggagctcaatatggatctcttccgcaagtgcatggaaccagttgagaagtgtttaagagatgctaagatggacaagaggactgtccatgatgttgtacttgttggtggctccaccagaattcccaaggtgcaacaactcctgcaagatttctttaatgggaaggcagctctgcaagagcatcaatcctgatgaggctgtggcatatggagctgcatttcaagctgctatcttgagtggtgagggtaatgagaaggttcatgatcttctccttcttgatgtcacccctctctctcttgggttggaaactgctggtggggtgatgacagtcttgatccccaggaacactactatcccaacaaagaaagaacaggttttctcaacctattctgacaaccagcctggtgtgtggacccaggtttatgagggtgagagaacaaggtctagagataacaacttgttgggcaaatttgaactttctggcattcctccagctcccaggggtgttcctcaaatcacagtgtgctttgacattgatgccaatggtatcttgaatgtctctgccgaagacaaaactaccggccaaaagaacaagatcaccattaccaatgacaagggtaggttgtcaaaggaagagattgagaagatggttcaagaggctgagaagtacaaatcagaagatgaagagcacaagaagagggtagaggccaagaatgcattggagaactactcatacaacatgaggaataccattaaagacgagaagattggaggaaaacttgacccagctgacaagaaaaagattgaggatgccattgagcaggccatccagtggctagacagcaaccagcttggagaggcagatgaatttgaggacaaaatgagggagttgggaagcatctgcaaccctatcattgccaagatgtaccacgggtggtgctggtccagaactcggtggtgcaatggacgatgatgttcctgctgctggaaagcggtgcggggccaaagattgaggaagtagactaaatttagttaatttctgcttttgatttactatttatttttaaatgtctgatttcatgtcctttggttggattaaatttctcaagaaaaacaatatttggaagtatgtcaagataaattaatgatttcagtatcatgttacccttttcagttttcactgtgttttagtggacacatacaggctttaaagcatatgttataagctggttttttagtatgtttatgtttctataaaaaaaaaaaaaaaaaaaagggcggccgccgcctatcgtcgacccgggaaat

SEQ ID NO: 1661 - DNA, 1658 bp, Glycine max
cttatggtcttgataagaaggccacaagtgttcgtgagaagaatgtgttgatttttgaccttggtggtgggacatttgatgtttctttactaaccattgaggagggtatctttgaggtgaaagccacagctggtgacacccatcttggaggtgaggattttgataacagaatggtgaaccactttgttcaagagtttaagagaaagaacaagaaggacataagtgggaaccccagagcacttagaaggttgaggactgcttgtgagagggccaagagaacattgtcatccactgcccagaccaccattgaaattgattctctctatgagggaattgatttctactccactgttactcgtgccagattcgaggaactgaacatggatctctttaggaagtgtatggagccggtggagaaatgtttgagggatgctaaaatggacaaaagaagtgttgatgatgttgtccttgttggtggttctaccagaattcccaaggttcaacaactgctgcaggacttctttaatggaaaggagctgtgcaagagcatcaatcctgatgaagctgttgcatatggtgctgctgttcaggctgcaattttaagtggtgagggcaatgagaaggttcaggatcttctcctccttgatgtcacccctctatctcttggtttggagactgctggcggtgtgatgactgtcttgatccctatgaacactacaattccaaccaagaaggaacaggttttctcaacatactctgacaaccagcctggtgtgttgatccaggttctttgaaggtgaaagagcatggactaaagataacaatttaggtgaacattgatggctagtctgtacatactactgccttcagcggtgatgctcagattactagtgtgcttttaacattgatgccaattgtattttgaacgtctctgccgaagataagaccactggccagaaaaatatgatcactatcaccaatgacaagggtagactgtcaaaggaagatatcgagaagatggttcaagaggctgagaagtacaaatctgaggatgaagagcacaaaaagaaggttgaggccaagaatgctttggaaaactatgcatacaacatgaggaacactgtgaaggatgacaaaattggtgagaaacttgatcctactgacaagaagaagattgaggacgcaattgagcaagctatccagtggctagacagcaaccagctcgcagaagcagatgaatttgaggacaaaatgaaggaattggaaagcatctgcaatcctatcattgccaagatgtaccaaggtggtgctggtcctgacatgggtggtgctggtgctggggcacccgaggatgattatgctgctccttctggtggaagtggtgctggccccaagattgaggaagtggactaaatgtgtagttgctttcatccatttatctgtttaaaacttatttgatgcttttttattgaattttaccttttatgattttagttggatgggatactaattgttttgcccgtgtgatatgaacgttgctttacgcattatgtcatttgctttatttcattagatgagaatactcattgttttacactttgttcgtaggaattattctgtcttgatattttaaatggcatgctcatctattttgccgg

SEQ ID NO: 1662 - DNA, 2442 bp, Glycine max
gacttgaatcacagtggtgcctacatcgctgtggttttcatcgtcttccttctcttatatttcttttttttttttttgctctacgccgcgacgccgaaacaatggccggaaaaggagagggtcctggctatcggaatcgatctcggaaccacctactcttgcgtcggtgtgtggcaacatgaccgcgttgaaatcatcgccaactgaccaagggaacagaaccacgtccgtcttacgtcggattcactgacaccgagcgtctcatcggtgatgcggccaagaatcaagtcgcctatgaaccccatcaacaacgttcttcgatgccaaaaaggtgaattggtcctagattcagtgattcctctgttcagaatgatatcaaattgtggccttttaagggtcattggctggtgctgctgacaagccaatgattcgtggttaactacaagggtgaagagaagcaatttgctgcagaagaaatctcttccatggtgactcatcatgatgcgtgatattgctgaggcttacctaggctccacggtgaatcaatgctgttgtcactgtccctgcttgactcaatgattctcagcgtcaagccaccaaggatgctggagtcattgctggtcttaatgtgatgcgaattatcaatgagcctacctgcagctgccattgcatatggacttgataagaaggccacgagtgttggtgagaaagaatgtgttgatttttgaccttggtggtgggacatttgatgtgtctttactcaccattgaggagggtatctttgaggtgaaagccactgctaggtgacagcacatcatctggaaggtcgaagatttctgcataaacagcgaatgggtgaaaccaatttggttacaggagtccaagaggaagaccaggagggcatttattgggaaaccccagagcacttagaaggttgaggactgcttgtaagagggccaagagaacactttcatggactgctcagaccaccattgaaattgattctctatacgagggaatgtgatggctactccactgttactcgtgccagatttgaggagctcaacatggatctcttcaggaaatgtatggagccggtggagaaatgtttgagggaatgctaagatggacaaaagaagtgttgatgatgttgtcctttgttggtggttctaccagaattcccaaggttcaacaactgctgcaggacttctttaatggaaaagaggcttcccaggagcattaatcccgatgaggctgttgcattatggtgcggctgttcaggctgcaatccttaatccgtgacggcaatgagaaggttcaggatcttctcctcctggatgtcacccctctgtctcttggtttggagactgccggtggtgtgatgactgtcctgatccctaggaacccttccaattccaacatagacggaacaagttttctcaacatactctgacaaccagcctggtgtgcttatccaggacctttgagggtgaaagacgcaaggaccagagataacagtttgttgggcaaatttgagctatctggcattcctcctgcacccagggggtgttcctcgagattacaagtgtgctttgacattgatgccaatggtatcttgaatgtctctgccgaagataaaaccactggccagaaaaataagatcactatcaccaatgacaagggctagattgtcaaaggaagatattgagaagatggttcaagaggctgagaagtacaagtctgaggatgaagagcacaagaagaaggttgaggccaaaaacgctttggaaaactatgcatacaacatgaggaacaccgtgaaggatgacaagattggtgagaaacttgacccggctgacaagaagaagattgaggatgcaattgagcaggcaatccagtggttagacagcaaccagcttgcagaagcagatgagtttgaggacaaaatgaaggaattggaaagcatctgcaatccaatcattgccaagatgtaccaaggtggtgctggtccagacgtgggtggtgctggtgcagcagaggatgagtatgctgctcctccttctggtggaagtggtgctggccccaagattgaggaagtggactaaatgtagttgctttccttcagatacctgttttaaaaacttattttactttatgctttttttaattggattttaatcgcatgatttttgttggatgggattcaaactatttttccccttctgatatgaacgttgctttaaacaattatgttatttgcgttattttcatgtattaaatggtatactcaattgttatgcactttacctgtaggaattattctgtcttgttaaatgacatatcttgtctttagtcatcatatgtgtatgttttattggcaagttattctctttaagtatacacgataattcaagtttttaatgcttgaaaaattatttttgt

SEQ ID NO: 1663 - DNA, 566 bp, Glycine max
ctcatcgcgttcgagaagctacattagcagctgaagcaaaagctccatcccttgcgttaatggtggattgtcagatttgattcgattttgggaacaacttatcgatccctcaatccgctgtgaacagatcgagggcgtggtctatttgatttgaactgaatttcggattgaaggatctcattttcttggagcattaaagcagaaattttcttgcatcctattctgttttacctaaaacatgtggagatttaagccattcagtcacaaagagcagactggtcttgaaggccgcactatagatgttggcaatcttaaaatacatgtcattaaggccattgccgaaggagggttctcttgtgtctacctagctcgagatgctgtacatatgtcaaagcaatatgctttgaagcacatgatatgcaatgacgaagaatcacttggattggtaaagaaggagatatctgtgatgaaggtgctggcaggacatcccaatgttgtcacacttcatgcacatgccatcttcgatatgggtaggacaaaagatgcattccttgtgatggagtttt

SEQ ID NO: 1664 - DNA, 320 bp, Glycine max
gaggaagcaagcaacattagcagctgaagcaaaagctcaatcccttgcgttaatggtggattgccagatttaattcgattttggaaacaacttatcgatcccccaatccgctgtgaacagatcgagggcgtggcctgtttgatttgaactgaatttcggattgaaggatctcattttcttggagcattaaagcagaaatttctagcgctatggggtttccagcagcagcggtggccgaatgaccaaacccctttcttaacctcgaatttcagcagaagacaagtcataatatgcggcctcagttccagctacaaagcgcg

SEQ ID NO: 1665 - DNA, 401 bp, Glycine max
cctattacagttttctgcgacaaacccagtgatcaagccattccaattcatcgtgaatgaacccatcattatcatagctcattgtcccagggtgaatcatcgatcaagcatcaatgaggtaactaactacgaagcttattcatgtgacgaccactgttgatgtggtatttgaagttacgctgcctgtacgttgtatctttgtttgaacagtgcaagctttgtatctccgtcagaaatcttggtggttttaaaccatggtctattgcaatgggttgaaatggacatttggtgagggtgaattatggtaacttggcaagtgacaattttttaatgccatctttcaagaaattctaacgggtggggaacgttgaactaatccgccagtgaagtataatgaaaga

SEQ ID NO: 1666 - DNA, 406 bp, Glycine max
caagtcgtaacttcctttgaaacagagaaacaaactaaccaaaccccttttctttctttcttttgagtgcatggcaatttggggcttttctttggaattagggcacacgcacatgcttttggttgagtgagcctcacaatcacagacagtggggaagatgtaatcccaccgagattattggttgattgattagttgattgattgataagtggtaagtgcaagggaaagtggaagtgcaagtgtttgtgtgtttgtgtaagggttttttggcatgaagggtgcgttggatcggacgaaggtggtgctccgccacttgccgccttctatttctgaggccgcccttttggcccaaattgatgccgccttccctgggcgctacaactggctctctttccgtcctggcaaa

SEQ ID NO: 1667 - DNA, 386 bp, Glycine max
acgaaagtgaagcttgtgcagttgtgctgtatctgggtacagtttaagtacagaccaatcctcatattcattcaattcaatggctctctactccttcttctctccctctcttttataccctccctcacatattccccgtcgacttttttgtcccaaggcttccttaagctcttcctcccctgaatccaaagcatcgcaaagtgtttcttctgcaacttccaccaccacttcccctaccccttcggttgagtctaggccacctgaccccgccttcaactatgcactcaccaaccctaacggcaacccaatcgtaaggattgttcgagccaccgagtcttccattgaaagggtcatttttgatttccgcttcttggcattacttgctg

SEQ ID NO: 1668 - DNA, 505 bp, Glycine max
ttcacgcgtccgaacgaactctattatttcaccatcatgtcgaatcaacccattgacccctatcaatacctccaaatcttccgcaaccccgacggcaccttcactcgcctaaacgacgccgttccatgcaccccaccctcttccgaccccactctctccgttctcaccaaagacataaccatcaaccaacaaaacaacacctggctccgtctattcctaccccgaacagcactatcctcaaattccaatcccaagaagctacctctcatcgttttctttcacggtagccgcttcgtgcgactcagcgcggcttccacaatgttccacgatttttgcgtcgaaatggcgaacaccgcggaggccttcgtggcctccgttgactaccgcctcgcaccggagcaccggcttccggcggcgtacgacgatgccgtggaggcgctgcggtggatcgcgtgcagcgaagaggagtggttgacgcaatatgcggattatagtaagtgttatc

SEQ ID NO: 1669 - DNA, 1068 bp, Glycine max
taaagattaaagaggaggtgtgctgagacaggtagggtttcgagttacagccgcaccttgattcagagcagagcgaccttgaagagctatggctgtcggaaagaataagaggatttccaagggaaagaagggtggcaagaagaaagccgctgatccctttgccaagaaagactggtacgatatcaaggccccttccctcttccaggtcaagaatattggcaaaaccctcgtctctcgtacccagggaaccaagattgcatccgaaggactcaaacatcgggtttttgaggtctcattggctgatctccaaggggatgaagaccactccttcaagaagattcgtttgagagctgaggacgttcaagggaagaatgttctgacaaacttctggggaatggatttcacaactgacaagttgaggtctttggtgcgaaaatggcaaactttaattgaagctcatgtggatgttaagaccactgataattatacattgaggatgttctgcattggctttactaagaggcgtagtaaccaggtgaagaggacctgttatgcacaatcgagccaaatcagacagattcgcaggaagatgagagagataatggtcaaccaagcaacagcatgtgatttgaaagaattggtgcgcaagttcatccccgaaatgattggaaaggagattgagaaggcaacatctagcatctatcctctacagaatgtgttcattcgtaaagttaagatccttaaagctccaaagtttgatcttggaaaactgatggaggttcatggggattactctgaagatgttggtgccaaggtggacagacctgccgatgaaacattggctgaggaagccactgaagtagttggggcttgatctggctcataatgcatttttgttattttagaattcctgtttctcttacaaatattaattttcagttttgttttaatatttagaaacacatttgttgcaaatctaaatctggatttttgttttgtcaaggttttttggtacaacccaataactaaacacggtatgaacccgagaaattttcttattgtcttccc

SEQ ID NO: 1670 - DNA, 353 bp, Glycine max
gacagccgcagcttgaagcagagcagagcgaccttgaagagctatggctgtcggaaagaataagaggatttccaagggaaagaagggtggcaagaagaaagcgttagtgcccattcccttcttcactcttttattctctcctttaaactctgatttctttcttcttcttccgtgattccacagcgctgatccctttgccaagaaagactggtacgatatcaaggccccttccctcttccaggtcaagaatattggcaaaaccctcgtctctcgtacccagggaaccaagattgcatccgaaggactcaaacatcgggtttttgaggtctcattggctgatctccaaggggatg

SEQ ID NO: 1671 - DNA, 893 bp, Glycine max
tgtggacgagacaacacaattacttacttacccaaaccagttgttgcagagagagtaattttattttttgtggtggtgattggggaactgagagagtgagtgagtggagtagcagaagagaagatgggatctgtgtgtatctgagactgtgcatcatccctgttcctaacgattcttgtggacagacagcgcactggtattttaaacaggcctgatgggttctagattcccatctcatcagctcagcaatggcctgtatgtatcaggtcgccctgaacagcccaaagaaagaactccaacaatgacctcagttgccatgccttacactggtggagacatcaagaaatcaggagaattagggaaaatgtttgatatcccaatggatggctctaaatctagaaaatccggtcagctaaataatgctccttcacggactggatcatttgcaggtgctgctgcttcacattctggacctatcttgccaaatgctgcacctcgttctatttataccacatctggtaacatatcttctggaggcagcatgacgactgcttcagtctcaatgaaaaagaccaactctggtccactgaataaacatggggagcctgtgaagaagtcatctggaccgcaatctggtggagtcacacgccaaaattctggtccgattccaccagttcttcctacaactggtcttattacatctggtcctctaaattcatctggggcaccaaggaaagtatctggtccattagaatttacaggatcaatgaaatcgcctagttctgtaactcacaatccagccatgaccactcttagcctagatgatgaatattccttcaggaggaacttcccaaagccaatactgtggtctgtaattctgattttcattatgg

SEQ ID NO: 1672 - DNA, 902 bp, Glycine max
gtaattctgattttcattatgggattcattgctggtgcttttattcttggagctgtccacaatgtcattctccttgttgttgtagtagttctttttggtgctgttgcggcattgttcacttggaacagttgttgtgggaggacagccattgttggtttcatttcccgttatcctgatgctgagcttcgaactgccaagaatgggcaatttgtgaaggtttctggggttgttacctgtggtaatgttccactagagtcctcctttcagaaagttcctagatgtgtatatacatccacaagcttgtatgaatatcgaggatgggattcaaaagccgccaacccgaagcatcgccgttttacatggggactcagagcagctgagaggcatgtggtggacttctacatttctgatttccaatctggattgagagcattggttaaaacaggctatggtgcaagggtgactccttatgttgatgattccgttgttattgatgttaatccagccaataaagacatgtcccctgagtttcttcgatggttgggcgagagaaaactttctagcgatgaccgtataatgcaattaaaagaagggtacatcaaagaaggtagcacagttagtgtaatgggagttgttcaaagaaatgacaatgtgcttatgattgtccctccacctgagcctttgactaccggatgccaatgggccaaatgtatattccctgctagccttgagggtattgttttgagatgtgaagatacgtcaaagattgacgtcattccagtgtagtcatccttgatgttgttccagtgtagtcatatcctctctggtaacctcttaggtattcttctttaaaagatatgtcttcgcatatccaaaatgatggtggttgggtgtggtgttgt

SEQ ID NO: 1673 - DNA, 427 bp, Glycine max
gcgagagagagagatggatactggtatgctatgaagatgggatctcagactcagcgtcatcaccactctctttgattctcttcaatcttgagtctccagtattactttgagtaccacttcaacaaactggtgctgctttgaaaaagtctgatgggttcaagattcccatctcatcagctcagcaatggcctgtatgtatcaggccggcctgaacagccaaaagaaaagactcccacaatgagctcagttgccatgccctatactactggtgacatcaagaggtcgggagaattaagcaaaatgtttgatatcccaatggatggctctaaatctagaaaatccggtcccataagtaatgctccttcaaggacaggatcatttgcaggtgcttgctcacactctggactatcatgcaaaatgctgcagc

SEQ ID NO: 1674 - DNA, 579 bp, Glycine max
aatgtatatgctagtttgggagacgggacgagacaaccgaaaccattgatccaacccaacccacaccagttgttgaagagagagagagagtaatttaaaattatttttaattggacgggtaaagaagaagagtagtagtagtaggagtaatagtgattggggaactgagactgagtgagttgagtagcagaagagaagagaagatgggatctgtatgtatctgagactgtgcatcaccccattccctgttgcggttgattcttgaggacaggcagagataggattaacttaatatgacgacacgacaccattgcaatttaccattctacatttaggcaatgccagccacccaatagataatagcaataagtctttcttcacttcaactcgcactggtatttaaacaagtctgatgggttcaagattcccatctcatcagctcagcaatggcctgtatgtatcaggtcggcctgaacagccgaaagaaagaactccaacaatgagctcagttgccatgccttacactggtggagacatcaagaaatccggagaattagggaaaatgtttgatatccccat

SEQ ID NO: 1675 - DNA, 283 bp, Glycine max
ggcttcgaagatgggatctcagactcagcagcttcatcacctctctctttgattctcttcaaccttcagtacgcctctttcacacactggtgccttttcttagttgcgctgcttttaaaaagtctgatgggttcaagattcccatctcatcagctcagcaatggcctgtatgtatcaggccgccctgaacagccaaaagaaaagactccgacaatgagttcagttgccatgccctataccggtggtgacatcaagaagtctggagaactagggaaaatgtttg

SEQ ID NO: 1676 - DNA, 1487 bp, Glycine max
ctcgagccgctcgagccgattcggcagagcctctgcttccgacacaaatcaatctttctgatcatatattattcttttgtttttttaatttattctccatacacatgcagacaataagttcgaacaagttcaggagcggcatggatttcttccaccgcgcgaaggcggtgcgcctccgcagccaccacgacaagtacctcctcgcggaggaggacgaggagtcggtgacgcaggaccgcaacggctcctccaaaagcgcacggtggacggtagaatacgtggccgaatacgacaacataattcgcctgaagagctgttacggcaagtacctcaccgcttccaaccacctcttcctcttgggcatgacgggccacaaggttctccagacgcttccctcgaggctggactcttctgtcgagtgggaacccgtcaaggacggagggcgcgtgaagctcaagtcccgttacgggaatttcctcagggcaaatggcgggttgccgccgtggagaaactccgttactcatgatattccgcacaggaccgccacgcaggattggatcctgtgggacgtggatgttgttgagatttacgtgaactctcccgcgaatcatgatagaccctccgctccgccgttgccggttgaggactctgttcccatactagcgagcgcgccgccgccgccaccgccaactgtgtctgctagcttttcaaggcaacagcccaatgatttatcaccgaaggtggaagggagaactatatactaccatattgctgaagacaatggagaggtgctggatgaaggtgtgcaggggtattctttgattttcaaagggaatggagttgaagaattgactcgaaagtttgaggaagaaacagggctagagggaatcattgtgtgtaatcggagtccattgaatggaaagctttatcctcttcgcttgcagcttcctccaaacactgtcaccatgcgggttgttttggttcttcccatgtcaaatttggcaagagactttgaggcacaaggcttactgtgagaagcctttagagttttgcaacgaaagcctacgtatatgtagttatgtactgatcgaagccagttcagaatttaggaatatgttctagtccatttcatttattaagcagagttcatcatggtcctgtgagggaagcttagagttgtcattgcatggatcaaaacagcaatgtcctttcatcaatgacatgtgttataggcgattctgatggtggattttgttggggcttctttttcattaactccagcttcaatataagcatgtgttgcatgtggattccgggaattttgttgtttgatggtttatgtaattttatgtgcttcatgattttttctctaggtggatataccgcatgtaaatagtataagttttgtcagcaatagaagattttcttttatcagatataaatataaatttctaatattcttcagaaatttagaaacatttttgttt

SEQ ID NO: 1677 - DNA, 1130 bp, Glycine max
ctcttcattcatctctgatccaaacgaagtaacgaaccaaccaatcaccctgtctttctgacccaaaaacatagtcccaaatcgaacaaaatcaatcaactaactcctccaacgttgttgttattatgcagacaacaagttccaacacctccggcgccacctcgatccgttccggcatggagctcttccaccgcgcgaaggcggtgcgcctccgcagccaccacgacaagtacctcctggccgacgaggacgaggagtccgtcacgcaagaccgcaacggatcctcccgcaacgccaagtggacggtggagctcatcccggagttcgacaacatcatcagactcaagagctgttacggaaaatacttgacggcgtccaaccagccgttactgctcggcgtgacggggcgcaaggtggtgcagagcttgccgcggcggctcgactcctccgtggagtgggagcccgtgcgcgacggcgcgcaggtcaagctcaagacccgttacgggaactttctgagagcgaacggtggggtcccaccttggaggaactccgtgacgcacgatatcccgcataggaccgccacacaggattggatcctgtgggatgtggatgttctcgagattcatgtggtgtcccctgctccgccttcgattccgcactccgattcgcttgatttcgaatcgaatactccttctgctgttaacatcaaatctactaccttctccagacaagagtcgacggattcgaatgtgggttcgccgccaaagaagatggaggggaggactatatactaccacgttgcagaagataatggggatgtggatgatgagaatgtgcagggttattctttgaatttcaaagggaatggggttgagcagttagctcgaaagtttgaggaagagactgggcttgagggagttattgtgtgcactcgaagtcctttgaatggaaaactctaccctcttcgcttgcagcttcctccaaacaatgtcaccatgcaggttggtttggttcttccctcgtctaaagtggcacgagaatttgaggagcaaggtatactatgacaagctacattattgcgggagccttgaatcgactctactgaaatgcaacttgtgattcaagcgtgt

SEQ ID NO: 1678 - DNA, 377 bp, Glycine max
gcgtacgcccacgcgttcgcaaaccatcaaacctcttctttcaggtccaattcactcgcttattcttttctttccatacacatgcagacactaagttcgaacaagttcaggactggcatggacttctttcaccgcgcgaaggcggtgcgcctccgcagccaccacgacaagtacctcctcgcggaggacgacgaggattcggtgacgcaggaccgcaaaggctcctcgaaaagcgcgcggtggacggtagaatacgtggctgaatacgataacataattcgcctgaagagctgttacggcaagtacctcaccgccttcaaccaccgcttcctcttgggcatgaccggccaccaggtcctccagacgcttccttcgag

SEQ ID NO: 1679 - DNA, 655 bp, Glycine max
ctgttttgtaaaagcaagagacaaagagagagaggaagaggaaggtggaaaagccctagtgtgtgttctgctgagagtccgatacacatctaggaaacgctatctatggctttttacggaggcgcgaaacgcgtttgtgtatccataaggcactattgttcgaattcagcgtcagagaaggtgaatctgataaagcagctgagagagagaacaagcgcagctatgaaggacgtgaaagcggctctggtggattcgaattgggacatagaggaagctcagaaggaactgaggaaaagaggcaaagttttggcgtccaagaaatcctctcgaactgcctcccaaggcctcctcgctctcgcccaatcccccaccaaactcgctctcatcgagctcaactgcgagaccgacttcgttgcccgaaacgacatctttcagcacctcgctttgcgtttagccaaccaagctttgtctctgtcgctcgattcttcttcttcttcttcttcttcttcctttcatcttggacctcaatcccttcaggacatgccattcaatctcgaccatcctaagttcaacggccaaacaactgtgcacaacgcaatcactgagctcgccgccatgatgggggacaatgtcaagcttcgaagagattgtttcc

SEQ ID NO: 1680 - DNA, 1033 bp, Glycine max
tggctcgagctcgagccgcacggacacgggatgtgattatgggatctgtagtcctgtgactccgaacaccctcctccctctatatatctatatccaaatctcccttcaattctcaatctctgaaaccacaattcacaaccgaaacagtttccatctctctcacaaaatgacaacaatatcaaattgctcccttctcttcctcttcctcttcctctccaccctccacatagcttccaccctctcaacccccaccaacttcatcaagtcctcctgcagcaccacccagtacccagccctctgcatccagtccctctccgtctacgcctccaccatccagcaagacccccacgagctcgtccagacagccctctccctctccctcaaccacaccgaggccaccaaaaccttcgtcgcaaaatgcaacaaattcagaggcctcaaaccgagagaatacgctgccttgaaggactgcgctgaagaaatcagtgacagcgtcgaccggctcagccggtcgctgaaggaactcaaattgtgtaaggtgaagggtgaggacttcacgtggcacatcagcaacgttgagacgtgggtgagttcggctttgaccgatgagagcacttgcggcgatgggttcgccgggaaggcgctgaatgggaagattaaggaggcgattagggctagaatggtcaatgttgctcaggttactagcaatgctctctcgcttattaatcagtatgctgcacaacactagggggagttgggaagaaagtttttgttttttgttttcgttttttcctttgaggggaaaaaaaaaaagaacaaacagttctatgtggttggttaatggttaattttgtgttttgtgtggtgtatgtaattgtgagtttttatagagatatggatcttgtgttgcttctgatcaaatgtgaaatatgagttctgtttttgtatgattttctttgttgctcttctctctacctttgattcagtaaagtaatgttccttagtccggacgaacacagttttctttgagcgt

SEQ ID NO: 1681 - DNA, 779 bp, Glycine max
  unsure (1)..(779): unsure at all n locations
cctccctttccgactccgcatggcaagaatatcaaattggtctcttgtcttcctcctcatctctacactactccacatagagcccagcctctcaagcccaagcccaagcccaagcccaagcccgttcataaaatcctcctgcagcagcacccagtacccagccctctgcgtctcatccctctccgtctacgcctccagcatccaacaggaccctcaccaactggttcagacagcactctccctctccctgaaccgcacccaagccaccaaaaccttcgtggctaactgcaacaaattcagaggcctgaaacccagagagcacgctgcactcaaggactgcgccgaggaaatcagcgacagcgttgaccgcctcagccggtcgctgaaggagctcaagctatgtaaggttaagggtgaggacttcacgtggcacattagcaacgtggagacatgggtcagttctgctttgaccgatgagagcacttgcggcgatggattctccgggaaggcgctgaatgggaagatcaaggactctattagggctaggatgctcaatgttgctcaggttactagcaatgctctctcgcttattaaccactatgctgcacaacactagttgggaacaatgatcttggttgcttaatgctttacttttcttcttttatgtgctctatgtaattattatatatgtgagtctttatagatatatggatcttctcatgcttcttaaatgtgaaatatgacgttgtgtttttctatgattaaaaaanannnnnnna

SEQ ID NO: 1682 - DNA, 786 bp, Glycine max
gcacccgtccgtaagctcggaattcggttcgagcccaagaacccaaccgtacctgtgatcatttgtctaacaaattgccggcgagtgtcaaattgctacgttctttcccgcttcatctacctttccaccctgcacatagctgccagcctgtaatcacccacgaacttcatcaagttctcgtgcagacacacccagttcgcaggcctgtgtattcagatccttcttcgtgtactcctacaccattcaacaagaccttcacgggctcgtacagacagccctctaactctccctgaaccgcacccaagccaccaaaaccttcgtggctaactgcaacaaattcagaggcctgaaacccagagagcacgctgcactcaaggactgcgccgaggaaatcagcgacagcgttgaccgcctcagccggtcgctgaaggagctcaagttatgtaaggttaagggtgaggacttcacgtggcacattagcaacgtggagacatgggtcagttctgctttgaccgatgagagcacttgcggcgatggattctccgggaaggcgctgaatgggaagatcaaggactctattagggctaggatgctcaatgttgctcaggttactagcaatgctctctcgcttattaaccactatgctgcacaacactagttgggaacaatgatcttggttgcttaatgctttacttttcttcttttacgtgctccatgtaattattatatatgtgagtaattataaaaaaaaaaaaaaaaaaaaaaaaaaaaaagggcggccgccga

SEQ ID NO: 1683 - DNA, 753 bp, Glycine max
  unsure (1)..(753): unsure at all n locations
gaagacgacagaagggaacagccacaacactttccacttgtctccgaattagttatcttgagaaacattattcccattgctatatattatggctagcatgaaggttacatgggtggttgtgatcatgtgcatggccgtggtgggtgcaccgatgatggcgcaagccatgacatgcaatgatgtgacggtgaacatggcacagtgcctatcctacctgatgcagggaggaacaccttcaacactttgctgcagcggagtcaagaacattcttggctctgctgtcaccaccgttgacaaacaaactgtgtgcaactgtctcaaggcggatgctgctaggtacaacatcaatgaccagtatgctcaggcactccctggtttctgcaaggtcaatgtcccttacaagatcagccgctccactaactgtgcaagcatcaggttctgaacaagccatggacagatttgctcatttctgcagcgggatactgaggcagcagtgaagcacttactatcagaataagagaaatcgagtgtgactgtagggcttcacttatgcgagccttttattgtattagtttctatttcttcagacacttcatagtctttgttgttgggtgtgagtgatcactagatgtatctaagttgattgttgcatgtaacaatcacgtatttgatataataactccatatgctattttgattattgcataccnnnnnnnnnnnnnnnnnnnnnnnnnnnnnnnnnnnnnnnnnnnn

SEQ ID NO: 1684 - DNA, 350 bp, Glycine max
gacagccacaacactttccacttgtctccgaattagttatcttgagaaacattattcccattgctatatattatggctagcatgaaggttacatgggtggttgtgatcatgtgcatggccgtggtgggtgcaccgatgatggcgcaagccatgacatgcaatgatgtgacggtgaacatggcacagtgcctatcctacctgatgcagggaggaacaccttcaacactctgctgtcaccaccgttgacaaacaaactgtgtgcaactgttctcaagcggatgctgccaggtaaaacatcaatgaccagtatgctcaggaattccctggtttctgcaaggtcaatgtccctt

SEQ ID NO: 1685 - DNA, 1456 bp, Glycine max
cctcgagaagtgccttcattcgggactgtaactagccgcagcacgaggagcagcctcaggaggagaataaggatgtctcacaggaagttcgagcacccaaggcacggttcactgggatttcttcccaggaagcgtgctgctcgtcacaggggaaaagtgaaggcattccccaaggatgacccatccaaggcacccaagctcactgcattcttgggttacaaggccggtatgactcacattgttagagaggtcgagaagccaggatcaaagcttcacaagaaggaaacttgtgagcctgttacaattattgagacccctccaatggttattgttggtgttgtgggttatgtgaaaactccccgtggtctccgaacattgaacactgtatgggctcagcacttgagtgaggaactgaaacgtaggttttataagaactggtgcaagtccaagaagaaggccttcaccaagtactcaaagcagtatgaaactgaggagggaaagaaaaacattgaggcacagctggagaaactgaagaagtatgctactgtggttcgtgttttggctcacactcagatcaggaaaatgaaagggttgaagcagaagaaagcccatatcatggaaattcaggttaatggtggtactattgcacaaaaggtggactttgcatacagtttctttgagaaacaggttcctattgatgcagtgttccagaaggatgagatgattgacatcattggtgtgaccaagggtaaaggttatgagggtgttgtcactcgttggggtgttacccgccttccccgtaagactcacagaggtttgaggaaggttgcttgtattggtgcctggcatcctgcaagagtttcattcactgttgccagggctggtcagaatggataccaccaccgaactgagttgaacaagaaggtttacaagcttggcaaagctggagatgaatctcactctgctcttactgagtttgataggaccgagaaagacattaccccaataggtggtttccctcactatggtgttgttaaggatgattatatcatggtcaagggatgctgcgttggtcccaagaaaagggttattacattgcgccaatccctccttaagcagacttctcgtgttgctctggaggagatcaagctcaagtttatcgacacctcttcaaagtttgggcatggtcgcttccagaccacacaggagaagcagaagttctttggacgcctcaaagcataattttgttaattggatggaaatgctggatttctattcggttaccatatcttataaacatattgtagtgttttctgttttgacattatggatccccgagtagtgagttttttccccccttaagttggccaaacttttgttgagactgatcttttaaaaaattccaaattgtttgattttatataaaagaaaaaaaagaagaaaaaaaaaggaagaa

SEQ ID NO: 1686 - DNA, 442 bp, Glycine max
tcgactcgagcgattcggctcgagcgaggagcagcctcaggaggagaataaggatgtctcacaggaagttcgagcacccaaggcacggctcactgggatttctccccaggaagcgtgctgctcgtcacaggggaaaagtgaaggcattccccaaggatgacccatccaaggcacccaagctcactgcattcttgggttacaaggctggtatgactcacattgttagagaggtcgagaagccaggatcaagtgagaaccattactcttttgctaattgaagttgatgtatatcatgctgtcaaccatgtgtttcactatctgcttatttgataatcagtagcgggactgtcactggtttgatttattttctcaatttttttaccgaactgtttcctagatttttaaatgtggaaatcatttatttatttgatatagaaaattt

SEQ ID NO: 1687 - DNA, 815 bp, Glycine max
caactcagttcggtggtggtatccattctgagttgaacaagaaggtttacaagcttggcaaagctggagataaatctcactctgctcttactgagtttgataggaccgagaaagacattaccccaataggtggtttccctcactatggtgttgttaaggatgattttatcatggtcaagggatgctgtgttggtcccaagaagagggtcattacattgcgtcaatccctccttaagcagacttctcgtgttgctcttgaggagatcaaactcaagtttatcgatacctcttcaaagtttgggcatggtcgcttccagaccacacaggagaagcagaagttctttggacgcctcaaagcataattatgttaattggatggaaatgctggaattctatttggttgccatcacttataaactttgtagtgtttctgttttgatattatggattctcgggtagtgagttttttttctccttaagttggccaaacttttgtttcagggaagactgatcgtttatttcaaattttgtttatgagtttatctatattatccgtgtttaatgaatttcaaagttatttaatcttttgttgaaacaaaattcatgatcgacatgatagttggttttgagattgggtactgttggttgcattctgaatgatcagacatattttggattgtgatctctatttgactgaaggattaagaaaatgctatagttttttcgttggtgagaaaaaggggccggcccctggaaaatgctatagttcattccatgctttaaaggatggttcatgccatgaagctggagaaata

SEQ ID NO: 1688 - DNA, 806 bp, Glycine max
gaaaaaaaaaaaagaaagaaaaaactaggcgacaatagagactagagaagagagaggtgttggtgccctaatcgtgagaagaaaggaaagggaaaagaggaaaatggtgtgcataaggaaggcgacggtgaaggaccttctggcgatgcaggcgtgcaacctgttctgcctccctgagaactaccagatgaagtactacctctatcacatcctctcctggccccagctcctctacgtcgccgaagactacaacggccgcatcgtcggctacgtcctcgccaagatggaggaagaaaccaccgactgccacggccacatcacctccctcgccgtcctccgcacccaccgcaagctcggcctcgccaccaagctcatgaccgcagcccagaacgccatggaacaggtgtttggtgccgagtacgtgtccctccacgtgcgcaagagcaaccgcgcggccttcaatttgtacacggagactcttggctacaagattcatgatgtggaggccaagtattatgcagatggggaggatgcttatgacatgaggaagcagctcaaggggaagcagcaccaccatcatcaccataatcaccatcaccatcaccaccaccaccacgagcacagtggtggctgttgttccggggagcccaaggggaatcctgccaaagccacctgattgaaagaaactaggagacttttagcttggaaaaagaaatagtaagctctggttgagttctgttgtgcaaacttgttgtaggtttattgggccgttttgtctcgttatatatgaatttttgctttgctgg

SEQ ID NO: 1689 - DNA, 467 bp, Glycine max
tctctcactgacgcaggtgtttggtgccgagtacgtgtccctgcacgtgcgcaagagcaaccgcgcggccttcaatttgtacacggagactctagggtacaagattcatgatgtggaggccaagtattatgcggacggggaggatgcttacgacatgaggaagcagctcaaggggaagcagcaccaccatcatcaccatcaccaccaccaccgtcacgagcacggcggtggctgttgttccggggagcccaaggggaatgttgcaaaagccacctgattgaaataaattatgagacttttagtttgaaagaatagtaagctctggttgagttctgttgtgcaaacttgttgtagatttattgggccattttgtctcattagatatgaatttttgctttgctgtcttggtgaaatatagacactccttgggcttcatattgcttgaataaatctgttctatatcgtaa

SEQ ID NO: 1690 - DNA, 837 bp, Glycine max
cccctcgagccgattcggctcgtctctctctcttctctttctctcttcaacattcttctctcaccaaagcaacaacacacacactgagagcgaggggaattcaactttctgcaatggcggtttcttcttcttctgcaacaaaatgggtcctcttcttgcttctggcgctgcttattcgagaagaagctatggctacaccacagatctctgacctcaggaatcttgaagttgaaagacacaggttgccgagcttgacgaactcgtcaatggtggagagggcaaaagaggctgacaaattaaatgaacaagctgctgtggctaacccagaggaagtggtttcaatggttgagatgagcatccagaacagcacagagagaaggaagttgggatatttctcttgtggaacaggcaacccaattgatgattgctggcgttgtgaccccaactggcaacgcaaccggaagcgtctggcggattgtggcattggttttggccggaatgctatcggtggtcgtgatggaaaattctatgtggtgactgaccccagggatgatgaccctgtgaacccgaaacccggcactcttcgccatgctgtgatccaggataagccattgtggattgtgttcaagagggacatggttattcagctgaaacaagagctgatcatgaacagcttcaagacaattgatggtagaggagtcaatgtgcacattgctaatgaaccatgcttaacatttaagttggtaaccaatgtcataatcaatggttggaaaattaatgattgcaaacttactggaattgctatggtaagaacttcccaaaccaatttgggttgaa

SEQ ID NO: 1691 - DNA, 442 bp, Glycine max
cggctcgagtggggacactgttcaacagtttaattattcaaccacaaagtttagtgaacaaaaagttttttcaaatgattttactgaaaatcaaaaacccctcagttattctccacaatcaattcagggtgggcatcaggagtcacatgcccctcatgttgggagatcatcagctggacgtccttctcatgctttggtaacttttggatttgggggaaaactcatcataatgaaagatcctaatcttttgagctcatcatacggaagccaggattctgtacaaggttctgtttctgtgttgaacttgattgaagttgtcacgggaaatatggattctttgagcatcagacataacaccagtaactatttccatgctctgagccagcaatcattcccaggtccgttggttggccggagtgttggaagtaaggaactgtacaaa

SEQ ID NO: 1692 - DNA, 1165 bp, Glycine max
cccacgcgtccgcccacgcgtccgcccacgcggtcgcagttgtattgttgaacaagggtttctctgtctgcttcttcactttctctcgtttcaatcgaaaccaaaacaaaaacatgggcagaaaattcttcgtcggtggcaactggaaatgcaatgggaccactgaggaggtaaagaagattgttactactttgaatgaggctaaagtccctggagaagatgtcgtagaagttgttgtgagccctccttttgtgttccttcctgttgtaaaaagtttgctgcgccctgatttccatgtttcggcacaaaactgttgggttcgcaaaggtggtgcttataccggtgaggttagtgctgaaatgcttgttaatttgggaattccttgggttattattggtcactctgaacggaggcagcttttaaatgaatcaaatgagtttgtgggagataaagttgcctatgcacttcaacaaggtctaaaagttattgcatgcattggggagactctcgaacagcgtgaagctggtacaacaacggctgttgtttctgagcaaacaaaagcaattgcagctaaaatatcaaattgggacaatgtcgttttggcctacgagccagtttgggccattggaacaggaaaggttgctactcctgctcaggctcaagaggtccatgctgatttgaggaaatgggttcatgacaatgtgagtgctgaagttgctgcatctgtaagaattatctatggaggctctgtaaatggaggaaactgcaaagaattggcagcacagcccgatgttgatggatttttggttggtggtgcatccctcaaggcggaatttgtggacatcataaacgctgctactgtgaagaagaattgaaattcgtagttaggaactgataatgctgcctttcaagctgcttcggaaattgctgtttttgagttttggttctgtgctttgtggccaatgtattgaactctgtttagtacctgaataaacatgctttcctttgatctcatccataggcgatcaattggattttgattaaatttctgaatgcaaaaatagtgtaactaccataacatttggtgggtaaataatgttgaacttgactgtacttttaatcgtcactttctttattactgtttatgcacgcatcatttagatat

SEQ ID NO: 1693 - DNA, 434 bp, Glycine max
gacacgcagtcgtattgtagaactgaacaagggtttctctgtctctttctctgtctgcttcttcactttctctcgtttcaatcgaaacaaaatcatgggcagaaaattcttcggcggtggcaactggaaatgcaatgggaccactgaggacgtgaagaagattgctactactttaaatgaagctaaagtccctggagaagatgttgtagaagttgtcgcgagccctccttttgtgttccttccttttgtaaaaagtttgctgcgccctgatttccatgtctcggcccagaattgctgggttcgcaaaggcggtgcttatactggagaggttagcgctgaaactgcttgtgaatttgggaattccttgggtgattattggtcactctgaacggatgcagctgttgaatgaatcaaatgagtatgtgggagataaa

SEQ ID NO: 1694 - DNA, 357 bp, Glycine max
ggccgcacagcccgatgttgatggatttttggttggtggtgccaattctttgcagtttcctccatttacagaacctccatagataattcttacagatgcagcaactgcaaagaattggccgcacagcccgatgttgatggatttttggttggtggtgcctccctgaagccggagttcgtggacatcataaatgctgccactgtgaagaagaattgaaattcgtagttaggaactgatataatgctgcctttcaagctgcttcggaaattgctgtttttgagttttggatctgtgctttgtggccaatgttttgaactctgtttagtactgaataaacacgctttcctttgagatctc

SEQ ID NO: 1695 - DNA, 460 bp, Glycine max
cccacgcgtccgtaaggctgtttggacggtcacacgcagttgtattgtagaactgaacaagggtttctctttctctttctctgtctgcttcttcactttctctcgtttcaatcgaaaaaaatcatgggcagaaaattcttcgtcggtggcaactggaaatgcaatgggaccactgaggaggtgaagaagattgttactactttaaatgaagctaaagtccctggagaagatgttgtagaagttgttgtgagccctccttttgtgttccttccttttgtaaaaagtttgctgcgccctgatttccatgtctcggcccaaaattgttgggttcgcaaaggtggtgcttatactggagaggttagtgctgaaatgcttggtaatttgggaattccttgggttattattggtcactctgaacggaggcagcttttgaatgaatcaaatgagtttgtgggagata

SEQ ID NO: 1696 - DNA, 1135 bp, Glycine max
cctcgagccgattcggctcgaggttcgttctagaaggctctattatcctcagataaaaccccccctatctctattttagggtctttattatctccatcaacgcgtgttcacactctctgcttcgcgtggaccaacaagaagtgtaagttttcattcaatggccagcgctcagctctcagcaatatcttcgtcgatctctacggcgtcgtttgaagggcttcgaccttcggctgttcagtttgcttccgcgggcagaattagaattggcaatctctcccaaaggtctttccggggcttggttgtcaaagccgccaccgttgttgcccccaaatacaccgcgattaagcctctgggagacagagtgctgataaaaattaaggaagcagaggagaaaactgagggtgggattttgcttccatcaactgctcaaacgaagcctcaagggggtgaggtggttgctgttggagaaggaaagacaattgggaagaacaatgtagagattagtgtgaagactggtgcacaagttgtgtattcgaagtatgcaggtactgaggtggatttcgatggtacaaagcatcttattgtgaaggatgatgacattgttggtatcctcgaaactgatgacatcaaggatcttaaacccttgaatgatagagtcctcataaaggttgctgaagctgaggaaaaaacctctggcggtttgttgcttacagaggcaaccaaggacaaaccttcgattggaacagtgatagcggttgggccggggcatctggacgaggaaggcaacagaaaacctttgtccgtgactcctgggaacacagttttgtactccaaatatgctggaaatgacttcaagggcaaagatggttctgactatattaccttgagagtctcagatgtcatggctgttctctcctagaacaacttgctttgggttttgtaacttgaaatttttgtgtttatctcgagaaaacgtggattcttttaatcgtaaggacttttgaaaaatagtttattgcaatctgttccgtagacaatctctttttatctttgaatttggtagcctgtgttgaaataagttccgcaatatctttgaacattttcttaattattaaatgcccccatattcccgtct

SEQ ID NO: 1697 - DNA, 435 bp, Glycine max
gattaccttcatctcgtcatcgtttcgttcaactttcaacgccagttcacactctctgcttcgcgtgtaccaacaagtgcaagttcgaatcaatggccagcgctcagctcacagcaatagcgtcatcgatctctacggcgtcgtttgaagggcttcgaccttccgctgttcagtttgcttccacgggcagaattagaattggcaatctctcccaaaggtccttccggggcttggttgtcaaagccgccaccgttgttgcccccaaatacactgcgataaagcctctgggagatagagtgctaataaaaattaaggaagcagaggagaaaactgagggtgggattttgcttccatcaactgctcaaacgaagcctcaagggggtgacgtggttgctgttggggaaggaaagacagttgggaagaacaatgtagaga

SEQ ID NO: 1698 - DNA, 342 bp, Glycine max
tctaggagagaacagccatgacatataagactctcaagggaacacagttttgtactccaaatatgctggaaatgacttcaagggcaacgatggttctgactatattaccttgtgagcctcagatgtcatggctgttctctcctagaaccaccttgccttgggttccgaaacttgaaatttctgtgtttatctcgagaaaacgtggattcttttaatcgtaaggacttttgaaaaattttattgcaatctgttccgttatactaaaacttacgatcctattgtaatggctgttcaattgactgaagtgaccttacctttaccgattatttacagacctaccag

SEQ ID NO: 1699 - DNA, 383 bp, Glycine max
  unsure (1)..(383): unsure at all n locations
gctgcatatgattggagaatagcatttcagaacactgaggtgagggatcaaacactaagtcggataaaaagcaacatagaacttatggttgcgactaatggtggaaataaggcagttattattccacattccatggggggcgtgtacttcctacattttatgaaatgggttgaagcaccagctccaatgggtggtgggggaggaccagattggtgctccaaatatataaagccagctttgtaaacattggtggaccatttttaggtgttcccaaggctatagcanggctattctcagctgaggccaatgatattgctgttgccaggacgatagctccaggatttttagataaccatctgtttcgcattcaaaccttgcaacat

SEQ ID NO: 1700 - DNA, 646 bp, Glycine max
tacacatcaccacaatatccctctcttttcccttaattctctctctaaacatcacaatggagtatggaaggttgggaccctctgatcctggtggctcctcgcgcctcaacaacgttcctccgacatcttccgggaggaagaagattgtcttgctttcactctttagcgtcttgttaatagccgcgtctgctgtaactgcagttgccgtccgctctcgcaccaaaaataccggaggggacggaactagtctcggcaagttcacacaggccatttcacgcacgtgcagcaagacacgctttaagatgttgtgcatgaaatcattactggacttcccgggatctcaaggagcatccgagaaggacctcgtccacatttccttcaacgtcacgctgcagcacttctccaaggcgctctactcttccgccaccatctcctacaccgccatggatccccgcgtccgcgccgcctaccacgactgcctcgagctcctcgacgactccgtcgacgcgctcgcccgctccctcaacacagtctccgtcggcgccgtcggctccgccaacgacgacgtgctgacgtggctcagcgctgcgctcaccaaccaggacacctgcgcggagggcttcgccgacgccgccgtcacagtcaa

SEQ ID NO: 1701 - DNA, 605 bp, Glycine max
cccacgcgtccgcccacgcgtccgcccacgcgtccgcccacgcgccctctcttttcccttaattctctctctaaacatcacaatggagtatggaaggttgggaccctctgatcctggtggctcctcgcgcctcaacaacgttcctccgacatcttccgggaggaagaagattgtcttgctttcactctttagcgtcttgttaatagccgcgtctgctgtaactgcagttgtcgtccgctctcgtattcaacaaaatacgagagcccatgagactaggctcggaaagcccactcaagcgatttcacgcacgtgcagcaagacacgctttaagaccttgtgtgtcaaatcgcttttagactttccgggatctgaagaggcgtcagagaaggacctcgtccacatttccttcaacgtcacgctgcagcacttctccaaggctctgtactcctccgcggccatgtcctacaccgccatggatccccgcgttcgcgccgcctacgacgactgcctcgagctcctcgacgactccgtcgacgccctcgcccgctccctcaacacagtctccgtcggtgccgtcggctccgccaacgacgacgtgctgacgt

SEQ ID NO: 1702 - DNA, 941 bp, Glycine max
cactttctctctcttcttgcttctctctcttcttgctcctctctccttttcaattactctctctaacacggagtgatggctgtgcagctgtgggaaaccctgaaggaagccatcgtagcctacactggcttctctccttccaccttcttcacggtgctggcgcttctttttgccgtttactacgtcgtcacgggtctctttggctcctccgacgatcaccatcaccgccaccgccacgtcgaggaggaggaggagatgccgcctctgcgccccccggttcagctcggcgagatcacagcggaggagctcaaggcctacgacggcaccgatcccgagaagcccttgctcatggccatcaaggcccagatctatgatgtctcccagagcaggatgttttatggacctggtggaccttatgccctatttgctggcaaggatgctagcagagccttagcaaagatgtcttttgaagagaaagatctgactggggatatttctggtcttggcccgtttgagcttgatgccttacaagactgggaatacaagtttatgggcaagtatgtaaaagttggaactgtcaacaaagaccgttccagtaactgaaccagaatccactggtgaaccatcagaatctactccccatgatgaatcttcaaagcctactgaagatgatggcccatcagaatcagcagctgctaaaaatgatggaaccccttcaaaggttgacgcagataaagagtaaataatcgttggataaagagcaattgtcttgcaaattctcttgcaaacagtggaaacggttacttagaagcttctgagaaatactgagccttgctgaatgtattcagcaaatgtgggacaaagtttgcctaagtattctgtttgataaataaggaaatcttggtatttaatttcagttttcctgggtttatagcttcttc

SEQ ID NO: 1703 - DNA, 586 bp, Glycine max
cacaccatttttatgataatgttgaacgttaactccgaaaacattggcctcagctccactctcctgaagtctttatcagaacccttagccagctttcgaagcaacttcatggtctcgtcctttcggacccctaaaaaggagttgagacggtggttggagagaatctcgagcgagcttatacgacgtaagttgcgccagtggtcgccgtacgatgatgctgtaataatggtgtggttgaagccgatgtactttgtcaatgaagagcgaaaacggttcgcgaagatgatgtcgtttttggtgaaacattcttccgctgcggatgcggacgaaacgacgaggacgggttgggacccgaaccgcagagagaggatattattagggccatatttctgtgagaggtcgtacaaggctcggtgaagtggctgtttcttcagctgatggaggtttccgattattggaagagatggtggacttggtgctgggttttttaacctttttctgaagaatagtagttttaaactgatgagaaaaattaagaggtaaaggatgttgataaggtcgaacgcgtggacgaacgcgtggacga

SEQ ID NO: 1704 - DNA, 544 bp, Glycine max
tgatggtatcataaaaatctcacccttttctgcaactttctctctgacacacaccgaacactcaaacacacacagtgtgcagcagcagcagcaacaacaagagaagaagatggctctgcaactatgggagacattgaaggaggccatagttgcctacacggggctctccccgcccaccttcttcacccttctggccctgatcctagccctatactacgtcgtttctgggctcttcccctcttccgaccaccgccacaacaccgcctcgcgcgacttggagccccagatggagcctctgcgaccccccgttcagatcggcgaggtcaccgaggacgacctcaaggcctacgacggcaccgatcccgagaagcctctcctcatggccatcaagggccagatctatgatgtttcccagagcagaatgttttatggacctggtggaccctatgctctatttgctggcaaggatgctagcagagctttagcaaagatgtcttttgaagaagaagatctaactggagatatctctgtcttggcccatttg

SEQ ID NO: 1705 - DNA, 3067 bp, Glycine max
aataatactaacaaataaaattttgttccgaaaatttcctagagtactcagagacataaattgattaagtgtccagcaacattagacacccttcagactccaaaaagtgcccttcagatttagaagtttccagccacattagaaacaccgatccaattaatcgttcctcctactcttcttcccattgcaggaaacaagtcagtaattcactagttttattccaaaagacagatgtgaactttttattcagagaaacaaacattgttacatcctcgggtagataacaatattctctctttatccatctaattgatgacatactacaagtctaaaccaaattacatgctacaacaaaaggacttccccaccccatgactactacaacatgccttgtctagctattaggatcaacaaccctttttctccactacatgatactaatactaggtgtcttacaacaaacctcccccctctctctctgcctgactccaacaattccctcaatgcttaattacaacaaaacccttctcctgatacaacaatgcatcaaacaccaagtcttaaaaaggactcaaacttggatctctattgaccatctgtacatctcctctggagaaactggaatggagaaggttgtcaacccggtctctgagtcatagttgaagtcggtttcagcgccacctaccacacacttcagtggtctctgggaggagtaaactccaaatctgcctcttccccttacactaagagctattgttttcgttgctgctcggttatgaatctcaacctgctccactgctcctccagtgttgaacatatccagtagccctattgctgcaaatgatatacttggagctatttcttggattggacagaagtggaaaagctcaaactccagaacttttagtgtcactggaattgaaaccccttttggtagccgaatcacctcacctgatctgtaagcataaacaattgtatctccaagccattcagcacctgctacttgtgtgatgaggtcaacatcagaggcgcagacagaggcggtgagtgtaccaggagatgtatcatggatgcgggttttcttctctatcttgcaccatccagcaccttggcagttaaatacaccaacaactccagagcatttgttcaggttccatattttgagcaagctagtcctatctctggctggatccacaaatagagaatcacgagttggcctgccaggtaactgagcacggagaaccgaaccatccgggagaaccagcttcttaagaagatcaaaattgtgattgcctggcttgtcactaacataaataggacatccaccaattgcacgagctgcagcatgataatctgctgctgggtgtaaactatgaaacatgtcccagtcaggttgcatgaattctccaaggaatagtgagttgtatgcaacagaagaaatatggatggtatgggaagcaggatcacgagggtaaaaatcatcagaagctctcacaatagcagtctgcttagcactataaagtccatcagtgttgtgacacatacacgcaatgcatccgttatcagtaaaattgctagcaatggaagcctcaagcgcgtgatgatagctgcgagtaagtgacactcggccaccatgtcccgcaccaagggtctcaataatgttctgcacatcaaccttcactccatctactccacaagaagctaagtaagcatggagctcgttgtagaaattgaaaaccttctttgggtgcactaggccaaggccatgtacagccaagctgtccatgacaatgtctggttggtttcctagcacgcctggtgactgcactggatatgccaaggcagtgtcataatgttccatgccggttgctgctggcttcactccaccccaataaccagctagtgcatgccatacatatacatttttcacattgtgatgctgctttgctccatgtactagatgcttcagacctgacatctgctcattgttctgtaatttcttttgaaatttagtattctctttaataccagtcaacctagtagcaaactgtgctccttcttgtaccaaacattcagtagcatcctttgctttattttcaatctgttgccaaccatcatctatgatgaggaatcgtggaggtgtacctccctgtgatagacttttcaggccttcctcaacaccctcagctgtgacatcagtatagaaagcatcccatgtgcaccatccaaaccagtcaagacaagatggcaaccttttcttctcacgatgaagaaaagtttgcatgtgtttttccacagccttgacagcttgattgatgacttcaaagggattggtcccagcatgcatgtaaaccatgtgaaggccttggtcagtctcaactgcattatccccactctcgaggcaaatctctatctcgttcttgtcattgccttgaagaacagctcggaattgaccttcgaggagaggaagcaagacagtgtagatgattggagaattctccccatcagtttcactctctttgctctcaataagcatgaattgagtctccagaggaacatccctcccacaagttcccattctctgagtcatccaccataacttgaaccggaaacaacacatgaaccggagcccctctaaaacacccattggaaacacatggagacttttgctgtgtgaagctgtggcaccaacaaaagcaccagtcacaagaccccttccagaacctggagtcagcacaacgttgtctggcactccagtcagaatggtcttaccatggacaacaagtttcccatcgttaactgagatcttaggtgtgacagtcattttcgaacacttcaccacgagttaccgtgacacgggtacgcgagaacgaagagtgaaaaaatgaaggagcaattaacttagcaacttagagaagtgaaaaaagaaaagtgtggtagtatttctattccaggaggaaatggtcctccaatggaagaagaaggtggattcacagagcaacacactcagctctgtgttgatgattgatcactagcttctgaaatatgcgtcagcgaacgagtgcgt

SEQ ID NO: 1706 - DNA, 1328 bp, Glycine max
ccatgactactacaacatgccttgtctagctattaggatcaacaaccccgtaagcataaacaattgtatctccaagccattcagcacctgctacttgtgtgatgaggtcaacatcagaggcgcagacagaggcggtgagtgtaccaggagatgtatcatggatgcgggttttcttctctatcttgcaccatccagcaccttggcagttaaatacaccaacaactccagagcatttgttcaggttccatattttgagcaagctagtcctatctctggctggatccacaaatagagaatcacgagttggcctgccaggtaactgagcacggagaaccgaaccatccgggagaaccagcttcttaagaagatcaaaattgtgattgcctggcttgtcactaacataaataggacatccaccaattgcacgagctgcagcatgataatctgctgctgggtgtaaactatgaaacatgtccaacagacaggagtgtggaagtatttgcagaactttgtttcccaacctccattgcctccgcttctacctcgctaccatgatcattcctgagaagaaccgcaaggagatctgcaaatacctcttccaagagggagtttgctttgcgaagaaggacttcaatttggcgaagcaccctgagattgacgtgccgaatctgcaggtgattaagctgatgcagagtttcaagtctcgcgagtatgtgagggagacttttgcttggatgcactattactggttcctcaccaacgatggaatcgagtttctcagaacttaccttaaccttccttccgaaattgtccctgctactttgaagaagcaggccaagccacctggcaggccctttggcggcccatccggtgatcgccctaggggtccaccacgctttgaaggggagcgtaggtttggtggtgatcgtgatggataccgtggaggtccccgaggaggacctggtggtgactttggaggagacaagggaggagctcctgctgactacaggccctcttttgggggtgctggtggaaggcctggctttggtcgtggatctggtggttttggagcgccaaccagctcaaatcttccctaagtataatgctatctgctatattttttgtttagttttctaggaagacttgtttgtagttggaatcaatgataattttccatctcttatagatcgttttatcggcctgatctctactttatattcagtttttcgttcaatgaagattttgatttttgagtgtttgtactaatttgtggtttattcggtgctcagacatcttctatctagaacccatacataaaatacttgcag

SEQ ID NO: 1707 - DNA, 540 bp, Glycine max
ccaggtaacataatttttatcaacttagaaggataacacagacaagggaggatgccttacttgacagcttgattgatgacttcaaagggattggtcccagcatgcatgtaaaccatgtgaaggccttggtcagtctcaactgcattatcccctgcaaaaccaaaccacataccaaaaggaaaagggtcgtttcggttctttgggacgccaccctatatatatatttactccaaaggaccaaagctataaactccatttgtttgattcaatttcattgatagtcatggagaggtttatccagctcaattcaattccattaatgacagctccaccccataatttcaggtggtaagtaagaccttcaaagtccagctgaagggaaggaactgaattaacagcagacaaggcacttaattatgatataatggaagactttcatggagccttgacccccaaattccaaaccatttttcgcatggcccaagagttactccaccactctcgagagcaaatctctatctcgttcttgtcattgcccga

SEQ ID NO: 1708 - DNA, 993 bp, Glycine max
ttttcttcaagcacgccctggattttcttcccctacaccttcaccttcaccaccaccacctattgcctattttttcttttctcgaaaaccctaattcatacgtcgccgttttgtctttctctctctgagttctccacaggatcaggaaccgaagcgttgaaatggggtaatatgatgatgatggtgatgaatcgaatttccatttcctgatgtgaggaacaaagcaccaccaccaccttggctaggttcatgtagggtttgttgagaatcttatagtttttttttttctttatcaaattcttccgcttgatcaggaattggatttgtgagttagaacaggaaataagagagagacatttgattgtgaatggatttggaatttaaattgtgtgaatattttttaattgtttgttgagaagcattgaattggattttacttgaggagtagtatattatggagaacgtgtgtgatgttaatcacttggatgcggatgttcttttgccccctcggaagcgtcttcttgctgggttgaaaaaacagagttcagatggtgatgctgctgcatccccacctatggttgttgcttcttgtgttacaacagtttctgaggttgcttcctcttcctattccagtgagtttgaagccaggcttaagaatttgttgggttctcattctgataaccctaaccttacccctgaggaggttgtggaggcttcaaaagctgcagcagtggctgcatctaaagctgcaaaggctgcaagagctgcggccgaggagaaggccgagactgcagcataggcagttgcagctgccaagagggctttggatttggttgcctccttctctgaagaggcagtgagcagcatggagaggagcctgacgaagaacatgctcatgaagcacctcccagttcatctcttgtacaaaacataccagcccattgaaaattgtgggactgatgaagaattggccaggaagtacatcgcgccatg

SEQ ID NO: 1709 - DNA, 447 bp, Glycine max
acgggcgataagacgacaattgggggaggaaagcgcgatcctcgtgactcgcgacccctcgggtttaaatcccctgcgacgcagcacaggctactacttcaccatcgccggataaaatggtcgacgacggagcaacctcggcggcgacgagccggagaaagccgtcgtggagagaaagagaaaacaacaggagaagagaacggcggagaagagcaatagctgcgaaaatatactctggacttcgagctcaggggaacttcaacttgccaaagcactgcgacaacaacgaagttctgaaagctctctgcgcagaagctggttggtgcgtagaagaagacggaaccacttatcgcaagggttgcaagccgcctctagccaatggtgctgggagctccatgtagaaacattcccttttcttcttctcaaaatccaagtcctctgtcttcg

SEQ ID NO: 1710 - DNA, 493 bp, Glycine max
cgtcgagccgaatcggctcgagattcattcagcaacagcgatatgccgccaatgaagtttgtggtgaagaaggcatggagcagtggtggatgtggtcgggtaggagcactagagatgggaagctgcccgggacccatagagacacccgctcttctcctatctactcgtaaagggcttcctcactttatctcccctgacctactcacttctctcccttcccccgattcccatctccttcaaatttctccactccactttttggaaggacttgcttcaaccactatatcaaaattaggagggcttcaccaaatgcttggtttgcaccaatatggaatggcggctgtagccagggattccattcaatgccttcctgagtctaagggagctaccaaactcggagcctcttttgaaactccttgtggtcgtctgttgattaaacccaaagattatgttgaaatgatttcatgcatgaggcctaatatatgggccactt

SEQ ID NO: 1711 - DNA, 401 bp, Glycine max
gcagctagttcaattaaatttgcaaaacatggaatttgataatgaagaccattatgcaaaactacttcgagctcaaacccacatatttgatcaaactttcggattcataaactctatgtcccttaaatgtgcaattgatttgtgcatacctgatgtaatacacaagtatggccaacccatgccactctctcaactcattgcttcacttccaattcacccttctaaggcttgcttcattttccgcttgatgcaaattttgactcattccggtttcttctctcaacacaataatgccaccgaaaattatgagcaagaagaagtgagttatgtgctaactgatgcatctaaactactccttaaggaccatcactttagtatgatttccttgccacaagtcatac

SEQ ID NO: 1712 - DNA, 738 bp, Glycine max
gcctttaagccagcacgccaaagagaacttctttgcaaaacacgactgaggaccttgcaacaccggcgtctccctccttcctctcctctctctgcctttacctttgattgtaggtttttcattatttggcggcgaaacagggttgaatatttttgttttagcgtctgagctttgaattacagagcaaagtgaagcgtgaacatggtgatgcatctaaacgggacaccgtgcgctctcggattccacatgcctgcggagtgggaaacccacgcgcagtgctggatgggttggcctgaacgtgccgataactggcgtgacggcgccgttcacgcccaacgcgtgtttgcgagggtagcgtcagcaatctcaagattcgagtctgtaacagtttgtgttagttctgcacagtgggagaacgcgcggagtcagctaccggagcatatcagggtcgttgagatgaacatgaacgattcttggttccgtgatattggacctacttttgttgtgagaagaagcaccacgccggaatctggtgatgcagcgagcaggattgcagggattgactggaattttaatagttggggaggcttagaagatggatgttactgtgattggagtcttgatttgcttgtggctaagaagattttgggaattgagaagattcctagattttcacattcgatggtgcttgaaggtggaagcatccatgtggatggagaaggaacttgtcttaccaca

SEQ ID NO: 1713 - DNA, 739 bp, Glycine max
gcggtttggtttgaaatttaacaataacaaatacaacaaacagtgacatgtccttgtttgttgtatttgttattgtggtcaactggtcagcgtctgcaattggtttgaagctaagtatattcctgtatattacacttttcctagtgcatttcaaaatcttggtgcaactcagaatgcaatttccacagattgactttcgcatgattgcaacgtactgccagactattatttccatttcttaaacaaaagaaaagtaatttataatgctttcatgcaggtgctgaggttgctgttctttgcatcaccaaatctggggaggttctaaattatcaggcattcactgatgctaaggggatatacacagtggccgagacaatgccggagagtgatcgctgggatgcgtgtcttgcccgaccaatcagtagtttccacgagcaatgcactcaacttggtgaaggcagcattggggttaaattcagttacaatcatccatcaggacattcacacactgtcaggacctttgtttatcgacccaccagtgttccaacttactgcatttgatatatactattggcttgctctgaatctgagagtgtctatgcttgattgaactagtgcaaaactaatgagtatatgagcatattttatttatactatatgtatgtgtagtggtgttccggcatgtatttctatagagcttagtcaaagtaagcatgagacgtttaagtaactgtaaatg

SEQ ID NO: 1714 - DNA, 290 bp, Glycine max
caaaaacagagtgctctgagaaaggtagcggtttttttgttgttttttttcctcaatctcaaccatggaaaagcagaagacactgatgggtttgattctgttgctgctgttatttgcttcggatgtgagtgcttggaccggtgaaatccatggaagagttgtttgtgacgtttgtggggattcttctctcggacctgaagaccatgttctcgaaggtgctgaggttgctgttctttgcatcaccaagtctggggaagttctaaattatcaggcattcactgatgctaagg

SEQ ID NO: 1715 - DNA, 736 bp, Glycine max
gagccacgtacgcaactgaaaaggaaaaccctaagagatgaagagaactcctatcttgttccctctcttctttcttctttgtgccttcacctcatatctaccttcagccaccgctgatgatgatcatgtgtacgacactgacggcgataagcttcaatacggtgtcaattatttcgtgttgccagtgataagaggaaatggcggtggaatacaagtagcaaaagcaggaaacgaaacttgccctctgactgtggtgcaatctggcaacgagctctctgaggggttaccgataaagattgcatctcgatcagcaggagtcgctttcatcacccaaggccagcttttcaagagcattcagttcggtgtgtttccatccacactcagaccagggtgtcccccaagtccaattccttctaagtgggacccaccttccaagtggactatcgttgagggtctaccagaaagaggactcgctgttaagcttgttggttaccaaaatagagtgtctggttggttcagtattgtgaaagttgctgatgatgcttcttcttcttctgtgggctataagcttgtgttctgtctatggccagaagaagaggtgatgattcacttatgtaagaatgttgggattcgtaccgatggtaagggaatcaggcgcttggtgctgtctgagaacactcctttagtcgttcagtttcagaaatttcgatctgcactggccctgaataatcatgtg

SEQ ID NO: 1716 - DNA, 1273 bp, Glycine max
ctaaatttggagctgaggcttatcatttttacggtgtgggtgcttcctcggatttgaggggtgtggggaagaggtcctcagagtgggatttgaatgattggagatgggatggtgatctgttcatcgctagccggctgaatccggtgccggccgatggtgttggagtgggacagcaatttttccctattgggtccgggatcccggtggccggaggcccatccaacagttcttccacctctgaggaagtagatcctagggatcccaaggcgaacaaggaaggggacaagaaaaggagagttattgtgctggaggatgatgggttgaatgaggaaggggggtactcttagtttaaagcttggtggccatgcttctgcagtggtggatagggaagttgcaagctgggacggtacgaatgggaagaaaagtagagtgtcgggaagtacttcaaatcgagctgtttgtcaggtggaggactgcagtgctgatctgagcaaagctaaggattatcacaggcgacataaagtttgtgagatgcactccaaggccagtagggcgcttgtgggaaatgcaatgcagagattctgtcaacaatgcagtaggtttcacctgcttcaagagtttgatgaaggaaagagaagctgccgaagacgtttggcagggcataataaacgaagaaggaaaacaaatcatgaagctgttcctaatggaagttcattaaatgatgatcagacaagtagctatctgttgataagtttattgaagatactttcaaatatgcattctgacaggtcagatcagactacagatcaggatctactaactcatattctgaggagtcttgctagtcagaatggtgagcaagggagcaagaacatagctaaccttttgcgagaaccagagaatttgttgagagaagatggttcatcaaggaagtcagagatgatgtcaactttattctccaatggttctcaaggctctccatccaatataagacaacatgaaactgtatctatggctaaaatgcagcaacaagtgatgcatgcacatgatgctggggcttctgatcagcaaatcacatcttctataaagcccagcatgtcaaacagtcctccggcctactcagaagccagagacagaccgctggacagatcaagatgaataatttcgatttgaatgacatatatattgactcagatgatggtatggaagatttagaaagattgcccgtctctacaaatcttgtgactagctctcttgtactaccatgggcaca

SEQ ID NO: 1717 - DNA, 1430 bp, Glycine max
accgaaccgcaattccggggtacgcctacatttggaggaaggaaggtaaaggaagcaaacgcaagagcaagagcaagagcgaaagcggcagagaagatggaaggagaagagggttctcagcagccacagttggtgctcgcggacaagctattccttctccggcaacccgatgtgcaagacattgacaaggttcgctacaaagaggatgtcttcactcatgtcaaggaaaacgatatggtccctctgtacgaaaccctagtcgctgattccgtgttggacttggatcgtgcccttttggactctatgcgcgctaaaattgacgacgagctcaccaagctcgacgaaaagattgctgatgccgaggaaaacttaggagagagtgaagttcgtgaggctcatttggcaaaatccttgtttttcatccggattatggacaaggagaaagccttggaacatctcaagataacagaaaccaagacagttgcagttggccagaaaatggacttggtgttttatacattgcagcttggtttctttgacatggattttgatctcatttccaaaagcatagacaaagccaaaaacttgtttgaggaaggtggtgattgggaaaggaagaataggctgaaagtgtatgaaggcctgtactgcatgtccactcgaaatttcaagaaggctgccaagttatttttggattctatttcaaccttcaccacctatgaactttttccctatgacacctttatattttatactgttttgaccagcattatatcattggatagagtttccctaaagcaaaaggtagtagatgctccagagatcttgacagtgattggcaaaatcccatatctttcagagtttttgaactccttatatgattgccaatacaagtcttttttctcagcatttgctggcctgacggagcaaattaagttggaccgctatctgcatccacacttccgttattacatgagggaggtcagaacagttgtttattcccaatttttggaatcttacaagagtgtgacaattgaagccatggcaaaagcctttggagtgacagtagatttcattgatgtggagctatcacgttttattgcagcagggaagcttcattgtaagattgataaagttgcaggtgttcttgaaactaatcgccctgatgctaagaatgctctttaccaagcaactattaagcaaggggacttcctgctgaatcggatccagaaattgtcacgtgtgatagatctttaggtcatctcttgcattttagattaaaatttactggaaaggcagagataatgacaatttcaaatttgaaggacatccttttgaatacatttctgtagtccatttgatttccaaatatgaacggttgaacttgctgcatccaaatatgtcaatcagttttcaattatttctgtgac

SEQ ID NO: 1718 - DNA, 403 bp, Glycine max
agaatagctattttgttggaaggaggtaagggaggaggtaaaggaagccagaggagatggaagaagagggttctcagcagccacagttggtgcttgccgagaagctattccttctccgacaacccgttcaagacattgacaaggttcgctacaaggaggatgttttcactcacatcaaggaaaacgagatggtccctttgtacgagaccctagtcgccgattccgtgttggacttggatcgtgcccttttggacttcatgcgcgctaaaattgaagacgagctcgccaacctcgacgaaaagattgctgatgctgaagaaaacttaggagagagtgaagctcgtgaggctcacttggcaaaatccttgtttttcatccggattatggacaaagagaaagcctt

SEQ ID NO: 1719 - DNA, 512 bp, Glycine max
aaaagaaacttaattttataataaataaagctcaaatactacattgaaaaaaccagaaatagtacttccaaaaatcagaaaacgaattccagattgaaagtcaatttgtcaccaaaattttaaccagcatactccatatgcaattctccgaacaaattctcaaagctaacaaaagtgaaactaagactctgagacaggatactcaaacacaacatcttttccagataacttcctgtatactgcagcaaaagtctccaacttgtactcagtgttgtttcgctactttgggtccaagtaaaccttcataatcttggatccatcaattcggaacctcacacgcttcccaacaatctcagcaggcaatacaacatcctccagcattgcttcatgaacagcagtaagagtgcgactacgaggacgctgagcagcagaacccttctttggtggcctcaaaatccttcgggtggcaaccaagattacatccttgccactaaactttttctcaagctccc

SEQ ID NO: 1720 - DNA, 607 bp, Glycine max
agctggagctgatgtacaaagtacagatgcaatgctatgaggatgctaaactgatgaagctgttccctgagattattagatctctttatgaccaggatgtgctggctgaagataccattcttcattggttccgaaaaggaacaaactccaagggcaggcaaacctttgtgaaggcgctggaaccctttgttaattggctggaggaggctgaagaggaggagtaagtgtggtggaggttcagggctgaagaaattaccttgtctttcagctcttgtaccatttaggtaagatatttggctcgaattctcttaaaatcgggtttcgcctagtagtcctgattatcttttaatttgtatttgtggtgtgtttgattcctcctcctcctccatcgtgctctcgggacatattcatggagcctgtgtgtttttccgcacgccactttgatatgttatacgggtgcattactgtattttgagtgattatttcaataatgggtggtactcttatccctgttgaaactttgagttcagtgcttgactaattctattggtggtactcttatccttgttttacactttttatatctattttgtttttattttaaaaa

SEQ ID NO: 1721 - DNA, 1753 bp, Glycine max
cccacgcgtccgcccacgcgtccgccctacgcgtccggtcctcttttctcggctccctttttctctctgtctctctctctctctctctcgctcttcttctcatccagcaccgagtcacagcactcattcgatcttccgattccctttcgtcttggtttatgagctcgaaggagagacccactctgtggtggcacgccggattaagacgcgcaaacggaatattgactgcgccgcgggacgtctgcagcattctcggatgcagaggtccacatttattttggataatgctgcttatctggaactaattgctaagagcattgaatctttaagaccttaacttttcaagatacggcgatacgttgttttgatgttgatttcactgggggtcgtacacaacctggaactaccaaggctaatgagggggaccgccacccatactctataatagagtgtgagacctaagcgtgaagtcattttaccatctgtaatctacatacaaaagattttgcggcgaaggccatttctcatcaagtcccttgaaaatgttatgcggaaattccttcagtccttggtacttcacgaggaaaatgagaggaaaaagttggcaatcttcacagcacttgctttctctcagaagctgtctggtctcccaccagaaactgtgttccaaccacttcttaaagataaccttgtggccaaagggctagttctgtcatttatgactgacttctttaaggagtatctgattgacaacagtcttgatgatcttatttcaattctaaaacggggtaaagtagaggagaatcttttgggcctttttcccccttccaaaaggtcttattgaacctttttttggccttttaaccaaggaaggactgttggccttggtggagattaatgaaaggaaaaattttggggggaacctaaaggaaatgaaagtcttcgttaacagcactgataacattagaagctgatacatctgaagtcattgagactgtgaagctgcgagttagagatgctaaattgccggacattgaggtaggtgcggatcttgtggggatgttttaatggatgctgttcaagtggtctggaaaaaatcagcaacagaatgcaaatgcagcccttcgtcaggtaaaaacttgggcagaattgttgaatacattctgcaccactgggaaaacttgagctggagctgatgtacaaagtacagatgcaatgctatgaagatgctaaactgatgaagctgttccctgagattgttagatctctgtatgaccaggatgtgctggctgaagataccattcttcattggttccgaaaaggaacaaactccaagggcaggcaaacctttgtgaaggcgctcgaaccctttgttaattggctggatgaggctgaagaggaggagtaagtctggtggaggttcatggctagggctgaagaaattatcttgtcttgcagcccttgtaccattagctaagatattggctttgaagtctataagttcagttctgcctagtactaattatctatttaatttgagtttgtgtttgactccttcatcttgctctcgggacatatcacggtgcctgtgttttccgcacgccacattgatatgttatacgagtgcattattgtattttgagtgattatttcaataatgagtgtactcctttccctgttgacttgttatcgtttttccccaaaattttaacgcagcgattggacgttgaaactgagttcactgcttttggct

SEQ ID NO: 1722 - DNA, 1084 bp, Glycine max
cccacgcgtccgggccaaagggctagttctgtcatttatgactgacttctttaaggagtatctgattgacaacagccttgatgatcttatttcaattctaaaacggggaaaagtagaggaggatcttttggacattttcccccctacaaaaagatccattgaagctttctctgagcatttcaccttcaacaagttcaacccagtccaaccaaacattatgtctccaaaatagatgcttagtatttcatctctctgggagtgttacaatctcaccaaagttggcagcaacgtgcgtgcccacctcggggatctctcggtcgtgccctttacggctgccccaatccacattttgggacagcggaaaccgggaacggtagcccagctgggctacatccctttaaattccacaattttcgcacccaacaaatcaaactcagctgacgggctttgccttcttcttggcacccgtcgggtctcagccccaatccgactgatggatttcttggtcttttcaacagtcccttaaaggacaagtctctccacaccgtggagattgagttcgatactttctcgaacaaaaaatgggatcctgcataccgacacatcggtcttcacgggaactcgatcaagtccgtcaaaacggcatcgtgggtggttgtgcaatggacaagtgacacgtgattatcgatacctataatgccgtcacgagcctattggctgcttctctgatccacccttcaaaagaaaacaagttacatcctctctgacacagtgaacttgaagagtaatcttcccgaatgggtgagcgttgggttctctgccaccaccgggttgcatgaatgctgacgttgaaacccatgatgtgaatacttggtcttttgcttccaagttgtcagatggtagcagcaatgatgctttggatcttccaagctttgtgctcaataaggcccttttacctccaaacatcgtagttaaatgtgacaaaagaaaaatgtaataacgccctagcttgctagaggctggtgctactaataatgtttgtcccaaaaattatataataataggtgttttactccgtctaaaa

SEQ ID NO: 1723 - DNA, 596 bp, Glycine max
cttaaaaatccggattcataggatgttaaaatcttaaaaatccggattcatagaatgttacaagaaaatatatcaaattctacattgataaaccaggacacagtattttctataagtaccacccctaaagaaaatccagaattaaagccaacttaacaaaaccagcatccaccatatataattcagaaacaaatgcaaagctaacaaatagaacctaagcctcggtggtaggatactcaaacacaatatctttgcccgaaagtttcctgtatactgcagcaaaagtctccaatttgtactcggtgttgtttcgctccttggggtccaaaaagaccttcataatcttggaaccatcaattttatacctaacacgctttccaacaatctcagcaggcgggcttgccttcttcttggcacccgtcgggtctcagccccaatccgacgatggatttcttggtcttttcaacagtcccttaaaggacaagtctctccaaaccgtggcgattgagttcgatactttctcgaacaaataatgcgatcctgcaaaccgacacatcggcattgacgtgaactcgatcaagtacgtcataactgca

SEQ ID NO: 1724 - DNA, 787 bp, Glycine max
ctcgagccgttcctttcctgttcatacttgtttcttcaatttcatttcttttattacttttcctctttgcattccaaatggccactgttgaggttgcacaacaaacaccaacaactgtgacagaaaatgaagcaaccgaggtaaccaagattgaggaaactaccccagaacaaccagctacccaggttactaccaccgaagaaccaaaggaagaaaccaccaaagaagcaaaagaggaagaagaagccccagttgagactaatgaggcaacagaagtgacagaggaagtgaagcctgaggtagaagagaacccagcacctgagagaacagaagaagaagaagtgaaagaggaaactaaagaaaccgaatcagcaccagtggaggaacagaagcaagaggagaacaaaccagctgaaaccgttgaggaaaccaaaacagaacaagtttctgttgagaagactgaagcttaagcccatggatacggtattattgaagtagatgaagtttcttgcatttttattttatttattattaatgttattattgtaatggtaagtctttgggtatggctttccgatatatatatatatatatatatatatatatatatatatatataagccctgctgatttggctccatgtcagcatgcatgcatgccaagcggaggatacgagaattctatgggttatgttatgtatgtattgaggatgatggttccaggagggttcaaattactatggtcatttgcctgttcctcttggtttgaataaattatatttacttcc

SEQ ID NO: 1725 - DNA, 640 bp, Glycine max
cacagtctctaagaagatattagtgttgaagactctacaactatatatttaaacctctcttacttggatcaactcacaaccactctcttttattcttagctttcctttccagttcatacttcatcctattattactttccctctttgcattccaaatggccactgttgaggttgcacagcaaacaccaacaactgtgacagagaatgaaacaacgactgaggtaaccaagattgaggaaactaccccagaacagccagccaccgaggttactgccccagaaacagtcaacgaagaagcaaaagaggaagcagcagttgagactaatgaggcaacagaagttacagaggaagggaaggctgagaaaacagaagaagaagaagaagtgaaagaggagactaaagaaaccgaatcagcaccagtggaggaagagaagcaggaggagaacaaaccagctgaaaccgtagaggaacccaaaacagaacaagtttctgtcgagaagactgaagtttaagcccattgatatatgttgttgtgagtgggaaaaaagaggttcttgcatttatattttatatattattaatgttgttattgtaatggtaagtctttgggtatggctttacgatttatgaaggatatata

SEQ ID NO: 1726 - DNA, 1491 bp, Glycine max
taggagaaaaaaaaaaacattttcatcatcttcttcttctttttcatcaatcatcaccagtggttcttttccttctgagaagatcgaattgtgttttgcaaaaatgggagttccagagaaagaccctctttcccaattgagtttgcctcctggttttcggttttaccccaccgacgaggagcttctcgttcagtatctgtgccgcaaggtcgctggccaccatttctctcttccaatcattgccgaaattgacttgtacaagttcgacccatgggttcttccaagtaaagcgattttcggtgaaaaagagtggtactttttcagccccagagacaggaaatacccgaacgggtctcgacccaacagagtagctgggtcgggttattggaaagccaccggaaccgacaagatcatcaccaccgaaggtagaaaagttggcataaaaaaagccctcgttttctacgttggcaaagcccccaaaggcaccaaaaccaattggatcatgcacgagtatcgcctcctcgactcttcccgaaagaacactggcaccaagcttgatgattgggttctgtgtcgtatctacaagaagaactcgagtgcacagaaggcggtgcaaaacggcgtggttccgagcaacgagcacactcaatacagcaacggttcctcttcctcttcttcgtcccagctcgacgacgttctggaatcgctgccagcgattgatgaacggtgtttcccgatgccacgtgtcaacacgctgcagcaacagcagcaccacgaggagaaggtcaatgttcagaacttgggtgcaggggggttactggattggaccaacccttcggttctgaattcggtcgccgatttcgcttcggggaataataaaaccaccggtacgggaccagactcaggggatggtgaactacaactgcaatgacctttatgtccctacgttatgccacttggactcatcggttccgttaaagatggaggaagaggtgcaaagcggcgtgagaaaccaacgggtcgggaataataattcgtggtttcttcagaatgatttcacacaggggtttcagaattcggttgacacgtgtgggtttaaatacccggttcagccggtcgggttcgggttcagaaattgaaccggctgatggattaataatagtaatgtttaaatcgggtttatttggtgtaaataggtggggattctttgggcttaactcgtgggggttttagattcctttttagaaaagggaagaagaaggtgcaaattttggtcctcattttcggctaaagatggagggtatactacaaacgttcaatgaatcaatccacgagataaagcaatgatggaaccatttaatttgttaggacgtagttttcggccatacaagcccttacttagccacatgaatcacatttgtacttaaaatgaagaactagaaaattgtttgctacacgctaggtttcgttaattaattaattccaatctgg

SEQ ID NO: 1727 - DNA, 1041 bp, Glycine max
agaaaagctacaagagaagaaaaaaaaaaagagagaaaagaaaaaatttgttttataactttttaacttattgttcacttcttcttcttcttcttcttcaatatcttggttctttgatattattctattgagcaaaaaatgggagttccagagagagaccctcttgcacaattgagtttgcctcctgggtttaggttttaccccacagatgaggagcttttggttcagtacctttgccgcaaggttgctggccatcatttctctcttccaatcattgctgaagttgatttgtacaagtttgatccatgggttcttccaggtaaggcagtgtttggagagaaggagtggtacttttttagcccaagagacaggaagtacccgaatggttcacgaccaaacagagtcgcgggttctgggtattggaaagcaactggaacagacaagatcatcaccactgaaggtagaaaagttggcataaaaaaagcacttgttttctacattggcaaagcacccaaaggctccaaaaccaattggatcatgcacgagtatcgccttctcgattcttcccgcaaacacaacctcggaaccgcaaagcttgatgattgggttctatgtcgtatctataagaagaactcaagttcacaaaaggttgaggctaattttttggctatggaatgcagcaatgggtcatcaccttcttcatcgtcccacgtggatgacatgctgggatcgttgccggagataaatgaccggtgcttcaccctgccacgagtgaactcactcagaacaatgcaccagcaggatgagaaattcgggtctccgaacatgggatccgggtttttctcggattgggttaactcgaccgatctcgattcgatttccgaattcgagtcgggttgccaaacccaaagaatggtgaattatgattgccatgacttttttgttccttctctgccgcccttgggccatgtggactacatggtggatgcacctttggaggaggaggttcaaagtggtgtgagaacccgacgggtcgacggg

SEQ ID NO: 1728 - DNA, 1267 bp, Glycine max
ggctcgagcgactcgagcacacacaaacccgtccctcacactctccaaaccctagcggcactacacactagttctatcgctatctccccaagatgtcgagcgccgatcccgagcacagagaagaggaggaggcacccgccgttggcgacgacgaggacaccggagctcacgtcgctccaatcgtcaagctcgaggaggttgctgtcaccaccggcgaggaggacgaagatgcaatcctggatctcaaatcgaagctttaccggttcgacaaggacgggaaccagtggaaggagcgtggcgccggcactgtgaagttcctgaagcataaggcttccggcaaggttaggcttctcatgaggcaatccaagacgctcaagatctgcgctaatcatctcattttgcctacgatgagtgtgcaagagcacgctgggaacgagaaatcctgcgtttggcatgctagggattttgctgatggtgaactcaaggacgagctcttctgcatccgttttccttctattgaaaattgcaaaagcttcatggaaacattccaagaagttgctgaaacacaaaaggcagaggatgagaaggaatcatctgatgcagctggtcttattgagaaattaagtgttgaagagaaggctgatgcagagaagaaagatgaagagaagtctgaggacaaaactgtggagaaagaatctgcatcaggaaaggaaagcaaggcagttgaagagcctgcgtcctcagcttgagtatttcttattcatattctatacttggctatctgacaaggttaggtggttgatgtttttgccgcccatatcttgggatattctcatacttaatagttgccggattgtgtcactgaattgagctgtttgtgtcctcttgagtttatttcagctggcaaagttagggttgggtttgaattttgaggcatgactggttgagctttcggggtctgggagtctgttattattgttatttttcattctacatatgtatttgttgcgagtaatgggtcatgttgggtgggaggggtgcagtccagaaatagtcaagaactttaagacgaacgttttggtaccgacttgtttgagtttcaaaaaaaaaagaatggtactttttcaaccccaaaaaacaagaaatacccgaacgggtctcgacccaacagaataactgggtcgggttattggaaagccaccggaaccgacaagaacattaccacctaaggtttaaaagtttgcataaaaaaagcccttcgtttcta

SEQ ID NO: 1729 - DNA, 1161 bp, Glycine max
tagggttccaagaggcgacagaaggggaagccttcaaatattttcctttttagctttgattagtgtggcctagttgttgttttctcgatgagaaaggcttcttccactatgcattgcgcacttctgcgcttttgggttcccttgttgctgcttgctagcttcagctatgctccttctgtttcggccacaactgaaatttcagggaatgaagtgaacacagatgggaaggtgataaatgaagagttagcaaaaccaagtctaaaaggacatgatgaagaagcaaagttcaaaggattttttccaaaaccaattcctatagttaaaccaattccaaagccaattcctattattaaacctattccaattccagtttataagcctattccaaaaccaattcctattgttaagcctattccaaagtcaattccagttgctaagccaattcctaatgaagaagaaaaattcaaaggatttattccaaagccaattcctataattaagcctattccaaagataattcctattgttaaacctattccaaagataattcctattgttaaacctattcctattccagtttataagcctaaaccaaaactaattcctgttgttaagccaattcctgttattaagcctgttccaaagataattcccgttgttaaaccaattccaattattaaacctgtgccaaaaccaattcccattattaagcctatcccaaaaccatttatagtgaaaaagcccatcccgactgttgagtcggaggaatttctaaaaccaaagcctttcttcaaaaagcctattattcctaagctaccacttcaccccaaattcaagaaaccacttctaccaccattgccaattcacaagccaattccaactccataagagtataatactctatctcaaactataaagttatcggttccatttctaaatgcctttataagtacagctacatcgtatctcaaaataaacttcgtactcctctcgtgtactgtaatggaaaataagtagttcatgctctctgttcaatgaagttctcggtgtgatcgtttgtagatcgattatattaatgtaatagatggtaccagttattccttttcaaaaaaaaaaaaaaaagggcggccgccgtatctcgtcgacccgggcatgggaatt

SEQ ID NO: 1730 - DNA, 859 bp, Glycine max
cttgaccatgatgatactgaaaagcagatgctgagaaagttaagtaaacaacttagtggtgaggaccagatatagatcctattgcccagcacagtgtgttcaaagaaaacaaaaacatttccctgctacttcatcttcttcttcttcttcttcatcaccggtggttctgttcattcttccttgcaccttcttctttgaagatcgaaattgtgtttttgaaaaaatgggagttccagagaaagaccctctttcccaattgagtttgcctcctggttttcggttttaccccaccgacgaggagctcctcgttcagtatctatgccgcaaggtcgctggccaccatttctctcttccaatcattgctgaaattgatttgtacaagttcgacccatgggttcttccaagtaaggcgattttcggtgagaaagagtggtactttttcagccctagagacaggaaataccctaacgggtcccgacccaacagagtagccgggtcgggttattggaaagccaccggaaccgacaagatcatcaccaccgaaggtagaaatgttggcataaaaaaagccttcgttttctacggtggcaaagcccccaaaggcaccaaaaccaattggatcatgcacgagtatcgcctactcaactgttcccgaaagaacactggcaccaaggtatacagctacacatacacacatgcacatactctgttgcttaatggtcttacaccttcaattaattagaatgtctaattgcagcatgatgattgggtctctgtgtgcgtatatacatgaagaactcgagtgcacagaagacggcgcataacggcgtggttccgagcaacgagcacactcaataca

SEQ ID NO: 1731 - DNA, 650 bp, Glycine max
gtcttattgagaaattaagtgttgaagaaaaggctgatgcagagaagaaggatgaagagaagtctgaggacaaaactgtggagaaagaatctgcatcagggaaggaaagcaaggcggttgaagataagaaagccgaagagcctgcatcctcagcttgagtgtttcttattcatattctatacttggcaatctgacaacgttaggtggttgatgtttttgccgcccatatcttgggatattctcatacttaatagttgccggatagcgtcactgaattgagctgttagagtacgctagagtttatttcagctggcaaagttacgagagaatacgaatctttgaggcatgactggttgatctggctgtgtctgggaccccaccatcattgatatttttcattctacatatgtatttaatgccagtaacgactaatgttgtctggcaagcactgcccaaattgacttgaactataaacaaccatgtgggttcccaattgaagcaatttcaagtgaaaaagagtggtactttttcagccccagagacaggaaatacccgaacgggtctcgacccaacagagtagctgggtcgggttattggaaagccaccggaaccgacaagatcatcaccaccgaaagtagaaaagttggcat

SEQ ID NO: 1732 - DNA, 416 bp, Glycine max
cccacaactacggaaaaaaaaaaagagaagaaaaaaaaacttggttttatcttctttgttattattatattcacttcttcaatatcttggttctttgatattattattcgattgagcaaaaaatgggagttccagagagagaccctcttgcacaattgagcttgcctcctggatttagattttatcccactgatgaggagcttttggttcagtacctttgccgcaaggttgctggccatcatttctctcttccaatcattgctgaagttgatttgtacaagtttgatccatgggttcttccaggtaaggcagcgtttggagagaaggagtggtacttcttcagtccaagagacaggaagtacccgaatggttcacgaccaaacagagttgcggtttctgggtattggaaagccact

SEQ ID NO: 1733 - DNA, 537 bp, Glycine max
  unsure (1)..(537): unsure at all n locations
gagaaattaagtgttgaagaaaaggttgatgcagagaagaaggatgaagagaagtctgaggacaaaactgtggagaaagaatctgcatcagggaaggaaagcaaggcggttgaagataagaaagccgaagagcctgcatcctcagcttgagtgtttcttattcatattctatacttggctatctgacaaggttaggtggttgatgtttttgccgcccatatcttgggatattctcatacttaatagttgccggattgtgtcactgaattgagctgtttgtgtcctcttgagtttatttcagctggcaaagttagggttgggtttgaattttgaggcatgactggttgagctttcggggtctgggagtttgttattattgttatttttcattctacatatgtatttgttgcgagtaatgggtcatgttgggttggagggtgcagtccagaaagtcaaaaattataaacgaaggttttggtaccgacttgtttgagtttcacgattattttttcctcaggacccnnnnnnnnnnnnnnn

SEQ ID NO: 1734 - DNA, 942 bp, Glycine max
gttttgtttcgtatctacaagaagaactcgagtgcgcagaaggcggtgcaaaacggcgtcgttccgagcaacgagcacactcaatacagcaacggttcctcttcctcttcttcgtcacaactcgacgacgttctggaatcgctgccagcgattgatgaacggtgtttcccgatgccacgtgtcaacacgctgcagcaacagcagcacgaggagaaggtcaatgttcagaacttgggtgaaggggggttactggattggaccaacccttcggttctgaattcggtcgttgatttcgtatcggggaataataatcataatcaattggtgcaggaccagacgcaaggcatggtgaactacaacgcgtgcaatgacctctatgtccctacgttatgccatgtgggcacgtcagttccgcaaaagatggaggaagaggtgcaaagcggcgtgagaaaccaacgggtccagaacaattcctggtttcttcagaatgatttcacacaggggtttcagaattcggttgacacgtctgggtttaagtacccggttcaaccggtggggttcgggttcacgaattgaaccctgttatcgattaataatagtagttatcttttaaatccggtaaataggtgggggattctttgggcttaactcgtgggggttttagattaatcctttagaaaagggaagaagaagaagaagaagaaggtgaaaattttggtcctcattttcagctaaagatgtagggtatacaaacgttcaatgaaccaatccacgagataaagcaatgacggggaccattttaatttgttacgacgtagttttcggcccacacaagcccttactcagccacatgaatcacatttgtacttcaaatgaacagcaagaattttttttactatatgaaaaaaaaaaaagggcggccgctcgcgatcttagaactag

SEQ ID NO: 1735 - DNA, 964 bp, Glycine max
gagaagacaacagaaggggaggcctgcaaatattttcctttttagctttgattagagtggcctagttgttgtttttctcaatgagaagggcttccactatgcattgcgcactttggcgcttctgggttcccttgttgctacttgctagcttcagttatgctccttttgttttggccacaactgaaatttcagggaatgaagtgagcactgatgggaaggttgtaaatgaagagttagcaaaacctaatctaaaaggacaagatgaagaagaaaaattcaaaggatttttccaaaaccaattccaattgttaaacctattccaaagccattcccatcattaaacctattccaaagataattcctttggttaaacctattcctattccagtttataagcctatatcaaaatcaattcccattgttaagcctattccgaagccatttctgattgttaaaccaattcctaatgacgaagaaaaattcaaaggtgtttttccataacctattcccatagttaagccaattccaaagccaattcccattgttaagcctatccctattcctatatataagcctataccaaaatcagttcccattgtgaaaccaattcctattattaaaccaatactaaagccaaatcccattgttaagccaattccaaagctgattcccattgttaagcctataccaaacccattaagagtgaaaaagtctatccctgcttttgggtcagaggaatttttaaaaccaaaacctttctttgaaaagcctattcctaaactaccacttgatcctaaattcaagaaacctcttctaccaccattgccaattcacaagccaattccaaccccataaaatgataacactctacgccatatagctataaggatattccttccgtttctaatgcctttatatatataaatgcaccgcattaatttcaacctgaatcatgatttcgata

SEQ ID NO: 1736 - DNA, 456 bp, Glycine max
  unsure (1)..(456): unsure at all n locations
ctagcacatacacacagttgttaaagattataagatagtgatgaagaggaagttcatttcggtggttgttttgggagtatgtttggtgctgggaatatcccaatatgttgatgcaagaaacgcggccgcatttacaaaggaattggatttggaggggttggaggtggtgtaggtgctattggtggtgttggtggtgtcattggtggtttcaagcatgttgaagccaacaagccttgaaaaatcaattgagttaattacgtacgtacgttcaataattccagatttgtgatgataattactaagattagtgtttcattttcacagttatggtttgctattgntaatttgctttctttctaatgtcgttttgtaccccacaaatttaaataagttcaagtatgtactaaatgcattcttcattttgcgttcatttgattgaaaagatatattccaaaa

SEQ ID NO: 1737 - DNA, 481 bp, Glycine max
gattctacattctctagagcacacacaaaccctcccctcacactctccaaaccctagcggcactacacacgttatctctctctctctctctctctctccctctctccttccccaagatgtcgagcgccgatcccgagcaccgagaagaggaggaggcacccgccgtcggcgacgacgaggacaccggagcacacgtcgctcccatcgtcaagctcgaggaggttgctgtcaccaccggcgaggaggacgaagatgcaatcctagatctcaaatcgaagctttaccggttcgacaaggatgggaaccagtggaaggagcgaggcgcgggcaccgtgaagttcctgaagcataaggctacgggcaaggttaggcttctcatgaggcaatccaagacgctcaagatctgcgccaatcatctcattttgcctactatgagtgtgcaagagcacgctgggaacgagaaatcttgcgtttggcacgc

SEQ ID NO: 1738 - DNA, 452 bp, Glycine max
tggggagggagaaagtcctagtgaggtgtgtatacaattactatagccacatatatacacacagtagtagttaaagtcttaaagattagaataagatcagtgatggagagaaagttcatttcagtagttgttttgggagtatgtttggtgctgggaatgtcccaatatgttgatgcaaggaacttggagaaaaaatcaaaggaagaggtgaagaagccagaatcgtgcttagatggagggtccattggtggtgttgggggcattggcggcattggcggtgctggtggaggtggtggtggtttaggaggtggctatggaggaggagctggtggtgatagtggtttaggtggtggatatggaggaggagcatggggttgttgattttgaagtcttttaagttgtattagttttttttggtgttatagattttgtattttttttttttatttttt

SEQ ID NO: 1739 - DNA, 394 bp, Glycine max
cccacgcgtccgctgcttgccagcttcagttttgctccttctgttttggccaaagcgtgaaatggcagggaatgaagtgaacacacatgggaaggttgtaagtaaagattataagatagtgatgaagaggaagttcatttcggtggttgttttgggagtatgtttggtgctgggaatatcccaatatgttgatgcaagaaacttggaggaaaaatcaaaggaagaggtcaagaagccagaaaattgcttagatggagggtccattggtggtgttggaggaattggagatgtgggtggaggtggtggtcggttagattggacataccttagccaccatcatagggtcgcttgcccgatgccactaatgggtcttaccatttgagatatgtgtttg

SEQ ID NO: 1740 - DNA, 463 bp, Glycine max
  unsure (1)..(463): unsure at all n locations
cccacgcgtccggtggtggtggtttaggaggtggctatggaggaggagctggaggtgatagtggtttatgtggtggatatggaggaggagctggtaagtggtcgaggtggtggtctatggaggtggtagtggtctaggtggtggaattgggggaggcatttacaaaggaattggtattggtggaggcatttacaaaggaattggaattggaggaggcatttacaaaggcattggattggtggtggtgtaggtgctataggtggtgttggtggtgtcattggtggtttcaagcatgttgaagccaaaaagccgtgaaaaatcaatcaactaaggagttaattacgtacgttcaataattccagatttgtgatgatcccagtaatcattagtgtttcatttttacagttatggtttgnctatgttaaatttgtttcctttttctagctaatatgttctgtaccac

SEQ ID NO: 1741 - DNA, 250 bp, Glycine max
tccaaaaccatttcccatcattaagcctattccaaagataattcctattgctaaacctattcctattccgatttataagcctatatcaaaatcaattcccattattaagcctgttccaaagataatccccattattaaaccaattccaattattaaacctgtaccaaaaccaattcccattattaagcctgtcccaaaactaccacttcaccctaaattcaagaaaccaattctaccaccattgccaatt

SEQ ID NO: 1742 - DNA, 779 bp, Glycine max
gaaccccacttccctcaccgctccgaattagggttttccaattcgctccaattcacagagcaacacaacgaaccaacaatggcgcagccgcagccgcagtcgcagccgcagcacgggcaagcagcgctggagcaggtgcagtgcttcggtcgcaagaagaccgccgtggccgtgacctactgcaagcgcgggcgcggtctcatcaagatcaacggctgccccattgagctcgtggagccggagatcctccgcttcaaggccttcgagcctatcctcctgttgggtaagagccgcttcgccggcgtcgacatgcgcatccgcgtcaagggtggcggccacacctcccagatctacgccatccgccagagcatcgccaaggcgctcgtcgcgttctaccagaagtacgttgatgaacagagtaagaaggagatcaaggacattctggtgaggtacgatcgcaccttgctcgtcgcggatcccaggcgctgcgagcccaagaagtttggtgggcgtggcgcacgtgcgaggttccagaagtcttaccgttgaagaagaatggtggtggtgttttcgttgtttttggcttttggtttcggttcatgttttatgctgtggaaaaaatgaatactttcgttgctggtggtttttggtagttttataattttgatcgctttttttataatggttggatttgatgttgttttaattcaactttttttgtttaggtacaatgaaggtatgaagttattatcattaaaaaaaaaaaaaaaaaaaactca

SEQ ID NO: 1743 - DNA, 752 bp, Glycine max
cgaaagggaatcgggttaaaattcctgaaccgggacgtggcggctgaggcatccatcggcagttagagacagagagagagagaaacaaaaccctaattggtgagtggcgaaaatggcgcagcgggcggcggcagcagcagcaacaggagcagcagtaatcgagcaagtgcagtgcttcgggcggaagaagacagcggtggcagtgacctactgcaagcgtggtcgaggcctcatcaagatcaatggctgcccgatcgagctggtggagccggagatcctccgtttcaaggccttcgagccaatcctcctcctcggccgccaccgcttcgccggcgtggacatgcgcatcagagtcaagggcggcggtcacacctcccagatctacgccatcaggcagagcatagccaaggccctcgttgcttactaccagaagtacgtagacgagcagtccaagaaggagatcaaggacatcctcgtcaggtacgaccgcaccctcctcgtcgccgatccccgccgctgcgagcccaagaagttcggtggtcgcggtgctcgcgccaggtttcagaagtcctaccgttgatttcctcctttttttttaagctattcatcataagttgttaaagtactttctctgttttattggttctgcgctgagttaagaccaatcgaattctgaatacagttatacaatggttaacgttaagttatgtcgttattaaatataattgcttgaatgctgcttttatcttgtt

SEQ ID NO: 1744 - DNA, 475 bp, Glycine max
ctcgagccgtgagagacgaaaccctaggttttagtgagtggcgaaaatggcggtgattttttcaagtgcaataccaggaggggcagcaccagcagcaatcgagcaagtgcagtgcttcgggcggaagaagacggcggtggcagtgacctactgcaagcgcggccgaggcctcattaagatcaacggctgcccgatcgagctggtggagccggagatcctccgcttcaaggccttcgagccaatcctcctcctcggtcgccaccgcttcgccggcgtggacatgcgcatccgcgtgaagggcggcggtcacacctcccagatatacgccatcaggcagagcatagccaaggctctcgtcgcttactaccagaagtacgtcgacgagcagtccaagaaggagatcaaggacattctcgtcaggtacgaccgcaccctcctcgttgtcgatccccgtcgctgtgagatcaaaaagttt

SEQ ID NO: 1745 - DNA, 957 bp, Glycine max
ggagggagagagcacgaacaacaacaacaaggtttacaatttataaatgcgcttctaaatactgtggcctctctctctaggattcccccatacctactttcagctcctaagagcacgcatcactgttgcacttcttactcgttctccctcttttttttcttcttcttcttcttcgctaaaccccccctttatttttcctatctcactaacatcgatgggagacgagaataagaccaagtcccctgcttccggcgtgtggtccaccatcaagcctttcgtcaatggcggagctccggcatgctcgccacctgcgtcattcaacccatcgatatgatcaaggtgaggattcaacttgggcaaggatcagctgcgcaggtcacttccaccatgcttaagaatgagggtgttgctgccttctataagggtctatctgctggattactcaggcaggctacatacaccactgcccgtcttggatcatttaaaatcttgacggccaaagctattgaggctaatgatgggaagcccctgccactgtatcagaaagctctgtgtgggctgactgctggtgctatcggagcaactgttggtagtccagcagatttggcactcattcggatgcaggctgatgcaacattacctgctgctcagcgccgaaattacactaatgccttccatgcactctatcgaattactgctgatgaaggggttttggcgctttggaaaggtgctgggcctactgttgttagagccatggcattgaacatgggcatgcttgcatcttatgatcaaagtgttgagttcttcagggattctgttggtcttggtgaagctgctactgttctaggtgcaagttccgtttctggatttttcgcagcagcttgcagtttgccatttgactatgtgaagacccagatccagaagatgcaacctgatgctgatggaaaatatccatac

SEQ ID NO: 1746 - DNA, 657 bp, Glycine max
cagcgagtgagcgagcgagcgaggtagggttctcgttgttcccccgtctttgaattcagttcgcgacgatggggtccatccccgatccaggcgagttgagcgagttgactcagccgagcttcgacgagttccagcacgagttccagcgccaaacttccctatcttggtttacttcaaggagtcacaaacgaagcctgagggacaaattcatttctttcccataatatttaatgggaagcagctttatgatgttatggtggaaagagctggcccttcaaaaactagtggaccaaaagaatcctgaggactgagatgtgtggttagagcctcagttggggtaactcggaaaccattgaagtccactgccggtaaagaggcttcttaagttgggattgatatttgtttgcgtatgagaagagcatgaaaatttcctgtttctcttccacatattgatctctcagtttcaagtagccagcaagttcaaattaaacaaacaacttaattatttgaagtcttgttagcatataacacaagtatagttcgtcttattcctttcgagattgaccagtgattgattttacttcattttggaagatgtataatatcacagtacccatatattaaacttatattaattccacagatgatgtagttctc

SEQ ID NO: 1747 - DNA, 633 bp, Glycine max
gaacaacaacatatgcgagctttacaatatataagtgcgcttctaacttctaaatagtgtgtgtggtctctctctatactataggtctcgcccaatacctactctccgctcccaagagcacgcaccaccactattgcacttcttcctcgttctccctctttttcttcttcttcgctaaacccttttttctatctcactaacacaacaatgggagacgagaagaagggcaagcctgctgcttccggcgtgtggtccaccatcaagcctttcgtcaatggtggagcctccggcatgctcgccacctgcgtcattcaacccatcgatatgatcaaggtgaggattcaacttgggcaaggatcagctgcgcaggtcacttccaccatgcttaagaatgagggttttgctgccttctataagggtctatctgctggattactcaggcaggctacatacaccactgcccgtcttgggtcatttaaaatcttgacggccaaagctattgaggctaatgatgggaagcccctgccactgtatcagaaagctctatgtgggctgactgctggtgctatcggagcaactgttggtagtccagcagatttggcactcattcggatgcaggctgatgcaacatta

SEQ ID NO: 1748 - DNA, 2130 bp, Glycine max
ttttccacgcgtccttctacgcgtgaagccagcgagtgagtgagcgagccaggtagggttttcgttgttcccccgtctttgaattcagttcgcgacgatggggtccatccccgatccaggcgagttgagcgagttgactcagccgagcttcgacgagttccagcgccaaacttccctcatgaccagctgcaccctcctctggaaggagctctccgaccacttctcctccctcgagcaagacctcaaccacaaatccgaagccctcaaacgcaagattcgcaccctcgacaacactacttccgactccctccgcctcctcgatcgccgcgaaacctccctcgacgccacgctccagatcgccctccgcacgctcgacacgcgccgcaccgctgctctctccgccctcctccacgacgctgacgacaccatcaacagctcccccgacggtgaggtcgacgacaccaccggcctcatcctcaaactcaagtccttctgcctccgcatggacgcattcgggttcttcgccttcgtcagcgccaagaagaaggagctcgacggcctacgcgccgagatgccggtggcgctggcggagtgcgtcgatccggcgaaattcgtgctggaggcgatctcggaggtgtttccggtcgacaagagaggggagaaggccggccacgacttgggctgggcctgcgtccttgtcctggagtcgttaattccggtcgtcgtcgaccccgtcatcggaaaatcgaggttgttggttacccctaccgtgaaggagcatgccacggagatcgcggagacttggaagagcagcctggaggatcgtggcggcgtggaaaacctgaagacacctgacgtccacactttcttgcagcacgttgttaccttcgggattgtcaagaacgatgactccgatttgtaccggaagcttgttattgcttccgcttggaggaaacagatgccgaagctcgcgctttcgcttggtctcgctcagcaaatgcctgatatgattgaagagttgatcagcaaagggcagcagcttgatgcggttcactttacctatgaagtgggtctggtggaaaagttccctcctgttcccttgttgaagtcttttctcaaggatgctaagaaagttgcggcttctattttggaagatcctaataatgcaggccgagctgcgtacctagctgcaaggaaagagcagtctgcactcagggctgtgattaaatgcattgaagaatacaaacttgaggatgagttccctccagaaaatctgaagaagcgacttgaccagttggagaaggtgaagacggtgaagaccgagaaaaggaaaccagtggcagttcctgccaataagagaactagagcaagcaacggcaatggaggtccaatgccaccagccaaagctgggcgtttgactaatgcgtatgtatcatctttccctgctgctcctacatttgtcaggtctccatcacacgggcaatacccagctgctcttccaccatacccttccccaccccacatgtacggcagcagaagtcccccagcaaatccttatgctgcttattcacccgagccggcaccagctattgcagggtcttacccggcagctcccatgaactatcctcatgcatatggcggctatggaaatgttttggctcccacttatcagcaggcttactaccgatagaaatgacaacctttgaagatggtaaccactgatatgacgaccttgatccaatttacttttgcaatgttgtttgtaatcactaaccgtttaacggtagcagttgtgtgtgttaattataactactgtcccacttcctgctctgcatggggagaagttgtatttctaatgttgatcccatagtactaggtgattgtggaaagtaactaggacggccaagaaacatcagaaactcaactaccactgttcggtttagttgtagaaagacttaccgtgtttacattatatgcttatcttgggatcgaactgaaggaaaacaaaaaaagaaagaggtaatctgtttcttggcagctgttgactatggtataaagactacaaaggaaataattttttctgagataaatgtttttctgcattcacaatgccggactaggtatttgtta

SEQ ID NO: 1749 - DNA, 662 bp, Glycine max
gacaaacaaatggcgagcactctgctgtccgtacaccactttctcccctctcaaaggagggaaaagatcggttgcttgagtggtgtcagaacttcattttgtggtcaagttgtgtgcaattcaagtttctgtgggagacaaataactagaagccatggaaaccgtcttgttgttcactcactgcttggaaggaaggtgaagtctgtgaagagcagagagactgtaattcctgaaccagattacaggattccaattgtgctactcggtatagctggtggattggtttacacagataatttggtacctgcagtacctgttggtctccttggattgcttctgttgtttcagaccactagagtgagatttgtctttgatgatgaggctctggaggtaaagataggtgaacagctccaggaatcaggtgagaatgttttcgtgggaggaaaaaaccgctggaagtactcgacatttgttaattgggaattctggtggccaaacttccctatcttggtttacttcaaggagtcacaaacgaagcctgagggacaaattcatttctttcccataatatttaatgggaagcagctttatgatgttatggtggaaagagctggcccttcaaaaactagtggaccaaaagaatcctgaggactgagatgtgt

SEQ ID NO: 1750 - DNA, 478 bp, Glycine max
gagcagtcttctgtccgtacaccactttcttccctcccaaaggagggaaaagattggttcttgagtggtttcaggacttctatttgtggacaagttgtgtgcaatccaagtttttgtgggagacaaataactagaagccatggaaaccgtcttgttgttcactcactgcttggaaggaaggtgaggtccgtgaagagcagagagactgtgattcctgaaccagattacaggattccaattgtgctacttggtggtttctgattctctctttatctgtatagctggtggattggcttacacagataatttggtacctgcagtacctgttgtctccttggattgcttctgttgttccagaccactagagtgacatttgtctttgatgatgaggctctggaggtaaagataggtgaacagctccaggaatcgggtgagaatgcttttgtgggaggaaaaaaatgctggaagtactcaacat

SEQ ID NO: 1751 - DNA, 493 bp, Glycine max
gaaagaacctctctctctcatttggtacggtttggtcgtgcccattgtcctgtttgtttcggtttctgttttgctttgaaagcagaagaatcaaatcaaatcaatccttcaccgttcgttcgttcattaattcattcaattccctttcttcggtttttctattttttccctcaaaaaataaaaatcggaactttgctttaaacgtggaaccccaccctgagatttcgcccccagaatcttgatccctttatccagaagggtacttattgtttttttttttccactgggattcttgttgttgttgttgttgtggttcattgtttgtggaagagaaatggcgacgagtatagggattatggatagcgcttactttgtcggcagaaacgaaattctcagttggatcaacaatcgccttcaacttaacctctctcgcattgaggaggctgcatctggtgctgtacaatgccagatgatggacatgacatatccaggg

SEQ ID NO: 1752 - DNA, 613 bp, Glycine max
gaagacaatgcagtttttaaaggaaattatcctttgcttgcccaattgccaattgatatgagaccagtattggcaccttgtcgccacaataaaattcctatatcagtgaggcaggcccagctttaccgcctgacagagcgcttattgaggaacacaaatctggctgtgattcgcagaactgcagatacagaattagctgttgcagatgcagttaatattgaaaaagaagttgctgacagatcaaacagcaaacttgtgtatttgaaccttagttcacaagaactcttgcatcgcacaaataacacaaaaaccaatgtagccacagatacaagtccatcagcctcatcagcaatgcttactgatcaacaatcggaacttaatactgatgatctttcaactgaggcggaagttgaaacagccttgaaaaatgctggtctgttgtctgattccccacctagcagtccacatgagagcagagaaacatgtaatagtgatatgtcagggcctgataatatacttgaactagattctcatcctgatctggatatttatggtgattttgagtatgatttggaagatgaagattatattggtgctagtgttacaaaggtct

SEQ ID NO: 1753 - DNA, 930 bp, Glycine max
gatacaaggagagaaaaaaaagtgtgttccagagaagcatgtcccattaaagtatattatgtcttcaccaaagaaccaccctcaagttagaagcatctctttgctgtagctgtagccaatagtaatacccttccagctggtatacgtaccctccattctatctttatataccctccttccattctcattcctcgtccttcacattctcctctctgaattcctcttattcaggaatttggagagtattgatatatcaaggtaggataaaccagtagccaaggaagatatggagttttctatgattttcattgttagcaacattatgctgcttttcagttcagcatttgccaaaactgctagtcctccctctctgagcccaactccagcaccagccccggcaccagacttcgtgaacctcactgagttactcagtgttgctggtccgtttcacaccttccttggataccttgagtccactaaagtgattgacactttccaaaaccaagccaacaacactgaagaaggaattaccatctttgttcctaaggacagtgccttcaatgctataaagaaaactaccctatccaacctcacctctgaccagctaaagcaagtgatcctcttccatgccttgccacatttctattctcttgctgagttcacaagccttagccaaaccagctctactcccacattcgccggaggagattacactttgaatttcactgatgattctgggacagtgcacattaattcaggatggtccaagaccagggtgagcagtgctgttcattccacagatcctgttgcaatatatcaagttgacaaggtgctactccctgaggccatttttggcactgatatacctcctgcacctgctcctgcaccaactcctgatattgcccctgctgctgattctccaactgaaca

SEQ ID NO: 1754 - DNA, 1499 bp, Glycine max
gcgggcaagcgaacgcctagtttcttacaaggctctactctactgcttcaccttctgctctagaaaattcagtggtgatacatggcttcggctactctctctgtagccaaaccagcccttcaggcaaatgggaaaggcttctctgaattctctggcctccgcagctcatcaggcttccttcccttttctagaaaatcttcagaggatttccattctgtcattgccttccagacctatgcagttggaagcagtggaggatacaagaagggtgtgacagaagcaaaactgaaggttgccataaacggatttggaaggattggaaggaacttcttgaggtgctggcacggtcgcaaagactcccctcttgatgtcattgccatcaacgacaccggtggcgtgaaacaagcctctcaccttctcaagtacgattcgatcctcggaaccttcgatgctgatgtcaagcctgttggcagcgacatcatctctgtcgatggaaaggaaatcaaagttgtttctgaccgcaaccctgccaaccttccttggaaggacttggggatagacttggtgattgaaggaaccggggtgtttgtagacagagaaggtgcagggaaacacattcaagcaggagctaagaaggtgctcatcactgctcctggtaaaggagatatccccacctacgtggttggtgtcaatgagtatgactacagccctgatgaacccatcatcagcaatgcctcttgcaccactaactgccttgcaccctttgtcaaggtccttgatcagaaattcggtatcatcaagggtaccatgaccaccactcactcctacaccggcgaccaaaggcttctcgacgcgagccaccgtgacctgaggcgcgccagggcggcagctctcaacattgtccccacttcaacaggagcagcaaaggcagtggcccttgtcctcccaaccctcaagggcaaactcaatggcattgcactccgtgtgccaacaccaaacgtctcagtggtggacctcgttgttcaggtctcaaagaagacctttgcagaagaagtgaatgcagcattcagagagagtgcagacaatgagctccagggaatcctctctgtgtgtgatgagccacttgtgtctgttgacttcaggtgcactgatgtgtcctcaaccgttgactcatcgttgaccatggtcatgggagatgacatggttaaggtgattgcttggtatgacaatgagtggggctactcccaaagggttgtggatttggctgacattgttgccaacaagtggaagtgagagccaaacaaattctgaattggtaattcaattattatatgtatgtaccatgccattgtagttttgtatgcttactactactactactaccactacaaacacttgttgcttcatttttcattctaaaacttgtactgagaaacagaaccatcaattttctctgccttctcattgtgcaataaaattcttaccttgaaatctgaatg

SEQ ID NO: 1755 - DNA, 253 bp, Glycine max
atctttcttttaaacttgtactgagaaacatgaagcaacaagtgttgtagtggtagtagtagtagtaagcatacaacacttgttgcttcatttttcttttaaacttgtactgagaaacagaaccatcaattttctctgccttctcattgtgcaataaaattcttaccttgagaaaagaaaaaatgaggagtccattgaaaaatcaacggtgatcccgggatttaaatccgggacgggccagttaggtgtagcc

SEQ ID NO: 1756 - DNA, 965 bp, Glycine max
cgacagaaggggattttcgacatgtgttggctataggattacattcacaatttcctctatatctttggacaggttctaaagtttttgatagcctcagaaacaaaatcagacctcatcatagttttgctaacacaagtatacactcattctcaaaaggtttaatttcatcctttctttccctctcttttcattggtgtgcactttcacttgtggagctgcatcaacagcagtggaaattgtgctttgttcttgagatgtctggtgttcttctttgggtgagttgtggacccaaagagaacatcaactccttggtgagtttttcatgcaggagtagtagtggtggtgaaagaacacaaaagagattttctggaatcagttttgctagtggtacttctgctttttcaagtgcagtggcagctactgagacttcaagatcttcagaggagagggtctatgaagtggttctgaagcaagcagctttggtaaaagaacacaaaaggggtacaaaaatagctttggatttggacaaagatgttgaggctgatttcaacaatgtggatctgttgaatgcggcttatgatcggtgtggtgaagtctgtgctgagtatgccaagacattttacttaggcacacaattgatgactgcagagcgccgaaaagctatttgggcaatttatgtgtggtgcagaagaactgatgagctagtggatggcccaaatgcttcacacatcacccctggggccttggacaggtgggagcaacgattgagtgatgtttttgaaggtcgaccctatgatatgtatgatgctgccctctcacatactgtctcaaagtacccggttgatattcagcccttcaaggacatgatcgaagggatgagggtggacctgagaaagtcaagatacaataactttgatgagctctacctttactgctactatgttgctgggacagtaggccttatg

SEQ ID NO: 1757 - DNA, 417 bp, Glycine max
gtaaattttaggcacacaattgatgactgcagagcgccgaaaagctatttgggcaatttatggtatgtctgattagattagattacacactcactgctatttcagcttctccagtgagacttgttttggaattgacaattattcattgtgcattgcagtgtggtgcagaagaactgatgagctagtggatggcccaaatgcttcgcacatcacccccggggccttggacaggtgggagcaacgactgagtgatgtttttgaaggtcgaccctatgatatgtatgatgctgccctctcactactgtctcaaagtacccagttgatattcaggtactttacatagccaaatctaagattgagaattacatctttttagaacaaacttacatgaagttctttagttggttttgatgttaa

SEQ ID NO: 1758 - DNA, 1323 bp, Glycine max
  unsure (1)..(1323): unsure at all n locations
gactcaagccatgcatatgctgatggcctatgagttccatcaggacaaatccatggtggcatgctctttcaattctcaattgaaattcccccaaagccaccttcttttgattcaataaatcaacacccaattttcaaaattccaacttgtaatgtcaatttttctttccatttgacacaccataccaatcaaccaaccttgttgcttcttgtgatcactcctgaaccacactaatggatattgatgagtgggagtttctctctgatgatggctaccttgatttcaatgaagagggtgggaagcaaaagcaaaagcagaattcctttggaaaattggactccgagggcatctttgacatggactacttttgctcatcaccaccaccaccaagggtgagaactcaactagtccctttgccaattcaattggagccaaaaattgggaaggccccagaagatattttggtgaaagacatcatcaagagtagtcctatggaagtggctattgctaccccatcagagaacacaaaggaatttgaggctgtggaagctgatagagtgaaggttttcttcaagatcaaggagaaaagtgagtttgtggacatgaaaagggggatcttgcctccaatggatgctgctggttccttgaaatttgaggacaaaggtgaggccatggagatcatcacctctcccagaaggaaggttattgagaaggatgtgtgtgacaaagaagaggagaccacttgggaggaagagaacaacagtggtttcaacttgtggaagtggagtttgacaggtgttggagctatctgttcttttggtgttgctgctgctactatttgtgttctcttctttggaagccagcagaggaacaaactaaagcaggatcagaagattcggttccagatctatactgatgacaagaggattaagcaagtggtgcagcatgcgaccaaattgaatgatgcaatttctgcagcaagaggtgttcctatgagcagagctcacataagcgttggtggttactatgatggtctttgaaagcatttgattaggtgccttcgtgaagcaattgtagtctacaatggatcaaccatgctataagatctattaatctggccctatcctatgttgctgtaaataacatgatgccagatgttaccttattgttgttgtttgttctgtatattttctctggtcttgtaaattaagtcacagatcagcggcactttcatttttattattattatttgattaatattttggaatttatgtatcaaaaaacccacgcgtccgnnnnnnnnnnnnnnnnnnnnnnnnnnnn

SEQ ID NO: 1759 - DNA, 593 bp, Glycine max
taggtgctttgaaatttgaggacactggtggtcaggcacaagagatcatcatggcctctccaagaatgaagattgagaaagaaattgctactattatggactgtggcaaagaagtgggggactctagtggtggtttcaacttttggaagtggagcttgaatggtgttggggctatatgttcttttggatttgctgctgccacaatctgtgtcctaattcttggaagccagcaaaggaacaacaaaatccagcaggatcagaagattcggttccagatctatactgatgacaagaggattaagcaagtggtgcatgcaaccaaattgaatgaagcaatggcagcagtgagtggtgttcctctgagtagagctcgcataacctgtggtggttactatgatggcctttgattgagcattgattaaggaagtttcggatagtacaatgggccaactatactactattctagatctatcatatagttttcttttcttttcttgtaaataaaataatgaggatggtgccttgtaaattaagctacagcttatgggctcttttagtattattagtactattattttatcgatatgggttt

SEQ ID NO: 1760 - DNA, 484 bp, Glycine max
gggctccattaaattaaagaaaatataaatatgcgtatgattctccagatctgtttatccaccttaggttgaattcatcgccgagcatcagatccgaaatgtcgatcggagatgcttttctgtgcttactgttcatcgcaacttgttggatttccgctgcttctgctgattccatctatggctgcggtggatttgtcgaggcgagctcatcgttggtgaagtcgaggaaacaaactgatgccaaattggactattccgatgtcacggttgagcttcaaactgtggatggactggtaaaggatagaacacaatgtgctcccaatggatactattttattccagtatatgacaagggttcctttgtaattaaaattaatggacctccaggatggacatgggattcagaaaaggttcctgtggttgttgacaataatggttgcaatggtaatgaagatataaaacttccgtttcacaggattcacta

SEQ ID NO: 1761 - DNA, 2780 bp, Glycine max
ggagtggcagagaagttcgacgaagatagccagacgcttaggctatgattgtccacaacatgtggatagcaggaaaaacgagtgtatagatcaacaactacccttcccttttcttctatcactcccatcactcttcttcttcttcttcacttgtacactcttcaaccactcaacaaagtggttggtttttggttcttaagccatggcatccacatcctctctgcatctatctcaggcccttctggcacgtgctgtgtaccttcatggctcttcttctgaccgtgtctcactctccttcccatcattctctggcctcaagtcacattctccatgcaaagcagcagccacgtcctcacgtagaaggggtgcttgcgcttccaccagcgttgttcgagccgctgcggttgagacactcgaccaaaccaccgaggtttctctggtggagaaatccgtcaacaccattcggtttttggccattgatgcagttgagaaggccaactctggtcaccctggtctccccatggggtgtgctccaatgggtcacattctctacgatgagataatgaggtacaatcctaagaaccccgcttggttcaaccgtgaccgtttcgttctctctgctggacatggctgcatgctccaatatgctctccttcaccttgctggctatgacactgttcaggaacaagaccttaaggaattccgacaatggggaagcagaactcctggacatcctgagaactttgagacccttggagttgaagtgaccacaggtcctcttggtcagggcattgccaatgctgttggattagcactagctgagaagcacttggctgcacgatttaacaagcctgacaatgagattgttgaccattacacatatgttatattgggtgatggttgtcaaatggagggaatttcaaatgaagcatgctcacttgccggtcactggggtctagggaagcttattgctttatatgatgacaatcacatttccattgatggtgacactgagattgcattcactgagaatgttgatcagcgttttgaggcacttgggtggcatgtaatttgggtgaagaatggaaatactggatatgatgaaattcgtgcagccattaaggaagcaaaggctgtcaaagacaaacccactttgatcaaggtaaccactaccattggttatggttctcctaacaaggctaactcctacagtgtgcatggaagtgcattaggtgctaaagaagttgatgctacaaggaagaatcttggatggccatacgagcctttccatgtgccagaagatgtcaagaagcattggagtcgccatacacctgagggtgctaaacttgaagctgagtggaatgccaagtttgtggaatatgagaagaaatacagtgaggaagctgcagagctgaaggctattattactggtgaattaccagctggttgggagaaagcacttccgacatacactccagaaagccctgctgatgctacaagaaatctgtctcagcaaaatctaaatgcccttgttaaggttcttcctggtctacttggtggcagtgcagatcttgcctcttccaacatgaccttgttgaaatcgtacggggatttccaaaagaatactcccgaagagcgcaatgttagatttggtgttagagaacatggaatgggagcaatctgtaacggtattgctcttcatagccccggattcattccatactgtgcaactttctttgtcttcactgactacatgagagctgccataaggatttctgcactgtgtgaagctggagttatttatgtgatgactcatgattcgattggacttggagaggatggaccaactcatcagccaatagagcacttggcaagcttcagggcaatgccaaacactttgatgcttcgtccagctgatggtaatgaaactgctggatcatacaaagttgctgtggttaacaggaagagaccctcaattcttgcactttctaggcaaaagttgacccaacttccaggaacttctattgagggagttgaaaagggtggctacaccatttcagacaactcatcaggtaacaagcctgatgttattttgattggaactggttctgagttggaaattgctgctgctgctgctgaggatctaaggaaggaaggaaaagctgttagagttgtttcttttgttagctgggaactttttgatgagcagtcagatgaatacaaggagagtgttctacctgcttcagtaacagctagagttagcattgaggcaggatcaacatttggttggcacaagattgttggaagcaaaggaaaggccataggcattgatcgatttggagcaagtgctccagctggaaaaatatacaaggagtttggtatcaccaaggaagctgttattgctgctgccaaagaactttcgtagatatatttgttgagtttcttttatctcatctagaacttgtggttttcacttgtggctttgggttactgttacatgacttgttttttgagatatcactttagccacaataaggaagattagattgttcttgcatatgattgtcagaggaaccacttacattgaaggatgagttgaattaatgaagttgtatgaatttgtaacaactatttggcttgctctgtggtgtagttgaattagtgatgctcactctagcactcaattctggacagatatggcttctaggaagaattatatccttctctatttttttttcttaaaaataaaaaataaagaatctagtttaaaaccattactc

SEQ ID NO: 1762 - DNA, 757 bp, Glycine max
ccccagcttcccggaacttccattgaaggagttgaaaagggtggttacaccatttcggacaactccactggcaacaagcctgatgtcattttgatcggaactggttcggaattggaaatcgctgccaaagctgctgatgacctaaggaaggaagggaaggctgttagagttgttccccttgtttcttgggaactttttgatgagcaatcagaagcctacaaggagagtgttttccctgctgctgtttcagccagagttagcattgaggcaggatcaacatttgggtgggagaaaattgttggagcaaagggaaaagcaataggcattgatcgttttggagctagtgctccagctggaagaatatacaaagaatttggtatcactaaggaagctgttgttgctgcagctaaagagcttatctagaacttttgattttttttgccttctggttttggttgagagcattccatgtcatgaataagaaaaaggttaaatatccttcgattgggaatttgggattctaagtgaagaagcaacatagatcaaagaattttgtgaacttgtaataactatttgacaatttagttttgcactgccacatggttaaattcaatgtttgatcatatcaaccatagatgctagtgtatactacttgtataatttgtttcacttgcagattcactcttagcatttgagtgtttggatggccgtgttttgttcattaagaaatgttgacatggatagtttgttgcatggt

SEQ ID NO: 1763 - DNA, 584 bp, Glycine max
ggaggcagagaagtaagaagaagatagccagaagtataggctaagattgtccacaacatgtggacagcaggaacaacgagtgtatagatcaacaactacctttcccttttcgtctatcagtccaaacactcttcttcttcttcttcttcttcactctacaaccactaaactaagtggttggttttggtttagtttcatttttttgaagctcttaaacttaaggcttaagccatggcatcctcatcctctctgcatctatctcaggcccttctggcacgtgctgtgtaccttcatggctcttcttcttctgaccgtgtctcactctccttcccatcattctctggcctcaagtcacattctacatgcaaagcagcagcagccacgtcctcgcgtagaaggggtgcttgtccatccaccaacgttgttcgagccgctgcggttgagacactcgaccaaaccaccgaggtttctctggtggagaaatccgtcaacaccattcggtttttggccattgatgccgttgagaaaggccaactctggtcaccctggtcctcccatggggtgtgctccaatgggtcacattc

SEQ ID NO: 1764 - DNA, 1336 bp, Glycine max
ctcctggcagcaagtagtagtaacaatttaggattgtggtgtgttgttgttgttgtagctatcagtaggtgaatccaaaaccctagccctcactctcaccaccattttttcaattcttgagctatgtttcagggataatagggcagggatgtacaaagaacgagagcgaggtggtgtttccgtttccgcctctaaatccgaggatcggaagcgaatcaacgacgttctcgataagcacttggaacgatcctctccttccacttcccgccccatcaacaccgcttccaagaattccaacctccaagtggaggaatctgagacggagagtgaagagtctgatgttagtggctctgatggggatgacacctcttggatctcgtggttctgtaatctaagagggaatgagttcttttgtgaggtggatgatgattacatacaggatgactttaacctctgtggattgagcagtcaagtgccctactttgattatgcccttgatttgattctcgacgttgagtcatcccatggtgacatgttcacggaggaacagaatgagttgattgaatcagcggcggaaatgctttatggtctgattcatgcccgatatgtgttgaccagcaaaggaatggctgccatgcttgacaaatacaagagctatgattttggtagatgcccaagagtttactgctctggacagccctgccttccagttggtcaatcggacattcctaggtcaagtactgtgaaaatatactgccctaggtgtgaagatctttactatccgcgttccaagtatcaaggcaacattgatggggcttactttggaactacatttccacacctcttcttgatgacttatggacaactgaagccacagaaaccagcacaaggctatgttccaagagtttttgggttcaaagttcacaagccataaagctgaagttgaagctttcatgaaagtaaaaatctgcccgtgtctcatttaactcttccttatggttctctttgcaacatccggcaaatcatatgctttccaaaccagtacaatctaggcatctgttttaattgttataggagcttgttgtaaagaaatatgcagacatgcgaagcaagtgcttagtttcagcttctgattcaatgagcaagtgcttaggtactcgatggtactttttaatgactgtttacgaattgtattcttgcgattaacttaatattgtctatggttatgtctcgaactacaaataccctgctatttttatattgttttattccatttctcccaatttatgtagcccctgactttgtggatttgctcccaatggattcatacattact

SEQ ID NO: 1765 - DNA, 541 bp, Glycine max
cccacgcgtcccgaaacggggaatcattgtctgcgtctgtaaattgtaaattgcatcatccctgaagctgaacctcaaaaccctagctgtccgcctgtctgcaacggcgtcgttatgatcagttgagaatccaaaggaatcgagtcgaatcatctgaccggcgacagttatgtacagagagcgaggaggcgtcggatccaaatcggaggtaacttccgttgatcggaagcgaatcaacgacgtcctcgataaacagcttgaacgttcctcgccttccacatccagagccgccgccatcaacggcaaggaccgctcctcctcttccctcttagccgccgccaaggactcccgctccgcctccgtcaccgcccctatctccaagaattccaacgcttccgacgaggaatctgaaacagacagcgaggagtctgatgttagtggctccgacggagatgacacatcgtggatctcgtggttctgcaatttgagaggaaatgaattcttctgcgaggttgatgacgattacatccaggacgacttc

SEQ ID NO: 1766 - DNA, 580 bp, Glycine max
gcggaaaaagaaaaagaaaaagaaaaaaatatttgcgaggaatagaaacgaaccgaaacggggaatcattgtctgcgtctgtaaattgtaaattgcatcatccctgaagctgaacctcaaaaccctagctgccggcttgtctgcaacggcatcgtttcagtatctcgttatgattagttgagaatccaaaggaatcgaatcgaatcatctcgacgagaagcaaaacaccggctatagttatgtacagagagcgaggaggcgtcggatccaaatcggaggtaacttccgttgatcggaagcgaatcaatgacgtcctcgataaacagctcgaacgatcctcgccgtccacatccagagccgccggcgccatcaacggcaaggaccgctcctcctcttccctcttagccgccgccaaggactcccgctccgcctccgtcaccgcccctatctccaagaattccaacgcttccgacgaggaatctgaaacagacagcgaggagtctgatgttagtggctccgacggagatgacacgtcgtggatctcgtggttctgcaatttgagaggaaatgaattcttctg

SEQ ID NO: 1767 - DNA, 465 bp, Glycine max
atttaggattgtggtgtgttgttgttgtattgtaggtattggtgggtgaaatcaaaaaccctagccctcactctcatcactttttttgagctatgtttcaagagagttagttagggataatagggcagggaagaataagagggatgtacaaagaacgagagcgagttggtgtttctgtttccgcttccaaatcggaggatcggaagcgaatcaacgacgttctcgataagcacttggaacgatcctctccttccacttctcgccccatcacctccgcctccaagaattccaacctccaagtggaggaatctgaaacggagagtgaagagtctgatgttagtggctctgatggggatgacacctcttggatctcgtggttctgtaatctcagagggaatgagttcttttgtgaggtggatgatgattacatacaggatgactttaacctatgtgggttgagcagtc

SEQ ID NO: 1768 - DNA, 380 bp, Glycine max
  unsure (1)..(380): unsure at all n locations
nnnnnnnacattgaaacatgtagtagaaatggttttattggagagttgacatccaaacatggtccatgataaagtgaaacggcattacaaaaagctgcaaacctttctcataatttctttcagatttaatggaaacaaaatcttatgagagaatatgggaattggagtcctttccagtgggttcgctttgtaaggacatgagcatcatcatccaacaagatacaaacaatccaatttggttggatatgtccctcccgtattatttacctgagtttgttgaagactcatatatactattagaatggtgctcaaagtgcggctatgcactcaatttcaatcttggcatccattggcaagccagctacttgataggttgaccg

SEQ ID NO: 1769 - DNA, 581 bp, Glycine max
  unsure (1)..(581): unsure at all n locations
ggaaacttcacaatctgtatttaacatcaaattcctagtttcagactttcagcaattctgcatgattcatagccacattcatagtgtggcaagtagaaacatgcatgcagcaccttctataatgaataggcacccagtctttctctgcacaagtaataaaaatagtgaatacaaaaaaagcaatcctgcaggttcacaatcaatctgtataacatatcaaatccaataatccatagttccatttcttttgcatagtttatggctcagtattctcttccaactcatgttttgattccttgtcttctgagatgaaatctgaactgccttcagcagcaacggtcccatcatcagtatgtcctacagctggagggttctgaaagagttcattattttccaactgagccaacttatctttggattctccctttagtagctctaccacctcaagtatggtgggtctcttctctggctgactctgaacacataagagagcagttaaaactactcttttaagctcttcctccgcatagttatgcccctcaagttntggatctgccagttcactgaatntcctcgagccg

SEQ ID NO: 1770 - DNA, 499 bp, Glycine max
  unsure (1)..(499): unsure at all n locations
gttatacaatgattcttttattcactttagttaaaagaaggaacctgaacatttcgcccaaagggagtagagaacagatgatcatgtacatttttatatgtatgatctactgctgtatacaaaattgcaatgaagcaatgtacagaaaacgagggtgaaattatgtgcatatcaagtatctaaagctgaactcatatggcataatttgtacaaattgtgataagggctcggtttttctttcctcaaggaatttaagggcttctttccccaattcacttggtaactggagacagatccaatccagcaatgactccaagtcttttgcaaagttcagcaaataccaatccagtagctttgggatagcaaactttgaagttgaaaatccaattgctgcctgtaagtactctcttttggccacttccagttcattctcaacctgngatgctgtgtaaactctcacagcaggagaggaccaagttccagaagagagagcaaatgt

SEQ ID NO: 1771 - DNA, 387 bp, Glycine max
aatttcccaatatatcgtacaactggatgggagactcctgcaaattaacctcagcctctcacaccaatgttttatactactccaatactatagattatgatcatcattattataaagggacatcattgtgatatatagaggaacgtgttgtttacttaagtgctcaaattcaacacaataaatgcaatcacaagaatagcaatcatttcataacaacgatatatagaaaagggcaatacatatatatgtagtactattaaacattggtgtgagaggctgaggttaacttgcaggactctcccctccagttgtacgatatattgggaagaaattgtgctcaccctcatatttttcactgatttgggtcacgcatcaaaaacacactca

SEQ ID NO: 1772 - DNA, 2172 bp, Glycine max
gaacaaaaaagccaaacattttcttttataaataagaataagtcacattgttttactctcttactactacggggtagtccaccgacggtgatgagtacgtcacgaattttctcttttactaatccgaggtaaggtaatacatcatcaacaatgagtaactaaatagcccatcaacattttgagtaactacgcctcaacaatgtgggtaactacgcctcttaattttctttatctacattcccgtctaattcctacgtctacctgtcataaggacattctagatcattttcagtgaccttaaaatgctgtggacgttgaccagagcaatgcagattccacattttaaaatatgatctctcaagattcctcacccaacgggccgtgtcaaatagagggcaagtcatgcgtacagctttaagcttattagtaagagcttgaagcttcggccgattcagagccaatgagactgctctatcttcatactcttccatgctgctaacaatcatctcctcccctagtccagtggcaagacagagtgacccagcaaccctagtagccattttctcaagaggcagagtaaccattggcaaacctgcccatagtatatctgttcctgttgtatgtgcattgcataaaggcgagtcaaggaataagtctgctaaagaactccgtctgatgtgttcattcttcattgcaacatctgtgaaaataatttgatccggctgtaccccttgtgcagcagcatatgctctcagtctcatttccccagctgcaggaaatctgaggagccagagtgcactgttgggtacacgtttaagaatattacaccatgtattaaatatttcaggatccatcttgtacagttgattgaagcatgcaaatataaatttatcctcaggtagaccataatctgatcgtttgtgtgggcagtttggatctaacacatcctgatttttctgtttataatcatttacaaagtagcaatgcggtagatgtacaatcttctctgaatatatatttgcataccgtagtggtgaaacaaactcatcagtgactaagtagtctatgtaagtagccccagttgttccagggaatcccatatatgaaacttgaatgggtgcaggttgcatagcaaatatctcatttctggcaccctttgtataaccatttaggttgacaaggatatgtatcttatcctcattaatcatttttgctattgcatccgatgacatggcagatacatctacaaagtgctctgcttcagactgaatacgttgcctccattcagtaccatcattaacactcaaggcatagcagaacacctcaacattcttcctgttgtgcataccaaaaacagatcccatgagatgtgacaagggatgattaccaaagtcactactaacataaccaacccttagtctttcatatcctccctcgcgcttgattggaataggagcaggatggttgaatggaggaagagaaaaacgagatgcaattaccgagcagtgtgcagcatatttacggctaatttccagagcaagcattgggtcaagtggatatgctattgcatggaatggctggacactaggaataacggacatattaatctgcctcctgattatcgcttcaacttccttgaacattttatcacgatcctcccaacagcatacacactggtatgtatgaaggagattgcaagttgcttcagggaagtctggacgaagaatcaatgcttgtttatagctcttcacagcagcctctacatgtccactatctttataagccgaagccaaattagcatgggcttcagccatggtgggtctgacagcaattgcccgtatgtaatcctggatagcatcactaactctaccaatctccttatacgtattgcctctattaactagcccatcagctgccaagggatcaatgcggaggacctcattgtagcatgatatggcatcaacataatttccctgctgcttatagataatggcaaggttgttataaggagcagacaatccagttgttacattcagtgtagctttataatattgagcagcagcagctaccatgttccattccatgtatatatttccaagattggtcaatgcttgtggatggttgggctgtaacgtaaggcattgattatagcactggattgcttcctccact

SEQ ID NO: 1773 - DNA, 493 bp, Glycine max
ttccagttctgttatttcttttggaactgtttcatgttctcatccatatttgaagaaaagaaactcaattcgttgatttctgcttatgctaaagcgagtttgtaaagccaagatcatgggtggctttcatcactatgtaattaatttcaaagttgttagagcctccaatattagggttggtgcattcattgctgctttgctacttctctggaaggtattctcacgttctgccctccaactttcccacagaaacagctcacacttcacactcttcacacgccactttgttaaaccatgatcttcaattcttcataattacctgaagtggacggagaaggttgaagcggcggaaaacggcggttgacggcgatggagttcagggttcaaagctcagagtcagtgtaggtaatggatttgaggttggagtacgaagtgtgtagcgtaattcaaaactcaacaagtcactttttttatctgtgttaacgagatcccg

SEQ ID NO: 1774 - DNA, 901 bp, Glycine max
ctgctcagaagagtcatgtttgccacaggtggtgcaaacgtcttgcaccaaaggtcttgagctggaccctgcaactcccttcattattgattcaaaaggagatggaacactgctctttgttgttcgagcccttgtccttaatgcagtaagtgcttctctattcccatttctcaatctatcgttctcaaccagctgatgtcgggctaaaagaagatgctcagcttccacttccagttctgttaatttcttttggaactgtttcatgttctcatccatatttgaagaaaagaaactccttggaaaacagaggtctgatatgtgtctcttaattttcaacggcagctagcatgtaatcagcaatgttagtgttgcaggctcatcatgctggtcctcatataagatggttcagttgttcggttagcaacttcgcttctctctcagcactattaactctgcattctatttgttcaagctgaagtgtatgaaggagattgtaagttagttcagagaagtctggacgaagaatcaatgcttgtttatagctcttcacagcatcctctacatgtccacattccatgtatatatttccaagattggtcaatgcttgttgatggttgggctctaatgtaaggcattgattcatcccacaaaatcccacaaaaaaagtaaattgagtaggaattttaaacattacgaggagctcatgaatcatgattaaatgtgcaaaatacctaatgatcatgcctacacgggaaagaacgaccatttattcccagatgaggaaattaaaattccaaacaatattgtacgcatatatttaacaacataattcaatattgcatggcaataccaacaaggttccagaaaacaaataaccagttagccaccgtgattaaataaa

SEQ ID NO: 1775 - DNA, 761 bp, Glycine max
catattaatctgcctcctgattatcgcttcaacttccttgaacattttatcacgatcttcccaacagcatacacattgcaacatgacaaaagattatgtacacattgatgccaaatgaaattacaaactatacctaaataattttaaaagtactaccaatacttgatcatgaactagcagagcaaagcattgtgataaccagacaatgaggaaatgacatttaaatacatttcacacgctaacagacagaaattaacactgtaatttctttttaggttgtgggaatgggcagagcatcatcacaaggcattgaaggcaatgctaaagataaaaagtaaacaacaatgagagaacattgttgcattataacatatagagcatcattttaaccatgacttccatccattttactggaaagcaaatccaaaacccaagtttatgatataatccaatcagctttaacaacagaaggctatacttattattcattccaaccacatgacatgaccagcaacatctatctgaagccaatcaaagcaatagccacttaaccatattgggggtgcattgggatagaagataatgaattcatgtaacacataagcaacaggattatatcaaaagatactctgccaaaatcactgaaaataataaatattataataaagaatggacaaaacctggtatgtatgaaggagattgcaagttgcttcagggaagtctggacgaagaatcaatgcttgtttatagctcttcacagc

SEQ ID NO: 1776 - DNA, 530 bp, Glycine max
  unsure (1)..(530): unsure at all n locations
tgcccattggagaacaaataaaaatgaaccctgatattccngatcagagtctaaaaatcataatcaaacgccaacacatacatgctctcagtctcgtttccccagctgcaggaaatctgaggagccagagtgcactgttgggtacccgtttaagaatattacaccatgtattaaatatttcaggatccatcttgtaaagttgattgaagcatgcaaatataaatttatcctcaggtagaccataatctgatcgtttgtgtggacagttgggatctaacacatcctgatttttctgtttataatcatttacaaagtagcaatgcgggagatgtacaatcttctctgaatatatatttgcataccctagtggtgaagcaagctgcatcagtgactaagtagtctaggtaagcagcccccagttgttccagggaatcccatatatgaaacttgaattgatgcaggttgcatagcctagtggtgaaacaaactcatcagtgactaagtagtctatgtaagtagccccagttgtc

SEQ ID NO: 1777 - DNA, 493 bp, Glycine max
ctatatgtatttttttctaatacgattgaaaaaatattaacatagtaaatatacagagtacatatatcctttacatcataagtttctctggagtacagccttctttggggtttccctttgtgagacaacgtataatacaaaagcgagaacataagtacgactatggttacacagattctgctggtctatccttggcaactgaagaaggttcagcaagcagatcgccaatgctcacaggtggaccgatgctgcatcgagctgtgttatgtatctcgatggcatcctttattttttgaaacttggcaagtgaacatgaaaatgattcaagctgcccctcagccccacgataaaagtggaagtaaggaagtactttaacattcaaccttttacacattggcttattctcatcaaaatttactttgaggaaaagaatttcagggtgttcttcagctgttctgcatagcttggggaataatgctcggcaagaagcaca

SEQ ID NO: 1778 - DNA, 425 bp, Glycine max
ggactttgaagactatttatattttcattggccaatactaattattaccacacaaaaacttgttataaaacttaaaacaaatacatcaaaaacacaaactgcatgtccgcatgtcatctaattactgatttttacaattgatggttctaagtttcaaaaagtaagctacccattttttacgtaatgttgtgatcgcctccgggtctagtgtcgagccatcaccgaaccacacactccaatcactcttcaactccgcgccaattatgttccacatccaatgcatcacataatacccacactcatagcctccgcgttgaatgtgagtcttcagttcaagccactggggtccagttttaggaactttcccatcagcaatcgtctgtaatgccttaaatgcattgttaatggcagtttggatatgaaca

SEQ ID NO: 1779 - DNA, 448 bp, Glycine max
gagtcagcgtgtttaagtggactggccaaggacctggttttacaacacaacccctaataatggcttctaacatggtttaattggaaaatccaaaacttaagccaagcctataaatcttacgcaactaagcaatcaacacaaaattggatttaagcatatttgcacacaagtactttgaagcacttaaatgttctaccttgatggtctctgcagtaactattgtatgtttgcgacctctcatagatgaagataacacctacaaagacataatcctacatccatttttgtcttacatttggcgctacatatcccattttttacgtaatgttgtgatcgcctccgggtctagtgccgagccatcaccgaaccacacactccaatcactcttcaactctgcgccaattatgttccacatccaatgcatcacataatacccacactcatcgcc

SEQ ID NO: 1780 - DNA, 699 bp, Glycine max
  unsure (1)..(699): unsure at all n locations
aataactgaaccttttataattgcagtggcagaaaaaatattttagacagaaatccgtacataaaaatctcccccacccaccccccatggagaaaaccatttctgcaaatttgagtatcccctattagcactagacataaataaatattttccgctatgagcatcttctctatccccctaaaataaatttctctaacttccttgatgtaagaggttccagcggccggaaggtctccaaccgcaagttggagctcgtgcagatctcactcaaaacagcatcacccttctccatttttattacctccaaggtgcttccaagaacatcagctgcaagtccagcttctaagaggctccccggttcctctccaccntcatgtattaaccgcccaatctctttcaaagagactacatgctctgttatagctttggcaaaaatgcggccaagaaactctggtgctttgggggcatcattacccgcatcttccaaagtgctgagaacagattcaaaccctttgatgagctgggcttgacccaatggtccatcctgagatttcacaagcttgacaagcagttgggccaaaagatttctctcggtgtcctttctctcaaacgagtctgtgacccagagagaaaccatggaaggatgaaagcctgggtagttcagatctttgatgcatagaacaacttcattcacatctc

SEQ ID NO: 1781 - DNA, 543 bp, Glycine max
  unsure (1)..(543): unsure at all n locations
ggcacgagcaacaatattttcagtgaatttcacttttaaatttggagcgagaatcattaaataataaattttttaaaattgaggattttctacaaatttcaaccaatcacgagtgtcagagcgtatcacaagcatcctcgaaaggtcttttccaaatacactaaggacaaaaggctgaagcattttttttcccctttgatggccttcggccaaaagtcagttaaccatgttagcttcgttttcttttcccccatggcatccaattccaaagactttcaattttctctacaagaggctctcttcgaaagccaaatctgtaaccttctcatcccccatttttctagacaattttggatgagcaagggacctaaatctacgacgttacatgccaccaattactctcacaattacaatccaaacccccccttcccgaaaagagagaaaacagttgaagctaaaactgcctatatcttacagatattcctttggaggaactgtttctcanagaaaaactatttctcagtcgatttaaccatgacaatt

SEQ ID NO: 1782 - DNA, 379 bp, Glycine max
ttaaagagcatcaccaattaacattaatggttaataataatgaaaatattttgggacagccacaaataaaagaagatttcgttactcccccacaataatgaataataacatacaatgaatacaaatgaaaggcagataaaaacaacaatgatacatagctacctaaacactcatttcatctgacccttcatttctccctatcttcctctcccttcttaatcacatcatatcactcatcaaataatcacttctctctcttctagttctttctctcaaggtatagatttgcattaggtgtctacaaatcattattcagataaaaaaaaatatagcaaagtacatgaatgaagcctatataatattatcaattacaaaatac

SEQ ID NO: 1783 - DNA, 398 bp, Glycine max
tttgagaacgacggaaggaaaaaaaaaaccctctccaaatgagtttcattcgaacaacaaaatttgcataggtttacacctatatttgattttattcagaggacaaggctccagtgacaaacaaatgtaagatttcagctcaacaacatcggaacatctaacaatcataaactttggctaataaagaacaacaaccataaactttggtctcttttttcaaggagataactgtgatgcttttggtgatatccgtccacacagacgccaggttgcaccagcatgaaacatagacttctcaaatacccatatatcacggacaagaacctccttgcttttatctccagctaccacagaaccttttgagtcatatgcttcaaatttctgtttagccaaaatct

SEQ ID NO: 1784 - DNA, 883 bp, Glycine max
atatagctactccaaggagaagggaaagtatatagctacttcagcgaaaatcaaatgcaaaagaacttcaaaacggtaatacacaatctgaaagccctactaagaaacctattatacaaagaatgaagtacaaaaacaagtatgatcattaaaaaaaaaaaaacaccctgctcgtacaattttctatttggtaagggttgtgttacctcagtgttgccggaatccagtactctttgcatacacataataacagtttaattacataacaagtgggatgcaacacaatcaaacaaaggaatgatacatacaacggcaacagaagcagcaaaggccaaagttgcagcactagcacccaactaatgattcgaccgcatcagattattctactcagaggatgatcagcttgctctatagctttcaacataaaacaactctaggccaaaacacatccaaatataaaaaccactctaaaatgatgcaaggaatcccgatggctcacttcagaaagtgcttttccaggccaagccatacctcatgtagacaattggaacctgccactaggcttttttcttctccatccaaaggcggcgtaatacacaaaggtcaatccagccaaaacaacaaatgcaatttggaatacattgtacttgtacaaatatttaattcctcgaagagactccaaagtgtgaccaaatatttcctgggctgcagttgcttgagcatagtaggcaaatgctgtggagcagaactggatcacactaatggaaaaagaagaataaggcccacattaaacagaaaagagttcattactatacatcccatgaagtggggagcaactctcatgggatgtatagtaatgaaaaactagtctcagtccaaggct

SEQ ID NO: 1785 - DNA, 406 bp, Glycine max
aaatacgagaactggggtcgtcgatgtatataatcatctacctactaaaacattcgatgacttaataatacgctttatcaacaaaacccaggttaaacaacgatcctcatcaattcatacaacaatcccaagaacaagtcaatgttttttgactgctccacattttaaacttgttgaaagccattcatccacattgcaatttgataccaccttgacaactcagacgccttaagcctcctcctcctcttcatcctcatactcttcctcgtcaacagtagcatcctggtattgcgggtactctgccaccagatcattcatgttaccctcggcctcggtgaaccccatttcgtccattccctcaccggtgtaccaatgcaagaaagccttgcgcctgaacatcgccgtg

SEQ ID NO: 1786 - DNA, 449 bp, Glycine max
gatataactagttaagaaaatttccaatagaaacatggaggattgtttatatatagaacgacaatttacttcctacttatattctaggttaaacctcaaaatgttttgtcatcatccaccttgatctggtggatgcttcatagtttacacctagaagtacaatcctcaactttgcaatgaaaatcaggtgaaatatgttaacatcttaacatccaactgcaaatattacaaaatctttgaaagggtagtaagtagtaacttcattacatttttctagcatttggtcgttctctccacttcaacccttccttctcgatcaaaagaggcatgaaacaggaaacacattggcaagcatggatgtttatgagaagcaccttaaaactcttctgatttagagtcatcttttgtctcagacttctgggttgtatctttttccatatattcttgtt

SEQ ID NO: 1787 - DNA, 407 bp, Glycine max
atattatcagctatatagtactttaaacgtgcacatgcacgtgtctcaagttaacaggtattaatatgatcttatttattctacggagcagtatacaaccaatatatgcgatgtactcgaaaaagaaaaaaatcttgacaaaggcattccgagtgacctaatccaacatattgtaataatggattatctggtttacatctccatttttagattgctagcttcaactagacctgtaaatggctgagggggaaaagatgctgttcgcccttgatcaaaagcaacgttgtaaaggctttggaaatcaccaccttcccaatttgaggagggtagaatttgagcgaaacaggaagagtcaagaaaagtttcgggcaaaggtacagtgctagtactaataatgttcgctcgag

SEQ ID NO: 1788 - DNA, 499 bp, Glycine max
cttctttaatggtataactaagtttattaccatgcaaaagtttccactacaatggcagtatttagcgtgggaaagataccttcatatttagcgcggatctacaattaaccttttagttttacacaaaaacaagttacaatactacaatttctcaagcgtttacagtacatgttgtatactaaagaaattatctaggaagtatgtaactccctgtaatcaaatttctcttcttccttgcctgctgaagctccaagtgtttgccctgcaggaggaccataggcacgacttattgcaagaaagtagaggtagttaatttgacctatgcaagtgagcagtgcataatagtaattcagatgtgccctgttaatgttggttgctaaccagctctcctcccctcctacactagtgaccttgtccacaatgttcactaacacactccctactacactagcagcagccacttcaagagtgaaaagagccattgcaaaactagacatgg

SEQ ID NO: 1789 - DNA, 679 bp, Glycine max
gccgccctttttttttttttttctatttttttttttttttttttctattttcattcgaattcattttatttatatattaatattatattcaaatgaaataaaaagatattaaaagatactaattataagaatttgaaagtgaaattataaagttattaaatgattaatcaatttttttctacctgttcctgtagtaaaaagagttccatctgttcttgaatagcttccttcaaaaggacttctgcttccccagtgaatgtcttggtagaagatatgatttctttgaattgaggtttattcgtgtttaagtaagcacgtaactcaacaagaaatttccttacctgtccaatttctaatgaatcaagataaccattcgttccagtataaatagttattatctgttcttccacggtaagaggagctgattgggattgtttaagcaactcgcgcaatcgttgacctcttgctaattgattttgagtagctttatcgagatcagaagcgaattgggcaaaagcttctaattctgcgaattgtgctaattccaattttaatttaccagctacttatttcatggctttaatttgagccgccgatccaactctggaaacggaaatacctacattaatagcgggtctgattccagcattgaatagatcggcagataagaatatttggc

SEQ ID NO: 1790 - DNA, 571 bp, Glycine max
tttttccaaagaaattaacaaagctccatgctttggaaaataacgcgaagatttcatcaagtggatacacagttcagtaagggggggcctccacaacataaattggttgtcgcttccaacacaccttttttccctctcgggttataaattgaggaaaagcatataagaggaaaaaaaatataaaatgagaaaagagtaaacctatatactttaattggcatctcctagcttattgaaatggaacatttatatatctcgtttgagatcactgatgcatgtacatgcctatcccttgttgttctatatgccttcacgggccacaccctacaaacttgaacgcatttcaacaagggtatcaaagctgttttgcacaattattgataaaagatggtgcaatacctagccttttagtatttcaaagtttaatgatcagctgaacacagcttcctcctgaaccgtgcgtgataattgatgcacagcagctgcaatttcatccaccgtgttcagctgacacccttcctctaccttaacactaactgaggtaaggaccatatcgtcaacagtggtaaca

SEQ ID NO: 1791 - DNA, 366 bp, Glycine max
atcgggcaaatattaaattaaatgggcaccgggtaagattcttttgatggtcatatgcggctagctagtttcaatagtgtctatttcctactagcttattcccagtaagcccacaagttagtgcatctcttgggatttttccaactttgtgaacaccctcagcaaaaatcacacccattcccatgtgcaaatggggttcaatgtgacaatggaaggcccaaactcctgggttatcagccttagacctcagagcagtccaaccatatggaaatatcacagcagtgttcctcaacggtgcatgggtcaaattgaatttcttctcatcacttggtttgaatttgccttctccataccccaaaacccaaa

SEQ ID NO: 1792 - DNA, 609 bp, Glycine max
ttttaaaaaaaaagaactttcaaaaccttatagtaacaaaaatagacaaccgtaatacaaggtacaggatttgcagtgtgtattggggtgcagcaatttcctttggcataacaaaaaggaaagagaaagtacatttaaaaagaatatggattcagacattcacaaccaaacaacacattgcaactagcaaggaatttggacaatcaatcaatagtcctatactgcatagcaatgttattgacacaagtatgcaagcatattacaactcatgcagatgcaggtaacgagatactgtttctctggctaccagcgcttggttttatctcccatgatgatagcacatgctgctcttcctcaggattgatgaaaggcaaagaaatctcacggatcatcaagtcgccacaaaatgggcattcactagctatagcatcatccagttgtgatcggagcttgtctatggtcatgctaggaatggactcctctggagaaagggtaccattggattctctccttgcttcactgcccatcaaagtaagttgcttctgcaggtccagtatatactcagcctgcaacattttcccaatagattcaatctgaatgacaatattg

SEQ ID NO: 1793 - DNA, 1000 bp, Glycine max
gaccctctagagcggccgcttttttcttttttttttttttttttttttttttgagcataaagcataacttttacctttggtgtatgaaaaaatgtcatttacatagaatgaaaccttaacagcacttattaagattaaatatactatctaactaattatatacaggtgttgcggcaagcctaagctggtaacattaggcgtcacgtgtagggagaaaattttagctcatacataatttaagaatacagcactgaacttgcgttcaagctttgcaaggcagtaatattcccaaatagcgttattccttttggaagaaagagagaacaatatctgtatgaacagagaagagctgtgtatccacgaaaagcttcatgaaaggctgatcacgataaggaaacgagtcaatgaaactctccttcaaaagcaaggataccttatcatcattggattgtacattggttattgtatgagaacgaatgttatagcaaagagaatccaaataagaccttaactccgataggaaccccttagcagcttctgtctgcacttccgtgcattcatacactggccttctcctacccaagtaactttctcccacaagagtttcatgataaggacgtaaagaagagattaactctttctgccttggcagttgaggtactgttgatgacttcacctggtttctgctgacgtcaatcaggataacattattagttaactttgactgaacttcattggtcttgttcttgataccaactatgtaggggacaggtgcatccagaaactcgagcatgccatttggtaaaactggcataagcaagctttgccattggtagggccggattagtggaataactgatcaaactgaagcagataggattccccaattagaacagacaaaaacaatctgcttctccagtagagctcctgcaaagaatgttaacacattttcaagtctcaaggtaccacacatgcatgctacagcccatatagataatgc

SEQ ID NO: 1794 - DNA, 410 bp, Glycine max
ttatagaataaaattagggacatattacactttatttcaaatataaatggctgcaatgataagcatatgaagctcattaaagttatgtgaaatttctcttacatgcccttttcaagggaatgggcggatctgtgaaagccccagaagagattaaatcaaagacaaccttgctagctgcttcagtgtagtgggttccatcccataccactctaacagatggtctttcgcatgaacccacaacaatatttgtgccattgacctgtatggttcctccacatccaacactctggctgaagttgtacgtccctccatagccacaacaagcaacatgcgggagttcaaagccatatttccttgggtttttgaatagcaagtacttagcagagtagatatctacatatgtaattgca

SEQ ID NO: 1795 - DNA, 1437 bp, Glycine max
ttttttttttttttttaataataataaagtagattatgtatgaattgattcacatacatacaaacaagaagaaaaaaaaaaaaaaaggcaaccaagaaggggtgtcggttatttacgcataaagacggagaatcaacataaaataaaatttaataaaaaaatggtatgtaattacagtatgagaccaaaatgacagaaaatttgtttttgttatcttccgtgtaatcgctcgctctccgtttatagattcaccatgcatccatcctttgtattgaaatgactactctacaacattcttcgagtttacatacattcactctttattatttttgtgattagttgagaatgcgatttcattggcagacttgtccaaaagatccaaacatgctacaggcgacttccatcaacttccctcttcttggtttaggagcagcaaccttaacaagtggagtggtgcggcgagtgcgttcttcttcttcttcaggagggataagaacgccgtcaattccctgaacggagatcctaccatcagtgtaaatatcaggatcaaacaggtaggcggaggaatcgccgtgaccgaatttaacggagccgtcagactcttgagccagaaccttgtgcggtaaccgcagtgtatcgtagctaaccttaccgaaccttctaaccgtattgtacatactctcttcggtttgatactcaggaataatgtgataatacattatctgttccggtgcgccaggttcgctcaactgatccgtcgttaacttcgccatggcttcgtcgtttggagccaaaacggtgagaacgtaaccttctgaaactagccttcccatttcggtggccagagacgttaggtttacgagaatatcagccatttcgttgtaacctccgtaatgtaagagtgtgtggatgaagtccttgacctggcgctcgccgttgaagtggtgcttcgggcctcccggtccccggcgccggcgccggcgcgagggatgggcctggtgccatggcgtcgtagattgggaggaccggaggcgcgccggcgggaacgggagcgggcttcttgaggcggtgagtacggggatcgacctccggcgctccctcgggaaggacggcggagatggcggcgaggttgcggcggcggttgaagtcctcctgtacggatcgggggacgatgagacgctcgatgccgtggatgacgccgtcggggcggaggacgtcgtcggcgcggaggatctcggcggagtcgacggttctatggccggagggcttggaggccaaatgcaggcggtgatcggagagagtgcggtggcggaggtcgtcggagggccagtggtgagaggcgattcgcgtcgggagaatgtgagacatcaagagcgtctgaagcgacctaagattgcgaggctcgagaaggaatcgcttaaattcagggtctaggtc

SEQ ID NO: 1796 - DNA, 576 bp, Glycine max
accaggacagaaaatttgtttttgttatcttccgtgtaatcgctcgctctccgtttatagattcaccatgcatccatcctttgtattgaaatgactactctacaactgcataatgcatgggaaaaaaaaatgattcagatcatactgttatccaaagaaatgaagaaacccaagcaagcaatgagtggtgggtaaaagtaaaacttaccattcttcgagtttacatacattcactctttattatttttgtgattagttgagaatgcgatttcattggcagacttgtccaaaagatccaaaagcaataataataataataataaagaatacctcttcttggtttaggagcagcaaccttaacaagtggagtggtgcggcgagtgcgttcttcttcttcttcaggagggataagaacgccgtcaattccctgaacggagatcctaccatcagtgtaaatatcaggatcaaacaggtaggcggaggaatcgccgtgaccgaatttaacggagccgtcagactcttgagccagaaccttgtgcggtaaccgcagtgtatcgtagctaaccttaccgaacg

SEQ ID NO: 1797 - DNA, 1228 bp, Glycine max
ggcaatcaatgttatttaacacgacgaagtttatgtaacgaccatatcatcctacattgtatgatgaagcatgccaccggtcatttttcttctcagtcaggtggtgccacaattctcaaattcctagacagaagaacataaactgtaggcactttacaaacacaaggaatgcagttacaatttacatgcagtcaagatacatatagtttctccgtcgattgtactgaagaaggcttccataggtgcgatcccagacaccaataaaaagtgattctgtgtcagggctaaaagatacaccagagatctccccaaaaaaatcgatctcctgctccttctcaaacccatgctgtgcgtcatacacatgcacaaagtcagctggctcggccatcgccatgaactgtccatcagatgtgaaacgtattgagcgtatagctccaagattgcctttaagaacagcaacggattttgacaagttccgaacatcccaaacacgacatgttttgtcttggttcccagtagcaaatatgtggccatcaggatgccatgcagatgcaaatgagaaatccaagtgtccacgaaaaggtgtgatagtctttcctgtttgagaatccaccagtaacccttctgggtagtctccaacaatcacaaccagtttcccatctgggctcaatgaagtgtgatttacgggccatgagaaggagaaatgcttggaaagctgaaatctttccatgtcaaagtctctaactccacagtcattatttgaagccatgaaatgaacagccccacttggatgatcataaatctcaacagcatttgttattgcattgtcatcataagtagttctagaacaaaagctaacaccaggtcgatctacatacttgcaaataagttctccttgaaaacccccggcaatcaacaacttatcccgcacagccagtgtactaatctgtgtctgagtaaatccttccaaaaggcttccaggatgtttctcacatggagctacatgccctgatacatttaggatttcagatctcttggaatttaaagacgaccagtgtataattgagtaactcgaaacaagatatacatcatgctttgatgttgcccaaaccaagcggacgcgtgggcggtgatcatatgattgtattttcttttcactttttttcttctttagagacctctgattcaattgagtaaaaagtttttttgtttaaatcggacgcgtggg

SEQ ID NO: 1798 - DNA, 465 bp, Glycine max
  unsure (1)..(465): unsure at all n locations
ctggatcctctgagcggcccgtttnttttttnttttttttttttttttnnccggtacaaacatccttcacattattaccgtcgggaaaagattaaaacagacattggcagtcaatgttatttagcatgaaggtgtacatcaaacaactgtagcatcctcaagccatgctctacaatgtatgatgaggcaatccaccggtttttctggtatgatggtacaattcctaaacactagacaacacaacataagctgttggtacttacaaggtgtaaggttacaaatttacaagcagtcaagatacatgtaatttctgcgtcgattgagctgtagaaggctttcataggtgcggtcccaaacaccaataaagagtgattctgtatcagggctaaaggatacaccagagatctccccaaaaaaatcaatctcttgctccttctcaaatccatgctttgcgtcatacacatg

SEQ ID NO: 1799 - DNA, 819 bp, Glycine max
catcataagtagttctagaacaaaagctaacaccaggtcgatctacgtacttgcaaataagttctccttgaaaccccccagcaatcaacaacttatctcgtacagccagtgtactaatttgtgtctgagtaaaaccttccaagaggcttccaggatgtttctcacatggagctacatgccctgatacattcaggacttcagatctcttggaagttaatgacgaccagtgtataattgagtaactcgaaacaagatatacatcatgctttgatgttgcccaaaccaagttcctcaattggaaatgaagtattgttgatttcacagatcgagtgttttgccagaaatcataatacttccctcctctatgtgttggtgtgcattccttttctgaccgttcgcctgattgaggtatattttcatagttcttgtactgctctagtctagtttgtctatacgtctcacgactaatgctaagtctatcccaaggaataccttggatatcctttcctttcctggcttctgcagcagaggtatctgtcatccgattttccatggagtcatattcatcatcgtcatctgattcggactctgaatcaccaaacactctaccacggaaatacatgtcatcttctacttccgccatttcattatcatcagcaacatactccatttcgtcctcctgttgttgagccatgttgcttggcttggcttgaagttgaattgaagagagaggatctgatctgctgcgtctgcgacaatgatacttcacccccccgttctgtcgactaccgcagccgtactgagccgatgagctcgaga

SEQ ID NO: 1800 - DNA, 404 bp, Glycine max
ttttacaaacttccttcattttattaccatcggaaagattaaaacagacattgacagtcaatgttatttagcatgaaggtgtacatcaaacaactgtagcatcctcaagccatgctctacaatgtatgatgagacaatctaccggtttttctggttttgctatgatgtaccaccatactcgaatacctaaacaatagacaacacaacatgagctgtaggtacttacaaggtgtaaggttacaaatttacaagcagtcaaggtacatgtaatttctgcgtcgattgaactgtagaaggcttccataggtgcgatcccaaacaccaataaagagtgattctgtgtcagggctgaaggatacaccagagatctccccaaaaaaatcgatctcctgctccttctcaaa

SEQ ID NO: 1801 - DNA, 473 bp, Glycine max
gaggtggcggtgataaataaggataaacaggttgagcgggtgagtgatggggtggcggagagccgtaattatgagcaggtggtgtaggggaagaatgtggcggtggcaaatacactggagaaggaggactatgaacaggtgaaggtgtcacaggtgtcgtaggtgaaggaaagggtgaaggagtagaaggcgatggaggtgaaggtgttacaggagttgtaggtgaaggaaatggtgaaggtgtaccaggtgacggaggggaatgtgaaggtgaaggtgttaccggtgttgtaggtgaaggaaatggtgaaggtgtaccacgtgacggaggggaatgttaaggtgaaggtgttaccggtgttgtaggtgtaacaagtgacggaggggaatgtcagggtgaaggggttaccggtgttgtaagtgaaggaaatggtgaaggtgtaccaggtgatggaggggaatgttagggtgaa

SEQ ID NO: 1802 - DNA, 612 bp, Glycine max
aacccttaaaaaaaattccattgttaatgaatatgaataacaaaactagggcgtttcagcctcaatattttgaggtttgattattcaccttgcgtacgagccaacgttgactgtttgattcactgataatcctacctgtgtactcagttctcaaaatttcatgtactagcagaataaatcgatgctgccagagtatatggagccatttatttctagaaacttgtgagggtttcttctgtaaatgggaaaggatatggcaagcataccaacaagcctaggagtaaaactgttactccaatagcaacatatttctcaccaggatcagttatttcctcagaaagaggagcaattggacctctttgcaagaagaatatgagaactacccaatagaaagctacatcattaagcagtgccgagactcccagcaacgcaattgaaacccctgtgaagcgtaatgaagcctttcttccccatagggcaaacgaaattctccctccatcaagctctcctgcaggaatgctgttgatggtattgatgaggagtcctgcgtaagcccaaatcacaggagggttgatagaaattgcagttccctcgagccgattcgctcgagga

SEQ ID NO: 1803 - DNA, 464 bp, Glycine max
tagatgcataacaatatgccagatattaatattgaaatgtatttatttcagattttggtttccacagggactattgtttgtacatgagaaggtcgcttttgtggcaatcctgaataattccatgatctgaacctaccacagcgcccagtgaatcaataaagctcacgcaacttacaacttggagtccacacccacctcaatgatactttcctaatgcttttctgaccaatgtgcatttgtatgggaataaagacaactagaggcccaaacccaattgctccatcaagggaaagaacctcactaaaaaacggcattaccatcgcaagaattgtggccaatattacaaaaatcgtcctccaaactaatctaaacaagttgaaacggaccattaaaccgcccacaatgaatggatattccttgttaatgaaatctgaatttggccaggcgatgttagcacaataatc

SEQ ID NO: 1804 - DNA, 1634 bp, Glycine max
aaataaatgtgtatactggtcttgctataggcataaaagataatgtgtaacaaaatcaagcattaagtttcagtgttgaagatcccaaccaaaacagctatgacagaaataggatagaaaccaaagacataagaaaaagacacacgacaaaaatcagcattttgactagggactaaaattttgtttctcacttgaagcacttagcatccaaaagaggctctccctcaaatggttcataatcctcgatcatctgattgacgcgctctttctgagtttcatcagagatgtcaaccttggtccagtcgtagagctccatatcatagcattcatcaatcacaaattgtggaatctcttgcccacggaaaagccacaaccccttcaccttaaatggtggatctgatccaatcacaagcatctttccaaatgcatacttgcgagccaaatccatccgctgaagaaatccaccaaccttgttcaatgtcacaaaagaaacagtattctcctcattgtatttgtaatcacaaaaccagagagagtatccctcgggatcatacatgtcccaaaatcctttgatagcaacctccctgaagttggttttagtgtttgagtagagtcttttccactcatccagtatcatcggacttggagggagaagatcaaggggattcttgggtttgggcttgggtgcctcctcttctgcttcttctttgggcttttctggctccttgtttgcctctttctttggttcatcttttgccttggccttggattcttttggctgggaaggcttctttgcagattgaacaggaggaatagcttcagcctgcttgacctgcccaattatttttcggaagtttggctgattgaccaaggtccaaaagtatctctcaacatgaggaaactcagaggtaaagctcttaaccaggatgtttgcaaaacccaaatacaaattgcatgtcattatgatgtcggccagggtcacagaatgcccaaccaggtaagtattggaagcaaggtgtgtgttcaaagcacccaaagctctctttagtgcagaaattgcagcctcctcagctggaggaagatatggtcctcgtccaactcttggggcataccacttgataatattagcatcaatctccaatgatgaaaaatcaatccactgttcaatgtgggcatattcaatcaaggaagatccatacaaagtgttatcacctttcagccgggtaacatagcgagcaatggcattgctctcgaatattggaccatcgggggtttccagcacaggaaccttgccaataggattgatcttgagaaattcaggagttttattggagacacccatctcaaaattaggggcaaaatcaacttggacgccagcatactcggctgcaatgagtgtcttgtaagaatttttgttggttttcccagcatgcaggatctagaaaaggagtagattactgagtgactgtaactctgttaagcgtaaatctgagagaaaggcttagactcaccagcggcgtcatggctggaaaaacaaaactcactcctcttgattaagatctggacagtgcgagcgaaaaatcaaatctcagcacaacacaacataactgcttggagagggaaatcggacgaaa

SEQ ID NO: 1805 - DNA, 522 bp, Glycine max
  unsure (1)..(522): unsure at all n locations
agcaaggtgtgtgttcaaagcacncanagctctctttagtgcagaaattgcagcctcctcagctggaggaagatatggtcctcgtccaactcttggggcataccacttgataatattagcatcaatctccaatgatgaaaaatcaatccactgttcaatgtgggcatattcaatcaaggaagatccatacaaagtgttatcacctttcagccgggtaacatagcgagcaatggcattgctctcgaatattggaccatcgggggtttccagcacaggaaccttgccaataggattgatcttgagaaattcaggagttttattggagacacccatctcaaaattaggggcaaaatcaacttggacgccagcatactcggctgcaatgagtgtcttgtaagaatttttgttggttttcccagcatgcaggatcagcggcgtcatggctggaaaaacaaaactcactcctcttgattaagatctggacagtgcgagcgagcgttcttcccaagcacaactgctccc

SEQ ID NO: 1806 - DNA, 412 bp, Glycine max
catcaatctccaatgatgaaatatcaatccattgttcaatgtgggcatgttcaatcaaagaagatccatacaaagtgttatcacctttcagctgggtaacatagcgagcaatggcattgctctcgaatactggaccatcaggtgtttccaacacaggaaccttgccaataggattgatcttgagaaattcaggagttttattggagacacccatctcaaaatttggggcaaagtcaacttggacgccggcatactccgccgcaatgagtgtcttgtaagaatttttgttggtttttccaccatgcaggatcagaggcgccatggcttgggctgcaaggaaaaacaaaactcgctcctcttctcttgattacgatctggacggtgcgggcgagcgttcttccgaagtgggcgc

SEQ ID NO: 1807 - DNA, 333 bp, Glycine max
  unsure (1)..(333): unsure at all n locations
nnntcgggaaaaagaaaacctatcaatgtaattaataaatgcttacatccaacataaaaatatagcacttgtatattagtctagctatcattaaaattaaaattaaaaataaattaaacataaagtttcaatgtgaagaaaccgtaccctaccaaaaacgaagacacattataaaagtagaccctttcaaggaataaattttcacttgaagcacttggcatccaaaagagcctcgccctcaaaaggttcacaatcttcaatcatctgattgacacgctccttttgaggttcgtcagagatgtcaaccttagtccattcgtagagctccatgtc

SEQ ID NO: 1808 - DNA, 286 bp, Glycine max
ttaacgtaacaaaggaaactgtgttctcatcattgtatttgtaatcacagaaccacagagaatatccctctggatcgtacatgtcccaaaatcctttgattgcaacctcccggaagttggtcttggtgtttgagtagagtctttgccactcatccgggatcatcttgcttggaggaagaagatcaagaggattcttgggcttgggcttgggtgcctcctcctctggttctgcttcttctttgggctctggtttagccactttctttggttcatccttagccttggg

SEQ ID NO: 1809 - DNA, 561 bp, Glycine max
  unsure (1)..(561): unsure at all n locations
nnnntttttaatttttttttgatgtcaaaagatcatcatattgaatttctaatgtacaacttgatattgatacataaccagtgaaataaaaaggagaggaaaaaaagagtctaaaattataacaatgctgcatgatacaattgtgagaagtatcgtatttcagtattgtactgaaggtgcaattatacggaatatggattctatcccaaccaaaattatgttgttgggcagtgtgagttgattctcttgatatgaacactagaaatctctttatgcaggtggaagagggccccggcaagtagggcactccatctttatatccatccatctttgcaaacagccagagtggaaaaaatgatcacaaggggtcaccatgcaatcattagatcgcggagaaagatcaatggctgtcatgcatataacgcagtctgtggcatgatttgtatcttgagcaaacctccgataatagcagtatttctcaggtagaaactgacgaggaatgaaccacanggacccaaaatggtgctgaagcaagagaattgcagcttgaagtccaacaaa

SEQ ID NO: 1810 - DNA, 623 bp, Glycine max
taaaagcaatgccacaatcttgcaaaatgaaaatgaataccgtcactcaacaacatgtaccatttgaaagcacgacccacaaaagaaaacgatttgaaagcaatgccacaatctttggttttagtccaaagaagcatgtaccatttgaaagcatgacccacaaaagaaaacaaactcaacaacatgaatttaacatacatgatatatataatagtttgcattcattttacttctccatgtaggaccaaaaaataagtctcatagcaatcacagaatagatcctttagaacttttcccataattaaaaaccagcccatccagctggttgagaagttgacttgtttgcctcaccaaaagcctgagactttgttcctgcactgctaggtctttgcatgtgtgggctgccagcaggtacagcactgaagctatctgatccaaaaccccatgaatcaaaatcagtagctagtgcaacaggttgcttgttctgctgaccatttttcaccctgacggatttggaggtattttcagctgagaaggacttttgttgttgaggttcctctggaaaagcatgccatgacttattcgcagatgcagatgcagatgatgtaactgcaggagaggtt

SEQ ID NO: 1811 - DNA, 1200 bp, Glycine max
accatgaacaaaaaatcttgattatgtcaacatcaaataaaagttatccaacagccgaattggacgtaaacttcaacagcataacttggtttataaatttaaaacttgcgccgaaggcagcaattcacaaaattgacaatataatcaagaaccgacaatgtaacagctacgttacgctgagaaatgcaacaccatactgtacaatgatattttagacgtaaattatccacacagtaataactcccgcaagacccttatttatccttagtagcacaccatctatggtatttaggtgtctgagctctacaagaaactccattgtcaacaaaagacatccatggaatgttgcttcaaagtagtgagcaaagatggtccaaaaactttccaggatcatttcaagcgcccaattgtatttggcagacagctaaatgatataggaactaaggaaacaggaactaaggaaacatcttcaatgaagttatgtctgaatattttaagccaaattaaatgcatcatagtactttcctctcttgtatagtaaaagaattttttttaaccacacactcatttacttgtaagaatctgtcaaccaaaaagagacagaatccagcagctagcaaatggatgctccaaaactgtaagtcagcaagcttatcacaatcaaaatactctaggtaccagaacttgctttttgaacccaaacttgtttctcgttggaaccataagcagatgtactagatcttctaggatgcttcccttcacttgaaactgaatagccatcaacatcctttaccccatgtgatggtccacgacgaccaaaatgcttattgaacccattttctgatgagtgactagtacggacacttccaagagattttacctccccacttcttgcatttggcgtgtcatgtttcaaatctgcatggcttccttccaaaggatctacttgtgaggaagcagaagatgagaaagagtcgtcagctccattggaacgacttgtccagacaccacgatcaggtctatctttatgtctaacatgtctctcctgcctctcactagacccatgtgaatcatgcacaccaatcttattctctggtgtcccattagagcccttcaaaattagttggacatgtaaggggcgaggaggctgtttttctttttctaaattggatgtttggatttgctgctcggagagggccc

SEQ ID NO: 1812 - DNA, 567 bp, Glycine max
agacggaaattaatttccacactggaataaggcccgcaagacccttatttatccttagtaacacacaccatttatgggatttaggggtctgagctctacaagaaactccactggcaacagaagaccgaagacacgaacctgaaacattatccatggaatggtgcttcaaagtagggagcaaagatgggccaaaaactttccaggatcatttcaagcgcccaattgtatttggcagacagctaaatgatttaggaactaagggaaaaggcacacaatacctcgaataggggattgcttatacaggaactaaggaaacgggtacagcataccctggatttatattgacactaaaaccactcaagattaactgtgtataaacccagactatgctcatactaggtcaacttgccaagatatgcaatcttatccataattctttcttcaaacaagcaacaactcgtaactgggacaccaggcaattgtgacaccacttttcatttctctttttactagggaaccatcttcaatgaagttatgtctgaatattttaagccaaattaaatgcat

SEQ ID NO: 1813 - DNA, 595 bp, Glycine max
aaaaagactgaccaatatgtaaggagacatgatttgacatttggaaaaatatgcatatgaattggtgagggggggacaaaggttgatgagatgagatgagctgggaaggaccaaagaacgaaaaaggaaaagaattgaaaagggaagaaaacaatggatgacacttctgcacctgctcctacaattgcattgcttgtttcagttggagcaagtcgagcagctaaggttgaccaacaacaaaacacacaatgtggcaatggggtaacaacataaaaccatattgacatgtgtaatttaatgtacacttgtcaagaaaaatgcaggatatggtaatcgaggtgtgaggaaagaaagcaatggatacgatgatgatgattttctactataatatggtaaaaacttgagaatcaaacacaaaagaaaaataatggatggcctctttcattcacatggctatggttgataatacatgctagcactgacggcctcttttgcaacctagtgcacaagcattggaagtcatggaatcaaccatggaagaagattttgctcctaagctagaggctctagcatagctggctgaggctccagcaca

SEQ ID NO: 1814 - DNA, 494 bp, Glycine max
aaaaagcaacaccacaactattacaattccataatcgtccttgataaagtgtttccatgtaactagactttgacaatcatgctttttttgcttgtattattaacttaccaaaccaatagttaattaattacaggggagtaaaagaaaaatcatattggactcattcaattcaaatcctataaaactgaaaatgattgaacagtatgtaaggagacatgagaaaaatatgcatatgaattggtgtgggggggggggatgagatgggaaggaccaaaggaagaaaaaggcaaaaaacaaaaagagtaagaatgaaaaagggaagaaaacaatggatggcgcttctgcacctgctcctacaattgcattgcttgtttcagctggagcaagtcgagcacctaaggttgaccaacaacaatacacacggtgtggcaaaggcgtagcacttgaacccatctcggcccgaatgcagagttcatgtaagcttggtctgacgt

SEQ ID NO: 1815 - DNA, 424 bp, Glycine max
  unsure (1)..(424): unsure at all n locations
nnnnnnnnnnnnnnnnnnnnnnnnnnnnnnnnnaaataagaaactgtatctaaattttatcgattatgtaccgttgtaggcttaatactactcaaaatacattgcaaaataatcgccggcgaccaaattcacctcacctcatcccttttgccccatcatctcatcatatacaatgtgaactaacgaatacacttccaattgaggccaaagagcatgattcagaaaatttaataccatttaatcgataaatacagaaggaacaaaattatatttcacaattgcatacactattcttttgtccgtgatctgttgaggtcatctttcctcgtggggcgtatccttgtttaataaaatgaacaaatgagtcgtactactcacctaagcaggtggtcctatcctttgttgtgtgtcacaccagttccat

SEQ ID NO: 1816 - DNA, 666 bp, Glycine max
aaataaatttccttgatttgccaccacgctggtgagtaggaagcttcattgccattttgtcatgttaatgacatagtttggaaaaggtaaacaaacggataattttgtaaatcatggggttggatgcttcccaacagcacaaactgaacacagtgcctccctacagtttaatcagttggcacagtgcaaagcgacccatgtccaggactatgctctagaggatacatggttgttctcttcacataccgtaaatgatcaagtgcagcctttctgagctttgaaactgcatttagatttctttttacttgcttcttaattatggaacatgcggccagtggatcttcagatcctgctccaactctcctcagtaatttctctgatgcaattctagcaccccgtatagtatggtggcttggaacccattttacaacacgatttagatcagctcgcatgggagaatgaattttgataagccccaagcactccatcatctggtaataagctctaccatgcaacggggtatggccttgacgggattcagagaaatatctagtccattctttataaccagcatctacagtgaaaccatacatatccactgaatcacacatagagagagcaaattcaagagctttaagtccagttccttttgctgctgacccaaag

SEQ ID NO: 1817 - DNA, 1250 bp, Glycine max
atatataaacaacccatcttaaattgacaacgtgcaagatcatacaggtattcgaagcagattacttcgtgtgcccctagcatttaacctagggaacgaaggatcaagttacaaaagaatattattttaaaagaatttgtttgggactatagaccaaaaaacaaataactgtggctatgtacactagcaagataaataatacaaaatttagacaaaaatttcttttcaaccgtgttccaatttcaaagccgtcacagtaaagacggaaacaggtatatcacttgttagaccactgaaattcaatttctaaattcctcgagggtccacttttactttccggcaacagagtgtactcaccagatactgctccaagcattactacccgatcaatctggatcgtcactttcccaaatgaactctttcccattttgctcttgtttttgcaagaaatgtgaagcttctgaccttttggaggactctcaaacgaccatgtaaagctctcatcccactccggattagggccagttgagaccaccttggtttgccttggaggagtgttgccaagtgtaagcttgcagtaaacacttgggtttccaacagactgcttcatattgttaccacgcttgatgatcaccaccaatgttcctggcaaacactgcaataaaaattctgccttctcctgaaagcgaggtgggccagactggattaagtactgcagcaaaggaatagcatctgcagctgctattgactgagctcttgaaacttctgctggacatgctgaccaagcttgcctaagcaggaaaagtgcatccaaggcagcttcctgagtagcctcagagcctgtctttaaggacgtaaccaaatggggaatgctaagtgttgctggttcagttgctctcagtcttgggaagttgctaaatagagaatttaaggctttaagatactcatcgttcacagatccagtagcccataagtccttttcaatagcagcagttattgctctgactgtttcactagaagcatactcttgaatggtatgatttgaaaatagaagtttaataaacattgcagcctgaacagatgtttcaggatcacttgaacctatcagatccagtataacctgaaccccacccgcctctgcaactgctcttttatttgatcgactgtacatcacaaggttttgcagagcacatatggctacaactttcatttcttcagttggttggtcttcaagcacattcactaaagcg

SEQ ID NO: 1818 - DNA, 598 bp, Glycine max
aaaggcaagcacaagctccattatggatccacactacaagtacgacaatatttgtcactgttattttacattcaatttagcgtcaaataattatactaagtcgtcggactcatacaagccccaaagcaaaaaagacaaaaacagactcgctatatcactttaaattgacaacaagcaaagaatcatacaagaaactcgaagctggcctgatcttcgtgctcctagtgtttatcctaggaatgaaagatcaagttacaaaagaatattttgacaaaagaatctgttttgaccaaaaataaacaacagctatatacatgtggtgtaataaaaaaaaaatccaaaaatttctttccagcttgatctttaacgttccaatttgaaagctggatggtatcacttgttagaccactgaaattctatttctagattccgtggggggccacttttactttgaggcaacaaagcatactctccagctactgatccaagcattaccactcgatcaatctggattgtaactttcccaaatttactctttcccactttgctcttatctttgcaagaaatctcgagccgctcgagccgattcgctcgagca

SEQ ID NO: 1819 - DNA, 731 bp, Glycine max
gttaagttgtacacctcagccatatcataactaatcagctgaacttattaagaataatgcccccggtcaggtttcttagagatgacaaatgaaatccttactttaataacaaaaatgttcaatgcaagctcttccaatataaccaattcgcgtagttcacccctccatggaactggactttgatcagcagaaccagcaactctatacatagaactctggtggcagcgaaaatatactgcaaaaaattatatatagtctgatctgatccttaaaggggttcaagagaagtgtgtctgagtggaactgcggaagtgcattgggcttcattcataggggtaacttgattttctcagaccacttgaagatatcagaatacactttatcacctcctagatcttctcctttggctccagcagccactcttataacatcctcaatcaatgcaaagtttcccatgatgtcaacatgagcaccactttgtgtgccccttccctctagaaggttggctggaggagaatgatcatattctctaacgtaggtgcgcataccagacgggttgaatcttgtttttccgcgccagcctttagcacacatgtagcctgaacttagaactggcacagtctcatccccatcaacagtgtagactccaccttgcagacaactatcttcatcacttccaccatcttgcgtggtgtcaatttcaaaaggaatgtaacactcggcctcgagcc

SEQ ID NO: 1820 - DNA, 766 bp, Glycine max
ttacatacatgatatattccttattatcatcatcatggggttaaaagaaaataaaataaaaaaacttttttggaggttattccagccacaaataaaaattttttgggcaaattggtttggtttaaactttaaactatgaaccaagattttgaaaagggtctaccggggcgggggatcaactttcgttgataacccagcaatgaacgccactccggtagagggcaaccaggacgagcccgatataaactggcccaccgtgaatctagacgcttccaccgtcgaattgatggcccgatagccggcccaattaacccgttggcccagagctgaacccggcccataattcatgtattcaccataataacacgtgtctaaagcaaaggaggaagtgttccactcgagccagccacgtggatgcacgtggtcccctatgtaggacagcatgtagacggttctagcgtaaagtttccaaggacggcccagataagtggggtagctacccttggatgcttcaagatccggcgtggccatgatcctacaattgtggatcgaaatgcccgtgttctgattcgggtcctttcggttttgggccgtgatggtgttcttctgttgggccatgggctgtcgggcccagagggtgcagttttggaacaccaccgcgcgttgccgaatatgaagtccacggttccgtaaaggtcgcattctcggtaaaattgacggttcgaggtgacatacattgtgtcttggtgagccgaatcgctcgagg

SEQ ID NO: 1821 - DNA, 437 bp, Glycine max
gggattaaaaaagtcacggcatttgaagtcactagctagaccaatgcatagttcaaaagactatggatttcgaaaagaagatacgaccacaaatgtagcattatacaattattcttgccacagaccaatgtagtattactcaattaaacaaaagatcattcattactcggactaagatacgaccacagatgtattgctctgttgcatttaaatgatatgcatactatggaattcgaaaagaagatctaacttaaagttactaccttttttttatggatccacacataaatttacccctgacaattcattattcaagcaaaggcacggtgcagaagagttggcccagactatcttcgaaaacttgccttacatttgctcggacgcgtgggcggacgcgtgggcggacgcgtgggcggacgcgtgggcggacgcgtggg

SEQ ID NO: 1822 - DNA, 382 bp, Glycine max
  unsure (1)..(382): unsure at all n locations
nnnnnnnnnnnnnnnnnnnnnnnnnnnnnnncataccccaaaagacttacccggcatggattcttgccatagagcaacccattattcaattaaacaaaagatcattcattactcagcctaagtaagacaagaccccaaatgtcattgctctgttgcatttaaatggtatacatactacggaattctaaaagaagatctaacttaaagttcctccccttttttttggatccacacataaattgacccggcaattcattatttatgagactaaatattcaaccaaaggctcggtgcagaagaggtggcctagactatcttcgaaaacttgccttacatttggctcagtctttactatgaagttctttttttctccattttccag

SEQ ID NO: 1823 - DNA, 783 bp, Glycine max
  unsure (1)..(783): unsure at all n locations
gagttaaatcaatagctggttccactaaaaattccgattcaatcatttaagagtaaccacaatttcccaatttaaatataaattaggttttatattttcaacggttttccatctatttgcatacactttcatccaggctgcaattattggattttgctaatctccaaaaattagcatacatgcccaattggagcaaaccaactaactaaccaagcaatttaaccaaatcaatttattctggaaacccataagcaacaatacaacacctatcaacgaatatcgagagtgccgccgctcaaatggctggttgttgctgagtaatgcaatgtatatttccaccggccaaaacaatctccctggcaccttcaattcccacaacttcatgatgagggaaggccttagataggactcggacagcttcatcatcccactttttatctccaaattgtggtgcaatgatagctttatttgcaatgtaaaagtttacataggaagcagcaagcctagtacctggaagtcttggcttagcctcattatccagagaaaccccagcagcctcgtcctctgtcatatagagtggactgggaacatggagtttaatgatttcaaactttctaccattagcatctgtttcatttgaaagcaaagaatatgcttctacagatctttcatactgaggatcagtttcatcatcaatccaagacaggncaataacccactggnntgccgannnattcctgcccaagcccggnnngggatcnncnacatagttctaaaagagcg

SEQ ID NO: 1824 - DNA, 1964 bp, Glycine max
  unsure (1)..(1964): unsure at all n locations
agcttttcatataagtttattattannttatttttgctgaaggtntcgacatgatatnnaataatatcccactaaagcanctcaanagtagcagcaaaataatccacgccttcaaaacattatacaccagatgtgaacacgataatatccttggtcctcgattgttttctcccttgctaaaagcgccgtttatttaatatttccttagccgcttagctgtataatacaagcccaagtacatggaccatggaacctttctcgcaccgctcgggagaactattgaactacatacattacaatatataggcacatttttattcttttcaaaacaccatatttacgatttacgagtgctccaacttcatttaacattgacaacttcatcaataacctcattctgttttcttccattgcttccccaatactggttatgcaatacgagagagtcagctgggactttctttccgtcatcattgcgataccagtggtagatagcatgggtcctgttttttatctccagtgtggcgtgtccatagctcgcttctctgaatgcagaatattctggctgtggatccaaataacttgaggcaagaccttctagatttcctccatctccgattgttatgtaaataggtgctgatttgtcaggtatgggataccttctaccgccagttatgttgtagtctatattagagtatcgatatgatctttcataagcatggacatggccagcaaagatcacatcaactttgtattggatgaaccagctctcaaaaacagatcgcatgctttcaccctccatatagtgagctccattactattgtagagcggcacgtgcatgagcacaatgagccaaggagtcttctccctctcaactcgcttcagctcttctttaagccacatgtattgaggagtgtatttcacaaatggtgaatagctggatagcacaattatatgagcagacgcacgcctgactgcataccagaggggactggagctattggaggccaagtagggagtagtatatcggtaaagatagtttttgaaaggttcaacttctcccatgtcaggcatatagtctatttcgtgatttccagcagaccataaccatggatgatatgctgtactcctttcaacaaatcgtccccatgtatcccaccgtaaaccaacatcattgtactggtacccatcagcataagaaagatctccaacaaataagacagtctgcgctccactttgtatataatgctcaagggtggaaagagaattaaacgtttgccccaaatcaccaatgatcccaaatttgtagggagaatctggatcaactttgggaggtgttttgaaccaaaattctcgagaagaatcaccacttccaattctatagtagtatttagtctcatactcaaggccttcaataagacagtgatgaatgtagccagacttgtatttgtggaaagtatagtttgtaactgtgccttcttcactagtttgaaatttattctctgatgtgccatactgtatatggctgtgccctggctcttctgtggtcacccatgagatgattactgcttttccatcatagtcaccttgcgtgatgtgcacttgttgaggtgcattataaccctttggaactgcaaatgcttcatgatcaagggggatgtcaactgccggccactctgaccgaatgaaagagctagtgatccctgcactcccgtctctgataaaactcaagaagacaaaggaagcaagaactaaattaagcaacatggccagcagcatccttctttccaacggtatgagtgttgtctttatcagcctacagagtcctaaccatcttggaatgaagcatttgcagagaagagagcgaaaggaagccaaccacataaaagagcgataaatcgatcccacgcgtccgcccacgcgtccgcccacgcgtccgcccacgcgtccgcccacgcgacat

SEQ ID NO: 1825 - DNA, 560 bp, Glycine max
cactgaaatggaagcataataatttgcgtttaaaaacctatcaatagataatatgttcttattttatttttctccagcaagctcatttaatattcttattagcgttgtaatacaagcatacaagccaaatagtacatagaaccatttccaacgtcctgcatttcgctcactcagacactattgaactgcatatattaatcaaggggcacatttttatccttttcaaaacgccaaatatgctagtgcttcaacttcaaattacatgctggcaacttcatcaataactttcaatagaaaatgcttcagttttcttcttctgcgattgtgtccccagtactgattatgcagtacaaaagagtcagtcggtactttcttgccatcatcattgcgattccagtggtagatagcatgggtcctattttttatctccagtgtggaatgtccgtagcttgcttctcgaaaagcagaatattctggctgtggatccaaaaaccttgaagcaagaccttcttgatttccaccatctccgactgttatgtaaacaggtgctgatttgttag

SEQ ID NO: 1826 - DNA, 429 bp, Glycine max
aaaaaaaatttgggggtaaaaaaaggccaagacttgtagttatagaaagtgtagtttgcaactgtgccttctgcactagttttaaacttatcctttgatgtgccatattgcacatggcgagtccctggttcatctggggtcacccatgagactattactgcttttccatcatagtcaccttgcgtgatgtgcacttgttgaggtgcattataaccctttggaactgcaaatacttcatgatccacgggaatgtcaactcctggccactgtggccgaacgaaagagctggtgatccctgcactcccatctctgatagaactcaagaggacaaaggaaacaagaactaaattaagcaacatggccttggaatattgaaacatttgctaaaagagggggcaagggaagccaaagcacgccacccgagtgatc

SEQ ID NO: 1827 - DNA, 451 bp, Glycine max
ttgtatttgtggaaagtatagtttgtacttgtgccttctccactagtttgaattttattctctgatgtgccatactgtatatgcttgtgccctggctcttctgtggtcacccatgagatgattactgcttttccatcatagtcaccttgcgtgatgtgcacttgttgaggtgcattataaccctttggaactgcaaatgcttcatgatcaagggggatgtcaactgccggccactctgaccgaatgaaagagctagtgatccctgcactcccgtctctgataaaactcaagatgacaagggaagcaagaactaatttaagcaacatggccagcagcatccttctttccaacggtatgagtgttgtctttatcagcctacagagtcctaaccatcagtccacacgtaaactcggagaagttgcacatgcacaaaatccaccttcatgtgtct

SEQ ID NO: 1828 - DNA, 1555 bp, Glycine max
caaagcttacagtgcccttggccacgccttacttcaggctttccaatctcaaagatagtggataactcattttgcttcttgtttgtattgttctctgtcatattgcttggaatctcaaccaccacatgagctgctccttgtttcttgttaatttttttctgcaccaagtgaatgtaagcataatggccacgtaaacgggcataatcctcaggtgtcgaacctgtgctgtcacgagcatttttccatgcttcaattcccaccatgcaaggatcattagtcaaagcatcaagtacatcctcagaaccatctttcccggctgctatatggagtggtgtcaaaccagcaggaccaacaacatcaggtctaaacaagaaggtctgattctcgccatcaaccagtgccttgtcttcaggtcctagtttatcagaaatattctcaggaacatatctcaaaagacactccactaactgcttgctgtttctccttacagctttgtgaaggagacccatctctgaaagcgcgagatacaaggaaggatgatctcctgtatttacagttccatcaagcagtaggttcaacagttttctcactgctgcacaccaatcatgatccatggaaaactcaataagccacttgaaccgtttcaatggaaagagatcctcactagaaaccatccttaatttcaactggcttctgtgaagaagccaacccatttcatgaataaaatccatggcttgatttttggctttgatttttcctgccccttcaatatctggatcagtttcacttaattctagaagaggctcaagtgtacagatttctgagcaaacatcctcctccacaacaatgaaaggaaaaaagctgctactcaaaccctggtcctcaatctcaataaatcctcttccattcatcacagggacagagcatgaaaactggacacactgaagttcatcaggctctttggagctttgatccattgacatatgatcatcttcacagaccagatatttcccttctaaagcacacattaacctagtggcagggcgtatcaggttgacacccttaacagaaaattgagctctctttgatgctggtgcagcaattggactaacagtcaaaatcttgctataattattacttctgaaaggtaaggaggtatctatgacaacttgaccattaaaaatgaaggccatctgatgctgcaccctgatgtgaacccatccatttctccaaaaagtatcatctgagacatccaacagcctattcaaactggaagtcagatcatagcaaagttcctcccacaacgcctcagcctgacgcagataaatggtcaaaacaatacaaccaggccgtatgtagctctccatatcagtaggactgtgagataaccagtcaagaatctgtgctctaagtacaagaggaaaatcatttggctctttaccgaagagcttaaaaacaattcgatctgtgcgactctgagcttctccactggaactggaaggagactgggcagatgcagaatcagaatttccacctcgagccgattcggctcgag

SEQ ID NO: 1829 - DNA, 812 bp, Glycine max
gaagaatgacctctgaaatttataatatacaaatggattaacacatttttccttctttttttacacattttaaaactgattactatgcttgcaaactcattaaatgaatgggttgctcttcaacacatgctggtaacttgagatgtatacagttgtaactcaaaagtatcacacattgtataacagttacctcctaaccattttggtaaacttctgagggcctagaagtgaaaaaccataggcagtaggtagtgacaagagtttctttacttttcctacatatgccctttttgtgaagttattataatcattggcttcaatggaatctaatatttgcctatacaacaacaatgatgcccacacaggccacctgctagctgagttgagctctgcaacccctctctctgcctcatcaaaaaacatcctcgccctctttatttgtcccttcatgaatttccgccatttgtctgtaactcttccgcggaaaatgtcatcatctgaaaggccagcttgtgccaattcatcttgtgggagatatactcttcctcttctagcatcttctccaacatctctaagtatgttggtaagttgatttgcaatgcctagagccaatgcagcattataaatgctctctgatgaagcatttgattctggtgctatccccattactgggacactcataaggcctactgtcccagcaacatagtagcagtaaaggtagagttcatcaaagctattgtatcttgactttctcagatcaagcctcatcccttcaatcatgtccttaaatggctattcatacagagatttca

SEQ ID NO: 1830 - DNA, 358 bp, Glycine max
ccagaatcaaatgcttcatcagagagcatttataatgctgcattggctctaggcattgcaaatcaactttccaacatacttagagatgttggagaagatgctagaagaggaagagtatatctccctcatttatttgtcccttcgtgaatttccgccatttgtctgtaactcttccgcggaaaatgtcatcatctgaaaggccagcttgtgccaattcatcttttcgtatcacccaagattggatttttatttatttttaattgataattgagtgatgcatttgctacttgagggtccattgctgaagtggttgtggtattgaagttttgatttgatcagttgagatactgaagtttgg

SEQ ID NO: 1831 - DNA, 1698 bp, Glycine max
cacagagacgcacccaaaaccaaaccataaccgaggtcgacgcttcgcgagtgcgcatcctaagacccacgtcttttttgttgtcgtggcctcaacgcaacatcattatcactgtcactataaaaaccctacttggctcttttcttcacttgttcactttcttccaacctctaacctacctctttttcttctctctcaacaacttcaccttcttcctcctcgatcatgtctcacttcaagggcaagtaccatgatgagcttatcgccaatgctgcgtacattggcactcctggaaagggtattcttgctgctgatgagtcaacagggacaattggcaagcgtttggccagcatcagtgtagagaacattgaatccaacaggcgagctcttagggagctgcttttcactgctcctggtgttcttcaatatctcagtggtgtcatcctctttgaggaaaccctctaccagagcacagctgcaggcaagccctttgtgaatgtcttgaaggaagctggtgtgcttcctggcatcaaggttgacaagggcacagtcgagcttgctggaactaatggagaaaccaccactcagggtctagatggccttggtcagcgttgtgccaagtactacgaagctggtgcacgttttgccaaatggcgtgcagtgctgaagattggtcccaacgagccatctgagctgtctatccatgagaacgcctatggcttggctagatacgctgtcatatgccaggagaatggcctggttcccattgttgagcctgagatccttgttgatggacctcatgacattcacaagtgtgccgccgtcaccgagcgtgtccttgcagcatgctacaaggctttgaatgatcaccatgtccttcttgagggtaccctattgaagccaaacatggtcacccctggatcccaatctgctaaggtttcccctcaggtggttgccgagcacactgtcagagcccttcagagaaccgtgcctgctgcagttcctgctgtcgttttcttgtctggtggccagagtgaggaggaggcatccgtcaacctcaacgccattaaccaggtcaatgggaagaagccatggtcactctctttctcctttggaagggcacttcaacagagcacccttaaggcatggggcggaaaagaagagaatgtgaagaaggctcaggaagcccttttggtaagagccaaggctaactcagaggcaactctgggaacctacaagggtaactcacagcttgctgatggtgcctcagagagcctccatgtttcgaactacagctactgatcaatcgaagttggtgttgtttgaagagactagtgcgagtaggaatcggtattatgggtacaacaaccgaatttcttgttgataagtattattgtggtttgactcttcccagaataatcgtttggaattttgctttttgttttcctagtgttccttttatgtcaattttagtaattcagtgtatttggtcaaacctgtgcaacagggaagggaatgtaactttgttttcttgaaagacaccaccgtgctgtgaatgaggctttgtgtttatttttgcgattatctgtctttgttttcatatttatgtctatcatcgattttctctaaattatttgttccaaaattttaaataaacgttgctgataagtttcctaaaaataaatatatgccattatc

SEQ ID NO: 1832 - DNA, 669 bp, Glycine max
  unsure (1)..(669): unsure at all n locations
cctgctgcagttcctgctatcgttttcttgtctggtgggcagagtgaggaggaggcatccgttaacctcaatgccattacccaggtcaatggaaagaagccatggtcactctctttctcctttggaagggcacttcaacagagcacccttaaggcatggagtggaaaagaggagaatgtgaagaaggctcaggaagcccttttggtaagagccaaggccaactcagaggcaactctgggaacctacaagggtaactcaaagcttgctgatggtgcctcagagagcctccatgttgaggactacaagtactgatcaatctaagtgcgggtaggaatcggtattttatgggtacaaccgaattttcttgttaatgagtattgtgcttcgactcttcccagaataataatcgtttggaattttgctttttgtttttcctagtgttccttcatatcaattttagtaattcggtgtattggtcaaacctgtgcaaacaggggaggggatgtaactttgttttcttgatagacaccaccaccttgctgttaacgaggctttgtgtttattttgcaattatctttctttgtgttttcatatttatatgtatgtgatattttctctaaattatttgttccaaaattttagatnnnnnnnnnnnnnnnnnnnnnnnnn

SEQ ID NO: 1833 - DNA, 595 bp, Glycine max
tcgcacgcacgctttcgtgatctcggtcttccctaccccttgttcttctccctcaacaacttcaccgtcggcctcctcgatcatgtctcacttcaacgggcaagtaccatcatgagcttattgccaatgctgcttacattggcactcctggaaagggtattcttgctgctgatgagtcaacagggacaattggcaagcgtttggccagcatcagtgtagagaatgttgaatccaacaggcgtgctcttagggagctgcttttcaccgctcccggtgctcttaaatatctcagtggtgtcatcctctttgaggaaaccctctaccagagcacagctgcaggtacgctcgacagttttgagtatcttaattggtttgaatcattaatcgatgagcattgcatcattgggtttgaacatgcgttgattgatattatgttcatcaaggttttaaattgtggtcacactgcatgctgattattgatattgtagaaatttgcatcctaatgaagcaggtgttattgcaattggggtttttgacttaaaatttgcgtctacatattcttttttaaaaccatgtttgccaacatggttttttc

SEQ ID NO: 1834 - DNA, 307 bp, Glycine max
  unsure (1)..(307): unsure at all n locations
gggcgnnccacgcgtccgattctgggaagagtcgaagcacaatactcattaactagaataataatcgtttggaaggttgcgttttgtttttcctagtgttccttcatatcaattttagtaattcggtgtattggtcaaacctgtgcaaacaggggaggggatgtaactttgttttcttgatagcaccaccaccttgctgttaacgatgctttgtgtttattttgcaattatctttctttgttttttaaatatgaaaacacaaagaaagataattgcaaaataaacacaaagcctcgttaacagcaag

SEQ ID NO: 1835 - DNA, 833 bp, Glycine max
  unsure (1)..(833): unsure at all n locations
gagactcttcatccctctctctttctctctcccaaaacgagtctttggatttggattagattcagattgtggccgtggcagccagcagcaatatctctaaactcgaaaaatggatcagcgaaagctacgagactcgtccaattcgaaacccgcttcagatgcagcaccccaacacgtcactctcacctctaaccgcttccgcaactctcaagctgctgtgagggagagagagaaagagaagggtgaaggggaaaacgaggatccaagtgcggcacgaaaggttctaaaggcagaccgcgagaagctcagaagggatcgactcaacgaacacttccaagagttgggaaacgcgttagatcctgatagaccaaagaatgacaaggcaactatcctcactgagaccgtccaaatgctaaaggacttaaccgctgaagttaataggcttaaaacagagcataaaacactttctgaagagtcacgcgaactaatgcaagaaaagaatgaactcagagaagagaagacatctcttaaatctgatatagaaaatcttaatgtgcagtatcagcagagagtcagaatcatgttcccatggagtgcaattgacccttcggctgtcattagtcaaccttactcatatccagttcccatacatatcccttttgctccaatctccatccacccatctcttcaaccttttcctttctttggaaatcaaaaccctggccacattcctaatccttgttcaatgtatgtcccatatactactccaactagccaccccccagttgagccgccatcaatgatgtatgcttccacgtcccacgcatcgancc

SEQ ID NO: 1836 - DNA, 4484 bp, Glycine max
gattgaatcaatgactattcatgattccataattgaatcaattacatactggatccaagctaaaggaatgttatggtaaaacttcgtttgaaacgatgtggtaaaaagcaacgagccgtttatcgaatcgttgcaatcgatgttcgatctcgaagagagggaagagatcttcggaaagtgggtttttatgatccaataaagaatcaaacctatttaaatattcctgttattctatatttccttgaacgaggcgctcaacctacaggaactgttcaggacatttcaaaaagggctggtgtttttatggaacttagctcgaatcaacaaacgaaattccattaatgaaataaaaaaaagggggtgtggatgacttgtatatagatttctaaaactcttttctcttttatccccccgctctcttgttctattcatacctaatttttcttatttcttgttgtttatatagaatgataggatgtagttttctatagccagaaaaagaaatgaaatttgcatcgatcttcaaaacaaaatgaaaaaatgtatagagataaaagatagaatataggaaaaagaaaaaaaatagtcactaaatgaagtaattggacttataaatagataaatagattacccctattgaggtacttttttttttaatgtttcttattatttttgattttattatcatttctttttaataccaactcgctctttattattttcagttactaatcctagttatttgatttatatactttttttatagtaaatacatgagatagaatattcaaaatggaatatttctattattttattcttcatccaatgactatacattcattatatttttgtgtaaatagaggaaaaactcgatggaaaaatggtggtttaattctatgttgtttaataggaagttagaatacaggtgtgaattaagtaaatcaatggatagtcttggtcctattgaaaataccagtctaagggaagaccctaaaattttaaccgatatagaaaaaaaaattcacagggatttggattatttagaaatggaaggttttttttctagcgatctgaatactgtttctaagaatgatgatgatcattacatgtatgagactcaatttagttttaacaataatattactagtttcattgatagttgcattgagagtttcaatttaggtgatattgacaaatacaatgatatttatttttatagttacatttttttgaagggcagaaattgtagtgaaagcgataattctagtactagtataataactagtacgaatgatacaaatgatagtgattccactataggagaaagttctaataatctcgatgaaagtcaaaaatataagcatttgtggcttgaatgcgaaaattgttatggattaaattataaaaaattttttaaatcaaaaatgaatatttgtgaatactgtggatatcatttgaaaatgggcagttcagatagaatcgaacttttgattgattcgggtacttggaatcctatggatgaagacatggtttctctggatcctattgaatttcattccgaagaggaaccttataaagatcgtattgattcttatcaaagaaaaacgggattaactgaggctgttcaaacaggtactggtcaactaaatggtattcctgtagctattggaattatggattttcagtttatggggggcagtatgggatccgcagtaggtgagaaaatcacccgtttggtagaatatgctactaatcaacttttacctcttattctggtatgtgcgtccggaggagcgcgtatgcaagaaggaagtttgagcttgatccaaatggctaaaatctcttctgctttatatgattatcaaaaaaataaaaagttattctatgtatccatacttacatctcccactactgggggggtaactgctagttttggcatgttgggggatatcattattgccgaaccaaatgcttatattgcatttgctggtaaaagagtaattgaacaaacattgaataaggcagtacctgaaggttcacaagcagctgaatatttattccataagggcttatttgattcaatcgtaccgcgtaatcttttaaagggcgttctgagtgagttatttcaattccataatttcttttctttgactaaaaatgataaggcatagccataaattctttgaataagaaaagggtatattatattatgatatatattggcttagctataatcactagaattattatatactaagtataaatatatagaaattctagtgattatagactatctttatataataatataaataagaataaaaaaataaaaaaaaaaaaagaatctatataaatataaaaataatatatataaggtacaaatagtaaatcgaggtacccattttatgataaactttccttccatttttgttcctctagtaggcctagtatttccggcaattgcaatggcttctttatttctttatgttcaaaaaaacaagattttttagatacagaaaacaaagtaaaattctggggttttttattccccaattataatactaaattcaaaaaaaggagagtaatgagtataatctttcgctcagacgatgtactgatatattctatggcggaggttcgaagaacaagcaatttattttgggccgttttcactttgttaggttcattggggttattgttcgttgcaatttccagttatcttggtatggatttgttctttatttctgagaaaattagtgatttttcttttattccggactttatttattttccatttattccacaaggggccacgatggctttttatggaatcgcgggtctctttagtagtttttattttgggtcgattattttttgggatataggtggtggttttgatatcttcaataaaaaagggaaaaaggtacgttttgttcgttggggatttcctggaaaaaatcgtcgtattattctcgaaatacctatgaacgagcttcactccatcagaataataacagaagttaaagaagagggtatttttactcgtaccagtacttttgagagtatcgtttatctggaaaccatagaacaggggtttattcccttgactcgtattgaagataatttgaatgggacacaaattgcacataaagctggcgaattatctgtatttttgggtgtaccacttttttactgatgagaattgaacttaattagaaattaaattgcacaaaaagcttcagaattgtcctatttattttgtgtaccttttgaaatattttgaaaaaaaaaaaacgtttttttttttcaaaatatttccatttttatagatgaggcgttatttgatttcgaaatccgattattatattcctaacccgaagtgctccttggtgtattcataaaaagtaataatttttcttcgaatcttagcaattgatatcctttcgaaacaccatttttttcttcatttgaattgacagtgaattctttcgatttcttattcgatttatgtattcttttttctaaattaaacaaggcaaggactaactcccgaactgcaagtaaaaaaaatgatagaatagaatatagatttatctataagctctatgacttgtaatagaacttatgcttgatagaaaggttattatcatatagagttgacgaatgagatgaagttgagttcattaaataaagacgaaaaatgacaaaaaagaaaacattcattccccttctatatcttacatctatagtctttttgccctggtgtatctctttcacatttaagaaaagtctcgaatcttggtttattgattggtggaatactaggcaatccgaaattttcttgaatgatattaaagaaaagagtattctaaaaaaattcatagaatttgaagaactgtttttcttagatgacatgttaaaggaatgtccggaaacacatctacaaaacctgcgtactggaatctataaagaaacaatccaattaatcaaaacgcacaacgaagatcgtatgaatacgattttgcacttctcgacaaatataatttgtttctttattctaagcggttattctattcttggtaatcaagaacttgttcttattaactctttggttcgagaatttatatataatttaagtgacacaataaaagctttttctattcttctattaactgatttatgtataggattccattcaacccatggttgggaactagtgattggtttcgtctataaagattttggatttgctcaaaatgatcaaattatatctggtcttgtttccacttttccagtcattttagatacaattttaaaatattggatttttcgttatttaaatcgcgtatctccatcacttgtagtgatttatcattcaatgaatgattgactgacaaaatgattcacttatctaattcttcaacttaaagttgtttagcatgaaaaaaacaccaccctaagaagaaaaagcggccgctcgaatt

SEQ ID NO: 1837 - DNA, 2307 bp, Glycine max
caatccaatttatcaataccacatttttatcgatgaatactatttgcactgtggtactatataatggttctttatcctacgcgttattctattcttgtaatcaacaacttgttcttattaactctttggttctagaatttatatataatttaagtgacacaataaaagctttttctattcttctattaactgatttatgtataggattccattcaacccatggttgggaactagtgattggtttcgtctataaagattttggatttgctcaaaatgatcaaattatatctggtcttgtttccacttttccagtcattttagatacaattttaaaatattggatttttcgttatttaaatcgcgtatctccatcacttgtagtgatttatcattcaatgaatgattgactgacaaaatgattcacttatcaaattttaatttaaagttttttagctaaaaagaaaataactttgctttttcccttctttttaacccccttaaatgaaaaaaggggttccccgacttggatagggaactatgcgagtgacctacctaatcttattgtagaaattttcaggatcaatgattagaccatgcaaactagaaatgctttttcttgtataaaggaagggattactcgatccatttccatatcgatcatgatatatataataattcgagcacccatttcaaacgcatatccaatttttgcacagcagggttatgaaaatccccgagaagcaaccggtcgtattgtctgtgccaattgccatttagctaataagcccgtggatattgaggttccacaagcggtacttcctgatactgtatttgaagcagttgttcgaattccttatgatatgcaagtgaaacaagttcttgctaatggtaaaaagggagctttgaatgtgggggctgttcttattttaccggaaggttttgaattggcaccccccgatcgtatttcgcctgagattaaagagaagataggcaatctgtcttttcaaaactatcgtcctacaaaaaaaaatattcttgtggtaggccctgttcctggtcaaaaatataaagaaataacctttcctattctttccccggatcccactactaagagagatgttcatttcttaaaatatcctatatacgtaggtgggaacaggggaaggggtcagatttatcttgacgggagcaagagtaataataatgtgtataatgctacagcagcgggtatggtaaaaaaaatcatacgaaaagaaaaagggggatacgaaataactatagtggatgcattggatgggcgtgaagtgattgatattatacctccaggaccagaacttcttgtttcagaaggtgaatctatcaaacttgatcagccattaacaagtaatccaaatgtgggtggatttggtcagggggatgcggaaatagtacttcaagatccgttacgtgtccaaggtctcttgttcttcttcgcatctattattttagcacaaatctttttagttcttaagaagaaacaatttgagaaggttcaattgtccgaaatgaatttctagtcccgcatatttatcaacatattaaactcataaaaataactcaatttttttgttgataatttatgtaattctattcagtataatatcagtataatagaataaaaaaattatgaaaagatctttggttctgtatagtctttttatactatatttaaagagttacttgtaacgtaatacaaataaactcgagtatggatattgtcaggaagactatttgactttgttttttcaaccccccaataaattcgaatattatggttatgacactgtttttttcagatttcatttttctataatagagagttctattatagaaatttcgattgtaaaatacaataaaattggattcgatactaaacataaaatagatatctatatagatagataatttgaaacaaaatcaattaaaatatggaaaaggtactctaggggggattttttgtcttttcctagagtccgattcctattccttcttgtttgtgtcgaaatagaaatattctaaaaatatcaataaaataatcttttttaaccccttcctgaaaaatcctatatcttagtttctattttttccaacttagaatatttctgccatataatattttattgcatataatacgtagtgaacaaataaaaagagagggggttggggaatttgattaaacaaattgaatttcttcaattaacttgtaaaaaaaaaaaaaaaaggaccggcggccgtttgaaacatcggaaaaagtagtcgtttatatgg

SEQ ID NO: 1838 - DNA, 1635 bp, Glycine max
ttcgtctctaatctaaatcgacttgctttcgaatatgtggattcaaaaacaagtcgagtttttgttactttcttttttgtataaaaattgttttaatgtaatcatttcattatatatatctattataattttataattttttcaattttttttttctttttttctaatatttttaaattcccatttttctactttacaaattctaaaaagagagtagaaaatagattgataaaataccgagttaattttcatttacgtctttactttaaaaaaagttttcgttatatagaagaaaaaccctgacctaaaaaggatagattattatgtatcgattgaatcaatgactattcatgattccataattgaatcaattacatactggatccaagctaaaggaatgttatggtaaaacttcgtttgaaacgatgtggtaaaaagcaacgtgcgacttgaaagacatgattagattagctgtggattcttacatccgccattttttctagtatatagaaatgaacatgctcttgactcgacatcgtttgttctgttccactagaacttattgttttggggacgggaaagcagttgatgatgtaagttgatgatgtaaatagtacatgatggagctcgagtttattcatttatcaggggcaagtatctaaggttagtaaaaattaataagttagaaaaacttcgtaagtttatttttgatagaaaaatagaaaggatccaatttgagcaaggttcaaaaaaatggttggaattagtaaaactgttttgatcaaaagtgtagccgcaggaattaaccttctatttgtatgattctttcatagaaagaaaaaatggtatgttgctgccatttttgaaaagattgaagattcccgaagtaatgcctaaacctaatgattcaaagaaaagctaaaagatcatggaacaagtaaataccattttcaaattgtctcatcaattctattatcaaaaattataaaaaataaattataaagaaacgaaacacgggcaagaaaggggagtagagaccactcaataaatgaaatagctactaaaggctttgttctctttttagttatttgataattatccaatttgagttatggagttataaatatgaggagttttttttcaaaaagaaaatacgaaagaaaaatacttaagtcatagtttaattgatttgatgattttattgatctatttgacatcataattttctacatacattataattttttattttctcgagccgtacgaggataaaacttcttatacgtttctagggggggggtgcattatttatctatctctatcccaatgagccgtttatcgaatcgttgcaatcgatgttcgatctcgaagagagggaagagatcttcggaaagtgggtttttatgatccaataaagaatcaaacctatttaaatattcctgttattctatatttccttgaacgaggcgctcaacctacaggaactgttcaggacattttaaaaagggctggtgtttttatggaacttagctcgaatcaacaaacgaaattccattaatgaaataaaaaaaagggggtgtggatgacttgtatatagatttttaaaactcttttctcttttatccccccgctctc

SEQ ID NO: 1839 - DNA, 406 bp, Glycine max
cccacgcgtccgatctttatataataatataaataagaatgaaggaatgaaaaaaaaaaaggaaaggggaaaaaaaaaagaaggattctatttaaatttaaaaataatatatttaagggacaaaatagtaaatcgaggtacccattttaatgataaactttccttccattttatgttcctctagtaggcctagtatttccggcaattgcaatggcttctttatttctttatgttcaaaaaaacaagattttttagatacagaaaacaaagtaaaattctggggttttttattccccaattataatactaaattcaaaaaaaggagagtaatgagtataatctttcgctcagacgatgtactgatatattctatggcggaggttcgaagaacaagcaatttattttg

SEQ ID NO: 1840 - DNA, 1125 bp, Glycine max
gtaagctgggaatcgggcttgctccacacttgactcacttctctacaaccctctcaatattttattatacccaacaaaaattcttcactcactcttaatttcttatggcatcatccgagaacgtagccagcattgagccatgtatgcttcgtccccctgtcaccgattcatggctcgcagagttcttcgctcgtgacgccgatgccttaaccaaggctcttcagaagtctctctccggtactgtcttgccggacgaggaaaactacttttctccctttctgcccaagtcagaccccgccgtcgccacccccaccgtctccagcctctccggctccgatcaggactcggcgccgcgccgccgcgcgccgcttccgccgtccgggaagatctccaagaggaagtcccgcgcctcgaagcgctcgcagacgacgttcatcacggcggaccccgccaacttccgacagatggtgcagcaggtcaccggcgtgcggttcggcggcgccggccagccaattgcgccggcggcgggggttgtgaagcccgagccgcagcgtgcctcgggccttgccaggttccccgccggcgcggggtgcctgccgacgctcgacacgtcggccttcctgctggaccatcaccagcaggtggtggggccctcctctgttaactctgggcctgccaccgggctttctgggcccggcccgctccccttcgcccaacccctccttgacgcttccttcgcctccgcagggttagattttgacaccttctccagcttccccactctcgagtcgtggaaagtcatgtgataaagaaagaagagaaaaaaaaaattttcagagaatctatctcatctcatattctctgaaaattttctttttactttttccctttttgcccctctcgtgggttaatgaatctagcaggggaagctagctaggatgatcttatgtaaatttgggaagggaaaatggatatggaactagtatctctttttttttttttttctttctgtaatttctgtaacatagttactttcttgttattactattatgaaggggtggagatatggtagctttgtttagtttaattaattaacctaattaatgaaattcgaagtttatctc

SEQ ID NO: 1841 - DNA, 1047 bp, Glycine max
ggaaatctttgaaaaatactacacgacaataccgtgttattaacagattatagatttagttagcagcagagcagaagaaaaagaagaaggtgattgttgttcggtggtttgcaaggatggggaacacgttctgcttcttctgtggttgcgttgctcaatccagcgtcggcgtggtcgagcagtggggtcgcttccaccgcctcgcccaaccgggcttccactttttcaaccctctcgccggcgaatgcctctccggtatcctctccaccaggatctcctccctcgacgtccgcatcgaaaccaaaaccaaggacaatgtttttgtgcagttgctgtgttcgattcaataccgagtgattaaggaaaacgctgatgatgctttctatgagttgcaaaaccctcaggagcagatccaggcttatgtttttgatgtgactcgtgctattgttccgagaatgaacttggacgagctgtttgagcagaagggtgaggttgccaaagctgtcttggaggaacttgaaaaggtgatgggagaatatggatatagtatagagcacatactcatggttgatattatacctgatcctgctgtgcgtaaggcaatgaatgagatcaatgcagctcaaaggatgcaacttgctagtcagtactttgacacaatcaaagaccttgggaattcatcaaagaataccactgtttttataccccatggacctggccacgttagggatattggtgagcagatacgcaatggactgatggaagcagccagtgctcaagtaaatgtggaggagtgattttgtaatattgccttagaaagtatatctctctctgtcacacacacacacacaatgatattctagttttattacttgtgtatgtaatatgtttctgctaaattttgtggaagaaaagttttgttcagttggaagttgtaatataagatgtttttcagtcgtattaaataatctttctagtcatgctatatgtcagaaattcaaaagatgatatgcaatttgctttataggaagaggaaaaaaaaaaaaa

SEQ ID NO: 1842 - DNA, 282 bp, Glycine max
ggaggatatttcaaaagggtaattggttgtaatagcaaaaagcaaaggaaggatggggaacacgttctgcttgttctgtggttgcgttgctcaatccagcgtcggcgtcgtcgaacagtggggtcgcttccaccgcctcgcccaacccggcttccactttttcaaccctctcgccggcgaatgcctctccggtatcctctccaccaggatctcctccctcgatgtccgcatcgaaaccaaaaccataggcaatgtgtttgtgcagttggctgggtcgattca

SEQ ID NO: 1843 - DNA, 797 bp, Glycine max
tgttcttcttctttgtcttccatttccaattctctgtgtagaagccatgtctaagggtcctggtctctactctgacattggcaagaaagccagagatctcctgttcaaggactaccacagtgaccagaagtttaccatcactacctactcacccactggagttgctataacatcctcggggaccaagaaaggtgacctttttgtggcggatgttaacacccagttgaagaacaagaacatcaccactgatatcaaagtggacaccggttccaatcttttcacaactatcactgtcaatgagcctgctcctggtctcaagactatttttagctttagagttcctgatcaaaggtctggaaaggtggaagtccagtacttgcatgactatgctggaataagcaccagtgtgggtttaacagcaaacccaattgtcaacttctccggcgttgtaggaactaatgtacttgcccttggtactgatgtttcttttgacaccaagattggggagttaactaaattcaatgctggattgaacttcaccaaagatgatttggttgcctcattgactgtgaataacaaaggtgattccctgaatgcttcatactaccatacagtcaatcgcttgaccaacacagctgttggtgctgaggtaactcaccaattctcaaccaatgagaacaccctcacacttggcacccagcatgcattggatccattgacgactgtgaaggctcgtgtcaacaacttgggcaaggcaaatgctctcatccagcacgagtggcgtcccagatcgttct

SEQ ID NO: 1844 - DNA, 1260 bp, Glycine max
  unsure (1)..(1260): unsure at all n locations
ttgcctacgcgtccgcccacgcgtccgcccacgcgtcctatcgtagcaaagaaagaaagaaagaaaaccctagctcaccgtttcaagatgcaaatcttcgttaagaccctcactggtaagaccatcactctcgaagtcgagagttcagataccatagacaatgtaaaggccaaaattcaagacaaggaagggatcccaccagatcagcaacggctcatttttgctggcaagcagcttgaggatggacgtacccttgctgattacaacatccaaaaggagtccactctccacttggtgctccgtctccgtggtggaatgcaaatctttgttaagaccttgaccggaaagacaatcacccttgaggtcgagagctctgacaccattgacaatgttaaggctaagattcaggacaaagagggtatcccaccagaccaacagaggcttatctttgctggaaagcagcttgaggatggccgtacccttgctgattacaacatccagaaggagtctactcttcacttggtgctccgtcttcgtggtgggatgcaaatctttgtcaagactctgaccggaaagacaatcacccttgaggtggagagttctgacaccattgacaatgtcaaggctaagattcaagacaaagagggtatcccaccagaccaacagaggctgatctttgctggaaagcagcttgaggatggccgtacccttgccgattacaacattcagaaagagtccaccctccacctggtgctccgtcttcgtggtggcatgcaaatctttgtcaagaccctcactggaaagaccatcacccttgaggtggagagctctgacactattgacaatgtcaaagctaagattcaagacaaagaaggtatcccaccagaccaacagaggctcatttttgctggaaacagcttgaagatggccgaaccttggcagattacaacatccagaaagaatctacctcccactggggtcgtcttcgcgtgtganaatttgaaaccttatctgaaccatactttttgagagagttgaccatnntcatgaaagagagtcgcaccgagagtctcaacaccaaaantattgtcgagncttgnnggagtcctgactcactataaaagatcttcccttcttttgttggggggggtgtaattactagacnnacncttnntgtagaattatgagaaantaaaagttttcnnnnnnnnnnnnnnntttnngnaaaaagggtgcacaaaaaaactctcctcntgtgtg

SEQ ID NO: 1845 - DNA, 1397 bp, Glycine max
cacccttgaggtggagagctctgacactattgacaatgtcaaggctaagattcaggacagggagggtatcccaccagaccaacagaggctcatctttgctggaaagcagcttgaggatggccgtaccctggctgattacaacatccaaaaagaatctaccctccacttggttctccgccttcgtggtgggatgcaaatctttgtcaagaccctcactggaaagaccatcacccttgaggtggagagctctgacactattgacaatgtcaaagctaagattcaagacaaagaaggtatcccaccagaccaacagaggctcatttttgctggaaaacagcttgaagatggccgaaccttggcagattacaacatccagaaagaatctaccctccacttggtgctccgtctgcgcggtggtatgcaaatctttgtgaagacccttactgggaagaccattactttggaggtagagagctcagacacaattgacaatgtgaaggcaaagatccaagacaaggagggtatcccaccagaccaacagaggctcatttttgctggcaaacagcttgaagatggccgaaccttggctgattacaacatccaaaaagaatctaccctccacttggtgctccgtctgcgcggtggtatgcaaatctttgtgaagacccttactgggaagaccattactttggaggtagagagctcagacacaattgacaatgtgaaggcaaagatccaagacaaggagggtattcctccagaccagcaaaggttgatttttgctggaaagcagcttgaagatggacgtacactggcagactacaacatccaaaaggagtccacccttcaccttgtccttcgtctcaggggaggtatgcagatctttgtgaagactttgacaggcaagactattaccttggaagttgaaagctcagacacaatcgataatgtcaaagcaaaaatccaggacaaggagggtatcccaccagaccagcagaggttgatatttgctgggaagcaattggaggatggaaggactcttgctgactacaacattcagaaagagtctactcttcaccttgtgttgcgtcttcgtggtgggttttaaaagtctgagaatgttctgtaggtgtcttgaagtctaagcatgtggaagttccgaagatctttgggtttttttttttaatgttcctgaaaggtttactcttgttaaattgtttccatggtcaatagtggcctttgaaaaactgttgtttgttctggtctttttataaattctgtttggttcgtgaatttgtcaagctaccttttatgaaatttagttctttgctatgaataagtacaatctgttgtcatgtttgatgaaatttatgttcaatttcttccgatttagcagc

SEQ ID NO: 1846 - DNA, 841 bp, Glycine max
  unsure (1)..(841): unsure at all n locations
gacaatgtcaaagctaagattcaagacagagatagtatcccaccacaccaacagacgctcatttttgctggaaaacagcttgacagatggccgaaccttggcagattacaacatccagaaagaatctaccctccacttggtgctccgtcttcgcggtggtatgcaaatctttgtgaagacccttactgggaagaccattactttggaggtagagagctctgacacaattgacaatgtgaaggcaaagatccaagacaaggagggtattcctccagaccagcaaaggttgatttttgcgggaaagcagcttgaagatggacgtacgctggcagactacaacattcaaaaggagtctacccttcaccttgtccttcgtctgaggggaggtatgcagatctttgtgaagactttgacagggaaaactatcaccttggaggttgaaagttcagacacaattgataatgtcaaggcaaaaatacaggacaaggaaggtatccccccagaccaacagaggttgatctttgctgggaagcaactggaggatggaaggactcttgctgactacaacattcagaaagagtctactcttcaccttgtcttgcgtcttcgtggtgggttttgagtttgagaatggtctgcaggtcccttgtttggtgtgaactgaagtatgtgaaagtctataatctggtcttttctttttatatgttcctgaactttgtgtatgtgtgcatcccgggtccattagcggaccttgaaaagctatgaatgtgtacaatttgcaatcatgttttaatgaatttagtactttcaataccttaaannnnnnnnnnnnnnnnnnnnn

SEQ ID NO: 1847 - DNA, 430 bp, Glycine max
gaagagctatgacatcacatgcaccctaacctcgaatgctgaatagccattcgtattgtcgcagagaaagaaaaccctagctcaccgtttcaagatgcaaatcttcgttaagaccctcactggtaagaccatcactctcgaagtcgagagttcagataccatagacaatgtaaaggccaaaattcaagacaaggaagggatcccaccagatcagcaacggctcatttttgctggcaagcagcttgaggatggacgtacccttgctgattataacatccaaaaggagtccactctccacttggttcttcgtctccgtggtgggatgcaaatctttgttaagaccttgacgggaaagacaatcacccttgaggtcgagagctccgacaccattgacaacgttaaggctaagattcaggacaaagagggtatc

SEQ ID NO: 1848 - DNA, 887 bp, Glycine max
cccggggcgacccacgcgtgcgcccaggcttccgaacggttacaaaaagacatcagaagggatattactatggatcgagaggggataagagtatctactcggacactacaatggaaatgtgttgaatcaagaatagacagtaaacgtctttattatggacgctttattctgtctccacttatgaaaggtcaagccgatacaataggcattgcaatgcgaagagttttactcggagaaatagagggaacatgtatcacacgtgtaaaattagaaaaaataccacatgaatattctaccataataggtattgaagaatcagtacatgaaattttaatgaatttgaaagaaattgtattgagaagtaatctgtatggaactcgggacgcgtctatttgtttcaaaggtcctggatatgtaaccgctcaagacatcattttaccaccctctgtggaaatcgttgataatacacaacatatagccaacgtaacagaacccgttaatttgtgtattgaattaaaaattgagaggaatcgtgggtatcgtataaaaacactaaaaaactttcaagatggaagttatcctatagatgccacatttatgcctgttcgaaatgtaaatcatagtattcattcttatgtgaatgggaatgaaaaacaagagatactctttctcgaaatatggacaaatggaagtttaactcctaaggaagcgctttatgaagcctcccggaatttgattgatttatttattccctttttacacgcagaagaagataactttaatttagaaaacaatcaacacaaagttactttgcccctttttacttttcatgatatattggctaaggaaaaactaatgaaaaaataaaattttataataatcaaaaa

SEQ ID NO: 1849 - DNA, 261 bp, Glycine max
aagatttcaagagaaataaacaagtcaagggtttgatcaaaataatatattactatggttcgagagaaaataagagtatctactcggacactacaatggaaatgtgttgaatcaagaatagacagtaaacgtctttattatggacgctttattctgtctccacttatgaaaggtcaagccgatacaataggcattgcaatgcgacgagttttactcggagaaatagagggaacatgtatcacacgtgtaaaattagaaaaa

SEQ ID NO: 1850 - DNA, 1338 bp, Glycine max
gagtagttttttattttctgctttcaaaacccattgagttgaatctgatgacggcatgactcagttttccattccgtaaaatttctttaccttaatttccgtagcagttcatccttacaaaaaacctttcataacttcttttcttcctccttcttcttcgggttgtgagtgtatacgcatcacgcatggcagctttccttcgacgctggattccacgatggaagattttatcttctccaccctgacgggatagcaaatctttcatgaaattgagaattgctgctgctaatagacaagcttccattgagatgggggagttcaccgggagtggtgagtatgtgactcacggtgaattaccttcctccaggccaaatcattcaaggaaagttacagttcttcctcttgtgtttctcatcttctatgaggtttcaggggggcctttcggggtggaggatactgtgcacgcagcaggtcctctgttagccctcattggattcttgcttttccctttgatatggagtgttcctgaagctttgatcactgctgagatgggtaccatgttccctgaaaacagtggttatgtggtttgggtttcatctgctttgggtcccttttgggggtttcagcaaggttggatgaaatggcttagtggggtgatagacaacgcattataccccgttttatttcttgactatctgaagtcaggaatcccggctttaggtggtgggtttcctagagttgttgcaacatggggtctgactatagttctcacttacttgaactataggggtatgaccattgtgggatgggttgctgtttgtttgggggttttctcactccttccttttgtggttatgggatttttggcgattccagacctaaagccttcaagatggacagtgacaaacccgaatgatgttaactggaatttgtatctgaatactctattttggaatctcaactattgggactccataagtactcttgctggagaagtggaaaatccgaagaaaactcttccgaaggctttgttttatgctgtgatcctagtagttctagggtacttctttcctcttctaattggtactggtgctgttcctgtcaaccgtgagttgtggacagatggctacttctcagatattgctttgattataggaggagcatggttgagatggtggcttcaggctgctgctgcgatgtcaaacatgggaatgtttgttgctgaaatgagcagtgacgccttccaacttctagggatggctgagaggggaatgttgcctgagttcttcggcaagaggtctcgctatggaacacctctcataggaatactcttctcag

SEQ ID NO: 1851 - DNA, 543 bp, Glycine max
taagtattgcagaagcaaaaaatggagccattattttcttcagcagcagcaatatgtgtggtgactgtgttggtagctgtgattcccatatgggcactgaagatgctgaactcgctgtggcttaggccaaagaggtttgaaaggcttcttagagcgcaaggttttcatggtgacccatactcactttctcatcacaactccaaccaaacccttttgcaacaacaccagctcaattcccaaccttttcctctatccgatgatgttgctcctcgtgtatcctccttgttacatcacactatcgacaaatatggcaagaaatccttcttttgggaaggtagaacaccaaaggtgatcattacggacccaaatcaactcaaagaagtcttcaacaacattcatgacttccagaagccaaagtttagtgacaatgtcaagttcttgttcgctggcctgttaaattatgagggtgacaagtgggctaaacatcgaagaattatgaacccagcatttcactcagaaaaattgaaaaatatgctaccagca

SEQ ID NO: 1852 - DNA, 989 bp, Glycine max
tcgccctcgcgtccgcggacgcggtcagttgcagcatcgtagagaaataagggaaaaatggtgtcgctgaaactgcagaagcggctcgccgcaagcgtgctcaagtgtggcagaggaaaggtttggcttgaccccaatgaagtcaacgaaatctccatggccaattctcggcaaaacataaggaagttggttaaggatgggtttatcatcaggaagccaaccaagattcactctcgctcacgtgctcgtagaatgaaggaggccaagaggaagggacgtcactctggttatggtaagcgtaagggtacaagggaggcaaggcttcccaccaaaatactttggatgaggaggatgcgtgtgctcagacggttgcttcgcaagtacagggaatcaaagaagattgacaagcacatgtaccatgatatgtacatgaaggtgaaaggtaatgttttcaagaacaagagagtcttgatggagagcattcacaagtccaaggctgagaaggcaagagagaagactttgtctgatcagtttgaggctaagcgtgcaaagaacaaggctagcagggaaaggaaaattgctcggagggaggagcgcttagcccaaggtcctgttgacaagacatctactgcacccagtgccccagctgccacagcaccccagtctacccaagcgccaaagaaattcaagaagtgagtagcatatcctggaattcaaaggacgtggagtctttaatagctctggcaaaatctttagtctgctaaagtagttgtgacgaatctctttttgttggtttagactttgtaagttttggatgtataagaacttcatatcttgcatatttttaattatatattttgtttgttggggtatacggttttttggaataaaacttcacgtagttgcggaaaaaaaaacaaaaaaaaaaaaaaaaaaaaaaaaaaaaaaaaaaaaaaaaaaaaaaaaaaggggggggccccctttttttt

SEQ ID NO: 1853 - DNA, 1012 bp, Glycine max
  unsure (1)..(1012): unsure at all n locations
cccacgcctgacagaggcgagtgatatacatcgtgcctcctcattccgttctcccattccaccggagagagagagagagagggagagggagatggtgtctctgaaacttcagaagcggcttgccgcaagcgttctcaagtgtggtagaggcaaggtttggcttgaccctaatgaggtcaatgaaatctccatggccaattctcgactaaacataaggaagttggttaaggatgggtttattatcaggaagccaactaagattcactctcgctctcgtgctcgtcgaatgaaggaggccaagaggaagggacgccactctggatatggtaagcgtaagggtacaagagaggctaggctccccaccaaaatcctttggatgaggaggatgcgtgtcctcagacgattgctccgcaagtacagggaagcaaagaagattgacaagcatatgtaccatgatatgtacatgaaggtaaagggtaatgtcttcaagaacaagagagtcttgatggagagcatacacaagtccaaggctgagaaggcaagagagaagaccttgtctgaccagtttgaggccaagcgtgccaagaacaaggctagcagggagaggaaaaatgctaggagagaagagcgtttggctcaaggccctggagagaagccatcagcagccccaagtgctccatctgcaatagcatccctgccagcccaagcatcaaagaaatcaaagaagtgacattttgggagattggaaggaagggcattgaatcttctatttggctggcatcctgagttacatggctagtgttttttttgacagattgtctgtttttcttagaccgtgttagttttattcaaaatttaagttgtatatctgcaatttgtattatgtttatttgtttatgctattttttcatgaagatggggttgcacctggcttcgatatacttgcctgttaattatgtattcctcctgcccctcnnnnnnnnnnnnnnnnnnnnnnnnnnnnnnnnnnnnn

SEQ ID NO: 1854 - DNA, 699 bp, Glycine max
gtgcttaggcttgaattgcatgattacttatagtgcttgcctgaatgctactaggtaagcgtaagggtacaagggaggcaaggcttcccactaaaatcctttggatgaggagaatgcgtgtgcttagacgcttgcttcgcaaatacagggaatctaagaagattgacaagcacatgtaccatgacatgtacatgaaggtgaaaggtaatgttttcaagaacaagagagtcttgatggagagcatacacaagtccaaggctgagaaggcaagagaaaagaccttgtctgaccagtttgaggcgaagcgtgccaagaacaaggctagcagggagaggaaaaatgctcgtagggaggagcgcttggcccaaggtccaggagagaggccatcagcagcacaaactgctacacctgcaacagcatcccagcctcctcaagcatcgaagaaatccaagaagtgagtcgcgtgatacagagatttggtggatgggcggctctttatctatgcgggcatcttcagttgccctgctcaagtattttttgtcacgtctctttctgttggttttagtcttttagttactctgcctatgtttgtcatttatatagctaacatagaactttatcggatattttttttatgatatgcattactgatgaaattttccatggtattatcaatggaaaaataagatttatttgtcc

SEQ ID NO: 1855 - DNA, 824 bp, Glycine max
ctacattcctcgacaagcttagcttcaccgtcagttgcaggaaaaatggtttcgctgaaactgcagaagcggctcgcagccagcgtcctcaagtgtggcagaggaaaggtttggcttgaccccaatgaagtcaacgaaatctccatggctaattctcgccaaaacataaggaagctggttaaggatgggtttattatcaggaagcccaccaagattcactctcgctcacgtgcccgccgaatgaaggaagccaagaggaaaggacgtcactctggatacggtaagcgtaagggtacaagggaggcaaggcttcccaacaaaattgcatgattacttatagtgcttgcctgaatgctactagggaatctaagaagattgacaagcacatgtatcatgacatgtacatgaaggtcaagggtaacgttttcaagaacaaaagagttttaatggagagcattcataagtccaaagccgagaaggcaagagagaagaccttgtccgatcaatttgaggccaaacgtgccaagaacaaggccagcagagaaagaaaaattgctcggagggaggagcgattggcccaaggtcctggagaaaaagtatccgctgcacccagtgctacagctgctacagcatcacagccagcgcaagcaccaaagaaatctaagaagtgatccacatattctgatattggcttgtagaatttttgggtctggcattttgagttgctgttctaaagtagttttgacgagtttttgaggagtttggtgttggtttagacctttagtttttatttaagtatatgaaattataacattctgttattt

SEQ ID NO: 1856 - DNA, 759 bp, Glycine max
  unsure (1)..(759): unsure at all n locations
gggcggcacgagaatttctgtagaaataagggaaaaatggtgtcgctgaaactgcagaagcgcctctccgcaagcgtgctcaagtgcggcagaggaaaggtttggcttgaccccaatgaagtcaacgaaatctccatggccaattctcggccaaacacataaaaataagaacccttttcacttcaactctaaaaggttccaaactctcttcaaaaaccaatatgggcacgttcgcgtcctccagaagaggaacggccgccactccggttatggtaaacgtaagggtacaagggaggcaaggcttcccacccagatactctggatgagaaggatgcgtgtgctcagacggttgcttcgtaagtacagggaatcaaagaacaaggctagcagggaaaggaaaattgctcggagggaggagcgcttagcccaaggtcctgttgacaagtcatttacagcacccagtgcccctgctgccacagtgccccagtttgcccaagcgccaaagaaatcgaagaagtgagcagcatatcctggaattcaaaggaccctgaatctttaatagctctgcaaaatctttagtctgctaaagtagttgtgacgaatctctttttgttggtttagactttgtagtgtgcatgtataaaaacttcatatcttgaatacttttaattatatattttgtttgtcggtgtttactgttttttggtattaaaattcacgtagttgcggnnnnnnnnnnnnnnnnnnnnnnnnnnnnnn

SEQ ID NO: 1857 - DNA, 384 bp, Glycine max
cgtccgtccggttgcaaaaggacaacagagggggaagctaaccttcaccgtcagttgcgggaaaaatggtttcgctgaacctgcagaagcggctcgccgcgagcgtgctcaagtgtggcagaggaaaggtttggcttgaccccaatgaagtcaacgaaatctccatggccaattctcgccaaaacataaggaagctggttaaggatgggtttatcatcaggaagcccaccaagattcactctcgctcacgtgctcgtcgaatgaaggaagccaagaggaaaggacgtcactctggatacggtaagcgtaagggtacaagggaggcaaggcttcccactaaaattctatggatgaggagaatgcgtgtgctcagacgcttgcttc

SEQ ID NO: 1858 - DNA, 363 bp, Glycine max
cggctcgaccaccctcagccagcttcgccaagcttccttacggctgcaaaaaaacaacaaaagggaaagcagttgcacacggcgcaaaggggaacaagaagaagaagatggtgtccttgaagcttcagaagcggctcgccgctagcgtcctaaagtgtggcagaggcaaggtctggctcgatccaaatgaagtcaatgaaatctccatggccaattctcgacaaaacataagaaagttggttaaggatgggtttattatcaggaagccaactaagattcactctcgctctcgtgctcgtcgaatgaaggaggccaagaggaagggacgtcactctggctatggtaagcgtaagggtacaaggg

SEQ ID NO: 1859 - DNA, 1451 bp, Glycine max
gacacaaaattgcttcgaactaacacagaactcataatattcatcactagaagtgttggatgcatttctatttctaactaattattgtgcttattattattgttgagaaagaaaagaatggcaaagttaataaaattctttgagttgaacacaggggccaagattccttctcttgggttagggacttggcaagctgaacctggtgttgtagctgaagctctcaccacagccattcaggttggatacaggcatattgactgtgctagtgcgtataagaatcaagcagagattggttctgctcttaagaagctttttgatgatggtgtggtgaagcgtgaggacttatggatcacttccaaactctggtgttcagatcatgcaccagaagatgtgccaaaagcattggataaaacattacaggaattgcaacttgactatcttgacctctatctgatccactggccagtccgcatgaaaagtggaacatttggactcaataaagaatatcttgagcaaccagacattcccaatacatggagagcaatggaggcactctatgactcagacaaggctagagccataggagtgagcaatttctcttcaaagaagcttcaagatttgttagatatagcaagagtggttcctgctgttaaccaagtggaattgcacccaggatggcagcagccaaagttgcgcgcattttgtgaatctaaagaaattcatctatctggatattctccactaggttcaccagcagctctcaaaagtgatattcttaagaatcctgttgtcacagagattgcagagagattggggaagacaccagcacaagttgcccttcgatggggcttgcaagcaggtcatagtgtgcttcctaagagcactaatgagtccagaatcaagggaaattttgatatctttgactggtctattcctcaagatttgatgaccaagatctctgaaattaagcaggaaaggctagttaaggccagtttttttgttcacgagacctatggtgcctataggagcattgaagacttctgggatggtgaactctgagcaatatgcatctttgagacgttgaaaaatacattgctcctagagcaaatttattctgccttatacccactagttgtagtgattcaagtgagattttgagaagtgttactattgatggtaacaccgaataagtagccaagagttatttttcatttaatgattgtatcttttattcaatataataaagtgagttgagtgaatttgacaggtccactgactaaaataaattgatattcatattccttaatctaatcaatttaacgggtattaattaatgtgaatatattgtcttgtaatatgagatgtgaaggcttaaattgttaaaaaatgacagacatatgattgtgacagtaccacgctggcacatcacagacatatatgattgtaaaaca

SEQ ID NO: 1860 - DNA, 764 bp, Glycine max
  unsure (1)..(764): unsure at all n locations
gtgttttgtgattgaatgataatgtaaaattactttaattgtcagtatataatccattttctcaactatcaattgcagtcagaaattatcacttttggtgaaattgtcttgagctagttgaaaatgatttcggtgtgcactcaaagatggagtatatatgatgaatttcttttcagggatattctccactaggttcaccagcagctctcaaaagtgatattcttaagaatcctgttgtcacagagattgcagagagattggggaagacaccggcacaagttgcccttaggtggggactgcaaacaggtcatagtgtgctgcctaagagcactaatgagtccagaatcaagggaaactttgatgtgtttgactggtctattccagaagaagtgatggataagttctctgaaattaagcaggatagactaattaagggcactttttttgttgacgagacctatggtgcctttaagaccgttgaagagctttgggatggtgaactctgagcaatatgcttcatagagatgttgacaaatgcactgctcctcaagcagattgattccgccttttacctgttaagatcttaaagctaccagctgtagtgattcaagtatgtttgagattttgagaagagctattgttcataataacacaaagtaaccgagacttatttttcatttataattgttgtatctttaattcaatctaaagaaaccagtgcagtgaattttaaaggtctggtagccaaaataaaaannnnnnnn

SEQ ID NO: 1861 - DNA, 470 bp, Glycine max
  unsure (1)..(470): unsure at all n locations
ggaantaccgggccgaccgaggcgtacgcccacgcctccgttttggccttatcaatcaaattctttgagttgggcacgggggccaagattccttctcttggcttagggacttggcaagctgaacctggtgttgtagctgaagctctcaccacagccattcaggttggatacaggcatattgactgtgctagtgcgtataagaatcaagcagagattggttctgctcttaagaagctttttgatgatggtgtggtgaagcgtgaggacttatggatcacttccaaactctggtgttcagatcatgcaccagaagatgtgccaaaagcattggataaaacattacaggaattgcaacttgactatcttgacctctatctgatccactggccagtccgcatgaaaagtggaacatttggactcaataaagaatatcttgagcaaccagacattcccaatacatggagagcaat

SEQ ID NO: 1862 - DNA, 538 bp, Glycine max
gcatttctatttctaactaattattgtgcttatgattattgttgagaaagaaaagaatggcaaagttaataaaattctttgagttgaacacaggggccaagattccttctgttgggttaggcacttggcaagctgagcctggtgttgtagccaaagctgtcaccacagccattctggttggatacaggcatattgattgtgctcaagcgtataacaatcaagcagagattggttctgctcttaagaagctttttgatgatggtgtggtgaagcgtgaggacttatggatcacctccaaactctggtgttcagatcatgctccagaagatgtgcccaaagcattggataaaacattgcaggatttgcaacttgactaccttgacctctatctggtatgcatgcattatgtttactgatatgtgaattcatgttgaaaatttgggggaagattaagggtttgtttagtacaaggaaacattcatttttactttttgaatgaaaaactttcgaaccaactatttcatggaactaggtttgg

SEQ ID NO: 1863 - DNA, 580 bp, Glycine max
ctcgagccgctcgagccgatttctaactaattgtgcttatccttcattgagagaaaaaatggccaaatcaatcaaattctttgagttgaacacaggggccaagattccttctcttgggttagggacttggcaagctgaacctggtgttgtagctgaagctctcaccacagccattcaggttggatacaggcatattgactgtgctagtgcgtataagaatcaagcagagattggttctgctcttaagaagctttttgatgatggcgtggtgaagcgtgaggacttatggatcactttcaaactctggtttgttgtcttttagtaattgtgatctctttttgaatattgagaaagattgtatgtgtttggaccaggttggttgctgaatgaaggatcctttgatttgttggctatatttttaggtgttcagatcatgcaccagaagatgtgccaaaagcattggataaaacattacaggaattgcaacttgactatcttgacctctatctgatccactggccagtgcgcatgaaaagtggaacatttggactcaataaataatatcttgagcaaccagaca

SEQ ID NO: 1864 - DNA, 538 bp, Glycine max
  unsure (1)..(538): unsure at all n locations
tatattgttagcatttatggtttctgaattgaataaagttcattggttttcaaacattcatataatgcttagtttagttaccaaggggcaagggtttatttcaatttcatcaattgctctcttgagtctctccgttcaaacaaactaaattgatttatgttttagatccactggccagtgcgcatgaaaagcggatcagttggattcaagaaggaatatctcgatcaaccggacattcccagcacatggaaagcaatggaggcactctatgactcangcaaggcaagagccataggagttagcaatttctcttcaaagaagcttcaagatctcttggatatagcaagagtgcctcctgctgttaaccaagtggaattgcacccaggatggcagcagccaaagctgcgcgcattctgtgaatctaaaggaattcatctatctgtaagtatggcatatatgatatatactttcacttaaaagacttgatattcctaaattatcaagactttaatggtgatgcactcacaatgtaaagtaa

SEQ ID NO: 1865 - DNA, 828 bp, Glycine max
gaagacgacagaaggggactctcatcacattattctatatcaattttggttaagagtcttgaaaaagcaagagaaaaaaaaataccaaccatggcaaccatttctgatcaacctagagggtcctactcctatggaacctcatatggagcaccctatggaaccacgtatgagaccaacaccagcattaacaacccaccttcacgccaaacagtgaagttcataactgctgccactattggcatcacactcttactcctgtctgggttgaccctcacaggcactgtcataggtttgatcattgcaacccctcttcttgttatcttcagccccatccttgtccctgctgcgtttgtgctgttcctggttgcttctggctttttgttctctgggggctgtggtgtggctgccattgctgctttatcttggatttacaactacgtttctgggaaccagcctgcgggttctgacacccttgactatgcaaaagggtaccttactgataaggcaagggatgtgaaggagagggcaaaggattatggaagttatgctcagggtagaattaatgaggccacacaaggagcttattagtcatgcctgcttatatatgcatgagtgtatgaggttgaattgaaggtggtgatggtggtggtacccttgtggatttgcatgttcaagttctgcagtttattttgaatcttgtttgcattgttctatgtagttctggtttttgtaatctcgtttgtttttgaagctaaatcgttcgccttatttgtgtaaccatcatgttaataaatctcttttgtagctagaccaatgattcctcttgtt

SEQ ID NO: 1866 - DNA, 683 bp, Glycine max
tttttgtgttgtttatattacctttcggcattcttctcccatttcctgtcggaattaatgctctctttagtcatggaccaaggcgttctgcaggccttgcacgtctttatgctctgtggaatcttacatccttcatgaatgttgttgttgcatttctttgtggatatatacattacaactctcaatcgtcttccagtaaaagacacccgagcattcagccgtggagtatcatggatgaaagtgaatggtggattttcccagctggattggttttgtgtaaattattccagtctcaactcattaattggcatgttgccaatctggaaattcaagaccgttccttgtatagcaacgattttgagctgttctggcagtcatgagggtatgttcacagcttatattcaacattaactttttaccctttttccctcttctctcgacccatcacatgttctgagtacggtcatctagtataggtcaaagattgacatagagatggtagtaggataaacttgaggtggggagaaatagaactatagaaatccaaagtagatgttgtagaggcattcatttactgtaacacctaatgctcaatagttcttttttttaaaaaaaaaattaatcattttcaccttgaattttcctactgtgtaaatatcaagtaactaagcacaatttagaat

SEQ ID NO: 1867 - DNA, 420 bp, Glycine max
cagagctcctggcatattagtatattcaagaacttgctagtgctatctactttcaaccgaaccggggagtacttcgtttcttttttttcctcctttgaaccgtccggttcgttgcgaaccgaatatcatggcagctctgttaccttgcgcgccgaacatagtctatggtccgttgttggggaaccggagcacgagccaccttcccgcaccgacctcactcccatgctttctccggttcgaccaccagacactttcttcgcggttcgcttaccgtcgcccggttcggattcaaacccgatttcttgcccgagccggatgaagctgaaggcgttctcagagaactgttcggccgagcggagggacttctttacacgattgccgatgcccgcgtttcttcgtcttgttgttcttcttccgata

SEQ ID NO: 1868 - DNA, 723 bp, Glycine max
gtaagggtccggtgtggcgaatgattactatttgagctcttccctctcacaaactcagaaaacaagtccaatgagcaatttccagagaatatcacacgaatcccaccctcccccagggtacggatctccttaccctccaccccaaccgggttacccatccgcaccgcctcatgaagggtaccctccgccgccgccgcctcacggatacggtgggtaccctccgccgcagccgccgcagcgtccgccgtacgactcctatcagggttacttcgataacgggcatccaccgccgcctccgccgccgcactaccactaccagcacgtggatcaccatcaccaccatgaggagcctgggtgcttttcgttcctccgaggctgcatcgcagcgctttgctgttgttgtgtgctagaggagtgttgcttctgataatcacatcgtaaaagttgtttcttcagtttgctgcacttggttatggctctatagagaaatgtggctacaattctagataataagtgagaggtggtaagtcttggtcattcttgtaactctttggtctttcccctctaccctaaatcctggtctgtgcatagcttctgtgatgtggtctatatcatatatgaattgctttgtacgaacactatattggaaagtgtaaaccgtttcttataaggtgtaacagacaatgatatggttaaaattgtttcatattactcgtcttcagt

SEQ ID NO: 1869 - DNA, 481 bp, Glycine max
gactcattcgctaatttcaccaatttctattttcataactttctctgcagtctcttcacctttatgttaatgatattatgtgtttagagagaaagagaacaagcatagttgagcttgattgtgttcttcaacattagaacaagaaaagaaagacaacaacatggaaggaggaggagtagaagttgatgcctctgctttcagagaatgcttgtctctgtcatggaaaaatccttacgttcttcgccttgctttttctgctggaattggtggccttctctttggctatgacactggagtcatatctggggctattttatatatcagagatgatttcaaagcagtggataggaagacttggcttcaggaagccatagtgagtatggctcttgctggagcaatcgtaggagctgcagttggtgggtggattaacgatcgatttggaaggagaaaagctattcttcttgcagacacactcttcttt

SEQ ID NO: 1870 - DNA, 676 bp, Glycine max
atgggagctgatgatagacttggaagtagtgggatggtgcagcctcttgtatccccgctaagtaatagattgatcttgcctcaggctgcaaaggctaatgatggaattgtttcagttgactctagtactgttaatgaagccgcagccgggagagttttctccccttctggggttcctggcatgcaatggagacctggaagtccctttcagaatcagaatgatgcaggccagcttcgtggaagaactgaaatagctcctgatcaaagggaaaagtttttgcagaagtatcagcaagtgcaacaagggcatagtacccttcttaatatgccttctcttgttgggggaaaccataagcagttttctgcccagcagcaaaatccccttttgcagcagggtaactcttatggctcatctgtctcttctcaatactttgcttattggttctttattggaagattcattatgtccaacaaaattgagttgtctagcctaaacatgcatttcatgcatgttcttctaatattaagctttgaccctcttgataatattccaagctaaatttgaattcaattttttgttttctatgtttctctaccttaaatgatggagaaagtttaagggggaaaaggaagaaaattcatatttttccttttctgctggttttaatttactgcct

SEQ ID NO: 1871 - DNA, 613 bp, Glycine max
ctggtattggacttggggtccagtccacaagtcttggtggtatttcttctgcttcactacagcagccacccaatcctgtccattccccctctagtcaacagccattgatgccagatgttggcaattctaagattgaagaacagcagcagcatcagaatttccctgatgattcaacaatagaatctattgctagcactgggattggcaagaatctcataaatgaagatgattcaaaatcagcatatactgtagatgctcctgcagcagtgtctgcctctcttccacaatctgctcaaacttccagggatattgatttgtctcctggccaaccattacaatctaatcaaccaactggcaaccttggtgtcattggaagaagaaatggtgctgagcatggagccattggtgataattttagtgggtcgaatgttagttctggtggagtgcgtgatcaagtatataatttgcaaatgcttgaggcagcccacttcacaattccactacccaaagactcggaacgtcactacgacttacactcctaagcacccagcaattacacctcccagctatcctcaagtacaggcacctattggtaataatcctgctttttggg

SEQ ID NO: 1872 - DNA, 1468 bp, Glycine max
ctggtgccgctcgagtccgatcgggtcctctgaacaatggcgtctctctctcacctcaacaaactcctctgcatgccgccgctcaactcttcaccctctacttcgccaccgcgcagcagcgtcggagtttcgaccaaatctgtcggaaggccgaggatggtcgccgatttcgcgaggccggtggggcgtgtccgagcggtgacgagcgacgacgagtggggcccggagaaggaggaggaggcatacggcggaggagtggcggtggaggagaaaccgacggagacggaaacggagaagctgaagaaggctttggtggattcgttttatggcacggatcttggactgaaagcaacgagtgaaacgagagcagagatcgttgaactcatcactcagctagaggccaagaaccctaaccctgctcccactgacgccttgactctcctcaacggaaaatggattctcgcgtatacgtcctttgcaggtttattcccattgttgtcaagtggaacactaccattggtcaaggtagaggaaatatctcagactattgacacgctgaattttaccgtccaaaactctgttcagttcgctggtcctttggccaccacctcaattagtactaatgccaaatttgatgttcgaagtccaaaacgtgtgcagataaagtttgaggaaggcataattggcactccacagcttacggactcattagagataccggaaaatgtggaatttctgggtcaaaagattgaccttacacttttcaaaggcatccttacctctgtccaagacacagccacatcggtagtgaaaacaatttcaagtaggcctcccttgaagatcccaatttccaacagcaatgctcagtcctggttactcaccacatacctcgacgaagaattgcgtatctcaaggggcgatggtggcagtgtgtttgttcttatcaaagaaggaagctctcttttgacaagataaacaaaacaaactagtttactttggtggtcaatatcaggcttatgtttataaataagtaaagggtctgaattttatacaatgattttgaagatacatgtgtagaacagtttgttaatgctgtgttgcgaattgttggttggttgttaatgtgatggtttatgagcagaatcgaaaggcatcaaccaacttcaagtaacatcataaaatgttttctgtgtttgactattttctcaggatcggaagtggtacaaccagtatgcttttgttgggaacagagtgagattcttgttaatctatactcttcctcaccagattggcactcaatttatacttaaatttcaatattggggtagctaattaaaatggaaataaatatttgagggaataaacatttgtattctttctcagaatagatattgaagtaaaaatgtagttgtgaaagtatggctaaatccatcttgctcatatcagtcacatgttcaatcccatagtt

SEQ ID NO: 1873 - DNA, 533 bp, Glycine max
cccacgcttgcgattctctgaacaatggcgtctctctctcacctcaacaaactcctctgcatgcccccgctcaactcttcaccctctatttcgccaccacgcagcagcgtcggaatttggaccaaacctgtcggaaggccgaggctactggtgcgtgtccgagcggtcacgagcgacgacgagtgggggccggagaaggaggaggcgtacggcggcggcgtagcggtggaggagaaaccgacgaagtcggagacggagacggagaagctgaagaaggccttggtggattcgttttatggcaccgatcgtggactgaaagcaacgagcgaaacgagagcggagatcgttgaactcatcacacagctcgaggccaagaaccctaaccctgttcccaccgacgccttgactcttctcaacggaaaatggattctcgcgtatacatcctttgcaggtttattcccattgttgtcaagtggaacactaccattggtcaaggtagaggaaatatcccagatatcgactcgctgaattta

SEQ ID NO: 1874 - DNA, 514 bp, Glycine max
atcagttataacacactattccgatttgatttctgactcaactcgcccgagtcacgccgttcttttatcgccccaagcatctcttcttaatcacaacaacaatttcttgttcccaaaccctctccctccccaattctccaccaaaacctccgccaccgcccgccgcctaacacaccctctctccgcccggctatggacgcgcaaccgccggaatccgccgcgccggcagcctcgaccgaggacttcgtccacgtcgcggatctgaagatggagagcctctctgagagcatcgttcgaatcgacgagccttccgaagccgacgccgccgcttcctccgctccggcggaatccgatcgccgtccggccacgctcccgccggaactctcaagaaacgtgagagtcctgtcgtgcgagtcctccgccgaacgccgcgtctgcgccgtttacttggtcggcaccgctcatgtctccgaggaatcgagcagagaagttcaagctatagtgaattttctga

SEQ ID NO: 1875 - DNA, 412 bp, Glycine max
  unsure (1)..(412): unsure at all n locations
ctgaattctgactctgagagagaaaccttaatcatttacgctttcacagcttatgactcacctggtcactcgcactcaactcgctagagtcacgcagctctctcatcgccccaaacccctcttcttcacaccaaaaccaacactttatcgttcccaaaccctctctctcccccaactctccacactctcctccgccaccttccgccgccgaacgcaccctctcctccgcccgacgatggacccgcaaccgccggaaccttccgcgcccgccgcctcggcggaggacttcgtccacgtcacggatctgaagatggagagcctctccgagagcatggttcgaatcgacgagccttccgaagccgacgccgctcncttcgctccggactccgattgccgtccagccacgctctcg

SEQ ID NO: 1876 - DNA, 413 bp, Glycine max
ggctgctgaagtgacatatgaggataacgagaattttgttgatgatgggattcaaattgagcctttcaacctagagaaagaaagggaagaaggttattttgatgctgcaggaaattttgttgaatatgtaagagagaatgagattaaggatgcatggcttgataatgttgaagttgatccaaaatatgctgcattaagctctgtagcaacaaatgatgaagatgagggccccccagacctttcttctaaagatattggaatcatgaagaggcgcattgcaaatgttcttgaacctggggaaacggtcttgcaagccttaagaaggttaaaaggtaacagtgacagaaaggcaaaaatgtctgctgagactaagattgtatttgaccagctaactgaggatgctatgaagctga

SEQ ID NO: 1877 - DNA, 1079 bp, Glycine max
tggatgtcctggcaagattttcagattcattttcgatcaatatatatttgccgtatctacccatcagagatgcgtcattctgttcatggtcaatggcgtggttacagtgccggggggtgtcaggattatgatacatggaatcaaaatccacagttcagactgactgcaactgggcaagatgcatcatttcctattcatgtattcattaccttgactcagggtgtgggattttcaagaacaacagctggttttagaaattatcaatccagccatgattcacagatgttctacattggaatgaggatactcaaaactcgtggcagacgtgctgctttcaatatctacctacatgaatcagttggtgggacagactatgttaattctcgagaaatatcctgtgaaatggttttggaacctgagccaaagggatatactatagttcctactactatacaccccggtgaagaagcaccgtttgtactttctgttttcaccaaggcgtcgataactctggaagctttgtagtgcctagggatagtttttacatgtatcttgtcctcttgataagtttctctgcctgggttctcggcggatcatttacttgtactgccggagcccgtctttagaacaatcggcattgagatactattcctggcggaaacgacatggcatctgtttgagagatgaatgaggtatagctgcgcataaactcttggtctttgaatctgacgatttgtcatcttgaacaatgcttctgccagcattgaagagggctctcggggtgtttattgtgtacataaaaaataagtggtactataggggtatacttgtaaccatttaagcaaagttggaaaagaaatagctgaaaataagtaggaaatttactaacacctggttcaaatggaggtaaggacggtgtggggaggtatagtaacaagcattgagtgactgattgtaaattcagttgccgttttgacaattgcaaaatattgtacaaacattaacaattatcagttcctatcatttattggcatttgggaaaattttgtacaaatgtctttctaatctaatttgatttc

SEQ ID NO: 1878 - DNA, 494 bp, Glycine max
caccgatcgaaaagtttccttgacaatctaattctgcaaaaatggcaagcaataaggagtctaagttcccagcacagagccagaaaactcagccaggaaaagaacatgtaatgaatccactcccacaagccacaaatcctgatcacaaggccgccaataaactccagggaaaggtggcgttggtgacaggaggtgactcaggaattggcagagcggtttgcctgtgtttcgcaaaagagggtgcaaccgtggcctttacatacgtaaagggccatgaggacagggataaagatgatactctgaagatgctgcttgaagctaagacaagtggtgcagacaatccattggcaatagcagcggatattggctttgatgagaactgcaaacaggtcattgaccttgttgtcaaagaatatggccgccttgatgttctggtcaacaatgcagctgagcagcatttgacaaactctgttgaggaaatcacacaacagcag

SEQ ID NO: 1879 - DNA, 1655 bp, Glycine max
ccggaatctgtctaaccaccctaaagatccggcggcgagccccaaaaccaaacccttcttaaaggagaatccaaaattcaattccaacacataaaatttcaagtccgaggttgcctataaaaaccactttggacccccttcgctcattgcagcctcaagaatccacacaaactcagggtagggcagagagagagagagagagagagagagagagagagaatgggagggtgggctatcgcggtgcatggtggcgctggtgtcgaccctaatctcccactcgagcgccaagaagaagcgaaacaacttctcacgcgctgtctcaatcttggaatctctgctctaaattctaatcttcccgccatagatgtcgtcgaacttgtggtgagggaattggaaacggatccgctgttcaattcgggccgtggatctgccctgacagaaaaaggaacggtggagatggaggctagcatcatggatggtccaaaacgacgatgcggcgccgtttcgggtcttaccaccgttaagaacccgatctcgcttgctcgtttggttatggacaaatccccgcattcctacctcgccttctccggcgccgaagaatttgctaggcaacagggtgtggaggttgtggacaacgagtactttatcacacctgacaacgttggcatgctcaagctggcaaaggaagcaaacacaatcctgtttgattaccgaatcccaacatcggggtacgagacgtgcggatccggtgtggagagtccactgcaaatgaatggactcccaataagcgtgtacgcgcccgaaaccgttgggtgcgtggtggttgaccgggagggccggtgcgcggcagcaacatccacgggagggctgatgaacaaaatgaccgggcgcatcggtgattcgccgctgataggcgccgggacctacgcgtgcgacgtgtgcggcgtatcgtgcacgggtgaaggcgaggccatcatacgtggcacgctggcgcgtgaggtggcagcggtgatggaatacaaaggcttgaagcttcaagaagccgtggattttgtgatcaagcaccgtctcgatgaagggatggctggtctcattgctgtgtccaacgctggggaagtggcttatggtttcaattgcaatggcatgtttaggggctgtgccactgaaaatggcttcatggaggtcggaatctgggaatagcttcattattttccttcatggttgtttcgatgcaacttttggatttctgtaccatgttccactgtagtgtagggtctttctgctggtgcccgatttagataaaaaatggtaaccttgtttctaagaattagaaaaaaatgtgaaataataatatggtaactttgttgtctttctcttaaataaagacttgtggtttgtgacgggcgtgacaagcacatggatgcttctgtttttgttattttataatagcgaatcgtgtggtgtggccagaccccactactcttatgatgatactatgcgcgcgtacttggtctagttttgcacggaggattggaaaacactagggtttccagtgatcgcttggacaacttccctttgtgagttgtgtagaccaaagggcctgagattgcccttccacagtggcgagctgttgtaaatggatgcccctgtcggac

SEQ ID NO: 1880 - DNA, 723 bp, Glycine max
attcgcggtcaggttctcttgagtgaaaaggcagtagctaaccctgcagatatggaaaacttattgtctaagtgtgctgcacaactcttggatctcctaaaccgtgttgaagatgctgatattgaagacattgtagaagtgctctgcaattttcccacagttgaagttgaagatacggggaaacttgagtcaaggaaggtagttgctgctagtatgctaggaaagagcttacaagctggggatgttgttttcgagagggtgtttaatgctgtctattcagctttgcgcggcgttgtgcttggtggaagtgggatccgtgggaggaaattagcagaaatggctctcatgaaagttggggctggtattctgactgataaggtagtggaaactgctggtgttttgattgtggcagccactatttcagttagtgttcatggaccttggtataaacatttgactgataacctgtgatatatttgctacgtacatgcgtaataataataataataataataataaatacacacatttgtacataggagtgtgtaaaattgtaagctgtgtatcttaggtttgtagagaagtgacattgtttgtagaattcttttgatgtaacaaacagaaatgtatataggtgcctaaaccttaacattgaattgctaatatatgattggatcttggaacttttcaaaaaaaaaaaaaaagggcggcgctcacgtactg

SEQ ID NO: 1881 - DNA, 419 bp, Glycine max
aattcccggctcgacccacgcgtacgggaagggatggctggtctcattgctgtgtcaaatgctggggaagtggcttatgggttcaattgcaatggcatgtttaggggctgtgccactgaaaatggcttcatggaggttggaatctgggaataggttcatttatttggttcctggttgtttcgattcaactattgaatttgtgtatcatgttggagtttagtagggtcttgctgggtgctggattgagttcattattattagtctaatagtcttgtttctaagaattagaaaacaaaaaaaattgtgaaataatagtggtaactttggttgtctttttcttgaataaagacttttggtagaccctccacccacccgtgtagcttttttctctcgtagcaactatgacttaatttaattct

SEQ ID NO: 1882 - DNA, 484 bp, Glycine max
  unsure (1)..(484): unsure at all n locations
ggtagttgctgctaggatgctaggaaagagcttacaagctgnggatgctgttttcgaaagggtgtataatgctgtctattcagctttgcgcggtgttgtgcttggtggaagtgggatccatgggaggaaattagcagaaatggctctcatgaaagttggggctggtattctgactgataaggtagtggaaattgctggtgttttgattttggcagccactatttcagttagtgttcatgggccttggtataaacacttgactgataacatgtgatatttggtggtaagtgcatgcataataatataataaaaaagacacatttgtacataggagcgtgtaaaattgtaagctgtgtatcttaggtttgtagagaagtgacattatttgtagaattcttttgatgtaacaaacagaaatgtatataggtatctaaactttttaacattgaattgctaatgtatgattggatcttgaacttttcaa

SEQ ID NO: 1883 - DNA, 386 bp, Glycine max
actgaaaatggcttcatggaggtcggaatctgggaatagcttcattattttccttcatggttgtttcgatgcaacttttgcatttctgtaccatgttccactgtagtgtagggtctttctgctggtgcccgatttagataaaaaatggtaaccttgtttctaagaattagaaaaaaatgtgaaataataatatggtaactttgttgtctttctcttaaataaagacttgtggtagaccctcaacaaacccgtgtacctttttactatcacttacttaacttccttctctttttcttcaattcttatattatttgcaaggatcttaatgtgtacaaattgttaataattagtagcattttattaatcagtttctttgaatattaatt

SEQ ID NO: 1884 - DNA, 432 bp, Glycine max
cttctctcattgcagcctgaagaatctacacaaacggagggtagggcagagagtggggcagagagagacagagagagagagagagagagagagaatgggaggctgggctatcgcggtgcatggtggcgctggtgtcgaccctaatctcccactcgagcgccaagaagaagcgaaacaacttctcacgcgctgtctcaatcttggaatctctgctctaaattctaatcttccccccatagatgtcgtccaacttgtggtgagggaattggaaacggatccgctgttcaattcaggccgtggatctgccctgacagaaaaaggaacggtggggatgggggcttcatcatggatgtcaaacgacatctgcgcgttcggtctacacgtaaaaccactccttgtgttgtatgcaatccgatctactgcttcggcgaa

SEQ ID NO: 1885 - DNA, 273 bp, Glycine max
cacctctctctcgcgtgggcttccaggtgggataaaacacacaaaaactcagggtagggcagagagagagagagaaatgggaggttgggctatcgcggtgcatggtggcgctggtgtggaccctaatcttccactcgagcgtcaagaagaagcgaaacaacttctcacgcactgtctcaatcttggaatctctgctctaaattctaatcttcccgccatagatgtcgttgaacttgtggtgagggaattggaaacggatccgctgttcaattc

SEQ ID NO: 1886 - DNA, 417 bp, Glycine max
cactcaccattgtgttgagacacactctctttctttcttgttattctctttctctttcatcatttggcttaaaacacacacacaaaaggtggccaaaatgagcagtgtctgtgccaagcagcacaagttttacccctctcaccaactcctttctccaaagaaaaccctcagagaaattgacatccctccaaggaagctcctcactcgccgtgccgccgcatgcgtcggcggcaccgacgtgtactcctccgaggagaccatgctgcaaaagttcctcccttccaacgattctgacgaggacgacccttactcctcagaccacttccggatgttcgagttcaaggtccgccggtgcacccgaggccggagccacgactggaccgactgccccttcgcccatccgggtgaaaaggcacg

SEQ ID NO: 1887 - DNA, 443 bp, Glycine max
ggagtggcaattgaatagtgaggtgatggtgaaagtgtcatcaatggagaaagagggtgaaaagcaaaaactgggggaaggaccccaaatctcaagaatggagccggtaacacatggtgcctatggtggtggaatgtacggtaccgagaaagggcaaccggagaaacaaacaaagccaccggcaagtgagagccagagtgctgatggccccgttgataaggacgctatcaagcccaaacacaatcctcccccttcaactggggacagagatttagatatcactggccagtcttatatccagtaacaaaatatatgtaaatacaatcactataataatcacggtgtagcttcctcctttatgtttttttttttcctattgttgttcgtgacttaaacggtacctctttatgttggttttcttttaggcaaaccaattttttatc

SEQ ID NO: 1888 - DNA, 2128 bp, Glycine max
gagttttgcgaccgggaggagtcttctaacggaccggtttcgtcgcaagggtccggcaacggcggatcgggtgtatacgaggccatgcactcgccctcacctgattccggcccttacgagagggacataacatcgtctcatgcgcatgcagttacaaacaatggtgtgaaaatggaggaaactccagcttttgatctgaagagaaagaaagaaagttgcgatggaagtgctaccaagcacagaaggttctcttcctcggtggagaataataataataacaccgagaaacagtctcagtctggtttgaatggaattgacgatgaggatgagaaaaggaaggcgaggttgatgaggaacagggaaagtgcacagctttctaggcagaggaagaagcattacgtggaggagcttgaggagaaagtgagatcattgaattccatcattgctgatatgagtagtaagatgtcgtatgtggtggctgagaatgctacacttagacagcaagtcggtgctgctgctggtgtcatgtgtcctcctcctccagcacctgctcctgggatgtaccctcatcatcctccaatggcacctatgccttatccgtggatgccttgtgctccttatgttgttaagcctcaagggtctcaggttcctttggttcccattcctaggttgaagcctcagcaacctgcttcagcccccaagggtaaaaagagtgagaacaagaagagtgaggggaaaactacgaaggttgctagcattagtttgctgggtttgttcttctttatcatgcttttcggtgggcttcttcctcttgttgattttaggtttgggggtttagtggacaatgttcccggtactggtagttctaattatgttagtgatagggtgtatggtcatggtggagggaaggtttggtctttgaatggtcctaggaatgggtctggaagagatggggatgtaggattttctaatgggaggtttagtgtttctgacagagtgaagaattatgagaagagaggccggaatttaagagaagaaaggcatgatcggaaaggcccagatgattccagtcgtcagggcaatgctagtgagccccttgttgcttctctgtatgttcctaggaatgataagatggtgaagattgatgggaacttgattatccattccattatggccagtgagaaagccatggcatctcaaactgctgaggcaaagaaggacaagagggaaactgggttggccattcctaaggatttggattctgcattggctattcctggagttggaagaagcagagatcaacatccacatgtgtatagggtttctcctgaacagaggaaggctcttggctctggttcaaccaaagctttgaaggaccatatgaagtcctctgcaactgatggtaaaatgcaacagtggttccgtgaaggtcttgcagggccaatgttaagttctggcatgtgcactgaagttttccagtttgatgcttctccaagtcctggagcaatagttcctgcaacatcagtagccaatgtttccaccgaaaaccatcagaatgctaccagtgttaagaagaccaggaatagaagaacccttcatgagctcccagagccgcttaatgggtctagtctgaacataactgaagaacaagtgaaaaatttgcagaaagaccacttccatggtaacaagtcttctatggtggtttcagtccttgttgatcccagagaggctggtgatggtgatgttgatgttgatggcatgatgaggccaaagtcactctctcggatttttgtggttgtgctaattgatagtgtcaagtatgtcacttactcttgtggtctgcctcgtgcttctccccatttggtgactggttacgtatgacaatccttcggaaaaaagttttgatgcagccgaagcatctaacctgagttgttctagtttctgtaacaaaggatgtgggggactgggaaggaaagaaactcatctccagttttgtacatattaacatatttaaagtagcagtcttaaaaatgtacctgagagaatttagaagctgggcttgaccaactgcgtgtactgagttgagacctttcttagaaacttaataatatatgccccccttaagtcc

SEQ ID NO: 1889 - DNA, 717 bp, Glycine max
tatcattcaggtaactctctgcagctgttgcatccaaaatgccaggtcttaccatcggagacactattcctgatcttcaagttgaaactaaccaaggcaaaatcaagcttcatcagttctgtgctgatggctggaccatccttttctctcacccaggtgatttcaccccggtttgtaccactgagcttggtaagatggctcagtatgctaaggagttttatcaacgaggagtgaagctcttaggtttatcttgtgatgatgtgcaatcccacaatgagtggatcaaagacattgaagcctacactccaggtgcgaaagtgaattatccaataattgctgatccgaagagagaaatcatcaagcaactcaacatggttgaccctgatgagaaagactccactggcaacctaccctcaagggctcttcatattgttggcccagatttgaaggtgaaacttgttctttgactagttaaattaatgaatatgtagttttttttttgggctaattaacatgttaattaatttaatatgagggttaattgttgtagatcaagctgagttttctgtaccctgccactactgggaggaacatggatgaagtgccgagggtgatagagtcattgcagaaggcctcaaagttcaaggttgctaccccagcaaactggaagccagcggaccctgttgtcatcacccctgatgtcaccaatgagcaagc

SEQ ID NO: 1890 - DNA, 761 bp, Glycine max
tgggacaaacaatttactttactacaagctatctcagcttgttagcactttctttttcttcatttcattatttttctcaaaatgtcaactttcatgttgaaaatcttccttctaatttccatctttcaaatctctttcgccactaggaggttgaatgagttagttcaggaccaaactcagcttcttcgttaccacaatggccctcttctctctggcaaaatctccattaacctcatttggtacggccacttcaaaccttcccagaaggcaatagtctccgatttcatcacctcgctgtcaccctcatcccctcacagcacccaaccatccgtcgccacgtggtggaaaaccacagaaaaatactaccaccacctcagtaatactaaaaaaacctcccctctttcaattccactcaataaacagattctcgacgaaaactactcgctcggcaaatccctcacgagcaagcacctcattcagctagcttcaaagggtgaccacaaaaacgccatcaacgttgtgttaacttccgctgacgtggcagttgaaggtttctgcacgagccgatgtgggacccacggttcttcctcagcgggccatgcaaagaacaagaactacaagttcgcatacatatgggttgggaattcggaggcccaatgcccgggccaatgcacgtggccgtttcaccagcccatatatgggcctcaaagcccacctcttgttgcgccgaacaacgacgtgggcattgacggaatggtaat

SEQ ID NO: 1891 - DNA, 598 bp, Glycine max
cgcgtccgcccacgcgtccgcccacgcgtccgcacacacacagctagcagatattacatacacgtgaatcactaattaagccatggagaagaaatcaatagctgggttgtgcttcctcttccttgttctctttgttgctcaagaagttgtggtgcaaactgaggcaaagacttgcgagaacctggctgatacatacaggggtccatgcttcaccactggcagctgcgatgatcactgcaagaacaaagagcacttgctcagaggcagatgcagggacgattttcgctgttggtgcaccaaaaactgttaaatggatccattcactccaacgtgaagaagatgcatgcagcgctattttataaaaaataaaactactatatactatatataataagactggcgctgcatcaatgacctatgtattatagtatatattattaccgatgtcagaactatagatgcatgtactgtgcataacggctgagttatgtacttatgttaagaataaaataaagtgctgttgttgctgaataaaggaaaagctactattttggcggacggtcttgaggattcaagcttacttccgcgtgcatgcaag

SEQ ID NO: 1892 - DNA, 1369 bp, Glycine max
aagaaagggaaagcaactaaacattctctctcagtccttaaattctcgccgctcccacttctctccctctctattgcagcatggtgtcttcctcccaacacattctggtcaccggtggtgccggtttcattggcacccacaccgtcgttcagcttctcaaagctggcttcagcgtttcaataatcgacaatttcgataactccgtcatggaagcagtggaccgcgtccgccaagtggttggccctctgctttctcagaacctccaattcacccagggcgatctccggaatagggatgacttggagaaactcttctccaaaacaacatttgatgccgtgatccactttgctggcttgaaagcggttgctgaaagcgttgcgaagccccgtcgctattttgattttaatttggttggcaccatcaacctctacgaatttatggcaaagtataattgcaaaaagatggttttctcatcatctgcaaccgtttatggccaacctgaaaagataccgtgtgaggaggatttcaagttacaagctatgaatccctatggacggaccaagcttttcctggaagaaattgcccgagatattcagaaagctgaaccagaatggaagatcatattactgagatacttcaatccagttggggctcatgaaagtggcaaactcggtgaagatcccaagggcatcccaaataacctcatgccttacattcagcaagtagccgttggaagattgactgaactcaatgtataccgtcatgactatccaacgacggatggctctgcgatccgggactatatccatgtgatggacttggcagatggccatattgctgccctgcgaaagctcttcacaacggagaacataggttgtactgcttacaacctgggaactggtcgtggaacatctgtgcttgaaatggttgcagcatttgaaaaggcttctggcaagaaaattccagtaaaattatgtccaagaagaccgggagatgcgactgaggtttatgcatctacagagagagctgagaaagaacttggttggaaggcaaactatggtgtggaggagatgtgcagggaccaatggaattgggcaaagaacaatccctggggttacgcggggaagccttgaattagcttgagaaatatactgctcatctacgaatgcttttcacataaataggcatctcttatatagaatactttcatgttggatgatttgtttaggcagttcgttgtataatcttgacaataaaaatttggcagcatttcaagaagttaaagctatgtatttaaacaatatctttaaattaggctggcccttgatttgatattgaaaaaagtttatccagtcggccctcttttttt

SEQ ID NO: 1893 - DNA, 261 bp, Glycine max
gggaaagcaagtaaacattcccccgatactaatgcataattatcccaaaatcaaattataaataactccattatctctcactccttaaattctcaacgccgctcccacttctctccctctctattgcagcatggtgtcttcctcccaacacattctggtcaccggtggtgccggtttcattggcacccacaccgtcgttcagcttctcaaagctggcttcagcgtttcaataatcgacaatttcgataactccgtcatgga

SEQ ID NO: 1894 - DNA, 296 bp, Glycine max
aagaaagggaaagcaactaaacattctctctcagtccttaaattctcatcgcaacacaacaccccccttccccactccaaaatggtgacctcgtcgcaaaagattctggttaccgccggtgccggtttcataggcacccacaccgtggtccagcttctcaaaggaggcttcagtgtttcaataatcgacaatttcgataactccgtcgtggaagcagtggaccgcgtccgccaagtggtgggccctcagctttctcagaacctggaattcacccagggcgatctcaggaataggga

SEQ ID NO: 1895 - DNA, 675 bp, Glycine max
tcgcccacgcgtccgcttaacactctttttgctattagacgttaaaccatggaaccgccatcgcagcaacagcctccgcaaccgcaaccgccaccgcgcactgccaccatcctcggaaagtaccagctgacgcgcttcctcggccgtggcagcttcgccaaggtctaccaggggcgatccctcgtcgacggtgccgccgtggccgtgaaaatcatcgacaaatcgaaaaccgttgacgccggcatggagccacgcataatccgcgagatcgacgccatgcgccgcctccaccaccaccctaacatcctcaaaatccacgaggtgctcgccaccaaaaccaagatccacctcgtcgtggagctcgccgccggcggcgagctcttcgccaaaatctcccgccgcggaaagctaccggagtccaccgcgcgccgctacttccagcagctcgtttcggcgttgcggttctgccaccgcaacggcgtggcccaccgcgacctgaagccgcagaacctcctcctcgacggcgacggcaacctcaaggtctccgacttcgggctctccgcgctgccggagcagctcaagaacggcctcctccacaccgcctgcggcacgccggcgtacaccgcgccggagatactccgccggagcggcggctacgacgggtccaaggccgac

SEQ ID NO: 1896 - DNA, 810 bp, Glycine max
gacaccagtgtgacagtgtgtagtgtgttcgtgtccgtgtctcaagttgaaacgttgtgtcgtgtttgtcattgtctaagaaagagggagaaatgggagtagtgaacagaagaaattctgcagctcataccagtaaccaaaacaaaacaacttcaattcaactccctttaggaatttttggaacagtgctggcagtgttgttcattgggtttgtagcatggagttatcaaactattcaaccttcttctccaaagatatgtggatctcttaatggtcccactattacagcacccagaatcaaactaagagatggaaggaatttagcatacaaagagcatggtgtcccaaaagatgttgccaagcataaaatcatctttgtccatggttttgatgcttgcaggcatgatgcctatgttgccaaaacactatcacctgatgttgctgaggtattaggggcttacattgtatcttttgatagacctgggtatggggaaagtgatcctcatccaaatcaaacagttaagagcctggcattggatatagaagaacttactgataaattgggattagggtccaaattctacataataggtttttctttgggtggccaggttgtttggaggtgccttaagtatatccctcacaggctggcaggtgcagtgctcatagccccagttctcaattactggtgggctggtcttcctgcaaacttaactaatgaagttttctaccaacaaaaactacaagaccagtggacagttcgtgtggctcactacataccatggctaacttactggtggaacactcaaa

SEQ ID NO: 1897 - DNA, 389 bp, Glycine max
  unsure (1)..(389): unsure at all n locations
tgatctctcctttattgaagaaattagttatggaatctggttttgggaagctccctatttttgaagttgaagctacaattgatattgccttggactgcatggcatctttattgaagaaagttgaggctaatcaagcttcattctgctcagctagttgggtgactatcatattcccttttctggtgtccgatgtacatcattaagtgttcctcaggatcttgtcatgtcttataattgaagatacctcacaggctcatcctgaagaattaggcatgttggttgaagttttgaaaagtggaatggttaccagtgcttcaggatcccaatatcgactttcncttgatgcanaatgtgattatgggaatattggtggatcctgggagttaata

SEQ ID NO: 1898 - DNA, 1666 bp, Glycine max
ggtcgaggccgcgtcagagagagagaagggaaggaaaagtggtgttggtggttgtcctcctcattggtatggcaaccctttcctccatcctctcctcctctcttcctcttttccatcgctaccctaaccctaacccttcgctctttcgcccctccctttctctctctttctctcgcactaaaccccgttcccccttcctcgttctcgctgcctcttcccatgatttcgcctccaactccaagaaatcagtgctcaccgagttgatacaagagatagaacctctggatgttagccacattcagaaggatgttccaccaactacagcagatgccatgaaaaggactatatctggtatgctgggcttgcttccatctgatcagtttcacgttgtcattgaggccttgtgggaacccctttccaagttactaatttcttcaatgatgactgggtatacgctgcacaatgttgaatatagactttgtcttgagaaaaaccttgatatgtttgaaggagatatagagaagccaaaggcagaaagtacgaaagtggacttacaagggttgatgcatgacagtgtaaatgtaattgactttggtagagataagagcttgtcttctaaagttgaaaagcttcatgaggacgctgacattcaagaacttggtgacatatctgcagaagctctgcaatatatttttaatctgcaatctcgcttgtcttccatgaaaaaggagctgcatgaagtaaagaggaaaagtgctgctcttcaaatgcaacagtttgttggagaggaaaagaacgatttattggattacttgagatctcttcaacctgaacaggtagctcagctttccgaatttacatcccctgagcttaaggacaccatcctctttgttgtccatggtctccttgctaccctttctcctaagatgcattctaaaccttccaccatctcagaaaatacaacagttggagcaacaaatgttgggaatgaggattgtgctgaggttgttgagaactctgctcatcaatttcagcctgttgtttcattaactcgggactatcttgctcgcctgctcttttggtgcatgcttttgggacactatcttagaggccttgagtgtcgattggatttgacagatttgctttccttgacaagtgatcctgagaatgatgcttctggcagtcaaccgattacttgaatgtgcatgcttttgggacgctatcttagaggccttgagtgtcgattggatttgacagatttgctttgcttggcaagtgatcctgagaatgaagatcaaagttcggtggttcaatatgtatatagacgtgttgtttcaacctgatttttgcgatacagactcaagtaccaatcacttctgctaaggagttatctttgcttactgaagaatattgcattcctgccatgtaccaattctcggtctcttccagtgttagagcgtcggtaggatcgaagatggttggcatgtagccatttgttttggctgggtgataatatcttaatagaatatggaaatgttgtgacgaactctgcagtagcagttctatttaaataaaacaatttagttaggtgatctatagattttattttccacttatatctcatttgatgtcttgatccgggtaataaagagcaaataattttatt

SEQ ID NO: 1899 - DNA, 482 bp, Glycine max
gacagcgtcacggagagagaagagaaggaagtgggtgttggtggttgtcctcctccctcctcatgggtatggcaaccctctcctcctctcttccgcttttccatcgctaccctaaccctaaccctaaccctaatccttcgctcttccgcccctccctttccctctccttctccttctctcgcactaaaccccgtcgtgccccctttctcgttctcgcttcctcttcccacgatttcacctccaactccaagaaatcagtgctcactgagttgatacaagagatagaacctctggatgttagccacatccagaaagatgttccgccaactacaacagatgccatgaaaaggactatatctggtatgctgggcttgcttccatctgatcagtttcacgttgtcattgaggccttgtgggaacccctttccaagttacttatttcttcaatgatgactgggtatacgctgcacaatgttgaatat

SEQ ID NO: 1900 - DNA, 395 bp, Glycine max
  unsure (1)..(395): unsure at all n locations
ggatagaagcctaacaggttggggcaagacaaccagaaggccccgccgacagaggtgcccggccggtaaccctccgttgatccagttaacctaatcaccataagaggcttaaaatttttagatgtgaatttatagaggtaagcagggcaggctttcgaattaatggaacgcatgatgttctcaggcatggggatttctcttgtaaatttcttcaacccgtatttgggtatatgcttgattgtcagtctttggggtggtggtaccaacttgtattattcttaaataatgttgcatgatttcttctcattatctctttatagaactgttgagatatataaaccagtgttcctccaaaaaaaaaaaaaaaaaaaaaaaannnnncgcgcccgctctag

SEQ ID NO: 1901 - DNA, 1083 bp, Glycine max
ctgccgaatgaattaggtgacatatagaagagcactgacgtcggacgcacgcgttcgttaacccgattcacgcaactaaataagaaatgaagagtactatcttctttgctctctttctagtttgtgccttcaccatctcatacctgccttcagccaccgctcagttcgtgctcgacactgatgatgatcctcttcaaaacggtggcacatactatatgttgccagttatgagaggaaagggcggtggaatagaagtagattcaactggaaaagaaatatgccctctcactgttgtgcaatcacccaatgagctcgataaggggattggactagtctttacatctccattacatgccctttttatcgccgaaggctatcctttgagcattaagtttggttcatttgcagttataacgctgtgtgccggcatgcctactgagtgggctattgtggagagagagggtctacaagctgttaaacttgctgcacgcgatacagtagatggttggtttaatattgagagagtttcccgtgaatacaatgactataagcttgtgttctgtccacagcaagctgaagataacaaatgcgaggatattgggattcagatcgacgatgatggaatcaggcgtttagtgctgtctaagaacaaaccattagtggttcagtttcagaaatttagatcatcaactgcatgaagcgtgaaaaatcacgtgctttcttgttaagagagacaagtgtacgtaagactaaataaatgctttggctaataataaattggttacagactaaataaaataatcaaagcttatgccttcccccaaaggctgaatgcaaaaaaaaagctcttcctcagtattttatccactttaggaggagaattacttttgccaagtgtacgtaagactaaataaatgctttggcttgtaataaattgaaaaaaaaaaaaaaaaaaaaactcgagactagtctctctcctctctctctctctctctctctctctctctctctctctctctctctctctctctctctctctctctctctctctctctctctctctctctctctctctctcctcgt

SEQ ID NO: 1902 - DNA, 247 bp, Glycine max
atggaatcaggcgtttagtgctgtctaagaacaaaccattagtggttcagtttcagaaatttagagtactatcttctttgctctctttctagtttgtgccttcaccatctcatacctgccttcagccaccgctcagttcgtgctcgacactgatgatgatcctcttcaaaacggtggcacatactatatgttgccagttatgagaggaaagggcggtggaatagaagtagattcaactggaaaagaa

SEQ ID NO: 1903 - DNA, 1007 bp, Glycine max
ccttgcgtccgtccacacgctcacaataacacactgtcaccgttccgttccgttttcctctgttttttttttctttctttcaaatccccgcttcgtggaaatcccgaaccagaaaccatgcttctccgaaccgctgctgcttctgcttcgtccctctccctcttcagcccgaacgccgaacctccccgttcggttcccgctcgtggattggtggttcgcgcagcgaaaggatccacgaaccaccgcgccctgaccggagtgatttttgaaccgttcgaagaggtgaagaaggagctcgatctcgttcccaccgttccgcaagcttctctcgcgcgccaaaaatacgttgacgaatctgagtccgccgttaacgaacaaatcaatgtggagtataacgtttcgtacgtttaccatgccatgtttgcgtacttcgatagggacaacgttgcgctgagaggacttgccaagttttttaaggaatcgagtgaagaagaaagagagcatgctgagaaattgatggagtatcagaacaaacgtggtggaagagtgaagttgcagtcaattgtgatgccgctttctgagtttgatcatgcagataagggagatgcgctgcacgcaatggaactcgctctctcattagagaagctaacgaacgagaagctccttaacttgcacagtgttgccacaaagaatggtgacgtgcagttggctgacttcgtggaaactgagtatctgggtgaacaggtggaagccatcaaaagaatatccgagtatgttgctcagctcagaagagttggcaaagggacatggtgtttggcactttgatcagatgctcctccacgagggaggagatgcagcttgatgattattactacattacccccctttctattattattttgtatcttgctcatctaggtggctttctagtcttttgctagaaggtggaactgacctatatggatgaataaaatacatgtggactggtttcggtcctctcgtagatt

SEQ ID NO: 1904 - DNA, 524 bp, Glycine max
gatccacacccacactgtcacctttccgttcatttcctctgttttttcttcaaatccattgtttcgtggaaatcccgaaatttaaccatgcttctccgaaccgccgcctccgccgcttctgcttcgtccctctccctcttcagccctacctccgaacctctccgttcggttcccgctcgtggattggtggttcgcgccgcgaaaggatccacgaaccaccgcgccctaaccggcgtgatctttgaaccgttcgaagaggtgaagaaggagctcgatctcgttcccaccgttccacaagcttctctcgcccgccaaaaatacgttgacgaatctgaagccgccgttaacgaacaaatcaatgtggagtataacgtttcgtacgtttaccatgccatgtttgcgcacttcgatagggacaacgttgcgctgagaggacttgccaagtaagtaacggtttcgttatttttagaatctatcgttttattttatactagttaggagtgattattagttattaataatgg

SEQ ID NO: 1905 - DNA, 1134 bp, Glycine max
ctcgagccgaatcggctcgagtgttgttggtgttgttcagttcttcttcctctctttgaacaacatctcacaattcattcaccttttaattcatctcactcacaaatcacaatgctcttcctttcttccttaataataataccataataatctgttacgttacggggcccaaatgtctgttacggagctcaaggagcgtcactctgctgccaccgacaccgtcaacaatctcagacaccgtttaaagcagaagcgcctttcgttgctcgacacagatatttctgggtatgcaaggtctcagggtagaacgcctgtgacctttggacctacggatctggtttgctgtagaaccttgcagggtcacacgggaaaggtgtattcattggattggacttctgaaaaaagtcagattgttagtgcatctcaagatgggcgattaatagtgtggaatgctctaactaggcagaaaattcatgccataaagctaccttgtgcatgggtcatgacctgtgctttttcaccaactggtcagtctgttgcatgcggtggtcttgacagtgtttgttctattttcaatcttaattcacccactgacagggatgggaatctacctgtttcccggatgcttagtggacataagggttatgtttcctcttgtcagtatgttccagatgaagatactcatttaattactggttctggtgatcagacatgtgttttatgggatattactactggccttaaaacatctgtctttggaggagagtttcagtctggacatactgcagatgtacttagtatctccattaatggatccaactcgagaatgtttgtatctggttcttgtgatgcaactgctcgattgtgggatactcgcgtggcaagtcgagcagtgcggacatttcatgggcatgagggagatgttaatgcagtcaaattctttcctgatggaaatagatttggaactggttcagatgatggaacctgcagattatttgacattaggactgggcaccaacttcaagtttattatcagcagcacagtgacaatgagatcccacctgtgacttccattgcattctctgcttcaggaagacttctctttgctggatacacaaatggagattgctatgt

SEQ ID NO: 1906 - DNA, 557 bp, Glycine max
cgcgtgggctcacgagtcattcagcttttgaaataaataaattgcctttctccctcacaatcacaatgctcttctacccttccttccttccttccctaatactataatttgttacgtcacggagcccaaatgtctgttacggagctcaaagagcgtcactccgctgccaccgacaccgtcaacaatctcagacaccgtttaaagcagaagcgcctttcgttgctcgacacagatgtttctgggtatgcaaggtctcagggtagaacacctgtgacctttggacctacggatctggtttgctgtagaaccttgcacggtcacacgggaaaggtgtattcattggattggacttctgaaaaaagtcagattgttagtgcatctcaagatgggcgattaatagtgtggaatgctctaactaggcagaaaattcatgccataaagctgccttgtgcatgggtcatgacatgtgctttttcaccaactggtcagtctgttgcatgcggtggtcttgacagtgtttgttctattttcaatctttattcacccactgacaagga

SEQ ID NO: 1907 - DNA, 459 bp, Glycine max
gggggccgtgtgtggaagagttgccagcgtcagaaagtcagaaacaacttgacttcttctccttcttcttcttcttcttctctttgaacagaacaacaactcaactcatctcacgattcattcagctttttaaataaataaaattcctttctccctcacaatcacaatgctcttctacccttcaaacccaacatcacacccctcttccttccttccttccctaatactataatttgttacgtcacggagcccaaatgtctgttacggagctcaaagagcgtcactccgctgccaccgacaccgtcaacaatctcagacaccgtttaaagcagtagcgcctttcgttgctcgacacagatgtttctgggtatgcaaggtctcagggtagaacacctgtgacctttggacctacggatctggtttgctgtagaaccttgcagggtcacacgggaaaggtgt

SEQ ID NO: 1908 - DNA, 290 bp, Glycine max
gcatggtgcatgcagcggaacatgtagtagaatagaagagaagagaagattgttaattgaagcagaggaagacctaacatgtccgttacggagctgaaggagcgtcacttggcggcgacggaaaccgtcaacagtctcagggagcgcttgaaggagaggcgtctttcattgctcgatacagatattgctggctacgccaggtctcaaggtagatcccctgtcacctttggtcccaccgatctcgtttgttgtagaactctccagggtcatgcgggaaaggtgtactcatt

SEQ ID NO: 1909 - DNA, 846 bp, Glycine max
accagttcagttcccatttgactcgttcccttgaagcgaaattatttgtgttgcttttttcttatcactcttgcaaccttttcattgttgctttgggagaacaaagaagcagctaaattcttttttacaagagtagattttttttctatcataatttttggatttttttttttcaagaaacatacaaaaataaaattatatacccaaatgtaactcacctaattttaaaaaacatacaactttattgtgcataatgtaaatttgggttggggatccaaatttttaccgtgttttcaattttttttcaaaaaccttttgagattttgggtccccaacccgaattctcaacagcttacggcgaagcattcgttcggtgttttcaacagggagaggtgacgccgacgtcgatgtagatgatggatgaggcctgtgctggggacgttgacgcggatgctcatgacctggaagcagaggaagagatcctgggcctcgaggccgtagattgcgtcgattttctggggagtacagtccttatggccagcctgtgctcgttcaattttaaaaaaatcacgtcaataataaaagcccgttgtgaatcctggtcacttgaattttccttttttttataaaaaaaaaacagactaaatccagatcttttcacgatgtactgtaaaattgtatttttttaaatagtgatgagttgtatagttgggtatgtaaatgtatgtaatcattatttttggacccttttgaatatcatgaaatacagtttgtattgttaagttaatttttaagctttattatattacaatcgcgtcttatctttgaaaaaaaaaaaaaaaaaaa

SEQ ID NO: 1910 - DNA, 1853 bp, Glycine max
ggactgtagcatatacaaaccatactgttcttccggaggcattagagaaatggagcttggatcttatgcaaaaactgcttccacgccatattgagattatagaaatgattgatgaggagctgattcggaccataattgcagaatatggcacagagaattcagacttgctggagaaaaaattgaaggaaatgagaatactagaaaatgtcgaattgcctgcagaatttgcagatatagtggttaagtccaaagaggccattgatattcctagtgaggagctgcaaagttctgaacaagcagaagcagaagacgaaaaagatgatgatgaagtggaagcagttgctaaaaagaatggaacagatgaaagttccattgaggatgagaaagaagagttgcctgagccagtaccagaaccaccaaaattggttcgtatggcaaatttgtgtgttgtgggtggtcatgcagtgaatggggttgcagagatacatagtgaaattgtaaaagatgatgttttcaatgcattttataagttgtggcccgagaagttccaaaacaaaacaaatggtgtgacaccaaggagatggatcaggttctgcaatccagatctgagtaaaataataaccgagtggataggtactgaggattgggtcctaaatactggaaaattggccgagctacggaagtttgtagacaatgaggatctacaagtgcagtggagggaagcaaagaggagtaacaaagttaaagttgcagcattcatcagagaaaaaacagggtattctgtcagtcctgatgcaatgtttgacatccaggtgaagagaatccatgaatataagcgacaattaatgaacatatttggaattgtttaccgatacaagaagatgaaagaaatgagtgcggcagaaagggaagcaaattttgttcctagagtttgtatatttgggggaaaagcatttgctacatatgtgcaagccaagagaattgtgaaatttattacagatgttggggctacagtaaatcatgaccctgaaataggagatctacttaaggttgtttttgtccctgattataatgtcagtgttgccgagatgcttattccagcaagtgaattgtcacaacatatcagtactgctggaatggaggcaagtggaactagcaatatgaaatttgcaatgaatggctgcatattgattggaactttagatggggccaatgttgaaataagggaagaggttggtgcagacaacttcttcctcttcggtgccacggctcatgaaattgctgggctgaggaaagaaagagcagagggaaagtttgtgcctgatccacgatttgaagaagttaaagaatttgtcagaagtggcgtttttggatcttacaactatgacgaattgatgggatccttagaaggaaatgaaggttttggtcgagcagattatttccttgtagggaaagacttccccagctacatagaatgccaagagaaggttgatgaagcataccgtgaccaaactaaatggacaagaatgtcaatattgaacacagcaggttcatacaagtttagcagtgaccgcacgattcatgaatatgcccgagagatatggaacattgaaccagtccaattgccatagaggagtatagagaatcggtgccacgtggttgtgatgatcactgcatagcttaattcctcgtagcagagaataaaatataacttcgcgtagagacgcgctttaagggtgcgctcatagtcaaaataagcttgcagttctgtaatatatatgttttatgggtacttcgtcggtgtaaatcaaacctttgtcttataataataaatatcaaattgttttggcttc

SEQ ID NO: 1911 - DNA, 516 bp, Glycine max
aatttgtgttccctgttctgctcgtgttttactgctggtttggaggcaagtggaactagcaatatgaaatttgcaatgaatggctgcatattgattggaactttagatggggccaatgttgaaataagggaagaggttggtgcagacaacttcttcctctttggtgccaaggctcatgaaattgctgggctgaggaaagaaagagcagagggaaaggtctgtcttaatacccatgttgtgcattttacttactgtgaaacatagttaatgccatgctgtttggggcatacaagcatagaacaaatattccactgttgaagtttctaatgttagtaataagaaattcacggatccaatgacttcaaaagaattgaacgaggagccatatgaagtgaaatcccatgtacggttttgtagtgtggcagtaagggtgacttatctgtcaacttttccacttctcaatggattggcagtaatttttttactgcatgtacattcccaaaatgatgatgtttt

SEQ ID NO: 1912 - DNA, 1191 bp, Glycine max
  unsure (1)..(1191): unsure at all n locations
cccacgcgtncgggttgcgaaaaagacgacacgacagagggtgacctccttgcttctctcatgttacaatcctcttgccgctgagctccctttctcctcggtccacagagacaaaatgtaagacaggtgccaacagttcatcacgaaagaaaggactagctgagccgagatcactaactaaaacgaatttaatactaatcgaaaatactaatagaatagaaatagaactgtcttttcatatagatatcccttcaacacaacataggtcatcgaaaggatctcgaagacccaccaacgcacgaaagccgggatctttcagaaaatggattcctattcgaagggtgcataaccgcatggataagctcacactaacccgtcaatttgggatccaattcggttccttaggaggtatcgggaaggaattttggaatgtaataatatcgattcatacagatacagaagaaagggttctctattgattcaaacgctctacctacgagatagggatagagaaagaggaaaaaaccgaggatttcacatagtacttttggtcgaaaaatcgatctgatttttttcgtacttttcgctcaatgatgaaatgggtcagattctacaggaccaaaccttgtgggagttaaggaatgatggaagaaaagaaataaaaaaaagtaaataaaaatgcagtagaagagtcctgattccaaacgaaaaaattcaaacttgattgaaaaggatctttctgattattgaagaatgggacaaaaggattgatcgcgaaaaagatttcttgttcttattagaagatcgtgattggatccacatatgtttggtaaaaagaaagaaaaatattcttctttgagaataataaaaaaggaaagtgttcaattggaacatgaaaacgtgacagaattggtcctagttactcttcggaacggaatagaagaaggggagagattctcgaaccgaactaggaaacggatccaatgacttcaaaagaattgaacgaggagccatatgaagtgaaaatctcatgtacggttctgtagagtggcagtaagggtgacttatctgtcaacttttccactattacacccaaaaaaccaaactctgctttacgtaaagttgccagagtacgcttaacctctggatttgaaattactgcttatatacccggtattggccataatttac

SEQ ID NO: 1913 - DNA, 486 bp, Glycine max
  unsure (1)..(486): unsure at all n locations
tccacgagtcaccaacgcacgaaagccgggatctttcagataatggattcctgttcnaagggtgcataaccgcatggataagctcacactaacccgtcaatttgggatccaattcgggcccttaggaactttgcagaggcagagggtaaatgtaataatatcgattcatacagatacagaagacagggttctctattgattcaaacgctctacctacgagatagggatagagcaaggcgcgacacccccgcggctttcacatagtacttttgggtcgaaaaatcgatctgatttttttcgtacttttcgctcaatgatgacatgggtcagattctacaggaccaaaccaagtgggcgttccggcgtgatggtagcctcgccctgaagcgccgtaaataaaaatgcagtagccgagtcctgattccaaacgagaaaattcaaacttgattgaaaaggatctttctgattattgaagaatgggacaaa

SEQ ID NO: 1914 - DNA, 248 bp, Glycine max
gagagatgggcagttatcgatctacgagtctttgccattgatgatcagcatttcgggtcatgcacctattccttttccacctccttgcttctctcatggtacaatcctcttgccgcgagctccctttctcctcggtccacagagacgaaatgtaagacaggtgccaacagttcatcacgactgataaggactacgctgagccgagatcactagctatgacggatttcatactaatcgaaaatactaat

SEQ ID NO: 1915 - DNA, 1033 bp, Glycine max
  unsure (1)..(1033): unsure at all n locations
tttggatgatgaacggttgaagaagttgggtgcgttgggtttgactatgagtaagcctgtggctgtgtgggatgaggatacccggaagccgaagaagaagacggtgcaggatgtgctggggaagtttagctttgatgatgatgttatggcaattggagatgtgttctatgctgaagtggaacgggaatgggtgatgcaaccgggtgggccaattgctcacaaatgcacgactctcattgaacctaatcggcttattttactcactgctcagcggtttattcagacattcctgggaaggaacttcgttgcattgcactttcggagacatgggtttttgaaattctgtaatgctaagaagccaagttgcttttaccccattcctcaagctgcagattgcatcttgagggtcgttgagagggccgatgcacctatcatctatctttctacggatgcagcagaaagtgaaactggtctgcttcagtcactagttgtgctgaatggcaggcctgttcctcttgtaatacgtccagctcgaaattcagcagaaaaatgggatgctctgttgtacaggcataatatggatggagattcacaggtggaagctatgttggacaagactatatgtgccatgtctagcgtgttcattggagcccctggttccactttcactgaagacatcctgcggctgagaaaggactggggatcagcatccatgtgtgatgagtatctttgccaaggtgaggaaccaaacataatagcggaaaatgaatgacaacaaaaaaaggtcttctcaagcccatgactcaggtccagcacgtattttcttctgccatgattggggatttgtcaatgtgagtagtcatgtatgatactagagttagccatgttaatgtaatgtataagttttgcttgttatacatattcttttgtcataatcattataatttgtatttgttgtattatcgacacattgatccagaatttgccccaaaacaattgtggcatttcaccnnnnnnnnnnnnnnnnnnnnnn

SEQ ID NO: 1916 - DNA, 1137 bp, Glycine max
tttttataataagagctcttgaacttttgttattgatatattttacaatacatagggctgtaatagattctatgattaagtccctcgtttccgtaagctctggaataggctcgaagcaaagcaatggctacttcaaagttgaaaacccagaatgtggttgtatctctctccctaaccttaaccttggtactggtgctactgaccagcaaggcaaactcagcggaaactgtttctttcagctggaacaagttcgtgccgaagcaaccaaacatgatcctccaaggagacgctattgtgacctcctcgggaaagttacaactcaataaggttgacgaaaacggcaccccaaaaccctcgtctcttggtcgcgccctctactccacccccatccacatttgggacaaagaaaccggtagcgttgccagcttcgccgcttccttcaacttcaccttctatgcccctgacacaaaaaggcttgcagatgggcttgccttctttctcgcaccaattgacactaagccacaaacacatgcaggttatcttggtcttttcaacgaaaacgagtctggtgatcaagtcgtcgctgttgagtttgacactttccggaactcttgggatccaccaaatccacacatcggaattaacgtcaattctatcagatccatcaaaacgacgtcttgggatttggccaacaataaagtagccaaggttctcattacctatgatgcctccaccagcctcttggttgcttctttggtctacccttcacagagaaccagcaatatcctctccgatgtggtcgatttgaagacttctcttcccgagtgggtgaggatagggttctctgctgccacgggactcgacatacctggggaatcgcatgacgtgctttcttggtcttttgcttccaatttgccacacgctagcagtaacattgatcctttggatcttacaagctttgtgttgcatgaggccatctaaatgtgacagatcgaaggaagaaagtgtaataagacgactctcactactcgatcgctagtgattgtcattgttatatataataatgttatctttcacaacttatcgtaatgcatgtgaaactataacacattaatcctacttgtcatatgataaaaa

SEQ ID NO: 1917 - DNA, 253 bp, Glycine max
atgggttctttagaaggggcgccccttttttttttttttaagggaccggaacagggttacatttattattagagctcttgaccctttggtagttgatagattttgcaatacataggggctgtaatagatccgacgattaagtccctcgtttcatttagacattgacaatgtatgtatgactgactctacccgagttgcatcgcttcttcccgtttcaagtcaaaatccctgatgagtgcgtacgcgtgggcgt

SEQ ID NO: 1918 - DNA, 844 bp, Glycine max
agaaggggagggtgaccagtgaacacaatacagggcagcatcgccatgggattgagtattctgagaagcacttccatttccactcctatctcttcctccaaatccaaacccattttctcaactcttgttcgttcatctttcgcctccatttcccccacaaagtgtgttactcccaccactcttttcgtttctgccacccccttcttcaccgcctcacccaagcgcggctttcgtggtgggattgtggccatggccgccgctggctcgctccgcaaatcagaggaagagtggcgcgcagttctctcccctgaacagtttcgtattctcaggcaaaagggcaccgagttccctggaacaggagagtatgacaagttctttgatgagggagtttacaactgtgctggttgtgggacacctctctacaggtccttaacaaaattcaattctggttgtggctggccagccttctatgaggggattcctggagccataaatcgcaatccggaccctgatgggatgaggacagaaataacgtgtgctgcttgtgggggacatctaggtcacgtctttaaaggagaaggatttccaacgcccactaacgaacgccattgtgtcaatagcatttcactgaaatttgcgccagccaattcttaataaaaattgagtctgctgttcggacgtgactgcttaagtacccaacattagtaaaaaaaaattatgcaatgtacttatattatgaatgaagttcatataatgatggctaaataccaattttaattaaagagttatgttgaaaaaaaaaaaaaaaagggcggccgccgagtgagctcgtcgacccgggccc

SEQ ID NO: 1919 - DNA, 427 bp, Glycine max
gatgtaaaaggtgagggtgacccgtgattcgtgaacacggacaccatcgccatgggcttcaatattctgagaaccacttccatctccactcctatctcttcctccaaatccaaacccattttctcaactcttcttcgttcttctccttccaccattttccccccaaagtccgttactcccaccactcttttcgtttctgccacccccttcttcactctccatcccaagcttggttttcgtggtgggattgtggccatggccgcacctggctctctccgcaaatccgaggaagagtggcgcgcaattctctcccctgaacagtttcggatcctcaggcaaaagggcaccgagttccctggaacaggagagtatgacaagttctatgaagagggagtttacaactgtgctggttgtgggacttcactct

SEQ ID NO: 1920 - DNA, 1655 bp, Glycine max
ggagattggcagaataaggtcggaggattgattgagaatcgttcgagactgcaaaatccaaaaccaaaaccaaacacaacacagcattcgtcattcaccgccttgtctcgtcttcttctgtctccgaacacggaatctctctgaatcgcgggattaagagaggaatatgcaacagaggcttaagttgcagcaacaacaacaagccctcatgcagcaagctttgcttcaacagcagcagatgtaccaccctggcatgctcgccgctgctatgtctcagatggagcctgttccaagtggaaatttgcctcctggttttgatacgtctgcatgccgtagtgtttatgtaggaaatattcatgtaaatgtcaccgataaacttcttgcagaagtttttcagagtgctggtcctcttgctggctgcaagctcataagaaaagaaaagtcctcttatggttttgtggactaccacgatcgagcatctgcagcccttgcaatagtgacattgcatggacgacaactgtatggtcaagcacttaaggtgaattgcgcatatgccaatagcacgtagggaggacacgtcagggcacttcaatatatttgtcggtgatttgagtccagaggttactgatgcaactttatttgcttgcttctcagtctatcctagttgttctgatgcaagggttatgtgggatcacaaaactggtcggtcaaaaggatatggttttgtttctttccgtgatcatcaggatgcccaaagtgccataaatgatatgacaggtaagtggctgggaaataggcaaatacgatgcaactgggcaactaagggtgctggtggcagttccaatgaagagaagattaatgacagtcaaaatgctgttgtgcttacaaatggatcttcagatggaggtcaagataataacaatgaggatgctcctgataacaatccttcatacaccacagtttatgttggcaaccttcctcatgatgtaacacaagctgaacttcattgtcagttccatgcactgggggctggggtgattgaggaggttcgagttcagagggataaaggttttggatttgtcagatacaacactcatgacgaagctgcactggccattcagatggctaatggaagacttgttcgtgggaagaatatgaagtgttcatggggtagtaaaccaactccacctggaacggcttcaaacccactacctcctcctgctcaaccatatcaaatacttcccactgcagggatgaaccaagggtattctcctgcggagttgttggcttatcagcgccaactggccttgagtcaggctgctgtatctggtctttcaggtcaaactcttctgcaaatgactggacaacatggcctagctccagcttctatgggcgtaaactctggggcatctcaagccatgtatgatggatataccggtaattcatcgagacagcagcttatgtactatcgttgacacactggccagcgcagattcacagttgcattgttatcttctggggggggctttgatgtgcatcacatttctctttgcttccccacagcatgttcttttcatactgatgcttttttattgatgcagcatcttggaatgttatgaagctacttttacaatagaggtctagaataaaaatac

SEQ ID NO: 1921 - DNA, 512 bp, Glycine max
agtggcatatcagcgccaactggccttgagtcacgctgctgtatctggtctttcaggtcaaactcttctgcaaatgactggacaacatggcctagctccagcttcgatgggcgtaaactctggggcatctcaagccatgtatgatggatataccggtaattcatcgagacagcagcttatgtactatcgttgacacactggccagcgcagattcacagttgcattgttatcttctgggggctttgatgtgcatcacatttctctttgcttccccacagcatgtccttttcatactgggctttttttattgaggtattatcgtggcttgatatttatttaatttttacgtcgtgttgtattttgtattgtttgatctaatgaggatttgatggctcgaaaaagaggaatctatgttttgctagaaagagcagccaattttatgtttgggtagttttcatcaatgttattgtgtattatatttatatataagtatgactcaagttcgtgttaat

SEQ ID NO: 1922 - DNA, 410 bp, Glycine max
cgtccgttcaatcgccgatttcaccatcattatcatcatcattacaattattattattttctcgctcgatttgtttcaattacgacatagtcgcgataatggcctctttgtttttttttgtgttatcaggaatctctctgaatcgcgggattaagagaggaatatgcaacagaggcttaagttgcagcaacaacagcaagccctcatgcagcaagctttgcttcaacagcagcagatgtaccaccctggcatgctcgccgctgctatgtctcagatggagcctgttccaagtggaaatgtgcctcctggttttgatacgtctgcatgccgtagtgtttatgtaggaaatattcatgtaaatgtcaccgataaacttcttgcagaagtttttcagagtgctggtcctcttg

SEQ ID NO: 1923 - DNA, 890 bp, Glycine max
  unsure (1)..(890): unsure at all n locations
ggcctactgttccttatacatgaccagaggaaaataatttcttttaataaaaaaaacttagaatcgaaacgaaaaatcgccatgaatcccaaaatcctcttcgtgtttgctctgcttctgaatctcgtatccaattcgttccaaaaccctaaccctaaaacccccaaatcaacgtcatcgcaggctcacgtggagctcatcaaccacggcttacccgccggtcttctccccgccaccaccgtcttgggctacgccgtgaaccgtacctccggtgactttaccgtcaagctcggcggcgcgtgcaagatcacgctcccgccggacaactacgtcgccacctattccgacaccatcacagggaagatcgtgaaggggaaaatcgctgaactcgaggggattagggttcgcgcgttcttcaagtggtggtccatcaccggaatccgctcctccggcgatgatatcgtcttcgaggtcggtatggtcacggcgaagtatccatcgaagaatttcgacgatagccccgcgtgcgagggccagcactcttcttcgtgaaaagggtattagctacttattcgcagccttcgtgtgttatgtaatgagatagcatccatccagtgtccactaagtgcagattgtgtgtaatgtaatattacaaggatagtattacttttacatcatcgtatttatgccacgacgaatccactttaatgttcatacactcgttggacccgtgaataaggccattttgtacgtttcttatttaatattctctgttgtagtagtatggccatgtaaatatcaaccttttttcccaacgttgtcgattaattagtaaatgattggatttaaaaaaaagaaangaaaagaatgaccaaaagtatactataact

SEQ ID NO: 1924 - DNA, 1420 bp, Glycine max
cggacccgcgcgttcaattctgttcatcctttgcttcccaaagaaagagaaaataaaaagcaatgggtagccttgaagcggaaagaacaacagtaggattggcagcaagagacccttcagggattctctccccatacacctacaatctaagaaacacaggccctgatgatgtttacataaaagttcactactgtggaatttgccattctgatctccaccagattaaaaatgatcttggcatgtccaactatcccatggtcccaggacatgaagtggttggtgaggtactggaggtgggatcaaacgttagcaggttcagagtgggagagttggtgggagttggactcctcgtaggttgctgcaaaaactgccagccatgccaacaagacattgagaattactgcagcaagaagatctggtcttacaatgatgtttatgtcgatggaaaacccacacagggtggctttgctgaaaccatgatcgttgagcaaaagtttgtggtgaagattccagagggtttggcgccagagcaagtggcaccattactgtgtgcgggtgtgacagtgtacagtccactggtacactttgggctgaaagagagtgggctaagaggtggaatattggggcttggaggagtgggacacatgggggtgaagatagcaaaggcactgggtcatcatgtgactgtgataagctcttctgacaagaagaaacaagaggcacttgaacaccttggagctgatcaatatctcgttagctctgatgccactgccatgcaggaagctgctgattcacttgactacatcattgacactgtgcctgttggtcaccctcttgagccttatctctccttgctcaaacttgatggcaagttgatcttgatgggggtcatcaacacccctcttcaatttgttagccccatggtcatgctagggaggaggtcaatcacgggaagctttattgggagcatgaaggagacagaggagatgttggagttctggaaagagaagggtctgagttcgatgattgaagtggtaaacatggattacattaacaaagcctttgaaaggttggagaagaacgatgtgagatacaggtttgtagtggatgtcaaaggcagcaaacttgttgattagtaaaagaaagtataccagcacgacacccgcaacatccatccatcatcatcaagagtctggaaaagtttttcattgaactaaagctgtgtttgtttattaaaaagagtgctctgttttctctgttttggttacacgccgttcattaaaatatttgatatcaaattctcgtggaaagcaaaagataccaaacttcctgtttgaccatagctttgctgtgtaaaaaaaatgttgtattgttccgccattaaaagaaagaaaaaagaagttggatactaaaaataaaa

SEQ ID NO: 1925 - DNA, 491 bp, Glycine max
ctagaaaaggccactccttttagcaagttaacaacacttttgtcttcgttccattatctagttctcaattctcttcaccctttgcctctgaaagaaatgggtagtcttgaagcggaaagaacaacagtaggattggcagcaagagacccttcagggattctctccccatacacctacaatctaagaaacacaggccctgatgatgtttacattaaagttcactactgtggaatttgccattctgatctccaccagattaaaaatgatcttggcatgtccaactatcccatggtcccaggacatgaagtggttggtgaggtactggaggtgggatcaaacgttagcaggttcagagtgggagagttggtgggagttggactcctcgtaggttgctgcaaaaactgccagccatgccaacaagacattgagaattactgcagcaagaagatctggtcttacaatgatgtttatgtcgatggaaaacccacaca

SEQ ID NO: 1926 - DNA, 796 bp, Glycine max
acttttgtcttcgttccattatctagttctcaattctcttcaccctttgcctctgaaagaaatgggtagtcttgaagcggaaagaacaacagtaggattggcagcaagagacccttcaaggattctctccccatacacctacaatctaagaaacacaagccctgatgatgtttacattaaagttcactactgtggaatttgccattctgatctccaccagattaaaaatgatcttggcatgttcaacaccccttttcaatttgttagccccatggtcatgctagggaggaagtcaattacgggaagcttcattgggagcatgaaggagacagaggagatgttggagttctggaaagagaagggtctgagttcgatgattgaaatggtaaacatggattacattaacaaagcctttgaaaggttggagaagaatgacgtgagatacaggtttgttgtggatgtcaaaggcagcaaacttgtcgatcagtaaaagaaagaaagtatactactagcacgacacacgcaacatccatccttccatcatgaagagtctggaaaagttattaattaattgagaactaaagctgtatttgttgttcactctaaaaaagaagctgtgttttgtttattaaaaagagtgctctgttttctctgttttggttacacgacgttcattaaaatatagtatttgatatcaaaaaaaaaaaaaaaaaatttttttttaattaaaaatttataatatatataataatttttttatattaatttataatatttataaaaaaaaaaagggggg

SEQ ID NO: 1927 - DNA, 354 bp, Glycine max
  unsure (1)..(354): unsure at all n locations
ctcaattctcttcacccgtggcctctgaaagcaatgggtagccttgaagcggaaagaacaacagtaggattggcagcaagagacccttcagggattctctccccatacacctacaatctaagaaacacaggccctgatgatgtttacattaaagttcactactgtggaatttgccattctgatctccaccagattaaaaatgatcttggcatgtccaactatcccatggtcccaggacatgaagtggttggtgaggtactggaggtggggtcagacgttagcaggttcagagtgggagagcttggtggagttggactcctcgtangttgctgcaanaactgccagccatgccaa

SEQ ID NO: 1928 - DNA, 561 bp, Glycine max
  unsure (1)..(561): unsure at all n locations
gaaggacaagagagccgaaaagaggagcgttgtgttgttaggcttgtttgtattgtgttagtaccattttctaatctcatcatctaacccttccatcgtagtttccacatttctcctaccgaaaagtcaaaactacccactcacccaggtaggcacaggcagcgatggacgtaggagccggcgacgatcattccccggaagccgtcatatcgcggtggaaattcgcggtgtcgcagcagtaccagcacatgctggacaaaacgacgccgcacgttctccggcggtggatcgggtgcctggtggttgccgccgtgtacgtgctccgcgtgtacttggtccaaggcttctacatcgtctcctacgccctcggcatttacatcctcaacctcctcatcggcttcctctcccctcaggtcgatcccgagattagcgacggccccaccctccccacccgaggatccgacgagttccgccccttcgttcgacgcctccccgagttcaagttctggtactcgatcacaaaggcattttgtatggcgtttgtgatgactttctntagtg

SEQ ID NO: 1929 - DNA, 374 bp, Glycine max
ctaacccatccgtcacagtttccacatttctcctacgccaacgaccttacattccgaaaagtcaaaactacccatccacccaggcaacgatggacgtaggaaccgccgacgatcattccccggaagccgccatatcgcggtggaaattcgcggtgtcgcggcagtaccagcacatgctggacaaaacgacgccgcacgtgctccgacggtggatcgggtgcctggtggttgccgccgtgtacgtgctccgcgtgtacttggtccaaggcttctacatcgtctcctacgccctcggcatttacatcctcaacctcctcatcggcttcctctcccctcaggtcgatcccgagattagcgaccgccccaccctcccc

SEQ ID NO: 1930 - DNA, 1397 bp, Glycine max
  unsure (1)..(1397): unsure at all n locations
ttggcggagtaggtgaacgtactcgtgagggaaatgatctttatatggaaatgaaagaatctggagtaattaatgaacaaaatattgcagaatcaaaagtagctctagtatatggtcaaatgaatgaaccgcccggagctcgtatgagagttggtttaactgccctgactatggcggaatattttcgagatgtcaatgaacaagatgtacttctatttatcgacaatatctttcgcttcgtccaagcaggatctgaagtatctgccttattgggtcgaatgccttctgctgtgggttatcaacccactcttagtactgaaatgggttctttacaagaaagaatcacttctaccaaagaggggtccataacttctattcaagcagtttatgtacccgcagacgatttaaccgatcctgcgcctgctacgacatttgcacatttagatgctactactgtactatcaagaggattagcggccaaaggtatctatccagcagtagatcctttagattcaacctcaactatgctccaacctcgaatcgttggtgaagaacattatgagactgcgcaaagagttaaacaaactttacaacgttacaaagaacttcaagacattatagctatccttggcttggacgaattatccgaagaagatcgcttaaccgtagcaagagcacgaaaaattgagcgtttcttatcacaaccttttttcgtagcagaagtttttaccggttcgccggggaaatatgttagtctagcagaaacaattagagggtttaaattgattctttctggagaattagatggtcttcctgaacaagccttttatttggtaggtaatatcgatgaagctactgcgaaagctacgaacttagaaatggagagcaatttgaagaaatgactttaaatctttgtgtactgacccccaatcgaattgtttgggattcggaagtgaaggaaatcattttatctactaatagcggacaaattggagtattaccaaatcatgcgcctattgccacagccgtagatataggtattttgagaatacgtcttcttaaagaccaatggttaacgatggctctgatgggcggttttgctagaataaacaataatgagatcactgttttagtaaatgatgcggaaaagggtagtgacattgatccacaagaagcacagcaaactcttgaaatagcagaagctaatttgaataaggcggaaggcaagagacaaacaattgaggcaaatctagctcttagacgagctaggacacgagtagaggctatcaatgtgatttcataacaagttgatgcgtccgaatatcggaataactaaaaaatggaaaatgaaacagtaagaaaagattccgctcgctttcaatcgcctggcnnnnnnn

SEQ ID NO: 1931 - DNA, 288 bp, Glycine max
gcgcaaagagttaaacaatctttacaacgtgcctaagcactccacgccaaggatagctataatgtcttgcagttctttgtaacgttgtaaagaacttcaggacattatagctatccttggcttggacgaattatccgaagaagatcgcttaaccgtagcaagagcacgaacaattgagcgtttcttatcacaaccttttttcgtagcagaagtgtttaccggttcgccggggaaatatgttagtctagcagaaacaattagagggtttaaattgattctttctggaga

SEQ ID NO: 1932 - DNA, 974 bp, Glycine max
gttccgatataaatttgagcaactagggtttttactggtccttctttgcgagattgaatcgtaagcagcggctaccctaacctctcctcttcctctctactaatttcagctatggccgacgaagctgtggttgttccagatcccacccagatcgatgtcaagctctttaaccgctggagcttcgacgatattgaggttactgacatttctctggctgattacattggagtggcggcatccaagcacgccacatatgttcctcacaccgccggaaggtactccgtgaagcggttcaggaaggcgcagtgccccattgttgagaggctcaccaactctctcatgatgcacggtagaaacaatggcaagaaactcttggctgttaggatcatcaagcatgctatggagattattcatttgttgactgaccagaaccccattcaggttattgttgatgctgtcatcaacagtggtccacgtgaagatgcaacaagaattggttctgctggagttgttaggagacaggctgtggatatctcaccccttaggcgtgttaatcaggctatctatcttctaacaactggtgcacgggaagctgctttcagaaatattaagacaattgctgaatgcttggctgatgaacttattaatgcagcaaaagggtcatccaacagctatgctatcaagaaaaaggatgaaattgagagagttgcaaaggccaatcgttgagcagttgtggaagcaatatttgcgatcgggaagattttgtttcggtcaatgtttgtcatttaatgatatttgatcttttgcttgcattagttactttttagctttttgctcgctggcttcgcaagttatgaaagattttgttgctgggacgaaaatttgtgttctaagatcgggagtttaagtactagcctgtttcataaattatacaatgataatttccatgatagtgttggggagttttgcccccc

SEQ ID NO: 1933 - DNA, 516 bp, Glycine max
ctaagagttgctgcttcttccgccactcagcacttcgctccctctgggcttcaccaaccatggccgagggcgaagctaccgttccagatccctctcaaatcgacgtcaaacttttcaaccgctggagcctcgacgacgttgaggcacttcttcacttttccccctttttattcactctctgtatcgacgcttctttaaactatagcaaatttgattaattattaagtttgtcttagttattaatctagttatatcgtgaaattaccggattttgtttacgataactgtgttctgattgttattaggttaatgacgttgctctggttgattaggttaactaaaaatgtattttttgtggtatttagtttgagttacttttttgcatgttctgattgggattaggttaatgatatgtcccttgctgattacgttggggcgtggttgattagtttaactaaaatgttttcttttgttgtatttagtttgatttttttttggatattaggttactgatat

SEQ ID NO: 1934 - DNA, 1021 bp, Glycine max
cccacgcgtccgcccatagggtttttgtcgtcgcgactaagagttgctgcttcttccgccactcagcacttcgctccctctgtgcttcaccaaccatggccgaaatcgaagctaccgttccagatccctctcaaatcgacgtcaaacttttcaaccgctggagcttcgacgacgttgaggttactgatatgtctctggctgattacattggagtgtccccgtcaaagcatgctacatatgttcctcacactgctggtaggtactcagtgaagaggttcaggaaggcgcagtgccccattgttgagaggctcaccaactctctgatgatgcacgggaggaacaatggaaagaagctcatggctgtcaggattatcaagcatgccatggagatcatccacttgctcactgacctgaacccaattcaggtcattgttgatgccgtcatcaatagtggtccccgtgaagatgcaactagaattggttctgctggagtggtgaggagacaggctgttgatatctcaccccttcgacgtgttaatcaggctatatatcttctaacaacaggtgctcgggaagctgctttcagaaacatcaagacaattgctgaatgcttggccgatgaacttattaatgcagccaaaggttcatccaatagttatgctatcaagaaaaaggatgaaattgagagagttgccaaggctaatcgttaagccaacccaacaaccagtattgtggccagaaagatttcgacctttgtacttcatttatttaaattttgaatattgtgtattacttttgatgaatttagttaatttttagttcgcgtaaggattttacatgaacgatttatttagttaatttagtttgcgtaaggattttacatgaacgatttatttagttaatttagtttgcgtaaggattttacatgaacgatttatttagttaatttttagtttgcgtaagtattttacatgaacgatttttgtttcttggacgaaaattatattccaatactggggag

SEQ ID NO: 1935 - DNA, 922 bp, Glycine max
gagggtttttgtcgttgcgactaagagttgctgcttcttccgccactcagcacttcgctccctctgtgcttcaccaaccatggccgaaatcgaagctaccgttccagatccctctcaaatcgacgtcaaacttttcaaccgctggagcttcgacgacgttgaggttactgatatgtctctggctgattacattggagtgtccccgtcaaagcatgctacatatgttcctcacactgctggtaggtactcagtgaagaggttcaggaaggcgcagtgccccattgttgagagactcaccaactctctcatgatgcacccggggaaagggggaaaaaccccaaaaaatttgggggggggaaaaaaaaaaaaaaaaagctcatggctgtcaggattatcaagcatgcaatggaaattattcacttgctcactgacctgaacccaattcaggtcattgttgatgccgtcatcaatagtggtccccgtgaagatgcaactagaattggttctgctggagtggtgaggagacagcgccgttgatatctcaccccttagacgtgttaatcaggccatctatcttctaacaacaggtgctcgggaagctgctttcagaaacatcaagacaattgctgaatgcttggctgatgaacttattaatgcagctaaaggttcatccaacagttatgctatcaagaaaaaggatgaaattgagagagttgccaaggctaatcgttaaaccaacaaaggatacagtattggtgaccagaaagattttgtttcgacctttgaacttcattttcaaatattgtgtactagttttgatggctttagctattttttagttcgcacaaggatttacatgaacgattttgtttcctggacgaaaatttatattcacagacttggagtttagtaagagcctgct

SEQ ID NO: 1936 - DNA, 402 bp, Glycine max
gcgtcaggcagcggctaccctaatcctctcctcttcctctctactaatttcagctatggccgacgaagctgtggttgttccagatcccacccagatcgatgtcaagctctttaaccgctggagcttcgacgatattgagtggcgacatccaagcacgccacgtatgtgcctcacaccgccggcaggtactcggtgaagcggttcaggaaggcgcaatgccccattgttgagaggctgaccaactctctcatgatgcacggtagaaacaatggcaagaaactcttggctgttaggatcatcaaacatgctatggagattattcatttgttgactgaccagaaccccattcaggttattgttgaagctgttgtcaacagtggtccacgtgaagatgcaacaaga

SEQ ID NO: 1937 - DNA, 1095 bp, Glycine max
  unsure (1)..(1095): unsure at all n locations
ttcccggtacgactcacgggtcgatacacgcgtcccgcacgcccgtccgggacaacacagaacaaaaacaaagaaaaaaaaaaacccttagccaacacaaccatcatggccacctctgctattcagcaatcagcattcactggtcaaactgctctgaagcagctcaatgagttcgtccgcaagaccggtggcgccggcaaaggtcgcactaacatgcgccgcaccgtcaagagtgctcctcagagcatttggtatggccctgaccgtcccaagtacttgggtccattctcggagcagattccatcatacctgaccggagaattccctggtgactacggatgggacactgctggattatcagctgacccggaaaccttcgccaggaaccgggagctggaggtgattcacagcagatgggcaatgcttggtgcccttggctgcaccttcccagagatccttgagaagaatggtgtcaaattcggcgaggccgtgtggttcaaggccggtgcacagatcttctcagagggaggccttgactacttgggcaacccaaacctgatccatgctcagagcatccttgctatctgggctgttcaggttgtgctcatggggtttgttgaaggttacagagttggtggaggaccacttggtgaaggacttgacccaatctaccctggtggtgcttttgaccctcttggtctggctgatgaccctgatgcattcgctgagttgaaggtcaaggaactcaagaacggtcgcttggctatgttctccatgtttggtttctttgttcaggctattgtcactggcaagggccctattcagaacctttacgaccacgttgctgatcctgttgccaacaatgcttgggcttatgccactaactttgtccctggacaatgaggatgcctacatgcaatgcaatcttctgctcccttttgcagttcccttgtgtttaactccattttcactaatgtaactacacctgtgtagcagaaaaatctgtatgagaaccattatatttttatatattagaaatttgggtccccagaaaatatcaactcttacgtttggaattcaagttaactagttcnn

SEQ ID NO: 1938 - DNA, 393 bp, Glycine max
agacgacagaaggggtcaacccagaacaaaaacaaagaaaaaaaaaaacccttagccaacacaaccatcatggccacctctgctattcagcaatcagcattcactggtcaaactgctctgaagcagctcaatgagttcgtccgcaagaccggtggcgccggcaaaggtcgcactaacatgcgccgcaccgtcaagagtgctcctcagagcatttggtaactcaacattacccttcccactccactagttcaacttagtagttactgcttttaatataatactcgcttgacaacataaaataatactagtaattccacaaaacttagatgcaaaaccttttgtttttggtattgtgttctacttcttccatctcattataattgtcccggaaga

SEQ ID NO: 1939 - DNA, 596 bp, Glycine max
ctcggaggtaagatctgtgaaccagccttgaaccacacggcctcgccgattttcacaccattcttctcatggctggttcatagatcttctcggagggaagacttgactacttgggcaacccaaacctgatccatgctcaaagcatccttgccatctgggctgttcaggttgtgctcatgggttttgttgaaggttacagagttggtggaggaccccttggtgaaggacttgaccctatctaccctggtggtgcatttgaccctcttggtctggctgatgaccctgatgcattcgctgagttgaaggtcaaggaactcaagaacggtcgcttggctatgttctccatgtttggtttctttgttcaggccattgtcactggcaagggccctattcagaacctttacgaccatgttgctgatcctgttgccaacaatgcttgggcttatgccactaactttgtccctggacaatgagcattgcaattcaatgcaatcttctgctcccattttctctaatgtaactacacctgtgtaccagaagaatctgtatgagaaccattatattatatatattagaaatttctgtccctaaaaaaa

SEQ ID NO: 1940 - DNA, 1519 bp, Glycine max
ccggctggagccacgcatccgcccacgcgtccgcggacgcgtacaaaaccctacaagtcacgaatttgagattctaagaccctcctctctctcgtacttcatcggaaccgaaacccttcgccgcaaaaaatgcctcccaaatctgccaaatccaaggaagctccagctgagcgacccatcctcggtcgattctcttctcacctcaaaattggcattgttggcttgccaaatgttggaaagtctactctctttaatactctcaccaagttggcaatacctgctgagaacttccccttttgcaccattgagcctaatgaggcacgggtcaatgtacccgatgaacggttcgagtggctttgccaattattcaagccaaaaagtgaggtctcggctttcttagaaatccatgacatagctggattggtccgaggtgctcatcaggggcaaggattggggaatagttttttatctcacatccgtgctgtagatggcattttccatgttttacgtgcatttgaggatccggacattattcacgttgatgatactgttgacccagtcagggatttagaggtcattactgaagaattgcggctgaaggatattgaattcatggaaagaaagatagaagatattgagaaaagcatgaagaggagcaatgacaaacagttaaaaatcgagcttgaatgttgtcaaagggtgaaggcattgcttgaggaaggaaaagatatacgtctaggggattggaaggctgctgatattgagattttgaattcctttcagttgctaactgccaagcctgttgtatacttggttaatatgaccgaaaaagattaccaaagaaaaaaaaacaagtttctgcccaaaattcatgcatgggtccaggagcacgggggtgagactattattcctttcagctgtgccttggaaaggaatcttgcagatatgccaccagatgaagcggctaagtattgtgaggagaacaaaactcaaagtgctcttaccaaaataataaagactggattttcagctattaatctcatttactttttcacagcaggacctgatgaggttaagtgttggcaaattagacgccaaacagaggctcctcaagctgcaggggctatccatactgattttgaaagaggatttatttgtgctaaggtgatgaagtttgaggatctaaaggaacttggtagtgagtcagctgtgaaggctgctggaaagtataaacaggaagggaaaacatatgtggtccaagatggagacattatattctttaagttcaacgtttctggtgggggcaagaagtaaaaccagagattcatctcaaatagcagagctggttttgcatggggtttgtgtcttattataggcgcctaccatgttgcacaatttgtagaagtttgaaaatgtaattttgggaccattttcaatattatttacttatttaggcttattaatatctctagtggattttgacctctcagctatttttatgatttaaatatgatatgct

SEQ ID NO: 1941 - DNA, 515 bp, Glycine max
caaattgcttggggaaacaaacgagggacaaatagaaagaaggaaaaaagccttcaccatttgttgttctgcttcctgagaccgtgttccatggcatgctctccttctacaactcttgtgtcaaattctcttctccttaacaaaacgactagtcagtgtcggcttcatgttcatcccaccctttcacttaatcaaaaccttccaatatattctaataacctactcaaactctcaacaattcaataccatgcaacaaccacaccctttgttgctgcttctgcaggagttgagtctccggtgttgggtgaggataccacgagttcactggattcggtgaaagtgtttgatttgaatggaaacgggattccaatttctgacttgtggaaagataggaaagccgttgtggcatttgcacgccactttgggtgcgtgttgtgccgcataagggctgattatctttcatccaagacggatataatggatgcatctggtgtggcacttgtattgattggacc

SEQ ID NO: 1942 - DNA, 466 bp, Glycine max
  unsure (1)..(466): unsure at all n locations
ctcgagccgaatcggctcgaggtttctcttgaggaacagcaacaacaacaaaatcctttcattgtttcttcttttggctgcgaagataaacagaaccagtttattttttcaccaccgcccattcagacaccgacaaatgggaagttctgtcgcaacagattcatgggcaacgacaacaaggttgtcggtggtgctgacgttaatggcccagatctcgcgtgggtgaacgagttgctgatgtaataggtgaaagatggtgacgacgaaaattaatggtagtgatcgatgactcatatcagtgaatgaaagtgtaaatacagcagagaaacattaaaaaaaaaaaacgtctctggcgtatctattgtcattgttaattactattgcttaattaaggtttcattgctttctgaatttgctgttaagtttgagacaatntatgtaatttggatttcatcttgtttttaat

SEQ ID NO: 1943 - DNA, 881 bp, Glycine max
  unsure (1)..(881): unsure at all n locations
gtacgtaagctcagnattcggctcgaggtagatccattggcttcaagcacatgggaggaggtttccccagaagatgtgcttatcactcaagtgcagtgcaaggctttgtcgagacaatttcacggagaaactgagtatacagttactcaagctatttcagctcaggaggcctacaagcggagtaacaattggttacctcctccatgggcaataatggcaatggtcatacttggttttaatgaatttatgttgctactaaaaaatcctctctacctgatgtttatatttgttgcctatctactcggaaaggccatctgggtacaaatggacatagctggagagtttcgacatggcactctgcctggactactatccatttcatcaaagtttcttcccacatttatgaaccttatcaaacgtcttgctgtcggcgcgcgggcgggtcaaacccctcaagaatcacaagggtcagcttctcagacacagatcttcagaaatcaagtgcacaaaccagattcagtatcaacctcaatttccaatgtatcgagtgttggcttgtctgttgatgataacgaatactcaaccacaaacttgtctcagaggcgaagaacaaacgctcccgaagctgaattttcatgacaaaattcatgacaatttgatttgaagacggttggcatcaagattagacatgcaccagttagggtgacttcccagatcagttttgtattattactccctatctatattttacatcaatattttacttttcttctttaccgtaacgtgtaaattatctgagtatatgaaggacccctatttgggttctataaaaacagaacatatcccagtccaatagtgacggaataaaaaaataataanct

SEQ ID NO: 1944 - DNA, 550 bp, Glycine max
ggagaacgtcgatgttccgtttccgaagttccactgtcccgaagctgtcaacaatggcgatttccggcgatctcagagtctcagcaacacttcctctgtatcgctcccactcgcctccactccgaacctcttctcagtcttccccaaaggtagactttcatcgtttcttgaacagagcttgtagcatctctgaattcactccaaaatgcccttacctgacaattgtacgatgcaatatgcgtgggtattgcaagccagttgctgcggtccttggaggtcctaaatttacatcaaattcagttagccaagaaaccgagaactttctccttgatgctgttaaaatgaacttctttgagcggttaaatttggcttggaagataattttcccatcggcaacatctagaaaaaactccaatgctaggattgctaagcaacgcttgaagatgattacgttctctgatcggcgcgaagtcagtgatgaggcaaagcgaaaaattgtaagcaatgatgtgcgtgctctatcagattctgtggaaatagaatcacagga

SEQ ID NO: 1945 - DNA, 1564 bp, Glycine max
cgctcatactagcggatcccccgcctgcaggagtgcgttctagaaatccttcacttgttgctcgtcttagtttctgtgttgtgtcatttttattgctatatcctaattaaacttcaccctcaaaatgagtgatcccacactagcacaaccacacctagtcgaagtccacacaacaacactcgaaaccgttgttaccacacacaaccataaccatagaccctcaataaatgcctcaggtgaaaagaagaaaattgtgggggtgttctacaaagggaatgagtatgctaaattgaaccccaatttcgtggggtgtgttgaaggagcattgggtatacgtgagtggctggaatcacagggtcatcagtacattgtcactgatgacaaagaaggaccagattctgaacttgagaaacacattccagatgcccatgtcatcatatctactccatttcaccccgcctatgtcaccgcagaaagaattaagaaagccaaaaatttggagctgcttttgactgctggcattggttctgatcacgttgatctcaaagctgcagctgctgctggtttaactgtggcagaggtcacaggaagcaacgttgtgtcggttgcggaggatgaactcatgagaatcctcattctaatgaggaatttcttgccagggtaccatcaggctgttaagggtgaatggaatgttgctggcattgcacatagagcttatgatcttgaaggaaagacagtaggaaccgttggcgcgggtcgaattgggaagcttttgctccagaggttgaaaccttttaactgtaatcttctgtattttgatcgacttaggatcgatcctgaattggagaaagagattggagcaaaatttgaggaggaccttgatgcaatgcttccaaagtgtgatgtaattgttatcaacacccctctcactgagcagacaaggggattgtttgacaaaaatagaattgcgaagtgcaagaaaggtgtcttgattgttaacaatgctcgaggggcaattgcggacacccaagcaattgctgatgcttgctccagtggccacgttgcaggttatagtggtgatgtttggcccccacaaccagctccaaaggatcatccatggcgctacatgccaaaccatgccatgactcctcatatttctggcaccaccattgatgcacagttacgttatgctgctggtgtcaaagacatgcttgataggcacttcaagggtgaagactttccagaacaaaactacattgtgaaggagggtcaacttgcaagccagtatcgttgaagtgatgcttttgttgaatttgaatcttccattttaaagttccacggattagcaaataaagatctatatagagggcactctaattatataatgtacttgctttgttgaatttgaactcgtttaattgatgtcagaaataaaattgtaaggaaccctttccatgttccatggattgatcttgtgtttttcgaatttgaatgtaaaacctgtcatgtgaggaatgaaaattaacgaccaatatgtctttccagcctatgaaggaagggttgg

SEQ ID NO: 1946 - DNA, 569 bp, Glycine max
cttagaattgaaaggcacatgagtataatactaacagtggacaaattgaaaaagcaacacacacagaacagacacaactgcgaattagttcatcctttcccaagccagccaagcgaggcatgctctcaatttttgaaattacttgcatagatagagcatcatggccatgatgaaacgtgctgcttcctcttcggttcgctcgctactttcctcatcctccaccttcaccagaaaccttcatgcctcaggtgaaaagaagaaaattgtgggggtgttctacaaagggaatgagtatgctaaattgaaccccaatttcgtggggtgtgttgaaggagcattgggaatacgtgagtggctggaatcacagggtcatcagtacattgtcactgatgacaaagaaggacctgattctgaacttgagaaacacattccagatgcacatgtcatcatatctactccattccaccccgcctatgtcaccgcagaaagaattaagaaagccaaaaatttggagctgcttttgactgctggcattggttctgatcatgttgatctcaaagctgcagctg

SEQ ID NO: 1947 - DNA, 477 bp, Glycine max
ctctattctctaacatcacaatttcaattgtcttttttttacataatcatggccatgaaacgtgctgttcaatccctgcttgcctcatcttccaccctcaccaggaaccttcatgcctcaggagaaaaaaagaagattgtaggggtgttctacaaagggaatgagtatgcttcgaatcccaattttgtgggatgtgttgaaagagcattgggtatacgtgagtggttggaatcacagggtcaccagtacatagtcactgatgacaaagaaggacccgattcagaactagagaaacacattcctgatgccaatgtcatcatatctactccatttcaccctgcctatatcaccgcagaaagaattaagaaagccaaaaatttggagctgcttttgactgctggcattggttctgatcacgttgatctcaaggcagcagctgctgctggtttaactgtggcagagatcacaggaagcaac

SEQ ID NO: 1948 - DNA, 410 bp, Glycine max
gacttcaataacaaatatttcactagctactactcttcttagtttctctgttgtatcatttttattgctatatcctaatcaaacttcactctcaaaatgagtgatcccacactagcacaacagcatctagtcaaagtccacacaacaacacacgaaacagttgttaccacacacaatcataaccaaacaccctcaataaatgcctcaggtgaaaagaagaagattgtgggggtgttctacaaagggaatgaatatgctaaattgaatccaaattttgttggatgtgttgaaggtgcattgggaatacgtgagtggctggaatcacagggtcatcagtacattgtcactgatgacaaagacggacctgattctgaacttgagaaacacatttcagatgcacatgtcatcat

SEQ ID NO: 1949 - DNA, 309 bp, Glycine max
gactccaataacaaatccttcacttgttgctcgtcttagtttctgtgttgtgtcatttttattgctatatcctaattaaacttcaccctcaaaatgagtgatcccacactagcacaaccacacctagtcgaagtccacacaacactcgaaaccgttgttaccacacacaaccataaccatagaccctcaataaatgtgtgttactgaatatttaattatttgtacacctgaccatgattaatatttaattcttcaactttggttatgcatgaccgtgactaatttttaattctttccctatgattgaga

SEQ ID NO: 1950 - DNA, 309 bp, Glycine max
ttttcttcttcttcttcttattattattattatcattttttctatataaacctcaccttaattactctactcttctctctaattacaattttctattttgttttaattagtgaaattacttgcatagatagataatcatggctatgatgaaacgtgctgcttcctctgcgcttcgctctcttattgcctcatcctccaccttcaccagaaaccttcatgcctcaggtgaaaagaagaagattgtgggggtgttcacaaagggaatgaatatgctaaattgaatccaaattttgttggatgtgttgaagg

SEQ ID NO: 1951 - DNA, 441 bp, Glycine max
ttgctgatgcttgctccagtggccacgttgcaggttatagtggtgatgtttggttcccacagccagctccaaaggatcatccatggcgctacatgccaaaccatgccatgactcctcatatttctggcaccaccattgatgcacagttacgttatgctgctggtgtcaaagacatgcttgataggcacttcaagggtgaagactttccagaacaaaactacattgtcaaggagggtcaacttgcaagccaataccggtgaagtagtgtgtgtcaatgtggcctttgaatcttccatttttaaggccaatcgatgagcaaataaagatctagaaggcactttaattatgtaatgtacttgctttgttgtgtctgaactcgtttaattgatctcagaaataaaattttgaggaacactctccatgttccaaaaaaaaaaacaa

SEQ ID NO: 1952 - DNA, 242 bp, Glycine max
gacacaactgcgaattagttcatcctttcccaagccagccaagcgagtttgcaattacttgcatagatagagcatcatggccatgatgaaacgtgctgcttcctcttcggttcgctcgctgctttcctcatcctccaccttcaccagataccttcatgcctcaggtgaaaagaagaaaattgtgggggtgttctacaaagggaatgagtatgctaaattgaaccccaatttcgtggggtgtg

SEQ ID NO: 1953 - DNA, 697 bp, Glycine max
cattgctgcagatgctgcagcaacctttaaggagcgcttgacaagacgtaaatctactgtggctgaattcctttccaagaattatgaatggtttttcgcagaatataacactaagctgttggaatcttccaattatattacaaggcgccaagctgtcaagttgttgggagatatgttacttgatcgttcaaattcagctgtaatgacacgatatgtgagctcaagagacaacttgaggattttaatgaatcttctgagagagtcaagcaagagcatacagattgaagcatttcatgttttcaagctatttgctgccaaccaacataagccagctgatatcgtcagtatatttgttgcgaacaaaagtaagatgctgagactattggaagacttcgcatgatcagagggaaaagaaaaagagtggccattgccgtgggaggcgaaaaactcatcaaagagcaaagtcacccgtgaacgtggtttctcacaccccagtaattccagattttcttttgtagcattaaaggaagctggttagagggaagcatcgagttaagttctccattctttttcggaaaatctgaagttttggctttcactcccccctcgtatgtcgggtgaatccatgacttgctattatatttatgttcaatcccgggatggagatgattcagatggtcgattgtagatgcttctt

SEQ ID NO: 1954 - DNA, 595 bp, Glycine max
aagatatgtgagctcaagagacaacttgaggattttaatgaatcttctaagagagtcaagcaagagcatacagattgaagcatttcatgttttcaagctatttgctgctaaccaacataagccagctgatatcgtcggtatatttgttgcgaacaaaagtaagatgctgagactgttggaagacttcaaaattgacaaagaggatgaacaatttgaagccgacaaagctcaagtgatgagggaaattgaagctctttaaacaagggaacagcgacgcacctgaactgcaaattgtgttaagtggcaaagttgcaatgtgtggcatttcactttagcgaattgtgtattgtaatagttctgttagtcttttatcacgatatgagaccatccgtttcatacagacttcaatgcttcctttctgtaattttgtaaccgtcctttaaaattgtagataaataattgcttaaatgagctacattattagtgtctttgtaggtgttagtaataaggtcttccaagctgccgtgtaaattattaattgtgcaaggtcatgcaataatctgacaatcacatttgtttaactaaactgttactc

SEQ ID NO: 1955 - DNA, 2489 bp, Glycine max
tttcaattttacacaaatattttcataaagtaaattatacttagatttgttttataaattctttctgcatttgcttcattatcgtaaatggatttataaaacacatcagagtataattcgctttatttcaattttacacaagtattttcatactagaaatccgaattcacataattcttgtgacatctcctttttgtcacaagcatatgtattttttaatttattacacacccgaattattaacataaacatctataagttaagatctgtttttcaatatcatggaatttttttttttctgaaaaatgaaataaaggattctttttttggagcacaaggaatatttcattataaattaaaacataataaccctctcaattctgtaataaatcaatggacaaattggttaaaggatcattattatcaatatgacttatctaaaagtagatggtccagattagtaccacaaaaatggagaaatagaataactgaatatcgtatagctcaaaataaagatttaaccaaatgcaattcatatgaaaaaagccaattaattctttacaaagaacaacaagtaaacgcattaaaaaaaaaaattagaaaacaatatagatacgatcttttatcctataattttatcaattatgcagataagaaagactcatatatttatggatatagatccctatttcaagtaaaaaaaaaccaagtgatttcttctaattacaacacgtataaaaaagaattattggatatcatagataatctctttatcaagaattatatatcggaagatgcgattctagatatggaaaaaaatatgtatagaaagtattttgattggatgggaatcaatagagaaatactaaatcgttccatatcgaatccagaattttggttcttttcaaaatttgtgatattttatgacgcatataggggtaactcgcaggttataccaatcaaattactttttttttcttctaatgtaaatcaaaatgttagtgaaaataaaaagaacattactagaaagaaaaaaaatgaatctcttgaattggagttagagactcgaaatcgggcaaaagcagaataccctgatcaacgaaatcttgaatcatctatctcaaaccaagaaaaagatattgaaaacgattatgtaggatcagacagtgaaaagaatagtaagggtataaagaaaaagaaagacaagaacaagatggaggcagaacttaatttcttactaagaaattttttgattttacatttaaattggaataatttcttaggtcaaagaatatttaacaatgtcaaagtatattgtctcctgattagattaaaaaatttaagagaaattacaatagcctctattcaaagaggagaactaggtctagatattatgatgattcaaaatcagaagaatttaattcttctaggcttaaggaaaaagaaaaataacaaatttatgaaaaaagaaatatttgttatcgaaccagttcgcctgtctagaaaaaacaataaacaattttttatgtatcaaaccataggtctttcattaattcaaaagaataaacgaaaaatttatcacaaatacccagaaaaaattcatgttaataagaaaaatttttataaatatattacaagaacaagagatcaaaaaataacagaaaaaaaagaaaaagataattctgatttacttgttcctgaaaacattttatccgctagacgtcgtagagaattgagaattctaatttgtttaaatccaaataatataaatagtatgcatagaaacacaatattttataatccaaataaagtccaaaatggttttccacttttgactaaaaaaagaaaatattttgagaaagataaaaaaaaactaatgaatttcaaaatttttctttggccaaaatatcgattagaagatttagcttgtataaatcgatattggtttaatacccataatggaagccgtttcagtatagtaaggatacatatgtatccgcgaatgaaaattcgttaatccaaatttgtcttctatttaccatatttatatggtaaatagaagacaaattaatatctatatctatctatatagatagatatagatacataacataaataaagacacgcattatggtatggcattgatactaattcactgatatataccttagataaaaaaagaatccacaaaattatgttttttttaagtataccattttttatggtgaatctataaaaaaagtctcctttatatctatttaaattgcatggattccattttttttatttataagaattaattcgattgtaaaaaaatcaagaattcttaagtaaattaagtaaattcagatttatataaaaaattcaaaattagtgtcattactattactgatcaatcaaaatatctatcaaaagtaaaaagcgaagagaagggaaaaactttaatttttttatggtaaaaaattcaattatacctgttatttcacaag

SEQ ID NO: 1956 - DNA, 1765 bp, Glycine max
aagagcttgacgtccatgcacgcgtcgtaagctcggattcgctcggctttgtcaccacttttttcccatcactttggggaaagatattcattctaagggaaaaatgacagaggagcaatccaaaaaggtggctgagactgagagttttccctctaatcctgcacctgaacctgttgttgttccaaaggaggatgtggcagaggagaaatctgtaattccacaaccctctccctctcctgctgatgagtccaaagctcttgtcatagttgagaagactagtgaagttgctgaagagaaaccgattgaggggtctgtgaaccgagatgctgtgcttgcaagagttgcaaccgagaagaggctgtcactaatcaaagcatgggaagaaagtgaaaagtccaaagcagataacaagtctcacaaaaagctttcagccatttcagcatgggaaaacagcaagaaagctgcagcggaggcaaaagaaagttcgaaaaaagaggaggaaaaaaaaaaggaaaatgaggaaagaaaacgtatagaaatagcagaagcctgggatagcattatatttgctcaagtaataagaggtattttattaataacccaatccattcttagaaaatatattctattaccttcattgataataactaaaaatattgctcgtatactattttttcaatttcccgaatggtcggaagattttagggattggaagagagaaatgtatattaaatgcacatataatggtgttcaattatccgaaagagaatttccaaaaaaatggctaacagatggtattcagataaagatcttatttccttttcgtctcaaaccttggcacaaatctaagctacgatccaatgaaaagaaaaaggatctaatgaaaaaaaagaacttttgttttctaacagtttgggggatggaagtcgacttgcccttttctggttctccccaaaaaaatagattttcatcattttttgaccccatttttaaagaactaaaaaaaaaaacgaaacaatttcaatttttcacttttcgagttctaaaagttttaagtgaaaaattgaaattgtttctaactatcttaatagaaaaagcaaaaaggattagcaaaagtattatcgaaagtattcttaaaagtattctcaaaagtattctaagcctaacgaaaataaaacaatttttcaaattgctatttattaaatttaaattcaaaaagatagatgaattgagcgaaaataaaaaagattcaacaatttataagaataatccaatgatttctgaaacaaccatttcaattcaatcgataaattcagtaaattgttcattgaaaaaaaaaaaaataaaggatcttaatgctaaaagaaaagcagttataaaaaaaattgaaaaaattaaaaaggggcttgtaatttcagagacaaatattcattcaaacaaaacaacttatgatagtaaaagggtagaattcgaaaaaaaaaaattgcagatattacaaagaagaagaaatgctcgattaactcgtaaatcacattcttttttaaaatttttcatgaaaaggatatacagagatatatttctatatatcagttgtattccgaggatcaatatacaactttttcttgaattaacaaaaaaatttttaaataaatccatttacgataatgaagcaaatgcagaaagaatttataaaacaaatcaaagtataattcgctgtatttcaattttacacaaatattttcatactagaaatccgaattcacat

SEQ ID NO: 1957 - DNA, 393 bp, Glycine max
ttaaaattgaaaaacctttattcttttcttttgatagtttcaaatcaatgaaaatattttttatgttcaaaatttggatgcgaaaaaaggaagaatttgaaatttctagttatacagaggaaagggcaaaagaaagttcgaaaaaagaggaggaaaaaaaaaaggaaaatgaggaaagaaaacgtatagaaatagcagaagcctgggatagcattatatttgctcaagtaataaggggtattttattaataacccaatccattcttagaaaatatattctattaccttcattgataataactaaaaatattgctcgtatactattttttcaatttcccgaatggtcggaagattttagggattggaagagagaaatgtatattaaatgcacat

SEQ ID NO: 1958 - DNA, 301 bp, Glycine max
gaatctctctacatatctatctatctttctatcatcacagtatccttaataagtcagaactttgtcacaactttttcccatcactttgtggaaagatattcattctaagggaaaaatgacagaggagcaatccaaaaaggtggctgagactgagagttttccctctaatcctgcacctgaacctgttgttgttccaaaggaggatgtggcagaggagaaatctgtaattccacaaccctctccctctcctgctgatgagtccaaagctcttgtcatagttgagaagactagtgaagttgct

SEQ ID NO: 1959 - DNA, 1194 bp, Glycine max
gagagacgcagatatctgtaatttgtgtctgctcactcgctcttctccgccacttctgaatctattgaatcaacaatcatgtcggacgaagagcaccatttcgagtccaaggccgacgccggagcctccaaaacctaccctcagcaagccggtaccatccgcaagaacggctacatcgtcatcaaaggccgcccctgcaaggttgtggaagtttcgacttccaaaactggaaagcacggtcacgctaagtgtcactttgttggaattgatattttcactgccaagaaacttgaggatattgtgccctcttctcacaactgtgatgttcctcatgtgaatcgtactgattaccagctcattgatattgctgaggatggatttttgagtctgcttactgaaaatgggaacactaaggatgacctcaagcttcccactgatgagagtctgctcactcagataaaggatggatttgctgagggcaaggatcttgttgtgtctgtcatgtctgctatgggtgaggaacagatttgtgccctgaaggatattgggccaaagaactagcttttggtgcttgttgcttgttatttctattttctatttaagcaaagatatttttgtaagccttttatattggtttgttcaagacctggcgtatagattctagtcagactagtcttaacaatggtttttatggatgtggtgacagaaactattatcacattttttctggttttctatgctgtcctatgactttgttataaaggaggagtcaaatgtgggaaggttttttttggtaataatataatgagatttcaaattgagcccgacactacacgaaagacgccagattattttttgtaacttcatatatctctttgtttgtagctactgctttatgctgttactgtagatgtgtctttaaggagagaagagtttcactgtttaagtggacggttttcatcaacataattctttcttttggagtttgtctgctgttgccgccgctgctgcggtcttatttggacaagaaacaaatagaaattgacccaactggtgttgtatatttttgataggaggaagcggcaatagcatggtatatcatgttctgtaattttttcttaaattaaatctcaagttagagagcagatttttgggttctgcccatcatgttcatttgagcctgttgatggtgcc

SEQ ID NO: 1960 - DNA, 1667 bp, Glycine max
agaaaaaatagttttatttttttattttttcttgtctctgtctgactgagaaacaccaagccgaggagacgaagagacaaagaaaaggcacacacaccagccgtggaaatgaatgaatgattgagaaaccaaatcaaaccacgccagcttcaaaacgctgcgtttcactcccgtcctcgcgtcgctcccaaaccctaatcctatccgcggcattcctctggtcgccgtcgacaccgtcccggtcgcgccaaccgccgcaacccgaagaaaccgaatcgatctgagagaaggtgcgatctcggaggtgggagccaaacgaaacgatgccgtctcacgcggatctggagcgacagatcgagcagctgatggactgcaagcctctgtcggagtcggaggtgaaggcgctgtgcgatcaagcgaggacgattcttgtggaggagtggaacgtgcaaccggttaagtgccccgtcaccgtctgcggcgatattcacggccagttctacgatctcatcgagctgtttcggattggagggaacgctcccgataccaattatctcttcatgggtgattatgtagatcgtggatactattcagtggagactgttacacttttggtggctttgaaagtccgttacagagatagaatcacaattctcaggggaaatcatgaaagccgtcaaattactcaagtgtatggcttctatgatgaatgcttgagaaaatatggaaatgcgaatgtctggaaatactttacagacttgtttgattatttacctctgactgccctcattgagagtcagattttctgcttgcatggaggtctctcaccttctttggatacactggataatatccgtgccttggatcgcatacaggaggttccacacgaaggaccaatgtgtgacctcttgtggtctgaccctgatgatcgctgtggttggggaatatctccacgtggtgcaggatacacatttggacaggatatagctgctcagtttaatcataccaatggtctctccctgatatcgagagctcatcagcttgtcatggaaggattcaattggtgccaggacaaaaatgtggtgactgtatttagtgcaccaaattactgttaccgatgtgggaatatggctgctatactagaaataggagagaatatggatcagaatttccttcagtttgatccagcgcccaggcaaattgagcctgacaccacacgcaagactccagattattttttataatttcatttatctgcctgtttgtagttactgctctctgccattactgtagatgtgtctttaaggaaaggagttttgctgtttaagtggagggtggtcatcaacataattctttcttttggagtttacctcctgctgctgccgctgccgctgccttatttggacaagaaaccaatagaactgacacaagccaccaattggggttgtatatttttgggaggaagcggtaataacatggtatatcttgttctgtaatcctttttctttaaattgaatctcaagttagagagcagatttttgagtcctgacaatgatgtccatttgagacttttgatgattccaaatgaaagtgcaggtgttcttttttcgtggttaaaaaaaaaaaaaaaaaaaaaaaaaccccccggccgctctagaggattcagc

SEQ ID NO: 1961 - DNA, 502 bp, Glycine max
gtaatggaaggattcaattggtgccaggacaagaatgtggtgactgtttttagtgcacccaattactgttaccgatgtgggaacatggctgccatactggaaattggagagaacatggatcagaattttctgcagtttgatccagctccccgacaaattgagcccgacaccacacgaaagacgccagattattttttgtaacttcatatatccctttgtttgtaagctactgctttatgctgttactgtagatgtgtctttaaggagagaagagtttcactgtttaagtgggacggttttcatcaacataattctttcttttggagtttgtctgctgttgccgccgctgctgccgtcttatttggacaagaaacaaatagaaattgacacaactggtgtttgtatatttttgataggaggaagcggcaatagcatggtatatcatgtgctggaattttttcttaaattaaatctcaagttagagagcagatttttgagttct

SEQ ID NO: 1962 - DNA, 523 bp, Glycine max
gccagacgaccgcacaacggtatgctgggctagagagtggcgcggaaccaaatgaaatgattgagaagagagagcgaagaaaaaaaagagagccaaaccaaacctttcccgaaacggttcgttttgcccttcttcggaaccctcccttctgcgccgctgctgctgctccggtcgccgtcggcgactctccggtaaccgaagaccactgccgatccgtcagaaacctcggatctcggatctgaacgagcgaaacgatgccgtctcacgcggatctggaccggcagatcgagcatctgatggagtgcaagcctctgccggaggccgaggtgaaggcgctgtgcgatcaggcgagggcgattctcgtcgaagagtggaacgttcagccggtgaagtgccccgtcaccgtctgcggcgacattcacggccagttctacgatctcatcgagctctttcggataggaggaaacgctcccgatactaattacctgtttatgggcgattatgtagatcgtgggtactattc

SEQ ID NO: 1963 - DNA, 838 bp, Glycine max
taaatccatatcctcccccaaagtctttgtcttctccgcccccactctcccaccccacttacatacacactctcccactcctccgagccggtcgagttgaatcggtgagtcagtgaccgagttgaaccatgtcggacgaagagcaccatttcgaatccaaggccgatgccggagcctccaagacctatcctcagcaggccggaaccatccgcaaaaacggctacatcgtcatcaagggtcgtccctgcaaggttgttgaagtttctacttccaagactggtaagcacggtcatgccaagtgtcactttgttgggattgatattttcactgccaagaagcttgaagatattgtgccctcttctcacaactgtgatgttccccatgtgaatcgtactgattaccagttgattgacattgctgaggatggatttcttagcttgcttactgaaaatgggaacaccaaggatgacctgaagttacctacagatgagagtctgcttactcagataaaggatgggtttgctgagggtaaggaccttgttgtgtcagttatgtctgcaatgggtgaggagcagatttgtgcactgaaggatattgggccaaagaactagcctcaattgctggtagtttgctgttttcatttatgcaaaagttatatatttttgtatgatcttgttaaaccccggagttatggagactctaagtcagactagttttatcaactgtgtttatggatgtgacagaaactgtttaacatttctctgtttcgatgttgtcttgatatttttttgataaaatacgactatcaaattatttttgttttaacgtattttgcatt

SEQ ID NO: 1964 - DNA, 483 bp, Glycine max
aaaaaaacaacaaaagggagagtgagatacagaaaagaaaaaggaaaccctagctggataggtcaaacatcatcatgtcggacgaagagcaccatttcgagtccaaggcagacgccggtgcctccaaaacctaccctcagcaagccggtaccattcgcaagaacggctacatcgtcatcaaaggacgcccctgcaaggttgtggaagtttcgacttccaaaactggaaagcacggtcacgccaagtgccactttgttggaattgatattttcactgccaagaaacttgaggatattgtgccctcttctcacaactgtgatgttcctcatgtgaatcgtactgattaccagctcattgatattgctgaggatggatttttgagtctgcttactgaaaatgggaacaccaaggatgacctcaagcttcccactgatgagagtctgctcactcagattaaggatggattcgctgagggcaaggatc

SEQ ID NO: 1965 - DNA, 473 bp, Glycine max
ccacgcgtccgcccacgcggcccaaatcaaaccaggccagcttcaaaacgctgcgtttcactcccccgtcctcgcgttgcttcgaaaccctaaccctatccacggcattcctccgctcgccgtcgacgccgtcaccgtcgcgccaactgccgcaaaccgaataaaccgaatcgatctgagagaagaagaagaagaagacgcgatctcggaggtgggagcgaaacgaaacgatgccgtctcacgcggatctggaacgacagatcgagcagctgatggagtgcaagcctctgtcggagtcggaggtgaaggcgctgtgtgatcaagcgagggcgattctcgtggaggaatggaacgtgcaaccggtgaagtgccccgtcaccgtctgcggcgatattcacggccagttttacgatctcatcgagctgtttcggattggagggaacgcacccgataccaattatctcttcatgggg

SEQ ID NO: 1966 - DNA, 384 bp, Glycine max
gtttttgtgtaccgagcgaaacaaagaaaaagaaaaggacagaaacaaacacacacacacgggagcgcggaaccaaatgaaatgattgagaagagagagcgaagcagtattaacagagccaaaccaaaccccaccgtccccgaaacggttcgttttgcccttcttcggaaccctcccttccgcgccgctgctgctgctccggtcgccgtcgggattctccggtaaccgaacaccatcgatccgtcaggagcctcggatctcggatctgagcgaaacgaatcgaaacgaaacgaaacgatgccgtctcatgcggatctggaccggcagatcgagcatctgatggagtgcaagcctctgccggaagccgatgtgaaggcgctgtgc

SEQ ID NO: 1967 - DNA, 466 bp, Glycine max
ctgctcgggccggtccgaccgccccagctcacccaccctccatacacactctctctgagtcggtcgagttgaatcggtgagagtcagtgaccgagtcgaaccatgtcggacgaagaacaccatttcgaatccaaggccgatgctggagcctccaagacctatcctcaacaagccggaaccatccgcaaaagcggttacatcgccatcaagggtcgtccctgcaaggttgctgaaggttctacttccaagactggtaagcacggtcatgccaagtgtcactttgttgggattgatattttcactgccaagaagcttgaagatattgtgccctattctcacaactgtgatgttccccatgtgaatcgtactgattaccagatgattgacattgctgaggatggatttcttagcttgcttactgaaaatgggaacaccaaggattgacctgagcttgctactgatgaga

SEQ ID NO: 1968 - DNA, 400 bp, Glycine max
tatcgagcccaaatccagagaaagagagaagaggaaagacactgagtaagcaatgaaatttccaaattctcaattgtttcttccattcttgttgttgttgttcttcgcgataactccctttcgcggttcagggcagcaaacggattggaacagcgaagagactcaacatggaaatggggttcgccgcagagttcttctgagtttcaaagagaagccctcaggaagtaacgttacctttgaatgtactccttcgggtccttgtgtgccctgtctctactctgagaagggtgatgagaaatatcgatgcagtgagactggctaccgaattccattcaaatgtttagagattaaagattcaacgaaggatgcaaagagaacaaagtctctaaaaggtcggttg

SEQ ID NO: 1969 - DNA, 370 bp, Glycine max
gaaaattctaacacttctaggcacttggctgaattttggatgattgaaccggagcttgcatttgctgatctaaatgatgacatggcttgtgcaactgcttatctccagtttgtaataagacatgttctcgataactgcaaggaagacatggagtttttcgatgcatggattaataaaggaatcattgatcgcttgagtgatgtagcagataaagatgttgtgcaaataacctacactgaagcgatagatctgctgtcaggagcaaataagaaatttgaattcccggtgaaatggggtagtgatcttcagagtgaacatgagcgttatataactgaagaggtattcagtggatgccctgtgataattaaag

SEQ ID NO: 1970 - DNA, 1179 bp, Glycine max
caaatatgatataattggtgctggttcacattcttcaggagattttcctgaaaaggaagatcaagaaaaacccaaaaagattgataccagattgagacaaagaatagatcctcaatacaatgaggttcaggctcagatggaaacaaatttgtttaaattgtctcttgatgatgttgaaactccttaagatccaacatagaacctttaggagtttcaacatcatcaagagacaatttaaactcctaaaggttctatgttggatacttaaaatttctcagtctaaaattgcacttcccaagatcactacgcagaatgattcctccaactgtgttcttgggaagtgatctattggcaaattttttgacagagggcaattttagagcaactgttgacaccattttaatcattcctttaatacgatgagtgcgctgcaaatcaacacttgctctaaaatggtggccacacgttggtatttcctgagaatacacggtatagcattggcctgtgctattgaatagttcttttaagggggcccgccagttcttgatatttacaccaatctgctcttcaagactgtgatattgtggcatctctgctttgcacaaaaagcattgacttatttcatttaaatccaaaccccgtgttttagatccatggagtttttggattttgtgaatgcgatacgcggattgtcactgtggatagtcatttcgtgtcacgtggatgcgacttgccaccccaatggcaagatgttacaggttacaaattgattggtttatttcctctcaggaatgtgttcccaggacctcattgtgttttaaaatccacaaaaatccttttgtggttaaaataggggggttgggggaaaaattgatttttccccccagggcacttttccgaagtgttaaagagaatgcctcttttctataagggggagggagctggtgcaaaagaatgctattctcatgaatatgccaaatgctgttctttcaatgtggagtatatattggtggagatctcgtttttgaagtttctaagatgacttctccctacattaaatgtacagtctctttcttcatagcatttggaaatttggctgatgacaccatcaattttgaggcttttccccacaagctggtgcagtttggagagattcacgaaaaaagtgtattgaaattt

SEQ ID NO: 1971 - DNA, 1637 bp, Glycine max
accccggaattcggtccaaggtcatgggaaacaaaactacccttttgcttttgctctttgttctttgccatggagtggccacaacaacaatggccttccatgatgatgagggtggtgataaaaagtcaccaaaaagtttgtttttgatgagcaactccacgagggttttcaagactgatgcaggggaaatgcgtgtgctgaaaagccatggtggtaggatattttataggcacatgcacattggcttcatctctatggaaccaaagtccttgtttgttcctcagtacctcgactccaatctcatcatattcatccgtagaggggaagcaaagctgggattcatatatgatgatgaactagcggaaaggagattgaagacaggggacttgtacatgattccatctggttcagcattctatttggtgaacataggagaaggtcagagacttcacgttatctgcagcattgacccctctacaagcttgggattagagaccttccagtccttctatattgggggaggagccaattcgcactcggtgctttctggattcgaacctgccatccttgaaactgcatttaatgaatcaagaacggtggtagaggaaatcttctccaaggaactagatgggccaattatgttcgtggatgattctcatgcacctagcttatggactaaattccttcaactgaagaaggatgacaaagagcaacagctgaagaaaatgatgcaagaccaagaggaggatgaggaggagaagcaaacaagtaggtcatggaggaagctcttggaaaccgtatttgggaaggtgaatgagaagatagagaacaaagacactgctggttcccctgcctcttacaacctctacgatgacaaaaaagccgatttcaaaaacgcttatggttggagcaaggcactgcatggaggcgagtatcctccactcagcgaaccggatattggagttttacttgtcaaactctcagcgggatccatgttggcacctcatgtgaatccaatatcagatgagtataccatagtgctgagtggttatggtgaactgcatatagggtatccaaacggaagcaaagcaatgaaaactaaaatcaaacaaggggacgtgtttgttgtgccaagatacttccccttctgtcaagtagcatcaagggatggacccttagagttctttggcttctccacttctgcaaggaagaacaagccacagtttctggctggtgctgcgtcccttctaaggaccttgatggggccggagctttcggcggcgttcggagtgagcgaggacacgttgcggcgcgctgttgatgctcagcatgaggctgtgatactgccatcagcatgggctgcaccaccggaaaatgcagggaagctgaagatggaagaagagccaaatgctattagaagctttgccaatgatgtggttatggatgttttttaatttgaacacttgatttggaataggggttatttggtagtgctagtgcctagtggaattctgtgttgagttttttgttctttatatttagttgagatgtgtgttgtgttcttgagttgtgaataaaaatctactttctttgtccaaaaaaaataatattcgatggtgtcaacggacatgccgatt

SEQ ID NO: 1972 - DNA, 2099 bp, Glycine max
tacattccagaacccctctcttggcgcaccccagaactctctagtctctatccagtaccttttggttttctataagctcttctctttccacttgttcagatcaaattcattcctttccttctttcttctaaaccctatggccgacgaagccaaagccaaaggcaacgcagccttctcctccggggactatcctgccgccatccaccacttctccgatgccatcgccctggctccctccaaccatgtcctctattccaaccgatccgccgcatacgcctccctcaaaaactacgcagatgcattagcggatgccaaaaagacagttgaactcaagcccgactggtccaagggttacagccgtctcggtgccgcgcatcttggcctttcccaatacgatgatgctattttggcttacaaaaggggtctcgaaatcgaccctcacaacgagccccttaagtctggtttggcagatgcgcagaaggccttggccgcggcctccaggcctcgcccctcggcctctaaccccttcggtgatgctttctctgggcctgagatgtgggcccgtctcaccgcagaccccaccactagggcttacctccaacagcctgatttcgtgaagatgatgcaggatatccagagagatcctaataacctcaacttgcacttgaaggaccagagaatcatgcaggccctaggagttttgctcaacgtcaagattcaaacccctcccacgggggctgacaccgatatgccggattctccatcgccctctgcggcagcgtctgagaggaagagagctgcggaagccgagcctgctaagcagcccgagcctgaacctgagcccgagcccgtgcccatggaattgacgggggaggagaaggacgcagagcagaagaaggctgaggctctgaaggaaaaggaagcgggcaatgcagcgtataagaagaaggattttgataccgcgattcaacattacaccaaggctttggagttggatgatgaggatatttcgtatctcactaaccgcgctgctgtctatttggaaatgggaaagtatgaggaatgcataaaagattgtgacaaggctgttgaaagaggaagagaactaagatcagattttaagatgatagcaagagctttgacaaggaaaggaaatgccttggtgaaattggcgaagtgctcgaaggattacgagtctgccattgagacttatcagaaagcactcactgagcaccgcaaccctgacactttgaagaaacttaatgaagctgaaaaggcgaagaaagaactagaacaacaggaatattttgatccaaagttggctgatgatgagagagaaaaaggaaatgaattcttcaagcagcagaagtatcctgatgctgtgaagcattacacagagtctatacgaagaaatccaaaagatcctagggcttatagtaacagagcagcatgctacactaaattgggggcaatgcctgaagggttaaaggatgcagagaagtgcattgaacttgatccaacctttgtaaagggttatacccggaaaggtgcagtccagtatttcatgaaggaatacgacaaggctttggagacatatagggaggggttgaaatatgactctaacaaccaggagttgcttgaaggcatcagaacatgcatacaacaaattaacaaggctagccgtggagacttaagtcctgacgaattgaaggagcgacaggccaaggcaatgcaggatccagaaattcagaacatccttcaagaccctgttatgagacaggtattgattgatttccaggaaaatcccaaggctgcacaggaacacacgaagaatccaatggtgatgaataagatccaaaagctggtcagtgctggaattgtccagatgaagtaagtttgtggcaggtggcagttcgtgtgaaaaagcaatcaagcaatcgataatgatgtctcagtgtgactattttgacatttaaatagatgtgcttcgcaaatcagctgggttatattaagtagacgccccataggcaaagtgtaaattgatccacatagtttgcatcgtaccatgtcgtttattgtatatacaagacattccattc

SEQ ID NO: 1973 - DNA, 969 bp, Glycine max
gattttaatcgggtcaaaccaaattggggtatataaagtctgagtgttagggttttaggtagttggatgtgttgagatccactgctgcagaatccaatttgtgacactaaatctaagttactatgactgctcagacccaagaggagcttcttgcgcaacacctcgaacagcaaaagatccatgatgatgaacctgtcgtcgaggatgatgatgacgaggaagtggatgatgatgatgacgatgaggatgatgaccatgacgaaggactagaaggtgatgcatctggtaggtcgaagcagaccagaagtgaaaagaagagtcgcaaggcaatgcttaaacttggaatgaaacctgtcacaggtgtcagtcgagtgacagtcaagaagagcaagaatatcctgttcgttatctcaaaaccagatgttttcaagagtccaacatctgacacgtacattatatttggggaagccaagattgaagacttgagctcacagctacaaactcaggcagcagagcaattcaaggctcctaatgtgagcaatgatggatcgaagcctgaaacctctgctgctgctgctcaagacgacgaggatgtcgacgagactggtgtagatcccaaggatatagacctggtgatgactcaagctggtgtgttgagatcaagagctgttaaggctctcaaagctgccaatggcgacattgttgctgccattatggagctaactaattgatgatggtcagatttgggataattttagaatttgcaatgtggagctatttttctgttagtcaaaatttttgctctcctttggtttgaaaagtggtttgctaattgaatctctgcttcattctattttctgggaaattgtctgcatagaaaaaaaagactgtagactcattctctacaattgtatgttcactgccaagaatgccaatcataattagtattcctattggttagtagagttt

SEQ ID NO: 1974 - DNA, 752 bp, Glycine max
ccgtcgagccgaatcggctcgagccgaccgatagcgaacgagtaccgcgcgggacaggtgcagaccagtatttcatgcaggaaaccgacaaggctttggagacatatcgggcggggttgcaatatgactctaacaaccaggagttgcttgacggcatcagaacatgcatacaacaaattaacaaggctcgccgtggagacttaagtcctgacgaattgaaggagcgacaggccaaggcaatgcaggatccagaaattcagaacatccttcaagaccctgttatgagacaggtattgattgatttccaggaaaatcccaaggctgcacaggaacacacgaagaatccaatggtgatgaataagatccaaaagctggtcagtgctggaattgtccagatgaagtaagtttgtggcaggtggcagttcgtgtgaaaaagcaatcaagcaatcgataatgatgtctcagtgtgactattttgacatttaaatagatgtgactgggaaaaaagttgggaaattttgagttgtttttacctttgttttgttttagtgaattcatataatttacgaatatcaggtgcagtccatttatatttcaatggcttattgtggtgacatgacttccttttaatttaaaatcggtagggggcgaacgtgaagtgcggtttagtttttaaggttaataactctaaatcctcgttatcctatactttataatgtttctatctacttattaatcttcttttgtatgat

SEQ ID NO: 1975 - DNA, 426 bp, Glycine max
gagcaattcaaggctcctaatttgagcaatgttggagtgaagcccgaatcttctgctgttgctcaagatgatgaggaagtggatgaggctggcgtagatcccaaggacatagagttggtgatgactcaagctggcgtgtcaaggcctaaagctgttaaagctctcaaggcggccagtggcgacattgttgctgccattatggagctaactaattaatggtccagtttgtttgaattttagaaagtgtagctatttttcattgttgatcgaaatttttgctccttgaatttgaagtacttgtttgtcaattatctgtgtaattgtccccatggaaggaaaagactgtagacttcatttgcaacaaatgcatgttcaatgccaagaatgtcagtcataattaacaattatctgatattgatacaaccc

SEQ ID NO: 1976 - DNA, 461 bp, Glycine max
  unsure (1)..(461): unsure at all n locations
ggggtcgtgtgttgttgtatactataatagcagaatcgtgagtaacagcagagcagaacaccgataaatcgctatgactgctcagacccaagaggagcttcttgcggccgaccttgagcaacaaaagatccatgatgatgagcctgtagttgaggatgatgatgaggatgacgaagatgacgacgatgaggatgacgacaatgttgaagaaggtgatgcatctggtaggtccaagcagaccagaagcgaaaagaagagtcgcaaggcaatgctcaaacttggaatgaaacctgtcacaggtgtcagtcgtgtgactgttaagaagagcaaaaatatcctgtttgttatatcaaaaccagatgttttcaagagcccgacttctgacacatacattatattcggcgaagccaagattgaagacttgagctcacagctacanactcaggcagcagagcaattca

SEQ ID NO: 1977 - DNA, 520 bp, Glycine max
agctagtcaccaaccaaacctctgcattattctcttctctcactctctctaagctctcttttagtcttactcacaaacacttttttcactgcttccattacgaacatatatttattatatggctcctgaacttgtccccaccgttgtgaaatccagtgctgcgttcacgaaacccgcgacccttccaaggcgtgcctacgtgacattcctcgccggaaacggtgactacgtgaaaggggtggttggcctcgccaaagggttgcgaaaggtgaaaaccgcgtacccgttggtggtggctgtcctccccgatgtgccggaggagcaccgtaagatcctggagtctcagggctgcatcgttcgcgagatcgaacccgtttacccacccgaaaaccaaacccagtttgccatggcttattacgtcatcaactactccaagcgccgtatatgggagtttgtggagtacagcgagatgatatcacttggacggagacattgcggtatatgagcacatagacgacct

SEQ ID NO: 1978 - DNA, 688 bp, Glycine max
gcattatttagacagacatgcgtccattaaaatgaacagaacacacaacacaacaattgcgaacaaagaaagaaccttttgcttttctttttttccctctctctccctccgaaaagaactgattctctctctctctgtgccttttatcttttttctttctttcttttttaacagatcgttcttcttcttcccactcactctcactctctgtgttggtgagatgggtatgtcatggctgtgctgctgagaatggctcagcctcacaatggcaacaccaacagcactgcgaaccagcaattggtccttcatgactttctgggtatgaggcccgccgccgattccccccaaaccgccgatgttaggtttccggagccgtccgcctccgcctcttccaccggaggacgcggccccttctccgccacctccgacatcgcttccgaaaaacaggtaggaaatcatctcgagggagttccattctatggcccgaggagtgatttttctggcactgagataagcaacagattagtgtgaagcaagagatgtaattctgattccacttttatgggttcctccagagatgccttccaattggtccctgattcctttcaagactcacatttgatgaaggttctccggaatgcagctggaggagaaagggctataagcccaatgatgatgcagtgttact

SEQ ID NO: 1979 - DNA, 517 bp, Glycine max
gaagaagttcgaaagctcctcatctcaaagcacttgttcttcagggaaatgtgtgcttaccacaacagttgtggccacaacaacaactgtggcagtacttccaacgtgcaacaatcaaccgaggctcaaccaccacatcaacatcaacagcagcagtgtttgcactcatcagagaacggggtggggagtctgagaatgttgaaagaggatgaggatattgaggacgatgattcggatgagttttctgatgaggatgaagatgaatcaggagaaggaggatcaaggggtatggaggaggatgaaaatgatcatgtgatgaggaagagagcaaggaataagggagggtgttggtgtttcatcgatatcatcacagatgatgcagcagttgaatggtgaagtgagtggtgtgttgcaagatggagggaagagtgcttgggagaaaaagcagtggatgaagaagaaggtggtgcagttggaggagcagcaggtgagttatcaaatgcaagcgtttgggatg

SEQ ID NO: 1980 - DNA, 708 bp, Glycine max
acatagaaatgacctccctttatttcttattctaataagatacacaccagaaaaagcacaaggggcaccagacggtgatacacggtaaatataggtagtactatagtagtggaactacgaactacaaagcttttatttagtgacacaaccccattttgcccttgctatataaagtgttcagaaattaaaaagcattcaacattacatcatatatatgtaggatcgttattgataagcttccatatgcataacatcagcaaccggtggtgttggtagtgtggaggccttggaggggggaggtcccggtggcccaggaggcggaggagttggatgagcatacggtggcccgggtgggccatggtgttgatgaaagcctggttcgggtgggccgggatggtggtgtggaggcccaggaggcggaggagttggataagcatgcggtgggccgggtgggccgtggtggtggtgtggaggcccaggaggcggaggagatggatgagcatgtggtggcggagccggtgggccggggtggtggtgagggcctggaccgcctggcgggggaggattgtgcatgttgctgagagttgttgaactgaggaatcacacactgggttgctaaccagtaaaccttataaaaatattgttagcaagaaatattttctttttggggtgaatgaacttaaaccactaatttcgataataatgtac

SEQ ID NO: 1981 - DNA, 842 bp, Glycine max
tagatctcccgataagaacaggcaaaagcacaagaaacatagcttaaacgagattagatggcaactgaatgttgtcaaaagtggctgcacacatcccgtaaaacataacattatgacagacagacacatatgtccaaaaatcaattacatgccaattttctgaaaggaagaagacacagtcatggacacttagcagtatttgcccgtatcacaattaatgggtaataataccgtaaaacacctacactccctaacaacccctatccattgaaaaaaaaaaaaaaaaaggaatttgaacaacaaaaacaccacccgcagcaacccatcttcatcttcacaaccaccaccaccaccaccacatcaagcacgctcaccacgaatccttcttgccaggctggatatctttgggcataatagttacacgcttaagcgtgaatggcacacaggttagtgtcgttcaaagagcccaacaaggtatgcttcagcagcttcttgcagatgcaagcacagcatggctctggaaacgcagatcagtcttgaagtcctgagcaatttcacgaaccagcctctggaaggggagcttcctgatcaaaagctcggtactcttctggtatttcctaatctcacgaagagcaacggtaccaggacgataacgatgtggcttcttcacaccaccagtagttggtgcagacttacgtgcagccttggttgcgagctgcttcctaggtgcctttcctcctgtggacttacgagcagtttgcttcgtacgtgccatctcgaacaactttttttttttttccaactgtggctgaatctaggggaaatcggacgcataagtcgac

SEQ ID NO: 1982 - DNA, 1853 bp, Glycine max
ggctgcttaagataatgacaaaaggctatatatgcatattatctaaacttgtacagttcatatcagtcactttatgtgttaatattgtagctgccatgaaacttgcagaaaaagttatcacgaaaacaaactgggttgcacgataagtagctctccaaattacacagacaaataaacctaacaattgtcccacatgtcatactcatagtccaaaagcacatattcctcaagatgaattgtgaaaataccagtttgagcttgcaagaaacattgtatgcatctgatgagaattcaacccaagttcaatcttctatttgataaaatgaccatgagcatgatagagctgtgataaggagcagctttcacttggcattagttactatcagcaaaactgaaactcacctgcaaggctcatgtagaggatgaatcggaggcagcggcctcttgtcttggccttctgcggtcagggggagggccagtctctccgtctctcataccttctactctcattctcttggtgcgctacgtttcggttgagtaggtagagtacttacaaggaataatctccccatttatgtacttgtcacctccgtagtctttattcttaacatctatataggagtctggcagtacccaaagaaccccaggcaaacccttgaatttctcggaggttgcttcatcaacagtgcactgaaatccagtgtaagtggtggtgctaaaggcatacatgttctttttagcttcctccatgcttcccaagacagtggcaagagtgtcgaggtacgtgtcaatcatctgttcacgggtgggtgcagggtcctttggaaactccatcacaatcagccaatggttgtagtcacaaccaggtaacattatcgtctccctctggtcgttgttgttgctgctgctgctccttttcgccgagaaatccccatccagcgccgcccgaatccggttacaattgcgggttcgggtcacgatagaaggagggaggcgaagattcgttaccggggtaaagttggagattggggttttggggtgataaggtagagttagggttttagcggaaaaggaaaacgtgactgtcgccattgtaggatcggtcgtgaaactgaactgagtccaagagagcgtagtaaaacgcggacgcgtgggaaaaaaatcaaatacatgccaaatttctaacaaccagaccttcacagtctcttaggcagtatttgccaatgacaattaatatgactaccaagtaaacacctatttttccctaataacctataggcttcaacaaaaagaaaacttagtaacaaaacaccatccgcagccaccaaacaatccatcttcacaaacacagaacgcaccaactcaagcacgctcaccacgtaatccttcttgccagctgaatatccttgggcataatagtcacacgcttggggcgtgaatggcacacaaagttagtgtcctcaaagagcccaacaaaggtatgcctcagcagccttcttgcaatgcaaagcacagcaatggctctggaaacgcaagatcagtcttgaaatcctgggcaatttcacgaaccaacctctggaaaggaagcttcctgattaggagctcagtgctcttctggtatttcctaatctcacgaagagcaacagttccagggcgataacgatgaggcttcttcacaccaccagttgttggtgcagacttacgtgcagccttggttgcaagctgcttcctgggagcttttcctccagttgacttacgagcagtttgctttgtacgggccatctcgaagtatttcggtctctgcttccaaaacgcacttgctgaatcttgaatgaatagaatgcaaaggttcc

SEQ ID NO: 1983 - DNA, 1039 bp, Glycine max
aaatctgacagctttgattaacgctcttttcttttatggaggtaatccataaataatgtacggtgaacaagtaaataagaaacccagtaaccaaactgggatggaaatcccgagtaagaacgaggcaacccaacaaactaacttaaacgagattagatggcaactgaatgttgtccaatacagtttctaaagtggctgcaacatcccgcaggtaaaaactaaaacagaagcatttttaacacatacatatgtccaaaaatcaattacaagccaattttcttaaaggaagaaaacacagtcacggacacttagcagtatttgcctatatcccaattaatgctactaccagcagaaaacctaccctccctaacaaccccatctattgaataaaaaaaggaatctgaaaaacaaaaacaccaaccgcagccaccaatcatcttcatctttccaaccaccaactcaagcacgctcaccacgaatcctttcttgccagctgaatatccttgggcataatggttacacgcttggcgtgaatggcacacaggttaagtgtccctcaaagagcccaacaaggtatgcctcagcaggttctagcaatgcaagcacggcgtggctctgaaaaacgcagatcagtcttgaagtcctgagcaatttcacgaaccagcctctggaaggggagcttcctgatcaaaagctcggtactcttctggtatttcctaatctcacgaagagcaacggtaccaggacgataacgatgtggcttcttcacaccaccagtagttggtgcagacttacgtgcagccttggttgcgagctgcttcctaggtgcctttcctcctgtggacttacgagcagtttgcttcgtacgtgccatctcgaacaactttttttttttttccaactcgagtctatagccttggccgacaggtccgggtaatctttgaaatttcatcgtgatggggatagatcattgcaattgttggtcttcaacgaggaattcctagtaagcgcgagtcatcagctcgcgttgactacgtcc

SEQ ID NO: 1984 - DNA, 542 bp, Glycine max
cacaactactacaagtacttccttacaatcaaaaccaacaacaactatggcaagttatcaaaagcactacgatgatcagggtcgcaaggttgacgagtatggcaacgttgagaagcaaagagattgtggaatttgtgatcacacaacataagcatatatatagaaagatgtcaggggcacaaggagcacaaccaaaggagtcaaaaacagcaacaacatatgagtcagtagaaggaggagagaaccgaacaaggactgacttgctttcaagggaggatcaaggctgcattcaagtggaaaaacttcaggagaaggtccatgatcctgctggcaaaggtggtcctgtctttggtgctggcaaagatgaagacaaacaagaccttggagttactggcacaggctaattaacctactatatatattactactatatactatatactgtatgagtatagtatatacccaaaaagtactagtctctcttgtgatcatggtgctgcttcaaaatctttggtttgggtttgagtttatgtaaattaatg

SEQ ID NO: 1985 - DNA, 1305 bp, Glycine max
acgcgtacgtaagctcggtcttcggtccgatcacacaacaaacatatctcttcctcttctgtccctcaatggaaggatcaggatccggtgtggttacagtctacggcaacggcgccatcaccgagaccaagaagtcccccttctccgtcaaagtcggcctagcccagatgctccgcggcggcgtcatcatggacgtcgtcgacgccgagcaggcccgcatcgcggaggaggccggtgcctgcgcggtgatggccctggagcgtgtccccgccgacatccgggcccagggcggcgtggcccgcatgagcgatccgcagctcatcaaggatatcaagcgggccgtcaccatccccgtgatggccaaggcccgcatcggccacttcgtcgaagcccagatcctcgaagccatcggcatcgactacgtcgacgagagcgaggtcctcaccctcgccgacgacgccaaccacatcaacaaacacaacttccgcatccccttcgtctgtggctgccgcaacctcggcgaggccctccgccgcatccgcgagggcgccgccatgatccgcaccaagggcgaggccggcaccggcaacatcatcgaggccgttcgccacgtccgctccgtcatgagcgacattagggttctccgcaacatggacgacgacgaggtcttcaccttcgccaagaacatcgctgcgccttatgacctcgtcatgcagaccaagcagcttggccgcctccccgttgtccacttcgccgccggcggagtcgccacccccgccgacgccgcgctcatgatgcagctcggctgcgacggcgtcttcgtcggctccggcgttttcaagagcggcgatcccgcgaagcgcgccagggcgattgttcaggccgtgactcactacagcgaccctgagattttggcggaggttagctgcggattgggtgaagccatggttggtatcaatttgaccgatgacaaggttgagaggttcgccaatcgctctgaatgaaatgaataataattctcagatttgtttctctgtggcgcttcaatttggactattaagggttttagttgcttcttatatattataataaggttatgtttttagttttcggtgttttgaaccgtgttaattggattttagaaaaaccaaaaagaaaaaatagataggtagctatttgggcatgccttgtaatatgcctatacttgtttttacatattcagcgtcgtggtattgtgttgagttagtagtgcgttcgtggtaaacgagaatcgaatcattcttgtttttggatattcaatcctaa

SEQ ID NO: 1986 - DNA, 387 bp, Glycine max
aatccttccttcttccttctaattcttttcctttctcttctcacttctcacacaccacatatcttcactctttgttcctttcccctcaaaatcaaaatcaatggaaggatcaggatccggtgtggttacagtgtacggcaacggtgcaatcaccgagaccaagaagtcccccttctccgttaaagtgggcctggcccagatgctccgcggcggcgtcatcatggacgtcgtcaacgcggaacaggcccgcatcgcggaggaggccggtgcctgcgcggtcatggcccttgagcgtgtccccgccgacatccgtgcccagggcggcgtggcccgcatgagcgacccgcagctcatcaaggacatcaagcgggccgtcaccatccccgt

SEQ ID NO: 1987 - DNA, 851 bp, Glycine max
cgttcttgttccttatctaatctaacgagaaaagcacactatttatacaagatccccaatttctctatttttgctcagtttctgttgtattttctcaattacaacatcgtattctgcaaattcaaaccgggtcttggttttctgaaagatgggaggtggcaaggacaagcatcatgatgaatctgacaaaggaattttttcacaccttgctcatggggtagctggtgcagcacatggtggacatgggtacccacctggggcttacccaccaccacctggggcataccctccacaacaaggatatcctccagctgggtatcctccacaacaagggtatcctccagctgggtaccctccacatcaaggctatcctcctgctggttaccccccagctggttatcctggttcatcacatgcaccaggttctcatgggcacggcggtatgggagcaatgctcgctgggggtgctgctgcggctgctgctgcttatggtgctcaccatgtctctcatggctcccatggctcctatggccaatatgctgcacatggtgctcacatgccccatggaaaattcaagcagcacgggcacggtaagttcaagcatggaaagcatggcaagtttggcaagcatggaaagcatggcaaattcggcaagcatggtggtgggttcaagaagtggaagtgaagaatgtgtatctaactatgattctaaaatgcagctctgtgtagagcttaaatctttataataaaccatactttggatgatgaaatcaatcgatctatgagatcatgatacttgaccccttgttttctttcttgttttttgttactttgatactattggcattggc

SEQ ID NO: 1988 - DNA, 708 bp, Glycine max
  unsure (1)..(708): unsure at all n locations
ccctcgtgnctcggtcacattttatacaagatccccaatttctctctttttgctcagtttctgttgtattttctcaattacaacatcgtattctgcaaattcaaaccgggtcttggttttctgaaagatgggaggtggcaaggacaagcatcatgatgaatctgacaaaggaattttttcacaccttgctcatggggtagctggtgcagcacatggtggacatgggtacccacctggggcttacccaccaccacctggggcataccctccacaacaaggatatcctccagctgggtatcctccagctgggtaccctccacatcaaggctatcctcctgctggttaccccccagctggttatcctggttcatcacatgcaccaggttctcatgggcactggcggtatgggagcaatgctcgctgggggtgctgctgcggctgctgctgcttatggtgctcaccatgtctctcatggctcccatggctcctatggccaatatgctgcacatggtgctcacatgccccatggaaaattcaagcagcatggaaagcatggcaaattcggcaagcatggtggtgggttcaaaaagtggaagtgaagaatgtgtatctaactatgattctaaaatgcagctctgtgtagagcttaaatctttataataaaccatactttggatgatgaaatcaatcgctctatgggtttttgtt

SEQ ID NO: 1989 - DNA, 858 bp, Glycine max
gggaagctgaaccctaactagctgagcagacggaggagaactcgactgaagctgcctctgcgacgccgtttcgattcagcctcagacatttccgttgcagtcatggtgcaagaaaatggcaagaggaagaaaccaaacattctggtgactggcacaccggggacaggaaagacaactgtgtgcactgctctagctgaagccacccagctctgccacatcaatgtcggagaattagtcaaagaaaagaacttgcatgatggatgggatgatgagcttgattgttaccttcttaatgaagacttggtttgtgatgaacttgaggatgttatggaagaggggggaaacattgtggactaccatggctgtgatttctttcctgagcgttggtttgattgcgtggttgtacttcaaactgataacaccattttgtatgaccgtttgagtaggagggggtacaaagattcaaagctttcgaacaatattgaatgtgaaatcttccaagttctgcttgaggaggctaaagaaagttactcggaggagaaagtgattgcaatgaagagtgataatatagaagacgttagtagaaatgtggcaactcttacagattgggtcagaaattggtctttaccctcacattcttaacaaaaaaatgagaactttgtatatacctttctgcttgagtatggtgaaagtatcacgatgaactgctacctgaagcagatctgcagtgtggttgaattctcttgcaaatttttggtgtggcatgtatttgtggcattttatgtgatgggttttaaatttgacaattgaaaggtaacttttaccaagttgtgataatgagtttcaaatagttaaggg

SEQ ID NO: 1990 - DNA, 708 bp, Glycine max
ggataatcaaaaccaagttaatttatcccaagattctcctattcctgaaaaaaactgtactgattacgtcccatctgttctggcgaggtttcatattcttaaatcccgggatgaaggttcaagttctacttcttcagaagggaaacagttacatggagatgaatctgctgctgtcaaaggaatggatggcataacagttgcaacaaatgtatctgagggtaaaagtttggatgtccatgcaaatcctgttgtggtgcatctcaattcctacactgccgtggacaagtcaatcccaaaggagtttcatctggattcggaggacaatcaagaaactcagcctagcggaacctgtgagtttcagcctcctacttactactccgatggcttcgcgtcagactgggaacatgtggagaaaagcttgtagaacgattttgaaaccttttaagagtttggttatatggttcaataaatgtttatgttttgagcatatgactctgaataaatgcttatgggttagatttattatctttatcagacatgcatattgcagaatttggtctttttcagtctttatcctgtttgtatataacaatgtcagactttatttttatctaatgtgtttgctcacttgcacatgtggataaataagtgcaagtgatagaaaaataaaatttccaaattgccaaagaataaaccattcagtttttc

SEQ ID NO: 1991 - DNA, 378 bp, Glycine max
  unsure (1)..(378): unsure at all n locations
atcgggttacctnctccaattctcaccgaaatccgtcgtcaaagttggtttccggcagagatcatatatctcctagggtttccagctgaatcgagcatactccctcaatctccaattccacatcacaaaccctataaaatcttttcagatgaatccaaaatcgctccaaatcctggtgcagtcaccggacctcggaatttcccttcaacccacaaccaaacacgaaacgcctttccgatctcaaacactctctctttcctcaatcacaccgatccttctacttcaccttcaatggcaagcccctccccgacaaaatccctctctcgcaattcncccctctctcaaccctctccctccgctcccgcctccctggtggtg

SEQ ID NO: 1992 - DNA, 982 bp, Glycine max
  unsure (1)..(982): unsure at all n locations
cgtagctcggtagggactttgagttcgaactaaacaattcaattcaatctgcctcgatcatggagaggaaaacatttgggtttttgttcttgctcctccttgtcttagcttctgatgtgacggtgaagagagcagaggcgaaagattgcttgacaaggaggcacgggttccagggtagatgcttattcgacaggcaatgtgcacatgtgtgcaggagcgatggtttcatcggtggtcagtgccgaggccctcttcgcaaatgcttttgcagcaggccatgttgatcgaaattactactgccaaagaggccatgaaataaacaaacaaacaaatgtattgttagttcacacactaagttctgaaaaatgagttccaaagtttttcttattctacttatgttcatggccactatacttttgatctcctctgaggttgcacccgatgatgcataccagaattttgacaaaacagatgggaagcgtagtgcaaatggggtagatgaaagcaaatattggcgtggtggctatggcgactatggtggttggcgtggtggtggttggcgtggtggctatggaggctggcgtggtggctatggtggtgggcgtggtggctatggtggctggcgtggtggctatggtggtgggcgtggtggctacggaggttggggtggtggctttggccctaacgaacataatgaggctgggattgatgctagccctcacaactaagaaggaaacttgctaaagcttatataggatttaagttatcgtaataaataaaacttcattggaagggtagttataatagatgtggagatctttcttcgctctggtcatataaaggaataatacttttctattaatttccttagaaaacaaaaaaagatcaaaaannnnnnnnnnnnnnnnnnnnnnnnnnnnnnnnnnnnnnnnnnnnnnnnnnnnnnnnnnnnnnnnnnnnnnnnnnnnnnnnnnnnnnnnnn

SEQ ID NO: 1993 - DNA, 1674 bp, Glycine max
tcgctcgctcctcgtggacactatttaaattaaaaacctcttcctttcactctctccacccgcttcagctttcttcttctcgtttttactttgacggtttctagagagagaaagtttgttatagagagagaaagcgcgctgctgcttcttctgctgctgcttcgacagtgagaagagagagagaagcgctcttctccgtaccgtttctagagagagaaactgatggccggagttaatccgaacggcgtcgccgattttccggcgactccaacgcacggcggacagttcattcagtacaacatattcggaaacctcttcgaggttacggcgaagtaccgtcctccgatcatgcctgtcggacgcggcgcgtatggaatcgtttgctcgctgttgaataccgagacgaatgagctggtggcggttaagaagatagcgaacgctttcgacaatcacatggacgctaagcgtacgcttcgtgagattaagcttcttaggcatttggatcatgaaaatgtaattggtttgagagatgtaattcctccacccttgcgtagagagtttaatgatgtctacatagccactgaactcatggatactgatcttcaccatatcattcgctccaatcaaaatctgtcagaggagcactctcaatacttcttgtaccagattcttcgtgggcttaagtatatacattctgcaaacgtaatccatagagatttaaaaccaagcaacctgctgctaaactcaaattgtgacttgaagattattgattttggtcttgcgagaccgactttggaaagtgacttcatgacagaatatgtagtcacaagatggtatagagctcccgaattgttgttgaactcctctgattacacctctgctatagatgtgtggtctgttggttgcatctttatggagcttatgaataaaaagcctctgtttccgggcaaagaccatgtgcatcagatgcgcctattgacagagcttcttggcaccccaactgaggctgaccttgggttagtgaaaaatgaagatgcaagaagatatatcagacaacttcctcaatatcctcgccaacctttagctcaagtcttcccccatgttcatccggcagccattgatcttgttgataaaatgctgacagttgatcccaccaaaagaattacagttgaagaagcactagcccatccataccttgaaaaactgcatgatgtagctgatgaaccaatctgcatggagccattttcatttgattttgagcaacaacaattggatgaagagcaaataaaagagatgatctacagggaagcattagcactcaatcctgagtatgcttaaagcagaaaaactcaaggacttgaagcaggcttagaaggaaaaataataattcgttttcaatttttttaatcactttaagttcagttcttacaatcacgaaaggatcaagttgaatgaaaattcaaccttgttgccgatcaaactccctaggtaatttattcaatctgtgtgactaggtaggtgcaattacggcttcatgagcgcccttttgttgtaaagtgccatgtaactatattaatttccatatattttttttaaccctgacggcttattgttgtaaagtgacatgtaacaatattccctgtttgccacaaaaaaaaaaaaaaaaagggcggc

SEQ ID NO: 1994 - DNA, 792 bp, Glycine max
  unsure (1)..(792): unsure at all n locations
cccacgcgtccgtccacgcgtccgcccacgcgtccgtctgactctacttcacttgcctataaatagggaacactcagtcacttcctccgcctcggcttccatacacttgtactgttctattagttcatactaagttctgaaaatgagttccaaggttttgcttgttctacttatgttcttggccactatacttctgatctcctctgaggttgcacccgatgatgcatacgagaattttgacaaaatagatgggaagcctagtgcagatggggtagatgaaagcaagtattggcgtggcggctatggtggcggctatggtggtggttatggaggtgggcgtggaggctatggaggtgggcgtggaggctatggagggggacgtggtggatatggcggcggacgaggtggctatggtggcgggcgtggtggctatggcggcgggcgtggtggcgggcgtggtggctatggtcctaatgaacataacgaggctggggttgatgctaaccctcacaactaagaaggcaactttctaaagcttatatatgggtttaagttatcgcaataaataaaacttcatgagaaggttagttgtaatagaagtggaaaactttgtaaaggaataatacctttcatgaatttccttatctttgtgttgtctctggttctgttttgctaaactcaaataaataaaattgtataatattgtctaatttgcatatttttactaccttttatctattnnnnnnnnnnnnnnnnnnnnnnnnnnnnnnnnnnnnnnnnnnnnnnnnnnnn

SEQ ID NO: 1995 - DNA, 570 bp, Glycine max
taccggtccagaattcccgggtcgactgcgagaagaaacaggactttgagttcgaactaaacaattcaattcaatctgcctcgatcatggagaggaaaacatttgggtttttgttcttgctcctccttgtcttagcttctgatgtgacggtgaagagagcagaggcgaaagattgcttgacaaggaggcacgggttccagggtagatgcttattcgacaggcaatgtgcacatgtgtgcaggagcgatggtttcatcggtggtcagtgccgaggccctcttcgcaaatgcttttgcagcaggccatgttgatcgaaattactactgccaaagaggccatgaaataaacaaacaaacaaataaataaatagctctaaccgacacatatgtacgtagtgtcggggttctagctagctaggtaggtacgtgtgtcttttgttatcgatcctagtttggtggagcaagtgtggcatcatgatctagttatatatatatgtcgtgatcatcttgctctgttcagcaataaattataatggaaattaataaattagttatgccttttcaaaaaaaa

SEQ ID NO: 1996 - DNA, 629 bp, Glycine max
tctctgtccccctccgactgcgatcgatcaaggcagcgtctacaatgagaaaggtggagatggctagatacaacgcgctgctgattctcctgctccttctaatacagtgaaaacacagagagaagcactcttctcactaccttttctagatacagaaactcatggcctgagttaatccgaacggcgtcgccgattctcccggcgactccaacgcacgagcggacagttcattcactacaacatattcggaaacctcttcgaggttacggccaagtaccgtcctccgatcatgcctgtcggacgcggcgctcgtatggaatcgtttgctcgctgttgaataccgagacgaatgagctggtggcggttaagaagatagcgaacgctttcgacaatcacatggacgctaagcgtacgcttcgtgagattaagcttcttaggcatttggatcatgaaaatgtgagtgctctcctttagctaagtttgacttaaagatattatcgtatcatatggtaccaatgatcaattcgtgctttggtttggttggtggaaatttctttcattacactgttttgattatgccacgtagtgtaacatactttttcatgaattagtcaattaaaattaagagt

SEQ ID NO: 1997 - DNA, 473 bp, Glycine max
gttctgaaaatgagttccaaggtttggcttgttctacttatgttctgggccactatacttctgatctcctctgaggttgcacccgatgatgcatacgagaattttgacaaaatagatgggaagcctagtgcagatggggtagatgaaagcaagtattggcgtggcggctatggtggcggctatggtggtggttatggaggtgggcgtggtggctatggcggcgggcgtggtggcgggcgtggtggctatggtcctaatgaacataacgaggctggggttgatgctaaccctcacaactaagaaggcaactttctaaagcttatatatgggtttaagttatcgcaataaataaaacttcatgagaaggttagttgtaatagaagtggaaaactttgtaaaggaataatacctttcatgaatttccttaaaaaaaaacaagtggtgtcatccaagatcgtggcagtggacttggg

SEQ ID NO: 1998 - DNA, 610 bp, Glycine max
tgtactgttctattagttcatactaagttctgtcaaacgagtgccaaggttttgcgtgttcgacttatgttcttgggccacgatacttctgatctcctctgaggttgcacccgatgatgcatacgagaattttgacaaaatagatgggaagcctagtgcagatggggtagatgaaagcaagtattggcgtggccggctatggtggcggctatggtggtggttatggaggtcggcgtggcggctatcgaggcgtgtcgtgaaggctctggatgagtgccagtgctgactatggcatgcctgtcggacgcggctatggtcgtatggcatccttggctcgctcgttgaatgccgtagtacgcaatcagtctggtggctatggtcctaagaagatagcgatcgctctcacccttgcgtagagagtttaatgatgtctacatagccactgaactcatggatactgatcttcaccatatcattcgctccaatcaaaatctgtcagaggagcactctcaagtgagtgctttcaattttttttttaaatatatcataattattatgtttacattttggattttttttgttttgctgatgattgtatgctcttttactt

SEQ ID NO: 1999 - DNA, 542 bp, Glycine max
cccgccggcacgcacgcacgcacggccgcggtgacttactcactcgctccttgcggacactatttaaattaaaaacctcttccttccacttctccatcggcttcgtcttctttctcgttcttactttgacggtttctagagagagaaagtgatggccggagttaatccaaacggcgtcgccgattttgcggcggttccgacgcatggcggacagttcattcagtacaacatatttggaaacctcttcgaggttacgacgaagtaccgtcctccgatcatgcctatcggacgcggcgcgtacggaatcgtttgctcactgttgaataccgagacgaacgagctggtggctgtgaagaagatagcgaacgctttcgacaatcacatggacgctaagcgtacgcttcgtgagattaagcttcttaggcatttggatcatgaaaatgtgagtgatatctctcctttgctaagtttgacttattttagatatatcgtatcatatgatacaaattcaattcgtgcttggtggaaatttttttcataca

SEQ ID NO: 2000 - DNA, 550 bp, Glycine max
tccgggtcgacgacgcgtacggttttgcttgttctacttatgttcttggccactatacttctgatctcctctgaagttgcacccgatggggcatacgagatttttgacaaaatagatgggaagcctagtgcagatggggtagatgaaagcatgtattggcgtggcggctatggtggccgctatggtggtggttatggaggtcggcgtctaggctatggaagtgtgggcgttggaggctactggagggggacgcgtggtggatatggcggcggacgatgtgtgctctatggtcgttcgcgacgcgtggtgcctatggacgggtatgggcgtggcatgctttgcgggcgtggtggctatggtcctaatgaacataacgaggctggggttgatgctaaccctcacaactaagaaggcaactttctaaagcttatatatgggtttaagttatcgcaataaataaaacttcatgagaaggttagttgtaatagaagtggaaaactttccaaaggaataatacctttcatgaatttccttaaaaaaaaaataaaac

SEQ ID NO: 2001 - DNA, 355 bp, Glycine max
aaaactcaaggacttgaagcaggcttagaaggaaaaataataattcgttttcaatttttttaatcactttaagttcagttcttacaatcacgaaaggatcaagttgaatgaaaattcacccttgttgccgatcaaactccctaggtaatttattcaatctgtgtgactaggtaggtgcaattacggcttgatgagtgtccttctgctgtaaagtgccaagtaacgatattaatctccaattttttttaaccctgacgggttattattatttttattttcttttgtgactgttttctcgggttcatcatgtattttacttaagttatttgcatcgtaacttattgctaccttaaaa

SEQ ID NO: 2002 - DNA, 464 bp, Glycine max
cggccgcgttcttcttctcgtttttactttgacggtttctagagagagaaagtttgttatagagagagaaagcgcgctgcctgcttcttctgctgctgcttcgacagtgagaagagagagagaagcgctcttctccgtaccgtttctagagagagaaactgatggccggagttaatccgaacggcgtcgccgattttccggcgactccaacgcacggcggacagttcattcagtacaatatattcggaaacctcttcgaggttacggcgaagtaccgtcctccgatcatgcctgtcggacgcggcgcgtatggaatcgtttggtaattggtttgagagatgtaattcctccacccttgcgtagagagtttaatgatgtctacatagccactgaactcatggatactgatcttcaccatatcattcgctccaatcaaaatctgtcagaggagcactctcaatact

SEQ ID NO: 2003 - DNA, 475 bp, Glycine max
cccacgcgtccggtggtggagttggggttgggggtggagaggcatggagggtttaaggatgcggatgtgtcgtagggggaaacgagggttcggaagaggatgattagggttacgaggaggagtctcgaacatattgcagattttagaaccaagacgtggtggtggttggcgtggtggctatggaggctggcgtggtggctatggtggtgggcgtggtggctatggtggctggcgtggtggctatggtggtgggcgtggtggctacggaggttggggtggtggctttggccctaacgaacataatgaggctgggattgatgctagccctcacaactaagaaggaaacttgctaaagcttatataggatttaagttatcgtaataaataaaacttcattggaagggtagttataatagatgtggagatctttcttcgctctggtcatataaaggaataatacttttctattaatttc

SEQ ID NO: 2004 - DNA, 275 bp, Glycine max
cttaaagcagaaaacctcaaggccttgacgcaggcttagaaggcaaacgaattattctttttccttctaagcctgcttcaagtccttgagttcagttcttacaatcccgaaaggatcaagttgaatgaaaattcaaccttgttgccgatcaaactccctctctaatttattcaatctgtgtgactaggtaggtgcaattacggcttgatgagtgtccttctgctgtaaagtgccaagtaacgatattaatctccaattttttttaaccctgacgg

SEQ ID NO: 2005 - DNA, 510 bp, Glycine max
tctagaattcaacggtcgacgcgacgcgtcagctctgaagttgcacccgatgggtgcataccagaattttgacaaaacagatgggaagcctagtgcagatggggtagatgaaagcaagatattggcgtggtgcggctatggctggcggctatggtggttggcgttgtggtggttgggcgtggtggctatggagggggggcctggtggctatggttggggaccgtggcggcccttggcctcaaacaaggtgcctatgatggcagacgtggaaggtacagctgcggccaaagccaccaccccaacctccgtagccaccacgcccaccaccataatgaggctgggattgatgctagccctcacaactaaggaaggaaacttgctaaagcttatataggatttaagttatcgtaataaataaaacttcattggaagggtaggtataatagatgtggagatctttcttcgctctggtcatataaaggaataatacttttctattaatttccttaa

SEQ ID NO: 2006 - DNA, 425 bp, Glycine max
acgatatgtactagtgttttgttagttcacacactaagttctgaaaaatgagttccagagtgggtcttattctacttatgttcatggccactatacttttgatctcctctgaggttgcacccgatgatgcataccagaattttgacaaaacagatgggaagcgtagtgcaaatggggtagatgaaagcatatattggcgtggtggctacggaggttggggtggtggctttggccctaacgaacataatgaggctgggattgatgctagccctcacaactaagaaggaaacttgctaaagcttatataggatttaagttatcggaataaataaaacttcattggaagggtagctataatagatgtggagatctttcttcgctctggtcatataaaggaataatacttttctattaatttcctaaaa

SEQ ID NO: 2007 - DNA, 435 bp, Glycine max
ccgggccgacccaagcgtcacacgactcacacattgcatctgctaactctctctctctgcgctctccactgaaccgagtctgaaagaggagaagatttaactaactccaatggctgcacgtgtggctgcaaggtacggatccagaaggctatttagcagtggttctgggaaaatacttagcgaggaggaaaaagctgcagagaatgcttactttaagaaagctgagcaagagaagttggagaagcttgctcgcaagggtcctcaatcagaagcagtctcggggggttcagtaactgatgccaaaccaagtagctcaggacatactggaacatcagttgacagagtttcaactgacaagtaccggaattatgcagttgtagctggtactgtaacaatgcttggggctttggggtggtaccttaaaggcactgcaaa

SEQ ID NO: 2008 - DNA, 797 bp, Glycine max
ggaccaaagaaggagcaaaatcctataacacccaatcctagctacaactccaaaccctctcttaactgcaccaccccatcatcccaaacatgtaacaccccttttgaaactttttctcatgagccaccccccctttgccccatgccaccacttccttaatcaatttggcatgtgggggtggtggacatgttgtggatatatggtgtgtttggtgtggctataatggtatcttccttatctttccatgctccttttctttcaaggctaagcgaaaacgctccttcttgaggggcggtttctgttggaaagggcaacttcaatcctttggcatttttcaactcctccatctcacctcacacactgtgatttgggctcttgagggacatctcagaatggcaacacccctttttatgtgtaccgtactattttctagttctttttcttgtacaacgaaatttagatgcagtttcttagatgttggtgttgttttttaatcaaaattagagttttatcttgatagtaccggattatcaaggtaaaactctgattcttatcagaaaatggcaccaaaaatactttaagaactgtatgcaagttttttgttgtttttttttggtaattcttgtttgtgatgtgatgatttcaactgcaaactatgcctatcagtatggttaccatagactatatgttatctaataaatttacatttgaataggcctttggccaaaatgtattattgttgtcgttaatatgaatatggttaaatctgactctagtcatgttaaaacaaagaaaaa

SEQ ID NO: 2009 - DNA, 697 bp, Glycine max
cccacgcgtccgcccacgcgtcttttgtttcccataccatagaagaagcacaaagagaagcattagcactaggagcagcaagaactagtctaagcagaaatggcctcttcagtgatggcatctgtggccctcaaacctgcccctttcactgttgagaagtcctcagttagaggccttccctccctctcaaggaactcctcttcattcagagttgtggccagtggtggcaagaagatcaagactgacaagccttatggaattaatggtggcatggctttgagggaaggagttgatgcatctggcaggaaaggaaagggaaagggcgtttaccagtttgtagacaaatacggtgctaatgtcgatggttacagtcctatctacgacaccaaggactggtctccaaccggtgatgtctacgctggcggtacgactggcttggctatctgggctgtgactctacttggtcttcttgctggtggtgcacttcttgtctacaacacaagtgctttggcgcaataaactttgcaaatcgatgttttaagctcaaacttagtccatgtaactatctaaaaatgaagaattattcatgaagtactttgtggatacgtgttccttctgttctataaatgtgtggatgtgaaaaatcttgtgttgttaatcatgcttcttcatcagagtctcccatttgtttctcaaa

SEQ ID NO: 2010 - DNA, 449 bp, Glycine max
  unsure (1)..(449): unsure at all n locations
gaacaatccaagtcaaccatcaaaagtaaattgcagatacaacatttcacttgatatacaacatctgcaagaggtggataacaaccggcatttagctggtggtatattgacttgtaagaaggaaaagggtcctgttgaaaaaggccaacctgctgtacctctgagtagcnntgncnnnannatcatnactgacanaccttatggaattaatggtggcatggctttgagggatggaactgatgcatctggcaggaaaggaaagggaaagggtgtttaccagtttgtagacaaatacggtgctaatgtcgatggttacagttctatctacgacaccaaggactggtctccaaccggtgatgtctacgctggcggtacgactggcttggcttattccttaagggcggggtggaactgtgactctactnggctttagctggtggtgcactttt

SEQ ID NO: 2011 - DNA, 454 bp, Glycine max
  unsure (1)..(454): unsure at all n locations
cccacgcgtccgcccacgcgtccgagcattatcaaaagcagcaacaactgggctacagctgaaggggcctcttcagtgatggcatctgtggccctcaaacctgcccctttcactgttgagaagtcctcagtgagaggccttccctccctctcaaggaactccttcttcattcagagttgcggccagtggtggcaagaagatcaaagactgacaagccttatggaattaatggtggcatggctttgagggatggagctgatgcatctggcaggaaaggaaagggaaagggcggtttaccagtttgtagacaaatacggtgctaatgtcgatggttacagtcctatctacgacaccaaggactggtctccaaccggtgatgtctacgctggcggtacgactggcttttgggcctttttaaaaaatttctgggctgtgactctactngtcttttact

SEQ ID NO: 2012 - DNA, 475 bp, Glycine max
gggccacagatgccatcactgaagaggccatttctgcttagactagtacggtgctaatgtcgatggttacagtcctatctacgacaccaaggactggtctccaaccggtgatgtctacgctggcggtacgactggcttggctatctgggctgtgactctacttggtcttcttgctggtggtgcacttcttgtctacaacacaagtgctttggcgcaataaactttgcaaatcgatgttttaagctcaaacttagtccatgtaactatctaaaaatgaagaattattcatgaagtactttgtggatacgtgttccttctgttctataaatgtgtggatgtgaaaaattcttttcttgtgttgttaaaaaaaaaaaaacaaacccgcgccaacatctaacaaaaagaaaaactaaaaaaaaacacacacctgtcgtctctgcccctctgcacgttcaacaaaaaaaaaaaaaaaatc

SEQ ID NO: 2013 - DNA, 799 bp, Glycine max
acatccacacatttatagaacagaaggaacacgtatccacaaagtacttcatgaataattcttcattcagagttgtggccactggtggcaagaagatcaagactgacaagccttatggaattaatggtggcatggctttgagggaaggagttgatgcatctggcaggaaaggaaagggaaagggcgtttaccagtttgtagacaaatacggtgctaatgtcgatggttacagtcctatctacgacaccaaggactggtctccaaccggtgatgtctacgctggcggtaccactggcttggcggctatctgggctgtgactctacttggtcttcttgctggtggtgcacttccttgtctacaacacaagtgctttggttcaatagactttgcaaatcgatgtttaagttataacatagtccatgtaactatctaaaaatgaagaactattcgtgaagtactttgtggatatgttccttctgttctataaatgagtggatgtgaaaaaaaaaaaaaaaaaactggctgttccatagctgagattcatgaaaggcttgtgtattatatgtattctcttaggtattggctctccattacatggaaagtttgatgttgtaaagaattaatcttcttttgttttatcgagaaaatcttgttctgattagtgagtgtaattctttgatggtggccatgcctggtggtagtcatggaaggcatgtgtattctatgtaaacttgggcattgaagctccattatatttatatggaaaaattatgcaaaaaaaaaaaaaaaaggggcggc

SEQ ID NO: 2014 - DNA, 2280 bp, Glycine max
aagagctatgacggcgcatgcacgccttccttaggctgggaatcgggttgggggttggggatgggggatattggaagtgctgacctggtcaactaccttctcatcaccgggtccattgacacaataatgcactttgctgctcaaacccatgttgacaactcgtttggtaacagctttgagttcaccaagaacaacatatatggtactcatgtcctattagaagcctgcaaggtaactggccagatcaagaggttcatccatgtgagcactgatgaggtctatggagagacagatgaggatgctgttgttggaaaccacgaggcttctcagttactcccaacaaatccatactctgcaacaaaagctggggcagaaatgcttgtgatggcatatggaaggtcatatgggttacctgtgatcacaacacgaggaaacaatgtttatgggcccaatcagtttcctgagaagttaattccaaagttcattctcctggccatgcaaggcaagcctcttccaatccacggggatggttctaatgtgaggagttatttgtattgtgaagatgttgcagaggcttttgaagttatccttcacaagggagaggtcgggcatgtttacaatattggtactaagaaggaaaggagggttattgatgttgccaaagatatatgcaggctttttaagatggacccagagactagtataaaatttgtggagaacagaccatttaatgaccagagatactttcttgatgatgaaaagctgaaaatcttgggttggtctgagaggaccacttgggaagagggcttgaagaaaaccatggactggtatatcaacaatcctgattggtggggtgatgtcagtggtgcattgcttccccatccaaggatgctgatgatgcccggtggactggagagacattttgatggatctgacgaagaaaaacctgcatcatatgtctcaactaatactcgaatggtggttccaacatccaagaatgttaactcctctcagaaacctgctctcaagttcttgatctatggcagaacaggttggattgggggtttgctggggaagttgtgtgaaaagcaaggaattccctatgaatatggaaaaggacgcctggaggaccgatcatcacttgtggctgatattcagaatgtgaagccaacacacatttttaatgcagctggagtaactggcagacccaatgtcgattggtgtgaatctcataagacggaaaccattcgcaccaacgttgctgggactttaacattggctgatgtcagcagagagcatggaatcttgatgataaattatgctactgggtgcatatttgagtatgacaaagctcatccagagggttctggcattggctttaaggaggaagacaaacccaacttcattggttctttctattccaaaactaaggctatggtcgaagagctcttgaaagaatatgacaatgtgtgcaccctcagggttcgcatgccaatttcatctgacttgagcaatccgcgcaatttcatcaccaagatttctcgttataacaaagtggtcaacattccaaacagcatgaccattttggatgaacttctgcctatttcaattgagatggcaaagcgaaacttgaggggcatctggaacttcacaaatcctggggccgtgagccacaatgagattctcgagatgtacagggattacattgatccaagcttcaagtggactaacttcaatcttgaagagcaagccaaggtgataattgctgcacggagcaacaacgagatggatgcatccaaactgaagaacgagttccctgagcttctttccatcaaggaatcactgatcaagtatgtctttgagccaaacaagaaaactgcttaaaagtattgagcggtttcatgttttagaaatcaaagattatgcatttttgttgcgggctacatagatcactctttatttcattgttatttcgttgggttttgataagaaccttactagaaaagctagccatgtagttcttgttctcatagctacaagtgattccagtttcagcatagttccatcatgttactgtgtttagagggtgacaagtataataattgggccagatatggttcctaagttaacatttctgtagctttattctagtttgtagcgtcctctgttaagagcagccttagaaaatagggtcttgttacctaaaagcttttgcatcctggaaggcatgtattctttttattgctcatatattatatcctttttgtggggtattcagtt

SEQ ID NO: 2015 - DNA, 3054 bp, Glycine max
  unsure (1)..(3054): unsure at all n locations
aataaaagaaaagcggatatagcattagatacaagttgcaggaagcaagttacatgaaaactattagtatgatcatatgatgataattgatatcccacagcatttaattaagccccttccctatttaaatttcacaaacattaaatcactgggatctcatcctgttgagctggttaagagcaggctgcaagatgttgtaaagaacccaagcaatagccggcgtaaccacaaacagcagaagctgtcccctgttgtcgttcgaggcagcttcagccatcgccgcttcagaagccgccgcccatgcatgcggcgcagccaccaagccagccaagccgccaagccccaacccaatgatcacgcctttggtgctgcgcattcggttcagctggttcagcgccggctgcagaatgttgaacagaacccaccctattgctgggattatgggcagcaacagtgccagtccgcggttgtcgccttctgctatgtcggctatttgttgaacagcgaatgcggcgtcgcaggttccgagggttgtgaatattgcacaggataaataacattttattacaaagtcctccatagcatacaataacaaagttacatggaaattcattaactaccactaacaataccgttatagccgggtcaaaatgctgaatttaaacaaaactaaagagatgaagcacatgtacatttatttttatttttatgaaacttagattgaaacaatacaacttaactatatgttgatgctttgccaagtgattctgcaatcttactggcaatacagtaagatgtagactgaatggttaccatggggttgacaccaactgcactaggcaaaacactcccatcacacacatacaagccttctgcttcccaagtctcaccattctcatcgagtgcaccttcttcttcagaggcacccattctacaacttgacatctgatgtgcagtggtaaacactgtccacacttcattccttgaccttggacccccaactattgtcacagtgtcaagaaactcctccaaatcttcctccttcatccccttacacttgattctttggccatcacttctgtatgttcccacttccatagcacctgctgcaaccaaaatcctcaatgccttcctcagtccaactctaaggctttctttgtcttctttgtcaagtctgtaagtcactctcccttcagccttcacttctcctgatccctggtctcgtatcaatgcgaaaatgttggcagttcttgcgtacttggccattctgtctttcatgtcctgccctgaaagccacggaacaaacgccgaanaagatcctggtcctagagaaggtgtttctatgatgaaccttggggtggaatcctctgcatattccttgtggatcgaagttatgatacccccctcgtagttgttgccgctgaagtttgttgtcatgtcttctgggaagtaaccccatgcaaattggacaggctggagatggagattccttccaatgtttggattttttagttccactagaaatcattagaggaggagtgttgagagagccacatgctgagatggttaccttggattcaatttggagtttctttgttaccttactcctccaacttgctgcagcaatcactcctaagcacttctttttcttcattccattctttccattttcaagtatgaatctctcagctttacatccagtgaggatcactgcaccattgcctacagaatcaaccaaccaagtggagtcagttcccttcttatctcctgttctgcaaccataacagcatgaaccacaatagtgatctgctgaggaatttatagccacagactctactttcaagcccattttctcacatccttgtatgagaatttggttctgaaagctttccttcttgcacttctctgttacgccaatccttctgcacaccgagtccatcgcagattggtaatcggagctaccaaagagtggaattttatattttttagaccattccctcagaacagaatcaggtgttctgatgcttgcagaccagtttacagcagagcctccaccaactgttgagccagccaggatcatcatcttcccatcaagactcggcataatgccgcccggattcgtattgttcatccatggatggaccttcaagggaagaataatcatgtgaaacaaaatactctcctttctcaaggactactactttatgaccagaatttgcaagaactgcagctgcaactcctccaccacaaccagaccccacaatcacaacatcacatttgaccttgtacaggttctgccttttatcttcagtgacttcaaggcctttttcagtgagcgtattggatcaaagtagaatcagtttcatacattgtttctattaatcccttttccaaaggcctctcctttctgatcaacttctccttggtgtccacttggtatccaattgctttccatgtgcgattttgcccatttgcatcagtccttgagaagaaattatagaagcaaaagagtttgatgagcacaaacactacccgtaaggctacccaactcttttccctggtccagttcctgaaaatttgttctctcttctccaaggaaatctcagagaacttgcgaatgaaagaccacttccagtccaaggaaagtcttccacagagcaacagtgtccccaatctgaaagacagtatccacagaacccaactcaccaacgacaccgcttctggcacagtcctcttgtacaacagctctgcagcctcatcaggaaaagggagctgagaagcagaggtattgtagaagtctgagagagcttggtcttgtgaagtgtccttgttgagtgggagggaaggaatgagggcatcacatatggcagccatgacatgcatctgagtggtggataagccatggttgtaacctttctcctctcttctcctacctcctctcagcaatgggtgacaactctctctcccttccattctctctctctctctcttattctatctttatcagtatatttttaatgtatgtgagttgtacttgcacaagttgttacaaac

SEQ ID NO: 2016 - DNA, 634 bp, Glycine max
aaaaccgcgtctatatatatacagagaaagtgtgtagagtccaaatctaaatctgagaactaccattttccatttcttctgtgtctgaaaaatttctctttcttgtcttcgtgttttctcccttcttctctcgcttcatcgcttgccaattcaagttgcttgacatggctacgcatacgcccaaaaatatcctcattactggagctgctggattcatcgcatctcatgttgcgaaccgtcttatccggaattatccccagtacaaaattgttgttcttgacaaacttgattattgctcgaatctgaagaatctcattccttcaaaatcatctcctaacttcaagtttgtgaagggggatattggaagtgctgatcttgtcaactaccttctcatcactgagtccattgacacaataatgcactttgctgctcaaacccatgttgacaactcctttggcaacagctttgagttcaccaagaacaacatttatggtactcatgtcctattagaagcctgcaaggtaactggccagatcaagaggttcatccatgtgagcactgatgaggtctacggagagacagatgaagatgctgttgttggaaaccatgaggcttctcagttactccccacgaa

SEQ ID NO: 2017 - DNA, 904 bp, Glycine max
gaaagtacaaacttgaactgaatcaatcagatctataaatcgcaaaagggaaggtacccacaacagttgcaacaaaaaagaaaccactggctagcttgggaatggaaaataataaaaagaaagcggatatagcattagatacaagttgcatgaaaactattagtgatgatgataattgatatcccagagcatttaagccccttccctattttaaatttcacccagctcaaatcactgtgatctcatcctgttgagctggttgagagcaggctgcaagatgttgtaaagcacccaagcaatagccggcgtaaccacaaacagcagaagctgtcccctgttgtcgctcggcagcagccgccgcacttcagaagccgccgccccgatgcatgcggcgcagccaccaagccagccaagccgccaagccccaacccaatgatcacgcctttggtgctgcgcatgcggttcagttggttcagcgccggctgcagaatgttgaacagaacccaccctattgcaggaattatgggcagcaacagtgccagaccgcggttgtcgccttctgctatgtcggctatttgttgaacggcgaaagcggcgtcgcaggttccgagggttgtgaatattgctcctgcgattgctgtcgcagtggaaagtttggtgttttcgggtgaggctattaggccctttggaaggttgacctgaagggaaggttttgatggtacgagcttggtggggttggggaactttgggttgacgcatttggcgttgatcatggccattgctgatattgttgatgccattgatgagtgagtgagggaggaggtgttgagaatgctgatggcagtggcagagatggggaacgtggctcagagtgttggagtagcaatttagcgtttggactcgt

SEQ ID NO: 2018 - DNA, 466 bp, Glycine max
agccaagccgccaagccacaagccaatgatcacgcctttggtgctgcgcattcggttcagctggttcagcgccggctgcagaatgttgaacagaacccaccctattgctgggattatgggcagcaacagtgccagtccgcggttgtcgccttctgctatgtcggctatttgttgaacagcgaatgcggcgtcgcaggttccgagggttgtgaatattgctcctgcgattgctgtcgcgggggaaagtttagtgctttcgggtgaggctatgaggccctttggaaggttgatctgaagggagggttttgatggtgcgagcttggtgggattggggaactttgggttgacgcatttggcgttgatcatggccattgctgatattgttgatgccattggtgagaacagagaagaagctagtgagtgagttatggcagtggcagagatggagaacgtggcgcgtggacga

SEQ ID NO: 2019 - DNA, 406 bp, Glycine max
tattgctcctgcgattgctgtcgcgggggaaagtttggtgttttcgggtgaggctattaggccctttggaaggttgacctgaagggaaggttttgatggtacgagcttggtggggttggggaactttgggttgacgcatttggcgttgatcatggccattgctgatattgttgatgccattgatgagtgagtgagggaggaggtgttgagaatgctgatggcagtggcagagatggggaacgtggctcagagtgttggagtagcaatttagcgcttggaaaaagccacgttggagaaacgaggtccaatggtattctggtttctagattcttctcttatccgaattgggggctagatgacatttccaccccatatttcttccctttcttatcacttgcgctgctcc

SEQ ID NO: 2020 - DNA, 417 bp, Glycine max
aatgatcacgcctttggtgatgcgcatgcggttcagttggttcagcgccggctgcagaatggtgaacagagcccaccctattgcaggaattatgggcagctacagtgccagaccgcggttgtcgccttctgctatgtcggctatttgttgaacggcgaaagcggcgtcgcaggttccgagggttgtgaatattgctcctgcgattgctgtcgcagtggaaagtttggtgttttcgggtgaggctattaggccctttggaagggtggcccggaggggatggttttgttggtacgagcttggtggggttggggaactttgggttgacgcatttggcgttgatcatgcccattgctgatattgttgatgccattgatgagtgagtgagggaggaggtgttgagaatgctgatggcagtgg

SEQ ID NO: 2021 - DNA, 299 bp, Glycine max
gttgtcgcattctgctatgtcggctatttgttgaacggcgaaagcggcgtcgcaggttccgagggttgtgaatattgctcctgcgattctgtcgcagtggaaagtttggtgttttcgggtgaggctattaggccctttggaaggttgacctgaagggaaggttttgatggtacgagcttggtggggttggggaactttgggttgacgcatttggcgttgatcatggccattgctgatattgttgatgccattgatgagtgagtgagggaggaggtgttgagaatgctgatggcagtggc

SEQ ID NO: 2022 - DNA, 283 bp, Glycine max
ctatgtcggctatttgttgaacagcgaatgcggcgtcgcaggttccgagggttgtgaatattgctcctgcgattgctgtcgcgggggaaagtttagtgctttcgggtgaggctatgaggccctttggaaggttgacctgaaggagggttttgatggtgcgagcttggtgggattggggaactttgggttgacgcatttggcgttgatcatggccattgctgatattgttgatgccattggtgagaacagagaagaagctagtgagtgagttatggcagtggca

SEQ ID NO: 2023 - DNA, 285 bp, Glycine max
ctatgaggccctttggaaggttgatctgaagggagggttttgatggtgcgagcttggtgggattggggaactttgggttgacgcatttggcgttgatcatggccattgctgatattgttgatgccattggtgagaacagagaagaagctagtgaggagttatggcagtggcagagatggagaacgtggctctgattgtgggagtagcaatttagcgtttggaaaaagccacgttggagaaacgaggtccaatgggattgtggtttctagattcttctcttatccg

SEQ ID NO: 2024 - DNA, 681 bp, Glycine max
cccacgcgtccgcccacgcgtccgagaaaccctaggaagcagcagcggcggcaacagggagagaagatgaagttcaatccacgtgtgtcgagcagccgccgcaagagccgaaaggctcatttcacggcgccgtcgagcgtgcggcgggtgcttatgagcgcccctctgtcggcggagctgcggtccaagtacaacgtgaggtcgatcccagtacggaaggaggacgaggtgcaggtggtgcgaggaacatacaagggtcgcgaggggaaggtgactcaggtctaccgtcgaaagtgggtgattcacattgagcgcataacccgcgagaaggtgaatggttccaccgtcaacgttgggattcacccctccaaggttgtgctgaccaagctcaaattggacaaggaccgtaaggccattctcgatcgcaaggccaagggtcgcgccgccgccgataaggagaagggtaccaagttcgctcccgaagatatcatgcaaaccgttgattagtctcttttgcccccttatcatacaaacaaattttctctatgggttttgctaccctttttctattgcaggattttgtttttcttgtgttagtcgaacttttttatccttttattttccatctgcttattattaactgctccccttttaatattttaattcgattgctgtgattgc

SEQ ID NO: 2025 - DNA, 559 bp, Glycine max
cgagcgtgcggagggtgttgatgagcgcccctctgtcggcggagctccggtcgaagtacaacgtgcggtcgatcccagtccgcaaggaggacgaggtgcaggtggtgcgcggaacatacaagggtcgcgaggggaaggtgacgcaggtgtaccgtcgcaagtgggtcattcacatcgagcgcataacccgcgagaaggtgaatggctccaccgtcaacgttgggattcacccctccaaggtggttgtcacaaagctcaaattggacaaggatcgcaaggccattctcgatcgcaaggccaagggtcgtgccgccgccgataaggagaagggtaccaagttcgctcccgaagacatcatgcaaaccgttgattagtctctttatcatacaagccaattttatgtatgggttttggtagcctttttctatctctccattttgcaggattttgttttcttttcttatgttaatcaaactgttttatcccatgagcttatcattaactattttaattcgttttcatgcgtgaagacagtgatgccagttatttcaagcgaatc

SEQ ID NO: 2026 - DNA, 817 bp, Glycine max
cacaagtatttgtgctttgggaacaaattttggtctgaaaatcgttgctttgcagagtataagatctggtatgctcttgctcccacgtctctgattgattacttgcaagcttcatctgcactcatggatcccaaccagcccgtgggtgaaaactacgccaatcccaggacttgcttctttcatgtcctcttcaaggctgcagccttggcattttacattctctcggccctctttattgataactttgtcatcattttcgtggtgaccgttcttcttgccgcccttgatttttgggtagtgaagaatgtgagtgggcgaattttagttggattgaggtggtggaatgaaattaatgatctgggtgagagtgtttggaaatttgaatgtcttgaccacgagtcattggctcggatgaacaagaaggattcatggcttttctggtggaccctgtaccttacggcggttttgtggatactgctggcaatattctcactcataaggcttcaagctgattatctccttgttgtaggagtttgtctgacccttagcattgcaaatattgttggttttaccaaatgcaaaaaagatgccaagaagcagattcaacaatttgcctctcagacaattgcctctcggttctcatctaccttacagtcagcgttcagtgttgtctgatcgtcaaagatggaaatgcaagttgaaccgttcattattgagatgcggtggaagtttgtacatgattatttcggccaggagcatcgaattggattgatcaaacttgcatagttactgatatagcaaatgcaaaattttgtac

SEQ ID NO: 2027 - DNA, 391 bp, Glycine max
tgctttgggaacaaattttggtctgaaaatcgttgctttgcagagtataagatctggtatgctcttgctcccacgtctctgattgattacttgcaagcttcatctgcactcatggatcccaaccagatttaggtgattaattagattttcttgtgtgtgtggtgcagcccgtgggtgaaaactacgccaatcccaggacttgcttctttcatgtcctcttcaaggctgcagccttggcattttacattctctcggccctctttattgataactttgtcatcattttcgtggtgaccgttcttcttgccgcccttgatttttgggtagtgaagaatgtgagtgggcgaattttagttggattgaggtggtggaatgaaattaatgatctggg

SEQ ID NO: 2028 - DNA, 440 bp, Glycine max
ctccttcaaaactcatctcgaaaccctaagcactcgctcgggttcgtgtagtgccaaaccctagggctcattttccagatctattcagtttttctctcctctcttttccgatccaccgttggagatcgaagatggtgtccgacgccagcaagaagaaggccgcacagaagaaggccgccgccgccgccaagagaggtggcaaagctgccgccgctgccgttatggccgccacctcttccaaagccgccgacaaggtcgccaacggaatcgccgatattcagatttcggatcggacctgcaccggcgtcctctgttcgcatcctctctccagagatattcgaatagagtctctatccgtcacattccatggacatgatctcattgctgattctgaattggagctgaattatggaaggcggtatggcttactcggattaaat

SEQ ID NO: 2029 - DNA, 720 bp, Glycine max
ctaattcggactgcaactttgctctctgtgaggcttcaatttctaattagggtttcgcttagagtaaccaataaccatgggagtcttcacctttgtcgtccgcaaatccggcagcgaatggagcgccaagcaacattccggcgacatcgaggcctccgccgattccaccttcgatctccaacggaagctcgtgcaagccgctctcgccgttgattcctccggtggagttcagtcctctttctctcccgtgtctcctacctccgctgtgttccaggtgatagtgggtggtgcagtattcgttggaggtggtggtggtgctgttgcagctgcacctgcaggtggtgctgccgcagctgatgctgccccagctgctgagaaaaaggaagaaaaggtggaggaagagtccgatgatgatatgggattgggactgtttgattagagttttttctgctttttattgagttttgatggaaaagtgtttttagtgtttaatcctataaattgtttgtttattgatttgcaccagttaatggtacattgaacttcgtcggataaagttatgttctgtgacccaaatggttcttctgctattgggttttagtaatttttttttttttcaaacaaatgtctcgctcgtcttttatcactgtcggatagaattttgcgctgatcaaacggtttttgctgttaatacgattttcttcttacatgttactgaac

SEQ ID NO: 2030 - DNA, 541 bp, Glycine max
accaggctctctgtgaggcttcaatttccaattagggtttcgcttagagtaaccaattaccatgggagtcttcacctttgtcgttcgcaaatccggcgccgaatggagcgccaagcaacattccggcgacatcgaggcctccgccgactccacctacgatctccaaaggaagctcgtgcaagccgctctcgccgttgattcctccggtggagtccagtcctccttctctcccgtgtctcctacctccgctgtgttccaggtgatagtgggtggtgctgtattcgttggaggtggcggtggtgctgttgcagctgcacctgcaggtggtgctgctgcagctgatgctgctgcagctgatgctgccccggctgctgagaaaaaggaagaaaaggtggaggaagagtccgatgatgatatgggattgggactgtgtgattagagattttctgctttttattgagttttgatggaaaagtgtttttagtgtttaatcctataaattgtgtgggtatattgcttttcaccagttaatggtacattg

SEQ ID NO: 2031 - DNA, 1112 bp, Glycine max
  unsure (1)..(1112): unsure at all n locations
cagaaacagaagcacagcaccaccacgaccccaatcccagcctttcggttcccccacaaataaaatagttaccacaacccatttgttgcttgctgcgagcgaatccctctctctctttctctttctctctcatccagatcttgcaaaaaaaaaaaaacacaatggcagcgagcgctcccactccacgcgaagagttcgtgtacatggcgaagctggcggagcaggccgagcgctacgaggagatggtggagttcatggagaaggtctccgcctccgccgagagcgaggagctgaccgtggaggagcgcaacctcctctccgtcgcctacaagaacgtaatcggcgctcgccgcgcctcctggcgcatcatctcctccattgagcagaaggaggagagccgcggcaacgaggaccacgtcgccgtcatccgtgactaccgctccaagatcgaggccgagctctccaacatctgcgacggaatcctcaagctcctcgacacgcgcctcgtcccctccgccgcctccggcgactccaaggtcttctacctcaagatgaagggagactaccacaggtacctcgccgagttcaagaccggcgccgaccgcaaggaaggccgccgagagcacgctctccgcctacaaagccgctcaggacattgctaataccgagctgcctccaactcaccctatcaggctgggtcttgctctgaacttctctgtgttttactatgagatccttaactctcctgatcgtgcctgcagccttgcaaaacaggcttttgatgaggctattgctgaattggatacattgggagaggagtcatacaaggatagcactttgatcatgcaactgctcgtgataaccttaccctctgactctgcatggcggtggtgggcatgaattngagccgccccaaggggagggacaaataactaccatcttttaataggtgacttcctggggatgtcaaggggaagaggggagaaactccggccggatgggcatcgttctctnaaaaaggggggccggcntttgttgcttcnccgcgttggcgtttttaagccctgtttataaaaaaaaaaaannaaaaaaaaaaaaaaaaatttcggggg

SEQ ID NO: 2032 - DNA, 1382 bp, Glycine max
cccacgcgtccgcggacgcgtgggctgcaccatcgtcctgcatgtcagcgaatccctctctctatctctcacacacactttctctctctctctctctcacccagatcttgtagcaatggcgagcgctcccactccacgcgaagagttcgtgtacatggcgaagctggcggagcaggccgagcgctacgaggagatggtggagttcatggagaaggtctccgcctccgccgagagcgaggagctgaccgtggaggagcgtaacctcctctccgtcgcctacaagaacgtgatcggcgctcgccgcgcctcctggcgcatcatctcctcaatcgagcagaaggaggagagccgcggcaacgaggaccacgtcgccgtcatccgcgactaccgctccaagatcgaggccgagctctccaacatctgcgacggaatcctcaaactcctcgacacgcgcctcgtcccctccgccgcctccggcgactccaaggtcttctacctcaagatgaagggagactaccacaggtacctcgccgagttcaagaccggcgctgaccgcaaggaggccgccgagagcacgctctccgcctacaaagccgctcaggacattgctaataccgagttgcctccaactcaccctatcaggctgggtcttgctctgaacttctccgtgttttactatgagattcttaactctcctgatcgggcttgcagccttgcaaaacaggcttttgatgaggctattgctgaattggatacattgggagaggagtcatacaaggatagcactttgatcatgcaactgctacgtgataacctcaccctctggacctctgacatgcaggacgatggtgcagatgaaattaaagaagccgcacccaaaggtgacggggaacaaaattaaacataccatactctctgcttattagtcattgaacttcccttctgtaatgttttcaaagggagaaggtgttgaatgctaatctcaatgttactgagattttgggcattcgtgttcttcgttatgaattgtggatgtactgggctattttagtttgtccttccatttatacgcgtttctgaactgcctattttcttaatgacactgaaatttccattataatgctgtttagaatattaagatattgttctctttagcaaacttcgtattgctcattattttagcatgcgaaggtgtgacacctttcatttgtttttattctaaagcctcggaatcataactctgatcgattttaacgtgttttttgttgtaagggttttcaacttcactatgtttaggtagggttttgttgttcttgatcgctattttagtgcaatgcccatggggtcatggaaaagtgtttgatataaaaagtatgatttct

SEQ ID NO: 2033 - DNA, 876 bp, Glycine max
cgcatgcggtccgacttgttcaacatctgcgattgttttctcaagctcctcgactctcgcctcatgcgctatgcttgcttcggcgattccaaggtcttctacctcaagatgaagggagattgccacaggttccttgccgagttcaagaccggcgcctagcgtaaggaggctgccgagagcactctctctgcatacaaagccgctcaggacattgcgaatgccgaactgcctcctactcatccaattaggcttggccttgctcttaactttatctgtattttactacgaaatccttaactctcccgatcgtgcctgcaaccttgcaaaacaggcttttgatgaagctattgctgaattggatacactgggagaggagtcatacaaggatagcactctgatcatgcaactccttcgtgataacctcacactttggacctctgacatgcaggatgatggagcagatgaaattaaagaagcagcaccgaaacaggatgaccagtaaaaatattttactgctaattagaattgaacttctcctccatatctttttgaagggagaaggtgtttgttgctaatatctctttggtactgagattttaggcattcatgtctgttatgattgtggatgtactgggccgtttttagtttgtccttccattttcaagtgttttccaaattgcctattttattaaggacgctgaagtttttattatatggaattggaattttaagattcttctcttctatctagtaaactttgttaccggcttatattgtgaggattagatatatttgtattctaaaaaaaaaaaaaaaaaaaaaaaaaaaagggcgccgctcgcgatctagcggacgcgtgggcggacgcgtggacaa

SEQ ID NO: 2034 - DNA, 374 bp, Glycine max
aacactactccctccaccatgcaacactgcatgcagaatgcttccaagtatggataatacttgcccatgtatgtcggatattacgcagatcattaggaaagctctcattccatgctattgtttgtattttccttgcatcttctgtgtctccccaaatgaaagagcgacattgcacactaacacagatcttgtagcaatggcgagcgctcccactccacgcgaagagttcgtgtacatggcgaagctggcggagcaggccgagcgctacgaggagatggtggagttcatggagaaggtctccgcctccgccgagagcgaggagctgaccgtggaggagcgtaacctcctctccgtcgcctacaagaacgtgatcg

SEQ ID NO: 2035 - DNA, 522 bp, Glycine max
gtgttccggtcatttcggtcgatgtgggattaatgccccatccaacccaccctgaaggtgatatgaagcttccaaaaaagactagttctaaggttaagttgtgagggtggaatgtccatgctatggaggcttgttgggttgggaggttcatgcatttttcaaaggttttcgtggcggtttccacggtgcaatgggatgacaatgcaatgtggggaagggaacacacaagggagaggtaaagaagggacctctgacatgcaggatgatggtgcagatgaaattaaagaagccgcacccaaaggtgacggggaacaaaattaaaacataccatacttctaattagtgattgaacttcccttgtgtaatgttttcaaagggagaaggtgttgaatgctaatctaggtgttactgagattttgggaattcatgttcttggttatgaattgtggatgtattgggctattttagtttgtcattccactagtatttattaaagccccccgtattttgataatgacggtg

SEQ ID NO: 2036 - DNA, 546 bp, Glycine max
ctcgagccgaatcggctcgagcgaaggagttgcatgatcagagtgctatccttcgtgataacctcaccctttggacctctgacatgcaggatgatggagcagatgaaattaaagaagcagcaccgaaacaggatgaccagtaaaaatattttactgctaattagaattgaacttctcctccatatctttttgaagggagaaggtgtttgttgctaatatctctttggtactgggattttaggcattcatgtctgttatgaattgtggatgtactgggcccgttttagtttgtccttccattttctcaagtgtttcccaaattgcctattttattaaggacgctgaagtttttattatatggaatgggaattttaagattctcttctatctagtaaactttgttaccggcttttattgtgaggattagatatatttgtattctttttgaagcctcgaaatttgaatttagcttgattggaattggaattgggttgtgctcgttgaactaaaaaaaaaaaaaaaaagggcggccgctcgcgatctaga

SEQ ID NO: 2037 - DNA, 492 bp, Glycine max
ggagaggaggtggatgtcgagtgggcgagagagtagtggagatttttgaagcttcactgtggggtcaagaatatacggtagaagcactatttggcctgagtttgggtccgggaaggctattaaggcacgtgttccggtcatttcgggtgatgtgggattgatgccccatccaacccacccagaaggtgatatgaagcttccaaagaagactagttctaaggttgagttgtgagggtggaatgtccacgctatggaggcttgctgggttgggaggttcatgcatgttttaaacgttttcgtggcggtttccacggtgcaatgggaggacaatgcaatgtggggaagggaacacagaagggagaggtaaagaagaaaagaagcatggtggtgccgtggcgtggatggatgaatggagaattgcagtgaatgatcagtgatcgatagggagagaattaatggtccatgccttcatgttgtttaattaatgcttcg

SEQ ID NO: 2038 - DNA, 316 bp, Glycine max
gatgggtggcagaaacagaagcacatcaccacgaaccaatcccaacctttcagttcccccacaaataaaatagttaccacaacccactattagttgcttgctgcgagcgaatccctctctctatctctcacacacactttctctctctctctctctcacccagatcttgtagcaatggcgagcgctcccactccacgcgaagagttcgtgtacatggcgaagctggcggagcaggccgagcgctacgaggagatggtggagttcatggagaaggtctccgcctccgccgagagcgaggagctgaccgtggaggagc

SEQ ID NO: 2039 - DNA, 880 bp, Glycine max
ttaaataagaaagaaaaggagaagctttttcctctcattattcagaaggaaagtgtgttcgtttgttcggtggtcaattcccatccacacgcctcaccggaaacatgtcagcggtggttgctggttcctcctcttcattctctgccaccttcactaccagaaggagcccctccttaaaaaactctcaactctctcattccaagacactaacttctcctcaatgccagaagacatctttacaaggcctctcacttcatgaagccaaaaggggtgtttcagaatccttcctagttgagaacaagaatggttcctccattgctggaaggagacttgagatcaaagcaagaactgctggggcttcaaagacaattgaggtggaggttgacaagccacttggcctcaccttaggccaaaagtctggtggtggtgttgtcatcactgctgttgatggtggtgggaatgcagcaagagcagggttaaaggcaggggaccaagtcctttacactagcagtttctttggggatgaattgtggcctgcggataagcttggatttactaaaaccgccatccaagcaaagccggactctgtctactttgttgtcagcaggggtgctgaagtagacgttaaaaagctcacaaagcgacctgctcctcctcgatttggaagaaaactgaccgagactcaaaaggcgagagctactcacatttgccttgattgtggatacatatacaccttacagaaaccttttgatgagcagccggacacatacgggtgtcctcaatgtcaagcaccaaagaagaggtttgctcggtatgatgttaacactggaaaagctattggtgggggcttgcctccaattggagttattattggactcct

SEQ ID NO: 2040 - DNA, 894 bp, Glycine max
cgcgagaagacgacagcagggggagaaaaacgagccaattcatcattttctctcttctctgcttcttcttgttcaaatcttaggagctgaggagaatcaatcgagagaaatatgtctggtatcgctcgtggacgccttgctgaggaacgaaagtcatggcgcaaaaaccatccacacggtttcgttgccaagcccgagactctacctgatggcaccgtaaatttgatggtctggcattgcactattcctggcaagaccgggactgattgggagggtggatatttcccactgacaatgcacttcagtgaagattaccctagcaagcctcccaagtgcaaattccctcaaggtttctttcaccctaatgtgtatccatctggaactgtttgcttgtctatacttaatgaagatagtgggtggagaccagctataacagtgaagcaaattcttgtgggcatccaagacttacttgatcagccaaatcctgctgaccctgcccagacagaaggctatcatctattcatccaggatgcagcagagtacaagagaagggtccgccagcaggcaaagcaatatccacctcttctctagggttgcatcagctaaatttatgaactatttttactatggcagatgtttcttcttttgtcccgtgttaaaactgtgttgtcattgtgattaatggctgccataacattaaacatgaatgttttagctatttatgattactcccagatctggaagaagtgttaatatataaaaaaaatgtgaaagtcaacccaatgaatacttgttggtgacatgtttctgatgtttgctgctacatttttatatgaatggatcattactataagtctatactgaattacattgctaccttctaaagagcatatc

SEQ ID NO: 2041 - DNA, 570 bp, Glycine max
ctggaagccgcggcaatacaaaggctgcgtttgctttgctcgctcgcgcactcacaaccacaacaaggcagcagagcgaagagaaagaaagaaagagaagaagcgcttatcgaactcggacggaagcactgagttaactcagagcgagtgaaagtgttgctgcgtgatgtctggtggtatcgcccgtggacgcctcaccgaggagcgcaagtcgtggcggaagaaccatccccatggttttgttgcgaagcggagacgctgcccgatggaaccgtgaacttgatggtgtggcattgcactattcccgggaagactgggactgattgggagggtggctacttcccgcttacgctgcactttagtgaagactacccaagcaagcctccaaagtgtaaattcccacaaggtttcttccaccctaatgtttatccttctgggactgtttgcttgtctatacttaatgaggatagtgggtggagaccagccataacagttaagcaaattcttgtgggcatccaagacttacttgatcagccaaatactgctgatcctgcccagacagaaggctat

SEQ ID NO: 2042 - DNA, 552 bp, Glycine max
aatagctaaaacattcatgtttaatgttatggcagccattaatcacaatgacaacacaggtttaacacgggacaaaagaagaaacaccagccataacagttaagcaaattctcgtgggcatccaagacttacttgaccagccaaatcctgctgaccctgcccagacagaacgctatcatctattcatccaggatgcagcagagtacaagagaagggtccgccagcaggcaaagcaatacccacctcttctctagggttgcatcagctaaatctatgaactatttttactatggcagatgtttcttcttttgccccgggttaaaactgtggtgtcattgtgattaatggctgccataacatttagacatgattgtgttagctattcatgattactcccagatctggaagaagtgttaatatataaaaaatatgaaagtcagccaatgaatacttggtgacatgtttctgatgtttgctgctacatttttatatgaatggatcattactataagtctataatgaattacattgctaccttctatggagcatatc

SEQ ID NO: 2043 - DNA, 413 bp, Glycine max
aggaacataaagtgaggaaaacgagtcaattcatcatttgctctctgctctgcttgttcaaattttaggagcggagaatccagagaaagagagatgtctggtatcgcccgtggacgtcttgccgaggagcgaaagtcatggcgcaaaaaccaccctcatggtttcgttgccaagcccgagactctccctgatgccaccgttaatttgatggtctggcattgcactattcctggcaaggctgggactgattgggatggtggatatttcccactgacaatgcacttcagtgaagattaccctagcaagcctcccaagtgcaaattccctcaacgtttctttcaccccaatgtgtagccatctggaactgtttgcatgtcgatacctaatgaagatagtagatggagaccagctat

SEQ ID NO: 2044 - DNA, 349 bp, Glycine max
tcctcgcgtgcgtccacgcgtccgaccacacggccgaacaatccatcattgggtgttttttctgctccttcttggtcaaatcttaagagctgaggagaatcaatcgggagaaatatggctggtatccctcgtggacgccttgctgaggtacgaaagtcacggcgcaaaaaccatccacacggtcgcgtcgctacttccttctcttttttctctgcttttatttcatcaatttcatttccccctttcgttacaatcaatgcttggtgctctcaatttttttagggtttcgttgccaagcccgagactctacctgatggcaccgtaaatttgatggtcttgcattgcacta

SEQ ID NO: 2045 - DNA, 555 bp, Glycine max
ggaactgggtcgatcttgcaacgattaacaatggcttcaaccgacaagtcaccggacccaacgccggcgaagggtccggatccaactccggggaagccgatgagtgttggtcagcacgtgatcgacaagagtgcaatgatggtgcagtcgctggaccccattaagcagatgagtcagcacgtgtgctccttcgctatctacagccatgacatgtctcgccagatagagacacatcactactgctccagactccaccagaacttcatacaatgtgctgtctatgattccgatgaatccaaagctcgtctcctcggggtggagtacatcgttcctgctgatgtctttgaagcctttcctccggaggagcagaaactttggcattctcatgcttatgagattaaatcaggcctgttggtgaatcctagagttcctgaggttgttgccatgccagagctcgaaaaccttgcccaaacttacggcaaattctggtgtacatggcaggttgacagaggggataggcttcctatgggtgcacctgccctgatgatgtctcca

SEQ ID NO: 2046 - DNA, 829 bp, Glycine max
gtaactaaacacaaaccccaaaaaccaaaatcacaactcccaaagcaaaaacccaaatcccaaatgatagtagtaacatgagatgacagacgaccgcgtgcatccaatcccaaacctagctatgtctccggccaccgcccactggacctctgacgccatccacggcggacccctccgtcgtgtcgacctcgactccggcaccaacggctgggcctcccctcccggtgacctcttcctcctccgctcccccaattatttcaccaaacgccagaaatcacccgccggcgactacctcctctccccctccggtatggactggctcaaatcccaatccaaactcgacaacgtcctctcccggcccgacaaccgcatggcccaggcccttcgccaggcccaggcccaaggcaaatccctcaaaagcttcatcttcgcagtcaaccttcaagtccctggaaaagaacatcacagcgcggtcttctacttctcaaccgacgaaccgataacctccggttcgctcctctcccggttcatcgagggcgacgacgcgttccgaaaccagcggttcaagctcgtgaaccggatcgtgaagggtccatggatcgtgaaaaaggctgtggggaattacagcgcttgcttattgggaaaggcgctgacgtgcaactatcacagaggaccaaactacttcgagattgacgtggacattgggagcagcgccatcgccaacgctatcctgcgcctcgcgctggggtatgttaccagcgtcaccatcgatatggggtttgttgtggaggcgcagagcgaggaggagctgccggagaggctcatcgga

SEQ ID NO: 2047 - DNA, 347 bp, Glycine max
ctaaaaccaaaatcacaatccccaaagcaaaaacccaaatcccaaatgagattatgacaacaacacatgagcgcgtgcatccaatcccaaacctagctatgtctcccaccacttcctcctccaccgcccactggacctccgacgccatacacggcggatccctccgccgcgtcgacctcgactccggcaccaacggctgggcctctcctcccggcgaccttttcctcctccgctcttccaattacttcacaaaacgccaaaaatcccccgccggcgactacctcctctccccggccggcatggactggctgaaatcccaatccaagctcgagaacgtgctctcccgg

SEQ ID NO: 2048 - DNA, 1394 bp, Glycine max
tacaaacttagccctgcttctgataatgcagaatgcatagatggtaaaatcaaaagagtctctcggagagggaagaaggttgttgatgaaagtgaagaaaaggagttaaagggcgattgggtggtcagaaaccagaacaagaacaagaaacctaaacgattgaatcttgatcagagaatttcattaaagaataacaaaagtggggacgaagtcattccaactcgaaagaaaagaaatgttgggaacaaaattgagaagattgaagaacttattcgggaatattcagtatcaactgattttgtcagtatggattggaaaagaatgagaatacctcccgttctttcttcttcagagcatgcttggttgttcaaattgatgcaacctatgaaggcactccttcaagcaaaagaagatttacagcaagtggacaaagaaattgcagatggtgaactagctgatgcaacaaacatgagcattattcaagtaaggaaagctatagaggttggtcgagctgcgagaaacaaactcataaagcacaatctccggcttgtattgttcgtgatcaacaaatattttcaagattttgcaagtggcccgaggtttcaagatctttgccaggcaggagttaaggggcttataacagcaatcgatcgttttgagccaaacaggagatttcggctatcaacttatagtttgttttggataagacattctatcgttcgttccataaccctctcaagcttcacacgtgttccttttggacttgaaagggttagagcagaaatccaaagagctaaacctgagttaacatttgagcttcagaggtcaccaacggaagaagagttagtagaaagagttcatatatcccctgaaagataccatgacgtaattaaggcatcaaaatccattctttctctgaactcgagacatacaaccacgcaagaggagttcattaatgggatcgttgatgatgatggtgttaatggtgataataggaaacaacctgctctactaaggcttgctcttgatgatgtgcttgattccctgaagccgaaggagagcttggtgatcagacagagatttggacttgatggcaagggtgacagaacattgggagaaattgctgggaacttgaatatatctagggaaatggttagaaagcacgaagtcaaggctcttatgaagctcaagcattcagctagattggattatcttcgccgttatgttgtataaacgactaatgtatataaacaccttacccagttatatagtatactgatgatttgtattactggtcatttaaataccgtctatcataatcatactcatgtaatttgtatatgatatacttgacattgcacaaagtatataagcgcttatgcttgttacatagt

SEQ ID NO: 2049 - DNA, 494 bp, Glycine max
acatatatccacacaaaaggagtatattaatgggattactgatgttgatggtgttaatggtgataataggaggcaacttgctgttctaagacttgctcttgatgatgggcttgattccctgaagccaaaggagagcctagtgatcaggcagagatatggacttgatggcaagggtgacagaacattgggagaaattgctgggaacttgaatatttctagggaaattgtccggaagcatgaagtcaaagctctcatgaagcttaagcatccagctcggttggattatcttcgtcgttatgttgtataaattaacaaatatatatatatgcttccattggtgtcattttagtcccacgtacgctacctatagccatgcccttgataattctcataacaattatttaagtatccaaaattataatcatttgtcatgtaatttgtatatgaaggagttattgctcataagaaataacaacccaatacatgttacatgt

SEQ ID NO: 2050 - DNA, 587 bp, Glycine max
ctcggacattgcagtttaaggaaacctggcatgggagttattactgtttctacctcagctgctaggactccattaagattgaatacaaggctgatcagtcatcagcaggagaaaattcctctacccctagaaacagcgaagaaacaccagaaaagagtaggaaagactagtgagtcactgaagagagtgagagccgtctctactgttgaaacctctccatgcaccttggatgtggactacaatgaagctgcagccaaacttgaaaatatatataaactcagccctgtatctgatacctgtaatgtggaagatatagatagtaaaatcgagagagtcttgcggaggaggaagaaggttagtgaggaacgtgatgatgaaaattgtgatattgtggttagaaaccagaataagaaggccaaacgattgagtcttgataagaggattacattgaaaaataatgcaaaggaggaagtgattgaccaaactcagaagataagaaatgttaagaatagagtacaaaatattgatgtgcttatcaaggattattcagcatcaactgatttagttagcatggactggaagaaaat

SEQ ID NO: 2051 - DNA, 505 bp, Glycine max
ctttggtcgaaaaatctggctcggacattgcagtttaagcacatgtgattgatattgaattgctctgctgttggatctctgcactggaaatttgtttcaatttatatgttctaaacacggcttaggaaacctggcatgggagttattactgtttctacctcagctgctaggactccattaagattgaatacaaggttgatcagtcatcagcaggtgcataaacgacccataattttagcttttaaaggaaataaatcgaataaaaccactttggtttcacctcaggagaaaattcctctacccctagaaacagcgaagaaacaccagaaaagagtaggaaagactagtgagtcactgaagagagtgagagccgtctctactgttgaaacctctccatgcaccttggatgtggactacaatgaagctgcagccaaacttgaaaatatatataaactcagccctgtatctgatacctgtaatatggaagatattgatagtaaagtcg

SEQ ID NO: 2052 - DNA, 528 bp, Glycine max
ctcaagtagaggaactggttgtggatgaagaaagtttagctttccttggggagattggacaacaaacatctttaaggcatgcagttcaactgttatcacctgccagcattgttgcaaaaatgaatggccgagacaacatctgcaaggcggatcttgaggaagtttgtacgctatatttggatgccaaatcatcggccaggttacttcaagagcagcaggagaaatacatttcataatattgttttccaactgttgcgatgactgttggttgggtttgaattacaaccagtttttgctttcgcttctatactgtctcttgcatgattgagataatcggttcaagggctgtaattttgttactgaattcattttaggattatttttcatgatgcttttgatgactgaaaatgaaaaacagcgtggaaatgtaatgaggcagttagtttcccatatttttcgtttctctgtattatcttttgcttttctaaatttagttctgttgataatggactttaatgtctttggttt

SEQ ID NO: 2053 - DNA, 813 bp, Glycine max
atctgatattctattattttatatattttgtggtgttactgttacgatatttgtggtattataaaataaaataataaagagctgaggaaatgggattgtagtttgttcggtctgagaagaacacacagtttgatcgatgatggaaacgttggccacatcttcttctgcaactcttccatcttcttcttctcccttttccattttcccttcaagaagaacttccctttatcctcccaagactctccaatttcgtttaccctcctccaagcgtgatgatgctttcgattcagactccaaagaaaaaaacaagcttccaattcttagtgatcgctgcctctctctttcccctctttccaaagatgctgcgatggggctggtgctgagtgctgcaacgggcagaggatggaccacgggttcagggatggaaggcccctctgttcctgcagttggtagggatagcgaatctgggacggggaacatctccactttcccatggtctctcttcacaaaatcccctaggagaaggatgctggtggcttttacttgtaccatctgtggccagcgaactacaagggctattaatccccatgcttacactgatggcactgtttttgtgcagtgctgtggatgcaatgcatatcataagctcgtggatcacttgaacctgtttcaggagacaaattgctatttgaattcaagttttaattataaaggagaaggatgggatgatcttaagttcaggtatatggatgataacgatgatgatgacatattccccattgcataagtgaactgcctgcatatggagcatat

SEQ ID NO: 2054 - DNA, 852 bp, Glycine max
agcctccctaatacttagccacatctattgcatgctctctcccctcatctccttcttattctctgcaatatatcatagtgccaaactctcatctttctctctctctcacacacacacaatataagtccaccctaaacaatcaccatggcagttgaagctagttacatgaatctcttgccttctcagttactcactaacagagaactcatcaaatccaatcaacagctacagcatcaattaaactctgattacatgtacaacactactacccagatggattcttcttcagctttgcctcaaccagcaacaatgcctgaatcactcttgtccttctaccaatccaacttttgtgatccaaacaaggcagatagtggtctcacctaccatattcctctccagagaaagcgttcaagagatttcaccaccgaattaacctctctcccagctcaccagaagaacaaaatctcctctgatccttcctttctcaaccaagagattctctaccaatttcagaaccaacaatcggaaattgatcgagtccttgctcatcatactgagaaagtgagaatggagttggaggaacaaagaatgaggcaatcaaggatgttggtgagcgcaatccaagaggcaatggtgaataagctgaaggaaaaagacgaagagattcagcgtatggagaagctgaattgggcccttcaagaaagagtcaaaagcatgtgcatggagaaccaaatttggagggaattggcacaaacgaacgaagccacagccaactacctaagaagcaatttggaacaagtcttggcacatgtcggcgaggaacgcgccaccgcggccgaggtggccgatgat

SEQ ID NO: 2055 - DNA, 1192 bp, Glycine max
caagaccaacaccaacacaaacactagcgaacctcgtcttcttcgtctttactcttttcttcaccgaagcgaaaaacaaaaggcttgactagagaaagagagagagagagcttcgaatcgaaactcagaagtagaaaaaaacacaaatcacaatcgctatggctaggtacgaccgagcaatcaccgtgttctcccctgacggccatctcttccaggtcgagtacgccctcgaagccgtccgcaagggcaacgccgccgtcggcgtccgcggcaccgacaatgttgtcctcggcgtcgagaagaaatccaccgccaaactccaagactccaggtcggtgaggaagatagtgaatctggacgaccacattgcgctggcctgcgcggggctgaaggccgacgcacgcgtgctcataaacagggcacgtgtggagtgccagagtcacaggctcaccgtggaggatcccgtcacggttgagtacataacgcggtacattgcggggctccagcagaagtacacgcagagcggcggcgtgaggccctttgggctttcgactctgattgtcgggtttgatccctacactcactcgccctccctctaccagacggatccctctggcacgttctcggcgtggaaggcgaacgccaccgggaggaactcgaattcgattcgggagttcctggagaagaactataaggacacttctggccaggagactgtcaagttggctattcgcgcattgcttgaagttgttgagagtggagggaagaacatagaagttgcggtgatgactaaggagcagggtctgcgtcaactggaggaagccgaaattgatgccatcgttgctgagatcgaagcggagaaggcagctgcagaggctgctaagaaagcccctcctaaggagacataattttctgttttgtgttatgcgagcattgttcttgctaggtattggctgtactcactgaagctaaaaattgatgccattgtgtctgagattgatgcaaagaaaacggctgctgaggctgcaaagaataccctttctaaggagacatgattttatgttacttttatttagctcgtgaattgttccttgctagatgttggcctaacttaaaatgactgctttattgtttttgggtactgccattagtgttggtcatatttaattgcatgtcattattattgaagttc

SEQ ID NO: 2056 - DNA, 1701 bp, Glycine max
cgacggtattgcctccccatattatctggaccccatcgcaatcggatcctacggcgcagtttccagaggagtgttcgtgtcctcttccgccggcaacgatggtcccagcggaatgtcagtgacgaaccttgctccatggttaacaacagtaggcgcaggcaccattgatcgtgacttcccctcacaggtgattctgggcgacggtcggagactctccggcgtgtcgctatacgccggagcagctttgaaggggaaaatgtatcaacttgtttacccagggaaatcagggattcttggagactcactctgcatggagaattctctagatccgaacatggtgaagggtaagatagtaatatgcgacagaggaagtagcccgagggtagcaaaggggttagtggtgaagaaagcagggggagtgggaatgattctggccaacggaatatccaacggcgaaggactcgtgggagacgctcatcttctcccagcttgtgctgttggtgccaacgaaggagacgtaatcaagaaatacatttcctcttcaacaaaccccacagccactcttgatttcaaaggtactatcttaggaatcaaaccggcaccggttatagcttctttctcagcgagaggacccaacggtttaaaccctcagatacttaaaccggatttcattgctcccggtgtcaacatcctcgccgcctggacccaagctgtcggcccgaccggtttggactccgataccaggagaaccgagttcaacatcttgtctggtcacttccatggcttgccctcacgtcagtggcgccgcggctttgctcaaatcggctcaccctgattggagccccgccgccctaaggtccgccatgatgaccaccgccaccgtcctcgacaaccgcaaccagaccatgaccgacgaagccaccgggaacagctcaactccttacgatttcggtgctggccatcttaacctaggacgagccatggatcctggcttggtgtacgatatcaccaacaatgattatgttaatttcctttgcggtattggctacgggcctaaggtgattcaggtgatcactcgcgcgccggcgagttgtccggtgagaaggccggcgccggagaatctgaattacccttcctttgttgctttgtttcctgtttcgtcgaagagggtggcttccaagacgttcatacggaccgtgaccaacgtggggcccgcgaactcagtttaccgcgtgagcgtggaggcgcccgcgagtggtgtcagcgtgacggtgaagccgtcgcggctcgtgttctcggaggcggtgaagaagcggagctatgcggtgacggtggcgggggacacccggaagctgaagatgggtccgtccggggcggtgttcgggtcgctgacgtggacggatgggaagcacgtggttcggagccccattgtggtgactcaaatagaaccgttatagagagcctcgaatcgatcatgtcgttttgatcgatgcggctcgtgactcgtgacgtaagtgggtggcacccctgtaggttgccacgactagtataaaagacaacaaaaacacaaatattttgtattttttctttctttttcatttttagatttttgtttaagtgaccaagtttggaggtgtaatccgttgttgtactttttttaataaaaaaaaaaaaaaaagggggccgctcgcgatctagaac

SEQ ID NO: 2057 - DNA, 1368 bp, Glycine max
accagctctcccctataggtaagccttttcagagggctgctttctacatgaaggaggctttgatgtcactgcttcattcaaatgctcacagtttcatggcttcttcgccaattagtttcattttcaaaatcggagcttataagtccttttctgagatatcacctgttcttcagtttgccaattttacttgcaaccaagccctcattgaagctgtggaaaggtctgacagaattcatgttatcgatttcgatattgggtttggagtgcagtggtcatcttttatgcaagagattgccttgagaagtagtggtgcaccttcactcaaagtcactgccattgtgtcaccctccacttgtgatgaggttgagctcaatttcactagagagaatttgattcaatacgcgaaagacatcaatgtgtcatttgaattcaatgttttgagcattgaatccttgaactctccttcctgtccactgcttggtaaattctttgataatgaggcaattgtggtgaatatgccagtctcaagtttcacaaactatccatcattgttcccttccgttcttcactttgtgaagcaactcaggccaaaggtcgtggtcactttggacagaatttgtgatcgaatggatgtaccacttcccaccaacgtagtccatgttctccaatgttattcggccctgctcgaatcgctggatgcggtgaatgtgaatcttgatgccctccaaaagattgagaggcatttcatccaaccagccatcaagaaaattatacttggccaccaccattctcaagaaaaattacccccatggaggaacctcttcatacaatctggattctctccattcacatttagcaacttcacagaagctcaagctgagtgtctagttcagagggcacctgtgaggggatttcatgtggagagaaagccttcatcacttgttctatgctggcaaaggaaagaactcatctcagtttctacttggagatgctgaggagcagcagcagaagctaattaccttatatttttaaaggtgcatggtaacttacattgcagtttatgtaattgtttgtgtaatttttaggcttattgatgagatccacacccaaatgttttcttaactacatgggttggaatctatcattctatagttctattactagtacgtcactttgaacatgggtagtaattatgcctttccccattcccatcatctaagatgagtaactgtttctttgttatcttctagacaaagcaaactgcttagtaagaaaggaacaatttagccaagaatgcagcctctattttcttcttcttggtttattatattctttcttaattaatgtatgatgacctgaatttgggat

SEQ ID NO: 2058 - DNA, 599 bp, Glycine max
aggttatgcaatattaattatttaggtacctaataaagtttgaagatggcacaagttgaacttcgtgacgagcatgggaacccagttgaactaacagatgcatatgggaatccggtttggttaacggacgagaaaggcaacccggtgcacctcacggctgtggcaaccaatgcacacaaatctatgcttcagaatgacaccccacaagagcttcctcactccaagagttcaagctcgtctgaggatgaagggcatggagagaggatcaggaagggactgaaggataacatagaagaaaagttaccagctggagaaggagtagtgaaggagaataaacacaccacaattgctgcttctacttctacaacagatactagtgatgctaatcaccacccaaccactgagcatgagaagaagagtatcatagacaagattaaagaaaaattccaataaatcagcagtgaatattaatatatattcacgaattgaagctttgtttatttgttatgtttttttgtatgtcatggcatagttggtttttgagagtttcgagcatgtatatatcaataagagaaacgttatctcacaaaattttcaag

SEQ ID NO: 2059 - DNA, 509 bp, Glycine max
ggaacttgggaaaggtttgcaggaaattcaaggtttgacaataacctaaaccacaatagttaccaaatcaagtatccccattacagaagacttcaaaagcatgcatggcaatacaaaagctgctttggattattatgtatctattaacagtgattcatatatggccacatattttgggaacatggataagatggttgcagcaatgagagctttcaatggtttatacaagactctatttttgagcagaagaggttttgcacaattaacctcacagggtcttagaggaaagaagttgatgcaagccctatggaagcttcacagagatgattttgccaatggaagaggctctgctctgtccgagtgtttttgcgaattcaagttgtgattttggatctcggattcatcatttttgtagttttgacattattaatttaatttggcttttcacttttcaggaaggcacttcttagcttctgtcagcttgtttattattttgtattgatgtgatg

SEQ ID NO: 2060 - DNA, 441 bp, Glycine max
caaccatccatgatcggaatggaagcttctggcattcatgagaccacttacaattcaatcatgaagtgtgatgtcgacattaggaaggacttgtatggacacattgttctcagtggtggatctaccatgttcccaggtatcgctgacagaatgagcaaggaaatctcagctttggccccaagcagcatgaagattaaggtggttgctccacctgagagaaagtacagtgtctggattggtggctctatcttggcttctctcagcactttccaacagatgtggattgcaaaggctgagtatgatgaggctggtccttcaattgtacacaggaaatgcttctaaatgctgcacagcctacagggtagcttggtgaaagaaattaaaatacggcgttctcgttttatatgatgaaaaaatgtgttgttaaatcagataactgag

SEQ ID NO: 2061 - DNA, 1697 bp, Glycine max
aaagaaggggtggggtggggtgttcatcttttcctttttcctgtccgttcttttttatacattgaaattaaccttccgtaaattcctctctatttggtatgtatagagaaagagagaatgaatgggtaaaatataaatgtagtagctccgttccgtcaatttctctttctctctccaaaattaaaacggggagcgaggatccaacggtcccaattgggtgtgatggttgttatattcatttgaattaatttggttcattttgtgtgtttctcagagaatcgctcttcttccatcctttcctctctctctctccctctgcatttcccaagcagagcagatattagaagatggcagacgctgaggatattcaaccccttgtttgcgacaatggaactggaatggtgaaggcaggatttgcaggagacgatgccccacgtgcagtgtttcctagcattgttggtcgtcctcgtcacactggtgtgatggctgggatgggcccataaagatgcatatgttggtgatgaggcacaatctaaacgtggtattctgactctcaagtatcccattgagcatggtattgttagcaactgggatgatatggaaaagatttggcatcataccttctataatgagcttcgtgtggccccagaagagcatccagttctgttgacagaggctcctcttaaccctaaggctaaccgtgagaagatgacccaaattatgtttgagacctttaatgcccctgctatgtatgttgctattcaggctgttctttcactgtatgccagtggtcgtacaactggtattgtgttggattctggggatggtgtcagccacacagtccctatctatgagggttatgccctcccacatgcaatccttcgtcttgatttggctggtcgtgacctcacagatttcttgatgaagattttgactgaacgtggatattcttttaccacctcagcagagcgtgaaattgtgagggatatgaaggaaaagctggcttacatagccctcgactatgagcaagagctagagacatccaagaccagctcttcagtggagaagagctatgagttgcctgatgggcaggttatcactattggcgctgagcgtttcaggtgtccggaggtcttgtaccaaccatccatggtaggaatggaagcatcaggcattcatgaaacaacatacaactccataatgaaatgtgatgttgacatcaggaaagacctgtacggtaacattgtcctttcaggaggtacaaccatgtttcctggcatcgctgatagaatgagcaaggaaatttctgctttagccccaagtagcatgaagatcaaggtggtagcacctcctgagagaaagtacagtgtctggattggaggttctatcttggcatccctgagcaccttccaacagatgtggattgcgaaggcagagtacgacgagtctggaccatcaattgttcatagaaagtgcttctaaattgtttgagcaatagggttattgaagaaaaagatagctgttttattcctcgggaagaagtgctgcttgcttgtaaccctttcattctattctaacttttgttatctgtttacgttattctctggagtaatgatttggagaaggcgaggagtttgttttgtcaaaacggtgcaattcttcagtattattatatattttgattttgattttttgag

SEQ ID NO: 2062 - DNA, 1811 bp, Glycine max
ggttctcatttctctttctgtagccctcaatcaccggagagagagtgagtgcaaagccatcgtcttcgtctcagacaagtagtttggtaaaagatggctgatgctgaggatattcaaccccttgtctgtgacaatggaactggaatggtgaaggcaggatttgctggtgatgatgctcctagggctgtgtttcccagtattgttggccgacctcgtcatactggtgttatggttgggatgggtcaaaaggatgcctatgtaggtgatgaagcccagtcaaacagaggtattcttactttgaagtacccaattgagcatggtatagttagtaactgggatgacatggaaaagatctggcatcacacattttacaatgaattgcgtgttgctcctgaggagcacccagtgcttctgactgaggctccactcaacccaaaggccaacagagaaaaacatgacccacatcatgtttgagaccttcaatgtgcctgccatgtatgtggccatccaagctgtcctctccctatatgcaagtgcgtcgcacaactggtattgttttggactctggcgatggtgttagtcacactgtgccaatctatgagggctatgcactccctcatgccattcttcgtctggatcttgctggccgtgatctgactgactctttgatgaagatcctcactgagagagggtacatgttcaccacctctgccgagcgggaaattgttcgtgacatgaaggagaagcttgcttatgttgccttggattatgagcaagaacttgagactgcaaagagcagttcttcagttgagaaaaactacgagcttcctgatgggcaagttatcaccattggagctgagagattccgttgccctgaagttcttttccagccttctatgattggaatggaagctgcaggaattcacgagaccacctacaactccatcatgaagtgtgatgtggatattaggaaggatctgtatggtaacattgttcttagtggtggctcaactatgttccctggtattgctgaccgtatgagcaaagaaatcactgcacttgctcctagcagcatgaagattaaggttgtggctccaccagagagaaagtatagtgtttggattggaggatcaatccttgcatccctcagcaccttccagcagatgtggatatcgaagggtgaatatgatgagtctggtccatccattgtccacaggaagtgcttctaagtccaaaagaaatgctttaatggtgagttatgtttttgctatggcttttttggtgtctgtgtcatgtcgtgcgaactatgttgtcatggataagaggtgggataggattggagggtatattcggagagcttgatgtatcatatattgtgtggcatccctctggatgtggcgggcacagaattgttgagaagcatttttcatcttggaattcatcaatgtcttcgaaagtaggattgtctgtagcaaaggagtgattgtgaatgcttattttattttctatgtatcctttttcagagttcacattttttttggccttcggaacattaatgtgaatgtctatagctacatgtatcgagaatttttatataagattgtcagttcgcactcataaattatcaaattttactttattcatgaatcacttgcccgatatttgagtgtgctataggcatgaagacacacttaaaagttgtaatggtgaggatacctgcacgatccctggtttaccaggagtccaagggaagggaaaatatctaaatactctaattttgctatcggtcaaatttaattttaatatttttt

SEQ ID NO: 2063 - DNA, 1735 bp, Glycine max
ctctactctctctctctcactctgtatatatacccctcacttctgttctagcaccttccattaatccatttccattctcaactgcgcggtgaggaagtgttatacagaaagtgcgagagccaccgtcttctcttctcagagcttggctttgcttatcgattctctctcctctcatctttctcattcaagggtctgtaaaagatggccgatgctgaggatattcaaccccttgtttgccgacaatggaactggaatggtcaaggcaggatttgctggtgacgatgctcctagggctgtctttcccagtattgttggccgacctcgacatactggtgttatggttgggatgggtcaaaaggatgcctatgttggtgatgaagcccaatccaaaagaggtattcttactctcaagtatcccattgagcatggtatagtcagcaactgggatgacatggaaaagatctggcatcacacattttataatgaacttcgtgttgctcctgaagtgcacccagtgcttctcactgaggctcctctcaacccataggccaacagagaaaagatgacccaaatcatgtttgagaccttcaatgtgcctgccatgtatgtggccatccaggctgttctctccctgtatgccagtggtcgcacaactggtattgtgttggactctggtgatggtgtgagtcacactgtaccaatctatgaggggtatgcactcccccatgccatccttcgtttggatctcgcaggtcgtgatctaactgatcatttgatgaagatcctcactgagagagggtacatgttcaccacctctgctgagcgagaaattgtccgtgacatgaaggaaaaacttgcatatgttgccctagattatgagcaagaactcgagactgcaaaaagcagttcatcagttgagaaaagctatgagcttcctgatggacaggttatcacaattggggcagagagattccgttgcccagaagttcttttccagccatcgatgattggaatggaagctgctggaattcatgagaccacctacaattctatcatgaagtgtgatgtggatatcagaaaggatctatatggcaacattgttcttagtggtggctcaactatgtttcctggtattgcagaccgtatgagcaaggagatcactgctcttgctcctagcagcatgaagattaaggttgtagctccaccagaaagaaaatatagtgtctggattggaggatcaatccttgcatccctcagcaccttccagcagatgtggatttctaaaggtgaatatgatgagtctggcccatccattgtccacaggaagtgcttctaacttctaagtacaaaatatgcttcaatggtgaaatatttttcgcaccagttgtttttatgggtctgtgtcatgtcatgttaacgatattgccatggataaagaggtgaggaaagtatcattaaaggagagggtctattctttagcttgatgcatcatattttgtgtggggggcagacagttagagagaggcatttcttgcgtttggccatccgtggttcatctatatcttcttagtaggttgtgttgtagcaagggagtgattgtgatgatctctttttcccccattttctttttgtatttttaaagtttacatttgaaggattttttccccttggaacattgaatcattgatgttaatagtcatatgtatcgagaaatctctatattattgttattacc

SEQ ID NO: 2064 - DNA, 1625 bp, Glycine max
cggggcggcccacgcgtccgcccacgcgtccgcccacgcgtccgcccacgcgtccgcccacgcgtccgtctccctctggcgcgtcactagctctgtgcattcttctctcgctctctgccttccatcacactcggaatttgaaaatcccaagatagtagaagatggcagacactgaggatattcaacctcttgtttgtgacaatggaacaggaatggtctaaggctggttttacctggagatgatgccccacgtgctgtgtttcccagcattgtaggtcgtcctcgtcacactggtgtgatggttggcatgggccaaaaaagatgcatatgttggtgatgaggcacaatctaagaaggggtattttgactctcaagtaaccccattgaacatggaattgtgagcaatttgcgatgatatggaaaagaattggcatcataccttctataatgagcttcgtgttgccccagaagagcatccagttctcttaactgaggcccctcttaaccccaaggctaatcgtgagaagatgacccaaatcatgtttgagaccttcaacacccctgctatgtacgtagccatccaagctgttctttcactgtatgcaagtggtcgtacaactggtattgggttggattctggtgatggtgtcagccacactgtacctatctatgagggttatgcactcccacatgccatccttcgtcttgatctgggccgtcgtgacctcactgatttcttgatgaaaattttgactgagcgtggttattccttcaccacctcagccgagcgggaaattgtaagggatgtgaaagaaaagctgtcttacattgcccttgactacgagcaagaactggagacagccaggaccagctcatccgtcgagaagagctacgagttgcctgatgggcaggtcatcactattggcgatgagcgtttcagatgtccagaggttctgttccaaccatccatgatcggaatggaagcttcaggcattcatgagacaacatacaactccataatgaagtgcggatgttgatatcaggaaggacctctatggtaacattgttctttcaggaggtgacaaccatgtttccctggtattgctgacagaatgagcaacgaaatttcggcattggcacccagcagcatgaagatcaaggttgaagcaccaccggagagaaaatacagtgtctggatcggtggttctatcttggcatctcttagcaccttccagcagatgtggattgcaaaggcagaatatgacgaatctggtccatcaattgtgcacagaaagtgcttctaaactgtttcgatagatagggttattgaagggaaagactactatcatcacgatttgtctggaagcaatgcattgcagattgtaaccctttgattctagcttttgttatccttttcatgttattctcttgttggagtgatcatttatttgcagaaagtgaggaaagttgggttttttttttttttttttaaatggtccagttcttttcatatccattgataagtttttgactggttcattttgagtatgagttagctggattatatcaaactacgcttgtacccttggtatgcataattataatccttcatccgttgaactaca

SEQ ID NO: 2065 - DNA, 1758 bp, Glycine max
tcgtttactctcatttagttctcttcaatgaatataaaagcttccttcttcagtgaagctctttcgcgaaacactcccctttgccgctgttgttgttgctgcaccaccgaacaacttccccctgtaaatgcacgtttagttcgcacaagggtttaaaaggttggttgtggttgaggccatccaccttttggtggttgatattggacctggattggtcaaggctggttttgcacggtgatgacgatcctagggccgtgttccccagtattattgggcgactcacgccataccggtgtaatggttgggatgggtcaaaaatgatgcttatcgtgggtgatgaagctcaatcaaaaaggggtatactcaccttgaagtatccctatagagcatggcatattcagcaacctgggacgatattggagaagatttggcatcacacattttacaatgagctatcgtgttgcccctgaagaacaccccgtacttcttaccgaggcaccactcaatcccaaggccaacagagagaagatgacccaaattatgtttgagactttcaatgtgcctgccatgtatgttgcaattcaggctgtcgtgtctctgtatgccagtggacgtactacaggtattgtgcttgattctggtgatggtgtgagccacacggtgcccatatatgaagggtatggctctttctcatgcaattcttcggttggaccttgctggccgtgatttaacggagtacttggtgaaaatccttactgagagaggatactccttcagcacctctgctgaaaaggaaattgtccgtgatgtgaaggagaaattggcatatgtggcccttgattttgaacaagaaatggagactactaagagtagttctgcagtggaaaagtagctatgaattgcctgatggacaggtcattacaataggttctgagagattccgttgcccagaagtactgttccagccttctctgattggtatggaagctactggaattcatgaaacgacatacaattccatcatgaaatgtgatcttgatattaggaaggatctgtatggaaacatcgtgcttagtggagggtctactatgtttccgggaattgctgatcgtatgagcaaggaaattggtgctcttgcacccagcagcatgaaaatcaaggtggttgcacctcctgagagacagtacagtgtcgggattggtggctctatcttggcatcacttagcaccttccaacagatgtggatctctaagggcgaatatgatgaatctgggccagctatcgttcatcggaagtgcttctaaagttgggtcaagtcgagctggatggtgatcaagttcttcgatgcacccagtcctgtgccatatttcagtcaagtttggttgactttatttggtatttgaagctttgggtttttaatagatatatctagtttaatgaatggatttgtaagttgagtatgttataagtttctccgttaggtcaccttggaagccagacttttttatgcaattggcggatggtattggaactttgtaggttctgattggtttgatttttttccttttattcgattttcttgttgtggccactaattacgtcgcctcgagttaggataacgatagtctaagcatcttttctcccagagggatttttgagtcagtttctgtttatatttattatatgcttaattggtttttatgtttgcattaaactcagaaatcagaatgtttttgttgtttgaggtcattaaaagct

SEQ ID NO: 2066 - DNA, 1818 bp, Glycine max
cccacgcgtccgcttcatagttcagaattcagatccattcttgtcctatctttttttttcttttagatttttctttaaaattctcaatcgatcgtagatctacggttaaattggtgtagtgtggtaagatgggaggtggatttagagtgcttcacttagttaggccatttctctcgtttcttcctgaagttcaaactgctgacaggaaagtgccatttagagagaaggtcatatacactgtgatctctcttttcattttcctggtttgtagtcagctccctctatatgggatacactcaacaacaggtgctgatccattctattggatgcgtgttattctcgcttcaaaccgtggaactgtcatggagctgggaatcactcccattgtgacttctgggctagtaatgcaacttctggctgggtcaaagatcattgaagtggacaacaatgtacgagaggatcgagctctgttaaacggtgcacagaagctacttggcattttgatagctgttggtgaggcagttgcctatgttctttcggggatgtatggtagtgtggggcaacttggagtaggaaatgccatcctcatcatcctccagctatgttttgcgggtattattgtgatatgtctagatgagctccttcaaaaaggctatggcttgggatctggaatttctctgttcattgccactaatatctgtgaaaacattatatggaaggcatttagtcccaccaccattaacagtggacgtggagctgaatttgaaggtgctgttattgctctgttccatttgttgataactagaacagacaaggtccgtgctcttcgtgaggcattttaccggcagaatcttcccaatgtgacaaatttgcttgctactgtcttgatcttcctaattgtgatatacttccaaggtttccgtgtggtcttgcctgtaagatcaaagaatgctcgtggacagcagggttcatatccaatcaaattgttttatacctccaacatgcccatcattcttcagtctgcccttgtttccaatctctacttcatctcccagctgctccaccgtaagtacagcggaaacttctttgtagatctattgggaaaatggaaggaatctgaatatggaggtggtcagtctgttcctgttggtggcattgcatactacatcactgcaccatccagcttagctgatatggcagccaatcctttccatgcactgttctatcttgtgtttatgctttcagcctgtgccttgttctctaaaacatggattgaagtctctggttcatctgctagagatgttgccaagcagctgaaggaacaacaaatggtaatgcctggacaccgtgagtcaaacttgcagaaagagctgaaccgatacattcccactgccgcagcatttggaggcatctgtattggtgccctgacagtgttggcagatttcatgggggccatcggttcaggaacaggaatattgcttgcagtaaccatcatctatcagtactttgagacatttgagaaggagagagctagcgagcttggcttctttggtttctaagttctgccaatgagctctcccacaccccttgtttgagggatcgttatacttgtaggtcgtttaacatcgtaagggaggacatagtctagtttgttgtcattttttttacttctttttcccctttcaactgaggaagtatgtagtacatcgttaacatttttgggtttcctcaaaatatacttgagtttatcattggattgaatctatattaaagtctgatagcaatgtttaaaaaaaaaaaaaaaaaagggcggccgcc

SEQ ID NO: 2067 - DNA, 735 bp, Glycine max
cttcccatccatttcgaatgaagtttaaaactgtcatggaatctgattctcacgtataaggtttgcatgcctggtgggtttcctgggggcttcccaggggccgggggcatgccagggggcttcccaggggccgggggcatgcctgggggcttcccaggggctgggggcatgcctgggggattcccaggggctggtggcatgcctgggggattcccaggggctggtggcatgcctggaaacattgattttagcaaaatcttgagtgaccctgaactgatggcgtcatttggtgatccagagattatggctgctcttcaagatgttatgaagaaccctgctaattttgccaagcaccaatcaaatccaaaggtagctcctgtaattgcgaaaatgatgaccaaacttggaggtggtcccaagtgaatacttttagatgcttgtaagttatttgagacttcaactttccagccctctggcatcgggtatttaatgtttattgcatttttaatcttaccgaaattattaaactttttaccgtttgttagtcctgtttcttaggtgcccctatatagctcgtgttggtagtatgtttatttgtcaacaatgcaatgttattttcccgagtgaatttgaacgtttgaagttgatattttttgcatttcaggaaaaatgaaataatagtttcttagctttgtccaaaagaaaaaagcgcctaagaaaaaaaaaaaggggggc

SEQ ID NO: 2068 - DNA, 631 bp, Glycine max
aaatggtaatgcctggacatcgggagtcaaacttgcagaaagaactgaaccgatacattcccaccgcggcagcatttggaggcatatgtatcggtgccctgactgtgttggcagatttcatgggggcaattggttcagggacaggaatattgcttgcagtaacaatcatctatcagtacttcgagacatttgagaaggagagagctagcgagcttggcttcttcggtttctaagctctgcttagcacattcactgttggtgacgcaattcggctctaccgcacccacagttttgttgtgtaatgaggactggttggtaggttgtttaacacagtaaggaagaacttagattagttttgtatcacttttctcaaccgaggaagccctagtataatatcactgtaaacgttatggagtttctctgaatacacttgcgttaatttaagttgtcagttctagaaattacttgctatttaatattattagttttcttgaaaaaaaaaaaaaaatttctctttcagcttttaggggaagcaagccctccgagtcaaagtttcattagtgccatgggaaactaccattaattttgccatcatcccggcacatggattttgtcaggtttaatatggagt

SEQ ID NO: 2069 - DNA, 465 bp, Glycine max
ctcgagccgaatcggctcgcttctcaatcgcaaattttctcccccaaatcgtagatctacggttaaattggtgtagtgtggtaagatgggaggaggatttagagtgcttcacttagttaggccatttctctcgtttcttcctgaagttcaaactgctgacaggaaagtgccatttagagagaaggtcatatacactgtgatctctcttttcattttcctggtttgtagtcagctccctctatatgggatacactcaacaacaggtgctgatccattctattggatgcgtgttattctcgcttcaaaccgtggaactgtcatggaacttggaatcactccgattgtgacttctgggctagtaatgcaacttctggctgggtcaaagatcattgaagtggacaacaatgtacgagaggatcgagccctgttaaacggagcacagaagctacttggtattttgatagc

SEQ ID NO: 2070 - DNA, 439 bp, Glycine max
ccttgctgtatatgttttgcagcttagctgatatggcggccaatcctttccatgcactgttctatcttgtgtttatgctttcagcttgtgccttgttctcaaaaacatggattgaagtctctggttcatctgctagagatgttgccaagcagctgaaggtacgaactggcattcattttgcatgccatttccctattgacgatatatatttcttaagtaaagcagcagaatattagctaggcttgggttttagccatctttagaagcaagtaatactgtgtctaaacaactattattttgagcttcgacccaactctttttgtaagctttaaaccaacataaattttaattgaactttaaatgaaaggttgtgtatggggccaatggactggaatatagataactagttgcactttgtcattcttgctggatcttggac

SEQ ID NO: 2071 - DNA, 482 bp, Glycine max
cgtgagtcaaacttgcagaaagagctgaaccgatacattcccacggccgcagcatttggaggcatctgtatcggtgctctgacagtgttggcagacttcatgggggccatcggttcaggaaccggaatattgcttgcagtaacaatcatctatcagtactttgagacatttgagaaggagagagctagtgagcttggcttcttcggtttctaagttctgccaagcaaataatgttggttggtgactccaacgagctctcccacaccccttgtttgagggatcgttatacttgtaggtcgtttaacatcgtaagggaggacataactagtttgttgtcaagatttacttttctttttttccctttcaactgaggaagtatcaagtagtacatcgttgttaacatttttgggtttcctctgaaatatacttgtgtttatcattgaattcaatctatacgtaagtctgacaccaaggtttaaaaa

SEQ ID NO: 2072 - DNA, 342 bp, Glycine max
tcgaattttctcccccaaatcgtatatctacggttaaatgcaggcgatgtgtaattctatgtagccgtgtaactgaatgattgatgtacctttttttttaattgaaatgaagttttgtttccttgatccccgttttaggatcaaaaggttgaatcagtgaaaattgggcattcgttgttctcgtatgcttctcagtaaactggtgattttagtgagtataaattgaaaaggtttgctaatgtaggttaaattggtgtagtgtggtaagatgggaggaggatttagagtgcttcacttagttaggccatttctctcgtttcttcctgaagttcaaactgctga

SEQ ID NO: 2073 - DNA, 361 bp, Glycine max
cggctcgagcaacttctcgacgcagcgcaaaagctgcaactccgcttctcatattagaattcagacaaagcctcatccttcatagttcagatccattcttgctctgtattttgtttttcttttaaatttttctttaaatttctcaattgatcaaagatcttcagcaaaccggtcaagtttgtgtagtttggccagatgggaggtgggtttagagtgctacacttagttagaccttttctctcgttcctacctgaagttcagactgctgataggaaagtgccatttagagagaaggtcatatatactgtgatctctctgttcagtatcctgtttgcagtcacttcctctgtatgtatacata

SEQ ID NO: 2074 - DNA, 341 bp, Glycine max
  unsure (1)..(341): unsure at all n locations
cggctcgagattatttcatttttactgaaatgcacaaaatatcaactttaaacattcaaaaccactcgggaaaataacattacattgttcacaaataaagcgtggcttcccaggagctggtggcatgcctggaggggtgcctggaaacattgattttagcaaaatcttgagtgaccctgaactgatggcggcatttagtgatccggaggttatggctgctcttcaagatgttatgaagaaccctgctaattttgcatggcaccaatcaaatccaaaggtaggtcctgtattgcgaaaatgatgaccaaacttggaggtggtnccaagtgaatacttttaga

SEQ ID NO: 2075 - DNA, 449 bp, Glycine max
caaagaaagagaggataaaaaaaaggagcgtgagaggcagcggcgccgtgctgaagctcaggctgcctatgagaaggctaagaagcaagagcaatcatcttccagtagaaatcctggaggcatgcctggtgggtttcctgggggcttcccaggggccgggggcatgccagggggcttcccaggggccgggggcatcccggggggcttcccaggggccgggggcatgcctgggggaggcttcccaggagctggtggcatgcctggaggggtgcctggaaacattgattttagcaaaatcttgagtgaccctgaactgatggcggcatttagtgatccggaggttatggctgctcttcaagatgttatgaagaaccctgctaattttgccaagcaccaatcaaatccaaaggtaggtcctgtaattgcgaaaatgatgaccaaacttggag

SEQ ID NO: 2076 - DNA, 480 bp, Glycine max
gtcttttatcagaaacttgtatgaattctctcattatgttgcagtgagaacatcatatggaaagcatttagccccaccaccattaacagtggacgtggagctgaatttgagggtgctgtcattgctctattccatttgttataactagaacagacaaggttcgtgcccttcgtgaagcattttaccggcaagaccttcccaatgtgacaaatctcgttgctaacgttttgatcttcctaattgtgatatacttccaaggatttcgtgtggttttgcctgtgagatgagggaatgcccgtggaccgcaggggtcgtagcgaatcaagttagtttagagctcgagcaatgggcattagtcgtcagtctgcgcttgtttccagtccctaagtcatttctcagcgtctacagagaaggtacagtgcaaacttcattgtggatctagtgggcagatggaaggattctgactatggaggtggtcag

SEQ ID NO: 2077 - DNA, 728 bp, Glycine max
ggaaaaacacacctaggcgctgttcaaacctggccgaacccgaaacatcactctatataaataatgcaaacctaaaacagaggttcgtccctcttactaacactagggtttacagagaagcgaagaggcgcagccgtagcagtaactcgtggaattgctagcaatggcgaggatcaaggtttacgagctgaggcagaagacgaaggctgatctgttgaatcagctgaaggacctcaaggcggagcttgccttgcttcgtgttgctaaggtcaccggtggtgcccctaacaagctctccaagatcaaggtggtgaggttgaacattgcccaggttttgacggtgatttctcagaagcagaaggctgcgttgagggatgcctacaagaataagaagtacttgcctctcgatctccgccctaagaagaccagggctattcgcaggaggcttactaagcaccaggcatcattgaagacagagagggagaagaagaaagagttatatttcccactaaggaaatatgctatcaaggtgtaactttagagcaatcttatcggttaattggacatttacctcctttatactcgacaagttttgatatatctcgttttgtagtttcatgtttattgcttattggctgtgttaaacttcatgtcttctttagacctggggtttcttgaagctaccaggatttatggatgtcgttagtttccgtttaatattgatgaaa

SEQ ID NO: 2078 - DNA, 579 bp, Glycine max
cccacgcgtcagacgacgacagacggggatagcagcatcatacaaagcattgaattcaaaaacttaagttcattccttgtgttttgctttcttcctcaaaaccaaacatgtcgaacacatgcggcaactgcgactgcgctgacaagactagctgcaccaagggaaacagctatggtgttattgtagagactgagaagagttacatcgagactgttgtcatggatgttccagcagctgagcatgatgggaagtgcaagtgtggcactaactgcacttgcacggactgcacctgtggccattaaggaatatgtatgaaaatgtaattgccatgtgtttggcaatacaaatatccaaataatgtaatcttcgtatgaataaatgtgtgtgctgttatcctacttcaggtctgtgtagtcatgcagtctgaatcatttcaagttcctgtcttagttaatataacagccatggttgtggcattctatggtttattagactaaaataagtgtaaatctccgttcaataatcccttttccacagctaaaaaaaaaaatctaaaaatactactcctaaaaaaaatag

SEQ ID NO: 2079 - DNA, 469 bp, Glycine max
  unsure (1)..(469): unsure at all n locations
cgggccgacccacgcgttcgggcttctttatttctacttaagggtatagctgcatcacacaaagcattgaattcggggacgtaagttcattccttgtgctttgctttcttcctcaaaaccaaacatgtcgaacacatgcggcaactgcgactgcgctgacaagactagctgcaccaagggaaacagctatggtgttattgtagagactgagaagagctacatcgagactgttgtcatggatgttccagcagctgagcatgatgggaagtgcaagtgtggcactaactgcacttgcacggactgcacctgtggccattaaggaatatgtatgaaaatgtaattgccatgtgtttggcaatacaaatctccaaataatgtaatcttcgtatgaataaatgtgtgctgttatcccaaaaaaaaaaaannnnnnnaaaaaaaaaaagcggccgctctaaaggatccaagctta

SEQ ID NO: 2080 - DNA, 656 bp, Glycine max
  unsure (1)..(656): unsure at all n locations
tactcggtcctgggttccctggtagacccacgcttacgattgaattcaaaaacttaagttcattccttgtgttttgctttcttcctcaagggccaaacatgtcgaacacagggcggcaactgcgactgcgctgacaagactagctgcaccaagggaaacagctatggtgttattgtagagactgagaagagttacatcgagactgttgtcatggatgttccagcagctgagcatgatgggaagtgcaagtgtggcactaactgcacttgcacggactgcacctgtggccattaaggaatatgtatgaaaatgtaattgccatgtgtttggcaatacaaatatccaaataatgtaatcttcgtatgaataaatgtgtgtgctgttatcctaaagaaaaaaaattaataactcgagactagttctctcctcgtgccgaattcggcaccaggggtttacagagaagcgaagaggcgcagccgtagcagtaactcgtggaattgctagcaatggcgaggatcaaggtttacgagctgaggcagaagacgaaggctgatctgttgaatcagctgaaggacctcaaggccgagcttgccttgcttcgtgttgctaaggtcanccgcggtgcacctaacaagctctctangatcaaggtggtg

SEQ ID NO: 2081 - DNA, 1315 bp, Glycine max
ccaacttccattacaaaaccaaaacactcaagttaacttcaacacctttaattttctaaaagtaattcagcggctgaataccaagcggagaagatgagtcaggagcagccacggcgtcccaaaggccaaaaccccatcaaatacggcgacgtttttgtcgtctccggcgaccttgcacagaagcccgtcgcaccggaagatgctgccatgatgcaaagcgcggaagctcgagtgctcggacaaacccaacccggcggagcagcttccgtcatgcaatctgccgccaccaggaatgaacaggctggccttgtcggtcaccgggacgtcaccgacgttaccggcgaccgtggcgtcacagtcacagaaactacagtccctggaagacgcattataaccgaggctgttggtggccaggtagtggaacagtatgtggaggcaactccggttgaggcagggcgaacagtgcaattaaggagaatgccataacaataggagaggcattggaggcgacggcacagacggtgggtcacaagccggtggatcagagtgatgcctcagcgattcaggcggcggaggttagagcaacgggaagtaacgttataacgccgggaggacttgcggctatggctcaatcagctgctgcttataatgctgactgcaagcatgaccaggacaaggtcaagcttgccgacgttttgaccggagccaccgccaagttgcccgcggacaaggccgccacactgcaagatgctgaaggtgtagcgtgtgctgaggtgaggaacaaccccgatgccaccgccactcccggtggggtagccgcttctgttgcggctgctgctaggctcaatgaaaatgttaagtaacgagtcatgttatgtgtcttgataatcatacttttgtttcatgatgtgtggtgttgatgtgttatagtctatagtgtattaataagtgtaagtggtgcaacatcttgtttttctttcttgtactctttgtgagttatattaattactggttttaaggactctacttaaggtgatgtatgtatactatgcgctatatgcatttctgtggttatcagttaataatatgtgctccaatcttgtaatttcttgtttgcaaccattctagatcccaaaatgcttgtcaagaggatttattacgtacccttttcctttagtcataatattttattctttagaaaactgtatttgtagttgtatgtattgtttggggataatatatactgcaattgttataggatagccaaaaaaacagcattctataagatattatagttgtgtttgtttatgatagg

SEQ ID NO: 2082 - DNA, 493 bp, Glycine max
cccacgcctcccctttctctctcaaaaccctaaccctaaccccaatccccagagtctggaagcctctccaatggcgtaccagacccccgatcaagattcaggttccgatccgaagaccccaacgcgcctctacaacccctacaaggatctcgaagtccccattcgcaacctctaccagctcccaacctccccggagtacctcttcgtcgaggaggcccgccgcaagcgccgatcctggggcgagaacctcaccttctacaccggctgcggctacctctccggcgctgtcggtggcgccgcctccggcctcgtcggcggcgttaaatccttcgagtccggcgacaccgccaagctccgcgtcaaccgcgtcctcaactcctccggccacgccggccgcgcctggggcaaccgcctcggcgtcatcggcctcctttacgccggcatcgagagcgggatcgaggcaacgagggacaccgacgacgtctggaacagc

SEQ ID NO: 2083 - DNA, 2285 bp, Glycine max
ttttctgtcatcgcgtccgattaggctttcacaacacctcagcgtcactgtaccagttggaaatggagacaataacagagaacggatcagatggtgtgagtttggcaagaaatacatccaacaacgcccgtcgagggttgccaatgatccaaacaaacatgaagccaacggattcggaattccaagtgtgccacgacgacagcaccccgccggtcagagcccaaaccattcacgagctccattctctgcagaagaaaaagtcaaccccttccactcccctctcagcaacgcaaggccccttcgccactgtttccgatgaggaacgccagaaacagcaactccaatcaatcagtgcgtcgttggcgtcgttgacgagggagtcagggcctaaggtggtgaaaggagacccagccactaaggcagagaaggggacacatgttcatcaccatccgcaaccacattactttgcttcaacggcgtttgatgtcagtgacagtgcgctcaaattcacccacgtcctctacaatctctcccccgctgagctgtatgagcaagcgattaagcacgagaaaggatcattcataacggcaacgggagcgttagctacactttctggagcaaaaacgggacgctctccccgagacaaacgggttgtcagggacgacaccaccgagcatgacctctggtggggaaagggctcgcccaatattgaaatggacgaacataccttcttaatcaacagagaaagagcagttgattacttgaactcccttgaaaaggtttatgtgaatgatcaatttctgaattgggatccagaacacagaatcaaagtccggatagtatctgcaagagcttatcactccctatttatgcacaatatgtgcatccgacccactcctgaagagctagaggaatttggaactccagacttcactatatacaatgcaggacagttcccttgtaatcgttacacacactacatgacttcatcaactagtattgacatcaacattgcaaggaaagaaatggtcatccttggcacacaatatgctggggaaatgaagaaaggtctctttggtttaatgcactacctcatgcccaagcgcaatattctctccctacattctgggtgcaatatgggcaaagatggcgatgttgcactcttttttggattatcaggtactggaaagacaactctgtctaccgatcataaccggtacttaattggagatgatgagcattgctggagtgaaaatggagtggcaaatattgaaggaggttgctatgcaaagtgtgtcgatctttcaaaggataaagaaccagacatctggaatgccatcaaatttgggacagtactcgaaaatgttgtttttgatgagcatactcgagaggtagatttctctgacaaatctgtgaccgagaacactcgtgcagcatatcctattgagtacatacccaatgctaagataccgtgtgttgctccccatgcaaagaatgtcatccttctagcttgtgatgcatttggggtgctccccccagtaagcaagctgagcttggcccaaacaatgtaccatttcatcagtggctacacagccctggttgctgggacagaggatggtataaaagaaccacaggctacattctctgcttgtttcggggcagcgtttataatgatgcaccctaccaaatatgcagcaatgctagccgaaaagatgcagaagcatggggctactggatggcttgtcaatactggctggtcaggaggaagttatggattaggcaatcggattaagttagcgtatactaggaaaatcattgatgctattcactctgggagccttttgaatgcacagtacactaagactgaagtgtttgggcttgagatcccaacagcactagagggagtcccttctgaaatcttggaccctgtgaatacttggtctgacaagaaggcctatcaagatacacgcttgaaactagcaagcttattcaagaagaattttgatggattcacgacctacaagataggaggggatcagaagttgactgaagagattgtctctgctggtcctatattctgatgagagcatttcctatttagcgaaaaaaaaaatgaagtccaaaagcattcggttgattatttctacttaaaggttttcactgtatttagcttgcttgactataagacgatccctttattattgacacttccgagacaatacacaaatctgttattttgcgagcgtttaattattgaaattttcggccttgtcaggctacagtcc

SEQ ID NO: 2084 - DNA, 1700 bp, Glycine max
gaaatataaaacatttattcattgtcaccaaattttgttccctgcaagagagagaagaagaagttgttgggttgagttgggtttggattggatttctaatctaatctatacctttctttttcctatgcttttaaggcacaaatccttctcccttctctcttctttcttcttcttctcctgacccttattattattccttgcccttaccctttaggcaagggaaggaagaaagaataactatattattatctttattgtaatctatctttttattataattataattataattattgttgttattattccttaaatatggattcgccgtgtctctccaacgattcggtttctggattcaaagacaaggagtcaatggttgacccctttttggtcgaggctctccagaaccctcgtcaccgcctcaccattttgaggatggagctggagatccagaagtttttgaataatgctgatcagctgcattttgagtttcatcatttcccttcttcctatctccgactggctgcacaccgtgttgctcaacactacaacatgcaaacaatggttcaagataatggcttagatggccagggaagtaaaattctggttaggaagttacctgaaagcaagtaccctgtagttcgattatccgaaatacctgctaagcagttggaaaatgataaatctgagcagaaaaaaattgttattagacctaggcctaataaaaacagtttgaatgatgccaacggagttgggaggaaaggaaatcctcttagaagtgtggaagagagaaaggaggaatatgatcgggcacgagcacgcatttttagtagctccagaagttgtgattcagatgatactctgtcccagacttcaactgatgagaaaaattctcttataaacaaggatgagaatgaaactagcaagacccctgtggtttattcagaacaatgctctattggtagggatattaattctactcgagttgccatcttgagagatagggaaaaggatcgcagtgatccagattatgatcgtaactatggaaggtatgctaggagtattccaacttcttctgttaacttgatgccttttaatttgcaacaagttcaacctccatttgtgcagtatgataatgcttttaatcagttgagtcagatgtcacaaaatcaagcttcacttggctatggacctcctccaagccctatgatgaatccttttggtgtcacagggttaaatcaggtgtctagggatggtgcttatgtacagtggccaagtgctgcaatgatgtatgcacattcatatgaccaatttagacatgctgttttccaggctccatttggtcaacgcccattgagtttcgattattcacagaattactagatgacgtttgggaagaagttttccatttggctgcataagttattttagctattaaggatttcagagttagatataatttttctgtactgttataatagatccttgttttctattctggtttttaagttttgatggtggtagcaagcatttggcgtttttggtatttcctggcgacatttttatactggactgtagtgaaagtacttggatttgaagtatatgaagagttatatgtgattaccttgtctaatgttaggaatgcttgacctcgttctgtctataaagtttatgcaaaaacctcaccttaattccatttt

SEQ ID NO: 2085 - DNA, 1009 bp, Glycine max
agcccacgcgtccgcccacgcgtccgcccacgcgtccgcgattatccgaaatacctgctaagcagttggaaaatgataaatctgagctgaaaaaatttgttattagacctaggcccaatagaaacagtttgaatgatgccaaccgagttgggacgaaaggaaatcctgtaagaagtgtggaagaaaggaaggaggaatatgaccgggcgcgggcacgtatctttagtagccctagaagctctgaatcaggtgatacctcatccgtggttccaatggatgggagatattcttctactagcaaggatgagaatgaaactagcaagaaccccatggctgattcagaaagatatatcagtaccagggatagttgttcgactcgagttgccatactcagagatagggaaaaggatcgtagtgatccagattatgaccgtagttatggaaggtatgctaggagtatcccaacctctgctgttaacttggtgccatttaacttgcaaaaagctcaaccttcatttgctcaatatgatgctacgtttaatcagttaggtcagatgtcacaaactcaggcctcacttggctatatacctccttcaaccccgataatgggtccttttggcaccacaggattaaatcagacatctagtgagggtgtttacctacagtggcctagtgctgcaatgatgtatgctcattcatatgaccaatttagacatggtgttttccaggctccatttggtcaacagccgttgagctttgactattcacagaactattagatgacatttagggggagaatattcaatttggatgcaaaaagttatgttagcttttttaaaatttcatgttaggttcatttgtcagtgctgtcagagacccttattgtgtttcagttttgatggttatagtaaatcgttgggtacttctaatgtgacaaatttataaaatagtgaattgtagtgtattactggatctcccatatatgataaggtttctgtggtggttttag

SEQ ID NO: 2086 - DNA, 831 bp, Glycine max
cccacgcgttcgcggagagagaaaaagagagaggtagagaaaagcgaagagtctctctcttcctatctctctctttcaatgtcagggcacaaatcttccacctctacttcttcttcttcttccttctaacctatatcagaaggaaacgcgaaaaaagaaaaaaaaaaaagaggcagaaggttctagaagccgccaatttttatttcttttaatttgtctgagtcagagacgttcgtgattgtaaccatggattcttcgtgtgtcccaaacggcgacgtttctgggttcaaagataaggagtcaatggttgaccctttcttggtcgaggctcttgagaaccctcggcaccgtgtcaccattttgcggatggagctggatatccagaggttcctgagtaatgcagattatcagcattttgagtttcaacatttcccttcttcctatctcagactggccgcacatcgtgttgctcaacactatggtatgcaaacaatggttcaagataatggcttagatggccagggaaccagaattatggtaagaaagatggcggaaagcaggtatcccatggttcgcttatctgaaatacctgctaaacagttggaaaatgataaacctgagaagataaaaattgccataaggcctaggcctaacaaaatcagtttaaatgaagccaatgaagctgggacgaaaggcaatcctcctagaagtgtggaagaaaggaaagaagaatatgaccgggcgcgggcacgtatctttagtagccctagaagctctgaatcaggcgatacctcatccatggttccaatggacgggagaaattcttctact

SEQ ID NO: 2087 - DNA, 577 bp, Glycine max
cccacgcgttcgcattaattaaaacactggagaaagagggatggaggaaaaaagatttggggaaggaaagaaattagaaatatttattcattgtcaccaaatcttgttccctgcaagagaaagaaagaagggagagaagaagttgttgggttgagttggattggatttctaatctaatctatacctttcttttttcctatgcttttaaggcacaaacccttctttcttccctcttctttcttcttcttattgttattccttgcctttaccctttagggaaggaagaaggaacaactatactactattatccttattattgttattattgtaattaatctttttattatagttattgttgttgttattattcctcaaatatggattcgttgtgcctctccaacgactcagttgtttctggattcaaagacaaggagtcaatggttgacccctttttggtcgaggctctccagaaccctcgtcaccgcctcaccattttgaggatggagctggacatccagaagtttttgaataatgctgatcagcagcattttgagtttcaacatttcccttcttcct

SEQ ID NO: 2088 - DNA, 529 bp, Glycine max
cctatatgttctcccgagtctccctctaatactttctcttctctttctctcctaattggtcgagagagaaaaagagataggtagagaaaaacgaagagtctctctcttctttatgtcagggcacaaatctttcacctcttcttctttcttctgacccatttcagaaggaaccaccaaaaaatagaggcagaaggttctagaagccgccaattcttttttttttttttggtttaatctgtctgagtccgagaggtttgtgattgtaacaatggattcctcgtgtgtcccaaacggtgatgtttccgggttcaaagataaggagccaatggttgaccctttcttggtcgaggctcttcagaaccctcgtcaccgtgtcaccattttgcggatggagctggatatccagaggttcctgaataatgcagatcagcagcattttgagtttcaacatttcccttcttcatatctcagactggctgcacatcgtgttgctcaacactatggtatgcaaacaatggttcaagataat

SEQ ID NO: 2089 - DNA, 423 bp, Glycine max
ggatgttaaaaaagcaaaactgaatcctataggaagtgagattatagatggactcttgtactaatgctttatatataaaaccacaactgtattaaccaataatgaaattgagttgtaggtgtgaatcatatctttagcaagtctgctgttgttggcatgaaaactttttgcattaaaactgactggaatactcaaattgtgaaataactagacattggagccattggttatattactcattatatggttccaaaatcagggattcatgcttggaacttttgattttgcagagaacactcgtgcagcatatcctattgagtacatacccaatgctaagataccgtgtgttgctccccatgcaaagaatgtcatccttctagcttgtgatgcatttggggtgctccccccagtaagcaagctgag

SEQ ID NO: 2090 - DNA, 434 bp, Glycine max
ggccccccaggattgaatcagacatctagtgagggtgcttccctacagtggcctagtgctgcagtgatgtgtgctcattcatatgaccaatttaaacatggtgttttccaggctccatttggtcaacagccgttgagctttgactattcacagaactattagatgacatttagggggagaatattcaatttggatgcaaaaagttatgttagcttttttagaatttcatgttaagttcatttgtcagttctgtcatagacccttattgtagggatatggctttggttttcagttttgatggttatagtaaatcgttgggtacttttaatgtgacagtttataaaatagtgaattgtagtgtatcactggatttgcaatatatgataaggtttctgtggttgcttctattaaaaaaaaaaaaaacaaattataaa

SEQ ID NO: 2091 - DNA, 683 bp, Glycine max
ccgcactgagacatctgctcgatatgctcccctcacttgatgagcttctctgatcctaggtagggtttaaaagcagcttgctctccgtagacaacgaatcaaagtcttcttcttcttctttctattcctcactcaagggttagggatgcgtcggaacagccctgcatactacagtcctccgcggcgaggatacggcggtggtggccgaggaggaggaggaggaggaggaggaggagggtccggcaggagggggttcggtggaggcaggcgcagggacagcaatgggagcctcttggttcgtaacattcccctcgattgcagacccgaggagcttcgcgtccctttcgagcgatttggacctgttcgtgacgtttacatacccaaggattattactctggagaacctcgaggctttgcctttgtgcagtttgtggatccttatgatgcctcagaggcacagtaccatatgaacagacagatttttgctggaagggaaatatctgtagttgtggctgaagagacgagaaaaagaccagaggagatgcgccacaggactagtaggttaagaggaccagcgggctatggaggccgaaggtcttctcgttacgggcgttctcgatctcgctcaattaccagatcacgctcgccaccttatcactctggttctagaaatcgatatcgct

SEQ ID NO: 2092 - DNA, 341 bp, Glycine max
acacgaataaacaagaagacattaaaatggtgtgttggtcctagggtttaaaatcgggttgctctccgaagacaagaaacgaatcgaagtctttttcttcttcttcctcctcttacgaactcgcgagatttctttgtcctcactcaagggttagggatgcggcggaacagtccagcatactacagtcctccgcggcgaggatacggtggcggtggccgaggaggagggtccggcaggaggggattcggtggaggcaggcgcagggacagcaatgggagcctcttggttcgtaacattcccctcgattgcagacccgaggagcttcgcgtccctttcgaacg

SEQ ID NO: 2093 - DNA, 332 bp, Glycine max
gcagcttgctctccgtagacaacgaatcaaagtcttcttcttcttctttctattcttcactcaagttctttcattgttcgttagggttagggatgcgtcggaacagccctgcatactacagtcctccgcggcgaggatacggcggtggtggccgaggaggaggaggaggaggaggaggaggagggtccggcaggagggggttcggtggaggcaggcgcagggacagcaatgggagcctcttggttcgtaacattcccctcgattgcagacccgaggggcttcgcgtccctttcgagcgatttggacctgttcgtgacgtttacatacccaag

SEQ ID NO: 2094 - DNA, 1119 bp, Glycine max
actcgagcgaatcggctcgacagcaacaaacgacagagattcttcctcaacacaatcgaaaaaaaaaaagcttccgattctaaaaccagaacaacaaaaaagtaaaacacacacgtcattttaaaacatttcatttttttggttatttatttaaagagcgagtgttgtaacaaatggtgaagccgaagagcgtggagaaacccgcagaggaacaacaacaacgaagtgtttcatcgtacagaggagtacggaagaggaagtgggggaagtacgtgtcggaaattaggttacccaacagccgtcaaaggatttggttgggttcctatgacagcgccgagaaggcggcacgcgcgttcgacgctgccatgttctgcttacgtggcagcggcgccaaatttaatttcccgagtgacccacccaacatcgccggcggggggaacatgacctcctcccagattcagatcgcggcggcgcgtttcgccaattcggagccccgaaatgagcgttcggatcaacccgtggagtctttaacttcggatgaggaaacggcatcgtttccggtcatttcggatacggatacatcatctcctcctctctcagacgtgacgttccaaaacgacgccgaattagttactgggtcgttccctgatatgttttcggatttcgggtcgggcgattttgtgcccgatttctccgattttccgagcttcgacgatttcagccgggacttcttcttgcatgaacttccgggtttcgattacggagaagagaacttggatgggttgataattcaggactcgttcctgtggaatttctaagcgggtcggggttaggataattttattatatcccaaccgtgtttagaattcggatcggatccggatttgggttgggtcaatttttgcgtgaccatgccctccatgtgttagtagttagtgatggttatagttttttttttaacgtacctagtagtcaagtgtttcgattttttgggatgagaatcataatttatttatttgtcatgactcatgtcattaattgtaaagttgtctgctgatagtgtaattttcttttggccattcgttccattataaaagtgataagatattttcgtctggg

SEQ ID NO: 2095 - DNA, 494 bp, Glycine max
cataccgttcgaaccactcaagccgctcgaaccgctcgagccgctcgaactcgagccgaatccgcagccaaaacaacaactaacgacaaagattcttccccaacacaagggaaaaccggagcaacaaaaaaagtaacacacacgcacacacgcatcatcgtataacatttgttttattttttttaaagagcgagtgttgtaacaaatggtgaagtcgaagagcgtggagaaacctgcggaggaacaacaacgaggtggtgtttcagcgtacagaggagtacggaagaggaagtgggggaagtacgtgtcggaaattaggctgcccaacagccgtcaaaggatttggttgggttcctacgacagcgccgaaaaggcggcgcgtgcattcgacgcggccatgttctgcttacgtggcagcggtgccaactttaatttcccgagcgaccggcccaacatcgctggcgggaggaacatgacgccctcgcagattcaga

SEQ ID NO: 2096 - DNA, 1306 bp, Glycine max
atggtgatcatgttgaccagaaaggatccattgttcttgctgaaaaattgagatttgacttttctcatggcaagcctattgaagctgacaatttaaggagaattgaatcaattgttaatgagcaaattaaagctgagttggatgtaagtgcaaaagaggcaactcttgctgaagccaagggtatcaatggtttgcgagctgtttttggggaagtctatcctgatcctgttagagttgtgtcaattggacaaaaagttgaggatctccttgctgacccaaagaatgaaaaatggttatctttttcgtcagagttatgtggaggtacccatatttcaaacacacgagaggcaaaagcttttgcacttttatctgaggagggaattgcaaaaggaatacgcagaataacagctgttacaactgatcgtgcgtatgacgcaatgaaagtggcagatgaatttgatcagcaagtagacgatgcggctaagttagtaggaactttgctagaagagaaagtttcatcattgaaaagcaatattgaaactttatctattcctgctgccaagaaagctgacatcaagatcaagatagttcggcttcaggatcaagtaagaaaagcacaaaagcaggtcgctgaggaaaacaagcgtaaagctgtaatgattacagcagagaaggctgaacttgctgtttcaaatgggaaaacattttgtatatctcttgttgatgttggtctggatgtagctgcagttcgtgaggctgttacaaaagtcatggaccagaagggcttatctgtgatggtttttagcacggacgaatctacgaacaaggctgtagtgtgtgccggggtgccagagaaaggaggtaaaggtaatctggatgtggcagattggctgagtaatgctttggggcctctaaaagggagatgtggtaaaggaaaaggtggtcttgcaacgggtcagggtacagaggcatcacatgtaaacgaggctatagatctggcagaaaaatttgcgtcgatgaaattgagttaatggtgtatttgcagtatatccttcctggggtgtaagcatgatatggatctttcgtttggtggtataatcataatcatacagaagggaagggcacttgaagtaattattagatccggatgagttgaacaaatttctaatttagtgcctgaatatttttttgctctgatagattatgtttttggtttatgtatagatcacaaattgttccacaatacagtagcaactgctctgatagattatgaagatattttgaaattttaaactcaccattttcg

SEQ ID NO: 2097 - DNA, 631 bp, Glycine max
accacgcgtccggaggaagtgggggaagtacgtgtcggaaattaggttacccaacagccgtcaaaggatttggttgggttcctatgacagcgccgagaatgcatgacgcgcgttctactctggcttgtactgatgacatggaccagaagggcttatctgtgatggtttttagcacggacgaatctacgaacaaggctgtagtgtgtgccggagtgccagagaaaggaggtaaaggtaatctggatgtggcagattggctgagtaatgctttggggcctctaaaagggagatgtggtaaaggaaaaggtggtcttgcaacgggtcagggtacagaggcatcacatgtaaacgaggctatagatctggcagaaaaatttgcgtcgatgaaattgagttaatggtgtatttgcagtatatccttcctggggcgtaagcatgatatggatctttcgtttggtggtataatcataatcatacagaagggaagggcacttgaagtaattattagatccggatgagttgaacaaatttctaatttagtgcctgaatatttttttgctctgatagattatgaagatattttgaaattttaaaatgtccatcaacaatctctttccgagattacaataac

SEQ ID NO: 2098 - DNA, 1302 bp, Glycine max
cgaaattggactgatcctttctctctctctctctctctttctcctcaacgcctcttcctttcaatttaatccaacaataataattattcgcaaaaaaacgttgaacagataccatcatcatcacccacatcatcagaatttcaaggtcttgtattgcaaggttattgaggatatgatggtgtgtgtggagtagagccggtgtttgtgtagaagatgaaaagggaacagcaagagggatgccgagctttgattcacaattgcccaattccaatgcatgctatacagagggaagcgcaattgattctttttgtgtgtttgactttgatcaatcagttggatatcgcatagaggattgtgttgccttgaggggaaactcagtttttgactcactaaaagtaagtagccaaacaatttctcggggtcctgttgaagttgattcctttgataagttaccaacttcactcaataaaaacccattaacaagccaaacagagcgacaaagattgcaattacaaaaggttcaattatcaaatctggtcagtggggatacggaacaccaggaagagtctgccatggctgacgccagtcctagaactgatatttctacagatgttgacactgatgataagaatccacggtttgatagaagtcagtcccttgttgctgtggtttctgactccagtgacagatcaaaggataaatcagatcagaagactctccgaaggcttgctcagaatcgtgaggcagcaagaaaaagtcggttgagaaagaaagcttatgttcaacagcttgaaagtagtcgcttaaagttaacccaactggagcaagagcttcagcgagctaggcagcagggaatctttatatcaaactcaggtgatcaagcacattcaatgagtggaaatggggctatggcatttgatgtagaatatgcaaggtggctggaagagcagaatcgacaaattaatgagctaagagcaggtgtaaattctcatgcaggtgatacagaacttcgcatgattatcgatggtataatggcacattatgatgagatatttaggctgaaggccgatgcagctaacgctgatgtcttccatttgttgtctggaatgtggaagacaccagcagagaggtgttttctatggcttggtggttttcggtcatctgaactcctcaagctcctggtaaatcagttggaacctctgacggagcaacagttcgtgggtcattaccaacttgcagcaatcttcccaacaggccgaagatgcattgtctcagggcatggaagcattgcaacagtccctt

SEQ ID NO: 2099 - DNA, 440 bp, Glycine max
gcagaacaaaacaagacgtctagaaattggattgatcctttctctctctctttcttcccaactcaactcaagtcctcttcctttcactttaatccaacagtaataattattcgcaaaaaaaaaaaaaacacgttgaacagataccatcatcattcatcttcatccccacatcatcagaatttcaagactcagtttttgactcactaagtaagtagccaaacaatttctcgggttcctgttcaagttgattcctttgataagttaccaacttcactcgataaaaacccattaacaaaccaaacagagtgacaaagtttgcaattacaaaaggttcaattatcaaatctggtcagtggtgatacggaacaccaggaagagtctgccatggctgacgccagtcctagaactgatatttctacagatgttgacacggatgataa

SEQ ID NO: 2100 - DNA, 273 bp, Glycine max
tggttatccctcatgtgaagcgacatgtctctttcttttgcaattcgtgttttgattgagagtcggagtagtttagttagtctgcctccagtcaagcaaagattgtgtttttgattctgtgaagtatttattttggtcatggtccttaggtcttgtattgcaaggttattgaggatatgatatgatggtatgtgtggagtagagccggtgtttgtgtagaagatgagaagggaacagcaagagggatgccgagcttcaattcacaattgccca

SEQ ID NO: 2101 - DNA, 1166 bp, Glycine max
acgtctcattcaaacctgaattcagctcagcattcaacctttctcttcctcctcactcaaacttcccctctctacgccgttcctcccaaatggatgcaccaatggagttttggggtgttgaggttaaggttggtcagaccgtgacagttgacccaatggatcctgtggattcatacatacacatatctcaggttgcgctcggagaggcgaaaaaggagaaacctaatgagtctgtggttttgtatttgaaagttggtgaacagaagattgtcttgggaaccctttctagggatggcattcctcatctatcgttggatttggttctggactccgattccgagctttcccacacttcaaaaagtgccagtgtctttttctgtgggtacagagtactaactggcggcaacaatgcttctgatttttctgatagtgaagaggatgaggaacttgcattggagggtcaagataatgatgaaggtgcaaaggttaccaaaccttctaaacctgttcccaagattggtgccccagcaaaaacagctgatcctaagaaagacgagggtgatgattctgatgatgaatcggatgatgatcttgctggtgaagatgaatttggaagttccgatgagatggatgatgacagcgatagtgatgaggagagtgatggcgatgatgaagagacccctgctaagaaggtggatcagggcaagaagagaccaaatgagtctgcagcaaaaactcctgtttctgccaagaaagctaaaactgctactcctgaaaagactaatggtaagaaaaatgtacatgtagcaactccccatccttcgaagaaaggtggaaagacacccaacagtacaaaaggccagtctcccagttctgctggacaactatcttgcgcaagttgtaaaaagtctttcaccaacgaagtcggtctgcaacaacataagaaggctaagcatggtggtcagtgaatattgatactgcattttatcgtactcatgtagtaattttcccctgtattacagtgagtaggttcggaaggctggtaatttatctcactattaggctagtaaacgaaacttcgaaattttgttttgatgtttgagtccctatatattggaactgctgcatttaaattttgttaatcattcaatgcttagaatattgtg

SEQ ID NO: 2102 - DNA, 621 bp, Glycine max
cctctcgtccgcccacgcgtccgggttttttgacgctgtggttgcggttgcatttgtggctacatagaccctattgtgatgaaactacacttttttgtttataggttgattgaatttcttttagagatggttgaatgtgtgtaacaacattgacataaggatttttactaaacctcgatcaaatatcttcttgatctttcacttttttcccttaacctgatgtgttcctgtggcacaagtggcggcaacaatgcttctgatttttctgatagtgaagaggatgaggaacttgcattggagggtcaagataatgatgaaggtgcaaaggttaccaaaccttctaaacctgttcccaagattggtgccccagcaaaaacagctgatcctaagaaagacgagggtgatgattctgatgatgaatcggatgatgatcttgctggtgaagatgaatttggaagttccgatgagatggatgatgacagcgatagtgatgaggagagtgatgaagagacccctgctaagaaggtggatcaggagtagcagttttagctttcttggcagaaacaggagtttttgctgcagactcatttggtctgatcttgccctgatccacatcgcgag

SEQ ID NO: 2103 - DNA, 536 bp, Glycine max
gactccgattctgagctttcccacacttcaaaaagtgccagtgtctttttctgtggatacaaagttctaactggcaatgacaatgcttctgacttttctgatagtagtgaagaggacgaggaacttgcattggagggacaagataatggaaaacctgaattaaaagctgaaggtgcgaaggttaccaaaccttctaaatctattcccaagattggtgcaccagcaaaagctgctgatcctaagaaagacgaggatgatgattccgatgatgaatcggatgatgatcttgctggtgaagatgaatctggaagttccgatgagatggatgatgatagcaatagtgaagaggagagtgatggagatgatgaagagacccctgctaagaaggtggatcagggcaagaagagacccaatgaatctgcagcaaaaactcctatttctgccaagaaagctaaaactgctactcctgaaaagactgatggtaagaaaagtgtacatgtagctactcctcatccttcgaaaaagggtgggaaaac

SEQ ID NO: 2104 - DNA, 662 bp, Glycine max
gacttcctccatttaggtcttcttctaatccttcttatggcacgccaaagccctctcttacttccacacgcagcggcttcttcttccgtttttctgcatcggcgtgaacaatggcgacgtacgctgcgatgaagcccacaaagcccggcttggaggagtcccaggaacagatccacaagataaggatcaccctttcctccaagcacgtcaaaaacctcgagaaggtttgtgcggacttggttcgtggtgcaaaggacaagcgcctcagggttaagggacctgtcaggatgcccactaaggttcttcacatcactaccaggaagtccccctgtggtgaaggtaccaacacatgggacagatttgaacttcgtgtgcacaagagagtgattgacctctacagttccccagatgtggttaagcagattacctctatcacgatcgaacctggtgtggaggttgaggtgaccattgcagatgcttgatctggatccaaattttaactgttatgctttcctagttttttttctcctcttattctgtattttataagttttgattgtgggaccgagttgaattgttttctttagttttacggttgtagacggttgatgaatacctgagaaatgtcatcttaatatatcttaaatgtacaaaaaaaaatt

SEQ ID NO: 2105 - DNA, 649 bp, Glycine max
ggaaattctaagagcttgttccgtcgtcccccaagtgctgcagagccgcattttgcttgcaattcagaaactttgtgcgtagaggggacgaaacaatacaatggcttacgctgcaatgaagcctactaaggccggcttggaggagcctcaggagcagatccataagattaggatcaccctttcctctaagaacgtcaagaatctcgagaaagtgtgcgccgaccttgttcgtggtgccaaggacaagcgcctcagggtgaagggacctgttaggatgccaactaaagtacttaacatcaccaccaggaaatccccgtgtggtgaaggcaccaacacatgggacagatttgagctgcgtgtgcacaagagaattattgatctctacagttcccctgatgtggttaagcagattacttcaatcacaattgaaccgggtgttgaggtcgaggtcaccattgcagatgcttgatttttgccccattttttccccgcatgctagtttcttttgtaatttatcctttttgctaggtatgttgagtcccatatgttagggttaatgcatttccttttgccgttaaaatttttgatgttgattattgtggaaggggaattattgacttgatcgattatcttttgttttatgtttatc

SEQ ID NO: 2106 - DNA, 544 bp, Glycine max
cccaacttgagagctgcattctgcttccgattctcaaactcaaaggagacgagacatggcttatgctgcaatgaaacccactaagcccggcttggaggagtcacaggagcaaatccataagattagaatcaccctttcctctaagaacgtcaagaatctcgagaaggtttgtgctgacctggttcgtggtgccaaggacaagcatctcagggtgaagggacctgttaaggatccaaactaaagttcttaacatcaccaccagaaaatccccctgtggtgaaggcaccaacacatgggacagatttgagctgcgtgtacacaaaagagtcattgacctctacagttcccctgatgtggttaagcagataacctcgatcacaattgaacctggtgtcgaggttgaggtgaccattgcagatgcttgattttggcatgctagttgattttgtaatttagccccttggctaggaatatgttgagtcaaatacaccagggttaatgcatttccttttgccttttcaatttttgaagttgattattgtgg

SEQ ID NO: 2107 - DNA, 441 bp, Glycine max
tgttcaccattacacatcaagttgagctttccagctgcaggtaagatttagacgtgattcaataacggatgcctaattcggggcttggccattctatcaagcacgtcaaaaaccctcgagaaggtttctgcggacttggttcgtggtgcacaggacaagcgcctcaaggttaagggacctgctaggatccccactacaggttctcacatcactaccaggaagtccccctgtggtgaacgtaccaacacatgggatagatttgaacttcgtgtccacaagagagtgattgacctctacagtgccccatatgacggtaaagtttggctttgtaaaattgattgtctagtgaactgatttgttttggatgacttttaccctgaaatttagggctataaaacttattgtaaatttcttaacacaataaactagttacgttttttt

SEQ ID NO: 2108 - DNA, 283 bp, Glycine max
cttcttctaatccttctttcgcctactcctccctctctctaactttcacacgcagcgaggtagcgtcttcttcttccgtttctctgcatcggtgtgaacagtggctacatacgctgcgatgaagcccacaaagcccggggttggaggagtcccaggaacaggatccacaagataaggatcaccctttcctccaagcacgtcaaaaacctcgagaaggtttgtgcggatttggttcgcggtgcaacggataagagactcagggtgaagggacctgttaggatgc

SEQ ID NO: 2109 - DNA, 940 bp, Glycine max
accagctccactctagcgttgttgcattgcagaagcgtctccattttctttcgcgatggccgcgcgagccctgttgaccagaaaaaccctagccaccgttctccgcaacgacgcgaagcccataatcggagctggcatagctgcagctactcattctcgtgggttgcacgtgtacacgctccccgatctggattacgactatggcgctctggagccagccatcagcggcgaaatcatgcagctgcaccaccagaagcaccaccagacttacatcaccaacttcaacaaggccctcgagcagctccaagacgccgtcgccaagaaagattcctccgccgtcgttaagctccagggcgccatcaagttcaacggcggaggtcacgtcaaccattctattttctggaaaaatctagctcctgttcgtgaaggaggtggtgaaccacccaagggttcactgggatgggccattgacacacattttggctcttttgaagcattagtacaaaaagttaatgcagaaggtgctgcactacaggggtctggatgggtgtggcttggtctggacaaagagttgaagaggcttgtagttgaaaccactgccaaccaggacccactggttactaagggaccaaatttggttccattgcttggtattgatgtttgggagcatgcgtactacttacagtacaagaatgttagaccagactatcttaagaacatttggaaagttattaattggaaatatgccagtgaagtgtatgagaaagagagctcttagtctgaagggctacttgatatagctcctgggatgacagatttgcagcacggtaacgagatgtggaataaaatatgatggatgtgatgtattagacagctactatttttaatgattgactgagaacctcaggcattgatggctggatttctttggctaagtccc

SEQ ID NO: 2110 - DNA, 486 bp, Glycine max
cagctccagtcttctatcatcatcgaatccactccagcgttgttgcattgtagaaggcgatggccgcgcgagctctgttgaccagaaaaaccctagccaccgtggctccgcaacgacgcgaagcccataatcggagttggcataacagcagcggctactcattcacgcgggttgcacgtgtacacgctacccgatctggattacgactatggcgcactggagccagccatcagcggcgacatcatgcagctgcaccaccagaagcaccaccagacttacatcaccaactacaacaaggccctcgagcagctccaagacgccatcgccaagaaagattcctccgccgtcgttaagctccagggcgccatcaagttcaacggcggaggtcatgtcaaccattctattttctggaaaaatctagctcctgttcgtgaaggatgtggtgaaccacccaagggttcactgggatgggctattgacacacat

SEQ ID NO: 2111 - DNA, 629 bp, Glycine max
cccacgcgtccgcccacgcgtccgcccactcgtccgaatcagagaacaaaggatgatgtggaagagaagaagaagccttcagcacttgaagttgaaaccttgctgatcctcatcatgggaaccatttttcctcctcactctctctctccactcctcaacatcaaaccttcaccctcaagaattctcttggctccctctccccaacccaagtcaaattctctcttttgctccaaacccattgtttcaagtctcagaaagaaccaaacttcatctcccaaaccttcatcgggcacaagctggttggctcatgctcaacagggcctagcagctttggctatctccttggcactcaactttagcccagttttgtttaatggcaatgcattggcatctgagtttgatgtgcttaatgagggtccacccaaagattcttatgtgtttgatgatgcaggagtgcttagtagggtgaccaggtctgatttgaagcagttgttgtctgatttggaatcaaggaagaacttccggatcaattttataactgttcgaaagctcacgagcaaagctgatgcatttgagtatgctgaccaagtcttggagcgttggtacccttctgtagaagaagggaacaa

SEQ ID NO: 2112 - DNA, 1013 bp, Glycine max
tatcgagccgattcgggttacgtttggggtttctctcgctaaccaagaaggaactagggttttacagaatacaagctctctctctctctcgtcggttttcgtcaatcaaatccaatccaatatcaaatatgagtcgtcatcccgaggttaagtgggctcagaggcttgacaaggtctatatcacggtgcaattggctgattcaaaaaatgccaaagtggatcttacaccagatggtatttttaccttctctggtagtgctggtgctgaagaccatcagtatgagctaaaactggagctctttgacaaggttaatgtagaggagagcaaaattaatgtaggagtgcgaagcatattctgtgtagtgcagaaggcagaggatggatggtggaaaaggttactgcgtggagaaggcaagcctccacattatgtgaaagtagattgggataaatgggtggatgaggatgaagatgatggtaataatggtgaagtggacttgggagggatggatttctcgaaatttggggggatgggtgctgatgcaatgggagcgatgggtgcgatgggaggcatgggtgggatggatttctctaaatttggtgggatgggtgatgcaatggatgacattgatgagagtgacgatgaagagcaagaagtgtcaaagcctgttgaacaagatgcaggcgaggggtcgaccgagaaaaaagaggctgctccaagcacataatgttgttgcaatcaagacgctaccctagaatatgtgcatgaaaattctcgagtgaaattttctctatccttaccattaattggtagttttttaagtagagacgttcatgtgtctctcccgtgttggctagacttttagcacttattattttaccaccaaaaaaaatctcctttagaatattgtataattgagatattttcatgcttgaatggcggtatccggatttctacatttttatgtgttatgtatgttttgaacttgtttggatggattaatttggtattctct

SEQ ID NO: 2113 - DNA, 1364 bp, Glycine max
tgaattcccggggcggcccaagccgtccgaccggttgcaaaaagagccagaagggttcctttcaaaaattaaccatcaccccgaccatcaccggagcccattaagaatatcagtaagaagagcgtatgttctagaagattcatataaccagcttcgcatgagatcaactcaagatttgaagggaaggttgactgttcacttccaaggggaggagggtatcgatgctggtgggcttacaagggaatggtaccaactgttgtccagagttatttttgacaaaggagcactgctttttactacagtgggcaatgaatcaacatttcagccaaaccctaactctgtttaccaaacagaacatttatcttatttcaaatttgttggtagagtggttggaaaagcattatttgatggtcagctcttggatgtccattttactcggtcattctacaagcacatccttggggccaaagttacatatcatgatattgaagccattgatcctgactatttcagaaatttgaaatggatgcttgagaatgatatcagtgatgttctggatcttacttttagcattgatgcagatgaggaaaagttgatcttgtatgagcggacagaggtgactgattatgagctgattcccgggggacggaatatcaaagttactgaggagaacaagcatcaatatgttgatttggttgccgagcatcggttgacaactgctattcgacctcaaataaattctttcttggaagggttcaatgaattaattcccagggagttaatatctatattcaatgacaaagagctggaattattgatcagtggacttcctgatattgatttggatgacttgagagcaaatacagaatattctggatatagtggtgcatcgccagttatccaatggttttgggaggttgttcaaggtttcagcaaagaagacaaagctcgactgttgcaatttgtgacaggcacatccaaggtgcctttggaaggctttagcgctcttcaaggaatttcaggctcccagaagtttcagatacacaaagcatatggaagtcctgatcacttgccttctgctcatacttgcttcaatcaattagatttgccggagtatccatctaaacaccatttagaagagaggttactgctggcaattcacgaagcaagtgagggttttggatttggttgagaagcttcagtggggaggggacaaaatacaatgtattacatttttaggttaggacctattttaaaatagaattgagtggtacagggggtcgaagttttcaagttaatatcatgttcatatgttgtacagtcgtatatttgcaatgggaaatgccattggcagtttttcaatc

SEQ ID NO: 2114 - DNA, 934 bp, Glycine max
gcagttcaaaagtggacttcatctgcaatgaatgagttacgtgtctttagtgaagcaatgaaagctctgcttagtacctcttctactgatggagctgcaattttgagagtcttgcaagccttgagttcccttgtcaccttactgacggagaaagagaatgacagaggtactcctgctctttctgaggtttgggaaatcaattcagcattagagcccttgtggcatgagcttagctgttgcataagcaagatagaatcctactcagagtctgcatctgagatttcgacatcttctagtacctttgtgtctaaaccatctggtgtaatgcctccacttcctgctggctctcaaaatatcttaccatacattgaatctttctttgtggtttgtgagaaattgcatcctgctcagccaggtgatagtcatgactcaagtatccctgttatttctgatgttgagtatgccaccacatctgcaactccccagaaagcatctggaactgctgtgaaagtagatgagaaacatatgccttttgtccggttctcagagaagcataggaagctactaaatgcattcttaaggcaaaaccctggtttgcttgagaaatctttctcactcatgctaaaggttccaagatttattgattttgataacaagcgtgcccacttccgatcaaaaattaagcatcagcatgaccatcaccatagtcccttgagaatatcagtaagaagggcatatgttctagaagattcttacaaccagcttcgcatgagatcaactcaagatttgaagggaaggttgactgtccacttccaaggggaggagggtattgatgcaagtgggcttacaagggaatggtatcaattattgtccagagttatttttgataaaggagcactgctttttactacagtgggcaatgaatcaacatttc

SEQ ID NO: 2115 - DNA, 459 bp, Glycine max
ggacagaaaaccatgctaaaactgcagagagtggcgaaatggcgactaggagcaaaagagaagcagagggtgttggtgatggtgatggtaataagatcgtgtggaacgaagcgcagcagaggttcgagacgcaggacaaggaggcgttcgtagagtacgccctgaaagaaaaagggaaggtcatggtcatggatttgatccacactttcgtgcccccttccaagagaggccttggcttggcttcccacctctgcgtcgccgcctttcagcacgcccaatctcactcgctatccatcatccccacctgctcctatgtctctgacacatttcttccccggaacccgtcttggaattctgttgtgtacacagagggcggcaaatctaatatctgagctcaccaagctcctatctgtgcttcttctgagtaaccatttgaacggtaatacctggtcacatatt

SEQ ID NO: 2116 - DNA, 1724 bp, Glycine max
  unsure (1)..(1724): unsure at all n locations
ccttttcctcgtttccacaaccctcccgaattcttgagacgcttcccgaatcctttcacacacacgttgctgaatctatatatatctaaatcccttcacttcccattcctaaatcctcttacaaaaaccgtacaacaaggttgtttttgttttgttttgtgttgtctctctctaatcattccaatggccaaagaaggacccaactgggacgggttgctcaaatggagcattgctcattccgatgggactcgccccactcgcaatttaagtgaggaggatcggagatggtttatggaagcgatgcaagcacagaccattgatgttgtaaaacgtatgaaagagatcacacttgtgatgcaaactccagaacaagtcttgaaagaccaaggagttacccctgcagacattgaagatatgttggaagagttgcaagagcatgttgagtcgattgacatggccaatgatctccactcaattggtggtttggttcctcttcttggttacctaaagaattctcatgccaatattcgagcaatggctgctgatgttgtgaccacaatagtccagaataatcctcgaagtcagcaacttgttatggaagcaaatggctttgaacctcttatttctaattttagttcggatcctgacgtgactgttagaactaaagcactgggtgcaatatcttcactaattcggcacaacaaacaaggcattactgtatttcgtttggcaaatgggtatgctgctttgaaagatgcactagcctctgaaaatgtgagatttcaaaggaaagctctcaacttgacccattacctgttgcatgagaataattcagactgcaacatcgtgaacgagcttgggtttcctcgactgttgatgcaccttgcctcaagtgaagattcagatgtcagagaagctgcccttcggggccttcttgagcttgctcgcaatgcgcaagatggcaaggatggcaatgaggaagacagtgagaagatgaagcaacttcttcaagaacgaataaacaatatcagtttaatgtcagctgaggaccttggtgtagtcagggaggagaggcaacttgtggactccctgtggagcacttgcttcaacgagccatcttctcttcgagagaaaggtcttcttgtgcttccaggtgaagatgcaccccctccagatgttgctagcaaattttttgagcctcctcttagatcttcgactgcgaatccatcttccaagaaagactcaaacaatgaaaagaaagagatccctttgcttttagggtcagggccttctcttgcagacactaacaaccaaggttcaaatagagaaaatgctaatagctgaaagcttggatgctttctgctctgttttttttttgccgtgctttctttctatcttatcatacaagtaatttcatataggctctttttttcccctttcttttctcaccttagattggtcttccattgtatttcaagaatgatctcatggtatgtgacactataactagccttccattgcagcggtgaatgccttcaattttttgcacttgatatttttaaatccttgtttagattgttacagtcccactcttacatgtataaaaggatctacttgtccccattatccttcaattttgggtttgggcagtgtgtttctagtgaataaaaagagagaatgatagttatgatagttatgatagtaannnnnnnnnnnnnnnnnnn

SEQ ID NO: 2117 - DNA, 432 bp, Glycine max
cataattccggggtcttttcatgtatgcatttgctttagcgtctgtggtattgataataggctggttaatggatttgtgttttctatgtttcaacacctatatgtctcacctattcccagatctccactcaattggtggtttggttcctcttcttggttacctaaagaattctcatgccaatattcgagcaatggctgctgatgttgtgaccacaatagtccagaataatcctcgaagtcagcaacttgttatggaagcaaatggctttgaacctcttatttctaattttagttcggatcctgacgtgactgttagaactaaagcactgggtgcaatatcttcactaattcggcacaacagaccaggcattactgcatttcgtttggcacatgggtatgcagctttgaaagatgctctagcctctgaaaatg

SEQ ID NO: 2118 - DNA, 425 bp, Glycine max
aatattttgagcctcctcttatatcttcgactgcaaatccatcttcaaagaaagaccgacccagaaaagaatgagatccctttgcttttagggtcaggaccttctcctacatacactaacaaccaaggttcaaataaaggagatgctagttcatagacagatgctaatatatcgaaagtttaaatgctttatgttctgttttttataccatgctttctttctatcttatcatacaatagtaatttctttctttcacttataggctatgtttttaaccctttcttctggcctcagattggttttccctagtatttctaggatgatgatctcatggtatgttacactgtgacactataactagccctccattgtagtttgttaatgtatgattgcagcggtgaatgccttcatttttttgtgccttc

SEQ ID NO: 2119 - DNA, 578 bp, Glycine max
ggctgcagatttgtgcgttaagaaagaaagaaaaaaaaaaaaaagtcatggcagcgagtgacggttgcagcagcttcttaacattgtcgtgtgcaggtgcagtgcaaaatcaacatgtatcacaccctacaacgtttttgggagttcctaacaacaatcagagaaaaaggaaaacaccgcacaggttagttgtggttgcggtgactcaaggctctgctgaatcaagcaagtccgacgaaaaaatcccttcgtgggccaaaccggactccgatgaacctccgccgtgggcccgggacgagcccaacaacaacagttcgcaacaagaaggatttgagatcccgttctatgcttatttgtttgcctctgctatcactgctattgccgctataggctccattttcgaatatgtgaatcaaaagcctgttttcggagtattaagctctgacagcgtgttttatgctcccttgcttggtttttttgtcttcaccggcattccctcatcggcttttctgtggttcaagtccgttcaagctgctaacaaggaagcggaggaacaagacaagaaggatggttattta

SEQ ID NO: 2120 - DNA, 460 bp, Glycine max
  unsure (1)..(460): unsure at all n locations
cgtaaaactcggaatantcggctcgagctgcgcacctcanttgcaaacaacaacagcctgccacaaaaaatcttcaacggcaaaaacaaatctctcgcgatggacgattcattgaccgctgccttcagtacccgcggcgaaagcaacgctttcgcctcgcaccaacaagtggaggataatgaaaatgctaacaacattagcagcagcagcggcaacaaatacaataccggttctgggtttctgcccgcgtctttggacactgacaacattgcggagacattcaagactttctttcctgtggaagcgacctcgacgtcgtttcagagttacccgccggcgccaccggatttagggcaccaagatctgcggctctcgttgcagtcctttcacgaccctattatgcttcaccaccagcctcatagccaccaccaaccggttccggctggtcagagcacctgca

SEQ ID NO: 2121 - DNA, 372 bp, Glycine max
agggaccagctcgcggagctcccgccatggaaccccactgccacctcaatgcaaccacgacagctgccacaagaaatcgtccactgcgagaacaaatctctcgcgatggacgattcaatgaccgctgccttcagtagccgcggcgaaagcaacgctttcgcctcccaccaacaagtggaggataatgaaaatgctaacaacattagcagcagcagcggcaacaaatacaataccggttctgggtttctgcccgcgtctttggacactgacaacattgcggagacaatcaagactttctttcctgctggaagcgacctcgacgtcgtttcagagttacccgccggcgccaccggatttaaggcaccaagatct

SEQ ID NO: 2122 - DNA, 1834 bp, Glycine max
gaatcgcgcaatgtcttatgtcattcacatgtactttctcctctctttccgttccctctttttttcctttcttgtcaaccaatatttaattcctttttcttcaagcatttcaattgcaatttgcaaactttaaaccaaaacccacataagaaaatataaaaaagagcattacttttttaatttctccttcttttatgcaaccagaagtgtagtgtgttgtgtatgactaggtttctgccagccctggggataatgggtaattgtctagattcttcagctaaagtagaagcagctcacagttccagaaccccttctggaatttcaaaaactagtccttcatctgttccttccaacttatctattctgtcatatagtgaagcaagtgatttctcaaatcttccaacaccaaggtctgagggcgaaatcttgtcttccccaaatcttaaggcctttaccttcaatgagctaaagaatgccaccaggaactttcgcccggacagtcttcttggtgaagggggatttggttatgtttacaaggggtggattgatgaacacacatttacagcttcaaaacctggatcaggaatggttgttgctgttaagaaactcaaacctgaagggttacaaggtcataaggagtggttgactgaagtggactaccttggacaactgcaccatcagaatctggtaaaattgattggatactgcgtggagggagagaaccggcttgttggtatatgagtttatgtccaaagggagcttagagaaccatctatttagaagaggaccacaaccactctcttggtcggtgaggatgaaagtggctattggtgctgccagaggactctcctttcttcataatgccaaatcacaagtcatataccgtgattttaaagcttctaacatcctgctggatgctgagtttaattcgaaactctctgactttggtttagctaaggcgggtcctactggtgatagaactcatgtgtctactcaagtcatgggtactcaaggatatgcagcacctgaatatgttgcaactggtcggttgacggccaaaagtgatgtctacagctttggagttgtgttgcttgaacttctatcaggaagacgcgcagttgataaaaccataaccggaatggagcagaatctggtggactgggcaaaaccatatttgagcgataaacgaagactgttccggattatggataccaagttggagggccagtacccacaaaagggggccttcacggctgccacacttgctctacaatgccttaacagtgaggccaaggcaaggcctccaatgacagaggttttagcaactctggaacagatagaggcccccaagacagcaggcagaaactcccattcagaacaccatagacttcagactcctgtgagaaagtctcctgcgcgaaaccggtcaccgttaaatctaactcctactgcgtctcctcctcccagctcaccggcaatcgcctcgtgtgcactaaagctgtgaacatagaacatctgtatatgtaaattccttaaatttatcaggttgtgttttggacagcatgcgttgaggcatgtgtacttaaatgcaattttgggtcatgcacggtagagtagttaacaccatttatccaaatgctatgcaagttattgcagagcagtattctgcatatatatctcctgttaccaatgtcttgttgataataacaacctgacacattgcttcccttctattatgggtgtccctttatttggttttggcctaaaacaattccaaaacatggagagagagagagggttgttgtatatacttaacatcttgtgtgcaaaattt

SEQ ID NO: 2123 - DNA, 955 bp, Glycine max
cgggccgaccgacgcgtgcgcccacgcgttcgcccactcgtccgctcactcttgcgaccggctattggtgtatgagtctaggcctagggggagcttatagatccatctatttagaagaggacctcaaccactctcttggtcggtgaggatgaaagtggccattggtgctgccagaggactctccttccttcataatgccaaatcacaagtcatataccgtgattttaaagcttccaacatcctgctggacgctgagttcaatgcgaagctctctgattttggcttagcaaaggctggccctacgggtgatagaactcatgtctctactcaagtcatgggaactcaaggatatgcagcacctgaatatgttgcaacaggtcggctgacggctaaaagtgatgtatacagctttggggttgtgttgcttgaactattgtccggtagacgagccgttgacagatcaaaagccggtgtagagcagaatctagtagaatgggcaaaaccatatttgggtgacaaaagaagactatttcggatcatggacaccaaattgggaggccaatacccacaaaaaggagcctatatggcggccactcttgctctaaaatgccttaatcgtgaagccaagggaaggcctccgattacagaggttttacaaactcttgaacagattgcagcctcaaaaactgcaggaagaaactcccaattagaacaaaagagagtccatgctcctgtcagaaagtctagtgtgcaaaaggggtcccatttgaatcatactcctactgcattcccataatctgcttgcgtactctgaattttgaacatctgtatatacattccttatttttataaggttggttttgacaaggagaaatgctagtaacacactattttgaacacttcctctcttgtttgttgaaattaaatgaagatgacacatttttgttggtcctaa

SEQ ID NO: 2124 - DNA, 660 bp, Glycine max
ctccatgttatgttgcaaccccgcattaaaccctcaccttctttctttcttccttctcatcacaaagacacaagctttcttcctcaactaccctacccaacttcttattccactcatcacttcctttgaaattgaaaccaccaaaattgtttttttttttctccttcactcgtagtaatattttgaaaagtgttgcgctttgggttgagaattgagagttgtggcagggtctaatgggtaactgcctagattcttctgccaaagttgatgcagctcagagctccagatccacttctgcatcaggaatctcaaaaactactccttccagtttatctattccatcatacagtgaaaaaagcaatgcctcaagtcttcccacaccaaggtccgagggtgaaatcttgtcttctcccaatcttaagcccttcacattcaatgagctgaagaatgccaccagaaattttcgccccgatagtcttctcggtgaagggggatttggatatgtctacaagggatggattgatgaacacacatttacagcttcaaaacctggatcaggaatggttgttgctgtaaagaggctgacacctgaaggttttcaaggtcacaaggagtggttgactgacgttaactaccttggacaactgtaccatgctaatc

SEQ ID NO: 2125 - DNA, 472 bp, Glycine max
caagcagatactgggaatgcagtaggagtatgattcaaatgggacccttttagcactctgcaatctgttcaagggtttctaaaacctctgtcattggaggccttgccttagcttcgctaataagactatttcagattatggacaccaagttgggtggccaatacccacaaaatggagcctacatggctgccactcctgctctaaaatgccttaatagcgaagctaaggcaaggcctccaatgacagacgttttagaaacccttgaacagattgcagagtgctaaaagggtcccatttgaatcatacccctactgcattcccataatctgcttgcgtactctaaattttgaacatctgtaaatatattccttatttttataaggttggtttttacaatgagaaatgctacgaacacactattttgaacacttcctctcttgttagttgaaatttattgaagatgacaaaattt

SEQ ID NO: 2126 - DNA, 423 bp, Glycine max
aaaaaagttcatgaatcctctgccgcgacacgatcgagtagggcgcaaccgtgaaatcgatccatcgagctcactcagccgccactgtcagtgttttcagcgcccgtgttttgttccctctgtgctatgccccaatcccctaatctatctatctatctatccatcttttcttcattccccttcttctcttctgaattcgaatttcgaaaatgttgggtggtctatacggagaccttcctccaccttcttccgccgaggaagacaacaagcccacccccaacgtctggtcctccagcaccaagatggctcccgccacgctccgcaagcccgcctccctcttcgcgcccccccaaaccctcctacgggcccaccccaagcccaagcccaccgccaagcccgtcctctccttcacaaccccgccct

SEQ ID NO: 2127 - DNA, 1590 bp, Glycine max
aagacaacgataaatcctgcggcgggacagtaccaactgacgctcatcattccctctctcttcggatcttaccgccgacgcgcagggcggtgccaccgtcacttcgatctccctctcatactgagaaggtaaagtcgttaaccatggccgtagcctctggtataaagagttgtgaaactttggctctttctggaggttgaagaagcttgtgttatcaggtgacatctccgatgtagcagcagttccgctgagtgaaatctgtgttgtagagtaagctgttgtcatgtgagaacttttaagagttttttcgattttacagaatttaatatgattgtttatggaaaaaactcttctctgcaacatcaagtgctggcattcgacattggtgtttgcttgacagagaaactctctgccactgccaccttcgctgctggcattcaagtttgcctcttctctttttccttacatgtatcctgatttggacacctgtttacatgatgagatggcggttacaacctttaaagtacctcctagtgagtgttgtgggaataagaaaatggaaagaaagccttctgggaggagacgtgtatttgttcagttagattgtgaggatcaggatttggatttcactacaaacatagaagagaaactgactgtaatgccaccatttcaagttggagcaagaaatggaaacattagaaacacactttctagactagaggaaagcatgatggaggacgaggctgagagtgaaggggagttgccctttggtggtgacgaatacaatggtcctgtaggaaatggggtgcctaatgtttcaaggctttctgtgtctctgaaaaacacgagaactggtgagaaaagtaggcagcagatgggtgtaaagcaaaagagtggctttttggctgggacatcatctggaaacacaactgtgaatgagttacctgcaagctcatgtttcgtgaagctaacagatatggatgaagagaggtggaatcagtttcttgagaatttccagaggttggtgatcccagcttttgttaattgcaaacgaggaaatgtgagcaagaagcagagacagagacttggaacttcatgccagttttagggggaccataaatgaaatgtgaagtgaactaataaatattagagacttgtacaatgtgtcatatggtacacatggaactatatatagataaataaataaataaatacagaggctttattttcgcaacactgaggactgaggaggatggattatccaggagtaaaagcaaatgaagatttccaggtaggcaatgtcttgcatcagcacaatagaggggagagcttatccactatagtagatgtgaagactatgtcctgatttgctcctttttatttttcccgctttatgttcactggttagtatgctgaataattcagggtagatgccaaaataaatttgtatatacctatgttttcctggagatataaaggatatttgtagtgtggtttgtttgtcgcctttacatctcttctgattttatcttttggtgaatttttattcaatccttgtataaaaagcttgaattcttggcctcgagggcc

SEQ ID NO: 2128 - DNA, 483 bp, Glycine max
  unsure (1)..(483): unsure at all n locations
gattgcatttaccggactatctcgttatcaagagaacggtaaattttgcggcgggacagtgccaactgactcacatcattccctctctctacagatctcacagccgacgctcacggtggtgccaccgttgcactctccgctggctctctattcgatctccctctcaccgatactaagaaggtaaagtcgttaacgatggacgaagtctctggtagtaagagttgtggcactttggctctttctggaggttgatgaaggctatagttggatgaacacaactgaaatgaatggaaaccagcaccgttacaatcctttgctaatcagtagtgaaattgaacagtggaaggcacgtgaagatgaaggtggacaaacagtggacattatgcgtattattttaacttatgggcttgatccaattaatggntcagtggagaacaaaccatgtctaacgaanagggtagaagaaatctggagaagactgct

SEQ ID NO: 2129 - DNA, 701 bp, Glycine max
gattttggatgtacgaattttaaacacagacagacatgcaggaaatcttctggtcaggaagcttgaagggtttggaaggtttgaccaagtggagctttttcccattgatcatggtctttgtctccctgaaactttggaagatccttattttgaatggatctattggcctcaagcatcaattcctttctcagatgatgagctcgactatatatatcacctagacccatttcgtgattcagaaatgcttagaatggagcttcccatgattcgagaagcatgcttgcgggttttggttctctgtactatcttcctcaaggaagcagcagcttttggtctttgtctagcagagattggtgacatgatgagtagggaatttcagggtctccatgaagagccaagtgagcttgagcttatctgtattgaagcaaagaaactgttagatcaggaagaattattttcctttgaagctgaggtaggagacaaagatgtgactcagtcagtttcagctagattgtgaggatcgggatttggatttcactacaaacatagaagagaaactgactgtaatgccaccatttcaagttggagctacaaatggaatcattagaaacacactttctagactagaggaaagtgtgatggaggacgaggctgagagtgaaggggagttgccctttggtggtgacgaatacaatggtcct

SEQ ID NO: 2130 - DNA, 409 bp, Glycine max
gaccgtactatctcgttatcaagaaaacgataaatcctgcggcgggacagtaccaactgacgcacatcattccctctctcttcggatctcacagccgccgctcacggcggtgccgccgttgcactcgccgctgctctctcttcgatctccccctcgccgatactgagaaggtaaagtccttaacgatggtcgaagtctctggtagtaagacttgtggcactttggctctttctggaggttgatgaaggtgacatctccgatgtagcggtttcgttgagtgaaatctgtgttgaagagtaagctgctgtcatgtgagaactttctaagagtctttttgattttacagaatttactatgattgtttatggaaaaaactcttctctgcaacatcaagtgctggcattcgaca

SEQ ID NO: 2131 - DNA, 914 bp, Glycine max
acgcacgcgtacgtaaactcgggatcaaggagaaaacaagaagtagtgagaagaagggagagaatggaggaaaaggcaaaagctgagcagaagaagataggtatgaccgagacttggttgaagaagcaccgtcttctttacaatggagccactagacaccctcttattattagcattcgcgatggcaccatcaacactgcttccttcaaaacatggctcgcacaggattacttgttcgttcgggcgtttgtcccatttgtggctagtgtgctgataaaagcgtggaaggaatcagattgcagtggtgacatggaagtcatattggggggcatggcttctctggaggatgagatttcatggttcaagacagaagccaacaagtggggtatttcactttctgacgttgttcctcagcaggctaacaaaaactattgtgggttgctggaaagtttaatgagtccagacgcggaatatactgtggctattacagcattttgggctattgaaacggtgtatcaagagagctttgcccactgcattgaagaaggctccaaaaccccaccagaactgaaggagacttgtgtaagatggggcaatgaggcctttggtaagtattgccaatctctgcagaacattgccaatagatgcttgcaaaaggcttctgatgaagaactcaaaaaggctgaagttatgttgctaagtgtccttgagcatgaagttgaattctggaacatgagccgtggaaatgtctgatatggttcaagaagccttcaatgtatgaatataataaaatcatctaagcctagggaaatactgcatatgttattgttcggttggatcattcacagcgtaatgtactgcgtgaaatgtttactttcctagaaaaaatagagtaaattagaactgagaaaatt

SEQ ID NO: 2132 - DNA, 452 bp, Glycine max
  unsure (1)..(452): unsure at all n locations
aaaaaaccgaccggcggcgcgtccggaaagcaataagtantgataaaaagtttgagtatggaggaaaaggcaaaagctgagcgcgcgcgttgatgtttataaccganactcccctccccaaacaccntcttctttacaatgganccactatacaccctcttattattagcattcgcgatggcaccatcaacactgcttccttcaaaacatggctcgcacaggattacttgttcgttcgggcgtttgtcccatttgtggctagtgtgctgataaaagcgtggaaggaatcagattgcagtggtgacatggaagtcatattggggggcatggcttctctggaggatgagatttcatggttcaagacagaagccaacaagtggggtatttcactttctgacgttgttcctcagcaagctaacaaaaactattgtgggttgctggaaaagttaatg

SEQ ID NO: 2133 - DNA, 513 bp, Glycine max
gaagaaagaaagcgagaaaacaagaagtagtgagaagaagggagagaatggaggaaaaggcaaaagctgagcagaagaagataggtatgaccgagacttggttgaagaagcaccgtcttctttacaatggagccactagacaccctcttattattagcattcgcgatggcaccatcaacactgcttccttcaaaacatggctcgttagtaattcttcaccctttttttttaagttattagtttaacttccttttcatatttagtacaattttgggtagccatgtcaagattcaacaaaaatgtttgcaatttaactgtgactacaattctttcatacttgttatgcaggcacaggattacttgttcgttcgggcgtttgtcccatttgtggctagtgtgctgataaaagcgtggaaggaatcagattgcagtggtgacatggaagtcatattggggggcatggcttctctggaggatgagatttcatggttcaagacagaagccaacaagtgg

SEQ ID NO: 2134 - DNA, 359 bp, Glycine max
caaagtttggcagagatagtggtggtggttgaagagaaggaccaaaaccaaaaccaaaagcaagatagtcatagtagtagtactttttttgggggtaacaattcattgtttgattgtatttacttgggaaagatcctacaagtgctagaactaccacttggcttaccaagaaggcttacaatcccagtggtgagtgaggagaaatggtcaaagccatatgcagtaatttctgtcacactggcaccggttttgttggcaattcttttcaacacacaaagtgaaaacgtgggttcaaggagtggtcttgtcacatacatagtagctgcattgattgggatagttttgggcaacattgcatg

SEQ ID NO: 2135 - DNA, 757 bp, Glycine max
tcggcgacacttggccgacgcgtgggtctgtgtcgtgtattgttattcccaatttgaaaatcgtgacagaagaaaaagaacgaagaaaaggggaaagggtttcgatttcggaagaggaataataaggagagcttctgaaagagagggttcagtgttcgaaaatgaagacgacgaagggcggcaaggtcatgaaccctaccgatgcttaccgaaaggagattcggaagaaagaattgaaaaggaataagaaagaaagaaagaaggtgagggaggtggggattttgaagaaagatcctgatcaattgaagaagcagattgacaacttggaaatgatgaaggctgatggtgctttggataaagcaagaaagcacatgatgagacagctacgacatacacttaatcttgacataaagaagaggagggaatatgaagacaaaatgcgggagaagggtgagaccccagttatgttcagtcatttggggcttcctcgaaggagaacaactgcagaagaagaagaaagggttaagcacccaaagcctgaggactctgtttattaccatcctacattaaaccctacaggggctccaccaccagggaaacctcctatgtttaaatcatctataggacccagaattcctttgtctggtgcttcatcaagtgctggtgcatcatcctcaggaacagagttggaggatgatgttttaactgtacctccacctcccccgccgccaacactgcctgatggtagcagtgcgag

SEQ ID NO: 2136 - DNA, 796 bp, Glycine max
ggaggaacaatttggattgactctcctgtgctatcttcgaatatgcggaatgaccaggatcgagtaagggagttagaaagtgcagttgtgaaagaaactgaagataaaatgagcgaccgaaaaaggacagttgtggagagtacaacggatagtacctatgattctgctgttattacaggacatgatcgtgcagatgaaaaattgtatgaagatgatgatgatgttggaagattcttgtacttggaaggagtggaatatatcatgtggtgtacatatgatgtgcacttctatgcctcatttgcccttcttgagctctttcctaggattgaattaaatatacagcgtgactttgctagagctgtcttgtgtgaagatggaagaaaagtaaagtttctggcagagggaaactggggcattcgcaaggtttatggagcagtgccacatgatttggggacacatgatccatggcatgaaatgaatgcctataacatccatgatactagcaagtggaaggacctgaacccaaaatttgttcttcaggtgtatcgagattttgctaccacaggtgatttggaatttggagtggatgtgtggcctgctgtccgtgctgcaatggagtacatggaacaatttgatagagatggtgatggtcttattgagaatgatgggttccctgatcaaacatacgatacatggacagtccatggtgtgagcacttactgtggttgtctttggcttgctgctctacaagctgtagctgtaaatggcccttgaactaggtgacagagaatttgca

SEQ ID NO: 2137 - DNA, 571 bp, Glycine max
ctcgagccgctcgagccgctcgagccgattcggctcgagctcaagcctttctctctttctaacaagttacaaataaaagttcccctttttctccggatcaatgaacgatcatctggtgctgttcgtggaccggctggtgcggcccgtgccggtggtccagccgctggcccaacagccccccgagcccgcgacgcccgtcgatgaggccgcggtggcggggccctccgggtcgtctccggcggcggaggacgacggtgacgacggcggggaggacgcgccgctgctgcagctggcggagtgtcgcatttgccaagaggaggacagcgtcagcggtttggagaccccctgctcctgcagcggtagtcttaagtatgctcatagaaagtgcgttcagcgttggtgcaatgagaaaggagacataacttgtgagatatgtcacaagtcctatgaacctggttatactgccccaccacctcgtcctcagcctgaagaaactacccttgatataggtggaggctggacaatctctggcacgccattggacttgcgtgatccccgactcttagcaatt

SEQ ID NO: 2138 - DNA, 1000 bp, Glycine max
cgagaataggctacccaatctatccgagtaacttctaaatttaacggatcaaaataaaataggattcttaatctttatgacaaaattattttacctctcagagtactttttcacctcgagagtaaaaatcaagcgaaagacgtggtttcaaattggggaaaaggaagaaagggcaagagagtcgagaaacggcgcactccgtctgttcctcaccgtcaccggcgcgcgcaccctctgttccagcgactcctaattaagttgggaaataaaaaagacttcaaatttcccagatggctgcagcctttgcttccagatgctctcgtgtgggccgttctctgtctggtggattaagcaacagttcccctggtttatttacctcatcacatggcatgacatgcaacaatttgttttctcagcaacaacgtaccttcatacagatgaggactgttctcaaggttgtcgataactcaggtgctaaaaaggtgatgtgcatacaggcattgaaagggaagaaaggggcaagattaggtgacacaataatagcatctgtgaaggaagcacatcctaatggaaaagtgaagaaaggaaaggttgtatatggggtagtggtgcgtgcggcaatgcaaaaggggcgttgtgatggcagtgaagtcaagtttgatgataatgctgtggtgcttgttgacaagcaaggccaacctattggaaccagagtttttggaccagtgcctcatgagctaaggcaaaagaagcatgtcaagattcttaccttggcagggcacattgcataaatgagaaaaagggctgtccttgagttttgttatgaattcaaatgtcacatctaccatttttatatttggatattttgatgtgatgtgcaagtttgagttctttatcaatttatgaggagtaaaacaggtgtagaaggcttctacttaaataactagtatatgatttggtttcttgcctaaaaaataggaaaaaaaaaaatataagacat

SEQ ID NO: 2139 - DNA, 406 bp, Glycine max
ggggaaaagaaaggccaagagagtcgagaaacggcactctcaccggcgcgcgcaccctctactctgatccagcgactcctaattaagttggtaataatcagccacacttcaagcaggaacataaaagacttcaaatttccaagatggctgcaatctttgcttccagatgctctcgtgtgggccgttctctgttcggtggattaagcaacagttcccctggtttatttaccacattacatgagatgacatgcaaaaatatgttttctcagcaacaacgtaccttcatacagatgaggactgttctcaaggttgtggataactcgggggctaaaaaggtgatgtgcatacaggcattgaaagggaagaaaggggcaagattaggtgacacaataatagcatctgtgaa

SEQ ID NO: 2140 - DNA, 274 bp, Glycine max
cgggaaaagaaaggccaagagagtcgagaaacggcactctcatcgtcgcgcgcaccctctactctgatccagcgactcctaattaagttgggaacataaaagacttcaaatttccaagatggctgcaatctttgcttccagatgctctcgtgtgagttctatggtaatggagccctgaatcttatttttgcggggaggggggtggagctggattgttgaatatgatgcagccactaatttggtcgcactggtacaattggcagtaaaacagttt

SEQ ID NO: 2141 - DNA, 2027 bp, Glycine max
ttttcgtttacgcgtccgcaacaatattattcgacagagcacaaggcacagcacagcgcagcgccgcctcaacatctcaactttcccttcgatctcattctcaggtgttgttgaagcttcctgtgttggcttggtatccctgcaagttctgctgtagcagattccaaggtgaaggtgtcacgttaaagtttctttcatgtttgaacaggctactatccatttgggagcaactgagctgcttggagagtatttttcttcctctaggaaaaattacagaccctcaccacagagacttagttgtatgaacggttggccaccttccattatccttgaaggagattgttcaaggatacagactacctttgaggttgaaattgcggctgcatataatttgaattccagcatttgctgcctctgaatatctctggaactttgtaagtcaacaaacatggctttacagaacattggtgctgcaaacagtgatgatgccttctacaggtataagatgcctaggatgattaccaaaattgagggcagaggtaatggcatcaaaactaatgttgtcaatatggttgacattgcaaaggcattggcaaggcctgcgtcttacacgaccaagtattttggttgtgaacttggggcccagtcaaaatttgatgagaagaccggcacttctcacgtcaatggagcacatgatactgctaagcttgctggccttcttgagaacttcattaagaaatatgtccagtgttatggttgtggaaatcctgaaactgagatcataatcactaagaaccaaatgatccagctgaaatgcgctgcttgtggttttgtgtctgatgttgatatgagagacaagctgactaccttcatcattaagaaccctccagaagttaagaaaggatccaaagacaagaaggccatgaggagagctgagaaggagagactgaaggaaggtgaattagctgatgaggaacagaagaaagtgaagaaagaggttaagaagaaaggctcttcatcttctaaggatggcactgctaaatcaacctcttctaagaaaaaagcaagtggctctgatgaagaccgcacttcacctactcacagtcaaattgacgagaaagaggaggctccagatgaagatgatgacgacgacgtgcaatggctgacagatacatcacttgatgctgctcgtcaacgtatccaagaacagttaagtgctgtgacagctgatatggttatgctttctacagatgaaccagagaagaagaaaaaagcagcaagtaacggaaatggcggttctcagaatggtaactcaatgcactatgggaccctggttggggaagtgaaagctaatttgaagaaaggtattggagcgaatgaattgctgtcccatctttcagcacatcctgcacctgctcaagaaaagatgagtgctctggttgaagctctattcgagggaactgagaaaggttttgctaaagaagctgataagaagaagaactactttgctgctgctgttgccgaagagggatcccagctgttattgcttcatgctattgaagaattttcttgcaagtctacttccaatgctttgaaggaggttgccctggttctaaaggcactctacgatgctgatgtgttggaggaagagcacatagtgcagtggtatcaaaagggactgaagggcgataacaagaactctaagatttggaagaatgctcaacctttcattgattggcttcagagtgcagaatcagaaaccgaggaagaataatttttcctacattctccgttacttatgtttacttgattgtgtcatgttctttatttccaataaaggttattgtaggccccatgtgttgttgaactactatactgtgcgaatggtgcatgcttgctggaccagtatgtatgcctcagtgcgttttgtgatgtgcggttctaatgtaattttgtttttggttgttgatgattatgttttatattttaataaaacgtgtcttgataaaataaaaaaaaaaaggcga

SEQ ID NO: 2142 - DNA, 613 bp, Glycine max
gggagcgaacagaaaagaggacacagcgcagagccgcctcaacatctgaaacagactctatccctaatccctatcttcttctctgctctctccgcacgctttggctcctctgatctcaggtgttgttggcttggtatccgtgcaagttctgctgtagccgatttgaaggtgaaggtgtcaccttaaagtttctttcatgtttgatcaggctactatccatttgggagcaactgagctgcttggagagtatttttcttcttctagaaaaaattacagaccctcatcccagagagttagctgtatgcattgcgagacatatcagaaattcattcagttttctggttgcggttggccaccttccattatacttgagggagattcttcaagggcacaagctaccttagaggctgaaattgcggctgcgtataatttgaattctggcatttgctgcatctgaatatctctgaaactttgtaagtcaacatggctttacagaacattggtgctgcaaacagtgatgatgccttctacaggtataagatgcctaggatgattaccaaaattgagggcagaggtaacggcatcaaaactaatgttgtcaatatggttgata

SEQ ID NO: 2143 - DNA, 542 bp, Glycine max
cggacgcgtggggacagaagggggacagaacacaaggcacagcacagcgcagcgccgcctcaacatctcaactttcccttcgatctcattctcaggtgttgttgaagcttcctgtgttggcttggtatccctgcaagtgctgctgtagcagattccaaggtgaaaggttcacgttgaactttctttcatgtttgaacgggctattatccatttgggagcaattgagttgcttagagagtgtttttcttcttctagaaaaaagaacaggcccttgcctacaagacccacctgtatgcactgcctggaatacaccaacctttgttgttgttcttgacaaccttcgctacatttgcttcccaagccaaaggcgtctgttgtgatttttctgtctttggaacttttcttgttcaagtcgtcatcatggccttgcagaacattggtgctggaaatagtgatgatgccttctatcggtataagatgcctaaaatgattaccaagatcgagggtagaggaaatggcatcaaaacaaatattgtcaacat

SEQ ID NO: 2144 - DNA, 492 bp, Glycine max
gcaaggttttcttcttcttcttcttcctctccttcacgccttttttcaattgcttcttgcaggattcctgcaagtactgctgtagcagattccaaggtgaaaggttcacgttgaactttctttcatgtttgaacgggctattatccatttgggagcaattgagttgcttggagagtgtttttcttcttctagaaaaaagaacaggcccttgcctacaagacccacctgtatgcactgccaaccgtacccggaataccccaacttttgttgttgttcttgacagccttcgctaattgcgtgattgcatttgctgcccaaggcgtctgttgtgattgtttttctctttggaacttttttttgtttaagtcatcatggccttgcagaacattggtgctggaaatagtgatgatgccttctatcggtataagatgcctaaaatgattaccaagattgagggtagagggaatggcatcaaaacaaatattgtcaaca

SEQ ID NO: 2145 - DNA, 372 bp, Glycine max
tagaatgcacatcgcagtctcatctcttctgctctctcattacgctctttcctccgatctcaggtgttgtttaagcttcctgtgttggcttggtatccttgcaagttcttctgtagcagattccaaggtgaaggtgtcacgttaaagtttctttcatgtttgaacaggctactatccatttgggagcaactgagctgcttggattgtatttttcttcttctagaaaaaattacagaccctcaccacccagacttagttgtatgaacgttggcaccttccatatcttgaagagatgttcaggtacagctaccttgagttgaatgcggtgatatatttgattcagctttctgctctgatatcttggaattgtag

SEQ ID NO: 2146 - DNA, 379 bp, Glycine max
tggtatcaaaagggactgaagggtgataacaagaactctaggatttggaagaatgctcaccctttcattgattggcttcagaatgcagaatcagaaaccgaggaagaataatttgtcctacattctccgttacttatgtttgcttgcttgtgttatgtcctttatttccaattaagggtcttgttggccccatgtgttgttcaactactatacttgctaaaaacttggtgtgaggggtgcatggttgctggactagtatagcatgtacgcgtcagtgagttttgtgttgtgttgttctaatgtattttggtttttggttggtgatgatcccgtcccctgttttaataaaacgtgtcttgataatataatgctgtttttc

SEQ ID NO: 2147 - DNA, 1768 bp, Glycine max
ggactcaaaagctcaataaatgcacgttaccaagtgaacaaatcaaatctctctctcaatctagccttctttctctgcgattttttcttcaatttccaaatcacgaaactcaagaagatggagaaagcgatcaacagacagaagattttgcttcatcatctcaacccttcatcatccacccaccccaacgaatcatcctccctccatgcttcagcatgtgtggcgggggatagcgctgcttatcaaaggacatcgacattcggggacgatgttgtgatcgtggctgcttatcggactgctcattgcaaagctaaacgaggtggtttcaaagacactcttcctgatgatctactggctcctgttttgaaggctgtaattgagaaaaccaatgtgaacccaagtgaagttggggatattgttgtaggtagtgtattggctcctggagctcaaagagctagtgaatgccgaatggctgcattttatgctggttttcccgaaactgtgcctgttaggaccgttaataggcaatgttcatctgggctccaggctgtcgctgatgtagctgctgctataagggctgggttctatgacattggtattggtgccggtttggaatctatgaccactaatccaatgggatgggatggatcagtgaatcctaaggtaaaaatgtttgaacaagcacaaaactgccttcttcctatgggaattacctctgaaaatgttgcacagcgctttggggtttcaaggaaggaacaagaccaggctgcagttgagtctcacaggcgagctgctgcagctactgctgctggtaaatttaaagatgaaattgtcccagttaccaccaagattgtggacccaaaaactggtgaggagaaatctgtcaccatttctgttgatgatggaattcgacctggcacaacagtgtctgatctaggaaggctcaaacctgtgttcaagaaagacggaagcactactgctggtaattctagtcaggtgagtgatggtgctgcagctgttctgctgatgaaaagaagtgttgcgttgcaaaaggggctacccattcttggtgtattcaggactttcgcagcagttggtgttgatcctgccataatgggtgttggccctgctgctgcaattcctgttgctgttaaggctgcaggtctagagcttgatgatattgatctttttgaaataaatgaggcatttgcctcccagttcgtgtattgccgtaacaagctagggcttgatccagaaaagatcaatgttaatggaggtgcaatggcaattgggcatcctctgggttcaacaggtgctcgatgtgttgcaactctgttgcatgaaatgaagaaacgtggcagggactgtcgatttggagttatatctatgtgcataggtactggaatgggggcagctgctgtttttgagagtggtgattgtgctgatgagctatgcaatgcccggaaagtggatgaccttcttttatccaaggatgctcgcttgaattagttacttcatactctctatatttggtcatcaaataagaaatcacaataaaggctttttctatggtagtgataatgtcaaccactcctcaagcgtttaatcctttctactcatattagacttgcattaatttgtgatatattttgggcaattgtaaacatacacttaatttttcttctatatctttttcactccactttttctttctaaaaaacgaattaattgatcatgacaaagggcttctggccgaatcatgctactt

SEQ ID NO: 2148 - DNA, 530 bp, Glycine max
tcccctcggtgctgtgtttagcttccttcttcttcttcctctttcttcttcttctgctgcacccacaaatcaaaaccccccttttccaacccaatttttctccataaaccctagattcaacgaacccgccgaccaagctcgaacctcacgtcgcaaaaaaacacttcttttcccctctccgaggttgtcgtgtcggagcatagccatgttgttccctcgaggaaattgatgatttttcataacattggggtctcgttttgcttgtggggtcaccttgaaggagggaaaagtaacgagctttggggctgaatcgtggtgggtctgttgagtatgcatagatctggagctacgatggcgtggaacgtgttcaagttctgcactgctctgcgtggattgggctcgatcatgatcctgttggttcttggcgttgttggtccacttactatgctgttgttttgaccaattatggccctgctttgtatgctggaggacttgattctcttgttgccttggcagtgttgatcttgttt

SEQ ID NO: 2149 - DNA, 534 bp, Glycine max
agccctgctaggccagttagttccagtaagtcaggaggtcctcgtgctaacggaggagccaatggtactcctaaccgacggctatcgcttaatgctcataaaaatggaaacaggtccacatcaaaagatggaaaaagggataaccgactatctgctcccgtgaattatgtggccatatcaaaagaagatgctgcttcccatgtttctggtactgaacccctcccggcatcaccctaataacgagatcttcattttcaaccctataatttcatctttgtagcattgtcaaattactagttactgctttaggaattataatatgggagtgacaagtaattagagagatactgttctgagctgtgtatgttcaatttgccatttggaggttttctgaatacatatgccctataatatgaaaatatacagtcttcagtgctagtcttgcctttttccaaaccctagcttctattcgttggtttggttcactttccgtgtgtttgaaatggtgttacatactcttaaaaaaatgatgtt

SEQ ID NO: 2150 - DNA, 674 bp, Glycine max
agaaggggacaacacatcctaaataagcatcataattcatagtctcttggtccttccttccttcttctgctcaataagtgtgtgccactctaattaattaccacccccttctagacatagttcttctccctctgttctctattctctacactgtgaaaccaagatgaaggtagcatttgcagctgttctacttatatgccttgtcctcagctcctccttgttcgaggtgtcaatggctggttctgctttctgttcctccaagtgctcgaagaggtgttctagagctgggatgaaggacaggtgcatgaagttctgcgggatttgctgcagcaagtgcaactgtgtgccatctgggacttatgggaacaagcatgagtgcccttgctacagagacatgaagaactccaagggcaaggccaaatgcccttgattatttttttttttcaccatccacacatcaacttcaagcctttgattcagtcactaccgtgcatgtatatctccaccttagagatattccaccatggacccttgctagctgattatgtttactacctttattgttgtgtttgtgtattacataaagagaaaaatttggtcactttagttggatcggatatgcatgatacatgagagtgagaataaatcggggtcttctttgtcctcgtgtgcgg

SEQ ID NO: 2151 - DNA, 284 bp, Glycine max
cctcgagccgaatcggctcgagtgatattgacataacattaagacgtactattatgggttcgacctttggaatcagctttctgctcctccaagtgctcgaagaggtgttctagagctgggatgaaggacaggtgcatgaagttctgcgggatttgctgcagcaagtgcaactgtgtgccatctgggacttatgggaacaagcatgagtgcccttgctacagagacatgaagaactccaagggcaaggccaaatgcccttgattacttttttttttcaccatcca

SEQ ID NO: 2152 - DNA, 994 bp, Glycine max
aggaataggggcaaacagcaagtcctacccctaaccctaacttggaaccttcttccttcagattcatccgtaccgctagttatattactggattcggggcagattgctgttaccgtgtttctccgctttcatttataagatgcacttctggtcatcattttaccaacatgcaggttttgagttgttggtttttgaatataaatggacgccaaacggttcatccagctggttgaggagaagaagaagaagattatggagagaaaggaagctcctctgaaatgggagcagaagctggaagctgctgctgaaactaaagagaggaagctgaaggctacaaagcataaaaaaagatctggctctgatagtgacagtgataatgacagtgatgatgagagtagaaagacaagtaaaagatctcacaggaagcacagaaagcattctcactatgactctggtgaccatgagaaaaggaaagaaaaaagttccaaacggaaaacaaagaaatcatcctctgagactagtgattatagtagtgatgactctgagagtagctttgaggaggagagaagaagaaagaagaagcaaagcaagaagctgagagatcggggttcaagatcagattctagcaactatgattctactgctgatgaattaagcaagaggaaaagacagcacaaacggcaacgcccatcaaaatttagtggatcagactactctactgatgaaggagatagtctagttcagaaaagaaatcatggaatgcatagcaaacgccatcgacaatcagaatctagtgaatctgacttgtcaagtgatgacgctccccataagaaaggccacagaaagcaccataaacatcacaagcgatcacataatgtggagctgaggttgtctgattctgattatcgcagtcatggtcaaagaagcagatcaaagtcattggaagaaaattctgaagatgatagcaaaaaaagatcaatggataagaagtctg

SEQ ID NO: 2153 - DNA, 531 bp, Glycine max
ttggtcgcgtgggtttttggaaggaataggggcaaacagcaagtcctacccctaaccctaacttggaaccttcttccttcagattcatccgtaccgctagttatattactggattcggggcagattgctgttaccgtgtttctccgctttcatttataaggttttgagttgttggtttttgaatataaatggacgccaaacggttcatccagctggttgaggagaagaagaagaagattatggagagaaaggaagctcctctgaaatgggagcagaagctggaagctgctgctgaaactaaagagaggaagctgaaggctacaaagcataaaaaaagatctggctctgatagtgacagtgataatgacagtgatgatgagagtagaaagacaagtaaaagatctcacaggaagcacagaaagcattctcactatgactctggtgaccatgagaaaaggaaagaaaaaagttccaaacggaaaacaaagaaatcgtcctctgagactagtgattatgatgactctgagagta

SEQ ID NO: 2154 - DNA, 492 bp, Glycine max
cgacagaaggggagacttttctggaatgtttatgtgcaagcagcaagtcctatcccaaccctaaccctaacttcgaaccttcgtcctttctctcttcttccttcagattcatccgtaccgttagttactactggattcgcggttgattgctgctaccgggtttctcctctttcacgtataagatgcacttccggtcatcattttaccaacatgcagattttgagttggtttctgaatataaatggacgccaaacggttcatccagctggttgaggagaagaagaagaaaattatggagagaaaggaagctcctttgaaatgggagcagaagctggaagctgctgctgaagctaaagagaggaagctgaaggttgcaaagcatacaaaaagatctggctctgatagtgacagcgattatgacagtgatgatgagagtagaaagacaagtaaaagatctcacaggaagcacagaaagcattctcactacgactc

SEQ ID NO: 2155 - DNA, 561 bp, Glycine max
gatatttgcctggctttggtcctgttgttcctcaagaatgccgtgattgtgggaaaaaattcaatatggggggccctatatggtctgcccctatccatgaccaagaatgggtggctgctattctggctgatgtgaaatctatgaaagacagatatccagcttatgatcgcatttcagctgtgttgactacaatatcagaggaattgccagatgttcccctctttttgagtctgcacaacctctgtgcaaccctcaaatgcacttctccgtcagcaattattttccgttctgcggtgatcaatgcaggctatcgtatatctggaactcatgttaatccattgggacttaaatcagatgcacccatggatgttatttgggatataatgcgctgctgggtaaaaaatcatcctgtgaagcctcaaccagcagatcaaccaggaagcatcatacttgcaaaggaacctgttcttcaggctaattttgctcgagctgtagcatctcttagcaaggcacaagctaagaaggttgcgcgctttcttccagatcctgaaagacactggg

SEQ ID NO: 2156 - DNA, 300 bp, Glycine max
gaaagtccaccaataatacttgttggcaacacttgctatgcctgatgttcgctggtgatgatgaaggtttttcttctgacaatttgcttcagtggcatatgctgtgaaagctgcttgattcctcccccaagcaatattcacaaaatttcttatccattaaggtgtaaggatgacttagttgcactcgttatatgcttgtatgttagtttttcacgttgttcccattacgttattcacggtgtagtggacaggtagagttggcttatgtatgatgtaaatttacgtgttgatatctgaaaa

SEQ ID NO: 2157 - DNA, 777 bp, Glycine max
cggctcgagcttagggattcccccattaccagcagcgaagtagaggtgagtttgattgagtcagtccaacaataactaaaaacccgtgactcagcccactcttgctttgcttggcctaaccgctaaccaaaccaaagctctctcaatggcttcggagcaacacgacgccgttttccgcgaagaagacatggacgacgacgacgacgagtctcaggaggacgaagagtacgaagaagacgacgacgaagaaaacgtgccctctccctccaccgctctcgctgtcaccgtcgccgtccccggttccgccgtctccaacggcggcggtggctctccaatttcgaagcccaccgccaccgccaccaccaccaccgccaccatcgtcctcgccgactcatccgatccgaagcggcgtcgcctggagctaatcgaggagaaaaagccgccgccgccgctggatgactcgcggcggctgtttcagcggctgtggaccgatgaggatgagatcgagctcttgcaagggttcctcgactacacatcgcagcgaggatcctcgcaccacaacgacaccgctttgttctacgaccaaatcaagtcgaagctccaactcgatttcaacaagaaccagctcgtcgagaagctccgaaggctgaagaagaagtaccgcaacgtcctcaacaaaatcagctccggcaaggatgtctccttcaagagccctcacgaccgagccaccttcgaaatctcgcgcaggatctggagcaacaccgctccaatcaccgg

SEQ ID NO: 2158 - DNA, 559 bp, Glycine max
gtcaaaagagacactaacaaaacaaaccccgtgaaagcaaagcaccccaccgcgctctttgcctaaccgactcactcccatggaatccgatctaaacgacgccgtttttcccgaagaagatctcgacgacgacgacgaaactccagaggatgaagaggaggaggaggacgacgacgtcttagatgacgatgaaaccgaaccccctccctccgtcatcgccgtcgcgccgcccgcttcccaaacgctcgacaccgcgttaattccgatctcctccgtcgcggattcctcgccgaaaccgctgcgcacggagctaatcgaggagaaaaaagcgctggacgattcgcggcgactgttccagcgtctgtggacagacgaggacgagatcgggctcttgcagggttttctggagtacacggcgcagcgaggatcctctcaccacaacgacaccgccctgttctacgaccaaatcaagtcgaagctccaactcggcttcaacaagaaccagctcgtcgagaagctccgaaggctgaaagagaagtaccgcacgtcctcaacaaaa

SEQ ID NO: 2159 - DNA, 542 bp, Glycine max
cagccccacttttgctttgcttggcctaaccactaaccaaaccaaacctctcaagtctcaatggcttctcagcaacacgacgccgttttccgcgaagaagacatggacgacgacgacgacgagtctcaggaggacggagactacgaagaagaagacgacgacgttttggccgacgacgaagaaaacgagccctctccctccacggctcttgccgtcaccgtcgccgtccccggttcctccgtctccaacggcggtgccgctccaatttcgacgcccaccgccaccaccatcgtcgtcgcagactcctccgatccgaagcggcggcgcctcgagccagtcgaggagaaaaagccgccgccgacgccggacgactcgcggcggctgtttcagcggctgtggaccgacgaggacgagatcgagctcttgcaaggcttcctagactacacctcgcagcgaggatcctcgcaccacaatgacaccgctttgttctacgagccaaataaattgagcggacgcgtgggcggacgcgataggcggacgaa

SEQ ID NO: 2160 - DNA, 493 bp, Glycine max
agcccacgcgtccggtgagtgaaaagttacaccaacaaacccgtgaaagcaaagcacccattagaccctttgcctaaccgactcactcccatggaatccgatctaaacgacgccgttttccccgaagaagatctcgacgacgacgacgacgacgacgatgaaactccagaggacgaagaggactacgacgacgaaaccgaaccccctcccttcgtcctcgccgtcgtagcagtcgcgccgcccgcttccaccgcctccgaaacactcgacaccacgttgatcccgatctccgccgtcgccgattcctcactgaaaccactgcacccggagctaatcgaggagaaaaaagcgctggacgattcgcggcgactgttccagcgtctgtggacggacgaggacgagatcgggctcttgcaggggtttctggactacacggcgcagcgaggatcctctcaccacagcgataccgccttgttctacgaccaaatcaagt

SEQ ID NO: 2161 - DNA, 1204 bp, Glycine max
ctcgagccgaatcggtataagcggatgtgtgagtttgcatggttggatagcaatggcagcaaagaaggtgtgtgtaacaggtgctggaggattcgtagcgtcttggcttgttaagcttcttctttccaaaggctacattgtccatggaactgtgagagaccctgaacctgctactcagaaatatgaacacttgctcaaactccacggagcttctgaaaacctcactctcttcaaggcagatctcttgaactacgaatctcttcgctcagcaatttctggatgcactgcagttttccatcttgcttgccctgtaccctcaatcagtgttcccaaccctcaaggttgaaatgattgagcctgctgtgaaaggaacaactaatgtacttgaagctagccttgaagctaaagtgcaacgacttgtctttgtatcatctttagctgctatttccaatagccccaatttgcctaaagataaagtgattgatgagtcctattggtctgataaagattactgcaaaacaactcagaactggtactgtttttccaagacagaggcggaggagcaggccttggactttgccaaaagaactggccttgatgtggtaagcatttgcccttcccttgttctcgggccaattttacagtcaaccactgttaatgcaagtagcctggctctcctcaaacttttaaaaggtgtcaactcaatggagaataagatccgttggatagtcgatgtacgagatgtagctgatgcaatacttttggcttatgagaagcttgaggcagaagggagatacatatgccattcacataccatcaagacacgggatatgctggagaaactaaagagtatataccccaactacaaataccctgcgaagtatactgaggtggatgattacataagtttcagctcagagaaactgcaaaggttgggttggaaatacaggtcactggaggaaacactcgttgattctgttgagagctatcgggaagctggccatctgcaatcagaataaatgtgacttagtagaatagaataaaactaagtgctatatgatagtagatacttcagttttttaaaatctttattaggattcgattcgattctagtgtgagtatgaaaaagactatataatgagggatgttgtaggtagtttggtaatctcgggttagtctccagcgtccggaggaatattctagt

SEQ ID NO: 2162 - DNA, 466 bp, Glycine max
  unsure (1)..(466): unsure at all n locations
cccacgcgtccgggtgtgtgtaacaggtgctggaggattcgtagcgtcttggcttggtaagcttcttctttccaaaggctacattgtccatggaactgtgagagaccctgaacctgctactcagaaatatgaacacttgctcaaactccacggagcttctgaaaacctcactctcttcaaggcagatctcttgaactacgaatctcttcgctcagcaatttctggatgcactgcagttttccatcttgcttgccctgtaccctcaatcagtgttcccaaccctcaggcaattctttcttttgggctttcattgcttacaaaaacaataaaaaaggtatgtcatttaatcaattcttctgcaggttgaaatgattgagcctgctgtgaaaggaacaactaatgtacttgaagctagccttgaagctaaagtngcacgacttgtctttgtatcatctttagctgctat

SEQ ID NO: 2163 - DNA, 1092 bp, Glycine max
agaaggggaggccccatatttctatcttactaaagaaaacggggcccaataaacttgaaagccctcgatggtgaatgaggagcagatgagcaatccctatctatatctacttatcgtctaagctcagtgatcagaacctacgccgagtgaaaccccaatcccaatacactcccaactcacaaagccatgtctccaggtcctgttgtcgacgcttcccctgaggttgaagcagagcaacaacttccctccgtcgatgacgcaacccagttgaagaaatcccaaccgcaggaggatgatgctcccgttgtcgaggacgtgagggatgatgacaaggacgacgacgatgaggacgacgacgacgatgatgaagatgacaaggaagacgatgctctaggtggtgctgagggttcaaagcagagcagaagtgagaagaagagtcgaaaagcaatgttgaagctgggactaaaacctgtcaccggtgttagtagggtcacaatcaagagaacaaaaaatattcttttcttcatctccaaacctgatgtcttcaagagtccaaattctgagacctatgtcatatttggtgaggcgaaaatagaggacttgagctctcagttgcagacacaggctgctcaacagttcaggatgccagatatgggatctgtaacggcaaaacaagaagatgctgctgctgcagcagtgcaacctgaagaagaggaggaggttgatgaaactggtgtcgagccccatgacattgatttggtgatgacgcaggcaggagtgtcaagaagcaaggccgtcaaggctctcaagactcacaacggggacattgttggagccatcatggaactcactacttaattgggggtttatgttctatttgtatgtttttttgggaatgatatttagaactagtgccgtttctatgttataaaccgaatcaacataaccgttttatgtttgggatttgggttttaccctttacttcataattttgttgcgttatcaaaaagttctgaatgcttttaatttgtatcagtatttggaagaattaggaagctgaacaatctattttaagcctacttaaaaaaaaaa

SEQ ID NO: 2164 - DNA, 517 bp, Glycine max
ggtctgcaacatttgtatctaccattggggtttcactgttcagtgtaactctcaagccatgtctccgggtcccgttattgacgcagccaccgaccccggcgccgaccaacaaattccctccgtcgacgacgcaatcctcaagaagaaagctcacccccaggaagatgacgctcccattgtcgaggacgtcaaggacgatgacaaagaggaaaccgaagacgaggatgaggacgatgacgacgatgacaaggaagatgacgcccaaggtggtgctgagggtgggaagcagagcagaagtgagaagaagagccgaaaagcaatgttgaagttgggactgaaacctgttactggcgttagtagggtcacaatcaagaggacaaagaatattctttttttcatctcaaaacctgatgtctttcagagtccaaattctgagacctacatcatattttgggaggcaaaaatagaggacttgagctctcagttgcagacacaggctgctcaacagttcaggatg

SEQ ID NO: 2165 - DNA, 510 bp, Glycine max
agaaggggaggccccatatttctatcttactaaagaaaactgggcccaataaacttgaaaaccctcgatggtgaatgaggagcaaatgagcaatccctatctatatctacttatcgtctaagctcagtgatcagaacctacgccgagcgaaaccccaaataccaatccaatcctcgcccggctcacaaagccatgtctccaggtcccgttgtcgacgcttcccctgaggttgatgcagagcaacaacttccctccctcgatgacgccactcagaagaagataccccaaccacaggaggacgatgctccccttgtcgaggacttgaaggatgatgacaaagacgacgacgatgaagacgacgacgacgacgacgaagatgacaaggaagacgatgctcaaggtcctcttctctttcactgtgttttcctcttagcctaataaaatccttatttggtcctttttttatgtttttgttagtaaaccctatggttctaatcgattatttggttt

SEQ ID NO: 2166 - DNA, 532 bp, Glycine max
taggaatttcatgaggcggtacaatgcaggaggggatgatgacgagaatgggattgaaaggcaaaaatagaggacttgagctctcagttgcagacacaggctgctcaacagtttaggatgccagatgtgggatctgtactggcaaaacaagatcaagatgctgcagctgcagcggcacagcctgaagaagaggaggaggaggttgatgaaactggtgtcgagccccacgacattgatttggtgatgacacaggcaggagtatcaagaagcaaggctgtcaaggccctcaagactcacaacggggacattgttggtgccatcatggagctcactacttagtttcggtttatgttctatttgtagttgttgatttttggggatgattttggaactagtgccatccttataattttgtggtagccaaaccatatctctggtccttatggttgtgtttaccttataattttgttgctctctaaaatttgtggtacaatatgatgatcaatgatcatattcttttgatatttttact

SEQ ID NO: 2167 - DNA, 313 bp, Glycine max
gaaaaagagagagagagagagttaaaaaacaagaagcgaaaaatgaaacgatattgcgaattaggaatttcatgaggcggtagcaatgcaggaggggatgatgacgagaatgggattgaaaggcctatgactcattccgaatattttcccgtttgaattattccttgagtgcgtgatcgtttttgaatatcagtcaacgcgttaagaatataattaacttgcttctttcgctaattcagacttttatggactttgtctcgccatagctacattctgaagctccatttgacactcaccccttgttgatggcgcg

SEQ ID NO: 2168 - DNA, 388 bp, Glycine max
gaatttcatgaggcggtacaatgcaggaggggatgatgacgagaatgggattgaaaggcctatgactcattccaaatattttcccgtttgaattattccttgagtgcgtgatcgtttttgaatatctctcaacgcgttaagaatataattaacttgcttctttcgctaattcagaaccgaggtttggtttgatagttaattattcaagttgaggaataatttggaattgtgattgtgatgcttttgatgaactccatgcttcctttggtagacttttatggactttgtctcgccatagctacattctgaagctccatttgacactcaccccttgttgatggcgcgccctactcatcatgtcattgacatcacggggagttcccgacct

SEQ ID NO: 2169 - DNA, 1511 bp, Glycine max
ataaataatggcataatctctaaagtccgaatcatctcattctcatcaagttattatcaaataattaattaaattcctcgtggaatcttgttgaagccatgtctacagctggtcaggtcatcaagtgcagagctgcggtggcatgggaagcagggaagccactatcgatagaaaccatagaagtggcaccaccccagaaaggtgaagtgcgtttgaagatcctcttcaactccctttgccgtacagatgtttactggtgggatgctaagggccagactccgctgtttcctcgtatcttaggccacgaagcttcggggattgtggagagcgtgggcaagggtgtgacacatctgaaaccaggtgaccatgctctcccaatattcactggggagtgtggtgaatgcacctattgcaagtctgaagagagcaacctgtgtgagcttctcaggatcaacactgacagaggagtgatgctcagtgatggcaaaacaaggttctccaaaaatggacaacctatttaccacttcgttggaacctccactttcagtgaatacactgttctccatgaaggatgtgtcgccaagatcaaccctgctgcccctcttgacaaagttgctgttgtcagttgtggattctgcacaggttttggggctactgtgaatgttgcaaaaccaaagcctaataatactgttgctgtctttggcttaggagctgttggtcttgctgcctgtgaaggggcaagggtttctggtgcatctagaatcatcggggttgatttacttcccaatcgatttgaacaagccaaaaaatttggggtcactgattttgtaaacccgaaagatcacaacaaaccagtccaagaggtcattgctgaaatgactaatggaggagtagatcgtgctattgaatgcactggaagcatccaagcatcaatctcggcatttgaatgcactcatgatggttggggtactgctgtccttgttagtgtgccaaagaaggatgcagaattcaaaactcatcctatgaagttcatggaagggagaactcttaagggtaccttctatggtcactatagaccccgcactgacattcccctggtgttgtggagaagtacctcaacaaggagctggagctggacaaatttatcactcactctgtcccattctcagagatcaacactgcatttgatcttatgctgaaaggggagggaataaggtgcctcatctgcatggaagagtaaatcaatgatgttctctgctgaacagtgtttgcgtgtaatgtgaaaagagaattgaataaatttggcatgtaattcggttattggattcatgctacatgagtgtgtaaagaggtaatgggggtgatgactttcttggtcattgtcgtggctttgtgatttctattgcaaatgttgtcttgtaactttgttgtattttcagcaatatatgatatatgatatctatcttaatttctaaaaaacaaaaaccaaaagaaaaaaaaaaaaagggggg

SEQ ID NO: 2170 - DNA, 990 bp, Glycine max
gtttgcttcctggcgatcccttgcaaccctagtcttcgaattgccccatatcacaaaccacattaaaaaaagactaccacgtattcttctctctccgtctctctctctctctctctctcttcacagtgccaatggcggatccaatcgcgaaggttctgatcgcgtttgcgctcttagcttccctcttgctgtgttcgcacgcttcctccgacgttcccttcatcgttgctcacaagaaggcctccctcaacagactcaagtccggcgccgaaagggtctccgtcaccatcgacatcttcaaccaaggaacctcgacggcctatgatgtaagcttatcagacgatagctggccaagtgatgcttttgatgtaatcagcggtagcacttcaaagtcatgggaaaggcttgatgctggtggcatcctttctcacacatttgagctggaggcaaaatcaaagggagtatttgccggtgaaccagctgtcataaagttccgtgttcccacaaaggctgctttgcaggaggcatattcaactcccatattgcctttggacgttctttctgatagacctcccgagaagaagtttgaatgggctaagaggttgctggctaagtatggatctctaatctcggtgatctccatcatggtcctgttcatatacttggtagcttcaccatcaaaatccagtgcaaagggaagcaagaagaagcgttaatcattggcaaattagtgcatttgcaatcagacactttggaggctagatcatgatattattctgatggtggtcagtttttacatagttgttggacctttttgaatgaatggttaaatgagttagtgagagaacaaattaatttcttgacggcatagcctaaacagttgtttctggttctcactggacggaatgtatcttttagctagcaaaagtatattttcttaattacctgatctctctgccattttggattgaaaaccatattttttggggg

SEQ ID NO: 2171 - DNA, 474 bp, Glycine max
gagtcttcgatggaattgccccagatcacaaaccacattaaaaaaagactcccacgttctcttctctctccgtctctctctctctctcttcatttctcattgactctctctttctctctctctctgcacagtgccaatggcggatccaatcgcgaaggctctgatcgcgtttgcgctcttagcttcccttttgctgtgcttgcaagcttcctccgatgtccccttcatcgtcgctcacaaaaaggcctccctcaacagactcaagtccggcgccgaaagggtctccgtcaccatcgacatctacaaccaaggaacctcgacggcctatgatgtaagcttatcagacgatagctggccaaatgatgcttttgatgtaatcaggggtagcacaatcaaatcatgggaaaagcttgattcttgtggcatcatttcttacacatttgaacttgaggcaaaaatcaagggagtattttc

SEQ ID NO: 2172 - DNA, 502 bp, Glycine max
  unsure (1)..(502): unsure at all n locations
gttcgcgtgncgaaggatgacgcagacggtgcgggcgtcgagccgggtgttgatgttgttgagaattgcgccgccgaaagggacggcgaagtggagctcgtacatggcgggtacgttcggggcgaggacgtagacgacgctgccgcggcggatgccgagggaggagagggaggaggcgagctggaggcatcggcggcgcgtgagggaccaggtgaaggtggtgtggttgtagactagggaagggacgtgggcgtagacggtggctgctctgtccaagaaggcgagtggagtgagaggggatgagttaggagcgcttggcttcagctgttccattaggagaaagattctctgaagcaaaacacacacccacgctgcttctgaatgaatgaacagaacgtatatacacagcgtcttgctcgtgtagtgatgagggagaaatatatgttaaatcattcatttcctctaatatttaagaatgatttagttagatcttttcgtccat

SEQ ID NO: 2173 - DNA, 540 bp, Glycine max
gaggaaaaagggagtgcctgataacccataaccgaccgcaccaccgttttcctttgctttgcgttctacaatgtcgaaaacctcagagattattacatgcaaagctgctatttgctggggaataggaaaacctgtgactgtggaagagatacaagtagaccctcccaaagccaccgaagttcgagttaagatgctttgtgccagtatatgctccacagacatctctagcacaaaaggattcccacataccaattttcctatagcacttggacacgaaggagttggtattatagagagtgtcggtgatcaagtaacgaatctgaaagaaggggatgtggtaattccaacatacataggcgagtgccaagaatgtgagaattgtgtttcagaaaaaaccaatttgtgtatgacatacccagtaagatggactggtctaatgccagataacacttcaaggatgtccatccgaggagagaggatataccatattttcagttgtgctacatggtcagaatactggttagtgatgccaactagttc

SEQ ID NO: 2174 - DNA, 1731 bp, Glycine max
tggaattccacgtgtcccaaaaccctgaagaaagacacagccattgtttgtttactttccattgattgagcgaaagctttgttttttctgcgatcattttccattgggtggaagaaagtctcaacctttagtcgaaagagcaaggatctgagtgagtgagcgatcatgtgtggtggtgcgattatctccgacttcattccagcgggtcccgccggcggggcgcagcgcgtgaccgccgacatcctgtggccgaatttgaggaagcggttctcgaagtcgctgctggacgatgatttcgaggcagggttcagagaattcgaggatgactcggaaatcgaggatgtcgatgatgaggacgatgaagaggaggaggagttgaagaagaagaagccctttgggttctctcgctccagcaacaaggctgcttctaagcctctctctcgtggatcagcaactgtggaatcaaaggggcaagctgagaagtgtgccaagagaaagaggaagaaccagtatcgtggaatccgtcagcgtccatggggaaagtgggctgctgagattcgcgacccaagaaagggggttcgtgtttggcttggaactttcagcactgctgaagaagctgcaagagcttacgatgctgaagcaaggaggatccgtggcaagaaagccaaggtgaatttccctgatgagccttcaggcgctgctgcttcctcaaaacgcctcaaggtgaatccagaggctcagccaatgaaggaaaatctgaacaccgtgaagccgaaaatgaaccagatgttcaattttggtgacaatcttgagggctactacagccctatagatcaggtggaacagaaaccactggttaaccagtatgttaaccgtgccccgtttgctggaaatggagttcaagtctcacctgttactccatctgctgatgttactgcttacttcagctctgagcattcgagcagctcgtttgattattctgacctcggatggggtgaacaagtccccaagacacccgagatctcatccatgctttctgctgctcctttggacggtgaatctcagtttgtgcagggtgctgctgatcagaatcagaagaagaacaacctgctggatatggcatctgtgcaagatgattctgcaaaaactctttctgaggagcttgcagacattgaatcccagctgaagttctttgagaccccttcttttcttgatgaagcctgggctgatgctgcattggcgtctttgctcagtgaagatgcatctcaggatgctgctggaaaccctatgaacctttggagcttcgacgacctgccttccatggcaggagtcttctgaacaccttcatatccctttttatgtaaataaagctacaagaattgtgatcgtgatgttggtgatggaatccacagcaagaaaaccaacctgcttaaagcatatgtggagtttatttatcttgtagctaatgcagtataggactatatataggtttttatagggtatcctttgtgtgaaactcaagagacctcgttttcaggggattttctgtttgatgtccataaggattatcaattatgttatatatggtctgggatacagtcttgacttacagtttttaacttggttgttttcattgttatggcaatttgattatgatttgagaccagccaattttctacacaaggttaaatgaacacagtgaaggcaccagcttggacaatgctggtctaa

SEQ ID NO: 2175 - DNA, 1305 bp, Glycine max
  unsure (1)..(1305): unsure at all n locations
gagagacaagtatcgattattgatctgaaacgaaaaaaagagcaacaactgtgaaatctgtggaatcaaaggggcaagctgagaagtgtgccaagagaaagaggaagaaccagtatcgcggaatccgccagcgtccatggggaaagtgggctgctgagattcgcgacccaagaaagggggttcgtgtttggcttggaactttcagcactgctgaagaagctgcaagagcttacgatgctgaagcaaggaggatccggggcaagaaagccaaggtgaatttcccggatgagccttcaggcgctgctgcttcctcaaaacgcctcaaggtgaatccagaggctcagccaatgaaggaaaatctgaacaccgtgaagccgaaaatgaaccagatgttcaattttggtcacaatctggagggctactacagcccaatagatcaggtggaacagaaaccactggttaaccagtatgttaaccctgccccgttccctggaaacggagttcaagtctcacctgttactccatctgctgatgttactgcttacttcagctctgagcattcgagcaactcgtttgattattctgaccttggatggggtgaacaagtccccaagacccccgagatctcatccttgctttctgctgctcctttggagggtgctgctgatcaggttcagaagaccaacaactcgcaggatgtggtggctgcacaagatgattctgcaaaaaccctttccgaagagcttgcagacattgaatcccagctcaagttctttgagaccccttcttttcttgatgaagcctgggctgatgctacattggcgtctttgctcggcggagacgcaactcatgacgccgccggaaaccctatgaacctttggagcttcgacgacctgccttccatggcaggagtcttctgaacaccctttatctccccttttatgtaaataaagctacaagaattgtgatcgtgatgttggtgatggagtccacagcaagaaacctgcttaaagcttatgtggagtttattttatcttgtagctaatgcagtagtataggactatatataggtttttattatagggtacccttttgtgaactcaaagacctcgttttcaggggattttctgtttgatgtccttaaggattatcaattatgttatatagggtctgggatacagtcttggctgctgatacagtttttttttaacttggtggttttcattttcattattattattagggcaatttgattatgactttgagccccnnnnnnnnnnnnnnnnnnnnnnnnnnnnnnnnnnn

SEQ ID NO: 2176 - DNA, 1375 bp, Glycine max
taatattttaacatttcagatactatatagcaccatcaggcaagagattgcgctcaatggtagaggtccagaagttcttgatggagcatcctgagtatacaagagatggggtaactctttcacagttctcatttcaaattccaaggccattacaagaaaactatgtgaggaagcgctccgctagacttacctcttcatatgaagtcagcgagcctgttgaacatcagcacgtgagtcctctagcatgggtagatccagaagggcatggtcgcagactggggcttcctgcccccccattcatggaatcccatgatattgaccctatcagtatcagccgtccttcaaagaggcaagcaactcataaaggtgccctgtagtaaggaccctcatcaaatcctttcgtgttatgtgcattgtgcagtcagtcagttgcatcttacttacaaatagagaaatagttcgtttatcctttttaatagggcattttaggtgtaatgagcttgcggggaaaagcagtgtagagacggttcacttgtcctcatgaggagatcattatcttggtattcctaataaaaatgtattttgcatctgggacaggcacccttttttgaccaacaactcgcaggatgtggtggctgcacaagatgattctgcaaaaaccctttccgaagagcttgcagacattgaatcccagctcaagttctttgagaccccttcttttcttgatgaagcctgggctgatgctacattggcgtctttgctcggcggagacgcatctcaggacgccgccggaaaccctatgaacctttggagcttcgacgacctgccttccatggcaggagtcttctgaacacccttcatctccccttttatgaattgtgatcgtgatgttggtgatggagtccacagcaagaaaaccaacctgcttaaagcttatgtggagtttattttatcttgtagctaatgcagtagtataggactatatataggtttttatagggtatcctttgtgtgaaactcaagagacctcgttttcaggggattttctgtttgatgtccttaaggattatcaattatgttatatatggtctgggatacagtcttgacttacagtttttaacttgggtgttttcattggtatggcaaaaaaaaaaaaacaaaaaaaaaaaaaaaaaaaaaaaaaaaaaaaaaaaaaaaaaaaaaataaaaaaaaaaaaaaaaaaataaggacaacacttatgaacgttcccaacatcgaacccctcctgcctaccttatacatcgccattactgcgacccaaacacatgtcattaggccgaatctttacaccgaagtggctggggaacccatggcgttaccctacttaattacctt

SEQ ID NO: 2177 - DNA, 510 bp, Glycine max
  unsure (1)..(510): unsure at all n locations
cccacgcgtccgaaaaccctgaagaaagacacagccattgtttacttttcattgagtgagcccaagcctggtatttgctgcgataattttccattgggtggaagaaaggctcaacctttaattcgaaggaccacggatctgagttgaagttgagtggtcatggtgtgggggtccgattatctccgacttcataccggcaggtcccgccagcggggcgcggcgcgtgaccgccgacatcctgtggccgagtttgaggaagcgcttctcgaagccgctgctggacgatgatttccaggctgggttcagagaattcgaggatgactcggaaatcgaggatgtcgatgatgaggacgatgaagaggaggaggagttgaagaagaagaagccctttgggttctctcgctccacacaccatgctactcataantctctctctcgtggancaacaactgtgaaatctgtggaatcaaaggggcaagctgagaactgtgcgccgagaaagaggaagaa

SEQ ID NO: 2178 - DNA, 416 bp, Glycine max
gacctgccttccatggcaggagtcttctgaacaccctttatctccccttttatgtaaataaagctacaagttcgtaattttcattctgcttctagttttattattattatttttttgcatccctgcatgtttctgaatgtatatgtatatgattatcattttgattttggcatttgctttcaggaattgtgatcgtgatgttggtgatggagtccccagcaagaaacctgcttaaagcttatgtggagtttattttatcttgtagctaatgcagtagtatagggctatatataggtttttattatagggtatccttttgtgaactcaaagacctcgttttcaggggattttctgtttgatgtccttaaggattatcaattatgttatatatggtcttggatacagtcttgactgct

SEQ ID NO: 2179 - DNA, 1304 bp, Glycine max
gacctaggaaaaaccgtttccaactttacattttcccaccaaccctcctctccattcctcaaaacaatcgttaatctcttctccattgtgaactctgatattctccaagtacacaacacaaacacacatcaatttatagcacccgatttctcttttccccctcaaattcagctccattttgttacagattcaaataataagccaagcagccacaccatgatctcgtcaatgaaatgcacagcctcatctctcacatgttctgctttctcaaacagaaagcttcccattgcaaggcctcaactcgtgacattaccaaccatcaacaacgttgaacaaaacatgggtccctctcagttgtgttcacagaagcctctctacctttcatccaccgagaacttggcattggtgaggagaaggagagtgacggagtgccaggcctatgaagctgacaggtcacggcctctggagatcaacattgagctgccggctgaagaggcggcgcagaggttcaagattggtgtgtattttgctacatggtgggctttgaatgtagttttcaacatttacaataagaaggttttgaatgcttttccttacccatggctcacctccactttgtcccttgctgctggctccctcatgatgttagtctcctgggccaccagggttgctgaggtcccaaaagtcaacttggacttctggaaggcctatgtttcctgttgcggtggcacacacaattgggcatgttgctgcaactgtgagcatgtccaaggttgctgtttcattcactcacatcatcaagaggggagagccagctttcagtggccttgtgtcaaggttcttgctcggagaagcattcccaatgccggtttatctgtcactgctgccaattattggtggtggtgcactagctgcagtgactgagctcaatttcaacatgattggcttcatgggggctatgatatcaaatttggcatttgtcttccgcaatatattctcaaagaaagggatgaagggaatgtctgttagtggaatgaactactatgcttgtctttccataatgtcactgttaattctcacaccttttgccattgctgttgagggccccaaggtttgggctgcaggctggcaaacagctgtgtctcaaattggtcccaattttgtatggtgggtagctgcccagagtgtcttctaccacttgtacaatcaagtctcatacatgtctcttgatcagatttctcccttaacattcatcattggaaacacaatgaagaggatttcggtcattgtctcttccatcctta

SEQ ID NO: 2180 - DNA, 389 bp, Glycine max
ggctgaccaaatgctgccaatctgaagtatttgcatcttgcctcaaaactaaataagaaaggacatgaagccattaattgattacaccacaatggcataccacaaatggagacagccaaagagtccctcagctgttgctctagcttctctgtcaacttactgctcacaaactcaatctgtgggacagacggaactgtcatttttagactatccaggttatcaactttcccttgggcaaaagcacaaattctttcacgcgacataaggtgaaatataatgctgaaatctggctttaaccaggttttctccattgatcatcttcggattttcaatgaagaagaacttgagcgaatgctttgtggagagtatgactcttgggctgtcaacga

SEQ ID NO: 2181 - DNA, 484 bp, Glycine max
cttgctctctacgacatacaatcctatgatcctgggcttggtaaggtgctacaagagtttcaagcattagtctccgaggaagaaatttatggaatctgtcagtggagggaattccgagttgcaatatggactaagctttcgagatatgagcattgaagatctttgtcttgattttactcttcctgggtttcctgatattgttcttgcttcagggaccgatcataccatggtaaatatgagaaacttggaggattatgtttctcttattgtcgatgcaactgtgaggtctggagtttcaagacaagtggaagcttttaaatctggctttaaccaggttttctccattgatcatcttcggattttcaatgaagaagaacttgagcgaatgctttgtggagagtatgactcttgggctgtcaacgagtttgggagatcacattaagtttgatcatgggtatactgctagcagtcctcccattgttaa

SEQ ID NO: 2182 - DNA, 1113 bp, Glycine max
ttgatcgagccgacattaatgtgtgtttgtcacgagacccatagtgctgccaaattatagtaactctctttctctatctgaagaagaagaagttctgaagaagcatgtgtggaggtgctatcatctcagacttcattggtgtgaagcgtggccgcaacctcgccgcgcaggaactgtggtccgagcttgaccctttctctgacctccttggcttcgataccaccaccaccaccaccaaccaaccaccccttccagacaaaaaagtggtgtcatcatgtgagaagaagaagaagaaaagtgtgagtgcagaaaagaagagtggtgggcgagctcggaagaacgtgtacagaggaatcaggcaaaggccgtggggcaagtgggccgcggaaataagggacccacataagggcgtccgcgtctggctcggcaccttccccaccgccgaggaagccgcccgagcctacgacgacgccgccaagcgcatccgcggcgacaaggccaagctcaacttcccggccaccgctccgccaccctccaaaaaacaacgctgcctcagccctgacaccaccaccgaacaaagcagcagctcacaatccaccactggatccaccggatcgccgccttccgccgccttccacggcggaggagatgaactcgacctgaaacaacttgaacggtttctagggttggacaacatgggtgctgagtgggacaacatggatgacctgtggatgctggacgacgtcgttgtgcccaaccgtcacttaatttactagaagggagataattaattaattaataaatggcgttttcttaagttatagttttataaaactatgttggtgtatgtgttcttagttttctgttttgtcttgtcctctcgctttggtaatttctgttttgtacggtcgaattatttcaaaattaggtgcaacgtatcatgagagggatgattatatgttatcattatgattataaataaaggccaattagggtgtgttagcgtttgggtcgtgcatgtttatatgtagtttatgcgttgtatataatatatttggcatgacattatttggttctacttgttaagcaaaaaaaaaaaaaaagcggctggct

SEQ ID NO: 2183 - DNA, 1132 bp, Glycine max
tctcgtagccgaatcggctcgaggtttgtttgtctgtcacgagactcatacattgtgctgccaattatagtaactctctatttctctttccatctctcaagttctgaagaagaaacatgtgtggaggtgctatcatctcagacttcattggtgtgaagcgtggccgcaacctcgccgcgcaggaactatggtctgagcttgaccctttctctgacttccttggcttcgataccaccaattccaaaaaccaaccacccctgcagaaaattccagacaaaaaagtggtgtcatcatgtgagaagaagaagaaaagcgtggtgggtgcagaaaagaagaagagtgatagtgggcgagctcgtaaaaacgtgtacagaggaatcaggcaaaggccatggggcaagtgggccgcggagataagggacccacacaagggtgttcgtgtctggctcggcaccttccccaccgccgaagaagccgcccaagcctacgacgacgccgccatacgcatccgcggcgacaaggccaagctcaacttcccggccaccaccatttccgccgccgccgccgctccgccaccttccaaaaagcaacgctgcctcagccctgacatcatcactgaagaaagcagcagcagcagctcacattccaccactggatccaccggcgaaagcggcggaggaaacgacgaactcgacctgaaacaaattgaatggtttctaggtttggagaatgagctgcctgttagcaacaacattggtgctgagtgggacaacatggatgacctgtggatgctggacgacgtcgttgtgcccaaccgtcacttaatttactagaaggctaataattaataaatggcgttttcttaagttttagttttactttataaattgtagtataaaactatgttggtatttgtgttcttagttttcttctgctgttttgtctcttctctggctttggtaatttctgttttggacggttgaatgatttcaaaattaggtacttaattacaccctatcatgattgggatgatgattatatattatgattatgatgattatatataaataaagggtgattaagttagggcgcgtgagtgtttgcgactttgcgccgtgcatgtttttataaa

SEQ ID NO: 2184 - DNA, 786 bp, Glycine max
ggaaaagtaatggtaaaagaaaagggaaagtttataactttttaagagtttcttaacttgagaaaagcaaactcataaataagtaaataaaattcattagacagaacaatcaaactcaccctgatcctatcagaccttatcacagtcctcacggtagacacatggacacatatatggcctttcgcggtttccagaaaatcaataatagccattagcaaccatcccatcaaaaaagataaaacattattttctgaagataaaaaagaagtatgtacgtattaataatttcatgtaataattaattattgtgtataaaaagtttataaacttttatttaataatcttaaaagagatatcaatcataatatatgtgactttgtgcggataagtatgtgaaattgattgaaaggtgtcacatgatgatagatggattaacacagtgtttgtatgtggcagtggtgtcatcatgtgagaagaagaagaagaaaagtgtgagtgcagaaaagaagagtggtgggcgagctcggaagaacgtgtacagaggaatcaggcaaaggccgtggggcaagtgggccgcggaaataagggacccacataagggcgtccgcgtctggctcggcaccttccccaccgtcgaggaagccgcccgagcctacgacgacgccgccaagcgcatccgcggcgacaaggccaagctcaacttcccggccaccgctccgccaccctccaaaaaacaacgctgcctcagccctgacaccaccaccgaacaaagcagcagctcacaat

SEQ ID NO: 2185 - DNA, 967 bp, Glycine max
caatggcgttaatataacagagagcacccgaatccctgcctccccctgtatctgtatcccactttcttttcatttccgttttctctccaaaaacgtttctctctcttctttctttctctttaaacgccgaccaacgacgcgacacgacaccgtttcgatggtggtgaagatgatgcggtggaggccgtggccccctctcgtctcgaagaagtacgaggttaagctcgtcgtgaaaaccctcactctccagggctgcgatctggtgcgtgcgtccgcagagaaaggcttcatgctccagattaagtggaagggtcccaagcttaccctaagctctctgcgacgcaacgctgttgctagaaacttcaccaaagaggtgcaccccgagcaaaacgacgacgtcgttttgtgggacgaggagtttcacgcgctctgcactctcaacgcgtacaaagacaatgcctttcacccctgggaaatcgctttctctctcttcaacggtttgaatcaaaggtcaaagactaaagttcctgtggttggaactgcagctttgaatctagctgattttgcatctgtggttgatcaaaaggattttgatttgaacattccactcacagtttctggtggctctgtggagtcttctccttcacttagtatatcgattagtttggtggagttaagagcggttcaagagagcacagagttagttcataataaagcaatagtgcctgtgcctgtggcttccgctaattcgcctttggttcagtcaggggagactaccttggctgagaaagacgagctttcgacgatcaaagccggtcttcggaaagtgaagattttgactgagtttgtgtctgttaggaaagcaaagaaagcctgccatgaggaggaggtgagtgagggaaatttcgctgccaggattgaggatgttggatgcaagtagcccgtgaactctgattcgcgcgacaaa

SEQ ID NO: 2186 - DNA, 435 bp, Glycine max
gacgctcacttttttcctcttctgcttcatcctcccctttccctaacctccttcttcttcactactaatcttcacaaccatatcatccccaaaacaaaaaaaatccacgtatttgaaatccgacgctgtttttgatggatttagcgtgcaacgatgaaccacctaccgcgaatattcggcaatagaaagaagcaagcctccgacatggacccgacgaagaagaagaagaagagtaagggtaagaagcatcagcagccgaagctcgagcgccgcaacgccgccaagcacttcgaatacgacgccggatcgttgtgctcgtcgcgcgatgagtacgacgcctcgacgtcgtcgtcgtcgtcgttgcactgcacgcgctcgatggagctcttcgaccgcaagagcttccgaatcgagggcgtggagggcgagttcgac

SEQ ID NO: 2187 - DNA, 258 bp, Glycine max
cacagatcatggcaacctacagcaattgtatgaagaatatttccagctcttgaacatggaccatggccaattcgaactgaattcatttgcagaatctttattagattaaaagaatatcaacaaagatttgttcagttcatgaagatcacattgcttacatataaactttgttgatagatcatatgtaaatatatctgtaaatgatctctgagttatgagatcttttttgtctttaataaatatcgccatctaactcac

SEQ ID NO: 2188 - DNA, 466 bp, Glycine max
ctctgtttctgggactactgatggaataagaagtctgggaaggttgggggactctagtaattcacaagaaaatgatataaaaatgttggaagtgaaacaaggtgagaagtatgcccctggaaatcaaatattggagaactcctctaacactgggcttgataaggaggagaatgtacaagatatattagaagaaagctccaatcattctacccgcaaagaacattttgatcatcatgaatttgaagatcgcactgattctcaagttagagcatctcatcaaaataccacaaccttcaaaaccattgaccaaaaccagatgatagatggaacaagcactcacaccaataacctcagcaagacttgtaaaccttcagaggaagatggtagcctgctaaaagctgataaacatagagttgatgatcaacttggtggcaattctcaaagaagaaaaaacacaactgttgat

SEQ ID NO: 2189 - DNA, 550 bp, Glycine max
gcgtccgaatggcaagaagacgacagaaagggaaactcatacacggaaaataaataagaatttagaaaccttagctaagtcaccatgtctccaaaatcaaaggctaaagcaatgttcttcatcttgaaaataataatgttaaatcttttgccaccaatatatgcatgtgggccatgcactccgccacgtcaccacaaacacccgccgcatcacggcggaggccggccgaaagtgtcccctccgctgccgccgatcataatcaaccctccggtggtaccgccgccggtggtgatatacccaccaccaatctcaccaccgtacccgccgccgcacggtggcagtccttttcctcaaaggacttgcccaattgatgccctaaaattggggctttgcttggatgtgcttggagggttggtgcatgtgggaatagggaacccagttgagaacgtgtgctgtcccgttatacaggggttgcttgatcttgaagctgcaatttgtctttgcactgttattagggctaagcttcttaacctcaatatctttcttcctc

SEQ ID NO: 2190 - DNA, 460 bp, Glycine max
gttcaagagaattctatattatcaggttgctcttgtttatgttcttacaagattggttctcaacgtttcacaggcataccttgctttctttgtcatcaatgacctacaaatggcccaatcagccaaagctttggttcctgctctcatatacatctgcagctttgttgtgtctatagcattacaggagattgcatggactggccgaatgcttaaggcctactactctgctggatgcattctttggattttttgtggtgcagtgatccttcttttaaccacaaatatgagttatgtcatgtacatagtatcggtattcattggcatagcaaatgctctcatgatggtaactggagtaagcatgcagaattttctcattggagagaaccttaatggctgtgcatttgttgttggatcattgagttttttggacaaaatttcatgtgggcttgctttatatgtt

SEQ ID NO: 2191 - DNA, 1116 bp, Glycine max
cctcaaaataaaaaataaaacttttgattatctgcacgttttgcatttgtgtttctgatttttgtgtacctaatcccaatccgtttcttttcaatcttctcttcgaccccatttcctagatctgcttgtttcttccatcatcaactaatcatggttcttcacagagaactcgatcatctcttttcatcccctttcgttgaccctcccaaagatgatgcgaaatccagtggcatgtcaattgaaaagaagattgagttcctcgagagtttgactggaaaggtcacaaatcggaggtctcggaggtggttaaatgatcgtctcttgatggaactagtaccacgtttaaatgcagaggaaattagaggcttgtttgctccaccaccttggggtgatgaagttccaccttcaacattttccatgacgaacatggaggagtgggacagattcaggaatattgacatggataaagaggttaatataatccattccctggaaaactctatagaaaagaggaaaggtcacattgatgctgacaagatggcagtgttgaatggttggcatagaatcgattgtagaacaagagatgcgcttcgccgtagttgtctttctgagctcattgagggttatgaggaatgtgtacgagctttcataacagaaagcacagatggagatattcttgaactacaaattcaggatccttttccatagattgttactgcatggagtttgtgagttctacaatctggcgtcggatacagtgtcaggttataatggcgtggagtcgtcaaggattacaaagataaagaggaagaaaaagggttctcctgtgctcccaaatatcaccctgtcccattttctgaagatgtccaaggaaggaagttggtagtttcttcaggcagtgttgttcatacaataaaactgaaccttagtgttgtcccagggtgaacaatgtgcaatatttcgtatttattcagaatatcactgtaaattagttcgatgacctgtattttaattggtttataccatcggtctacgcaagttgttgattgttggtttacattgttgtagctgattattctgattttaacaaatactatatcttaaggttgaattttc

SEQ ID NO: 2192 - DNA, 930 bp, Glycine max
cagatatggaaaatatggatgctgatacaaaagaatcaggggatcggcaccttgacacagttgagaggttgaagaagcgaagtgagcggttcaagctcccaatgcctagtgaaaaagaggccctcgtcatcaagaagttagaaagtgaacctctgccttctgccaaaagtgaaaatccagtagtagattcagaagtcaaacaagaacgacctgcccggaaaagaagatgggttactaactgaataagaaatctggggcattattattttgcccggagtctaatctatagtttggcccagggaaaatttcagctttgcctgatattttttataattctagaaccctgcaagccagccatgcttagtatctctatctctatcactatcctctatcactatcaaacgttgaaaatggcatctgtagggtttgggacaatttgtacttcagtaatgtcatcttgtagaccttgctacctatacatttattgtacactgtatatatacaagtaaaatgtaaaacatgaactgccactacaggtagcacatattttgggtgtccaaatatggatcttacctagatggatctgggtaatgagaattattggtgaacgttaccaaggttggatgcatttgacattcagaaacagctggcatggctggtaggcattgagcctgatactggcaccttccacttgaggacttagcaggtcaaagcttttggaaaacatcttggtgaagggctatccaaagaaaaacttttggaaaacatcttggtgaagggctatccaaagaaatgcatgctgcttgcttctcaacgtgtttctttaaattgaattatagatgccatgaaatcattttctttgttgaagactttaagcaggtacggattactcatttctccccatttctatctttacattttttacgcgga

SEQ ID NO: 2193 - DNA, 2068 bp, Glycine max
ggcacgtgtcatacgttgtgtttttcggggttccgtttctactccttcaaaaccccctcctcgtgactgtctacgatgcccaaattttttcatagcattttcagaggaacaatggcgggtagggtttcgacgtgcttcttcttcgtgtttgctctttctctccttcttccttttcagatctccgctgaggaatcatcggagaaagagttcgtactcacattggatcactctaactttcacgacactgtcagcaagcacgatttcatcgtcgtcgagttctacgctccatggtgtggccactgtaagaagcttgctcccgagtatgagaaagctgcttctatcttgagtagtcatgatcctccggttgttttggctaaaattgatgccaatgaggagaagaacaaagaccttgcatctcaatatgatgttaggggatacccaacaattaagattctgagaaatgggggaaagaatgttcaggaatacaaaggtccccgtgaagcagatggcatcgttgactatttgaagaaacaaagtggtcctgcttcaactgaaattaaatctgctgatgaagctactgcttttattggtgaaaataaagttgctattgttggagttttcccgaaattttctggagaggagtttgacaacttttctgccttagcagagaagttgcgttctgattatgactttggtcacactctgaatgccaaactccttccaagaggagagtcatcagtttctgggcccgtagttaggctgttcaagccattcgatgaactttttgttgacttccaggatttcaatgtggaagctctagagaagtttgttgaggaatctagtacccctgttgttactgtctttaacaatgaaccgagcaatcaccctttcgttgtcaaattcttcaacagtcccaacgcaaaggcaatgttgttcatcaacttcactgccgaaggtgctgaagctatcaaatcaaaataccgtgaagctgctgagcaatataaacaacagggtgtcagctttttggtgggagatgttgagtctagtcaaggtgctttccagtattttggactgaaagaagaacaagtacctctaattatcattcaacacaatgacgggaaaaagttttttaaacccaatttggaagctgatcacattccaacctggttgaaggcatacaaggatggtcatgttgcaccatttgttaagtctgaacccattcccgagactaacgatgaacctgttaaagtggtagttggggccagtcttgaggacattgttttcaaatctgggaagaatgttctgctggagttttatgctccctggtgtggtcattgcaaacagttggctccaatattggatgaagttgctatctcatatcaaaatgaagctgatgttgttattgcaaaactggatgcaactgccaacgatatcccaagtgaaacctttgatgtccaaggttatcctaccgtgtacttcaggtcagcaagtggaaagttatcacaatacgacggcggtaggaccaaggaagacatcatagaattcatcgaaaagaaccgggataaacctgctcagcaagaacaaggaaaagataaagatgagcaagaacaaggaaaagatgagctttgaaaggagctgttcctctcatgggatatatagacacaaagttacatgtgggttgcacacccttttgtatctcgttatcagaatttagtgaaccataggtgcatctatcttcctttgatctttttatctttttggttttctttatgtatggttttccttaataaaaacgggagcttttatttggcggattagagtttagtgctggaaaagttgtagctggtatccgagttaaattaatggatgtttttagatcacccagtatctctagtctctagatatcttaatagtaattttaagtttcacatcgtcacgtatgttatgatataaaattttcagttaagcgtgttttgcaaaccctgttagtagttgctctgtatttctccgtgtttggccttatacagttatacccatgctctacctaaagtttttttttttttctttt

SEQ ID NO: 2194 - DNA, 573 bp, Glycine max
gcaactgccaacgatatcccaagtgaaacctttgatgtccaaggttatccaaccgtgtacttcaggtcagcaagtggaaagttatcacaatacgaagggggtaggaccaaggaagacatcatagaattcatcgaaaagaaccgggacaaacctgctcagcaagaacaaggacaagataaacctgctcagcaagaacaaggacaagatgagcaagaaaaaggaaaagatgagctttgaaagggagctgttcctcacatgggatatagacacaaagttacatgtgggctgcacacccttttgtatctcgttatcagaatttagtgaaccttaggtgctacctatcttcctttgatcttcttttcttttcggttttcttttatgtatggtttacttaataaaaacgggagcttttgcttggtgtagtagagtttagtgcagggaaaggtgtagctgggatccgagttaaattaatggatgtttttagatcacccagtatctctagtctctagatatcttaatagtaattttaagtttcatatcgtgacgtatgttatgatataaaattctcagttc

SEQ ID NO: 2195 - DNA, 357 bp, Glycine max
cgagaaagttgggttgtagcgtaccacaccgaaccaaaaatggatgtcgccgtctccggaaactctctcgccggaacttccacaccctataaccgtttgcaagaactaaaggccttcgacgaatcccaagctggagttaaaggcctggtcgactccggcatcaccagactcccataaattttcgtccggccgccagaggacctcgccgccgccgacccagtatccggcaaccctgccggtgcccagttcacgatccccataattgacctcgacggccttaccggcgagcgctccggcgtggtggctggagtccggcgggcggcggagacggtggggttcttccaggtggtgaatcac

SEQ ID NO: 2196 - DNA, 490 bp, Glycine max
gttgtttggtattccccttgttacaaggtggtccagtatttcctgtggatatgatgatgttgaaagggagtttctgaagttaatcaatccatttctgatgcgcactgaaggtgtattagatgagtatgataagaatgatggtgttaaaaaaagagtaagtgaacatgatgaattgggtgatgctactaactctgcagcaataggaaatgatgcagactcaaacagtggaacagaggatggcattcattcttcaactgcctttgaattctacttacaaggaatagagagggcgaagataatagtgaaaaaaccattaccacaagtcacaacattgcctggaaagctgcctgtggtagttgtcttgtggtcggataagatgcttaacatgtatgatacatacctgcttgactcattgcctgaggttttcaagccccagctatttgccaagagaatgcaagaatcagtttctatttacaagtgccttgaagcc

SEQ ID NO: 2197 - DNA, 521 bp, Glycine max
acgaaacagatagctgtttctttctctcacgctaccgccatcgttcatcaatggccaccctcaacctctcttcgttgcaagctctctcctcccatcgtttatgctcttcttttccccaaaatacccctaccccttccttcaatttccagctaaaaccctcaattaacccgcgcccaatttctctgaaaccctacgtttccgagaagcctcgcgcgcgcgtggtggcattggccgtgaagagcctcggcgatacggaggcgctggcggtgtcgcctgaaaatgacggccccgccggagaactgccgtcgggcgccggcgtctacgccgtgtacgacacgaacggcgacgttcagttcatcggtttgtcgcggaacattgccgcgagcgttgccgcgcactggaaatcggtgccggagctgtgcggttccgtcaaggctggggtagtggatgaaccagacagagaaactctaacccaagcatggaagtcttggatggaagaatacataaaagatagtggaaaa

SEQ ID NO: 2198 - DNA, 1031 bp, Glycine max
cccacgcgtccggcggagagttgaagagcaagagctagggaaagggacaaacagcccttcggagatctcaagggcctttccctcgttctctccgaactctcactttgtcttcttatttgctccttttcttctctcttccctccccaattattcattccctcatggccaccacgctttattcaacgccttgtcgttcactcgctacttcctcctcctcgtcctcgtcgttgcaaccctctcctctgtcgtctaacctcgcttaccctcaacgcctcaccttctcacagcgctttctcccctccaaggtttctctcaaatctcaaccccaaacttatcagattcccgttctcacccagcagcaggaaggtacagtggcagctgctgtgacccctgttgaaaacggcacttctcacaagcagttgaaggctgacttattgtctcttaagtccccagaggagtctcgggctgaagacggttttgaaaaggatgaaaatgagtccagtgttagtattactgttgttggagcctctggagaccttgctaagaagaagatatttccggctctctttgcgctttactatgaggattgtctccctaagcacttcaccatctatggttatgcacgaagtaagatgactgatgcagaactgagaaatatggttagcaagaccctcacttgtagaattgataagagagagaactgcaatgagaagatggaccaatttctaataagatgtttctaccattctggtcaatatgattctcaggaaaactttgcagcgctagacaagaagctgaaggaacatgagggtgttgaaaaagggatgatctgaaatgactctagtctataacttaatgtagttcagattcctcctgtaagaactaagaagcaagcactgttttaaatttagttttttgaaacagtagtattttattaatgggaactaaatacaatttctcaattgaaagcaaaatcacatcttttttttttccccccactctgcacctctttttttgcatgatattttaat

SEQ ID NO: 2199 - DNA, 539 bp, Glycine max
tgttgtgtgggcggacgcgtgggctgatgcagaactgagaaatatggttagcaagaccctcacttgtagaattgataagagagagaactgcaatgagaagacggaccaatttctaataagatgtttctaccattctggtcaatatgattctcaggaaaactttgcagcactagacaagaagctgaaggaacatgagggtgggagaacttctaatcgcctgttttatctttcaattcctcctaatatattcatagatgctgttaaatgtgcaagcttgtcagcttcttctggcaatggttggaccagggtcattgttgaaaagccttttggccgtgattcagattcttcggctgcattaactagatcactcaagcagtatctgacagaggatcacattttcaggttcgtccaccatcttgggaaagagcttgtggaaaatctttctgttctccgattctcaaatctcatcttttgaacattatggtcaaggcagtatataagaaatgtacagttgatattctcagaagattttggcactg

SEQ ID NO: 2200 - DNA, 860 bp, Glycine max
cccacgcgtccgcccacgcgtccgcccacgcgtgcgcccacgcgtccgcccacgcgtccgcccacgcgtccggacacgctcgtgggtcccaccctcaaggacgaggtgatgaagatcacgccggtccagaagcagacccgggccgggcagagaacccggttcaaggccttcgtggtcgtcggcgacaacaacggccacgtcggtctgggcgtgaagtgcagcaaggaagtggcgacagctattcgtggcgcgattattctcgcgaagctgtctgttattcccgtgaggagggggtactgggggaacaagatcgggaagccccacaccgttccgtgcaaggttacggggaagtgcggctccgttaccgttaggatggttcccgcgcctagaggttccgggatcgtggcggctagggttcccaagaaggtgctgcagttcgctgggattgatgatgttttcacctcctccaggggatccaccaagaccctcggcaacttcgttaaggctacttttgattgcttgatgaaaacctatggattcctgacaccagaattctggaaggagactcgcttctccaaatctccattccaagagtacacagatctactggcaaaaccaacaggaaagactctaatcttggaggaggaaagggtggatgcttgatttgctagttttgctttatggatgttttaggaactttattactttacatactttgttggttctgtgctttacttttggttttgatagacggtatgtctctgtatgcattttgattgtttcaagttttaatttaattgactgtagttttgaataaaaagactaaaagaaaagggcggccgccgactagtgagctcgtc

SEQ ID NO: 2201 - DNA, 1179 bp, Glycine max
ctcacgcgtccggtgcttctcattctcttctaaaaacgccccacgcgtccggctgcactctcttttatccctcaaaaaccaaaaccctaatggcagagcgcggaggtggcgatcgtggcggcgaccgtggcggtttcggacgcggcttcggcgggcgagggcgcggaggtgacaggggccgaggccggcgccgaggtccccgccgcgaggaagaggagaagtgggtcccagtgaccaaactgggccgcctggtgaaggagggaagaatccgaagccttgaacagatctacctccactcgctcccgatcaaggagcaccagatcatcgacacgctcgtgggtcccaccctcaaggacgaggtgatgaagatcacgccggtccagaagcagacccgggccgggcagaggacccggttcaaggccttcgtcgtcgtcggagacaacaacggccacgtcgggctgggcgtgaagtgcagcaaggaagtggcgacagctattcgtggcgcgattattctggcgaagctgtctgttatccccgtgaggagggggtactgggggaacaagatcggaaagccccacaccgttccctgcaaggttaccggaaagtgtggctccgtcaccgtccgcatggtccccgcccctcgtgggtccggaatcgtcgccgctagggtccccaagaaggtcttgcagttcgctggaatcgatgacgtcttcacttcctccaggggttccaccaaaaccctcggaaatttcgtcaaggctacttttgactgtttgctgaaaacctacggttttctaacacctgaattctggaaggagactcggttctccaaatcaccattccaagagtacactgatctattggcaaagccaacagggaaggcccttatcctcgaggaggaaagggtggaggcttgagttagcagaagcagcagcagttttgatgttatcggatgattgtgcctcgtcttaagcatgctaggacccagtaattatatgttttgctaccttttgttatttcattttctattgaaggacatattatatatctccatgctttttgttttttctcaaatttagttgaatggatattatttactgaactttcaaacaggggtttattaaatttttcatgctgtcccaactaaatcataattcaaagaaaagaaaatgtgtttct

SEQ ID NO: 2202 - DNA, 499 bp, Glycine max
ctctcgcgtccgcccacgcgtccggccaaaccttacgcattccatttctctctattcgctctctttcaatcacaacaacatggccgaacgtggaggcggagaccgtgccggtttcggtcgcggctttggcggtcgtggacgcggcggcgacaggggacgagggcggcgcagggcaggagggcgccgcgacgaggaggagaagtgggtcccagtgacgaagctggggcgcctggtgaaggaggggaaaattcggagcctggagcagatctacctacactcgctcccaatcaaggagcaccaaatcattgacaccctcgtggggcccaccctgaaggacgaggtgatgaagatcatgcccgtccagaagcagacccgcgccggtcagcgaacccgcttcaaggccttcgtggtggtcggcgacaacaacggccacgtcggtctcggagtgaagtgcagcaaggaagtcgccaccgccatacgcggcgccatcattctcgca

SEQ ID NO: 2203 - DNA, 581 bp, Glycine max
tatcatcacttgtgtgatttgttacctgtgtatgtgtgtttatgtggatgatcttttgttagagaggctaatgtgtatttgtgtgcatgatcctttggtggagaggctaatgttcatgaaagaattgctatgatgttgtttttagtacccataataatgatgatgctttgtattatttacaggctacttttgattgcttgatgaaaacctatggattcctgacaccagaattctggaaggagactcgcttctccaaatctccattccaagagtacacagatctactggcaaaaccaacaggaaagactctaatcttggaggaggaaagggtggatgcttgatttgctagttttgctttatggatgttttaggaactttattactttacatactttgttggttctgtgctttacttttggttttgatagacggtatgtctctgtatgcattttgattgtttccaagttttaattgactgcaaaaaaaaaaaaaaaaaaaaatattaataataaaaaaaaaaaaataaaaaaaaaaaagggccgccccttttaaagaaccaaacttaactaccccttccttcc

SEQ ID NO: 2204 - DNA, 393 bp, Glycine max
cccacgcgtccgcccacgcgtccgcccacgcgtccgaaacgccgcagtctcttctctctcagaaaccctaatggcagagcgcggaggatggcgaccgtggcggccaccgtggcgggttcggacgcggcttcggcgggcgagggcgcggaggcgacaggggccgcggccggcgtagaggtccccgccgcgaggaggaggagaagtgggtcccggtgactaagctgggacgcctggtgaaggaaggaagaatccgaagcctggagcagatctacctccactcgctgcccatcaaagagcaccagatcatcgacacgctggtgggccccaccctgaaggacgaggtgatgaagatcacgccggttcagaagcagacccgggccgggcagagaaccc

SEQ ID NO: 2205 - DNA, 749 bp, Glycine max
ccgggctttcttacaccaccgaaaggattatcgaaggtgatgcaactgaataattaagaaaagccatttccatagcagcctaagaaaatgaagagcactagcttgttcgctatctttctactttgcgccttcacctcatacctaccttccgccaccgcccaggacgtgctcgacgtggatggcgatccgattcggaacggtttcatatactacgttttgccggcaataagaggaaacggtggcggaatagaacgagccgcactcgggaaagacacttgccctatcactgtagtgcaatctcccaatccaaactctaaggggttagaaattaagtttgaatctgcataccccgcctattacataaacgaaaccctaattttgcaaataaagttcagttacccacagcagtgtgaaagaaagaatccttggtgggccatttctaaggatatatctgaaggaccacctgctattaaactctctgggttccatggtactgaactcggttggtttaaaattcagaaagcttccaaatcctgtgactctaatgactacaagcttgtgttctgccagtatgatgagacctggtgtttggatgtcggcatttacgtcgatcgtcaaggaaacaggcgtttggtgcttgctgttactggtgaaccgtttttggttcactttcacaaaattactgcttcatgcagttgaagaactaattttgtgaaagtgaaccaaattagttcttcaactgcatgaag

SEQ ID NO: 2206 - DNA, 363 bp, Glycine max
  unsure (1)..(363): unsure at all n locations
gacctggtgtttggatgtcggcatttacgtcgatcgtcaaggaaacaggcgtttggtggctggctgttcctggggaaccgttttgggttcactttcacaaaattagttcttcaactgcttgaaccagtaccacactggcccaaaaaaaaaattcatgtgcttaatttctagctgtgagagacaattaagtgtatgaccaataaaatggttttgttgtaggaccaagtctgagagacgccaagcaccacatgaataaaataaccaaagcttggtttgtattgtagccttctctaatgctattggtctggttacatcatctntaattcccctttatatatgcatatgtntattatttattgattt

SEQ ID NO: 2207 - DNA, 1371 bp, Glycine max
  unsure (1)..(1371): unsure at all n locations
caagaattgctaacggttttctctcgtttttcatggccgtgggcaacgtgctaggttacgcagcagggtcctacaaaggtctccacaagatgtttcccttcacggagaccaaggcctgcgacgtcttctgcgcaaacttaaaaagctgtttctttttctcgatcctactgcttctctttttagcaactgttgctctgctctacgttaaggacaagcaagttgaagcaattgccttggatgatgccactcaaccctcttgtttctttcagcttttcggtgctctgaaagagctcaagagaccgatgtggatgctgatgctggtcacagctgtgaactgggtggggtggtttccttacttccttttcgacactgactggatgggtcgtgaggtctacggtggaactgctggggaggacgcgtacgcgaagggagtgcgcgtgggatcgttagggctgatggtaaacgccgtcgtgttgggcttcatgtcgttggcggtggagccgttggggaagatggttgggggagtgaagaggctttgggcgattgtgaactttattctcgcgattgggttcggaatgacggtggtgatcaccaaggtggcggagcaccagcgccggatgaaccccgccgccgtgggccacccctccgagggggtggtggttgggtccatggttttctttggggttcttggagttccccttgcgattactttcagtgtcccttttgctctagcatcaatatactgcagcgcttcaggagcaggacaaggtttatctttgggagttctcaatcttgcaattgtggtaccacagatggtggtgtctgcattaagtggtccttgggattccttgtttggtggtggcaacttgccggctttcatggtgggtgctgcggcagccgcgttgagcgccataatggcgattgtcttgctgccaactccaaagccagctgatgaggccaaggcttcaagcatgatggcagggggctttcactagttaatggagttttgcatgtttcagttttgtcccctgctttaatagaaagaaaaaaaaaacacagtaataaaagaggaaaaattggatagtctcttttgatttgaagctggtgtgtaattatgtaatagacccaccaagtgctacatttgtaaccttttgtagcacccactgaacatagtaattgcagagtttggtgtgattgtacataattgcagtggttggaacttcttggaagacccttcctcttatataattttagtctgtttcagtgttcagaggaatgtggtgattaaggatgagtcttagtttaagactttacatcaattaatgataataagggaaatgctactttttacaatgttcnnnnnnnnnnnnn

SEQ ID NO: 2208 - DNA, 515 bp, Glycine max
  unsure (1)..(515): unsure at all n locations
atctttttcttcttcttctcttcaaaccctaaatcgtggcctcgtaaattaaccaccaaagtgatcgaacttcaataccctaaaagccatggcccaatcccatggatccatcctcactcgatcagtgtggtcctccaatctcgaatcggagttcgacttaatccgatccgtcatcgactccttccctctcatctcgatggacaccgagttccccggcgtcgtcgtgcgccccgacgccggcgacccctccttccgccaccgccaacccgtcgcgcactacgccgtactcaaagccaacgtcgaccgcctccacctgattcagatcgggcttaccctttccgacaacgccggaaaccttcccaccctcggcacctccaacgccttcatgtgggaattcaacttcaaagatttcgacgtcgcgcgtgacgcccacgctcacgactctgtggagttgctgcgccgccagggcatcgatttcgagaagaatcgcgatttcnggattgactcgttccggt

SEQ ID NO: 2209 - DNA, 802 bp, Glycine max
  unsure (1)..(802): unsure at all n locations
nctacgtgtccgcttcacttgatcacagtttcctctattaacactccacattctcacatcttcactcctatatctcgccgagaaaacttctcagctcacagttagcaatggcgccacccgccacctccaccggcggtacgctgccggagctaactaaccgaaccccctttctcggcctcaaactctacgtcctactcctaattgcagttctaatcgtgatcgcaacggtgatcctgatcctcgtgtgcgttcgccggagccggagctcgaagaagcggaaaatgcgagtgaagcacagctccggcgcgatccctctggtgtcgaaggagaatcgtggaggtgaatactctggagctgaaaatcgatgaggaggtggagattgagattgaagagagtgcgtcggcggagtcgccgaacatagggtggggacgatggtatagtctcaaggagcttgagaatgcgactgaagggtttgcggaagtgaatgtgatcggagaaggaggctatgggattgtctacaaaggaattctcatggatggatctgtcgtcgctgtcaaaaatcttctcaacaacaagggccaggcagagaaagagtttaaagtggaggttgaagccattggaaaagtgaaacataagaatttggtggggttagttggatattgcgcagaaggtgctcaaaggatgcttgtttatgaatatgttgacaatggaacattggaacagtggcttcatggtgatgtaggacctgttagccccttgccatgggatataagaatgaagattgctgttggactcaaaaggg

SEQ ID NO: 2210 - DNA, 1120 bp, Glycine max
  unsure (1)..(1120): unsure at all n locations
gatccttcaccctcttggcttgtgaatcagcaccacattcacctgagctttttgtgaggattccaaagcatggcttcccttgcagcatccactgctgctgcttcccttggcatgtcagaaatgcttggaaaccccatcaacctcagtggtgccacaaggccagctccatctgcctctagccctgcctccttcaagactgtggctcttttctccaaaaagaaggctgcacctccaaaaaaagctgcagctgctgctcctgccaatgatgagcttgccaagtggtatggtcctgacagaaggatcttcttgcctgagggtctcttggaccgatctgagatcccagagtacttgaccggagaagtccccggagactatggttatgacccatttggtcttagcaagaagccagaagatttttccaaatatcaggcatttgaattgattcacgccagatgggcaatgcttggtgctgctggattcatcattcccgaggccttcaacaaatatggagcaaactgcggtcctgaggctgtttggttcaagactggagctctgcttcttgatgggggtaccttgaactacttcgggaaacccatccccatcaatcttattgtggctgtcattgctgagattgttcttgtgggaggtgcagagtactacagaattattaatggcctgaacttcgaagacaaacttcatccaggtggtccatttgacccattggggcttgcaaatgatccagaccaagctgcactgctaaaggtgaaggaaattaagaatggaagacttgctatgtttgccatgcttggtttctacttccaagcatatgtcactggagaaggtcctgttgagaacctagcaaaacatctcagtgacccttttggcaacaacttgctcactgtcattgctggatctgctgagagagctccaactctctaaatcattcatcttcatgtttttctccaatcttataatgtacaatacatatcactgagatattaaggcatttggctttgttccttggaacaaattacctctaatttataaaaaaaaaacacancaaaaaaaancaaacaaaaaaaacacaaaagnaccaccncacaaaaccncaaaaattcgg

SEQ ID NO: 2211 - DNA, 613 bp, Glycine max
gattctcacctttccatgcatatagcttagctagctccttcacctccttagtttcgaaagcatggcttccctggcggcttccaccgcggctatgtcagaaatccttggaaaccccgttaacctcagatgcgcaaccaggtctgctccatcaccaactacacctgccaccttcaagaccgtcgcacttttctccaagaagaagccagctccacctccaaagaaaaagcctgccgctgtatcccccgccaatgaggaactcgccaagtggtatggtcctgacagaaggatcttcttgcctgagggtctcttggaccgatctgagatccccgagtacttgaccggagaagtgcctggagattatggttatgatccgtttggtcttagcaagaagccagaggacttcgccaagtaccaggcgtttgagttgattcatgccagatgggcaatgcttggtgctgctggattcatcattcctgaggccttcaacaaatacggagctaactgcggtcctgaggctgtttggttcaaggtttgcaagctttataacaactttcactgtgtcaagttcactaatacattatttttttatgacactcaacaaatgaaattcaat

SEQ ID NO: 2212 - DNA, 343 bp, Glycine max
  unsure (1)..(343): unsure at all n locations
ccctccgcaccccnacgtaagctttgtattctgctcgagacttccaagcatatgtcaccggagaaggtcctgttgagaacctagcaaaacatctcagtgacccttttggcatcaacgtgctccctgtcattgccgggctccgctgagagggcgccaactctctaaagcattcatcttcatgctcttctccactcttataatgtccaatacatctctctgagatattagacttaaggcatttttctttattccctggaagccaaattactgttaatttatagaacctgagtcacatcaattacaatttgaccttaataatccagttcccccaaaatttgcatcc

SEQ ID NO: 2213 - DNA, 454 bp, Glycine max
  unsure (1)..(454): unsure at all n locations
gaagacgacagaaggggatccttcgtccagctagcaccacattcacctgaggcttccaaagcaatggcttcccttgcagcatccactgctgctgcttcccttggcatgtcagaaatgcttggaaaccccatcaacttcagtggtgccacaaggccagctccatctgcttctagtcctgcctccttcaagactgtggctcttttctccaaaaagaaggctacaccaacacctccaaaaaaagctgctgctgctgctcctgccaatgatgagcttgccaagtggtatggtcctgacagaaggatcttcttgcctgagggtctcttggaccgatccgaaatcccagagtacttgaccggagaagtccctggagactatggttatgacccatttggtcttagcaagaagccagaagactntgccaaatatcaggcatttgagttgattcatgccagat

SEQ ID NO: 2214 - DNA, 687 bp, Glycine max
gtcattgctgagattgttcttgtgggaggtgcagagtactacagaattattaatggcctgacagccacaaatatggagcaaactgcggtcctgaggctgtttggttcaagactggagctctgcttcttgatgggggtaccttgaactacttcgggaaacccatccccatcaatcttattgtggctgtcattgctgagattgttcttgtgggaggtgcagagtactacagaattattaatggcctgaatttcgaagacaaacttcatccaggtggtccatttgacccattggggcttgcaaatgatccagaccaagctgcactgctaaaggtgaaggaaattaaaaatggaagacttgctatgtttgccatgcttggtttctacttccaagcttatgtcactggaaacttaacaattccggatgttgagagaattttgaatgcgaagactgttactgccgcaagtccaatggccccggcatgtggtctctacctaggagaggtgaaatatgatctacctaccacttaagtagatagatatttcagggtctctcggaaacactcatgcattcgagttaaaagctgctgtaggattcaatttcaatccaatggactagatttttttatattttgtgtaaatgtgccatttaagggtttttatatcattggaagtcccccagcagaggatc

SEQ ID NO: 2215 - DNA, 430 bp, Glycine max
tcatccaggtggtccatttgacccattggggcttgcaaatgatccagaccaagctgcactgctaaaggtgaaggaaattaaaaatggaagacttgctatgtttgccatgcttggtttctacttccaagcttatgtcaccggagaaggtcctgttgagaaccttgcaaaacatctcagtggcccttttggcaacaacttgctcactgtcattgccgggttctgctgagagagctccaactctctaaatcattcatcttcatgtttttctcccatcttacttaatgtacaatacatatcactgagatattaaggcatttggctttgttccttggaactcaattcttgaatttcttccgatttttctgcgtctaattaaataaaatcataccacaaagcactaaatggacacaaattcttagtttcaaactta

SEQ ID NO: 2216 - DNA, 438 bp, Glycine max
  unsure (1)..(438): unsure at all n locations
cgtacgagctcgatcggtcgtacgagcgttcgtcgagtatcagaccacattcccatagtttttgtgacgattcaaagcatggcttcccatgcaggatgcactgctggtggttcccttggcatgtcagatatgcttggaaaccccatcaacctcagtggtgccacaaggccagctccatctgcctctagccctgcctccttcaagactgtggctcttttctccaaaaagaaggctgcaccaacatctccaaaaaaagctgctgctgctgctcctgccaatgatgagcttgccaagtggtatggtcctgacagaaggatcttcttgcctgagggtctcttggaccgatccgaaatcccagagtacttgaccggagaagtccctggagagtatgtggattctcctctcttatagtccacttntaattcacattaacatgct

SEQ ID NO: 2217 - DNA, 187 bp, Glycine max
gagttccaaggaacaaagccaaatgccttaatatctcagtgatatgtattgtacattaagtaagattggagaaaaacatgaagatgaatgatttagagagttggagctctctcagcagatccagaccaagctgcactgctaaaggtgaaggaaattaaaaatggaagacttgctatgtttgccatgc

SEQ ID NO: 2218 - DNA, 465 bp, Glycine max
actcggactggaattcccgggcaggccgtccgaacttgctccaaagaaaaagcctgttgctgtttcccttgccaatgaggaactcgccaagtggtatggtcctgacagaaggatcttcttgcctgaaggtctcttggaccgatcagagatccccgagtccttgaccggagaagtgcctggagattatggttatgacccgtttggtcttagcaagaagccagaggacttcgccaaataccaggcgtttgagttgattcatgccagatgggcaatgcttggtgctgctggattcatcattcctgaggcctttaacaaatacggagctaactgtggtcctgaggctgtttggttcaaggtttgcaagatctgtcaattgtcacccctgttaaattcattaatacactgattttatgactcaacaaattaagtatttagaaatacctgataacacaattctaagctaag

SEQ ID NO: 2219 - DNA, 720 bp, Glycine max
catttattcacatccatatccactcactattccctcctccttcctttgcctctttcgcttttgctttctaggttttttttttttttttcttgctctttctctgtgtcgatggcgggaaaaggagggaaggggcttgtggccggaaaaaccacggcagcgaacaaggacaaagacaaggataagaaaaggcctgtctctcgttcatcccgtgctgggatccagtttcctgtgggtcgtatccataggcagttgaagcaaagggtgcaagcaaatggacgtgtgggggcgactgctgctgtgtacttggcctccattctggaatatctgactgctgaggtgctggagctggcggggaatgctagcaaagatctgaaggtgaagaggatcacaccaaggcacttgcaactcgctatcaggggagacgaagagcttgacaccctcatcaaagggaccattgctggtggtggtgttatccctcacattcacaagtccttgatcaacaaagctgccaaagaatgaaaatcaaatgcctctttgtttctcctattatgtgtttctttatgtttatgtagtgttagttagtgtagtaggccttcgctactgtttatgaacagatgttgatgttattgtgtaaatggtcattctattggcttttaacttgcctgctgtgatacccctggacctgtaacgctgctggattttaaaggatctttgtttccc

SEQ ID NO: 2220 - DNA, 571 bp, Glycine max
ccgcgcgccgcgagaagacgacagaagggggaaaaaccgtgtttcactcggatcgcgcattcacaaataaggttgaagaggtcactgccggaagaagggagcaacaccatctttcattttccggcgatctcttgtttcttccatcatcaccgttttccggcgatccctaatcctcgcaaacagaaatgacgacatcaaggcgccttgcggacaggaaggtggagaagtttgagaagaacatcacaaaaagaggatttgtgccagacactaccactaagaagggaaaagactaccctgttggcccagtgctgctcggtttcttcgtctttgttgtcattggatcatctctcttccagataatcaggacagcaacgagtggaggcatggcttaaatggagctttgttttggattttgtgtcatcttctctttcttagcctcctcgtagaaaatgctaatacttctctacatgtactgtacttgtactagaccctgttcctgttcatgttttaatgaactttataagaattttgaattaaaaataaaactattgttcgtttaaaaaaaacaaaa

SEQ ID NO: 2221 - DNA, 905 bp, Glycine max
tttgtttttttttttccttgcgaccaaagaacttgatacaaattctcacaattggcaaccaatacagaagctgttcataaattagatttgttacttagtgtactaccttgtgtcgaaggattacattcacttggttgggtgcgtttttttcttggcgaagaacattacaacctttgaaggaaatgatgactttttcttctttttgttcttatttgaggctgattcagcttcagtgttattggaaggaacttttccctttgggcttgatgaatcatgtgcaggctcagttggatcagaagtttgttcattcaattcagtagccttctcttgttgcttttgttcagccctccatgttcttaattcatgttctacagctaactttccttcattggccttttcggaattcccagttgcaattttcagagattctcttcttacagacaactcctcattcagttcttctaacttctccaggcttcttaattcagactcccttgctatctgaatctgagaagtagcagcttcgatcctcgcattggcttgctcctctgccttataggctctcctgctgagctcatgatattcttctagtgtgagtgtcaccattgaggaagagtccttgtcatttttgttgcctttagctgattcactcttctccaatgctgtgattgcatctctggccaacatctcggcaaccttggctgcttcaatctccttttgtgctgccaataaactactttccaatgtgcttgatttggccttggcttgttcaacctcttcttgtgcttcaatcagctctgcctgagctgcctgagcaagtgatttggcctcatcagcctcttgtgctgctcggtttcttcgtctttgttgtcattggatcatctctcttccagataatcagaaca

SEQ ID NO: 2222 - DNA, 478 bp, Glycine max
  unsure (1)..(478): unsure at all n locations
tcggtattcggctcgtgctcgagcgaatcggctcgagcggctcgagcggctcgagcgcacgtcacaaataaggctagaagaggtcactgccggaagaagggagcagcaccatctttcattttccggcgatctcttgtttcttccatcatcaccgttttccggcgatccataatcctcgcaaacagaaatgacgacatcaaggcgccttgcggacaggaaggtggagaagtttgagaagaacatcacaaaaagaggatttgtgccagacactaccactaagaagggaaaagactaccctgttggcccagtgctgctcggtttcttcgtctttgttgtcattggatcatgtaagagaatcatttctacatcatcttaattaattcgtttcttttggtggcaaaatgttttctattttattttcattnttaattataaaaaaacatatgatgttaagtgatttatgtaaacaatcttatct

SEQ ID NO: 2223 - DNA, 797 bp, Glycine max
cttatcctcttcctgcaaaaccctaattcacacccaaagagaaaaaaaaaaaaaaacaacagtggtacgtgatgccaccgaagttcgatccctcgcaggtggtggacgtgttcgtccgagtcaccggcggcgaggtcggcgcggcgagttctctcgccccgaagatcggtcccttgggactctccccaaagaagatcggagaggatattgcgaaggaaaccgcgaaggactggaagggcctccgcgtgacggtgaagctaaccgtgcagaaccggcaggcgaaagtgacggtggtgccatccgccgccgcgctggtcatcaaggcgctgaaggaacccgaaagggacaggaagaagacgaagaacatcaagcacaatgggaacatctccctcgacgacgtggttgagatcgctagggtgatgagcccgcgctccatggccaaggatcttagtggaaccattaaggagattctcgggacttgcgtttcggttgggtgcaccgttgatgggaaggaccccaaggatctgcagcaggagatttctgatggagatgttgaggttcctcttgaatgaagttgctgaaatttcagtggttttttgttgtttcgtttatgttgttttttttgggcaattttggttttttttttacaagataaaggaatttgagtcataggaatggtatgatagttaagactttggtaaatgatatcacattgttgggtttttgagtaattttgtaatggagttgtgatttgtattgttgccaaaaccatttgtcaaattttaaggttggatcgt

SEQ ID NO: 2224 - DNA, 422 bp, Glycine max
gatcgctagggtgatgagcccgcgctccatggcgaaggatcttagtgggaccatcaaggagattctcgggacttgtgtttcggttgggtgcaccgtggatgggaaggaccccaaggatctgcagcaggaaatttctgatggagatgttgaggttcctcttcattgacgttagtgaaatttcagtgtttttttttatttgtttcgattatgttgtttttgttttcggcaattttggtttttttttttacaaggataaaggaaattgagtcatagaaatagtatggtagttaagacttaagagtgctggttggtaaatgatataacattgttggaattttgagtaattttgtgatggagtggtgatttgtaggggttgccaaaccatttgtctaattttaaggttggatcgtaattttgttaaa

SEQ ID NO: 2225 - DNA, 368 bp, Glycine max
attgcacttgactcaaataaaatataagcaaaccagggagggcaacacctcagaaaatggaagaaatgattcaaatttgggttccctgtttatctgcagattttggagacaccaagcctcttggctgagggctcgtccggtgtgaaaaaaaacatcttcaagcagaaacccccacagtctgatgcatcaagtagtggctgctgctcatggtgattgtcatgttcacgaggggcactcaccttccacttcttggtatgatctgggtttcaagtgcgtcaatttcattacatgtatcaactatcaaaaataattttattacaacccatatatctagattaaattattgttctcaagaatttgcttaacgt

SEQ ID NO: 2226 - DNA, 1196 bp, Glycine max
caaatcttcccacgtaacaccaatacacgaacgctggccctcctgccacgtcagccatcacaagtactttccgtaatcaacgagaacttcccaatctacccccactccccctccaaattcaccaacccaccctcccctcatataaaaaagataaaacgcagaacgcaccgcactcccgaagaatccccaatacccatttcggtaaataatataatcgcaatccttcttcactcgcttcgatggcgacagggttactgaagagggcggcgcagaggctcccctcctcgccggggttcaagctggccctcctccgggcccacgcgtcggaggcccaggcccagcaggtggagcccaaggcccgcggcaccccgaccctcaaaaccttccaaatctaccgctggagcccggagaacccctcaaagcccgagctcaaggactaccagatcaacctaaaggagtgcgggcccatggtcctggacgcgctcatcaagatcaagaacgagatcgacccgagcctcacgttccgccgctcgtgccgcgaggggatctgcggctcctgcgccatgaacatcgacggttgcaacggcctcgcgtgcctcaccaagatcccctccgaaggcgccgccaccacgatcacccctctgccacacatgttcgtgatcaaggacctcgtcgtcgacatgacgaacttctacaatcagtacaagagtatcgagccgtggctcaagaggaagaacccaccggtgccgggaaaagagattctgcagagcaagaaggagagggagaagctcgacgggatgtacgagtgcattctctgcgcctgctgtagcacctcttgccccagctactggtggaaccccgagtcctatctcggtcccgctgcgttgctccacgctaataggtggataagcgacagccgtgatgagtacactaaggagagattggatgccattaatgatgaattcaagctctatcgctgccacaccatattgaactgtgctcgtgcctgcccaaaggggttgaacccaggaaagcaaatctcacatatcaagtcacttcagcctaaagcttacactcctattgttagaggcatgatgatgtttgcatttgatcatttgtgttggaactttgtatttcttcaaagttggggatgatttagctatattcttgattaataaaacctgagccccttttgt

SEQ ID NO: 2227 - DNA, 779 bp, Glycine max
ggatcatgcttttaaacagataggattgaaaatcgggcaaatctctcattttgtgtggtagatcttacggcatcaaatccctggttgctttcgcagatcgctcccttttgcaactccaactcccttctcttgatgtccaccatcagaataggtgtgctccaaaaaatcgaatcccattttaattctcagatccaagcttgggagacagagaaagagaaagagaatggacgccattgattctgtgttcgatccgctgagagaattcgcaaaggacagcgtgaggctcgtgaagcgctgccacaaacccgatcgcaaagaattctccaaggttgccgtccgtactgcaattggtttcgtcgtgatgggattcgtcggtttcttcgtgaagctcattttcattccaattaacaacatcatcgtcggatctggttaggatgaagggaactacaatcgcctcaggaattcaggttgtcaagcaaaaggaggcagacagagttcccacatcaatagatcattctatgcccccaatcttagttctgttttcatttttgttttttttcttatctcaggaagcgttacttactttagatgtaaaattttatttatcctctgttagaccttgacacattgttttgatttaggataaggaggaaaaaacaatggtcaaacctgaaacttgatttgattctatgttgactttgctttcgaatttattttgatggctgtttattggcctttgcagaataacgttttgtttcatttagcaagaatctgcagat

SEQ ID NO: 2228 - DNA, 484 bp, Glycine max
agcccaagcgtccgattgaaacagaaaatttgaagagtttgtttattgtgaaaaaaagaaaaatgcaggcagcaaagaaagccatagagacctttaaggaaaccgcagccaacattggcgcctctgccaagtctggcttggagaaaaccaaggccactatccaagagaagaatgagaagatgaatgcagaagatcaaactcaaatggatatggctaccaagaggaaagaagagaagatcaaccaggctgagatggagaagcagcaggcccgtaagtactacgccgctgcaaaacaatacgccatggctgagcacatggcaaagggcaaccacgacaccgccgggcctagaatcgagactgccacacacatcaccagtgggcccgggactgacaatgctatgtactctaacactgggcctgggactgagactgccacgtacaccactagtgggcttgggcatgacaatgctatacccaccagcac

SEQ ID NO: 2229 - DNA, 1199 bp, Glycine max
gtcatccatcccaaaagcattcatcatttaactgctaagctaactgaactctccctctctccttcctcgttcctttcgcctctcactacaaatacacatctcatctcatccgtctctcacttttaatttttctctgcaatctgaaccttccggatttcgtttttctttgttccggtagccagccagccagccatggtgctcttcaatgtttcacgcgttgagaccactcccttcgatggacagaagcctggaacctctggtctccgcaagaaggtgaaagtattcgtgcaacctcattacctccataactttgttcagtcaacattcaatgcattaactgtggaaaaagttagaggtgcaacgctagttgtatctggtgatggtcgttatttttcaaaggaagctattcagattataactaaaatgtcagcagcaaatggagtaagacgtgtttggattggtcaaaatggattactttccactcctgcagtatctgctgttatacgtgaaaaagttggagctgatggatccagggcaacaggtgcatttatactgacagcaagtcacaatcccggtggccctaatgaggattttgggattaaatataatatggaaaacggtggacctgcaccagagggaattactgacaagatatatgaaaacacaacaacaattaatgagtacttgattgcatcagatctgccagatgtggatatcaccacaacaggtgttacaagctttacaggccctgaaggaccatttgatgttgaggtttttgattcagcaagtgattatataaaattgatgaagtcaatttttgattttgaatctatcaggaaactgctgtcatctcctaaattcacattctgttatgatgcactacatggggttggtggagcatatgcaaagagtatatttgtggatgagcttggggcacaagaaagctctttactgaactgtacaccaaaggaagactttggaggaggacacccagaccccaatttgacatatgcaaaagagttggttgctcgtatgggattgggcaaatccgaaccacaagatgatcccccagagtttggtgctgcttctgatggtgatgcagatcgcaacatgatacttggtaaaaggttttttgtcactccttttgtgatgaatttaaatattctctaacttttttgtgtaatatctgtgtatcccct

SEQ ID NO: 2230 - DNA, 418 bp, Glycine max
atctccataagcattcattttcatcaactgctaagctaactgaactctctctcgttgttcccttggcctctcgctctataaatacacatcgcatcattctctcacttgcacattgaaatctgaaccttccggatttcgttttgctttgttcaggtagccagccagtcatggtgctcttcaatgtttcacgcgtagagaccactcccttcgatggccagaagcctggaacctctggtctccgcaagaaggtgaaagtgttcgtgcaacctcattacctccataactttgttcagtcaacatccaatgcattaactgtggaaaaagttagaggtgcaacgctagttgtatctggtgatggtcgttatttttcaaaggaagctattcagattataactaaaatgtcagcagcaaatggagt

SEQ ID NO: 2231 - DNA, 518 bp, Glycine max
ttctgttatgatgcactacatggggttggtggagcatatgcaaagagtatatttgtggatgagcttggggcacaagaaagctctttactgaactgtacaccaaaggaagacttcggaggaggacacccagaccccaatttgacatatgcaaaagagttggttgctcgtatgggattgggcaaatccgaaccccaagatgagcccccagagtttggtgctgcttctgatggtgatgcagatcgcaacatggttcttggtaaaaggttttttgtcactccttcagattccgtggccattatcgctgcaaatgccgttgaagctataccatacttttctgctggtttaaagggtgttgccaggagcatgccaacctctgctgccctggatgttgttgccaaacctctgactttgaaattttttgaggtccccacgggttggaagttctttggtactttaatggatgctggatttgttcagtctgtggtgaagaagttttgggatggttctgccatatcgtg

SEQ ID NO: 2232 - DNA, 2065 bp, Glycine max
caagaaccactccccaaagagacaatgacacatacacacactcttcaatcaaactcgtgcagaagccaaaggccagtgttatctacgtagagacttgtagtccaaagcttggccacaattgaagcacgagagcattatccctttggattaatatagccatctcaaatctcaatttcgataatccgttagcacttttttcagtggctctggtgctgccattacgttccaccaaccgccactgctacacaaatacacttcactacagacaaataaatttcacactcttttgtctgacacgtataacattctgaactaaaactacttggtttttcccacaccgaatactcttcttcaatcaagcgaaggtggtctcacttgactcgattgcaagtgatccacgacacactgttcgcttcacaaaagcttcgaatccaattcctcagtaacatctgcaagaagtcttctccttcaccatgccaccaaagcctttagactatgggtcaataaatgaaaacgtgaagaagagtcaatatgctgtcagaggtgaattataccttcgagcttctgagcttcagaaagagggcaaaaagattatatttactaatgttggcaacccacatgcattgggacagaaaccactgagcttccctcgtcaggttgttgctttgtgccaagctccattcctacttgatgatcctaatgttggactgctattccctgctgatgcaattgcaagagctaaacactatctttcattgacctcgggcggtttaggcgcttatagtgactcccgcggccttccaggagtgaggaaggaagtggctgagttcatactcaggcgtgatggttatccaactgatccagaactcatatatctcactgatggtgccagcaagggggtgatgcagatattaaatactatcatcagaggtcaagacgatgggattttggttccagtcccacaatacccactctactcagcaacaattgctctgcttggtggtacccttgttccatactaccttgaagagacagcaaattggggtcttgatgttaatgaacttcgtcaatcagttgagcaggctcgctttaaaggaataactgttaaagcaatggtgatcataaatcctggaaaccctactggtcaatgccttagtgaagctaatctaagagaggttttgcaattctgctatcaagaaaatttagccttgcttggagatgaggtttaccagacgaatatatatcaggatgaacgacccttcatcagttctagaaaggttttgatggaattggggccacctataagcaaggaagtccagcttatttcttttcactccgtgtcaaaaggttattatggtgaatgtggacagcgaggtggatattttgaaatgaccaacattcctccagagacagttgatgagatctacaaggttgcatcaatatcacttagtccaaatgttccagcacaaatatttatgggagttatgctccatccacctcaacctggagatatttcttatgacaaatttgttagggagagcaccggaatacttgaatcactgagaagaagagcaaggctaatgactgatggattcaacagttgcagaaatgtggtttgtaattttactgaaggtgccatgtattcattccctcaaatacgtttgccgccaagagctttagaggctgctaaacaggctggaaaggttccagatgtttactactgcctcaagcttttggaagccactggcatatccactgttcctggttcaggatttggtcagaaagaaggggtgttccatttgaggacaactattttaccagacgaggaagacatgcccgctattatggatagtttcaaaaagttcaatgatgaattcatggagcaatacgaagacaatagaggttattcaaggttgtaagaaaattatcgtaaaagatgcattatactcttgtgcttttgtaagaaaaacataacctccctttctactatttgtccttggagataattcttaaaccttacactttcttctatatcatctctgaacttacaaaaaaaaaaaaaaaa

SEQ ID NO: 2233 - DNA, 517 bp, Glycine max
gagcaaggataatgactgatggattcaacagttgcagaaatgtggtttgtaattttactgaaggtgccatgtattcattccctcaaatacgcttgccgccaagagctttagaggctgctaaacaggctggaaaggttccagatgtttactactgcctcaagcttttggaagccactggcatatccactgttcctggttcaggatttggtcagaaagaaggggtgttccatttgaggacaactattttaccagctgaggaagacatgcctgatattatggatagtttcaaaaagttcaatgatgaattcatggagcaatacgaagacgatagaggttattcaaggttgtaagaaaatcattgtaaaagctgcattatactcttgcgcttttggaagttcttcatccatccatccctcggagagaaaaaaaacataacctccgtttctactatttgtccttcattggagattattcttaaaccttacactttcttctatatcatctctgaacttacaat

SEQ ID NO: 2234 - DNA, 808 bp, Glycine max
cggaggattcgacgtgtcctaactctgaaactctactattctttctcctccgcagaaccttaacaaccaaaaccaagcattacaattcccaatttcacagaaacaccagaattgatcaaaacacataacaaaaaaaaagtgaaaatggcgagcgctgtggagaaggagggtggcgcgagcgaggaaactttctctttggagcttcctgctccacctggttggaagaagcagttcatcccaaagaaagctggtaccccaaagaaaaatgagattgtgttcactgcaccaacaggagaggagatcaataacaggaagcagctggaaaaatatttgaaagcacaccctggtggtccagctgtatcagaatttgactggggcactggtgagaccccaagaagatctacaagaattagtgagaaggcaaaggcagctcctccatctgtaagtgagcccccaaagaagcgtactaaaagatcatcagcctcacaaaaggaaacttcccaggaagaaaaagaacaggagataaaggaagcggaaatgcaagaagctgatgacaccactaaggatgataatgttatagggaaggaaaaggatgttgtaaaggaaaatcaagatgacaagagtgtggaagatacagatgtcaacaaatccactcattctggagaagagctaaacctgtagaaaatgttgaggtacctattgaagaggaaaaatccaatgctgctgatggagaactacctgcattgaaagataaagttgatgacaaagtttttctgagaaaggatttaagaaaagattgagcaaccac

SEQ ID NO: 2235 - DNA, 909 bp, Glycine max
cgcatacacacactcttcaatcaaattgaagcagaaagccaaaggccagagagagccctgttatctacggagagacccttacactccaaagcttggccacaattgaaggacgagcattatccctttggattaataaagccatctcaaatctcaattccaataatccgttagcacttttttcagtggctctggtgctgccattgcgttccaccaaccgccactgcgcacacatacacttcactacagacaaataaatttcacactcttttgtctgacacgtataagtgtatgacattctctactacaactacttggtgtttcccataccgaacactcttcttcaatcaagcgaaggtggtctcgattgcaagtgatccacgatacactctacgcttcacaaaaccttcaaacccaattccacagaattcttctgcttcaccatgccaccaaagcctttagactatgggtcaataaatgaaaacgtgaagaagagtcaatatgctgtcagaggtgaattataccttcgagcttctgaacttcagaaagagggcaaaaagattatctttactaatgttggcaacccgcatgcattgggacagaaaccactgagcttccctcgccaggttgttgctttgtgccaagctccattcctacttgatgatcctaatgttggactgctattccctgctgatgcaattgcaagagctaaacactatctttcattgacctcgggtggtttaggtgcttatagtgactcccgtggccttccaggagtgaggaaggaagttgctgagttcatactcaggcgtgatggttatccaactgatccagagctcatatatctcactgatggtgcaagcaaaggagtgatgcagatattaaatactatcatcaggggtcaagacgatg

SEQ ID NO: 2236 - DNA, 407 bp, Glycine max
aagctcgagccgcgtgtcccaactctcaagcccgcttcctcttaattactctattcctctttaccctcctctgaacctacaaacaccgaaaccaagcattacaattcccaatttcacagaaacaccagaatcgataaaaacacataacaacaaaagaagtgaaaaatggcgagctcagtggagaaggagggtggcgcgagcgaggaaactttctctttggagcttcctgctccacctggttggaagaagctgttcatcccaaagaaagctggtaccccaaagagaaacgagattgtggtcactgcaccaacaggagaggaagacatgcccgctattatggatagtttcagcaagttcaatgatgaattcatcgcgcaatacgaagacaatagaggttattcaaggtt

SEQ ID NO: 2237 - DNA, 619 bp, Glycine max
acgaggaacactcttcttcaatcaagcgaaggtggtctcgattgcaagtgatccacgatacactctacgcttcacaaaaccttcaaacccaattccacagaaatttgacttggggtgaacacagattcctcagggcacagtgcacagtgcacaagcttttgcttttttttttttttttttcactgttatggtttaaccgtgttttctctattatcttgcaaactggttggtgttgcatttgttaagccatatgttatattcctttaagtattctgagtctacatatttgatgaagttatgattaaatcagagaagtctaattatggagctgagtctacatgtcagtctttacttcactagttagcttgaattctgttattgaagaaatctaagttccttaacgaaaacacttcacatgtagtagagtagggtaattttgtggtgctttgtttcacgagtaacatctgcaagaagtcttctccttcaccatgccaccaaagcctttagactatgggtcaataaatgaaaacgtgaagaagagtcaatatgctgtcagaggtgaattatacccgagcttctgagcttcagaaagagggcaaaaagattatatttactaatg

SEQ ID NO: 2238 - DNA, 505 bp, Glycine max
gggtaccgctgagactaagcatatcaataagcggaggaaaagacactaacaaggattcccttagtaacagcgagcccccacagaagcgtactaaaagatcgtcagcttcacaaaaggaaacttccctggaagaaaaagaagaggagacaaaggaagcggaaatgcaagaagctgattacaccactaaggatgataatgatatagagaaggaaaaggatgttgtaatggaaaatcaagatgtcaagagtgtggaagatacagatgtcaacaaatccactcattctggagaagctaaagctggagaaaatgttgaggtacctattgaaaaggacaaaggaattgaggtctcggaagtttttctgagaaaggatgaagaaaagattgagcaaccacaggaagagacaaaagaatatcgtggatctggggagccagagaaattggaaacatgcactattgctgacaaaaaggttgaagtggaaggagtgaataaagaggaaaacatcaa

SEQ ID NO: 2239 - DNA, 1441 bp, Glycine max
  unsure (1)..(1441): unsure at all n locations
ctcgagccgaatcggctcgagattccacctcatatttcatatgtgttccaaacttcttcttggaatgtcccttcctaaataaccctcaaacaaaagccaccttaacatctcttctctgaaaattctctttagagagatagagagatagagagagagagaaagaaattaagaaaaaatggcagcctgcactgtctactcaacacaatctctgagcacaaattgctccatctcaaccccatcaaagacacagctgagtttcttccaccaaaagcaggtagttttctggaggaacagcaacaggggcaacagcagcagcagaagaagctatgtgataacatgtgcagcaggtgactcacagacagtggtgattggtcttgctgcagactcagggtgtgggaagagcaccttcatgaggaggctgacaagtgtgtttggaggagcagcagagccaccgaagggtggcaaccctgactcaaacacactcatcagtgacaccaccactgtcatatgcttggatgattaccactctttggatagaactggcagaaaggagaagggtgtcactgcccttgaccctagagccaatgattttgatctcatgtatgaacaagttaaagctcttaaggatggaattgctgttgaaaaaccaatctacaaccatgtcactggtctcttggatccccctgagctcattaaaccccccaaaatcttagtcattgaaggcttgcacccaatgtatgattctcgggtcagagatctcttggactttagcatctacctagacattagcaatgaggtcaaattcgcttggaaaattcagagagacatggcagagcgtggacacagtcttgaaagcatcaaggctagcattgaagcaaggaagcctgattttgaagcatatattgatccacaaaagcaatacgcagatgcagtgatagaagtgttgccaacgcaactcattccagatgacaacgagggtaagattttgagagtgagattgatacagaaagagggggttaagtactttagcccagtttacttatttgatgatggctctaccatttcatggataccatgtggaaggaagcttacatgctcctaccctggcatcaaattcttctatggacctgagaactcagtagcttgcaaaaagcttagaattgaacctgccatattatatataccttatatcatcgagccacccagcccaaaatgagtctctcatccatcaaaaacatcattttcttttcttctttcatgttccacaaatccacttttatttcatgtaatttgncattgtatttaagctgttgcatgatataatgaaaaaaacccttttggttgtgctatcccgagaaaaggcggggttggaaatccatagtgtccagagagcactaatgggcttcttcttggcgcacgtccccacccgaaaacaatttat

SEQ ID NO: 2240 - DNA, 1042 bp, Glycine max
ccgtgtcagagatctcttggactttagcatctacctagacattagcaatgaggtcaaattcgcttggaaaattcagagagacatggcagagcgtggacacagtcttgaaagcatcaaggctagcattgaagcaaggaagcctgattttgaagcatatattgatccacaaaagcaatacgcagatgcagtgatagaagtgttgccaacgcaactcattccagatgacaacgagggtaagattttgagagtgagattgatacagaaagagggggttaagtactttagcccagtttacttgtttgatgatggctctaccatttcatggataccatgtggaaggaagcttacatgctcctaccctggcatcaaattcttctatggaccagagacttactacggaaatgaggtgtcagttgtagaaatggatggacaatttgacagactagatgaactaatatacgttgagagccacctaagcaacctctctacaaagttctatggagaggttactcaacagatgttgaagcatgctgatttccccggcagcaacaatggaacaggtctcttccaaaccatagttggtttgaagataagagatttatatgagcagctaatagccaccaaggctgagactccagtggctgcaaaagcttaggaattgaattgaacctgccataataatatatatacatatcgaccgagcgacgcagtcaaattgcattagttctcatcaaaatcatcattttctttcttctttcatgttttccacaatttcactgtgtttcatgttattttgtctattgttattaggctgttctgcatcataattaatgaaaaaaacacatatgtatgtatgtatgtacttatccgagaaaaaaaagtgaggctgagattcagttatgttgatacaagattgagacaataattggcttctctttctctagctttatccatactggcatcgcatattttcttatcaaactttttgtgtgtagtttgtaaattaatcaaagggaatgatctaatattctatttgttggtt

SEQ ID NO: 2241 - DNA, 677 bp, Glycine max
ggggtagtcacagaaacacataaacaagaagacacccaccaatattttgctttctcttttcttttcctgcttataactgccttttgttttggttttaattccacctcatattttatatgtgttccaaacttcttcttggaatgtcccttccttaatacccctcaaagaaaagccaccttaacatctcttctctgaaaattctctttagagagatagagagaggaagaaagaatggcagcttgcactgtctactcaacacaatctctgagcacaaattgctccatctcaaccccatcaaagacgcaactcagttttttccaccaaaagcaggtagttttctggaggaacagcaagaagggcagctgcagcagcagaagaagctatgtgataacatgtgcagcaggtgactcacagacagtggtgattggcctggctgcagactcagggtgtgggaagagcaccttcatgaggaggctgaccagtgtgtttggaggagcagcagagccaccaaagggtggcaaccctgactccaacactctcatcagtgacaccaccactgtcatatgcttggatgattaccactctttggacagaactggaagaaaggagaagggtgtcactgcccttgaccctagagccaatgattttgatctcatgtatgaacaagttaaagctct

SEQ ID NO: 2242 - DNA, 1726 bp, Glycine max
ctctctctctctctctctctctctctctacaatggcctcagccgcatcccccaccactttctctctcctccactccgccaccccttcctcctcctccaccgccacctccgcctccccctccccctcgcgcgtgcagctcacctcctccctccgcgcccgcccgctgcgccgcctgggcttcgccgcggcggacccgctgctcgcggcgagtgtagcggcgcgcgtggcggcggtgagaggaggaggaaagggcgcgaggggggtggtgtcgatggcgaagaagagcgtgggggacctgagcgcggcggacctgaaggggaagaaggtcttcgtcagggccgacctcaacgtcccgctcgacgacaaccagaacatcaccgacgacaccagaatccgcgccgccattcccaccatcaaacatctcatccaaaacggcgccaaagtcattctctccagccacttggggcggccgaagggtgtcactcccaaatacagcttggcacctcttgtgccccggctttctgagctcattggtatccaggttgtcaaggctgaagacagtattggtccagaagtagaaaagttggtggcttctcttccagatggaggtgttcttcttctagaaaatgtgaggttttacaaggaggaagaaaagaatgatcccgagcatgcaaaaaagcttgcctctctggcagatctgtttgtgaatgatgcatttggtactgctcacagggcacatgcatcaacagagggtgttactaaatacctgaagccatctgttgctggttttcttttgcaaaaggaacttgattaccttgttggggcagtatcaaaccccaaaaggccatttgctgccattgttggtggttccaaagtctcatctaaaattggagtgattgagtcacttttagaaaaagttgacatccttcttcttggtggaggaatgatcttcacattttacaaggcacaaggtctttcagtgggttcatcccttgtagaagaagataagttggatcttgctacatcactacttgcaaaagccaaggaaaagggggtgtctctcttgttaccaagtgatgtggtgattgcagacaaatttgctcctgatgctaatagcaaggtcgtgccagcatctgccatccctgatggctggatgggattggatattggtccagattctgttaaatcattcagtgaagcattggatactacccaaaccatcatatggaatggaccaatgggagtgtttgagtttgacaagtttgctgttggtacagaggctattgcaaagaagctggctgatctcagtggaaagggggtgaccacaattatcggaggaggagattctgttgcagctgtggagaaagtaggagttgctagtgtcatgagccacatatctactggtggtggtgccagtttggagttattggaaggcaaagagcttccaggagtccttgctctcgatgaagccgtcccagttgccgtgtaagacaattttcagcttggaaaatttttccatcctcagatttcggtgttgtcaatcttgtaaaagagcatatgttgtaggacccttcggagtctgttagtgtaaattttatcatgcttgagttattattggcttcacacataaattgcgtgtaactgtaaaccctggctgagagccataaattcgaataaatcttttagttgctgccaaaaaaaaaaaaaaaaaaaagggcggccgccg

SEQ ID NO: 2243 - DNA, 691 bp, Glycine max
gtgcggtcaagaattcacgggtcgagggacccatcagacgtcgatacggatgccagaagacgagggagggggaattcacttgcggctgcagcagagaagcactcatcattcttcgtttgtctaagatccgccttctctgaattgtaaaaatgtcgctcggagaaactgcttgttcatacgcagctctcatccttcatgaagatggaatcagtgtaactgccgacaagatcagcaccttgttggaaactgcaaaggttcaagtagatacctattggccaaccttatttgctaaacttgctgagaagaaaaatcttggcgatttgatagccaatgcagcaggcggtggtgcaccagttgctgttgcagctgcccctgttgctgcctcaggtggtggtggtgctgctgctgccgccccagctgctgaggagaaaaagaaggaagaacctgaagaagagagtgatgatgatatgggattcggcttgtttgattagggacattctcaatgatttggttaaattttgtggttctttaccttttaaggttactctatggatattgtaggttttatttttgtgctggttatttatatctgtataagacttgattttgtagttttatgaacttcggaatgtgggttttatgtccatttgagaattcggatgggagaaatgtttactttatattctgtttc

SEQ ID NO: 2244 - DNA, 2828 bp, Glycine max
  unsure (1)..(2828): unsure at all n locations
gactcgagcttccctcacacgttctctgtgactgcctctgttccgccaagcgcagcattttcccaccgttcaggccaccggctgagttaggtttccggcgaggatgggtgctgctctgctgtcggagcttgcgacggagatagtcgtgccagtgtgcgccgtcatcgggatcgtgttctcgctggtgcagtggttcctcgtgtcgcgcgtcaagctcactcccgaccgcaacggaacgacgtcgtcgccgcgcaacaacaaaaacggctacggcgacttcctcattgaagaggaagaaggcatcaacgaccacagcgtcgttgtgaaatgcgctgagatacagaacgctatctccgaaggtgcaacatcctttcttttcactgaatatcaatatgtggggatcttcatggttgcttttgcaatactgatcttcctttttctgggctctgtggaaggcttcagtactaagagccagccctgcacatatgataagagcaagctatgcaagccagcccttgcgactgcattgtttagcactgtatctttcttgcttggtgctataacttcagtcctatctggtttccttgggatgaaaattgcaacctatgccaatgcaaggacaaccttggaagccagaaagggagttggaaaggctttcattactgcatttaggtctggtgcagtgatgggtttccttcttgcagcaaatggtcttttggtgctctacattaccatcaatctcttcaagctttactatggtgatgactggggtggtctttttgaggccatcactggttatggtcttggtgggtcttctatggctttgtttggaagagttggtggaggtatctatactaaggctgctgatgttggtgctgatcttgtcggaaaggttgaaagaaacatccccgaagatgatccaagaaatccagctgtgattgctgataatgttggtgataatgttggggatatcgctggtatgggatctgatctttttggttcatatgccgagtcatcctgtgctgctcttgttgttgcttccatctcttcttttggggtgaatcatgagttgactgctatgttataccctctcattatcagttctgtgggtatccttgtttgtttgctcacaaccttatttgcaactgacttctttgagatcaaggctgtaaaggagattgagcctgcattgaagaaacaactcatcatttccactgccctgatgactattgggattgcaattgttagttggattgcactcccaacttccttcactatcttcaattttggagttcagaaagatgtcaagaattggcagctattcttgtgtgttgctgttggtctttgggcaggtcttattattggatttgtaactgagtactatactagcaatgcatatagtccggtgcaagatgttgcagactcctgcaggactggtgctgcaactaatgttatatttggccttgccttgggatacaagtctgttattattccaatttttgctattgccattagtatttttgttagtttcacctttgctgccatgtatggtattgctgttgctgcgcttggcatgctgagtaccattgccaccggattggccattgatgcatatggtccaatcagtgacaatgctggaggtattgctgaaatggctggtatgagtcacagaattagagagagaactgatgcccttgatgctgccggaaacacgactgccgctattgggaagggatttgccattggttctgctgcccttgtatcactggccctctttggtgcctttgtgagccgagctgctattacaactgttgatgtgttgactccaaaggttttcattggtttgattgtgggtgcaatgcttccttactggttttctgctatgactatgaagagtgtgggaagtgctgctctgaagatggttgaggaagtacgcaggcaattcaacaccattccaggattgatggagggaactgctaagcctgactatgccacctgtgttaagatctccactgatgcttccattaaagaaatgattccacctggtgctcttgtcatgcttacaccgcttgttgttggaatcctttttggtgttgaaacactttctggtgtcctagctggatctttggtgtctggtgtacagattgctatttctgcatccaacaccggtggtgcttgggataatgccaagaagtacattgaggctggtgcttctgagcatgcaagaagccttggtccaaaagggtcagattgtcacaaggcagctgttattggtgacaccattggagaccctctaaaggatacatctggaccttcacttaacatccttattaagctcatggcggttgagtctcttgtgtttgctcccttctttgctacacatggtggcctactcttcaagatctaaaggatttgatagaaaaagagtatcgtccatcatttttctacaacgacagaacaaggaaaagccgtccctttaccaatgccttctcgtttttgtgttagtctttaactcatctgtcatgtcaattccattgtttttgaaaccttttcctcccccaccttgaaacaaagtatattttgtctcatgtagttttaagacaacttgattaggctgagtctgttgcgaaaattttccttgtatgatgacgatgatgtttaccatctcttccgcgtggtcaattttctaaatatattcctttccggatggttcaactttcttaatatttctttaccattttgtttttattgtattgtctgtttttaagagtgtttgcaattgaactaattcaattataactaaaaataaataattcaagatattnaat

SEQ ID NO: 2245 - DNA, 700 bp, Glycine max
ggtcatgccaagcctgattatgccacctgcgtcaaaatttctactgatgcatccatcaaggagatgattcttccgggtgcccttgtcatgctcacaccactcattgttggaatcttcttcggggtggaaacactttcaggtgttcttgccggggctctagtttctggtgtacagattgcaatatcagcatccaacactggcggtgcttgggataatgctaagaagtacatagaggctggtgcgtctgagcatgcaaggaccctgggcccgaagggatctgaaccacataaggcagctgttattggagataccattggagaccctcttaaagatacttcaggtccttcactcaacatcctcatcaagctcatggccgttgagtcgctcgtcttcgcaccatttttcgccactcacggtggcctgcttttcaagatcttttgatttgagggtagagttttctatcaatttatcctatttttctcggagcctgcagcaggcatttttctttgtaccaatataccctctccacctttaggggtagctcttctaattatcaggacttgctcttcaaattatcaggacttgaaatttgttactaaatgtagtagcttttcgatttttcacccagttttatatgataattcgtaatttaattatgaatcaattattacatattataccacttataatatgacacagt

SEQ ID NO: 2246 - DNA, 766 bp, Glycine max
ccctcgcgtccgcgttccctcattcttatttttttcctctcttcactttcactctctctctctctctcagccatcatcatgggagcagtgattctcccagatctcggcaccgagattttgattccggtctgcgccatcattggaatagggttcgccctcttccagtgggtcctcgtctccaaggttaagctctccgctgccagagacgcttcccctaacgccgccggcaaaaatggctacaacgattacctcatcgaagaagaggaaggcctcaacgatcacaacgttgtcctcaaatgcgccgaaatccaaaacgccatttccgaaggagcaacctctttccttttcactgaatacaagtatgtgggaatcttcatggtggcttttgccattttgatattcctattccttggctctgtggaaggattcagcacgagctaccagccttgcacctatgatcaaactaaaatgtgtaagccagctcttgccactgctgttttcagcaccatatctttcctgcttggaggtgtcacatcgcttatttctggattccttggaatgaaaattgcaacttatgccaatgcaagaaccaccctggacgcaagaaagggtgttgggaaggctttcattacggcttttagatctggtgcagttatcggttttctccgtgctgcaaatggtcttttggggctttacattgccatcaacttgttcaagatttactatggtgatgactggtgtggtcttttgaggccatcactggtta

SEQ ID NO: 2247 - DNA, 388 bp, Glycine max
gacttgcggctgcagcagagaagcactcatcattcttcgtctgtctacgatccgccttctctgaattgtgaaaatgtcgctcggagaaactgcttgttcagacgctgctctcatccttcatgaagatggaatcagtgtaactgtatccttttctgtgccctgaggttttgcgtgaacgaagtgtgagtgtatgttcgaaataagttcttttctttgtttcgggttatgttttctagtgttagttgagatttaattcaattgaagaaccgagtaattggtattaaatcaaaactaaaaaaaagtttctgtgaagtaatttttattgaaaatgtggttccaatttaacctgtaatttcttgttgagattcatttgtaaacaaattaaata

SEQ ID NO: 2248 - DNA, 473 bp, Glycine max
gtgggtcttctatggctttgtttggaagagttggtggaggtatctatactaaggctgctgatgttggtgctgatcttgtcggaaaggttgaaagaaaaatccccgaagatgatccaagaaatccagctgtaagaaatataatcctgaaactaggcccccttatttggttgacccaaaaaagagaaggcagtatgacagtgctggatttgaggcccttgatgcggatagcatggacatggaaattgatttatctaatcttgggactgtgaacacaatgtttacagctttattcagcaaaatgggtgtccctatcaagactaccatttcagctattgctcttgaagaagctctgaatggaacagttacaatcagaccccttccaattgttctactttgaacaagatgcaaatggaggctatggtttagcattgcaggaagatagtgagaagactggcaaggtgacatctgcagga

SEQ ID NO: 2249 - DNA, 414 bp, Glycine max
ggatgggttctaaaatggaaggaccgtctaccccagcaattcgacgtgacccatacgaggtattgtccgtgtcgaaagactcaaccgatcaagaaattaaaacggcttacagaaagcttgctcttaagtatcaccctgacaagaatgccagcaatcctgaagcttcggagctatttaaagaggttgcatattcttatagtatcttgtctgacccagaaaagagaaggcagtatgacagtgctggatttgaggcccttgatgctgatagcatggacatggaaattgatttatctaatcttgggactgtgaacacaatgtttgcagctttattcagcaaactgggtgtccctatcaagactaccatttcagctaatgttcttgaagaagctctgaatggaacagttacagtcagac

SEQ ID NO: 2250 - DNA, 375 bp, Glycine max
tctgcctttgcgtccgcggacgcgtgggctaattcttctctgtttttttaactatcttcaaaccttattcttccaagtccatggaaacatcattttccctactgctaggtggctatagtgtgtgctattctgcttttagggatttgccatcggttctgctgcccttgtatctctggccctctttggtgcctttgtgagccgagctgctattacaactgttgatgtgttgactccaaaggttttcattggtttgattgtgggtgcaatgcttccttactggttctctgccatgaccatgaagagtgtgggaagtgctgctctgaagatggttgaggaagtacgcaggcaattcaacaccattccaggattgatgga

SEQ ID NO: 2251 - DNA, 811 bp, Glycine max
ttgaaacactttctggtgtcctagctggatctttggtgtctggtgtacaggtgatgtttcacccaccactatttattactagtttaataacctcaacaacttattggtctttgtcattctcctcttttattctttgcttctaagacatatttccattccatgtttacagattgctatttctgcatccaacaccggtggtgcttgggataatgccaagaagtccattgaggctggtgcttctgagcatgcaagaagccttggtccaaaagggtcagattgtcacaaggcagctgttattggtgacaccattggagaccctctaaaggatacatctggaccttcacttaacatccttattaagctcatggcggttgagtctcttgtgtttgctcccttctttgctacacatggtggcctactcttcaagatctaaaggatttaatagaaaaaagagcatcgtccatcaattttctacaatggcagaacaaggaaaagcccgttcctttaccagtgccttctcttttttgttagtctttaactcatctgtcatgtcaattccattgtttttgaaacctttccatcccccaccttgaaacaaaagtataatttgtctcatgtagttttaagacactcgattaggctgagcctgcagcgaaaattttccttgtaaagaggaggttgacgacgacgacgacgacgatgatgtttaccatctctcccgcgtggtcaattttcttatatattccttttggatggtccaattttcttaatatttccttaccatattttatatatatttatattgtctgtt

SEQ ID NO: 2252 - DNA, 411 bp, Glycine max
cggttcgaggaggtgctattatgcgcctcggacggttcgtcgtgggttgaggaggctgagaaccatatacaaatggtgtctgattgatgcatatgggccaatcaggtgacactgctggaggcattgctcaaatggctggtatgagtcacagaattagagagagaactgatgcccttgatgctgccggaaacacgactgccgctattgggaagggatttgccattggttctgctgcccttgtatcactggccctttttggtgcctttgtgagccgcgctgttttttcaacctgctgatgggagtgactccaaaggttttcatagctttgattgtgggtgcaatgctttcttactgggaaaatgctatgactatgcatagtgcaggctgtgcttgtttgactatgagatgatg

SEQ ID NO: 2253 - DNA, 964 bp, Glycine max
agggaaggtctttttgaggctataactggttatggtttgggtggatcttccatggctctgtttggcagagttggtggtggtatctataccaaggctgctgatgttggtgctgatctggttggaaaagttgagagaaatatcccagaggatgatccaagaaatccagctgtgattgctgacaatgttggtgataatgttatatcccctactcatcagttctatgggcattattgtctgtttgattactactctctttgcaactgatttctttgagatcaaggctgtcaaggaaattgaaccagctctaaaaaagcagcttatcatctctacagtactcatgactgttggaattgcaattattagttggattgctctgccaacatccttcacaattttcaactttggcgctcagcaggcagtaaagagctggcagctgtgcctctgtgtgggctgttggtctatgggctggacttattattggttttgttacagcgtatcattcttgcattgccttcagccctgtaccagatgttgctgattcctgccggactggagctgcaaccaatgtcatctttggccttgctctgggatacaagtctgtcattattcctatttgggccatcgcaatcagcatttttgtgagttttacttttgctgcaatgtatggcattgctgtggctgcccttgggatgctgagcaccattgcgacagggttggctattgatgcctatgggccaatcagtgacaatgcaggaggtattgctgagatggcaggcatgagccatcgtattcgtgagagaactgatgcccttgatgctgctggcaacactactgctgccataggcaaaggatttgctaatgggtctgctgcttttgtgtctttggccctaattggtgcatttgggaaccgaacttgaattttgacttgtgatgtcttgacttccaaagtctttattggactcat

SEQ ID NO: 2254 - DNA, 1169 bp, Glycine max
gaaagtttgacaaattcagagagaaaagcttcactatctattaagaaagttgattacatgattgtttatacatctgatctagtaaaagcagttcgcaaggcagctggaaacatagagaaaccattggagggtttccatatagttgttgatgcaggcaatggagcaggaggcttttttgcagcaaaggttctggaacctctgggggcaataacttctgggagtcaatttttggagcctgatggcttgtttccaaatcatatcccaaatcctgaggacaaaacagcaatgaaagctataacccaagcagtccttgataacaaagctgatcttggaattatctttgatactgatgtggacagatctgctgctgtggatttcactggccgtgaattcaacaggaatcgtttaattgccttaatggcagctattgttcttgaggaacatcctggaacaactattgtcacagacagtgtgacttctgatgggcttaccacgtttattgagaagaaacttggtggcagacaccatcggttcaaaagaggctacaaaaatgtgattgatgaagctattcgtttgaattctattggcgaggagtcacatttggcaattgaaactagtggacatggagctctcaaggaaaatcattggcttgatgatggtgcatacctaatggtcaagatcttaaataaacttgcttctgcaagagcttctggaaagggtggtggaagcaaggttttgactgatctaatagacggacttcaggagccagcttttgctgcagaactgagattaaagataaaccaaaaccatccagatcttaaaggaggatcttttcgggaatatggagaagctgtgctgaaacatttggagaattcaattggctctgatccaagtctgctcaaggctcctgtgaactatgaaggggtccgagtttctggctatggtggatggttccttcttagattatcactccatgatcctgtacttccccttaacattgaggcacctagtaatgaccatgctgtgaagcttggacttgctgtgcttgcagctgtaaaggacttcgcaggtttagacacatcagccttgaacaagttggtaggagcatcataattcgatgctgtacgcttctatttttgcattatacaaagaggttctctatatgtgca

SEQ ID NO: 2255 - DNA, 703 bp, Glycine max
gacgcagcgagcgagccacgaaaatattcatcacacagggttttggtttattattccaatttttggttttcccttttgttggatattagagtgtgtaagaaagagaagaaaggagagagtgatgggaaggggaagagtggagttgaagagaattgagaacaagatcaacaggcaagtgacctttgcaaaacgaaggaacgggcttttgaagaaagcttatgagctttccgttctttgtgatgccgaggttgctctcatcatcttctccaatagaggaaagcagtacgagttttgcagcggttcaagcatgctcaaaacgctggagaggtaccagaaatgcaactatggagcgcctgaggacaatgtggcaacaaaggaagccttggtattggagttaagcagtcaacaagaatacttgaggctgaaagcacgttatgaagctctacaacgttctcaaaggaaccttatgggagaagatcttggccctctaagcagcaaagagcttgaatcacttgaaaggcagctagattcgtctttgaagcaaatcagatcaataaggacccaattcatgctggatcagctttctgatctacaacgtaaggtatgaggtcaattatcctttttctttaattaatttgtcaatgtttaactgctattcttcttcttccgcatatttcccttgctcaccggttcaattatgcat

SEQ ID NO: 2256 - DNA, 669 bp, Glycine max
  unsure (1)..(669): unsure at all n locations
ccgggccggaatacccgggcggacccacgcggacaccaccacgganggggcaattgacgggggagaacaagatcaacaggcaagtgacctttgcaaaacgaatgaacgggcttttgaagaaagcttacgagctttccgttctttgtgatgccgaggttgctctcatcatcttctccaatagaggaaaactgtacgagttctgcagcagttcaagcatgctcaaaacgctagagaggtaccagaaatgtaactatggtgcgcctgaggctaatgtgtctacacgggaagccttggtattggagttaagcagtcaacaagaatacttgaggctgaaagcacgttatgaagctctacaacgttctcaaaggaaccttatgggagaagatcttggccctctaagcagcagagagcttgaatcacttgaaaggcagctagattcgtctttgaagcaaatcagatcaatagggacccaagtcatgctggatcagctttctgatctacaacgtaaggaacactttctaggtgagtcaaacagagatctcagacaaaggttggaagagtttcaaataaatccactccaactgaatcccagtgctgaagatatggggtatggacgccatccaggtcagccccaaggccatgctctctttcaaccattggagtgtgagc

SEQ ID NO: 2257 - DNA, 311 bp, Glycine max
gctacatatatatattatagagattttatacattctaaattttgtgagtgtggacatactctgagcgtgagaaagagaaggggaagaaagagagagagtgatgggaaggggaagagtggagttgaagagaattgagaacaagatcaacaggcaagtgacctttgcaaaacgaaggaacgggcttttgaagaaagcttatgagctttccgttctttgtgatgccgaggttgctctcatcatcttctccaatagaggaaagcagtacgagttttgcagcggttcaagcatgctcaaaacgttggagaggtacc

SEQ ID NO: 2258 - DNA, 640 bp, Glycine max
gaattaaagggagggtaccagctgtcaaatagtgctttccacacactttcaccaatttataaattatttgcagttacactccaagtctactttttctttggcagcttagccttcctattttggaaaccctcttcactgctctcccaccttttttgtgtgtatgtgtaggagcttctcttctactctattcactgcactcttattaataaatatcagtgcttggaaagcagaagagaagatccatagctaagatagatctcgagatgggtcgtggcaagattgagataaagttgattgagaaccccaccaacaggcaagtcacctactccaagcgaaggaatggtatcttcaagaaagctcatgaactcagtgttctctgtgatgccaaggtttcactcatcatgttctctaaaaacaacaagatgcatgaatacattagccctggcctcacgacaaaaaagatcattgatcagtatcagaagactttgggggatattgatctgtggcattctcactatgagaaaatgcttgaaaacttgaagaagctgaaagatattaacaataagctcaggagacagatcaggcataggataggtgagggcttggacatggacgacatgagcttccagcaactgcgcac

SEQ ID NO: 2259 - DNA, 373 bp, Glycine max
gaagatccatagctaataagctaggttcagtagttagtgagtgatcgatatctggagatgggtcgaggcaagattgagataaagttgattgagaaccccaccaacaggcaagtcacttactccaagcgaaggaatggtatcttcaagaaagctcatgaactcagtgttctctgtgatgccaaggtttcacttatcatgttctctaaaaacaacaagatgcatgaatacattagccctggcctcacgacaaaaaggatcattgatcagtatcagaagactttgggggatattgatctgtggcgttctcactatgagaaaatgcttgaaaacttgaagaagctgatagatattaacaacaagctcagaagacaga

SEQ ID NO: 2260 - DNA, 1640 bp, Glycine max
cgcgtacgtaagctcggaatgcagttgggcagagttggttctttctttccccaatttgtgagtgttactattgaatcgattggattgacatggcgagcgcgatggttgaggacgccaacttcgaagatgaccagctcgccaatatgaccaccgacgacgtcgtcagagcttctcgtcttctcgacaacgagattcgcatcctcaaagaagagttgcagaggaccaatttggagttggaatcgtacaaggacaagatcaaggagaatcaggagaagattaagctcaataagcagttgccctacctcgttgggaacatcgttgagatattggaaatgaacccagaagacgaagctgaagaagatggtgccaatattgatcttgactcacaaaggaagggaaagtgtgttgtgctaaagacttctactcgacagacaatctttctacctgttgttgggcttgttgaccctgacaagttaaaacccggtgatctggttggtgttaacaaggatagttacttaatcttggataccctgccttccgagtatgattctagagttaaggccatggaagttgatgaaaagccaacagaggattacaatgacattggcggattagagaagcagattcaagaattagttgaagccattgttttgcccatgacccacaaggagcggttccaaaagttaggagttcgtcctcccaagggagtgctgttgtatggacctccagggactgggaaaacattgatggctcgtgcctgtgcagcacagacaaatgccacttttctgaaattggctggccctcaactggtccagatgttcattggagatggagcaaaacttgttcgtgacgcctttcaactagcaaaagaaaagtcaccatgcattatttttatagatgaaattgatgcaattggtaccaagcgttttgatagtgaagtaagtggagacagagaggtacaacgaactatgttagaattgcttaatcagcttgatggttttagcagtgatgaccggatcaaggtgatagcagcaactaaccgtgcagatattcttgatcctgccctgatgcgttctggtcgtttggatcgtaaaattgagtttccacacccaagtgaagaagcaagagctcgaattctacagatccattcgaggaagatgaatgttcacccagatgtcaactttgaagaacttgcccggtccacagatgatttcaatggcgcacaactgaaggctgtctgtgttgaggctggcatgttggctctacgccgtgatgcaactgaggtgaaccatgaggactttaatgaaggtattattcaagtccaagcaaagaagaaagcaagcctcaattattatgcataggctggattttggaacaagctatttttcagtttacgaagatctattgagacatatcaagccaatggaaaacctaagtcgatgtttgacatttgttatctatttcttttcttttttttggcaatctaatggtatgataacccacagcatactggaatcatcgtatcttttaaaaacatgcaatctgatcattaatttcgtggtagtaatagaaatttgatctgcttgctatgtttaaaaaaaaaaaaaaagggcggccgctcgcgatctagaactagctta

SEQ ID NO: 2261 - DNA, 1808 bp, Glycine max
aatctggctgaaattcatgaaaactgcatttcacgggtaatgtgtccttacagtaccaataatgttgttctaaagcagaacacaaactttattggttctgatctgaaccacacactcatccatcacatagtatcatagcctcttcaataattcaattgactcattcctggaaacctgtgtggtgaatctcaaccgcacacatcatgctaccttatcatctttattaactcgttcatttccaagccagtttcactcaccccgctgaactcatcacttactggaagccttgttgtgagtaagagaaaaggcttcctgcaccgagcacaccaacttgatacctctgattctttctttgcttagaattccacagaatatggagactgttcttttcaatcactccccacctttggaattcaagggtttgagcaaggaggaggaagactcattgctagggcaagtggaaatatggaggtacatgacatgcttcacggactccgtggccttgaaagctgtcatagagcttcgtatagcggacatactagaccgttatggtaaaccactatccttgtcgcaaattgtggagaacatagaagacgcaccctccccagatgcctctcttctccagagagtcctgagagtgatggtgcgcagaaagatcttcagtgcacaagaatcagagacaggagaaaccctcttcggcttgacacgagcctcgaagtggatccttcgcgacacgaaaatgaccctagcacccatgttgctgctggagaaccacccaattcacctgaaccctgcgcactacatcagtgagattattagagaaggcacaaaaaatggcactgctttctttaagtgccatggacatgagcaatttgagatgacgggtttggatcctgagtataataggttgttcaatgagggcatggtgtgcactgctagggttgtgtccaaggctgtgatcactggctacaaagatgggttcaaccagattaagtccttggttgatgttggaggtggcattggagggtctctttcggagattgttagggcttatcctcatatcaatgccatcaactttgacttgcctcatgtggttgccactgctcctaagttcgatgggatcacccatgttggaggtgacatgttcgtgtccattcctagtgctgatgctatttacatgaagtggattctgcatgactggagcgacgagcactgcatcaagatcttgaagaactgcaggaaggcaataccagagaagacaggaaaagtcataatcgtggatcacgttcttcgacccgaaggcaacgaactcttcacagacgttggcatcgcattcgacatgatgcttctcgctcacaacgccggtggcaaagagaggaccgaagagaactggaagtggctgttcaaggaaaccggtttcgcgcgttacaacatcatcaagatcaacgctctcccttccatcattgaggcgtttccaatctgaagaagatgccactaccacaactgcatgtggtttttatgttgcatgtgttgttgttattattaacagctatatgatcttcgttttaattttgtggttttccttcctgcccttgttatgtttgtgcattaaataaaagtaagaaatgccccaccactaagtaatgctatatggattatgtatgtgttccatatatgtcaagtgagtggtgtgtggttgtgaagaatctattgcttttaatgaatcagatcctttggtgtgaaaacttgctttatgtgatgttttctctcctcgctccatatatatatataataaaaagctcaagttc

SEQ ID NO: 2262 - DNA, 520 bp, Glycine max
caaaattggaaacagaaataaaaacgcatgccctcgtctctttttgaaaacactttagtttcgcaaagttgattctttctctctttatctttctttccccaatttgtgagtgttactgttgaatcgattggattggcattaggttgatctgaaatacgcaattgacatggcgagcgcgatggtagaggacgcgaacttcgaagatgaccaactagccaatatgaccaccgacgacatcgtcagagcttctcgtcttctcgacaacgagattcgcatcctcaaggaagagttgcagaggaccaatttggaattggaatcgtacaaggacaagatcaaggagaatcaggagaagattaagctcaataagcagttgccctacctcgttggcaacattgttgagatattggaaatgaacccggaagacgaagctgaagaagatggtgccaatattgatcttgactcacaaaggaagggaaagtgtgctgtgctaaagacttctactcgacagacaatctttcta

SEQ ID NO: 2263 - DNA, 702 bp, Glycine max
caagtttgtgttgtgttgtgtgtgcatgaaaggttgaaccccattttccattgacaattgaactgatggcgagcgccatgttaggggatgctaccacgagctttgaagatggtaagttggcgtctatgaccaccgatgacgtcgtcagagcctctcgtattctcgaaaacgatattcgcattctcaaggaagaggtgcagagatcgaatcgggaatgggaatcgtacaaggagaagatacaagataatgaggagaaagttaaacttaataagcaattgcccctacctcgttggtaacattgttgagatattggaaataaatccagaagatgaagcagaagaagatggttccaacattgatcttgactcccaaaggaaaggaaaatgtgttgtgctaaagacatctactcgacagacaatctttcttcctgttgttgggcttgttgaccctgccaagttaaaacctggtgatctggttggtgttaacaaggatagttacttaatcttggatgccctgccttctgagtatgattctagagttaaggccatggaagttgatgaaaagccaccaatgtcattgtagtcctcggttggctggagaacatagatgatgcaccctccccagatgcctctcttctacagagagtgatgagagtgatggtacgtagaaagatcttcatgcagaacaatcagagactggaga

SEQ ID NO: 2264 - DNA, 615 bp, Glycine max
aattcttaagccttacctctatctttccccataaaatgtaagatgcatattagcacaataattaacccaaattactaataactgctggtcatgttgtactttactaagtttattaaacaaaatacaaatcttttggatctgtatagtgagttcactgtgcattaatctctctatttagggtaactatcaaatagttgcaatatataatatataatgttgacagatatataatataataaataacatgtcaattcctctcatgacattgtggtttgtagatatcttctcaaaccatcaaagtgggggtcgaacatgatatcaaataaataaaaataaaataaagggtacatactccacaaaattacataaacaggtagagagggatacagtaattaaatttcaagtcccattattaagattattttagtgatgatttaaccatatacttggcactatttctacgcaccttgaattccaaaggtggggagtgattgaaaagaacaatctccatattctgtggaattctaagcaaagaaagaatcagaggtatcaagttggtgtgctcggtgcaggaagccttttctcttactcacaacaaggcttccagtaagtgat

SEQ ID NO: 2265 - DNA, 554 bp, Glycine max
aaagaaacaggtttcgcccgttacaacatcatcaagatcaacgctcttccgtcctctctttgccaccgacgttggcattgcatttgacatgatgcttctcgctcacaacgccggcggcaaagagaggacggaagagaactggaagtggctgttcaaagaaacaggtttcgcccgttacaacatcatcaagatcaacgctcgtccttccatcattgaggcgtttccaatctaacgaagaggaagccactacgactgcatgtgcgtgggtgtatgttgcatgtgttgttattattactaacagctatgtgatcttcgtgtgatgtggttttcatccctacccgtgttatgtttgtgtattaaataaaagtatgaaacgccccaccactaagtaatgctatatggattatgtatgtgttccatatatgtcaagtgagtggtgtgtggttgtgaagaatctattgcttttaatgaatcagatcctttggtgtgaaaaaaaaaaaaaaaaaaaaaaaaaagggggggcgccaataagggagctcgtgaaccgggaaatt

SEQ ID NO: 2266 - DNA, 740 bp, Glycine max
accagaaagcgtttcgatagtgaagtaagtggagacagggagttacagcgaacaatgttagaattgctcaatcagcttgatggttttagtagtgatgatcgtgttaaggtgattgcagcaacaaaccgtgctgatattcttgatcctgcccttatgtgttctggtcgattggattgaaaaattgagtttccacacccaacattaactgatccattctcggaaaatgaatgttcatcccgatgtcaatgcagcacaacttaatgaaggctgtctgtgttgaggctggcatgttggctctacgccgtgatgcaactgaggtgaaccacgaggattttaatgaaggtattattcaagtccaagcaaagaagaaagcaagtctgaactattatgcataggctggattgtggaacaagctatttttcagtttacaaagatccattgagatatttcaagccaatggagaacctaagcggatgcttgacatttattatctttttcttattttttggcaatctttaatcgtgtgataaccttcagcttgccagagtcatgatatatttttttttatatataaaaaacacaatctgatcgtcaactttgtagtagcaatagaaatttgatcggcttgctatatttaaaatcttgttgatcaggctgcgaatctctatgataaacaaacaagacgtgttaaggctgtgatcagaattttattttaacctgtggactatctactttttata

SEQ ID NO: 2267 - DNA, 676 bp, Glycine max
  unsure (1)..(676): unsure at all n locations
gcctcccatttgcggcaatgcaaatgcacctcctctttccctcattaattgaaatcgctgccccagatcgtgcaagtgaagaagctgctagctattagctatggctagaggaaagatccagatcaagaggatagagaacaacaccaaccgccaggtcacttactctaaacgacggaatggccttttcaagaaggccaacgagcttaccgttctctgcgatgccaaggtttctattattatgttctccagcactggaaaactccaccagtacatcagcccctccacctcaacaaagcagttcttcgatcaataccagatgactctgggagttgatctctggaactctcattacgagaatatgcaagagaacttgaagaaactgaaagaggtgaataggaatcttcgtaaggagattacgcagagaatgggagattgtctgaacgagctgggcatggaagatctcaagctccttgaggaagaaatggacaaggccgccaaggttgttcgtgagcgtaagtataaggtgataacaaatcagattgacacccagaggaaaaagtttaataacgagaaagaagtgcacaacacgctcctgcatgacttggatgcaaaagcagaagattcacgttttgcattgatagataatggangggagtatgagtctgtgatcggattc

SEQ ID NO: 2268 - DNA, 459 bp, Glycine max
ttggggttttggagagagagatgggaaggtccccttgctgtgagaaagcacacacaaacaaaggtgcatggaccaaagaagaagatcatcgcctcatttcttacattagagctcacggtgaaggctgctggcgctctctccccaaagccgccggccttctccgttgcggcaagagctgtcgtctccgctggatcaactatctccgccctgacctcaagcgcggcaatttctccctcgaagaagaccaactcatcatcaaactccacagcctccttggcaacaagtggtctctaattgctggtagattgcccggtagaactgacaatgagatcaagaattactggaatactcacatacgcaggaagcttctgagcagaggtattgaccctgccactcacaggcctctcaacgactcttctcatcaagaacctgctgctgtctctgcccctcctaaacatc

SEQ ID NO: 2269 - DNA, 550 bp, Glycine max
gaagaagaccaactcatcatcaaactccatagcctccttggcaacaagtggtctctaattgctggaagattgccgggtaacacggacaatgagataaagaattactggaatactcacataagaaggaagcttctgagcagaggtattgaccctgccactcacaggcctctcaacgatgacaaggtattggaacgctgccctgacttgaaccttgagctaaccattagtcctccccgtcaacctcaatctgatcagcatcacttgaagcccgttgggagaaactcaaacctttgctttgcctgcagtttgggtttgcaaaatagcaaagatcattgtagctgtgcgctcaacactgccaacgctgcttctggccatgatttcttggccttgaaaaccagcgttttggaaatgaaatgagtcaaattcatttggaatctttcttccctaattaattagttgttaatggatgcaaatgattgcctgcccaatttcctcgtggagccctttctattattcctatgttcatgtacatgtgcgtaagactacaaac

SEQ ID NO: 2270 - DNA, 350 bp, Glycine max
ggaggcaaagagagagagagagaagaccaaaggagggtaaggaaaaacttcagcagaggaattccttgcagaagggtgcaactttactccctctctttctctcttgctctttcttgtcagggtttggtcatataagaagccatggccagttttggaggaaccacacaaaagtgcatggcttgtgccaaaactgtgtatcttgttgataagttaactgcagatagccgtgtctatcataaggcttgcttccgatgccaccattgccgtaatacccttaagcttagcaactactgttcttttgagggggtgctctactgcagacctcactatgatcaactctacaagcgaac

SEQ ID NO: 2271 - DNA, 1829 bp, Glycine max
ccctcgagccgattcggcacgttgcttggcggggataagattaaagattcaacaatggcctctgcttctgctactcttctcaagtcatctcctgttcttgacaagtgcgagtgggtcaaaggccagacccttcgccaacctctcgtgagatgtaacccttcctcagcatcagctctcaccatcaaagctgcttcctatgctgacgagctcgtcaaaaccgccaaaacagtggcctcaccggggcgtggtattttggcgatggatgagtcaaatgcaacctgcgggaagcgtttggcatcaattgggctagagaacactgaagctaaccgccaggcataccgtaccctccttgtgacagttccaggacttggtcagtacatctctggtgccattctctttgaggaaactctctaccaatccacaactgatggcaggaagattgtcgacgtgctccttgagcaaaacattgttcccggtattaaagtcgacaagggtttggtgccccttgctggttccaacgacgagtcatggtgccaaggtcttgatggtcttgcctctcgctcagctgcatactacgagcaaggtgcccgtttcgccaaatggcgtactgttgtgagcatccccaacggtccctctgctctggcagttaaggaagcagcctggggtctggctcgctatgctgcaattgctcaggacaatgggttggtcccaattgtggagccagagatcttgcttgatggggagcatggtattgacagaacttttgaagtagcccaaaaggtctgggcagaggttttcttctaccttgctgagaacaatgtcctttttgagggtattctccttaagcctagcatggttacacctggagccgagtccaaggacaaggccagtcctcagacagttgctgattacaccctcaagctccttcacaggagaattccccctgctgtccctggaattatgtttttgtctggtggacagtctgaggttgaagctaccctcaatttgaatgccatgaaccaatctccaaacccgtggcacgtgtcattctcgtatgccagagccctccaaaacactgccttgaagacatggggaggccgcccagagaacgtgaaggcagcacaagatgcactcgcattccgtgccaagtccaactcactcgctcagcttgggaagtacactggtgagggtgaatccgaggaagccaagaaggagttgttcgtcaaaagctactcctactaagatgtttgcagtgaatatgatacttgttaggcagcagcacaccagcagttacagtaggtgttgacggacgatgaagtggaagaagactaatttgtctaaaatgtaatgtttttatagtcttggagactatttttgtttatggttaaatgcacctttacagcttaataaaccttttgctgtgagttgtgtacttgattgattatgtctcaatatataacaaacatggttgaatctcggcaatcaatgaaaaaacccattaaaaatgtgtggaaattgaaaaaacccgttaaatgatctgtgggaggaatatagcggcatgatccattgcactatttgctggttgaatttggtattgctgagaagctcttccaagacaattgtatgtcgtcgttatttatttgttatgacaatcactggtacatatacttttactacccaactcacacccaattaggacaagagtacaagacttgtgttggccttgtgtctgttgcattagtgaacccatatcgggtgaactgaaactgatcaacgaagcactgcaggttcagcatattataaagtcaaggtgtcactattttttcttc

SEQ ID NO: 2272 - DNA, 626 bp, Glycine max
gaaagaggtgcatacaactacaaaggttgctgtaggagataagattgcagtagtgctaagtgctaacacctgcagtgaacaatggcctctgcatcagcatctctgctcaagtcttcacttgttcttgacaagtctgagtgggtgaagggacaaacccttcgccaaccttctgcatcagttgtgagatgcaaccccaccaccccatcaggcctcaccatcagagctggttcctatgctgatgagctcgttaagaccgcgaaaacagtggcttcaccagggaggggtattttggccatggatgagtccaatgctacctgtgggaagcgtttggcttcaattgggctagagaacactgaagctaaccgccaggcataccgtaccctcctcgtgacagttccaggccttggtcagtacatctctggtgccattctctttgaggaaacactctaccaatccacaactgatggcaggaagattgttgacgtgctcctcgagcaaaacattgttcccggtattaaagtcgacaagggtttggtaccccttgctggttccaacgatgagtcatggtgccaagtcttgatggcttgctctcgtcggctgatatacacaagtgccgtcgccaatgg

SEQ ID NO: 2273 - DNA, 772 bp, Glycine max
atgctccccatcaagcaagatctctggctccacaattgggaccatggtattgatagaacttttgaagtagcccaaaaggtctgggcagaggttttcttctaccttgctgagaacaatgtcctttttgagggtattctccttaagcctagcatggttacacctggagccgagtccaaggacaaggccagtcctctgcaagttgctgattacaccctcaagctccttcacaggagaatcccacctgctgtccctggaatcatgtttctgtctggcggacaatctgaggttgaagcaaccttgaacttgaatgctatgaaccagtctccaaacccatggcacgtgtccttctcctacgccagagctctccaaaacacctgcttgaagacatggggtggactccctgagaacgtgaaggctgctcaagatgcactccttttccgtgccaagtccaactcactcgctcagcttggaaagtacactgccgagggtgaatctgaggaagccactcggggaatgttcgtcaaaggttactcctactaagatcatcttgccacacatgctacagtaacccaaggatccaacattaatttgtctaaattgtgtttgtggtttatatagtcttggacactatttttaatgatgattattacttgtaccttttctacttaatgaacttctagccaatcaattacgaatcttggacttcaacgtgcaccatcatgttcgaaactcttggaactttgataaaaagaaaattttgattactcacccc

SEQ ID NO: 2274 - DNA, 547 bp, Glycine max
gacgtcgcatgcacccgtccgtaagctcggatttcggttcgagggtctggatggtcttgcctttcgctcggctgcatactaccagcaaggtgcccgtttcgccaaatggcgtactgttgtgagccatccccaacggtccctctgctctggcagttaaggaagctgcctggggtctggctcgctatgcagcaattgctcaggacaatggattggtcccaattgtggagccagagatcttgcttgttggggagcatggtattgacagaacttttgaagtagcaaaaaaggtctgggcagaggttttcttctaccttgctgagaacaatgtcctttttgagggtattcttcttaagcctagcatggttacacctggagctgagtccaaggacaaggccagtcctcagacagttgctgattacaccctcaagctccttcacaggagaattccccctgctgtccctggaattatggtaatgccaaatgcatcatcattctttgcattcctaacttccctccctttcatgtgctaattaaccatcctgtgcta

SEQ ID NO: 2275 - DNA, 996 bp, Glycine max
cccacgcgtccgcccactcgtccgcagtcaccacctctgaactctctctctcatctataagtcaacatggctcatcatgaagattcaagtgcatggaattcgagtaaacctcaccctaagctcaatgaaagaattctgtcttctctgtcacggagaactgttgctgctcacccctggcacgacttagagattgggccaggagctccagcagttttcaactgtgtggttgaaattggcaaaggaagtaaggttaagtatgagctggacaagacaagtggacttataaaggttgatcgtattctttactcatcagtagtctacccacacaactatggttttatcccaagaaccatttgtgaagacagtgatcctatggacgtgctggttctaatgcaggaacccgtgcttcctggttccttccttcgtgctcgtgctattggactaatgcctatgattgaccagggtgagagggatgacaagatcatagcagtttgtgctgatgaccctgagttccgccattacacagacatcaatgagcttcctccacatcggcttgctgaaatcagaagattctttgaggactacaagaagaatgagaacaaaatagttgatgttgaagactttctaccggctgaagctgccattgatgccatcaattactccatggacttgtatgctgcttacatagttgagagcttaaggcactaacttctttagaaactgaatagccaatttcagtgatctccaactaaatatgtaaaatgtgaatgaaactccataaacattgtgatttccgtgctgttctgtgatgcactagtgctgcctcggttattgacacaacagtgtcaaaaactttctgctttgggatgcggctgtactgctactcaataatgagttcatttctagtattgaagagtcctttgtttggtattggagaaatggtaacacatgaatgaattttcagttaaaaaaaaaaaaaaaaaaaaaaaagggggg

SEQ ID NO: 2276 - DNA, 1006 bp, Glycine max
gtaattgtttggaaggttgctttagtctccgcaattttctgcttgcttcttcacttttttttttcctctgtctcctcctcaatcttcattgtcctgttctttcccttggtgacaaaccaagactaacacacacagaacatagcttgtgttggtgaggtgagaagataaagaaagaatggcatttgcaggaacaacacagaagtgtatggcctgtgacaaaaccgtttatctggttgataagttgaccgcggataaccgagttttccacaaagcttgcttcagatgccatcactgcaaaggaaccctcaagctgagcaactacaactcttttgagggagttctttactgcaggccacactttgaccaactgttcaaaagaactggtagtcttgacaaaagcttcgaagggacaccaaaaattgctaaaccagaaaaaaccggggaagagaaacctgcagcaaccaaagtctcaagtatgtttggtggaactagagataaatgtgccggttgtcagaaaacagtgtatcccactgaaaaggttactgtgaatggaactccttatcacaagagttgtttcaaatgcactcatggagggtgtgttattagtccctccaactacattgcacacgagggcaaactctactgcaagcaccaccacgtccaactgatcaaggagaagggcaatttaagccaacttgaaggtgacaatgagaagagtgcaactaatgggaaaatcaatggtgaagaagttgccacggagacatgatgaaagagtcgagtctcagaattgtactttctcaagttccatatttgtgcaccatatgtttctgctgtctctcatgcttttaccattactttgcagtccgggaagctctttacccgtgacaaatatggtattcaattttttgttagttgaactgtgtggatcttcatcatctgtttttggttgttgtgagcgtttgattcagaatgtgtgatttagaagtacatgctactgcacttcttg

SEQ ID NO: 2277 - DNA, 1168 bp, Glycine max
acgcccacgcgtacgggtatgacttaggtggttaaaatattggacaaaatgagtgtcaacgacagtatatttgttggggtgtctgctttttgtctcctgcctcctacatttcaccaccccctttatccttatctcctctcttcttcatttgttctgctcttcccctctatttaaagctcacacaaagggatcatataccttggttgcactttggtaaggtgagagaataggaaaaagggaaatatggcatttgcaggaacaactcagaagtgcatggcttgtgacaaaacagtttatctggttgataagttgacagcagataaccgagtgtaccataaggcttgcttcagatgccaccactgcaaaggaacactcaagcttagcaactataactcttttgagggggttctttactgcaggccacacttcgaccaactgttcaaaagaactggtagtcttgacaaaagcttcgaagggacaccaaaaattgctaaaccagaaaaaaccggtgaagagaaacctgcagcaaccaaagtctcaagtatgtttggtggaactagagataaatgtgccggttgtcaaaaaacagtgtatcccactgaaaaggttactgtgaatggaactccttatcacaagagttgtttcaaatgcactcatggagggtgtgttattagtccctccaactacattgcacacgaaggcaaactctactgcaagcaccaccacatccaactgatcaaggagaagggcaatttaagccaacttgaaggtgaccatgagaagagtgcagagcaagagaaaatcaacggtgaagtggttgcagctgagacatgaaatgaaatgaaatgcttgagttatgacaaatgaatattctcttcctcaagttccatatttctgtatcatgtgtttgtgctatatctcctgctttatcattatggagtccataatgctcttgaaaaatatggtaatcccttttttttttgtggtcggggacttggggtgtgtgaaaatccgtcattttgttttctgttgctgtgaggttgtggatactaaaaatgagacttaatggcatgcgattctgaatgtgattcagaagccagtgctactgaatttgtatgaactctcttttgtattcatattgatacatatacatacatcttaatccccg

SEQ ID NO: 2278 - DNA, 1461 bp, Glycine max
tgttactcttaacagagaacaattaaaatacctggttattgaagctttacggggcggttgccagggacatagagctgagctatttgctgcccgtgttgcaaagtgcttagctgctttggagggacgtgaaaaggtttatgtggatgacctaaaaaaagctgtagaattggtcattctaccccggtcaatcgttactgagaacccaccagatcaacaaaaccagcctcctccccctccgcctcctccacaaaatcaagaatcaggcgaagaacagaatgaagaggaagaacaagaggatgacaaggatgaagagaatgaacaacagcaagaacaattacctgaagagtttatctttgatgctgaaggtggcttggtagatgaaaaactcctcttctttgcccaacaagcacagagacgccgtgggagggctggaagggcaaaaaatgttatattttccgaggatagaggccgatacatcaagcccatgcttccaaagggccctgtaaagagattagctgtagatgcaacccttagagctgctgcaccttatcaaaaattgcgaagggcaaaagattctggaaacaatagaaaggtatttgtggagaaaacggacatgagggcaaagagaatggcacgtaaggcaggagcattggtgatatttgtggttgatgcaagtggaagcatggcattgaacaggatgcagaatgcaaaaggtgcagcacttaagcttctggctgaaagttatacaagcagggatcaggtctctataattccattccgtggagatgcagctgaagttcttctgccaccttctagatcaattgcaatggcaaggaaacgtcttgagaggcttccatgtggtggagggtccccacttgctcatggtcttacaacggctgttagagttggattaaatgcggagaaaagtggtgacgttggacgtgtgatgattgttgcaatcactgatggcagagccaatatatcattgaaaaggtcgactgaccctgaagttgccgcagctactgatgccccaaaaccttcagcacaagaattgaaggatgaaattcttgaggtggctgggaagatatataaagcaggaatgtctctccttgtcatcgacactgaaaataagtttgtctcaacgggtttcgccaaggagattgctagagttgcccaaggcaagtattattatctgccaaatgcttcagacgctgttatctcatcggcaacaaaggaagctttatcagctttgaaaagttcatgaaaccttgtaaaaataaagcagtcaaacatcacttccccctttggtcgtaaatgttaatgtaaatcatgcaaactatgttatgatgggaagaacgcatgttgtaataaccaggagcaattttgaatcataccaatgctaacaaaccatagacatgataatgatcagtgttgtgttggctaaaaaaaaaaaaaaagagc

SEQ ID NO: 2279 - DNA, 784 bp, Glycine max
ttagatatcagtatctctctctctcccctcttccccacccaaccttctctctattctctcacacaaaataatggacaagaagcttggcaacacgtctcatgatcctgaagtgagaaaggggccatggacaatggaagaagacttaatcttgatcacctatattgccaatcacggggaaggggtttggaactctttggccaaggctgctggacttaaacgtaccggaaagagttgccggctccggtggctaaactacctccgtcctgatgttagaagagggaatattacacccgaggaacagcttttgatcatggaacttcatgcaaagtggggaaacaggtggtccaaaattgccaagcatctacccggaaggactgataatgagattaagaactactggaggacaaggatccagaagcacatcaagcaagctgccagcacttccagcaacagagtagtaattctgagataaattatcatccccaagcttgcactagccaagtgtccaccatggcgcagcccatagaaacctattctccacccagttatcaaggaatgttagatccattttcaattcagttcccaacaaatcctcatcattctagttgttgtaccaatgacgacgacaacaacaactattggagcatggaggatatctggtcaatgcaattagccaattactgaacgggaattaaacctataaacataaatataaataatatatataaacctaagtgtctaagttccataaattaagctgtagtctctggcttaaaacatgtta

SEQ ID NO: 2280 - DNA, 464 bp, Glycine max
cggctcgagcggctcgagctcgagcgaatcggctcgagcacacaaagtaatggacaaaaaaccatgcgactcatctcatgatccagaagtgagaaagggaccatggatcatggaagaagacttgatcttgataaactatattgcaaatcacggtgaaggtgtttggaattctttagccaaagcttctggtcttaaacgaacgggaaagagttgtcgactccgttggctaaactaccttcgtcctgatgttagaagaggaaacattacacccgaggaacagcttttgatcatagaacttcatgcaaagtggggcaatacgtggtccaaaattgcaaagcatcttccaggaagaactgacaatgacattaagaacttctggagaactaggatccaaaagcacattaagcaagctgagacttcacagcatcatggtaattcatcagagaatactaataatgatcatc

SEQ ID NO: 2281 - DNA, 1704 bp, Glycine max
  unsure (1)..(1704): unsure at all n locations
tgttcaagattaggttgccctgtctgttctctcacacacttactcttcactctccttctctctcctattgcggctagggtttgggtttttcactttcagcctctccattccttcaaccttcttcttctctttgatctctgatggagacgttccgtgtttagtagcaagggttagttgaggccttgtgtttggaaacgtacggtgtcgttttggagttgggaaaacaaataattctgagagatggcaaccacgaacccttttgatttgttgggtgacgacgctgaggacccttctcagctcatcgccgccgagcaactcaaggcggcggctgctgccgcggctgccaccgccgctcccaagaaggcgccggctcagcagaacaagccggctcagctccctaccaagccgcctcctccggctcaggctgtgagggatgccagaaatgagtctgttcgtggaggccgtggaggtggacgaggtgggggacgtggatttggacgtggtcgtgggtttagtcgtgactcctcgaatgatgagaactcattccctaccagcagagctccttataatcagggtccttttgaagaaggagatgctgggaagtcttctgaaagacgcagttatggtggaccacgagttccttaccgtggtggtcgtcgtggaggtttcagcaatggtgaaactggtgaaggtgaagacggacgacctcgaagagcatttgatcgtcgcagtgggactggacgaggaaatgaattcaaacgtgaaggttcaggacgtggtaactggggagcccaaactgatgaacttgctcaggtaactgatgaggttgcgaatgaaactgaaaagaatttgggtgatgagaagcctgcagttgaagaagatgtagctgatggtaacaaggacagccctactaatgaaactgaagaaaaagagcctgaagataaggagatgactctggaggaatatgaaaaagtgttggaagagagaaggaaggccttccaagcactcaagactgaagagagaaaggtggacactaaagagtttgaatccatgcaggccttatcaagcaagaaagacaatcatgacatattcattaaactgggatctgataaagataagcgaaaagaggcttttgagaaggaagaaaaatccaagaagtctgtgagcatcaccgagtttctgaagcctgctgagggggaagcatactataacccaggacgtggtaggggccgtggccgtggttcacgaggcggaggcggttaccatggaagtgccaccaacaatgcacctgctccatccattgaagatcccgggcatttcccaaccttgggtgccaagtgaggccttcccagaacccttttgacatatctctgtcctattttcaattttgggttctcttatttgaacttaatcaggaaaagaactatggtaattggatttcctggattggaaggttcatttaattttatgccttgaaagtgtaaatttatgttgttgttcttcatacggtcctgtacccttgaagcctgttcccccttgtgctttacttttactgcgtttgatattttgggggaatatggtcggggtaagacataaatgttgttgagttcccttttcttcatagatagacatctcagttttgcttcaatttttggtttctcatccccnnnnnnnnnnnnnnnnnnnnnnnnnnnnnnnnnnnnn

SEQ ID NO: 2282 - DNA, 393 bp, Glycine max
gctggacattacattccagctcttgcatccagggttcaccaaggaaacaaagcaaaagaaggaattcatataaatctaaagggatttgctattggtaatgggttaaccaatcctgaaattcagtaccaggcgtatacagactacgcattagacaggggactaattaaaaaggctgaatataacagtatcaacaagttgatcccaccatgcaagcaggccatagaagcttgcgggactgaaaggtggagaaacatgcgtatcttcattatatgtttgcaataagatattcaatcggatcatgaccattgctgatgatgttaattactatgacattagaaagaaatgtttgggagtctcgtgttatgacttctctgtgatggaggatttcttaaa

SEQ ID NO: 2283 - DNA, 1814 bp, Glycine max
agcatcccgacagagtgagttgtatagctaggcttagctatttcttacctcttggcatggccattcaaatgtcttcttttgtctttgcttctcttacaattttattttgcttctcttccttggagaagagttttgcctttcaaacaacaaaggaggacacagaaagcaacaatcttcatcaatatactcatcttgttcacctcagctcactccttccttcatcttcctgcagctcttctgccaaaggtcccaaaagaaaagcatcattagaagtggtacacaaacatgggccatgctcccaactaaataatcatgatggcaaagcaaagtctacaacaccacacagtgagattctgaaccaagacaaagaaagggttaagtacattaactcaaggatctcaaagaacttgggccaagatagtagtgtgagtgaattggactcagttacactaccagccaagtctggtagccttattgggtctgggaattactttgtggttgttggtcttggaacacccaagagggacttgtcactcatctttgacactggcagtgatctcacttggactcagtgtgaaccatgtgctcgttcttgctacaagcaacaagatgctatctttgatccatcaaagtctacatcatattccaatattacatgcacatctacgctttgcacccagctctctactgctacagggaatgagccgggatgttcagcctccacaaaagcatgcatatacggcatccagtacggtgacagttcgttctccgttggctacttcagccgcgagcggctctccgtgaccgccaccgacatcgtcgacaacttcctcttcggttgcggccaaaacaaccagggcctctttggtggctccgccggcctcatcggcctcggccgccaccccatctccttcgtccaacaaaccgccgccgtatatcgtaaaatcttctcctactgcctccccgccacctccagctccaccggccgcctctccttcggcaccaccaccacttcctacgtcaagtacacccccttctccaccatctcccgcggctcctccttctacggcctcgacatcaccggcatctccgtgggcggcgccaaactcccagtctcctcctccaccttctccaccggcggtgcaatcatcgactccggcaccgtgatcacccgcctcccccccaccgcctacaccgccctccgctccgccttcaggcaaggcatgtccaaatacccctccgccggggaactctccatactcgacacgtgttatgatctcagcggctacgaggtcttttccattcccacgatagaattttcgttcgccggcggcgtcacggtgaagctgcctccacagggtatactcttcgtggcgagtaccaagcaggtttgtttggcttttgctgcaaatggtgacgatagtgatgttactatatatgggaacgtgcagcagaaaacaatagaggttgtgtatgatgttggtggtggaagaattgggtttggtgctggtggctgcaagtgattaagattaaacatatgctttgggctagttagagaaaaatcaatcttaattggctctaggctttcataattattgttgttccttttattgcaaagtgtacgtaacagtggcaatagaaaaaaaaggaaaacaaaaatgtgggaattaaatataatatagtttgtagcatgaagaagaatggaggggtgaatatatgactctcaagccgtgcgattgcttgcaattgtacatatgtaaggtggaaaaaaaactgtaaacttgtccttgttattaattaaatgtttgttgaat

SEQ ID NO: 2284 - DNA, 586 bp, Glycine max
tttgatccatcaaagtctacatcatattccaatataacatgcacatctgccctctgcacccagctctctactgctacaggtaaatattaatttgattctcaacatttcaagatgattattatatgtgctggaaacttacttacccacaaaatcatggttatatgtgttttacatatagaagaaacattttgactcaagattgccaagggacttgcgtctttgataccattgagttatatgttcagatagaaaacaatatgatgattctaaaattgacttgtccaaatatacactcaatatttaattagatgtttggccgtttgggctacttgagttgatacaaatgcaatacatttttctttcgtctcatatttcaacttgttaaactaaataattataaaaatgattttttttcttattttgtattcccacttgttacttattcaataaagacaaaactttaaataacttggttccactttagaaaacgattttccctgctaattgaaaattaaaggtgttttttttccctatcaatggtcaacttatatgaatcaacgagtcaatactatttcaaataatgact

SEQ ID NO: 2285 - DNA, 717 bp, Glycine max
gtgtaggcggtgggggggaggcgggtgatcacggtgccggagtcgatgattgcaccgccctccgctccgccttcaggcaaggcatgtccaaatacccctccgccggggaactctccatcctcgacacgtgttatgatctcagcggctacgaggtcttttccattcccacgatagatttttccttcgccggcggcgtcacggtgcagctgccgccgcaggggatactcttcgtggccagtgccaagcaggtttgtttggcttttgccgcaaatggtgacgatagtgatgttactatatatgggaacgtacaacagagaccaatagaggttgtgtatgatgttggaggtgggagaattgggtttggtgctggtgggtgcaagtgattaatgattaaacatgctttgggctagttagggacaaaggaatcttaattggttctaggctttcattattactattgttgttgtcatgacataatgtaacagtggaaatagaaaagggaaaacaataatgtgggggaaattaaatagtgattaattgttggaaaacatataatataatgttgtaaaagaatggaggaggtgaaatatgtatgactctcaagctgtgcgattgcttgcaattgtacatatgtaagatgaaaaaaaataatgtaaacttgttcttgttattaattaaaggtttgttgaataaagcagaaacgtcttgttttggatt

SEQ ID NO: 2286 - DNA, 301 bp, Glycine max
catgcacatccaaatgtcttctttcctcttagcttaaattgcactttcggtttgcatctccgccttggagaagagctttgcctttcaagcaacaaacgctagcaaccctcttcgtcaatatccctctgttcacctcaactctctatttccatcatcgtcttgcagctgcttctcccaaaggtccttaaaggaacagcatcattagaagtggtgcacaaacatggcccatgctcccaactaaatcatagtggcaaagcagaggctacaatatcacacaatgatattatgaacctagacaatg

SEQ ID NO: 2287 - DNA, 854 bp, Glycine max
ctgctcgagaatttagtttggatctggtcctttctccaccatgtgcatgcttcaactctaatctctatctgtcacaccatttcccttctacccacaaacttatccctctccccccatgttcagttgttcctcctattttcttcacatttaaaaacaaaagaaaaaaaattgaccagatcacagtcctataactagtctccaagatcacttcaccagttaggaactctgtaaggggcaaactcgtcactcgcccacaaaacttgaatcaacaacagtactataaataccagcattgtcagaatcccaaactccaatgcaagtagccacacacccctcccaccgattcattaacttcacacacagacacggtgtttccaccacaccatagcatatagtactagtagattaaacgccaaagaaataaattactcactttcacgtaaaccataacgtgcttccaccgcaaccaaccacaatgggtgccgttaggtccataacggtgttgctactagtgttatttatggccatgagctccggcgtgcgctcgtgtccgccgtcggacagggcggcgctgctggcattcaaggcggcgctccacgaaccctacctgggaatcttcaactcgtggaccggcgccgactgctgccacaagtggtacggcgtgagctgcgaccaggagacccgccgcgtcgccgacatcaacctccgcggcgagtcggaggagccgatcttcgagcgcgcccaccgcaccggctacatgaccggctacatctcgccggcgatctgcaagctcgcgcgcctctccagcatcaccatcgccgactggaagggaatctccggcgagatcccgcgct

SEQ ID NO: 2288 - DNA, 368 bp, Glycine max
ctcatagttctaaaaccctaaagtgagtgagtgatggaacttcagaccctttgttgcgctcttccctctcaaccacttcacttttccaatcatcgtattctatcatcaccagcgtttggcaacccacgctccattaacaaaccaaattcatagatttcggttcggaaacccctcaaaatgtttaaaatgggtgattaaagagacttcacttttgggattgagcgaatccaagaagcttctagtacatgcttctgattccaatttaaatggtggcttggaagttcatccgccacaaagttctagtgtacccgttactacatttaacggggtggaaccgtttcatggtaaatcaggtactgtctcctttt

SEQ ID NO: 2289 - DNA, 291 bp, Glycine max
aaccctaaagtgagtgagtgatggaactttcagaccctttgttgcgctcttccctctcaaccacttcacttttccaatcatcgtattctatcagtgagtaaaccttaaccgacaccttcgaatcaatttttctttgttaccattctaacccttctctgcaattcccgattactattcaccaactcgttaatgttatattcgcagtcaccagcgtttggtaacccacgctccattaacaaaccctattccatagatttcggttcggaaacccctcaaaatgtttaaaatggg

SEQ ID NO: 2290 - DNA, 286 bp, Glycine max
ccagcgtcatgttatagcatttgacccactcttaatcggcctgcatacgtaggactcttacccttcttcagtttttctcattttctggttctgttgttgcagacgctgacatgacaaaacacgcttcttcctaatcaatcctctttgctactttgactcaccaatataaatatcaattataaattgccgcgtccattgcttcatttcactctttctcttctcacattgcgtcatgagctccggcgtgcgctcgtgtccgccgtcggacagggcggcgctgctggca

SEQ ID NO: 2291 - DNA, 767 bp, Glycine max
ccccccccgcgccgtctctgcaattacgatggcgcccagggacaagactagtgccgttaagcctagcggtaacgccggggtgaaggacctgcattttcgtggagtcaggaagagaccgtgggggaggttcgccgccgagatcagagatcccgccaagaagacccgcgtctggctcggaaccttcgacaccgcggaggaggcggcccgtgcctacgacgccgccgcgcgggagtttcgcggccctaaggcgaagacaaacttccctctcccttcggaaaattttaagaacgcgagccctagccagagcagcacggtggagtcctccagccgcgaccgcgacgtcgccgccgattcctcgcctctagacctcaacctcgcccctgccgccgccgcatccgctcgattccccttccagcaccagttcccggtttttaccggcgcggtgcctgcggcaaatcaggttttgtacttcgacgctgtcctacgcgccggcatggccggtccacgtggctttgcgtttggctacaatcatcatcccgttgcggcgagtgagttccacgcgacgacgagcgactcggactcgtcctccgttatcgatctgaatcataacgaaggcgtggttaaggggaacggttctagaatcttcgatctcgaccttaaccatcctcctccgcatgagatcgcttgatccagaatctgactcatgccttgagtttttctttttctaattttgtttactaaagtagagaaagtagcagcgttcgata

SEQ ID NO: 2292 - DNA, 495 bp, Glycine max
cggacgcgtgggcggacgcgtgggcggactcgtgggctcatctgtatgcctatgcttgtttatcattttcttactttcctctcacgctctgccacaaaactccgtctccgcaataacggaataaaaaaacaagtttaattactattatggcgccgagggatcataagacaagcaacgctaaggctaacggtaacggtaacagcggggtgaaggaggtgcattttcgtggagtgagaaagaggccgtgggggagatacgccgcggagatcagagatcccggcaagaagagccgcgtctggctcggaaccttcgacacggcggaggaggcagcgcgtgcctacgacgccgcagcacgagagtttcgcggccctaaggccaagacaaacttccctctccctttggaaaatgttaagaactcgagccccagccagagcagcacggaccttaaccatcctcctccgcatgagatcgcttgatccaaagtctgactcaccc

SEQ ID NO: 2293 - DNA, 440 bp, Glycine max
gttgatttaattggaaagccaggaaacttatccgagcctgattccttgctcaatggtccatcttccatctcattttcttcacccttgcgctttccacgacttaaaccagctgaaactaccattgatttcaggtcactggccaaacagtatttctcggactgtgtgtctcttgagcttgtctttgacaacaattctgcagaacagtttgatgggaagtgtaaagacaggaataaccctaggccaattttgactgacagcaatagaagttctcaccttcctctgcatcctcaagattctcatccaagctcacgggaacaaggttccgaaacatatcaatcatgtaaccctcctcagaacattgtagactcgactgtgggaaagtatccaccaccaataaagcataagcgtcctgctggtataccaaccccattagcacttac

SEQ ID NO: 2294 - DNA, 1873 bp, Glycine max
  unsure (1)..(1873): unsure at all n locations
nnnnnnnnnnnngacaacaataaggaaaattagtttttagtaacaaaaaaaaatattcataaaataaattaatgacaataatttagaacacatggcttaaggtcaaacagaatgatagaatgatacaacttacagctgacctggaaagacaacaaagcaatgaatcgagagatccttaaaaacacagaaaaaagtcttccctaggtaatatataaagtgtctcaacatgtttagcagcgcatggtctctacattaaaattacatagagcacagattgcccttgtataaattcctacttctccatgtgggggctatattgcctacaggctaacgaaaccaataggaggaaaatttacgattttatataaaatcaaccagtataatatggcagaacacttgggcaagacaagaacacccttctcaaaggtagcacatcaccatcactgtaaaaagcttaacttgcaacgggttttgcaatgactttcttaacggcttcagcatatgtcctgtgctgatatgtcagagtggactcaagcaggtcccaaagtgaagtcttgggattccatccaagctgcctgtttattatggtcatgtcagggattctcttgtcactgtcatcatatccctcaccataaaattcttttgagctcacatcaacggtaggtgtttcaggagtttgttcgccacttacctttgaataaacctgaatcattatttcagcaagctgcctaacagtaacctcattgtttgggttacccacattaaatatgtggccattggccctggcagggttttcaatcatcagcaagacagcttcaatagcatctttaatgtaaacaaaggttctctgggactggccaccgtccacaagcttgaggggctctccacggaggagattattgctaaagcatgccagaacccgaggaacaccctcacttgggccatcaatgccgggaatgaaatccattcgtggtccaatccaattaaaaggcctcacaattgtgaattccaagccattttcagcaccctcagcataaacaagcctctcaatcaactgcttagcacaggcataggaccatctctgcttttcaattgaaccaaaaatacaaggagactcatcctccttaagtacgtagtatgcaggatcctgacgaagaggactatctttggggaggaagcttccaatcgttttcccatagacttcacacgtagagaaatgaatgagacgcttgttgttctctgaacagtacttcaccacaggaagcgcgtcgatgaagttgctgtaaattgtgtcaagagggcgcgtgttgtaatccgcgggagtgcaaatggcagccagattaatagtcagatctgacattttgatgaggccttcgagacgggaatcgtgcttgatgttgaggcgatggaactggatgcgagaggcccaagggagcgtgtggggttccaagaggtgtttgatcttgtcattgtagacatccaaggcgaggacactgtgaggggtctccgacatgagcttctcgcagaggtgggacccaatgaagccaccggcgccaatcatgcaaatggtgatgggctttatggggttcccatccagatctactcgcgacgaagccattactcagaaacaatcaaatcgataagagaagaaattgggtcgctggagcttatataaggattgaggagagcgaatcctttctctcttccaccgttactgtcactgttgccgatgatgtgatggttttgcacgcaaagtatttggttttagtttaggatttaaataactttgtgttttctggaatcgaaagattgtatggtgctgtgatggtgaattcattgcctgttaaaatggtcgagccgattcggctcgagt

SEQ ID NO: 2295 - DNA, 1779 bp, Glycine max
cagagcgaatagacagtagagcacagaagggcgcgtggaaactggtggtccgagtaagtaatgaacgaaagggacgtacgcaaggcgggtgtgagtgtgtcacagtcggaaaaagaaatacatgttctgctcaaaatataattaaataagtatcacatctccgtcttctatatattatcagtcgctgagtcccgttaaaaagcaccaccaccaccaccaccacaacactattcttcttcgcagcaatggcgcgagtggatctggacgggaaccccatgaaggcacttacgatctgcatgatcggcgctggcggcttcataggctcgcatctctgcgagaagctcatgtccgaaacccctcacaccgtcctcgccctcgacgtctacaacgacaagatcaaacacctcctcgaaccctccgattccccctgggccggccgcatcaccttccaccgcctcaacatcaaacacgactctcgcctcgaaggcctcatcaagatggcagatctcactattaatctggctgccatttgcactcccgcggattacaacacccgccctctcgacaccatttacagcaatttcatcgacgcgctccccgtggtgaaatactgttccgagaacaacaagcgccttatccatttctctacttgcgaagtgtacggaaagacgattggagcctttctccctaaagatagtcctcttcgtaaggatccggcatactatgttcttaaagaagacgagtctccttgcatttttggttctattgaaaaacagaggtggtcttatgcctgtgcgaaacagttgattgagaggctgatttatgctgagggtgctgaaaatggcttggagttcacaattgtgaggccttttaactggattggacctcgaatggatttcattcctggcattgatggtccaagtgagggtgttcctcgggttcttgcatgctttagcaataatcttctcagaggagagcccctcaagcttgtggacggtggccagtcccagagaacctttgtttacattaaagatgctattgaagctgtcttgctgatgattgaaaatcccgccagggctaatggacatatttttaatgtgggaaacccaaacaatgaggttacagttaggcagcttgctgaaatgatgactcaggtttattcaaaggtaagtggagaagcacctctggaaaaacctactattgatgtgagctccaaagaattttatggtgagggatatgatgatagtgacaagagaattcctgacatgaccataattaataggcagcttggctggaatcctaaaacctcactttgggacctgcttgaatcaactctcacctatcagcacaggacttatgctgaagccgttaagaaagtcattgcaaagcccgtggcaagttaaacttgtatggtattgaattgcattgagaagagtgtttctgcctataggggcacttatatatagttcaatggttgattttatttatatacatggtaatttcccccttggttttggtagccaatgtagccaacgtagcccatgccttatttattgcatttttatgaagaagtaggaatttattattaattatcaaggacaatatgtgctactgcaatgtgattttctcgcagagcttggggccactagacatatttggagaccttttatacgaagaaagaagcttttttatgttgtaggggggtgtctttccatattcagttgtaacatttatcatatgtttcctaaattaatggtcattgatttatttttatggatt

SEQ ID NO: 2296 - DNA, 1006 bp, Glycine max
tagtaacaaaaaatatccatagtataaattaatgacaattatttagaacacatggcttaaggtcaaacagaatgatacaacttacagctgatctggaaagacatcaaagcaatgaatcgagagatccctaaaaacacagaaaaaacgtcttccctagtatataaagtgcctcaacatcatgtttagcagcgcatggtctctacattaaaattacatagcagcacagattgccctatatataaattcctacttctccaggaacatacaccaaggcattggggcttatgtgggctatattgcctactggctaacgaaaccaaaaggaggaaaatttgcgattttatataaaaccaaccagtaaaatatggcagaacacttgggcaagaacaccccttctcaaaggtagcacatcaccatcactgtaaaagcttaacttgcgaggggttttgcaatgactttcttaacggcttcagcatatgtcctgtgctgatatgtcagagtggattcaagcaggtcccaaagtgaagtcttaggattccatccaagctgcttgtttattatggtcatgtcagggattctcttgtcactgtcatcatatccctcaccataaaattcttttgagctcacatcaatggtaggtgtttcagcagtgtgttctccacttacctgtgagttaacatgaatcaatcatcaacaagacagcttcaatagcatctttaatgtaaatgaaggttctctgggactggccaccgtccacaagcttgaggggctctcctcggagaagattattgctaaagcaagcaagaacccgaggaacaccctcacttggaccatcaatcccaggaatgaaatccattcgaggtccaatccagttaaatggccttacaattgtgaactccaagccattttcagcaccctcagcaaaaatcagcctctcaatcaactgttttgcacatgcataagaccacctctgcttctcgatagaaccaaaaatgcaaggagattc

SEQ ID NO: 2297 - DNA, 482 bp, Glycine max
ttggcttcaattccattctttctatatattatcactcgctcactcccgttaaaattcaccgccaccatcaccaattcattctcatacattccttcttcttcttcttcttcttcttcttctttcacaatcacaatggcgcgagtggatctggatggtaaccccatcaagccacttacgatctgcatgatcggcgctggcgggttcatcgggtcgcacctctgcgagaagctcatgtccgaaacccctcacaccgtcctcgccctcgacgtctacagcgacaagatcaaacacctcctggatcccgccgattcccccctcccttgggctggccgcatcaccttccaccgcctcaacatcaaacacgactctcgcctcgaaggcctcatcaagatggcagatctcactattaatctggctgcgatttgcactcccgcggattacaacactcgccctctcgacaccatttacagcaatttcatcga

SEQ ID NO: 2298 - DNA, 349 bp, Glycine max
ttctcgtaataataccttcttttctctttcttttcctctttgttttattttctttacatcgtatcgtttctttctccgtttcagagtattaatctggctgccatttgcactcccgcggattacaacacccgccctctcgacaccatttacagcactttcatcgacgcgctccccgtggtgaaacactgttccgagaacaacaagcgccttatccatttctccacttgcgaagtgtacgggaaaacgattggagcctttctccctaaagatagtcctcttcgcaaggtaacctttcttttgaattttattatcgaaccgttttcttttgaagagcgttttagatctgtgc

SEQ ID NO: 2299 - DNA, 2211 bp, Glycine max
gcgcgtttaaaacacaagaactcgaaggactctagcttggagaaaactcctttcgccttcgtcttcctccatagcgttagggttttcagagtctcttttcttttccccctcaacactcacttgccgttggccacgtgttgcacacctccaagaccaaaacgacgcgtttttgaaaccgctctttgactctatcccacggttccacataacatcgcagttccgttccgtcgaatcgcgaattcgaaggatatcgatattatcgtgctacacgagattttgaaaagaaaagaaaatgtctatggttgatgagccgctatatccaatagcagtgctcatagatgagctgaaaaatgatgacatccagctgcggttgaactcaattagaaagctctcgacaattgcgagggccctcggggaggagcgaacacgaagggaattgataccatttttgggtgaaaataacgacgatgatgatgaggtacttcttgcgatggcggaagagttgggggtgttcattccttttgttgggggagtggaacatgcccatgtgttgctcccgcctttggagatgctttgcactgttgaggaaacttgtgtgagagataaagctgtggaatcactatgtaggattggattgcaaatgagggagagtgatttggttgagtatttcatccctttagtgaagagattggcagcaggtgaatggtttactgctcgagtctctgcatgtggactatttcatattgcataccctagcgcaccagaaacatcaaagacagagttgagatcaatatacagtctgttatgtcaagatgacatgcctatggttagaaggtcggctgcatcaaatcttgggaaatttgctgcaactgttgaatatgctcatttgaaggctgatgtcatgtcaatttttgaggatcttactcaagatgatcaagattctgtcagattgttggctgtggagggctgtgctgctcttggcaagctgttggagccacaagattgtgttgcacatatactcccggttattgttaacttctcccaggataagtcttggcgcgtgcgttacatggttgcaaatcaattgtatgagctttgtgaagctgtaggccctgaacctaccagaacggaattggtacctgcttatgtgcggttgcttcgagataatgaggctgaagtacgcatagcagctgctggaaaagtgaccaagttttgccggattttaaatccagatcttgcaattcagcatattcttccttgtgtgaaggaattgtcatcagattcttcacagcatgtccggtctgctttggcttcagtaataatgggaatggctccagtgttgggaaaggaagcaacaattgagcagcttcttcctattttcctttcccttttgaaggatgaatttcctgacgtacgcctaaacattatcagcaagcttgatcaagtgaatcaggttataggaatcgatctgttatctcagtctttgttaccagccattgttgagcttgctgaggataggcattggagggtccggcttgcaattatagaatatatacccttattggcaagtcaattgggggttaggttttttgatgacaaacttggtgctctttgcatgcagtggttacaggataaggttcattcaattcgtgaagcagctgctaacaacttgaaacgccttgctgaagaatttggtcctgagtgggctatgcagcacataattcctcaggttttggagatgaacaacaacccacactatttgtatcggatgaccattcttcgtgctatctctctgcttgctcctgtgatgggccctgaaatcacttgttcaaacttgttaccagttgttgttgctgcatctaaagacagagtgcccaacataaagttcaatgtggcaaaggtcttggagtcaatcttccccatagtggatcaatctgttgtggagaagacgattcgtccaagtctggttgagctcagcgaggatcctgatgttgatgtaagatttttttccaatcaagcacttcacgcaatggatcatgtcatgatgtctagctaggaagcaatcttcaacacgcgttagattgaaggcctgtgtagagatatgctaatattgccacctatcagaatacttctattctacttggttcttttttgtttcttgtcctcgtagacagcaaattgctggtctctgacggcaaaaaaatgattttc

SEQ ID NO: 2300 - DNA, 1294 bp, Glycine max
tgtgaagctgtaggccctgaacctaccagaacggaattggttcctgcctatgtgcggttgcttcgagacaatgaagctgaagtacggattgcagctgctgggaaagtgaccaagttttgccggatattaaatccagatctttcaattcagcatattcttccttgcgtgaaggaattgtcaacggattctttgcagcatgttcgctctgctttggcttccgtgataatgggaatggctccagtgttaggaaagttaaacaggatcaccctttaggaggcatttgtttcaagtttatgtgtttttctttattgcaggatgcaacaattgagcagcttcttcctatttttctctcccttttgaaggatgaatttcctgatgtacgcctaaatatcataagcaagcttgatcaagtgaatcaggttattggaatcaatttgttatctcaatctttgttaccagccattgttgagcttgctgaggataggcattggagggttcgacttgcaataatagaatatatacccttattagcaagtcaattgggggttgggtttttttatgacaaacttggtgctctttgcatgcagtggttacaggacaaggttcattcgatccgtgaggcagctgctaacaatttgaagcgcctagctgaagaatttggtcctgagtgggctatgcaacacataattccacaggttttggagatgaacaacaatccacactatttgtatcggatgaccattcttcgtgctatctctctgcttgctcctgtgatgggccctgaaatcacttgttcaaacttgttaccggttgttcttgctgcatctaaagacagagtgcccaacataaagttcaatgtggcaaaggtattagagtccatcttccccatcgttgatcagtcggtcgtggagaagactattcgtccatgtctggttgagctcagtgaggatcctgatgttgacgtgcgatttttctccaaccaagcactacaagcaattgatcatgtcatgatgtcttgctaggcagaaatggttccacacgcatttaggttgaagacgtcagaagagatgctaatatttccaactaccataaataatactgcatagttatgtttagtgcttttcagtcattgaccattgatgtgatttagtttccattatatgctaatttccatatattatgtgttttttcctgattgtatttttcgtagatttttttttgttccttggtgtaatattctgctaggcaatgaattgcacatttcaatcattatccaaacgcaccataagtgcca

SEQ ID NO: 2301 - DNA, 499 bp, Glycine max
actattcttcgtgctatctctctgcttgctcctgtgatgggccctgaaatcacttgttcaaacttgttaccagttgttgttgctgcatcaaaagacagagtgcccaacataaagttcaatgtggcaaaggtattagagtccatcttccccatcgttgatcagtctgtggtggagaagactattcgtccatgtctggttgagctcagtgaggatcccgatgttgacgtgcgatttttctccaaccaagcactgcaggcaattgatcatgtcatgatgtctagctaggcagaaatggttccacacgcaattaattaggttgaagacgtcggaagagatgctaatatttccaactaccataaataatactgcatatttatgtttagtgcttttcaattatagctgaatggttatttatttgtgagtaactactagtcattgaccattgatgtgatttagttcccattatatgctaatttccgtatattatgtgttttttctt

SEQ ID NO: 2302 - DNA, 541 bp, Glycine max
catgtcttgaaatatatgtttgctatatgctattaccttttctattctcccaagtgtaacttcagaagtatctatatggaatgtgtggaacaggttttgggagatgaccaccaccccacactattggtttcggatgactattcttcgtgctatctctctgcttgctcctgtgatgggccctgaaatcacttgttcaaacttgttaccagttgttgttgctgcatcaaaagacaggtactttgtattaccttttgaaagccgggtacatgccatcatttccatacagtttctttaagttcctaattgctgccatttactcccttttagagtgcccaacataaagttcaatgtggcaaaggtattagagtccatcttccccatcgttgatcagtctgtaagtatcattcttatgtttccatcttctgttcatctttctttgtcttagactcttactgtgaacatcattgtcattcaagtggtggagaagactattcgtccatgtctggttgagctcagtgaggatcccgatgttgacgtgcga

SEQ ID NO: 2303 - DNA, 500 bp, Glycine max
gggcatttctgtgtgtgatcacattgtttccctctatcgtcttctccctccttcttcaatggtcttagggtttccggtgtccatgcgtagaagctcgcaataatgcgcttttgaaacccgtgttcatctgtatccaacgatttactagaaggaggtcgcaatttctccatcttcacatttcgctagcacgtgaaatcaaaagttatcgacactttcgcgcgacacgaaatattgggaaccaagcaaaatatctatggctgacgaaccattatatccaatagcggtgcttatagatgagttgaaaaatgatgacatccagctgcggttaaactcaattcgtaggctatcaacaattgcacgtgctcttggggaggagcgaacccgtcgagaattaattccatttttaagtgaaaataatgatgatgatgacgaagtacttcttgcaatggcagaatgaagttggagagtgttattccttatgttgggggagtggaacatgc

SEQ ID NO: 2304 - DNA, 1723 bp, Glycine max
gtctcgagtttttttttgttcttctgtctaccgacctaacccaagacgagagaatagaggaagcttggggtttgaatcgaatcgaatcgaagcgattcatcgatcgatcgatggctcttgtaggagttgaactgaagcatgcggcggagggcgtaccggaggcgaattgctccgccaagcccaccaagcagggcgagggcctccgccactactattctctcaacatccacgagcatcagctccttcttcgccaaaagactcataacctcaaccgtctcgaggctcagagaaacgacctcaattctagggtgaggatgctgcgcgaagaattacagcttctgcaggaacccggctcttatgttggtgaagttgtcaaagtcatgggcaagaacaaagtccttgtcaaggtccacccagaaggaaaatatgtcgttgatattgacaaaagtattgacattacaaagattactccatccactagagttgcacttcgcaacgacagttatgttcttcacttagttctgccaagtaaagttgatccattggtcaatctgatgaaagttgagaaggttcccgattctacttacgacatgattggtggtttagaccagcaaattaaagaaataaaagaggtcattgagttaccaatcaaacatcctgagctgtttgaaagtcttggaattgcacaaccaaagggtgtcctgctctatgggccacctggtacaggaaaaacattgttggctagggcagtggctcatcatactgactgtacattcatcagggtgtctggttctgaattagttcagaaatacattggagaaggttctagaatggtcagggaactttttgttatggccagggaacatgctccatcaattatcttcatggacgaaattgacagtattggatctgctcggatggaatctggaagtggcaatggtgatagtgaggtacagcgtactatgctggaacttctcaatcagttggatggatttgaagcttcaaacaagatcaaggttttgatggccacaaatcggattgatatcctggatcaagccctccttagacctggacggattgaccggaagattgaatttccaaaccctaatgaagagtctcggctggatattttgaaaatccattcaagaagaatgaatttaatgcgtggcattgatctgaagaagattgccgagaagatgaatggagcatctggtgctgaacttaaggctgtttgcaccgaagctggaatgtttgcattgagggagcggagggtacacgtgactcaggaggattttgagatggctgtggccaaggtgatgaaaaaggagactgaaaaaaacatgtcattgcggaagttgtggaagtgatttttatttcatgtttgtggtgcacattattatcctgcgaagatgggcagcgaacacaccttagggttatttcaatttacagtggcattggatttcattttgcttaagtttaccaagttatgtaccgaatcatatgattctttctttgagtttttccttgtctgtgtcttcggacggcacactacatttatagagtatttttaaaagatttatattcaagaccacttaataaaaaactcatatattatattttttataattttttatctattcttttatcttatacattctattcaatatatttcctttatttttttttttcattttactatatataatttttatttttttataat

SEQ ID NO: 2305 - DNA, 1327 bp, Glycine max
gaacgatttgatggtttggaatgcatttcccaagcaacgagtctgcattttgagagagagaaatagagagagaacttcaagtgagggtgagagtgacacaaatctagagagagcactagtactctaaaagtctattatattcttcaaaatatgaccatgcatcgcgagtcttgggcttttgtcttcggcgttatgggcaacatcatctcctttggagtgttccttgctccattgccaaccttttaccaaatctacaagaagaaatccactgaaggtttccagtcacttccttatgttgttgcactgttcagtgcaatgctttggatttactatgctttcgtgaaaagggaaactgccctccttctcattaccattaacacatttggaattgttgtggagtcaatttacctttctatcttcctaatttatgccccaaggaagcctaggcttacaaccatcaagcttcttctcttactgaatgtgtttggattcggagccatgcttctatcaactctctacctgtcaaagggagcaaagcgtcttgctatcataggatggatttgccttgttttcaacatcagtgtctttgctgcgcctctcttcattattaggcgtgtcataaagacgaggagcgtggaatacatgccatttactttgtccatgtttttaaccatcaatgctgttatgtggttcttctatggccttctcctcagggattattacgttgctcttccaaacacacttgggtttgtcttcggcataattcagatggggatgtatttgatgtacagaaacgccaccccagtggcactagaggagccagtgaaggctcaagaattgaatggccacatcattgacgttgggaagatgggaacaatggaaccgaatcacgcagctactgctggtgctgttggcaaagtttgaatatcaccattgagattatatgaatgtggagaaacaagggatcaatgacaagaaaagttaaaaaaagggaataacctaaacgttcaattactttactgagtgaggtcacatctaatatcgctcatatctacaatgcaagaatagtacgtagtctttggtataagtgtttttcgttcgattaatgtaaaggtgtggttttaatttgcctgttcgggtagctgtaactgttggccgcaacacttagcctctcttaatttggcccatatcactctcatattgtactactacgtgtaacgtagtatattctcttctctcggtgtatcccccagtcaaactcatttcaattcacttttcccttgtattcgtaattaatgttcgggtaatgaaaatgaattactttagt

SEQ ID NO: 2306 - DNA, 1909 bp, Glycine max
  unsure (1)..(1909): unsure at all n locations
gaaaatcatttcctaattattggcctgttttgtgtatatagatgaatagagtttcactaggggatatttacaagagaaaaacgacaaatatgaaaaatatcgtcgaaataaaagtgatgcttttacaaactaaaggtgaatatggaactattactagtgctgaaataatgaaaggatggagatgggaaatcaaagtgttttggatttgtgaattttgagaatgctgatgatgctgctagggctgttgaggctctcaatggcaaaaattttgatgacaaagaatggtatgttggaaaagctcagaagaaatctgaaagggagaatgaattgaaacaacgatttgagcagagcatgaaagaagctgctgataaatatcaaggcgcaaacttgtatgtaaaaaatttagatgatagcattggtgatgaaaaacttaaggagctgttctccccttttggtaccattacctcttgcaaggttatgagagacccaaatggcttaagtcgtggatcgggttttgttgcattctcgactcccgaggaggcatctagagcactcctggagatgaatggcaaaatggtggtaagcaaacctctgtatgtgactctagcccaaaggaaagaagataggagagctagactgcaggctcagtttgctcaaatgcgacctgttggaatgccaccatctgttggtcctcgtgtgccaatgtatcccccaggtggtccaggtattggtcaacaattattttatagccaaggccctcctgctatcattccttcccagcctggatttggctatcaacaacaacttatgcctggtatgaggccaggtgcagctcctgtgccgaattttttcgtgccaatggttcagcagggacaacagggacagcgtcccggtggaaggcgtccaggtgcagttcagcagtcccagcagccagttcctatgatgccacagcagatgcttcctaggggacgtgtctatcgttatcctcctggtaggggtattcctgatgttcctatgcccggggttgctggaggtatgttttctgttccatatgatgtgggtgggatgccactgcgtgatgcatcaatctcccagcaaattcctgttggggctttagcaacagctctggctaatgcttctccagagcagcagaggacgatgctgggtgagaatctctacccccttgtggaacagttagagcctgacaatgctgccaaagtgacaggcatgcttcttgagatggaccagactgaagttctgcatttgctcgagtcgccagaagccctgaaagcaaaggtggcggaggcaatggacgtcctaaggaaatgttgctcagcaacaggctggcggtactgcggatcagctggcttcattatctcttaatgacaaccttgtttcttaaggtttatattttggagtttacttagtgatgatggattgttattttctgcactggctttgatacagatttcaggttgagtttgtttcgttatctcttaatgacaaccttgtttcttaaggtttatattttggagtttacgtagtgatgatggattgttattttctgcactggctttgatacagttttcaggttgagtttgtttcgttagattagacacttttggtatgttatggaccaccaccttttggttgaaggatacttcagcactgattttaattatgccttgcattttggtacatggaaatcatttgttgacttatctatgattacatgagtttgatttgcataaatatgggttacctatgataagtgatccagtgtttagcggggacgtgatcctcgtctcatgtacttgagtcgtgatggatatattgatcaatttntgccccttgtcttgataggccagggacaaattcttgtggcacttgttttgcttcctctttaatt

SEQ ID NO: 2307 - DNA, 1564 bp, Glycine max
attttcttcatctttattctgctttcgcaatcctctatcccttccctcgggccccagctggggggtcattcaacgggtcagatctctccgctggattgtgctagggtttacccaaacccgccaccatcatcaatttcatcatctctcttacctattaatccctctcactccttctttccccattccttttctcagcgcagtatctactgctctctctctccctctccctctccctccaaattttccttcattctcacgcgccgccgtggtttccgccggcggctactccctatccaccgcgcatccatcccgcttccctctcctcgcttttctcacaaaacaaaaaaaattaaaaatttctccgaagactgtgtattatcgttatcgttcactgagttaggttttgctgttcttcctagggttttattgtgtccaataacaagaggagggggaagagaaacaaaacaaaaaaaaaaaagaataaaaggcaaaaattagggatttttttttgggaaaaaaaagagaaatttaagttatcgttgttgtagtagtgttgtttggttgagatggctcaggttcaggttccgcctcagaatgcgatgccaggtcccaacggtggtggtggtgccggtggtgctggaaaccagttcgtaacgacgtcgctttacgtcggagatctcgacccgaacgtcacggacgcgcagctctatgacttgttcaaccaattggggcaagtcgtgtccgttagggtttgcagggatttgaccagccggagatcgctcggttatggttatgtcaactttagcaacccgcaagacgctgctagagcattggatgttctgaacttcactcctctcaataacaggcccatccgtattatgtattcgcatcgtgatcccagtatccgtaaaagtggacaaggaaatatatttattaagaatttggatagggcaattgaccacaaggcattgcatgataccttttctacatttggaaatatcctttcgtgcaaggtagctacggattcatctgggcaatcaaaaggctatggctttgttcaatttgataatgaggaatctgcccaaaaagctatagagaagctgaatggtatgctgttgaatgataaacaagtgtacgtgggacccttccttcgcaagcaagagagagaaagtgctgctgacaaggcaaaattcaacaatgtttttgtgaagaatctatcagaatcaaccaccgatgatgagttgaagaacacttttggtgaatttggaactattactagtgctgtagtaatgagggatggagatgggaaatcaaagtgttttggatttgtgaattttgagaatgctgatgatgctgctagggctgttgaggctctcaatggcaaaaagtttgatgacaaagaatggtatgttggaaaagctcaaaagaaatctgaaagggagaatgaattgaaacaacgatttgagcagagcatgaaagaagctgctgataaatatcaaggcgcaaacttgtatgtaaaaaatttagatgatagcattggtgatgaaaaactaaggagctgttc

SEQ ID NO: 2308 - DNA, 484 bp, Glycine max
tctctacccccttgtggaacagttagagcctgacaatgctgccaaagtgacaggcatgcttcttgagatggaccagactgaagttctgcatttgctcgagtcgccagaagccctgaaagcaaaggtggcggaggcaatggacgtcctaagaaatgttgctcagcaacaggctggcggtactgcggatcagctggcttcattatctcttaatgacaaccttgtttcacaaggtttatattttggatttatttagtgacgatgggttgttattttcggcactggctctgatacagtttcaggttgagtttgtttcgttagattagacacttttggtttgttatggaccaccaccttcttttggttgaagggcacttcaacactgattttaattatgccttgcatttggtacatggaatcatttgttggtttatcttttgattaaaaaaaaaaaaaaaaacaaaaaaaaaaaaaaaaaggggggggg

SEQ ID NO: 2309 - DNA, 504 bp, Glycine max
tgttacaagtactattttgtttgttctcctttctaccgacctaacacgagaggagaggagaggagagaagagaggaagttttggggtttgaatctatagaatagaatcaaaccaaattgaaagaagatcgatcgatcgatcgatggctctggtcggagttgaagtgaagcatgcggcggagggcgcaccggaggagaattgctccgccaagcccaccaagcagggcgagggcctccgccactactattctcacaacatccacgagcatcagctccttctccgtcaaaagacgcataacctcaaccgtcttgaggctcagagaaacgagctcaattccagggtgaggatgctgcgcgaagaattacagcttttgcaggaaccaggctcttatgttggtgaagttgtcaaagtcatgggcaagaacaaagtccttgtcaaggtcccacccagaaggaaaatatgtcgttgatattgaccaaagtattgacattacaaagattactc

SEQ ID NO: 2310 - DNA, 547 bp, Glycine max
cgaacgatttgatggtttggaatgcatttcccaagcaacgagtcttcggttcgaaaccagcagagagagagactgagagagacaggggggaaatgggtatgtgatgagagtgagattggcgtcgttcttcaccggggctgcagcggcgtcgtttctggggctctacaccctccacaaggattacaaggtcccgcaccaatcctttactcaacagatcccatcatcatgatagacattgctcgtctcccacactttgtgtaaatcttctcaaaagcaaacaaaagacagaaaacatatattacaaagtgttgttgaaggaaacaacaagtgaaaacatgattcttctcaaagacattgtgcctgcagctcagaacaatatagacaccaaatttatcattttggacaaaggcaagaccacagtagaagggcaaaacaagatatgcctggctcttgtggcagatgcgactgcagctattcatttccagttctggggcgacgagtgcgatgcttttgattcaggtgacataatttgtcttaccaatggcat

SEQ ID NO: 2311 - DNA, 465 bp, Glycine max
  unsure (1)..(465): unsure at all n locations
cgctcttttagaactangnntgtgatcccnnnccgggctttgcaggannnattcggcaccgagngggtgagattcgnngcgtcgttcttcaccggggctgcagtgcgtcgtttctggggctctacaccctccacaaggattacaaggtcgcgcaccaatcctttactcaacagatgaatgacctccacaaatcgctggaaggtcgaatttcttccttggaaaaactgaaacaaacggaaacgtctgaacaggttgaagcaactgaataagagttcagaccgaagcatccattgtggggaaaaaattgattcaatgtacttactatgaaaagtaaccttttggtttgttttcctgatgaataagttcaatttgactcattttatggcacctcatctgactgaactttttcgtctaaaagagtacagnatcagttgtgtaccaaatgtagtttggattattattttg

SEQ ID NO: 2312 - DNA, 414 bp, Glycine max
gaaaggagtagtatttgtgaagtgtaatagagactgagagggaaaggggggaaatggggtgtatgtgatgagagtgagattggcgtcgttcttcaccggggctgcagtggcgtcgtttctggggctctacaccctccacaaggattacaaggtcgcgcaccaatcctttactcaacagatgaatgacctccacaaatcgctggaaggtcgaatttcttccttggaaaaaatgaaacaaacggaaacgtctgaacaggttgaagcaactgaataagagttcagaccgaagcatccattgtggggaaaaattgattcaatgtacttactatgaaaagtaactttttggtttggtttcctgatgaataagttcaatttgactcattttatggcacctcatctgactgaactttttcg

SEQ ID NO: 2313 - DNA, 576 bp, Glycine max
ggcaaacaaaaacaaaaacgcagtcctttctctgtcctctctctctctctatctgcgaatttaaactccaatttccatttccattgataggaaggaggaaggaacgaagcggaagcggaagcgaaatcgctttgtctctatattgagccactttgaatctgtcgccgcaacggtagatcaaatcgagtttcacctgaatgctctttctggatgcgatttaggttgttgaaggaaacaacaagtgaaaacatgattcttctcaaagacattgtgcctgcagctcagaacaatatagacaccaaatttatcattttggacaaaggcaagaccacagtagaagggcaaaacaagatatgcctggctcttgtggcagatgcgactgcagctattcatttccagttctggggcgacgagtgcgatgcttttgattcaagctaccgtattctgttatcagtttggtataaaagaaatttagggggagagaatggtgtcatattacaaggcatgaaaagtctttgaactcaatgagcgctcgcagaggtacttgtatttatctcactactaggagatgaatgg

SEQ ID NO: 2314 - DNA, 663 bp, Glycine max
  unsure (1)..(663): unsure at all n locations
gagaagatgaatggagcatctggtgctgaacttaaggctgtttgcactgaagctggaatgtttgctttgagggagcggagggtacacgtgactcaggaggattttgagatggccgtggcgaaggtgatgaaaaaggagactgaaaaaaacatgtcattgcggaagttgtggaagtgattctcatttcatgtttgtggtgcacattgtcctgcgaagatgggcagagaacacacattagggttatttcaatttacagtggcattggctttcgttttgcttaactttacccaatcatgattctttcctcgagttcttccttgtctgtgtcttaggacggcacactacatttatagagtatttttaaaagatttatattcaagaccactaagtattctaaaactagtgaaaaaaaaaaaaaaaaaaaaaaaaaaaaaaaaaaaaaaaaaaaaaaaaaaaaaaaaaaaaaaaaaaaaaaaaaaaaaaaaaaaaaaaaaaaaaaaaaaannnnnnnnaaaaaaaaaaaaaaaaaaaaaaggggggggccgtttaaggggacccaggttaccgccccgggccgggcaaggaaaaactttttttttggggcacccaaattcaatttccggggccggggttaacaaccgggggggggggaaaacccggggg

SEQ ID NO: 2315 - DNA, 1111 bp, Glycine max
cggctcgagacgctcgaggcatgctctagtcacagacaccgacacagatctgtcttccgaagcaggaactaaatatggctgacttgttggaatggtcaaagcaagataagaaacgaatgcttcatgtcgtctaccgtgttggtgaccttgatcgcaccatcaaattttacacagaatgtttaggaatgaagcttttgaggcaaagagatatcccagaggagaaatatgctaatgcttttcttggatttggccctgaagaatcccattttgttgttgaattaacatataattatggggttacctcgtatgacattggcgatggctttggacattttgcaattgcaactcaggacatttataaattggttgagcacatcagggccaagggtggaaacatcacaagggaacctggtccagttcaaggtggaactactgttatcgcctttgttaaggatcctgatggttatacttttggacttatccaaagacctacagtccatgacccattttgtcaagtaatgcttcgtgttggtgatttagagcgctcaattaagttttatgaaaaggctttgggcatgaaggtggtgaggaaggttgataagcctgagtacaagtacactatagctatgctcgggtatggagaggagcacgagacaactgtgttggagctgacatataactatggtgtcactgaatactccaagggaaatgcttatgcacagattgccattggtactgatgatgtatacaagagtgctgaggttgtcaacatagtcacacaagagcttggagggaagattactcggcaaccagggccaattcctggccttaacacaaagatcacttctttcttagatcctgatggatggaaaactgttttggttgacaatcaagattttctgaaggagctggagtaaagagttatggctttttaatttaaagtactaatgctattgtatgaataagtgatcagctcctgtatttatcagtgaagtagtagtgttcaatacggtttctctgatgtgtttgcctgtttggttgagattctagacagtctacagtgacatccaacagtatttcaatatatttagtaaaagttggagaataaaaa

SEQ ID NO: 2316 - DNA, 539 bp, Glycine max
aatgttaccttataaagcaacacgctctctttggctgagagggttctggtttgtcgttctttctctcgcaatcttcactacattcaccgagcatttgcattcacattgaatatggctgagactacacaatctaatgctgagttgttggagtggcctaagaaagataagcgccgcttcctgcatgttgtgtatcgtgttggtgatcttgatcgcaccattaagttttatactgaatgttttgggatgaagcttttgaggaaaagagatattccagaggagaaatatgccaatgcttttcttggatttggccctgaacaatcccattttgttgtggaattaacatacaattatggggtgacctcatatgatattggaactggatttggacattttgctatcgcaactccagatgtttacaaattggttgaagacatccgggctaagggtggaaatgtcaccagggaagccgggtccaggtaagggtgggaagtctgttattgccttcgtgaaggatcctgatggttatgcttttgagctca

SEQ ID NO: 2317 - DNA, 361 bp, Glycine max
ttcagatctgtcttccggttagtcacctctcaaatttctcagacatttctttgatgatagtttgtgttggagctgaaattacatgcttcgcttgtagttataggaatgaatgttttttttattattgtgttgtttgtttggtttaattcttttgaaccccaatcatctaaacatgacattttcttcataatttctgaaccctggaggcttcagtttactgttgattttcgtgttatgcttctaccaatgccataagcttggtactccaccactttgcatcttgtttaagccttaaaacaacccgttctgaacccgttattgagcttttctagcttcttgtgtgacatttttgcttgctaat

SEQ ID NO: 2318 - DNA, 468 bp, Glycine max
gagacaactgtgttggagttgacatataactatggtgtgactgaatactctaagggaaatgcttatgcacagattgccattggtactgatgatgtatataagagtgctgaggtagttaaccaagtcataaaagaggttggagggaagattactcggcaaccagggccaattcctggccttaatacaaaaaccacttcgtttttagatccagatggatggaaaactgtcttggttgacaacgttgatttcttggaagaactgaagtgaagagcaagctttatatgaaataagtagtcctgctgcttttgtatgaataagttgtctcgcattttatcattgtgcgttttgtatcagtaccagtcatcaacttgttttcttgcttttatgggttcttttgttgacttaaaaccgcaattgaaacctcattctgcatgctacctatgattaatctactagtttatcataaaa

SEQ ID NO: 2319 - DNA, 407 bp, Glycine max
ggaatgttttttttattattgtgttgtttgtttggtttaattcttttgaaccccaatcatctaaacatgacattttcttcataatttctgaaccctggaggcttcagtttactgttgattttcgtgttatgcttctaccaatgccataagcttgaagcaggaactaaatatggctgacttgttggaatggtcaaagcaagataagaaacgaatgcttcatgtcgtctaccgtgttggtgaccttgatcgcaccatcaaattttacacagaatgtttaggaatgaagcttttgaggcaaagagatatcccagaggagaaatatgctaatgcttttcttggatttggccctgaagaatcccattttgttgttgaattaacatataattatggggttacctcgtatgaca

SEQ ID NO: 2320 - DNA, 282 bp, Glycine max
gttctttctctcgcaatcttcactacattcaccggttagataccctctctctctctctctggaaagcatttgcattcacattgaatatggctgaggctacacaatctaatgctgagttgttggagtgcgcctaagaaagataagcgccgcttcctgcatgttgtgtatcgtgttggtgatcttgatcgcaccattaagttttatactgaatgttttgggatgaagcttttgaggaaaagagatattccagaggagaaatatgccaatgcttttcttggattt

SEQ ID NO: 2321 - DNA, 859 bp, Glycine max
catttctggtctatttggttacgatggaatatcaattccaccatagtttaggttcgaacgccgttgccaaaaaatagatacttgtttcttattcacgtagtattttaatacttagtcaaacacgatagcatgaacccaaaatttttgacaattgtttctcaacaagagagattttgattttagcagaaaagcaatggcaagtgcgttgggtagcagagttgaatctgttcgaaactctcacttactaagcttttcgctcaactccattagatccttgagttcttcttcttcatccgccgtttcttctgctcagaaccctaagactaagaaatcgaagcgaagaaaagaagaacttgttcgatgtggctcagttcttacctaactggggaatcggctaccacatggccaagactcactggaatgaagtttcttacgaaatcactaaaataaatctctacaaggatggaagacatggaaaagcatgggggattgcttttaaaaatggcttgccattagcagatgctcccaaaaagattagtggagttcacaagcgctgttggaggtacataccaaatgtagtaaaagcattagaaagctcaacaaacttaacgagctcaacagacagtggcttaaaagttgaaactgaagcaagttgatgctttctagtgactctgggtatttaggtcatcgacattataccatgccttagagttgattttcaatcggcattgttgttttcgactatggttgcattttttagtcgaccatgaaatgtgctctgagggagtaatctagttggatttggttctttctttgtgtttgtctttgacccatattttcgaagttggtatacaatctt

SEQ ID NO: 2322 - DNA, 690 bp, Glycine max
ctgagagaaccaagaaaaacggactgcatcttcaacctctcgcattccaccgcgaccaaagatcgtctctgtttcaaaccagttctgttttgatcctctgcgacttgtttctctgcttctgcgagctagctattgttcggaaaagcaatggcaagtgcgttgagtagcagagttgaatctgttcgaaactctccctcattaagattttctctcaactgcatcagagcccttagctcttcttcttcttcttcttctgctgctgctgcggtttcttctggtgagaaccctaataaatcaaagcgaaggaagaagaagaacttgttcgaggtggctcagttcttacctaactggggaatcggctaccacatggcctagactcactggaatgaagtttcttacgaaatcactaaaatcaatctctacaaggatggaagacatggaaaagcatggggggttgcttttaaaaatggcttgccattagcagatgctccaaaaaaaattagtggagttcacaagcgctgttggagatacctaccaaatgtagtaaaagaattagaaagttcaacaaacttaatgagttccgcagacagtgactttgggtttttaggtcatcgacattagcccgtccatgtcttttcaatttggcttagttgttttcgataatggtatcgtttcttagtagatcatgta

SEQ ID NO: 2323 - DNA, 584 bp, Glycine max
tttgaatccgatttggaatgaacactttgaatttgttgttgaagatgtgtccactcagcacgtaactgttaaagtttatgattctgagggtttacagtcatctgaattgattggatgtgctcagctacagcttagtgaacttcaacctggtaaagtaaaggatgtttggttgaagttggtcaaggattcggagattcaaagggatacgaagaacagagggcaggttcattcggagctcttgtactgtccatttggcatggagaatagctttacaaacccatttgctcccaactactcaatgacatctttggaaaaggttcttaaaaatgcgaatggagtagagtctaatggaaatgaaaacgcagttacccaaaagaaaaaggaggttattattagaggagtcctttctgttactgtaatatctgctgaagacttgcctgcaacagatttcatggggaaatctgatccttttgttgttcttaccttgaagaaagcagaaacaaaaaacaaaaccagggttgtgaatgacagcttgaatcctgtttggaatcaaacatttgactttgttgttgaggatggattac

SEQ ID NO: 2324 - DNA, 992 bp, Glycine max
gagggaaggggatcgcatttcatagcactcaccctcattaccaacacgaaagcatagccaaaaccttttttcgaagtctctgattttcctaatggctccggcaaaggcagagaagaagccggcggagaagaagccagcggcggagaaggcaccggcggagaagaagccgaaggcggagaagaagatctcgaaggaaggagggagcgagaagaagaagaagcgcacgaagaagagcgtggagacctacaagatctacatcttcaaggtcctcaagcaggttcaccccgacattggtatttccagcaaggccatgggcatcatgaacagcttcatcaacgacatcttcgagaagctcgcccaggaagcgtcgcgtttggctcgctacaacaagaagcccaccatcacctcgagggagatccagaccgccgtgcgtctcgtgctccctggtgaattggccaaacacgccgtttctgaagggaccaaggcggttaccaagtttaccagctcttgaattagggtttgttaggcggttgtgttgcagatctagggttttctgtggatttcttttcttaaaaattagtttgtagatgtaatgatctgaacagttgttaatggaaggtttcgtttgaataattataattgcatgactgtggattactttttcgtcctttttgtttatggtttgggcggtgattagggttagggttgttggattgactcttaagatgtataatagataagaggagtgtggggttgtgtcaatttgatcatatcgttccctaatttccgctctgtttgccgcaatttgaagaacaacagttcacactattctttgttttttggctattgttttctgattttcgaaatgaacgccgttttgaaggatgtggttttcgttgtttcggaagatcggtgagggcttgaatgtattttggctgcttaatggacgtgctgcaataattatcgcagcctatttttagaaattgattctc

SEQ ID NO: 2325 - DNA, 711 bp, Glycine max
caaaagcaatgtatacatccgctcatataaacaaaaaagcgtggtttccctttctacattcacgtgagcctgatactgcccttacaaaggcaaattctatacctaaaaaataattttacataggctcccaactttaccaggcttgaggattcaatgtattccttgataaattaagaattgaatataggatctgcagcacaaccactcaatagataacaagaccatcctggatggatttacaggcaaggggcatgtccaaataaagacggacacattcccccaactggatgattcatgttacaaacagaaagttcacgttagtattcatcaacttatgatgcattctgcatgagggagtcaatctgagcacacgacttaggcgaaggctgttgcattatctccacttcatccaaatcttgagattggatgtctatatcctgtgtctgtaaaaacggttgaggttgctgatcttgggttaatggataagctggtggttgagacattctatagtaaggttctttcagatcaagtttacaggatgatgtttgaagaatccctccttgttcagcaccaggaccccacgttttagctgacaatgttaaaaagatcgtataactctgagcagtgtgagcaatcaagtgcatcctgccagtaatttcttgtcctgccatgacatatattggctgcgagagaacacagcgtaactgatac

SEQ ID NO: 2326 - DNA, 421 bp, Glycine max
tctctcactgcaattgcaaagcaacaacattccttttctccacttcgaagcaacgcaacgagtctctctttgcgaggttgaagtcgtcgtctttcgatatccggtggtgcatccctctcttcttcaattcgttttgtgtttgtgtctccatttgtttccttcttgaattactagaattcaccttcatatagttctaattttagtttattggttgtttttttttgttaatttattaatttcatgcggaaaagcctacttcatttctcaatcgcggatccgtactcagactggttaatcaatgctagggtttagcttgtgaatctttgacttctctctggatgagtccgatagttattattattatggtgaaacagtgaacctgaatactttctggtacttctaaacatcagcaattttactc

SEQ ID NO: 2327 - DNA, 264 bp, Glycine max
actctctctctcactgcaattgcaaagcaacaacattccttttctccacttcgaagcaacgcaacattctctctttgcgaggttgaagtcgtcgtctttcgatatccgccctaactctttagatgacttggcaacgttgtgtgggatgtaaaagttgagagctcagcacaacaattaccagaaccataattgagcggggcaggaaaggttcaggactgtaaccagttcttacttactataggggagcacaaggaatcattctag

SEQ ID NO: 2328 - DNA, 754 bp, Glycine max
  unsure (1)..(754): unsure at all n locations
cccacgcgtccgaccacgcctcctctgggactgtgaagtgtatttggtcactgacctatcttggtagagatttgaagtttaaaccttcaaattaatcaaaccattttaatttgcctatagattctgagtcactgctgctatggcgctacgcgtacttcttgtgttggggatgttgctgatgttgtgccttgttaaggtttcatctgatccaaagatagaagaagaaatactggaagcagaagaagaactgcagtttcccgataacgagccacttatcgtgagagacgcgaacagaaggctaatgcaagatatggattgtggtgggttgtgcaagacgaggtgcagtgcacattcgaggcccaacttgtgcactagggcgtgtggcacgtgctgtgtgaggtgcaagtgtgtcccacctggtacatctggaaatagggaactatgtggaacctgctacactgatatgaccacccatggcaacaagaccaagtgcccttagagaaacaaaaagcttcattagattggccaatttgtgcttcgttcattatgcatcaaaggttaagtgtactcctatgtggggtgcaattctgtttactatagcgatggatttgtgtgcactactatggctatattaattgactgttagtgtttttatttaaggtgtgcctgtatgattgatgtgatgagctaatcattgtaactttgtgccttntgtttgcgtaatataaaatgtagtacattacttgaccctttt

SEQ ID NO: 2329 - DNA, 491 bp, Glycine max
atgactaattctgtcttgtgtatgtcttattggcttatttgtgttatgcacatttttcatgtctaagactaaaacgggtgttggggatgttgctgatggtgtgccttgttaaggtttcgtctgatccaaagagagaagaagaaatactggaagaagaactacattttcccgataacgagccacttattgtgagagacgggaacagaaggctaatgcaagacatagattgtggtgggttgtgcaagacgaggtgcagtgcacattcgagacccaacttgtgcactagggcgtgtggcacgtgctgtgtgaggtgtaagtgtgtcccacctggcacatctggaaatagggaactatgtggaacttgctacactgatatgactacccatggcaacaagaccaagtgcccttagagaaaaaacccattgggaaatttgtgcttcattgattatgcaccgaagttcaagtgtactagtatgtggtggttcaattct

SEQ ID NO: 2330 - DNA, 406 bp, Glycine max
tggaactgtgaagtgtattggtcactgacctatcttggaagagttttgaagtttaaaccttcaaacccttttgcctttagattctgattctgagtctctgctgctatatatggcgccacgcgtatttcttgtgttggggatgttgctgatggtgtgccttgttaaggtttcgtctgatccaaagagagaagaagaaatactggaagaagaactacattttcccgataacgagccacttattgtgagagacgggaacagaaggctaatgcaagacatagattgtggtgggttgtgcaagacgaggtgcagtgcacattcgagacccaacttgtgcactatggcgtgtggcacgtgctgtgtgaagtggtagtgtgtcccacctggcacatctggaaataaggaacta

SEQ ID NO: 2331 - DNA, 700 bp, Glycine max
ggtggttggtgcaaccctcctttgcaacactttgatatggctgaacctgccttccttcaaattgctgaatatagagctggaattgtgcctgtggccttcaggagggttccttgtgtgaaaaagggaggaataaggttcacaatcaatggccactcttacttcaacctagtttggatcaccaatgtggctggagctggtgatgtgaattcagtgtccattaaagggtccaaaactgggtggcagcccatgtcaagaaactgggggcaaaactggcagagcaactcatacctcaatggacaatccctctcttttcaagtcaccaccagtgatggcagaactgtgacaagcttcaatgtggcaccagccaattggcaatttggccagaccttccaaggaggccaattctagagacattattgcaatgagggatagaaaatagtgcaaaacaaaaaaaatgtttgtatacctattattaatcacctcattggaagaaccattaagtgtcattaataggtattgattcttgtaactgtgattctgaaaggccagtgttttttattttattggtctaaaaagtagctgaggtgtttatatggcacccgctggtcacttcgcatataatatacatatatggagagttatgtgttatcctgcccgtgctggtgctgcttttcttcaatccaagataataattatattc

SEQ ID NO: 2332 - DNA, 1219 bp, Glycine max
gcagcatatagaattgtcttccatgatctaagccaggttttatgggatggtttatatgttggggatccagcatcttcaagaattgagccatgtctcaggaacttgagcggaagttaatgttcatttcagacactgttcatgaaagaattcgcacacgtattattactgaaataatgagagcttcctttgatggattcttgcttgtattgcttgctggaggtccctcacgtgcttttacccggaaggactctcagatcatagaggatgatttcaagtttctcaaggagttgttttgggcaaatggggatggtttgccttctgaactaatagataaattttcaactactgcaaggtctatccttcccctcttcagaaccgacacagagaccctcattgagcagttcaaacggttgaccatggagacatataaatcctctgccaggtccaaactcccattacctccaacttctggacagtggaatccatcagaaccaaacacattgttacgtgttttgtgctatagaaatgatgaatcagcttctaagtttctgaagaaggcatatgatctgcctaagaaactttaacaaccttgagaaccagttaatggaatggcaaactgtgatgtactgggagtgggagatgcattctgtttaatttgtctggttctgctggtatatagtacaacgttgtccagcaggtaatttatgtgaattgttgagcaagatttacgtcaggatgcgaccatcctgtaagacatcgggaatattggccagaggcttagtgctaccgccgtgttctccaagtccgaagtgaggcagcataaatcttggccatgattatggctgacttatttgcgaaggtagttgaatattctttctgattcattaattattggaagattagagatatctcacggtggtttattctgtgtttaacttaatttttccttttaccttctgagagttccctctctctatatatagtatgaaaatggcatctatgttctcattattcttttgttaaattcctttggattgggttgccccttttactagtatgaaatgcaggcagtgtataatagcctatttgttgattgagagtttctgcaattatttcttagtatgaatgaaaaggctggcgttgattgtaacctgagatttaacattgtacatatgctaattcagcacttttttatgtcatacatatccctcttagtcag

SEQ ID NO: 2333 - DNA, 752 bp, Glycine max
gcttcagcagcactcactgcgctaaccccttctctctctctctctctgctcggttctccgatcgccgtcttcgccttgcccattcctgatcaatatgtctagaagatatgatagccgtacaacaatcttctcccccgaaggacgtctttaccaagtggagtatgcaatggaggccattgggaatgctggaactgcaatagggatcttgtcaaaagatggggtagttctggttggtgaaaagaaggtcacatccaagctgctgcaaacctcaacttccaccgagaaaatgtacaagattgatgatcatgttgcatgtgctgtggctggaattatgtctgatgccaacatcctaatcaatactgctagagtccaagcacaacgctacacatatgcttaccaagagccaatgccagttgagcagttggttcaatctctttgtgataccaagcaaggttacacccaattcggtggtcttcggccatttggagtctcgttcctctttgctggatgggacaaaaactttggctttcaactttacatgagtgaccctagtggaaattatggtggctggaaagctgcagctattggtgccaacaaccaggcagctcagtcaattctgaaacaggactacgaggatgacatcacaagggaagaagcacgttcaacttgcactcatcgtgctaagtaaaaccatggacagcacaagtctaacctcagaaaagcttgaacttgcaaaggttttcctttcaccc

SEQ ID NO: 2334 - DNA, 463 bp, Glycine max
tctcgagccgaatcggctcgacgggcaattcgagtcttgaatccctctttcaaccttaacactcctcacttcgtttccgtcgcagctttttacacactccaccgctgcttccccttcacctccgatttcgttaatcagagatcaaaatgtctcgaagatatgacagccgtacaacaatcttctccccggaaggacgtctttaccaagtggaatatgcaatggaggctattgggaatgctggtaccgcaatagggatcttatcaaaagatggggtagtgctggttggtgaaaagaaggtcacatccaagctgctccaaacctcaacttccaccgagaaaatgtacaagattgatgatcatgttgcatgcgctgtggctgggataatgtctgatgccaacatcctaatcaatacccgctagggtccaagcacaacgctacacatacgcctatcaagagcccatgc

SEQ ID NO: 2335 - DNA, 2082 bp, Glycine max
cctcgagccggagacatctccccaattttagttgagagtggtgggcagtcgttatccttgcgctccctaatcaataaaaatttgagcatcccaacactcctgagcagctcagcacaatgccgggtctggtctccgtagcggacaccccccaaagatccccttccccagttcccaagaaagcagcctccccatccccttctggctcctccaaaaagaaagccccacttctctccgatgcctctctggacaaccctgatctcggcccattccttctcaagctggcccgcgacaccattgcctctggcgatggccccgccaaggccctcgacttcgccatccgggcctccacttcctttgagcgctgcgccatccagggcgagcccagcctcgacctcgccatgagcctccacgtcctcgccgccatctactgcagcctcggacgcttcgaagaagccgtccccgtcctcgaacgcgccatcctggtccccgacgtcgaccgcggccccgatcacgccctcgcctcgttctccggctacatgcagctcggcgacaccttctccatgctcggtcaggttgaccgatccatctcctgctacgaccaaggcctccagatccagatccaagccctcggtgacaccgatccccgcgtcggtgaaacttgccgatacttggcggaggcaaatgtgcaagcaatgcagtttgataaagcagaggagctgtgtaagaagacactggagattcatcgggcacatagtgaaccggcttcgcttgaggaagctgcagataggaggctcatggcgctgatttgcgaggcgaagggagattacgaatcagcgttggagcatcttgtgcttgctagcatggccatgattgcaaatggtcaagataatgaggttgcatcaattgatgttagcattgggaacatttacatgtcgctttgtcgttttgacgaggcgattttctcataccagaaggcgcttacggtgtttaagtctgccaagggtgagaaccacccttctgttgcctctgtttttgtgaggcttgctgatttgtaccacaggactggtaagcttcgcgagtcaaagtcttactgtgagaatgctcttaggatttactcaaagcctgttccggggaccaccgcagaggagattgccggtggcttgacagagatttcagcagtttttgaatctgtcgatgagccggaggaggcgctgaagctgttgaacagggcaatgaagttgttggaggataagccagggcagcagagcactattgcggggattgaggcacgaatgggagtgatgtattacatgattgggaggtatgaggactcaaggaactcgtttgagagtgctgtggcgaaactcagggctagtggggagagaaagagtgccttctttggagttgttttgaaccagatggggttggcatgtgttcaactgttcaagattgatgaggctgctgagttgtttgaagaagctaggggaattcttgaacaggagtgtggcccatgtcatcaggatactcttggggtgtacagcaatcttgcagctacatatgatgctatgggaagagtgggagatgcgattgaaatcttagaatatgtgctcaagttgagggaggaaaagcttgggatagcaaatcctgattttgaagatgagaagcgtcgtctggcagagcttctgaaagaagcaggcaagacacgggacagaaaagcaaaatctctggaaaaccttattgatcctggctcaaagcggacgaagaaggagggggcaaagaggtggcctggtttggggtttagaatttaaccatagttttattcatttaaatatatatattgaatgcacattctgtaacataggatatcttgtatagggttgaatatgtaattggggagggagcttccctgtttcttgatatttgttcatgcatttgtttctctgggttaattgctttatcaattgtgttgtgatctttttagctgtaccacaaaattctatacctgtcctacgtttccggaaaatgttgaaagcaaatttttattctgagtgaataaattttgatgagattgtgttttatttt

SEQ ID NO: 2336 - DNA, 571 bp, Glycine max
  unsure (1)..(571): unsure at all n locations
ggggagttgaattaccataataacccgagagacagatagagggtgaaaagaatgaaagctccttgggagctcagagtctagtttcttaatcaatagaagaaaatttgtaatccgagtccctccagcagcatgccaggtctcgtatcggacgcccaacccctcggaatctccgtcccggacacacccaggcaatcccagagaaccccttctccactccccaaaaaaccacccagcccatctccttctcgctcctccaaaaagaaaactcctgaaacccctccgcttctctctgatgcctctctcgacaacccggatctcggcccattcctccttaagttggcccgcgacaccattgcctcgggcgatgggccctccaaggccctcgacttcgccatccgggcctccaagtccttcgagcgctgcgccgtcgagggcgagcccagcctcgacctcgccatgagcctccacgtcctcgccgccatctactgcagcctcggacgcttcgacgaagccgtccccgtcctcgaacgcgctatccaagtccncgacgtcgaacgcggcgccgatcacg

SEQ ID NO: 2337 - DNA, 652 bp, Glycine max
ccgggacgcttatacagctctagagaattatcatacccttcaagatgaaaccgtacctacgtccaatattcctattattccttatccttctcgaccaatccatttcggcgagtgctgctataaatattaatggtctgagaaacaaaattagagaagttctaaacaagcacccgagcatcaatcttccggcagataaactgaagaaggtgaagagaccactgaaggcactggattatctgcttggcgaatgtaaggacaggccgcctcaagaatttcaagaattttgcccgaaatttaagaacgattatcaacaaaattgcccgaatgccgcgtatgaagcagtttgcccgttactgaagcaagcgattcaaatatgttgccagaaacacgcataactctgcaagccacggtgggcgtttggatgtgcttttagttaccactttctctcttggatttgcttacgtattgctccttttgtattagtggctcctgtcccaccttgcttttggacttgagctttttatatttctgattgttcaatgtctgttgtgtgtgctctccaacctgtggtgactttccggtttattcctgtggctgtttcttgtaggcctttcgacctccagtattaaataaaagatcatcttgtagcttt

SEQ ID NO: 2338 - DNA, 1478 bp, Glycine max
ggggcacacagttatacagctctagagaattatcataccctttaagatgaaaccgtacctacgtccaatattcctattattccttatccttctcgaccaatccacttcggcgagtgcttctaatagtaggtttatagaattcttttcaaaattaaagaattcttttaatcctaagtctgaagaactaaaatcaaaagatataaagaagctcccgagcgtcgaatttttgaagaagaaacatgacggagttaaggacttctctcaagaagctatcctgaaactaccaattatacactggccgttcccgataccaaaaataccaaaaaacttctggaaaccaaagtcccagaaaccaaagcaccctcccccaccgccagactaccgtgtacaactaaagtccgatcccccagcgccaaacgcaccaccgaagcaaatcaatattaagggcctgtccgtcgtcaaagattacttatctgactacggctacattgaatcctctgggccatttaacgattctttcgaccaggaaataatatcagccattaagacctaccagaatttttccaatcttaatgttaccggcgacctgaacaaacagcttattcagcaaatgttgtccatacgatgcggtgtccccgacgttaacttcgactacaacttcaccgacgacaacatttcctatcccaaagccggacaccgctggttcccaaacagaaacctcacatacggttttcttcccgaaaaccaaatcccagacaacatgactaaggtgttcagagattcctttgcgaggtgggcccaagcctcggggactttgagtctcacggagacaacctacgacaacgccgacatccaggtagggttctacaacttcactaactcgaggattgaagtgtatggtggcagccttatatttttgcaaccggattctagtaagaaaggggtggtacttctggacggtaacatgggctggttacttccaagtgaaaacgccacactgtctaaagatgatggagttttggacttggagactgcggcgatgcaccagatagggcatctacttggacttgatcactctcacaaagaggactctgttatgtatccttacatattgtcctctcacagcaacgaaaggtgcagctttccaattctgacaaggccaacattcaccttcagtttgctaagcatgcttaggatgttctctgctgccaaactcgcatgactcagcaagccacggtgggggtttggatgtgcttttagttaccactttctctcttggatttgcttacgtattgctccttttgtattagtcgttcctgtcccacattatgagctttttatatttctgattgttcaatgtttattgtatgtgctccccaacctgtggtgacttttcggtttattctcacgtggctgtttcttataggcctttcgacctccaatattaaataaaagatcattttgagctttctaatttt

SEQ ID NO: 2339 - DNA, 759 bp, Glycine max
  unsure (1)..(759): unsure at all n locations
cgccgctctagagaatcaagaaaattattatacccattaagatgaaaccgtacctacgtgcaatattcctattattccttatccttccttcggcgagatggggcgaggctaaaattgataggaagacgataacaatgttttggggcaaggttaaagatgcgacgataaaaaatttcccgagtcgtgatgagcggaagaaactgagggagtattacgagaaattcagggaattcatggatcgtgtagaacaaaagacgacccctcccccaccgccaatgtaccgtttacaaccaaagtcccctcccccaccgccaaacgcaccaccgaagcaaatcaatattaaaggcctgtccgtcgtcaaagattacttatctgactacggctacattgaatcctctgggccatttaacgattctttcgatcaggaaataatatcagccattaagacctaccagcaatatttcagtttgcaacccaccggcaaactaaacaacgagactcttcagcaaatgtcgttcctacgatgtggcgtccccgacattaacattgactacaacttcaccgacgacaacatgtcatatccgaaagccggtcaccggtggttcccccacacaaacctcacatacggttttcttcctgaaaaccaaatcccagccaacatgaccaaggtgtttagagattccttcgctcggtgggcccaggcctctngggttttgaatctcaccgagacaacctacgacaacgccgacatccaagtag

SEQ ID NO: 2340 - DNA, 506 bp, Glycine max
tctcccacgcgtcctagggaataaaccaagaaattatatacgtatacccattaattatgatgaaatcttcttcacatctttctgcaatattcctattgttctttctccttactgccctatccccttcggatggagtttcattctcttcattcctaaagcaattaaaacagaagctggagaagagtcccaccctaaaagatttcctgaaacccaccactataggggatatttattatacgttgaatttcacagaaatcttctcttccgaagagagaagcgcaccaccggtgtctctcatcaaagattacttatcaaactacggctacattgaatcctctgggccattgagcaattcgatggaccaagaaacaataatatcagccattaagacctaccagcaatatttcagtttgcaacccaccggcaaactaaacaacgagactctttcagcaaatgtcgttcctacgatgtggcgtccccgacattaacattgactacaactttac

SEQ ID NO: 2341 - DNA, 387 bp, Glycine max
cggacataattaaactttattaaactcatgaaactcccttctagcgtgcaattcgcaacagcaaccatcagtcatctaccactatatattactcctcagctcttatatttagacgcacacaattatacagctctagagaatcaagacaattattatacccattaagatgaaaccgtacctacgtgcaatgttcctgttattccttatccttctcgatcaatttatttcagcgagtgctggtggtacttaatagtgaactattcaaatgtattggtctaccatttaaagcactaagaaagataccgaacaagatagaaaatttggagaggttaaataaattgactgagaggttcaagaaagtgatgaacgcctgtgacaatttacaac

SEQ ID NO: 2342 - DNA, 619 bp, Glycine max
acccactcatccgatcacttacctatgaattgatatcgaggtgtatggtggcagccttatatttttgcaacccgattctaccaagaaaggggttatacttctcgacggtaccaataagttgtgggctcttcccagtgaaaacggtaggttgtcgtgggaggaaggagttttggacttggagagtgcggcaatgcacgagatagggcatttactacggcttgaccactctaacaaagaggactctgttatgtacccttgcatattgccttcacaccaacgaaaggtgcagctctcgaaatctgataagaccaacgttcagcatcagtttgctaacgtagaggactctgcaggccacgtagggcgtttgggagtgagtttaattaccactttgtctcttggattcgcttacttacttctccttttgtattaattaggtctactcgtgcgtcacgctttaccttggttgtaataattttatgattgttgaatgtgcatcagtgcatgttcccccgcgcatgatttctttttgttttactcgtacgtgtcgttgtttcttattggtctttggacatcttgtatatcttaataaataaaagattgttgtttttttatttcaaaa

SEQ ID NO: 2343 - DNA, 472 bp, Glycine max
ggcacacaatcatgcagctctagggaatcaagaaaattattataccctttaagatgaaaccgtacctacgtgcaatattcctattattccttatccttctcgaccaatccatttcggcgagtgcttttttaaatttaaatggattgctaaacattgaaaagtggccctctggcgagaaaagtttggaaatgggaaagatagggaaggagacgacagatcatatcaaagaccttttaaagaaactgattgagtcccctcccgaaccaccgaagcaaatcaatattgaagttgaaggcctgtctgtcgtcaaggattacttatctgactacggctacattgaatcctctgggccatttaacaatattttcgaccaggaaacaatgtcagccattaagacctaccaggaattttccaatcttccagttaccggcgttccgaacaaacagcttaagcagcaaatgttgtccctacg

SEQ ID NO: 2344 - DNA, 483 bp, Glycine max
  unsure (1)..(483): unsure at all n locations
gttatacagctctagagaattatcatacccattaagatgaaaccgtacctacgtccagtattcctattattccttatccttctcgaccaatccatttcggcgagtgctggtaatttttttgattcattgaaaaaattatttggtccagcattagcaaagataccgagcaagaaagaagatttgaagaaggctgagaaagcgaaggagtggatcgagaaagtgaaggacggcgtagaacttggaatagaaaatgcccctccctcaccgccaaacgaaccaccgaagcaaatcaatattaaaggcctgtctgtcgtcaaggattacttatctgagtacggctacattgaatcctctaggccatttaacaattctttcgaccaggaaacaatgtcagccattaagacctaccagaaattttccaatcttccagttaccggcgttccgaacaaacagcttattcagcanatgttgtccctacgatgc

SEQ ID NO: 2345 - DNA, 328 bp, Glycine max
ctagagaattatcatacccattaagatgaaaccgtacctacgtccagtattcctattattccttatccttctcgaccaatccatttcggcgagtgctgctattaatattaatggtctgataaacaaatatgcacaaattataaagaggcccccgagcatcaaaattccggcagataaactgaagaaggtgaagagatcactgacggtagtggagaagctgattggcgaatgtaaggacaggccgcctcaagaattttgcccgaaaattaataaggcgtatcaacaaaattgcccgaatgccgcgtataaagaagtttgcccgatagtg

SEQ ID NO: 2346 - DNA, 1391 bp, Glycine max
ctcgagccgaatcgttttgtatgcacttcaaacagtttgggcgtcatgtggagagagagagcgttattggtgatcctgctactgcttctagtccagcaaatttgtgctaccaagaagcaagatcatggttgccccctttcttcctgcggcaaaatcaccaacataacttacccatttcgattaaagggccaccctaaaagctgcggcgacaataggtatgagctagcttgtgaaaacaatgttactgtgttacatttgtactctggaaaatatcatgtgcaggcaatcaactacaataatttcactatccgagtggttgatccaggagtcgatcaacaaacaaattgctcctcccttcctcgctatttcttgtctcgctccaatttcactgatacttacagtgatatttacaacatggatccataccaagctggtcaatattcaggtcgtagtaattgggacaggcttgctttccagcatatagtgtatatgaattgtagcaatccagtgactcagaatgggaagtatgtggatactgcttcatacgtcaactgggactccaaagacaagtacatatacgctattgctggtgacttaaaagcagaggacttccaagttggttgtcacgtaaagctggttgctctgacatcttggtggggtttggatacaaactattattcctactctgccatgcacacggggctagtctatggatttgagatttcatggatgcgcctcatatgtgaccagcactgtccaagtaaacacggctgctactactacaaggtattctcataattttcactatgttatgggcatggaaaattttgttaacagtgtcactgtttattgtgattttgacgtgtaaatggagaaaaagacatttgtcaatgtttgaaagtattgaaaattatctagaacaaaataacttgatgcctattagatattcatacaaggaagttaagaagatggcaggaggttttaaagacaagttgggtgaaggaggatatggctctgtgttcaagggaaaattgcgtagcgggtcttgtgtggcaataaagatgttaggtaaatcaaaaggaaatggccaagattttattagtgaagttgcaaccattggaagaacatatcatcaaaatatagtacaattaattggattttgtgttcacgggtcaaaacgtgctcttgtctatgaattcatgcccaatggatctcttgacaaatttattttttccaaagatgaaagtatacatttaagctatgatagaatatataatatatcaattggagtggctcgtggaattgcttatctccactatgggtgtgagatgcagattttgcactttgatatcaagccccacaacattctactagatgaaaacttcacccca

SEQ ID NO: 2347 - DNA, 1629 bp, Glycine max
  unsure (1)..(1629): unsure at all n locations
gcaagtctttgtcttgttcatcgtgcaagattaatgggacagggtgttattgataaagaggattggcctgctcccaaagctctttttgacatcgatcttaaaaacctgaggattattgctgaatatcttcaaaaaattgatcccaaatcagatggtgcaaagagggactgggttgctatttatgatgagtgtgcctctgttttatatcaggagattgattacaccaaggaggctgctaatgcagaactgtttgcaagtaactttaagaacttggattatgtgaaagtccctacaatcttctgggattataccacgccacagattctgacaatggagtatgttcctgggattaaaataaacaaaatacaagctttagatcaactgggtgttgaccgcaaaaggttagggagatatgcggttgagtcatacttggaacaaattttatcacatggtttcttccatgctgaccctcatcctggaaatattgcagttgatgatgtcaatggtggaagattgatcttttatgattttggaatgatgggaagtatcagtcaaaatattcgagaaggtttacttgaagctttttatggaatttatgagaaggatccagacaaggttctacaagcaatgattcaaatgggagttcttgtccctactggagatatgactgctgttagaagaacagcacaattcttccttaacagttttgaagagcgcctggctgcacaaaggcaagagagagaggaagcaacaactgaacttggattcaaaaaaccattaagcaaggaggaaaaaataaagaagaaaaagcaacgtctggctgctattggtgaagatttattatctattgcagcagaccagcccttccgatttcctgctacattcacatttgttgttagagccttctcagtgttggatggcattggaaaggggcttgacccacgttttgacatcactgagattgccaaaccttatgccctggagttgctcaggtttcgtgaagctggggttgaagttgtcctaaaggacttcaggaagagatgggatagacaatctcaagcattttacaacttattcagacaggctgatagggttgacaagcttgctgacattatccaaagactggagcaaggtgatctaaagctgcgagttcgaactttggaatctgagagggcattccagcgtgttgctgctgtccagaagactatagggaatgcagtagctgctgggagcctaatcaatcttgcaacagttttgtatctcaactcaattcgggtgcctgccattgcagcatatatcttctgtgcactctttggttttcaagtgctcttgggcattgtcaaggtcaagaagctagatgaacgggaacgattgataacagggattgcatgagcagctacatgatttaggaccgagaaatagcacatgttacggtcatggttgcaagtcaaccttcagaaaaggattaaatgacctggggagctgatagaaagcattacccaacatttcgaaagacttcagcaagtacaaaaatttcaagcagcanatgatgggggctntctccattcacctgtttctgttaataaaaaaaatgtgctctacgatagccaaattggcttagagccacat

SEQ ID NO: 2348 - DNA, 1065 bp, Glycine max
tgcacttcaaacagtttgggcgtcatgtggagagagagagcgttattggtgatcctgctactgcttctagtccagcaaatttgtgctaccaagaagcaagatcatggttgccccctttcttcctgcggcaaaatcaccaacataacttacccatttcgattaaagggccaccctaaaagctgcggcgacaataggtatgagctagcttgtgaaaacaatgttactgtgttacatttgtactctggaaaatatcatgtgcaggcaatcaactacaataatttcactatccgagtggttgatccaggagtcgatcaacaaacaaattgctcctcccttcctcgctatttcttgtctcgctccaatttcactgatacttacagtgatatttacaacatggatccataccaagctggtcaatattcaggtcatcggaatttatttatttgttatcggtaaagattagttgttagttttcatttatgatgaaatccacgactttttcattctcaattctttcaatacttaggtcgtagtaattgggacaggcttgctttccagcatatagtgtatatgaattgtagcaatccagtgactcagaatgggaagtatgtggatactgcttcatacgtcaactgggactccaaagacaattacatatacgctattgctggtgacttaaaagcagaggacttccaagttggttgtcacgtaaagctggttgctctgacatcttggtggggtttggatacaaacaattattcctactctgccatgcacacggggctagtctatggatttgagatttcatggatgcgcctcatatgtgaccagcactgtccaagtaaacacggctgctactactacaaggtctgctttttcgactctgtcagccaggagcttcattattgggacggggattcattagggagtgagtgaaacttaacataaaaagacttttttattcagagtgctctatgttaatatgaattcttttttttttttgttaatatacgtgaccttcttgttttatgaaaattaatggtaaataatattttttatggacct

SEQ ID NO: 2349 - DNA, 461 bp, Glycine max
ttgtaactaatatttacactgttcgtgcagcatcctggaaatatcgcagttgatgatgtcaatggtggaagattgatcttttatgattttggaatgatgggaagtatcagtcaaaatatccgagaaggtttacttgaagctttttatggaatttatgagaagaatccagataaggtccttcaatcaatgattcaaatgggtgttcttgtcccaactggagatatgactgctgttaaacgaacagcacagttcttcctcaacagttttgaagagcgtttggctgcacaaaggagagagagagagatggcaacggtcctgctactgcttctagtccagcaaatttgtgctaccaagaagcaagatcatggttgccccctttcttcctgcggcaaaatcaccaacataacttacccatttcgattaaagggccaccctaaaagctgcggcgacaataggtatga

SEQ ID NO: 2350 - DNA, 499 bp, Glycine max
tctcgagccgaatcgactgaagaagaaagataaagcattccatagcctcccataaaaatgaagaatactatcttctctgctctctttctactttgtgccttcaccacctcatacctaccttcaaccaccgcggtggtcgataccgacggtgatattcttcagaatcctggcacatactttatcttgtccgtttttcgacccggcggcggagtagaattcgccgccactggaaacgaaacttgccctctcactgtcgtgcagactctcttcgggaggggctttccagcaatattatcgtcccggttacgaatccctttcatcggcgaaggacaactcttcagcatcctgttccgtattgtgccatggtgcgccaccactccttctaagtggaccattgtggagggtttaccagaatcacccgcggttaaactcactgggtacgacaacacagtgcctggtgagtttaaaattgagaaagctaaccctttccataacgact

SEQ ID NO: 2351 - DNA, 1923 bp, Glycine max
  unsure (1)..(1923): unsure at all n locations
cccgcgccctgggcccatgccccgcggcgctggcggactcctcctgcctgctccccaacaaaattcaaaaccaattccctctatcacccaaggccatccacagcgtgacgaaggaaccacaagtggacagcccagtccccatctcctcgttctcggatgaggacgaggagatcgtacaagccgtagtgtcgggctccatcccatcctactcactcgagtcgcggctcggcgacacacgccgggccacggccatcaggcatgaggtggtgcagaggctgacttcccgatccctgtcaggtttacccctggaaggtttcaactacgactcaatattggggcagtgctgtgagatgccgatagggttcgtgcagatccccgtgggagtagcggggccattattgttggacgggaaggagtacaccgtgcccatggccaccactgaagggtgtctcgttgcgagcaccaacagagggtgcaaagctatccacgtctccggtggggcctcctcggtgttgctcagagatggcatgaccagagcacccgttgttcggttaccctccgctcagcgcgccgcgcagttgaagttcttcttggaggatcctctcaacttcgattcgcttgctgtcgttttcaataagtcaagcagatttgccaggttgcagaacattcagtgtgctattgcgggcaagaatctgtacatgagattccgatgcagcactggtgatgccatggggatgaacatggtgtcaaaaggtgttcaaaatgttcttgattttcttcaggatgacttccctgatatggatgttattggaatctctggcaatttctgttcggacaagaaagccgcagccgtgaattggattgaagggcgtggcaagtctgtggtgtgtgaggccataattaaggaggatgtggtgaagaaggtgttgaagaccagtgtggaggccatggtcaaacttaatatgctcaaaaaccttacgggctcagccatggctggtgctcttggtgggttcaatgctcatgctagcaatattgtgtctgctatctacattgccactggtcaggatcctgcccagaatgtggagagttctcactgcatcaccatgatggaagctatcaatgatggcaaggaccttcatgtttccgtgaccatgccctccattgaggttggtactgttggaggtggcacacaactcgcatctcagtcagcatgtcttaatttacttggtgtcaagggtgccaacaaagaatctccgggtgcaaattctaggctactggccaccattgtagccggttcagtcctcgccggggagctatcgctcatgtctgctattgcagctggacaacttgttaagagccacatgaaatacaacagatctagcagggatatatctacaattgtccaatgaactggccacagtacacttaaacttgtgtcagagactaatattctaataagcaaaccatcagataaagacataaataacgagaaaaaaattggtattgatgatggtgggggtaaaagataaagtgatggttggcatcttccatgggcaaatccagctccccagaagcgtggggttggttggcattcattgaatatctgcttcgtgtgaggcattttctcttatggagattgtacagaggtacttgaattagagggtggaggtaaacaggagccacacttttgggattagagtttctctttgttttccaaaaaaaaaaaaaaaaatgtcattttgtgttgtgtgttatcctcttgtttaaggctactgcttcaataatgtggtactttagagggtagtgtttttacgtgttgtaatctccatcttgttgatttgtaattgtagcaagagatgtctcccattgggatgtagagttgttaataataacagtctctggttgctcaaanaaaaaaaaaaa

SEQ ID NO: 2352 - DNA, 451 bp, Glycine max
tcggcgtcgcctcccgcgcctccctcgacgagctctccgacggcgagctccgcctccaggaagactcccgcgccccgggcccgtgcgccgcggcgctgtcggactcctgctcactccccaacaacaaaatccaagaccaattccctctgccacccagggctgtccacagtttggcgaaggaaaaacaacatattccttcgccaccacaagtggacagtcctgtctctgtctcagtctcggtctcttcctcctcggacgacgaggacgaggagatcgtgcaagccgtagtgtcgggctccatcccgtcctactcactcgagtcgcggctcggtgacacccgtcgggccgccaccatccgccacgaggtggtgcagagactgacttcccgatccctgtcaggtttacctctggaaggtttcaactacgactcgatattggggcagtgctgcga

SEQ ID NO: 2353 - DNA, 854 bp, Glycine max
catttttctttcattttccgttagtgttgtggctatggagtcggcattgatatttctgggaacgggagtttcgggaacggttccctccatgaggtgcctcatcgacccttcagatcctccatgtctcgtctgcactcaatctctctccctcccacctcacctaaaccctaactacaggtgcaatacctctctgttaatcgattattactctcaaagcgacgccactcacaaatatatattgatcgacgctggcaagaccttcagggagactgtacttaggtggtttgttttccatcacattccaagaatagattctattcttttgactcatgaacatgctgatgcagtccttggattggatgatatacgagctgtgcagccgtttagtcccactaatgatattgatcccacccccatttacttaactcggcattcaatggatagcatggaaaaggtgtttccttatttggttcagaaaaaacacaaagaagggcaagaaatacgaagggtagctcagtgttgctggaacataattgctgatgattgtaatctgccattttctgcatcaggcttaaaatttattcctttgccagtaatgcatggagaggattatatctgtttgggtttcctttttggtgagaaagatagggtggcttatatatctgatgtttcacggattccagctagtacagagtatgtcatttcaaaaagtggggctggacagttggatcttcttatattggatacactgaaaaagactggatcgcataatgttcacttttgtcttccacaggctcttgaaactgtgaagaggttatgtccaaagcaaaccctattgattggaatgactcacg

SEQ ID NO: 2354 - DNA, 605 bp, Glycine max
tataccttcctctattggccgtctctcacatttgcaaattatgaacttgtctaccaatttcttctctggtgaaattcccgacattggagtattaagcacctttgacaagaactcgtttgttggcaatgtagatctttgtgggcgacaagtccaaaagccatgtcgaacatcacttggtttccctgtggtgctaccacatgctgaaagtgatgaagctgcagtccctaccaaaaggccttcacattacatgaagggggtcctaattggagcaatggcaattttgggtctcgcacttgtcataatcctttcattcctctggactcgtttgttatcaaagaaggaacgagcagcaaagagatacactgaagtcaagaaacaagctgatccaaaagcaagcacaaaacttattaccttccatggtgatctgccatacacatcatctgagatcatagagaagctagagtctcttgatgaagaggatatagtaggatcaggaggatttggtacagtttaccggatggtgatgaatgattgtggtacatttgctgttaaacagattgatcgaagttgtgaagggtctgatcaagtgtttgaaagggactaga

SEQ ID NO: 2355 - DNA, 449 bp, Glycine max
gtcactgcctgtgctgtgtgctgtgctgtgttgcgttgtgtccattcccccgaaaacgaaaaggagaagatgaaatgggatatgcagatggaggaaatcgaagcgattatggagaaaatttgggacctccacgataagctcagcgacgccattcactccgtctccagatcccactttctcacttccgtcaaaaccctcaaactcaacaactctccaccgcaccttcccaacgccgccgtcgccgctgccgatgaccgctcctccggtttcgttttcgtcaaggactttagaccgctcgccgtcgccgataacgacaacgatgacgatgactccgccgtccgcgaagccaagagcctcaacgccatccggaccgccctcgagaacctcgaagaccagctcgagttcttccatactattcaaacccagcagcgtgttgagagagatgccgc

SEQ ID NO: 2356 - DNA, 853 bp, Glycine max
cctctcctctggttttggggttagattaggtcttcctacccaaaacaaaacttcaatttctgtttcagttcgcggagatcaatattttatctaggtccatcgtcgatagaagatacgagaaaccaaaggcaatgtttttgtgggattggttttatgggattctagcgtcgctcgggctgtggcagaaggaggccaagatcttattcttgggcctcgataacgctggcaaaactaccttgcttcacatgctcaaagatgagagattagtccagcatcagcctacccagtatcctacatcggaggagttgagtattgggaagatcaagtttaaagcttttgatctagggggtcatcagattgctcgaagagtttggaaagattactatgcccaggtggatgcagtggtgtacttggttgatgcttatgacaaggagagatttgctgagtcaaaaaaagagctggatgctctactctctgatgaatctttagccagtgtcccttttcttgtccttgggaacaagatagatattccatatgctgcctcagaagaagaattgcgctaccatttgggcctgactaacttcaccacaggcaagggtaaggtaaacttggccgactcaaatgtccgtcccatggaggtattcatgtgcagtattgtgaagaaaatgggttatggggatggtttcaaatgggtttcccagtacatcaaatagtcccttagcaagagatggcttggtaactcatttctagaagtttgtttctctagttgagatttggaggtgttgttgggacaaaattgctgttaaagaaattgcagtatatttcaacttttatttatataaaatgactggga

SEQ ID NO: 2357 - DNA, 495 bp, Glycine max
ggactctgatgcgaacgtaaccaggctctggttttgcggttagggtagctctttctactcaaaacaaaacaaaacatcaatttctgtttcagttcgcggagatcaatatttgtcgctgaggtcgatcgtcgataaaaggcaatgtttttgtgggattggttttatgggattctagcgtcgcttggcctgtggcagaaggaggccaagatcttattcttgggcctcgataacgctggcaaaaccaccttgcttcacatgctcaaagatgagagattagtccagcatcagcctacccaatatcctacatcagaggagttgagtattgggaagatcaagtttaaagcttttgatctcgggggtcatcagattgctcgaagagtttggaaagattactatgcccaggtggatgcagtggtgtacttggttgatgcttatgacaaggaaagatttgctgagtcaaaaaaagagctggatgctctactctctgatgaatct

SEQ ID NO: 2358 - DNA, 541 bp, Glycine max
cgtcaccttcccttcccacaagacccacagttctacttccacagccatcgaaatgtttacagcagcacagtcactctttctatattccttgctttctgctttcatcttcactctgtttttgggggtcagatcttaataccgaaggcttcgtattctgtttgaatattgatatctattgggagtggagtagtattgagatcgagcgtaaaagaaaggcgatgtttttgtttgattggttttatgggattctggcatcgcttggattgtggcagaaggaggccaagatcttattcttaggtctcgataatgccggaaagaccaccttgcttcacatgctcaaagacgagagactagttcagcatcagcctacacagtatcccacatcagaggagttgagtattgggaggatcaagtttaaagcttttgatcttgggggtcaccagattgcacgaagagcctggaaagattactatgctaaggtagatccagtggtctacttggtagatgcatatgacaaggaacgttttgcaatatctataaa

SEQ ID NO: 2359 - DNA, 389 bp, Glycine max
ccctctagccgaatcggctcgagctaaatcgttcaacctcacacccactcctccgatattcttttctgctttaatcttcgctctgttttcgggggtcagatcttaatgccgaaggttcgtattctgtttgaattttgttatctattgggagtggagtagtatttgagatcgagcgtaaaatatataaaaataataaaagaagcaaaggcgatgtttttgtttgattggttttatgggattctggcatcgcttgggttgtggcagaaggaggccaagatcttattcttaggtctcgataatgccggaaagaccaccttgcttcacatgctcaaagacgagagactagttcagcatcagcctacacagtatccaacatcagaggagttgag

SEQ ID NO: 2360 - DNA, 940 bp, Glycine max
gacttctaagctgtgataagaaaacatatacagaattgatatggaaggatatctgagtattagccaatgaagtgacccgtgcgtggatccccaccctatctgtgccttttcctatgtttgcgaattaaatgaagcaagcattcataaaccataactgaagaaaactaaggaaggaaggaaggaaggaagagtgagcgtgaaagatgccttgggcgaggctttcagggtctccaaggctcgacgttgctattgacatgggcaatccatttctcaatctcactgttgatggtttccttaagatcggagctgtcgcagccacgcgatcagctgctgaagatacttatcatattatccaaaaggggaatatctcaagtcatgatttcgagaaaacgttgaagaagatgtgtaaagaaggtgtatattggggaactatagctggtgtttatcttggaatggaatatggggtagagaggatccgtggcaccagagattggaagaatgccatgattgggggtgcagtaactggggccctggtatctgcagccagcaacaacaagaaagacaaaattgcaatagatgccattactggggcagcaattgctactgctgcagagttcataaattaccttacctgaatgaatgaaagtggatgtcttgctggttttcttgcatgttttggaaagggattgcacactcagtctctctttagtcatactctgtaccggttccgtctttgatattggtgcagttacttctaagatatgctatttatttaactttctataaaacccatgttttgataaattatattggccattcggttttctgcatgttagtagctttgccttgcaatttagtcaagctagacttgtgcaattatgtcaaagcatgttcagttcgatttagtctttgggttttggaataatgaaggttctggatg

SEQ ID NO: 2361 - DNA, 793 bp, Glycine max
aaatcggcattgttgtctgagtgtcgagactcgagagttttcaaatcgtaaaacctaaataaatacatcactgccttcagaaaacgactgcgcctagcttctagccaccctttaatcttcgtcaacgttacttttccacctcgtacgagggattcaattgagagggaaagggactgatggcagacaacacacagtcttactgggaaggctacaaagcgttttggtcagagaggttttcctttttgagcaactattcgaggttcatcaaccgtgataaacccatcccttcctggtcaagctctgatgtcgaggagttcattgcttctgatcctgttcatggacccgtcctgaaaagtgctagagaagcagtgcaatttggcctcacaggaagtgctttgggagcattatttactgcaggctatgcctggaaatattcaaagagtttacatggcgctggactgtcatttttagctggaggtatatttgggtggacttttgggcatgaaatcgcaaatcacacacttcaactttacagggtagacacattggctgctgaggccaagtttctggactggtggaataagaagactggagggtattaaaactgttggcttatgggaattaatgctacatttgttatcgtttctgaaaaatgaagaataatttttggtgttggcagtgcgatttatgctcactgaataagtatgttgtgaattaggttatgttttaaaactaatgcatcatcgcaaaacaaatggtgacttgtgccattttttctctgtaaaaaaaaaaa

SEQ ID NO: 2362 - DNA, 729 bp, Glycine max
gatatgaaacaatttttgcaataagaggtaacttcatcctagtgtctcatcttgaagacgagctgtgatgaaaaaaaaatatctagaattaatacggaaggatatctgggtagtgagtattagccaaatgaattggcacatggagatccccaccctatctgtgccttttcctatgtgtgtgaatttaaatgataactgaagaaaactaaggaaggaaggaagagtgagcgtgaaagatgccttgggtgaggctttcagagtctccaaggctcgacgttgctattgacatgggtaatccatttctcaatctcactgttgatggtttccttaagatcggagctgtcgcagccacgcgatcagctgctgaagatacttatcatattatccaaaagggtaaccaagcatttcacaaattctccaccccatttatttttcatgctattttccttttttctcggagcctaaagaggtaaaatttgattcttataacgttttttatttttactttcctttattttccttgtttaaattcgggttatacaccaacgtgcaagcataaaataggttgtattgtagtaccgtattttactttgcttctgtggtggcatcggttcaatgttcctggttgttttgatttgaattattgttattatctgcgaaggcctttgttgtcagactaattcaacatgtctgttccagggaatatctcaagtcatgatttcgagaaaa

SEQ ID NO: 2363 - DNA, 780 bp, Glycine max
ggatgatctatatcagatgctaccgatgagcttaaggttatctctcaaggccaaactgaagtcctatgtcaagagtttggccatatatgatgctcctcttgcccatgactggaaggagaatcttgatgggatactcaagtggctcgccccacttgggcataacatgatcagatggcaaagtgagcgtaattttgagcaacaccaaatcgttagccggacaaatgttctgctacttcagacattatactttgctgacagggaaaagactgaggaatcaatctgcaaaattcttgttgggttgaattacatatgccggtatgagcaccaacaaaatgctctactggattgtgcaagcagttttgattttgaagattgtgtggagtggcaattgcaatgtggagattcttttctcaattgaacacattttaaaatttgaaatcttcaatatggtgggtgagcattttcttgattttaaatatcgtaggatatcatctcaatacaatgtggaactatggactttggttttgaagattaatactgttgaagacttggaaagtataattgtatttttttacagtttgccttgcgcagtggataaccagtcatatttacaaaggggcatagaagttcatgctgaacttgtaaaaaaaaaaatttatggacagattgcttcctgcttaaagtatgctttgttaaaattgttgtcatgaaaaccccagaaactagtattgggattttaatttttaagcgggggttgatttgttggggcttgtccttccc

SEQ ID NO: 2364 - DNA, 519 bp, Glycine max
ttatgcacctctctaattttcctcgaacaactatactctctctatcgcactcagtctctctccctccgtcgcccgaacgcatctccgatcagccagccgccgcctttccggtgattcgccacttcgatcctcccgcagcgccgtcgtttcctcagatccgtggctgtgatgcgaaagtcgttggaggcgaagcagcagcagcatccgcggattaggaagatccttcttcccaattcgttatcctagttagggttagggtttcaataatcattcccaagaaatgttcaagcgaatcatgaagggagggcagaagaagccctccaagacggacccgagcgatccgtcgcccttggctccggcggcggcgggtgcggcagccgctccggcgctggtggttcctccgccgtcgggcaccatagagcctctgcctctcttacgcgacgtggcggtctcggagcggcagaacctcttcatccggaagctccagatatgctgccacgtgttggacttctccgacac

SEQ ID NO: 2365 - DNA, 1390 bp, Glycine max
cggtccggaattcccgggtcgaggcacgcgtccgcccacgcgtccgccgaagatacggaggctgctgctatcgaatactcggataaggagggtaagggcggtgaagtgcagtacttcaatccccttttctctcttctccttttatttcatcactctcttcgttcctttcttcttctccaaattttcaattttcacacttttagaaacatcttttcaatggcgtcccaaattacccgtgagtggtctggaatcaatacattcgcacctgctacccagactaagttgcttgaactcttgggaaaacttaaacaagagaatgtgaactccttaactatacttgtgatgggaaaaggtggtgttggaaaatcttcaactgtgaactccatcattggggatagagtggtttcgattaatcctttccagtcggaagggccaagacccgtgattgtgtcgcgatcaagggctggttttacattgaacatcattgacactcctggtctcattgaagggggatacatcaatgatatggcacttgatataataaaacgtttccttctgaacaagaccatagatgtactgctttatgtggatcgcttggatgtgtacagagtggacaacttggataagttagtcgccaaagctataacagatagttttggcaaaggaatatggaacaaggccattgtaacactcacacatgcccagttctctccaccagatggattgccctatgatgaattcttttcacaaagatctgagtctctcttgaaggttcttaggtcaggtgccaggataaagaaagaagcctttcaggctgcttcaattcctgttgttttggtcgagaacagtgggagatgcaacaaaaatgacagtgatgaaaaggttcttccaaatgggactgcttggattcctaatctagtccagacaatcacagatatcgcattgaaccaaagtgagtctattcacgttgacaagaatttgattgaagggccaaatccgaatcagagaggaaaattatggactcctcttgtgtttgctatccaatacttccttatcatgaagccaataaaaggactgatcgagaaggacattgcaaatgagagaaagccaacatgggagagacgtgatgccgctttccggaagagagatttatattagctgtgcacttctgtgcccatgaaattccatggatgcttagcttcctttgctagcacattcgtttacttttgtctgttctacgaatgaacttggatggtttttcttatactgtaattgctggtagtctgcggcataggaatttgtttgtgactgagaggattgccttgtatgctggtaagttgttggcttttgcatgattcagtttgttaatgttagtctttaaatgtcttgt

SEQ ID NO: 2366 - DNA, 406 bp, Glycine max
acgcgagaagacgacagtagggggaagatacggaggctgctgctataaaaaagctcgaatactcggataaggagaaacatcttttaatggcgtcccaaatccgtgagtggtctggaatcaatacattcgcacctgctacccagactaagttgcttgaactcttgggaaatcttaaacaagagaatgtgaactccttgactatacttgtgatgggaaaaggaggtgttggaaaatcttcaactgtgaactccatcattggggaaagagtggtttcgattagtcctttccagtcggaagggccaagacctgtgatggtgtcacgatcaatggctggttttacattgaacattattgacactcctggtctcattgaaggggggtacatcaatgatatggcacttgatat

SEQ ID NO: 2367 - DNA, 1026 bp, Glycine max
cccactcgttcgtctgtcctcccctcagcggcatcgttgtattgttcttacacatctttctctctctcactttcggtttctaaaccaaaaccctaatcgagatcacaatcggatcgtaaacaaacagagaccagccatggacggtgattcctcttggagtgctcgactctcttccgcttccaggcgctaccaatccgctcttcaatctcgatcagacatgttcatgggttttgatgaaaatgatggggacgatgatataagagaggagtttctctgcccattttgttctgagtattttgatatcgttggattatgctgccacattgatgaagagcatccaatggaggcaaaaaatggggtatgtccagtttgtgcattgagggtgggggttgatatggtagcacatataaccctacaacatgggagtatatttaagatgcagcgcaaaaggaaatcacggaaaggtggatcgtattcaacactatctttattgaggaaggaactacgagaaggaaatttgcaatccctttttggcggatcttcatgtatagtgtcctcatctaatgcagatccactgttgtcatcatttatattgcctttagctaatgaacatgccagttctcagcctcacttacacactgagacaagatcatctaaaaaatgcttagatgagactgtgtcaacaagaaatgtggagacatcaaccttgtcagttaaggataaggaggagaaggaaaaaagatgcgagtttgttcaagggctgttgctgtccaccatacttgatgacaatttataaaggaaattcatggaggtggctgcttcagtagtgggcgaattcatatgcggtacctgctatgtatggtttgcctgatgaaattgtctatgtatttgatcagagtggaataataagtagtagaaaatgaatgtaatttatgttatatgtgaactgatgtttttagttcaagagtttcatcatctcctttaatctcagatcataaagcttaaatgaaaaaaaatcctttcctg

SEQ ID NO: 2368 - DNA, 917 bp, Glycine max
ggcagtggcattgagaaaccagggagacatgtcggccatgttctactgcgccatgcacggttaccaagacacattgaacgtccacgcgaaccgtgaattctaccgcaactgcgaaatctccggcaccatagactttatctggggagcatatgcaaccttaattcagaactcaagagtcatagtaaggaagccagactcacaccaattcaacacagtgaccgcagatggaaccaagcagatgaacatggccacaggaattgtgctccagaactgcgagatcttgccggagcaggctctgttccctgcaaggtgccaaacgacatcgtacttggggaggccgtggaaggagtccgcgagaacagtggttatggaatcgaacattggcgacttcattcagccagaggggtggaccccttgggatgggaacctgtatcttgatacgttgtactatgctgagtatgctaacgttggacctggttctaacgttcaaggaagggtaaagtggaggggttaccatcccaatattaataagaacgaagctgcacaattcactgctgcccaattcctcagaggtggacctgctggagatgctgatggttggttgaaggctactggcgttccttatactattggtttcaccaaatagggcatcatactgcagcctaatcttgggaagattttttttgttattttgtgtgcaaattaatgtgtctatgtagaataaataaattagctttgttttcagcacagttgttgtgattcttcttccaagctagggtggaatcatatcatatcttgtacaaattaaacatgagaaaactgtacagctaatacatgtgaaatttttatattgttttttgaaaaatgacctcataagtgtattatggggaatcaatatatggatattcatgcatctt

SEQ ID NO: 2369 - DNA, 918 bp, Glycine max
aatctaacacaaccagttcaataaaactagaattaaatatcaagtacaaatgttgtctagtaataaagctgaaacaaaaccacgccaaatcctctctactagatgaacaaaataccaacattctgaagtatttcaacacacaagctccataaaaaatacatatgcaaactaaagcattgtccaccgcacccaccaccatgcttatcaagttaatcacctagagtagcccggacttcggctcaaactcctattgtaactcctacttctgctgcggcttcttgatgcataagatgatctagagtatgatcgatccctatactttctgtcccttggtgagattcacctgtaatgtcgccttcgtcttggagaaggagaatagtctggactaggagaataggttcgtgaagatcgcctgtaatcatgcgatcgatccctcctcgtgttctcttgctctcatttcagcaggtttctttctgttttcttcagcaaacactacagttatctcacgaccaagaagaattcgaccgtccatgtgatattttgcatctgcagcatcagctgggtccacatattggacaaacccaaaacctcttggctccccagtataataatctcgaggcaggtaaacatccttaagaggaccaaattggccaaatggaccatgcagatcttctggcctgcaatctctgttgaggtttcgaaccagaagacttgttggcaaatccctatcacatcctctatatcggcccctagggctaaggctgtgccttcttcggctgtaacgccttggaggtgaaggtgatgggctgtaactgcagcttcttcccctcatatttggtgctatttcaccagcggcttcacaattcgcgaaacaaacgcaatctctgttccagacaccgagagagagaggggggggac

SEQ ID NO: 2370 - DNA, 394 bp, Glycine max
gttttattgaaagagttgaagacacaaatgaagtaatataagagtactgtgttgaagagaagaaagaagtaataaagagtgctctgttgaagaaaagaaagaagtaataagagttctgttcaaggtgatgttagtgtccttgaaggtttggaaggttgagtttgaattcattgtgaagaagttgaagtcttgaagagttcaatctcaattaatactttggcttctacgaggttagcaaatccatgtggtgtttataattgatttctatggagtgttgagaaagtgacttgtgatagtttgggagtcaggatcatatttgtggatatctgcaatcaagccaccttccgtatgcaggtgtgtttacttattaaaccatgcatatggtgtaacttaa

SEQ ID NO: 2371 - DNA, 2544 bp, Glycine max
  unsure (1)..(2544): unsure at all n locations
gaggtactttatgatagttcaatcagggaaatacgatgaattattagattctggaatggattttaaagctctggtagttgcacatgagacctccatggctctagtagagcagggtcagggtgtggtcatgcctggtgaaaatttgaataaaccaatgaaatctcctgaggcaagaaattctggtgaaagcaattctcttgaccggcctgtgtcaagcaagaaaagttctaaactcatcaaagaggaggagagagagaccggcaaagtcagcttacatatctataaactctactgcactgaggcttttgggtggtggggcattatagcagtaatctctctttctgtgttgtggcaagcatcaatgatggcaagtgattattggctggcatatgaaacatcagaagagcgtgctcagttgttcaatccttccatgttcatttccatctacgcgattattgcggctagttcagttgttttggttgtgctaagatcctactctgtcacagtcctggggttaaagacagcacagattttcttctctcaaattctccacagcatcttgcatgcccccatgtctttctttgacaccacgccatctgggagaattctaagcagggcatccactgatcaaaccaatgttgatgtctttatccccttgttcatcaattttgtggtggctatgtacattacagtgatcagcatcttcataatcacgtgtcaaaattcttggccaacagctttcttgttaattcctcttgcttggttaaacatttggtaccggggttattttcttgcttcatctcgcgagttaactcgtctggattcaattacaaaagcaccagtgattcaccatttctctgaaagcatttccggggtcatgacaattcgcgcattcagaaagcagaaggaattttgcggagaaaacattttacgggtgaatgctaatttgagaatggatttccacaacttcagttccaatgcgtggttgggtttccgcttagaattgcttggaagcttagttttttgcctttctgcaatgttcatgatcatgttacccagcagtatcataaagccagaaaatgttggtttgtctctctcatatggcttgtcattaaatgccgtgatgttctgggctatatacatgagctgtttcattgaaaacaaaatggtatctgttgagaggatcaaacagttcacaaatattccatcggaagcttcatggaacattaaggatcgcctgcctcctgcaaattggcccggggaaggccatgttgatatcaaagacttgcaggtcagatatcgtccaaacactcctttggttcttaaaggcatcaccctaagcatcaacggaggggaaaagattggagttgttggtcgaacaggaagtggaaaatcaactttaattcaagttttcttcaggctggtggaacctacaggaggaaaaataatcattgacggcattgacatatccgccttggggcttcatgatcttaggtcacggtttggtatcatccctcaggagcctgtcctttttgaaggaaccgtcagaagtaacattgatccaactggacagtacacagatgaagagatatggaagagtttggaacgttgtcaactaaaagatgcagtggcttctaagcctgagaaacttgacacttcagtggttgataatggagataactggagtgtggggcagaggcagttgctttgtttagggagggttatgcttaagcaaagcaggctgttgtttatggatgaggcaacagcttctgttgattcccaaaccgatgctgttattcagaagatcatcagagaggactttgcagctcgtaccatcatcagcattgctcatagaataccaacagtaatggactgtgatagagttctagttgtagatgcagggcgggccaaagaatttgattcaccagccaacttgctccaaaggccatctctctttggggcattagttcaagagtatgccaaccgttccagtggcctataagaaagttccatgcatgtgtctctctcagccattcagacaataacagaaaaccaaacttaggctaagccttttaagttttgattgatcttccaagtgccacgagaaaggagaaaggcattttactttagagaggtgcaattaccatcctgcataattgctgtttggacaagtgaagaatgagcaaaccttgtgaatggtttttctaattacctctggcttaagtagctctagtatacaaacaaaatatagccttttttaggtcctaatttatataacacagtgcccagtgtacaattacacagttgctccactgcctttatattgaattatgcatcatcagtaatatactttggacttctcgttgagcattagcttacagcattaaatattgttgaccttgttcatgtcgcgcaacgagttctaaatggaagatgcattttnnnnnnnnnnnnnnnnnnnnnnnnnnnnnnnnnnnnnnnnnnnnnnnnnnnnnnnnnnnnnnnnnnnnnnnnnnnnnnnnnnnnnnnnnnnnnnnnnnnnnn

SEQ ID NO: 2372 - DNA, 500 bp, Glycine max
tttctcgcgtccgcccacgcgtccgcggacgcgtgggttcaataaaataaaataaaacagaagagaaggaaacagaagtaaaaaaaaaataaaatgggttacacaagatcttctcttctgtccgtggctcttgtcttggcattctgttcaagcattcagggtttggacatcaccaaattgttgggcgaatatcccgaatatgcacagttcaacaaatacctaactgaaaccaagctggcggaccaaatcaacagccgtaacgccgttacagtccttgcccttgacgacgccgcaatggcttccctctccggcaagtcgcaagacgccgttaaggccatccttagcacccatgtgctcgtcaacttctacgacgagaagaagctgatggaagccgaaggtagtcgcaccaaggtcgaaaccctattccaatcctccggtgtcgccaagcccaaccagggttacatctacgtggcgctcatcaacgagggggagattgcgtt

SEQ ID NO: 2373 - DNA, 1463 bp, Glycine max
cctcgagccgaatcggctcgaggcccatgataagagatatgcgcacacatcatcacgctatttataccactgatccgctactacctgcctaggctagtgtgcacccctgtcttgaacctcttaccgtgcgcatcttctcaatccataacaacttcgccaccgttgcaccgaaaccaatcgccacaaactcgggatctcagattcgacgcgccaaaccatgtcgaaggcgcgtgtctacacagatgtcaatgtccttcgccctaaagagtattgggattacgagtctctcacccttcaatggggtgatcaagatgattatgaggttgtgcgaaaagtgggcagggggaaatatagtgaagtttttgaaggcataaatgtcaatagcaatgagcgctgtataatcaagattctgaaacctgtcaagaaaaagaagattaaaagagagataaaaatacttcagaatatttgtggaggcccaaatattgtcaagcttcttgatattgtcagagatcaacactctaaaactcctagcttaatatttgagtatgtcaacagtacagattttaaagttttgtatccaaccttgactgattatgacatacgctattacatatatgagcttcttaaggccttagattactgccattctcaaggcataatgcatagagatgtcaagcctcataatgttatgatagatcatgaattacggaaacttcgcttgatagattggggtcttgctgaattttatcatcctggaaaggaatacaatgttcgtgtggcttcaagatactttaagggccctgaacttctagttgatttacaagactatgactactcattagacatgtggagccttggctgcatgtttgctggaatgatatttcgcaaagaacctttcttttatggtcatgacaaccatgatcagcttgtcaaaatagctaaggtgcttgggactgatgaactgaatgcatatcttaataagtatcatctggagcttgatcctcaacttgatgcacttgttggaagacacagtcgaaagccctggtctaaatttatcaatgcagataatcagcatcttgtgtctcctgaggcaattgattttcttgataagctccttcgatacgatcaccaggacaggctaacagcaagagaagcaatggcacatccatatttctctcaagtaagggcagctgaaagtagcagaatgaggacccagtaacttaaatcattggatccatcagcctgagtttcatatatgtgggattgttttataatacaccctcaaatgtggcatggttgccttctgttaaaattatagtttgttagttttgttgtggaatgtaactatatcataacttgttccagctgaataatttgttagcctgctgttgaaaattcaaattctatcttaaaaaagttgtgattataacttagtaaggcaataccgacacagagtatcatgt

SEQ ID NO: 2374 - DNA, 746 bp, Glycine max
aaataaataagagaatgtacaaaagtagtatgtgtaagtgtaaatattatcgctatacgcgcattaaatatgcgcaggaagcaccaccagcactacttctccgcttcttgctagtgtgcacccttgttgccttgcgtgcgccggttgcgcagccccctatcgtgcgcatcccccccaatcacctcaccgaaactactaacaccttcacaatcgttcaccagcgctacagaacccagatctcgggttccaatcgtcgagccatgtccaaggcacgcgtctacaccgatgtcaatgttcttcgccccaaagagtactgggattacgagtccctcaccgttcaatggggtgatcaagatgattatgaggttgtgcgcaaagtgggaaggggaaagtacagtgaggtttttgaaggcataaatgttaatagcaatgagcgttgtgtaatcaagattctcaagcctgtcaagaaaaagaagattaaaagagagataaaaatacttcagaacctttgtgggggcccaaatattgtcaagcttcttgatattgtcagagatcagcactctaaaactcctagcttaatatttgagtatgtcaacagtacagattttaaagttttgtatccaaccttgactgattatgacatacgctattacatatatgagcttcttaaggcctcgggttcctgccatctctcatggtataccttgactggtgctctgtgtcctctccataatgtatatattgga

SEQ ID NO: 2375 - DNA, 823 bp, Glycine max
catgggcccatgatgagagatatgcgcacaaatcatcacgctattaatactactgctccgctacttgctgcctaggctagtgcgcacccctgtcttcaacctcttaccgtgcgaatctctcaattcatcaaaactaacaacatcatcaccatcgtcgcaccgaaatcaatcgccacaacctcgggatctcagattcgacgcgccaaatcatgtcgaaggcgcgtgtctacaccgatgtcaatgtccttcgccccaaggagtattcggattacgagtctctcacccttcaatggggtgatcaagtaatgttccgaaccctaatttttatgtttctcttattcttttctgatccccaaagtgaacaatccacaatgaaggggaattttattgtctgatcttagagtttgtagatagtttcttagctgctgttttgttgcattcttccccattccttgtgaattccaatggcatagtgcaattttatctagcattttgtgttaactaactgattgacgatgaattatgccatttccgttgctctgatatgtttttttattggatcgcatgtttttgcttagtttttttgtggtaggaccagagacagaaggtggtcgagaatcaccgtgtgctgctgagttcattgatcgaatttgttctctgaatcctcaatataactttgtataccatttctttttttaatttactgagcgagtgttgccttttatttttcagtgatcaagatgattatgaggttgtgcgaaaagtgggcaggggtaaatatagtgaagtttttgaaggcataaatgtcaatagcaatgagcgc

SEQ ID NO: 2376 - DNA, 707 bp, Glycine max
acgagctcgtgccgaattcggcacgagagttttggaagtttttgaatgacactgccaaaaacatgtcatgtgctatgcttttatttctcagatactttaagggccctgaacttctagttgatttacaagactatgactactcattagacatgtggagtcttggctgcatgtttgctggaatgatatttcgcaaggaacctttcttttatggtcacgacaaccatgaccagcttgtcaaaatagctaaggtgcttgggactgatgaactgaacgcatatctgaataagtatcatctggagcttgatcctcaacttgatgcactggttgggagacacagtcgaaagccctggtctaaattcatcaatgcagataatcagcatcttgtgtctcctgaggcaattgattttcttgataagctccttcgatatgatcaccaggacaggctaacagctagagaagcaatggcacatccatatttctctcaggtaagggcagctgagagtagcagaatgaggacacagtaacttgatcacatatggatccataaacttgagttaatatatttgggattgttttatgataccctaacgcgcacctccgttaccttctgtttattagagattagttttcctggggagtgtatcgatattatgttttcagttgaggaataatgccattgccagttattgaaaattgaaattgtcttg

SEQ ID NO: 2377 - DNA, 742 bp, Glycine max
ctctttggtgtttgggtagcaaaatcagagagagaatagcaataaccggtttgctaatggtgagcagagcacttgttttcttttccacttaggataacagtatttgggatttgtacctgctgaggaaaacggaagtgatgatattgagaaacctggaggcatttgtgcctattattaaagcaggatggaggttttctaagatctactgttttatacacgttacccaaacctatttgatcgcccctgctgtgacctatggtcctagcatgcttcctactatcgatttgaaaacaggtgtgttcttaatggaaaagatctcaccccggtttggtaaagttacttgtggagatattgtagtcttgcgcaatcctcaacaccctaggcactttatgaccaaacgtgtggttggattggagggtgatagcgttacatacatttccaatcctgagacctatgaatatgagggtgatagttttacacacatttcctctcctgataacggtgataagtctaagacgattgtggtgccaaagggtgccgtttgggttgagggagataacaagtataacagcaatgattcaagaaaatttggtcctgttccttatgaccttattgatggcaagatgttctggaggataacgccacttaaaaaatttggacctttctggaataaatgatctgaagcaaagaattctgtcatggaagctacaatcttttgcagcatggctttgttgtatgttta

SEQ ID NO: 2378 - DNA, 740 bp, Glycine max
  unsure (1)..(740): unsure at all n locations
gtgcagaccgcatttcgtatgtctgaggtgcaganncngtatagtcgcagaagggcagtgaggcattgnganaaaggaagggttgtcatttntgctgctggaactggaatccattctttaccacagacactgctgcagcactccgatgtgcagaaattaatgccgaggttgtactcaaagcaacaaacgttgatggagtttttgatgaggacccaaagcgtaatccacaagcacgtcttcatgagacactaacctatcaggaggtaacttccaaagatctgtcagtgatggacatgactgccataactttatgccaagaaaataatattccagttattgtctttaatcttaacaaacctggtaacattgagaaagctattaaaggagaaagagttggcactttgattggggccacctggaattctaccgtatcaagagcatgaaaatatttgtagtctggttacccattgattacttcttgtgtttttcttttcctatacaatcctccagccgaggatgccaaatatgtgaggtgcattacttgcgcattggtggttttgatggacttcaagggtgctgttgagtcataaatttgtaaatataacaagttaaattatcgtttgatgtttccctccacctggtttggccttattttactttgccattttgtggtttatgcaaattatattttgacttttggactttgctccgtttgcataaattcacgtcttccgtttttt

SEQ ID NO: 2379 - DNA, 626 bp, Glycine max
acgagaaacaatggtggctttacaagtatcagaactaagaatttctcagagcctgaaaatctttctgcatatgatggtttggagttccgcctaaaaggtgatgggcgtagatataaaatcattgttcgcacaagcagtgattgggacactcttggttacactgcaggctttgacactgagaaagggaaatggcaatcagttcaagtgccattttcttccctgagtcctgtatttcgagcaagaacagtgtccaatgctccaccatttgatccaagcattgttgtatcattacagctcatgttcagcaagtttgagtctgatggtaaattaaatgaaacttttgtggaaggtccatttgagcttccggtgtctagcatacgggcatatataaaggatccaataacacccaggtttgtgcatgtgagctcagcaggagttacaagacccgaaaagactggaatcgaacggcgggaggctgtttacttagatcgattccaggcctttcggttaaacaaggaactggattatatcctcacatttaaactaaagggcgaggatttacttagagaaagtggcattccctatgcaatcgtgaggccttgtgcattaactgaggagcctgctgg

SEQ ID NO: 2380 - DNA, 835 bp, Glycine max
cacagaccatgaatcagattcttggggccaataatgagcagcgtggcatgcctgatttgcattctctaagggaggtgatgcaaaacccagagtttctacgcctgttttcctcacccgagacactgcagcaactcttgtcttttcagcaagctcttctgtctcagcttggtcagcaacaatcaacacaggaaccaggtcaaacaggtggaggcactggaccgatgaacaacttggggctggagatgttatcaagcatgtttggtggactcggagctggtagcctggctgttcctaacagatcaaatgagccgccggagcaattgtatgccacccaactttctcagcttcaggagatggggttctttgacacgcaagagaacataagggctcttattgctacatcagggaatgttcatgcagcagttgagcggcttttggggaactccggacagtagcaggtggtaagaagggacacaagactagcaattaaatcccaaacactagaatctggtgtgagatatttgtccatttagctttgattttcatcatggaattatgttcaaacaaatctattgatttttttttcatttacatgatatccagagtttagtattatatccaatactcagatgtccaatgattaattataccttcagctacaagaaagtacaaagccttttgtaccatatatatgtaattctaacttgcctgtttgcaaggattgggttcacagatacattcaaagaaggggtttatattggaacatgaatttagacatatgattataaacttttgtttgtcatttagtggtaaatcttgttgtaaattccataac

SEQ ID NO: 2381 - DNA, 1113 bp, Glycine max
ccaaacactgacacatacaaacgacgcatccttctctttctttcggctttgatttctctctcctcgactcgatcccaattccactagggattcaattccgatgcgattccgagcttgttagatccacgacaacgtttcgtttcccagattcttttgtaaaaaaaaataatcttcctttgcccaacaggtaagttggaaaaaaatggaccatgacaagactgggtgccaagctcctcctgaaggtcctatattgtgcatcaacaactgtggattttttggaagtgcagctaccatgaatatgtgttctaaatgccacaaagacatgttgctgaaacaggagcaggccaagcttgcagcatcatccattgggaatattatgaatgggtcttcaagcagcactgaaaaggaacctgttgttgccgctgctgctgctaatgttgatatcccagttattccagtagagcctaaaactgtctctgtgcaacctttatttggttcaggtccagaagggagtggtgaggcaaagctgaaggatggaccaaaacgctgcagcagctgcaacaagcgagttggtttgacagggtttaattgtcgatgtggtgaccttttttgtgctgtacatcgctactcagacaagcataattgcccatttgattaccgcactgctgctcgggatgccatagctaaagcaaacccagttgtcaaggctgagaagcttgataagatctaagatttgaagtcaaagtttcatggcctgagatgaagttatgcataatttcatcatgaaatgatccgagtttccttcacattttatttggtgttcttattatattgttatatgtggtgggtgacttggagttattggacatctctgcaatttgaaggactctttcatgtgattggcgaaaatatatatgttggccacagtgtttaagtttttaagtgctggtttggtgaaagttggttggtgttgttagctttgtaatgcatctatcctgtatcagaatggtatgtgcaatttaaagatggtttcaagagcatccgtggacatgtggtagattgtaattattgtgggctatctatgaattattttcgatatgctagaattttcag

SEQ ID NO: 2382 - DNA, 1291 bp, Glycine max
ccgctcaaacacaacacaacacagcataccgtgtttcattttctctcacacacaaacctccttcgttttcatttacttctcaggaggtataactactatttttcgctttttttttaaaaaaaaaattgattaaatcttttgccatgggaacccagattttgcgacctcaggactgcttggtagaacgaatcagggctcctccggctgacttttcccggcggaggagttccggtaactactgtaattattattaccacagcaaccatgttgccacttccaggtcgtgccggaagccggttgcccgacccgacaaaaggaaacgggctgctcccggttctgcccagccggtggtggcggaggccgcggcggcggtgttgaagagaccgagccgtgatgattcaagggtggccaggagccaaagtttggagatgactacgattctacgtaggggccagtcgcttgattcggctgtgaagagcgaggtgtacgccggatctgcgttcgcggtgtctccgtcgccggaagcgcttcctctgccgtctttttcgacgaagaagcaggactcggcggcggttgatgactccgccacgcgagatctgaggcgtctgctccgcctcgaatgaaaacgagccgggttgcagtcccgggtttctgggtcgggttggacccgacaaattatccatattacagtctctctttctcaccttattattatccagaatattctctttctcgtcttctctccgtaaccgttaactttaagcccgtcccggtttgaagttctgacccgattgtgatttttttaaacgaaagggtggatgatctgaaactagggggtgaaatgtttaaaggtttggagtagcgtttgagccgtgaggctttgatgatgtaacatgtaacttgtaacatatttctagggttgcttattaaaacattaaaataaattttagggtttttgtagttcaaaggggtgggaaaaaaaattgagtaagaaggggggataactagaggaggaactggaacgtagttttgtaaaatccagaaagtgtttgaattttgtgtgggttgggctttcagtttcagccatgaacagtgtgaagtgatcaacaagtgaatggttcttaagtgaatggttcttgttctgttgtgaatttgccagcttcttgtacgctatttttgtaaagtggagtaaattattaactcggggagatttcagcagatttaatttatgggagaatttaaaattttaaaaaattttaaattttaggaattttaaattgaaattttttta

SEQ ID NO: 2383 - DNA, 554 bp, Glycine max
  unsure (1)..(554): unsure at all n locations
gacatacaaacgacgcatccttctctttctttcggctttgatttctctctcctcgactcgatcccaattccactagggattcaattccgatgcgattccgagcttgttagatccacgacaaggtttcgtttcccagattcttttgtaaaaaaaaattcttcctctgcccaacaggtattggacactagttgaactgaggggtcatgtatgcatgtggaatgaaatctataataacactaaaaacagggctagctgactatcttttaacaaggagtaagttgtaaaaaaatggaccatgacaagactgggtgccaagctcctcctgaaggtcctatattgcgcatcaacaactgtgggttttttggaagtgcagctaccatgaacatgtgttctaaatgccacaaagacatattgctgaaacaggagcaggccaagcttgcagcatcatccattgngaatattatgaatgggtcatcaagcagcactgaaaagggaacctgtgttgctgctgctgctaatattgatatcccagttattccaatagagcctaaaac

SEQ ID NO: 2384 - DNA, 826 bp, Glycine max
acggtcatgcttcttccctctctctgctcttctctgcctctttgtcttccctctctttgcctggtctttgagtctttctcttccctctctctacctctttctcttctcttcatttccgatgttgcctcaattctcagtaaaaggagttcgttggtaccacacatacaaacgacgcatccttctctttctttcggcttcaatttctctctcctcttcctcctcctcgatcccaattccactagggttagggttccgttacccttatctccttctcaattcttgctttcctctttaataatccgctctcgtattcgtttattaattgatcattctttctcgttttgttctttttcgctgaatccaggattcaattccgatgcgattccgagcttgttagatccacgacaacgtttcgtttcccagattcttttgtaaaaaaaaataatcttcctttgcccaacaggtaagttggaaaaaaatggaccatgacaagacaatgggtgccatgcatccatcctgaagagaaatcctatcttgcgacactcaacaactgtggacttgctgggaaaagtgcagctaccactgaatacgtgctctacatgccatcttataatgactatgttgctgaaacaaatggaccatgccaagactgggtgccaagcatcctccattgggaaggtcctatgattgggtcttcaacaactgtggattttttggaagtgcagctaccatgaatatgtgttctaaatgccacaaagacatgttgctgaaacaggagcaggccaagcttgcagcatcatccattgggaatattatgaatgggtct

SEQ ID NO: 2385 - DNA, 458 bp, Glycine max
ttttgtagtgaaggagaaaacaaaagcgtttctaaaatctaaatgcacaaaaaatagagaaagatagagagaataacagcacctctttctctctgtctctctcccctcgttgatcccaaatctactaggggttctcattcgatgcgattcggccggaagctttcgtttcgcggatttttttaattattatttttcctgcctatcaggaaagttgaaaaaaagatggaccatgacaagactggatgccaagctcccccagaaggtcctatattgtgcatcaccaactgcggattttttggaagtgcagctaccatgaacatgtgttctaagtgccacaaagacatgatgctgaaacaggagcaggcagggcttgtagcatcatccattgggaatattatgaatgggtcatcaagcagcagtggaaatgaacctgtcgttgctaccagtgtggatgtttc

SEQ ID NO: 2386 - DNA, 350 bp, Glycine max
gttctgaacatcgctactcagacaagcataattgcccatttgattatcgcactgctgcaagggatgccatagctaaagcaaatccaactgtcaaggctgagaaacttgttaagatctagatttgttgtctttaagtttcatgctctaggtgctgttatgctcattgttgtcctcatgagatgatccgagtttcctgcattttaatggtattattatattttatatgtgatggaggacttggagttataggacatcgctgcagttcgaagtactatttcatgtgatttgcaaaaatatacttcccattctttaatttcaagtatttaaatctctgctggtttggtggaaaa

SEQ ID NO: 2387 - DNA, 752 bp, Glycine max
  unsure (1)..(752): unsure at all n locations
gctcgagcaaacacaacacaacacagctttccgngnnncannnncncncacacacaaaccccccgcgggcgcaancaccccccaagaggaagaacgacccaannncgccanccgcngaaaaaaaaaaacgaaaaaaacnnncgccacgggaacccagacggcgcgaccccacgactgctnggtagaacgaatcacggctcctccggctgactttacccggcggaggagttccgggcattacttgtattattattactacaacaacaccaacaaccgcggtgtcgctcacttccagggcgggccggaagcctgttagccgaccccaccaaaggaaacgggctgctcccggttctgcccanccggtggtggcggaggccgcggcggcggtgttgaagagaccgagccgtgatgattcaagggtggccaggagccaaagttcggagatgactactattctacgtaggggccagtcgcttgattcggctgtgaagagcgaggtgtacgccggatctgcgttcgcggtgtctccgtcgccgcaccgcaccatctacgacgccgagcacgggcaggacctgccgggcaccaaggtccgcgaggagggctccgcgcccggctcggacgccactgtcaaccgcgcctacgcgggcctcggggccaccttcgagctggacctgaaggcgtacggccggtactacatcgacggcaacgggctgccgctggacgccaccgtgcactttggagagggctacgac

SEQ ID NO: 2388 - DNA, 625 bp, Glycine max
  unsure (1)..(625): unsure at all n locations
tagaatcttctctttctcttatcctctccgtaaccgttaccgttacgcccgtcccggtttgaagttctgacccgactgtgatttttttaaacggaagggtggatgatctgatctaaactagggggtgaaatgtttaaaggtttggagtagcgtatgggccgtgaggctatgattatgtatcatgtaacttgtaacatatttcttgggttgtttattaaaacattaaaataaaatttagggtttatatacttgtaacactaataccaatcagttcaaaggggtgggaagaaatgaggaagaagcataagaaggaggaaatgtaagttagttttgtaaaatccagcaagtgtttgaatttggtgtaggttgggctttcagctatgaacagtttgatgtgatcaagtatagttcgtgctgtgttgtgaaacacggtgatcaacaagtgaatggttctggttcgtgctctgttgtgaatttgccagcttctctttgtacgctattttttgtaaagtggagcaaattattaacttgaggagatttgatcagatttagtttctgcatcgcctccacnnnnnnnnnnnnnnnnnnnnnnnnnnnnnnnnnnnnnnnnnnnnnnnnnnnnnnn

SEQ ID NO: 2389 - DNA, 740 bp, Glycine max
tttgatttctctctcctcgactcgatcccaattccactagggattcaattccgatgcgattccgagcttgttagatccacgacaaggtttcgtttcccagattcttttgtaaaaaaaaattcttccccgcccaacaggtaagttgtaaaaaaatggaccatgacaagactgggtgccaagctcctccatgcacgagatcctatatctcgtctccgataaacttcaagtggtttcgtacaaatggctgagtcgcaattatatggtatcgtccgatgaagcaaagaggttgcttcaggagtttgtgctaaaacatgagggtgggttggaggtggtgtatgctttgtctggctggttaaagagcaaccatcctagttaccacgtaaggcttgttaccgggccaaagcttgcagaagcacaacaagaatttgatggtgattgctccgttcagatatatagtgtgcaagctagcattcccaaggatccagctgttctttggaatgctgagttcattcaagcagaggagctcttcaagcaaccttcctcggttgacaattgtttgagggataataggttctgtgggatctctaattcttttgtgcagcggaatgtggatggcccaacagtagtttttgcagctcctcaatcaaaatctgtaggtgagggaccaacaaagagtgacatagttcagcaacctcctaaaaatatatcacgtgattcgattgacaaagtccataccaaac

SEQ ID NO: 2390 - DNA, 485 bp, Glycine max
gaagacgcaataatgttgtgtgtgttgaaacttgtctcaaatgaatgtttgtctgtcaagactcaagaataacttcacacgtcgccaccaatcatgaaatagcgttcattttgtaatatagaagcgagaaagatagagagactgacaacacctctctctctctcccctcgttgatcccaaatctattaggggtttttattcgatgctattcggcctgaagctttcgtttcgcggatttttttaattatttttttttcctgcctatcaggaaagttgaaaaaaagatggaccatgacaagactggatgcgatgtatgctgtggaatgaaatctataataacactaaaaacagggctatctgactatcttttaacaaggagttaagtgactttatatttgtgattaaatctgataatattcattgatatcttttacactgtcaattggaatggatttgcagtaagacttttaccactgcatctaata

SEQ ID NO: 2391 - DNA, 301 bp, Glycine max
ctctctcctcctcgatcccaattccactagggattcaattccgatgcgattccgagcttgttagatccacgtcaaccgtttcgtttcccagattcttttgtaaaaaaaaataatcttcctttgcccaacaggtattggacactagttgaagaggggtcaatgggccatgtatgcatgtgaaaagaaatctatctagtaacactaaaaacaggactagctgggaaaaggaaccactgtactgctcactgctatcttataatgagtaagttggaaaaaaatggaccatgacaagactgggtgc

SEQ ID NO: 2392 - DNA, 1210 bp, Glycine max
gtaccgtgtccggaattgacggatgcagcaactctttttgtttcttcagtttggtataaccttagccgaggtcaggaggagcactagctaggttcacaatttcaaaatggctaggggattaaagaagcatctgaagaggctcaatgctcctaagcattggatgcttgacaaactgggtggtgcatttgcgcctaaaccctcatctggaccacacaaatcgagggagtgcctccccctcatactcattctgcgaaaccggctgaagtatgctctgacataccgtgaagtcattgctattctgatgcagcgacatgttcttgttgatggcaaagtcaggactgacaagacttaccctgctggtttcatggatgttgtttcaatcccaaaaacaaatgagaacttccgcctgctctatgacactaaaggccgattccgtctccattcagtcagggatgatgaggctaagttcaagctctgcaaggttaggtcagtgcagtttggccagaaaggtatcccatacttgaacacctacgatggtcgcactatccgctacccagaccctctcatcagggctaatgacaccattaagctggatttggaggagaacaagattgtcgatttcatcaaatttgatgttgggaatgtagtcatggtgacaggtggaaggaataggggtcgtgttggagtgatcaagaacagagagaagcataagggaagctttgagactatccatgttcaggatgccactggccatgaatttgcaactcgtatgggcaatgtgttcaccattggcaagggaacaaaaccatggatatctcttcccaagggtaaaggtattaagctatcaatcattgaggaagctaggaaaaggattgccgcccaacaagcaactgctgcttaaatctttaggaaatgaatagactttgagtgcttggtagtttttattcaatggttttggtttctaatttattttgtcttgaaattttatccgctgaatttcgtctcttaaatgcactatagaactttttattgcggcttctatgttcatgaaggaatctttccatttcctagtattgatgtagtttagtcggataaaattacttaaagtccccgctctaacgaaatgccttaataattactcttggtaagggatcatgttgctattgaatactgtattgttatttgcgtactatcttgaatgattcaacgc

SEQ ID NO: 2393 - DNA, 601 bp, Glycine max
gacccaacccctctcttttcttttcttcagttcggtggagggagggagccgtagcagcggaagctctagcttgggtagcgaatcacaatggcgagaggattaaagaagcatctgaagaggcttaatgccccaaagcattggatgcttgacaaactgggtggtgcatttgctcctaagccctcatctggaccacacaaatcgagggaatgcctgccactcatactcattttgcgaaaccggctgaagtatgctctaacataccgtgaagtcattgctattctgatgcagcgacatgtccttgttgatggcaaagtcaggactgacaaaacataccctgctggttttatggatgttgtatcaatccctaaaacaaatgagaacttccgcctgctgtatgacaccaaaggtcgattccgtctccactcagtcagggatgacgaggctaacgtcaagctttgcaacagatcgctcagcgcagttcgcgcaaaagggtatcccatacttaaatacctacgacggtcgcactatccgctacccagaccctctcatcatggctaatgacaccattaagctggatttggaggagaacaagatggtgaat

SEQ ID NO: 2394 - DNA, 542 bp, Glycine max
cagctaattggtatttaattagacaaccaaagccgcaagagtcagtcagcaaggaagatggcaacaaccttcaagtactttacttccatcctcttcctcaccctcgtcatcaaagggtcatgtgatgactgttccttgaacaacatcaatattggcacatcaagaactgggagagaaatccagggccagcctgagtggaacgtgaccgtgatcaacaattgcaactgtgaacagagtcagataaagttgtcttgcaaaggttttcaaagtgcagaaagtgttgacccttcaattctttccatggaaggtgatagctgcttactcatcaatgggaatccaatgaagggttctgatactgttaacttctcctatgcctgggatcctccctttctgcttttgcctacaagctctgttttaggtccttgttcatagggatttgcttaacagaatatgaaaaagaaagaaagaaaaagcaataataatgataataactgtgaatttgaagcatgctgtggattcagttctatgaacctttgagtttt

SEQ ID NO: 2395 - DNA, 1086 bp, Glycine max
ctcgagccgcgatcacataattaagcaattaattaagcactctaaaacatatctttatttccttgtctacatatatcttgaaaaactcaatcatggctagtgtttcttcggtttcagctccatttagaaggcttgaggggaaggtggcgattatcactggtggtgcgagtggtctaggtgcagccactgcaagactcttctctaagcatggagcacatgtagtcatagctgatattcaagacgacttgggtctctctgttgccaaagagttagaatccgcttcctatgtccattgcgatgtcacaaacgaaaacgacgttgaaaactgcgtgaacacagcggtttccaagtatggcaaactagatatcatgtttaataatgctggcataattgatgagatcaaaacaagcatacttgacaacagcaagtctgattttgagagagtgataagtgttaacttggttggtccttttctgggaacaaagcatgctgcaagggtcatgattcctgctaaaaagggatgcataatcaacacagtagtgttgctggatcctttggtggaggggcttcacatgcctacacaagttcaaagcacgcactaattggactgatgaaaaacactgcggtggagcttggacagtttggtattagggtaaattgcttgtccccttatgtggttgccacaccattgactaagaaatgtttcaatcttgatgaagaccgaaatggtgagatttattccaacctaaaaggtgttcatcttgtgccaaacgatgtggccgaagctgctctatatttggcaggtgatgagtcaaagtatgttagtggtcacaatcttgtgttagatggagggttcaccaatctaaatgtaggattttctgtgtttgggcagtctgagtaaaaaatgtcttttaataattatagtgttggtgttttgatgactgtgtttagagggcactgcagttccgaaactttatctgccagcgtatgtgaagaaaagcaatatagggtattataagcctcattccacgtacactagccgtttttgtatttgtatgtaaaaattggatgaaattggtttcatat

SEQ ID NO: 2396 - DNA, 454 bp, Glycine max
gcgacgtaagctcggaattcggctcgagcacattcatactaaaaataaataaactaatatttgttacagacacatttcttttttagtatgagtagctgaacaaattttatctaatgcattcatactaaaataaaggattatatacgttaacaaataccaattgtcttagataaaattatagaactgtgacagctgtcttcttgctaacctaacatgtcatacccaaatatttataaggcttgaagggaaagtggctcttatcagtggtggtgctagcggtataggtgaggccactgcaagactcttctctaagcatggagcacacgttgtgatagctgatattcaagacgatttgggtctctctctttgcaaacacttggaatccgcttcctatgtccattgcgatgtcacaaacgaaaacgacgttcaaaacgccgttaacacagcgatttcc

SEQ ID NO: 2397 - DNA, 1632 bp, Glycine max
ctaaccccccgagtcatgcttgtgttcaacgaagacagccacaggcgcagcatgttattgatggcttcctcactcaccaaccaccaaaccacaccgtcgcacccattccatcgctgattcctccaatggcttccactaccaccactttctctctttctctccgcaccaaccaacaaactccattccccaaaccctctttcttctccaataacaaccatctgcatttcaactctaataattgggcctggacctctgtttccactgctcgcaagtcaaggatatgcgtcacttcctctcaagttttggattccttagcagcaaaatccgaacccgctcttcccaccaccgtcgaagtcgatttgggtaatcggagctatcccatttacatcggatccgggttactaaaccaacccgactatctccagaggcatgtgcatggaaagagggtcctagttgtaactaacaaaacggttgcgccactttatctagacaaggttgttgatgctttgacaaggggaaacccgaatgtttctgtggagagtgtaattttacctgatggtgagcagtacaaggacatggatactcttatgaaagtctttgacaaggccatcgagtcgcggctcgaccggcggtgtacatttgttgctcttggtggtggtgtgattggcgacatgtgtggctttgctgcctctgccttcctacgtggtgttaattttattcagattcctacaactgtgatggcacaggtcgattcttcagttggtggaaaaactgggataaatcaccgccttgggaagaacatgatcggtaccttttaccaacctcagtgtgtgcttatagacacagacacattaaatacgctaccggatagggaactggcatcagggctagcagaggttataaagtatgggctcattagggatgcagagttttttgagtggcaagagaaaaatatgcacttattattggcaagagatcctagtgtaatggcatatgctataaagcgatcttgtgaaaacaaggctgaggttgtgtccttagatgagaaggaaagtggactgagggcaacattgaacttgggtcatacatttggtcatgcaatagaaactggggtaggctatgggcagtggcttcatggagaggctgttgcagctggcacggtaatggctgttgacatgtcatatcgcctaggttggattgatgattctcttgtgaaacgagttggagacattttaaaacaggctaagttacccacagcccctcctgagaccgtgactgtggacatgtttaaatctgtcatggcagtggataagaaggtagcagatgggttgctaaggcttatccttctaaagggtcctctaggcaattgtgttttcacaggggattatgacagaaaggctctagacaatacgcttcgtgcattctgtaaatcctgatctttgtgctccatgtttctattgcagctttatccaattccttttagtgagtttttgtatgttgttatataccctcacttgtatttttcttatgtactttggatggcaaccatggtccccattatatacgcaagagtatattatttgaaattgagattagaaattgaggcatgatcaataattatcatttgagcat

SEQ ID NO: 2398 - DNA, 470 bp, Glycine max
agaagagctatgacggcgcatgcacccctaccgtaagccccgaaattcggttcgaggtttgtttttaaggaagacaggcccaggcacaggcgcatcatgttattgttattggtggcttcttcactcagcaaccaccaaaccacaccgtcgcacccattccatcgctgattcccccaatggcttccactgccaccaatttctctctttctctctgcgccaaccaacaaactccaatccccaaaccctctttcttctccaataacaaccatttgcacttcaactctaataataattgggcctgggcctctgtttccacctctcgcaagtcaaggatatgcgccacctcctctcaagttatggatccctccgcagcaaaatccgaacccgctcttcccaccatcgtcgaagtcgatttgggtagccggagctatcctatttacatcggatccgggttactaaaccaacccgac

SEQ ID NO: 2399 - DNA, 419 bp, Glycine max
ctggggttggctatgggcagtggcttcatggagaggctgttgcagctggcacggtattttttaaaaaacaaaaatatcatgaattgtacttatatttgtgtttaatactaaagtctataggtctattctgatgaatctgtatgccaatgtacacaggtaatggctgttgacatgtcatatcgcctaggttggattgatgattctctagtgaagagagttggagatattttaaaacaggctaagttaccttcagcccctcctgagaccgtgactgtggacatgtttaaatctgtcatggcagtaagtactgattctcaatacccttttaatgttcagtttgtttatattaaggcttatagttttttttattttttattttggtgtattaggtggataagaaggtagcagatgggttgcta

SEQ ID NO: 2400 - DNA, 1139 bp, Glycine max
cagaccatatcagattcaaggaacatgatttagaaaactgccaagcccacccatattcattctctcaaaacttccaaccatgaactgaagcaccacacatacccacttcctccaaagacatcatttttattaccaatcttccaatttcagagaaaattctttgtgggcatctcttaattaaaaaaatgtcaagcttccccaacacggtggcggaaggccgcaggtccagcaaggcaccggaaaaatccactttttctcagacttgcagcctcttgagccagttcttgaaggagaaacgtgcttctgctgattccacctttcgaattggtgggaaaatggaacccatagcgagtaccaagggtttgttaggaagcctgcaaaactctgatggggctttgaaactaagcgcttctgccatggaatttcttccccagcttgtggaaaacccctgcattaagaagtctagatcacagggacctgaaactccccaattgacaatattctatgctggaaaaatgttggtgtttgatgccttttcgccggagaaggcgacagaggtcatggagatggccaccaagttggcctcgaacaactccggcactgaagaaagtccccctagccttccggttaccactgaaaaattggctgtgtccaagatgcctcaaacaaacacatcctcagaaacccctaagcccggaaaccaaggggttggttcagatatgaggtacccaaggagagcttcacttctaaaatttcttgagaaaagaaaagaaagggtcaatgctagagggccataccaaatgaacaatctcaagccagaaggaagcagttcaggtggtgaacctgaagatcagtgttccaaacagtttgaccttaacttttagtggtttagttcattgtgaatttaggatatacatgctctggtcaaccaaaaagcacctaacttatatgattgttggcctttcgaagattactgtggccttcatacgtatttcataagatatatatatatttgtatgtattattatttcatcaattaggtcctcctcttcggaccaaaccagagataaatttagctttattaccgagatcgattaaattcagagaatttaaagtactttgtgtgcattatttggatc

SEQ ID NO: 2401 - DNA, 444 bp, Glycine max
cccacgcgtccgcagattcaaggaacatgatttagaaaactgccaagcccacccatattcagtctctcaaaacttccaaccatgaactgaagcaccacacatacccacttcctccaaagacatcatttttattaccaatcttccaatttcagagaaaattctttgtgggcatctcttaattaaaaaaatgtcaagcttccccaacacggtggcggaaggccgcaggtccagcaaggcaccggaaaaatccactttttctcagacttgcagcctcttgagccagttcttgaaggagaaacgtgcttctgctgattccacctttcgaattggtgggaaaatggaacccatagcgagtaccaagggtttgttaggaagccccctttcgcggacgcccctaaaactctgatggggctttgatctaagcgcttctgcatggaattcttc

SEQ ID NO: 2402 - DNA, 450 bp, Glycine max
cccacgcgtccgcccacgcgtcagccgattcgactcgagcagattcaaggaacatgcttagaaaactgccaagcccacccatattctctcaaaactttcaaccatgaactgaacaacaacaacaacaacaacagggccacccgtacagacccacctccaaagagatcatttttattaccaattttccgatttcacagagaaaattctttgtgggcatctcttcaaaaatgtcaagcttccccaacacggtggcggaaggccgcaggtccggcaaggcaccggaaaaatccaccttttctcagacttgcagcctcttgagccagttcttgaaggagaaacgtgcttctgctgattccacccttggaattggtggaaaaatggaacctaaagcgaataccaaggctttgttaggaagcttgcaaaactctgatggggccttaaagctaagcg

SEQ ID NO: 2403 - DNA, 1366 bp, Glycine max
ccaaaaccactttactctctcgttcactctgcatctgactcctatagtttcctctgctaattccatatccccgttttccttcactcttgaaccccgattcatttccaccagcacaagaagcatggctgcaatatcaataccttctcacatgaaagcttggacatactctgagtatggaaaatccaaggaagttctcaagtttaatcagagtgtggctttgcctgaggtgaaggaagaccaggtcctcatcaaggtcgctgctgcttcccttaaccccattgatcataagagaatggaaggctatttcaagaacagcgactcccctttacctactgctccgggttatgatgttgctggagtggtggttaaagtgggaagtgaagtgaagaaatttaaggttggggatgaagtttatggtgatatcaatgtgaaagctttggaatatccaaaggtgattggttctttggctgagtacactgctgcagaagagaggctattggctcacaagccacagaatctgagctttgctgaggctgctagccttcctttaacacttgagactgcttatgaaggccttgaacgaaccgggttttctgctgggaaatctatccttgtgcttggaggtgctggtggagttggaacccatgttattcagcttgccaagcatgtttatggagcatccaaggtagcagctactgctagcactaggaaactggaactattaaggaatttgggagctgactggcctattgattatacaaaggagaattttgaagacctgtctgaaaagtttgatgtggtgtatgatacagtagggcaaactgaacaggcattcaaggttttgaaagaaggaggaaaagttgtgacaatagtaccacctggatttcatccagctatccttttcatactctctactgatggggcgatcttagagaaactaaacccctattttgagagtggtaagctgaagccaatacttgacccgaagagcccgtttccattttctcagactgttgaagcgtttgcccatctggaaacaaacagagcaactggaaaaatagttgtctatcccattccatgaacatgcataagctccactacaatctacatgcttctgtctgtgatttaaggtttgtgttaaaagagtgaggcacattagtacatgttctccatagcctaaagctacccacttactcttcaagagtgtgtagtggaataacttagttttacaagcgtgcctgcaactgtggctttaacatagtgtggtttgtaatttgtttttggtgtgcatactgtggtttgtagttttggctaatgaaataatcacatggtttttttttaactagtttggtctcaataagtctgt

SEQ ID NO: 2404 - DNA, 1467 bp, Glycine max
agtgatttgatttgcatcaatatggatcactaaccttgctggtggctggtgcatacaatagtatttgtaccaaacctcttttttcttttgggcacgtgtattgttttttatttatgaacccaactccatccatcattgttgcgacgaactcaacaagctagatcagtagtatatatcatcaaattcaatagtctcttctccatttaatagatggttgaaaaatcttccagaaccaaccttggccaccatcaagactttggcatggagccttactccattgatggtgtttcttcacaaactgactccaaattctacgatgatgatggccatgttaaacgaacagggaccgtttggactacaagctcgcacataataacagcagtggtgggttctggggtgctgtctttggcatgggccatggctcaaatgggttgggttgctgggcctgcagttatgatcttcttcagtgttgttacgttgtatacgacgtcgcttctggctgattgttatcggtgcggtgaccccgttaccgggaagagaaactatactttcatggatgcagttcaatccattctcggtgggtattatgatgcattttgtggggtagttcagtactcaaatctttacggaaccgccgtaggatacacaattgcagcttctattagcatgatggcaataaaaaggtccaactgtttccattcttcaggcggaaaaagtccatgtcaggtttcaagcaacccatacatgatcggttttggcataatccaaattttattttctcaaattccagattttcatgaaacgtggtggctctccatagttgcagcaatcatgtcttttgtctattccacaattgggctcgctcttggcattgccaaaattgcagaaacgggaactttcaagggtagcctcactggagtaagcattggaactgtgaccgaggcccaaaaagtatggggtgttttccaagctcttggtaacatagccttcgcctattcatattctttcgttctccttgaaattcaggataccatcaaatctccaccatctgaagtaaaaacaatgaagaaggctgcaaagttaagtattgcagtgaccacaacattttatatgctttgtggctgcgtaggctatgctgcttttggagattcagcacctgggaacctgcttgctggatttggtttccataaactatattggcttatagatattgctaatgctgctatcgtaattcaccttgtgggggcataccaagtttatgcccagcccctctttgcctttgtagagaaggagacagcaaaaagatggcccaaaattgacaaggaattccaaatttctattcccggtttgcaatcctacaatcagaacatatttagcctagtttgtaggacagtgtttgtgatcataaccactgttatatcaacgttgcttccattcttcaatgatattttgggagtgattggagca

SEQ ID NO: 2405 - DNA, 295 bp, Glycine max
tttggttggcaagtgtgttcaaaatttgaccaaactcactctcactccccaaattaaactagcagcagcagcaacaacaacaacaacaacaaaccttctctttaatttgggttccacaatcaaaaccaatcttagccaccatcaagactttggcatggagccttactccattgatggtgtttcttcacaaactaactccaaattctacgatgatgatggccatgttaaacgaacagggaccgtttggacaacaagctcgcacataataacagcagtggtgggttctggggtgctg

SEQ ID NO: 2406 - DNA, 1328 bp, Glycine max
gaaggatcaattgcactcagagcattataataacacaacattaccactgccaccgtcacgttgttgtgctgcgcctctcctctcgctgcgttttccaatggcggccataacccgcctcctaaatcgcacctcttccctctcttccgtggcgcgtggattctcatctcacgcatcgccgccgcgcaaggaggagaggaatgtccagtgggtgttcctgggttgccccggcgtcggaaaaggcacctacgccagtcgcctctgcaacctcctcggcgtccctcacatcgccaccgacggcccccctttcttcccagctatcagaaattgttaatcaaggaaaattggtgtcagatgaaatcatcataagtttattgtcaaagaggctggctgatggggaagctaaaggagaatcgggatttattcttgatggttttcctcgaacaattaagcaagcggaaatattggaaggggtaactgacattgacttggtagtcaatctgaagctccgagaagatgttctgcttgagagatgccttggtaggagaatttgcaatcagtgtgggggtaattttgatgttgcttccatcaacgtcaaggccgagaatgggagccctgaaattattatggctccacttcttcctcctgagaattgtatgtcaaagctcattactcgatcagatgatactgaatcagtggtcaaagaaaggcttcgaatatacaatgaaatgactcagcctgtggaggaattttaccgttcgagaggaaaattattggagtttaacctgcctggaggaatcccggaatcttggcctaagttgctacatgctcttaatcttgatgattacgaggacaaacgatctgctgcagcataacgatataataatgtatcataacagtaagtatttcattctttgcgtgcttatattgcatgcttggcaattttgcaggacagagaaccaaagcaagggaacttctctgctagtattattttggaccaatgatgatatttgtaagtgttgtaatctgataagactggtagtgttgcgttttgttttcgtataatttggttatatgggaagggtttcctagcatataatgttattgtgaagagtgaataatatatcccagtattgctagaaagatagttggtcaggaatcaacgtcgataggattggtgcatcatcactattgttgtaaattaaatgtgaaataaccttattctattacatcaacacatcatcacatgctcgtgatttagggaaggcttttttactggagtaacttccaggaaaaaaattatttaatatgatgtttcatgttatttgaat

SEQ ID NO: 2407 - DNA, 488 bp, Glycine max
  unsure (1)..(488): unsure at all n locations
ggaaatagagtgcgcagagagcattgtaataataccacattaccacttccaccctcacctttcgctgcgttttccaatggcggccataacccgcctcctaaatcgcacctcttccctctcttccgtggcgcgtggattctcatctcacgcatcgccgccgcgcaaggaggagaggaatgtccagtgggtgttcctgggttgccccggcgtcggaaaaggcacctacgccagtcgcctctgcaacctcctcggcgtccctcacatcgccaccggcgatctcgtccgccacgagctcgcctccaacggccccctttcttcccagctatcagaaattgttaatcaaggaaaattggtgtcagatgaaatcatcataagtttattgtcaaagaggctggctgatggggaagctaaaggagaatcgggatttattcttgatggttttncacgaacaataaagcaagcggaaatattggaaggggtaactgaca

SEQ ID NO: 2408 - DNA, 488 bp, Glycine max
tcatcgctgtcgttgatcattcagcgcaagtctgcaaatcccatcatcatggcggccataacccgcctcgcgaagcgcgcgttcgtcgtctcttccctggcgaggaggtgcctgagctcctccgtagtcaactgccacgcgccgccgcacgacgccacgtcgttccgcccgtttccgctgcgtgaagattcgagcaagcggtgcgtgcagtgggtgttcctcggctgccccggcgtcggaaaaggaacgtacgctagtcgcctctcgaacctcctcggcgtccctcacatcgccaccggcgatctcgttcgcgacgaactcacctcctctggccccctttcttcccagctatcagaaattgtaaaacaaggtcaattggtgtcagatgaaattattattagtttattgtcaaagagacttgttgccggggaagctaaaggcgatctgggatttattcttgatggttttcctcgaacaattaagcaagc

SEQ ID NO: 2409 - DNA, 492 bp, Glycine max
attcagcgcaactctgcaaatcacatcatcatggtggccgtaacccgcctcgcgaagcgcgcgtcaaccttctcacccccagatgaggaggtgcctgagctcctccgaagtcaaatcccacgcgccgccgcacgacgccgcgtccttccgcccgtttccgcggcgcgaagatctgagcatgcggtgcgtgcagtgggcgttcctcggctgccccggcgtcggaaaaggaacgtacgctagtcgcctgtccaacctcctcggcgtccctcacatcgccaccggcgatctcgttcgcgacgaactcgcctcctctgaccccctttcttcccaggttctcttcttcttcctcttcactttgaattaactagattaatttttgtaacgcaaatttggtcaaggttattgaaatttctgcgtacggcgcagcgcttagacagaaaaatgggatgataattattattttaaaaaatataaaaagttgtcatctaatca

SEQ ID NO: 2410 - DNA, 753 bp, Glycine max
ctataaatcactccccttgtcccctcgaactttctctcttcgggttctcgtcaaaacgcaaagatgcaagttccattgatcgacatcgacagaatcaacgatctccaagtgggtctgaactctctgcagaacccatccttcccaatcccttctcagatcacaacctccctcgcttacaatttctgcaaatggggcgcagtcattctcgcccttgtcgccaccttcggcagcatcatcaacagagtcactatcttcatcatccgcttccgcgccaaagccccttctctcccatccctaaccctaaacgacgacaatttttacacctcctcctcctctgacgacgacgacgacgacgataacgacgacgacctaacctactcctcttccgagcccgaagacgagccctccgcgtcttccagtttcatccgtttggacgactatttccgactcagaggaaccgataataataataataataacctagacgacgagtttcagactcaaaacggcacgcacaaacgatgtcgtagcatcggggatattttctccctctcggaactagccaacagcaagagcgtggtgaagctctgggacaccataggcttcggcctgggcttggacttcgatgattacgatggttactacgttggtaacgcggcggttccgacgagctccaccgcgtctccctcggtggttgtctcggcgggggaaggcgcgtgcgggaatctggcgctggagatctgggacacgcgg

SEQ ID NO: 2411 - DNA, 666 bp, Glycine max
aaaaaaaaagtcagtgaagtaaataagctgaaacaagaaaaaacgttggggtcagtcggcatcaatggcggatctgaagaaccgtaatttcctcacctacgcgtacattcttctctacattgctctctccagcggccaaatcttcttcaacaagtgggttttgtcctctaaggaaattaacttcccttatcctttgggcttgactctacttcacatggtcttctcctctgttctgtgttttgtgttaaccaagattctgaaggttatgaaggttgaggagggaatgactcctgaaatatacgctacttcggtagtgccaattggggccatgtttgcaatgactctttggctgggaaatactgcctacctgtatatttctgttgcttttgcacaaatgctgaaggcaattatgcctgtagctgtttttgtgcttggagtagctgcaggacttgaggtaatgagctacaaaatgctattaatcatgtcagtgattagttttggtgttctagtagcttcttatggagagataaatataaactggattggagtagtttaccaaatgggaggtgttgttggtgaagctctgagacttatcttcatggagatttttgttaagaggaaaggtcttaagttgaaccctctatccgtgatgtattatgttagtcc

SEQ ID NO: 2412 - DNA, 1155 bp, Glycine max
accgataccatactactatggcattcaaccagctgtccatcagaaaggtgaagtaacactatgacatcggggcccatctttcaagggggtacagaaaactggtcgcattatagaggcttcgcaggccttacgaggtctgctccatccgcggtctccgatcctcaaaccttaacgtggaatcagaaagacttcgttatctcgccgtaaaagaccgctatatccgccaggctttacattcccaaaaccacttacccgccgccgcaaaagcttcctcttttagtttacttccatggcggcgccttcataatcgaaacaccgttttctccgaactaccacaacctcctcaacaacattgtttcaaaggctaatgtgattggtgtttccgtacactacaggagggcaccggagcacccggttcccgtcgcccacgaagattcgtggagtgccctcaaatgggtcgcttctcacgtgggcgaaaacggtgttgaagagtggctgaagaaccatgcagattttgaaaaagtgttcttcgccggcgacagcgccggcgccaacattgcgagctatttgggcattcgggtcgggttagaagggttacccgggttgaagctcgaaggggttgttttggtgcatccttatttctggggtacggagccgctcgagtgtgacgtggagcatgctgaaggcgctgccaaggtgcaccagctgtggcggtttacgtgccccaccacaacgggatccgacgacccgattatcaaccccggtcacgatccgaatctgggcaagctggcctctgggagagtgcttgtttgtgtggcggagaaggatttgctgaagggcaggggttggcactacaaggagttgcttcagaagagtgattggcctggagttgtggacgtggttgagactaaggacgaggatcacgtgtttcatatgtcggatccgaattgtgacaatgctaaggctttgcttaaccagattgtttcctttatcaaatagaattgaatagtttaatgtgtgctctatcttgtctattgtgttttacttatcgtttttagttttcagtgtagtagtgtatgcattctatcttatatcgtatcgggttaaagttgaatagttaattgatttaaagtgtgaaaaaaaaaaaaaaaaaaa

SEQ ID NO: 2413 - DNA, 647 bp, Glycine max
cgaagatatgataaggtgctcaagcttcagtggacaccaaccaaccactaacaaaaccaaacttcccatcatcgaagaacttgattacccatcccttccttccatcatcccttccccttaaaccacatagccctcttctaatcccttctcacaaactcaaaaaacccttacactcatttcccttaatggattcgagtacaacaacctccacagacagtgaagtagcctatgacatcccacccatcctcaaagtctacaaaaacggtcgcatagagaggctcgcaggcttcgaggttgttcctccgggtctcgatcccgaaactaacgtggaatcgaaagacgtcgtaatcgccgaaaaagacggcgtatccgccaggctttacattccgaaaaccacttacccaccaacgcaaaagcttcctattttagtttacttccacggcggcgccttcataattggaacaccgttttctccgaacgtccacaagcttctcaacaaccttgtttcaaaggcgaatgtgataggcgtttccgttgaccacatgacggcacccgagcagccggttcccattgcccccgaggattcatggagtgctctcaaatgggcctattcggaaatctttggaatcggtgttgaatagtggccg

SEQ ID NO: 2414 - DNA, 237 bp, Glycine max
aaaaacccttacagtactttataccaccctcatcaactactatggattcaacaacttccacagatcgtgaagtagcctatgacatcccacccatcctcaaagtctacataaacggtcgcatagagaggctcgcaggcttcgaggctgttcctccgggtctcggaccccgaaactaacgtggaatcgatatacgtcgtaattcgagtaaaagacggcgtatcggctatgctttacatt

SEQ ID NO: 2415 - DNA, 705 bp, Glycine max
gttccgggatccaatcgcgttagggtttttgagagttgcagtgtgcactttgtaggatcatctcctagcattgatcgattgagatggcagacgaagctaacagaactgctttccttgaaattcaaagtcgcatgatcgatactactggaaaaataaaacaggtgcaaacccagatgcgttccaaagaagcagaaaaaaagcgtgcttttctgaccatggaggagctgaagcaagttcctgatgatacgaatgtttacaaatccattggaagaatgtttgtattggagaccaaggcaacattaatgaatgaacaggagaccaagtttaaggatggtgaagcttcaattactgcattacagagctcaaaagaatacttggaaaaacagatggcagaggtggaaaccaatttgagagaactgctacaacaagatcctggtcttgctaggcaaatcatgtctatgaatgtagtgtaaactttccgttagtgaaattaacttaaagtggcagggttttctggtgcatttgagcaaatagaaaattcaggacttggtgagatgtgaggaaggatgtgtactgcctgcttcatggatgattttctattacttctcaaaatgttgaatttggagggatttttgtaagttattttaattcttagattggtatggttattacatgaatgataatccttattaattgtgtgcaagt

SEQ ID NO: 2416 - DNA, 2006 bp, Glycine max
cgtcgcatgcaccgcgtacgttaagctccgaaggattcggctcaatatccccccctagctacagagcagccaaaggggaggaataataataagcctatattctaaggccggaaaaataaaaaaggaataacaaaaatgtctggaaaggtaattatctcggctgtttctctcatcctggtggttggagtggccataggtgtggtggtggccgtcaacaagaagggcgaggatcccacacttcaatctcaacaaaaatcagtaggggttatctgccaaaacactgatgaccagaagctctgccacgaaaccctaagctccgtgaagggcatggacaccgctgatccaaaggcttacatcgccaaggcggtgaaagccaccatggacagcgtgaccagggccttcaacatgagtgataggctcagtaccgagtacggaggcaacgataacggaaccaagatggcccttgatgattgcaaggacctcttgcaatccgctatcgagagcctccaactcagcattgacatggttcacaacaacaacttgcaggccgtgcataaccaacaggctgacttcaagaactggctcagcgctgttatctcgtaccaacaggcctgcatggagggttttgacgatggcaaagaaggtgagaagaagatcaaggagcagtttcataccgagaccttggacaatgttcagaaactcactggcatcacccttgacattgtgagtggtttgtccaacatcctcgagaagttcgggttgaagtttaatcttaaacccgcgtctcgccgtcttctcggcaaggatgggttgcccacttggttctctgctgctgatcgtaagcttttgggtcgtggatggagatcacgtgtcaagcccaatgttgtggttgcccaggatggcactggtcagttcaaaaccgttgccgatgctattgcttcctacccaaaggataacaaaggtagatacattatctacgttaaggctggtgtctatgacgagtacatcaccgttcccaagagttcaaagaacattctcatgtacggtgatggccctgctaagaccatcatcaccggtcgcaagaacttcgtcgatggtgtcaagaccatgcaaactgccactttcgccaacactgcagaagggttcattgccaaggcaatgacattccagaacactgccggtgctgagggacaccaagccgttgcattcaggaaccaaggagacatgtccgctctcgttggttgccacatcttgggttaccaagacaccttgtacgtccagaccaacaggcaattctaccgcaactgcgtcatctccggcacagtcgacttcatcttcggcacctcctccaccgtgatccagcactccgttatcatcgtgaggaagcccctggacaaccagttcaacacagtcaccgccgacggaacatcccagaagaacatggctacaggaatcgtgatccagggttgcaacatcgtcccagaagccgaacttttccctacaaggttccaagtgaagtcataccttggaaggccatggaagcaattctcaaggacggttgtgatggaatccaccgtgggtgacttccttcaccccgaaggatggtgcccatgggccggtgaacacttcgaagacaccttgtactatgctgaatacaacaacgatggacctggtgccaacgttaacggaaggatcaagtggaagggttaccgtggtcttattagccgcgaagaagctacccaattcacccctgcccagttcctacaggctggagccaacggtggaagcgactggttgaaagctctccgtgttcctcacgcacttagcttcatgaaggcttaattgaaattacacaaacacatatccatgcatcatcaattgagtactgttagagagtgtgatgatgagggtcatagtccgtagacaatttgttattctttgtatttatctttggaggtctaccggaaatatttttaatgaaaatttttaaaattgctttgattaac

SEQ ID NO: 2417 - DNA, 366 bp, Glycine max
tgtactatgctgaatacaacaacgatggacctggtgccaacgttaacggaaggatcaagtggaagggtttccccggtctcattagccagcaagtagctgctcagttcacccctgcccaattcctccaggctggttccaacggtggaactgtctggttgaaggctctccatgttcctcatgcacttaacttcatgaaagcttgaaattaaacccgtatatccatcaatgctcactctttattaactgagtgttagcgtttgtcatgttgagggtcatagtccgtgtgacaatttgttattctttgcatttatctttggaggtctccggataatatttttaataaaaattagataatttatttcgatt

SEQ ID NO: 2418 - DNA, 1570 bp, Glycine max
caatttcgaagcctctcgaatccaaactcaacagaacattcatttccctatagagtcgacgtcgtttcgttccgctctcactccaagaaaacgttttgcagaagattccaatcggagctcagaaaaaaaagaaacctaatcgccgatcgcgtcgaaagtccctaagcttacatcctgcttctagatagttggtaatcttatctgagggtagtagctagtaccatgggagaagtggcagtaatgcactctgagcctctgcagtttgagtgcaatgacattagtgtgaatatgactgagaaggaagtgtatcctccagaatcaaatgtggagcgcttacctggagaagaatcgagtcaatcaacagaccacaaaaatatcaatgacttgcaagagagaggatatatggagtatggatgtcagcattaccggagaagatgccgtatcagggccccatgttgcaatgagatttttgattgccgccattgtcataatgaggcaaaaaatgatatcaacattgatcagaagcatagacatgatattccacgacaccaagtcaaacaggtgatttgttcactttgtgggactgaacaagaggttcagcaaaactgtataaattgtggtgtttgtatgggcaagtacttctgtggaacatgcaagctttttgatgatgatatatctaagcagcagtaccattgcagtggctgtggaatttgcagaactggaggaagcgaaaatttcttccattgctacaagtgtggttgttgctactcaactcttctgaaaaacagtcacccttgtgtagaaggagcaatgcatcatgattgccctgtttgttttgagtatttgtttgaatcaagaaacgatgtcactgttatgccatgtggacatacgatccataagagctgcctgaatgaaatgagagaacatttccagtatgcatgccctctctgctcaaagtcagtctgtgacatgtcaaaggtttgggagaaatttgaccttgagattgctgctacacgaatgcctgagcaatatcaaaataaaatggtttggatcctgtgcaacgattgtggtaaaacttctcacgttcagttccattttgtggctcaaaagtgtccgaactgcaaatcctacaatacacgacaaacatgaggctgagcaagtggccacgattattcattggtttcgtcaaaagccttcacttgagttctcttgatgttgttgtgattcgtgaaggctgtgaaaatgcatgtgtgtccattgggtacgtggatgtgcacgtgggaatttgaatttggagtgcacgatgagccacattcaaagggatagaataatggttctttttcttatatgttgatttggagtggggtagtgtaatttgttggggcgccactagttggaatagggcccccgagtgttagagttcgtgtttgttttagcttagcaatttggctaaaagtgtttctatttttttgggtctcaattgataagtattctagttaaattactattaagtgaaattcatgcttctaaaaaaaaaaaaaaaaaaactgagactagttctctcctcgtg

SEQ ID NO: 2419 - DNA, 543 bp, Glycine max
ctcgaatccaaactcagaacattcatttccctataaactcgacgtcgtttcattcccgtctcgaagaaaacatctagctgaagattccaatcggagctcagaaaaaagaaacctaatcgccgatcgcgtcgccgtcgcgccgaaagttcgttgttgttctgtgaaattgccggttttaatttttcgttttgtgataattctgagaattagtaacaattattgtggtttttttttctgttaggtaacgttgctgtggttctttttttttcttttttcttttttataatttcgttgccgttttgtaggtgaagatagtcgttttggttgctgctgtgttttttgttttctggtgttcgaattgtgtgcaattttgaattctacttgttagttgtgtaatttgtttgttttctatcacttttgtgttctggagttaaaatgttttctaatgagttaagaatcgtttgcttttgtggtacgtagctgtacaatacgatgccttgaattccaaggtttcggtttggtttattttaatttacaaaaacc

SEQ ID NO: 2420 - DNA, 517 bp, Glycine max
ggaaggtcaatttcgaagcctctcgaatccaaactcaacagaacattcatttccctataaattcgacgttgtttcgttccgctctcactccaaataacgttttgcagaagattccaatcggagctcagaaaaaaaagaaacctaatcgccgatcgcgtcgaaagttcgttgttgttctgtgaaattgcctttttttttttttccgttctgtgataattctgtgaataataacaataattgtgtgtgttttctcttttaggtaacgtagctgcggttcctttttttgttataatttttttgccgtttgaagatagtcgtttcggttactgctgcgttttgtgttttctggtgttttaattctgtgcaattttttaattctacatgtttgattgtttattttgggctgcgtgatttgttcgttgtctatgacttctgtgttctggagttgaaatgttgtctaacgagtttagaatccgttgcttttgtggtacgtagccgaacaattcaatgcctgaat

SEQ ID NO: 2421 - DNA, 391 bp, Glycine max
ggagaaggtcaatttcgaagcctctcgaatccaaactcaacagaacattcatttccctataaattcgacgtcgtttcgttccgctctcactccaagaaaacgttttgcagaagattccaatcggagctcagaaaaaaaagaaacctaatcgccgatcgcgtcgaaagtaacgtagctgtggttccttttttttttataatttttttgccgtttgaagatagtcgtttcggttactgctgcgttttgtgttttctggtgttttaattctgtgcaattttttaattctacatgtttgattgtttatttttggttgtgtgatttgtttgttttctatgacttctgcgttctggagttgaaaatgtgtctaacgagtttagaaagccgtgctttt

SEQ ID NO: 2422 - DNA, 1688 bp, Glycine max
  unsure (1)..(1688): unsure at all n locations
aaagcttaatgtgggatatcccttttgtattattcacaggaaatatccatttgtttctttaccagtttatgttcagtgaaaaggctggcttgatgccactcccattggtagatgtcacatgaatactcagtactatcagtgccaacatttccatctttcttcttccagcctttgctttgtcttggttggtatagaagtgacaatccagccgcactcttaacgtggataatgatttcatttttgaatattgataacctagtcccctggagtagtgttaatattctttttggcagtgaacacacagtccactgtcaagttacctagttaatgaagtgaagggttataatttgatccaaaggaatctgccaaggtgcagatgatgtggagtttttatgttcttccttttggtaagtttcagttcttggaggagtcaaatgctgaactgcgttttaaggttggagtgtctattgattggatcagtatagttggatttggttcagagagttcttcaaggattcaagtgaccattcaatgctattggtttctatttactgcttgaggctgtcaagtaccccagtgccaccttatagtaatatgtggaattcttgtatatacactagttttgatgtgttctcctcttggagtagtgctgattggagctgcattaatcgattttgttgttgctgatttcaattggtctgcggcagtatagaagaaagcaacgatgcgttggtgtttacctggcttgatggggtgactgaatatgcctttagaagttttaggattatttctaaatgtgttcctacatgcaggtccctaagcttacatcctgcttctagatagttggtaatcttatctgagggtagtagctagtaccatgggagaagtggcagtaatgcactctgagcctctgcagtttgagtgcaatgacattactgtgaatatgactgagaaggaagtgtatcctccagaatcaaatgtggagcacttgcctggagaagaatcgagtcaatcaacagaccacanaaatatcaatgacttgcatgagagaggatttatggagtatggatgtcagcattaccggagaagatgccgtatcagggccccatgttgcaatgagatttttgattgccgccattgtcataatgaggcaaaagcaagccagactcatatgagttatgactcataatgtaccagaatgatatcaacattgatcagaagcatagacatgatattccacgacaccaagtcaatcaggtgatttgttcactttgtgggactgaacaagaggttcagcaaaactgtataaattgtggtgtttgtatgggcaagtacttctgtggaacatgcaagctttttgatgatgatatatctaagcagcagtaccattgcagtggctgtggaatttgcagaactggaggaagcgaaaatttcttccattgctacaagtgtggttgtagctacaaaattcttttgaataacagtcacttttgtgttgaaggagcatttgcatcattattgtcctgtattgattttatgttttttttaaattaagtatgtattttatttataattctatgattcttatgannnnnnnnnnnnnnnnnnnnnnnnnnnnnnnnnnnnnnnnnnnnnnnnnnnnnnnnnnnnnnnnnnnnnnnnnnnnnnnnnnnnnnnnnnnnnnnnnn

SEQ ID NO: 2423 - DNA, 441 bp, Glycine max
caaaataaaatggtttggatcctgtgcaatgactgtggtaaaacttctcacgttcagttccattttgtggctcaaaagtgtccgaactgcaaatcctacaacactcgacatacatcaggcggagcaggtgcccacgattattcattggcttcatcaaaagccttcactcgagagctctcttgatgttgtcgtgacttgtgaaggcagtgaaaatagatgtgcatccattgggtacgtggatgtgcacgtgtgggaatttggagtgcatgatgagccacattcagagggataaaataatggttcttatgttgatttggagtggggtggtttaatttgttggggctcccctagtagttggaatagtccagagtgttagagttcttgtattatatttgttttagccctatcgataagtattctagttaaattactctttaagtg

SEQ ID NO: 2424 - DNA, 1626 bp, Glycine max
gcacggggaagaagtttgtggtgaaactagaggagaaaacgatgctgatgctgatgatgaaggtgaagaaagccatcacaggtcatcagaggacagtgaaaatgcatctgaaaatgttgatgtttctggaagcgagtctgctgatggtgaggagtgttctcgagaagagcacgaggatggggaacatgataacaaggctgagagtgaaggtgaagctgaaggaatagctgatgcccatgatgttgaaggagatggaatgtcattgccatattctgaacgctttctactaactgtgaagcctctagcaaagcatgttcctccaatgttacatgagaaggacatgaattcacgagttttctatggaaacgattccatttatgtgctgcttagacttcatcagacattgtatgagaggatacaatcagcaaagattaactcatcatctgctgataggaaatggaaggcttcaagtgatacaagctccactgatcaatatgacaggttcatgaatgccctttacagtttgctggatggttcttctgataatacaaaatttgaggatgattgtcgagctataattggaattcaatcatatgtcttattcacattagacaagctgatatataaacttgttaaacagcttcaagctgttgccgctgatgagatggataataagcttttacaactatatgcatatgagaaatcgagaaaacccggaaaatttgttgacatcgtttatcatgaaaatgcccgtgttcttctccatgatgagaacatatatcgtattgaatattcacctggaccaatgaaactgtctattcaactgatggactctggacatgataaacctgaagtgactgctgtgtcaatggaccctaatttttcaacctatctacacaatgacttcctatctgtcgtccctgacaaaaaagagaagtcaggaattttcttgaagaggaataaacgtagatatgctggtaatgatgaattttcaagccaggctatggaaggactacaaattattaatggtctggagtgtaagatagcttgcagttcatctaaggtctcatatgttttagataccgaagactttttgtttcggataagaaggaaaagaagagttttgcatccaaagagttcaggcgcccatgaacaggcacagtcttcaaagagttcaagcagagtacaacgattccgcaatttgttttccattacatgaaaatgtccattttgagctgggcatgtaacatttgtcaaatgtaaacattggcagaggcgcctgactgaaaacgccgtcctatccaagaagttgttgatcaagggatgtttttctgaaattatttttgcacattttctttgagcaacctaataaatcttacagaatgggtagctggtgcggcatggagaggaggagattgttgtatactgtaatttgatggctaacgatggctcacaataatgtaaataaatagaggtaatttgtgatttaactagaggactctttatttcattcatccatatttttgttatttagtttttcttttcctcttttaactttagctgctacaaatattgaggtttattgatcatgggacattcggtggctgcaattggccctgccgtttc

SEQ ID NO: 2425 - DNA, 795 bp, Glycine max
agcgcggaagccggccgaatggaaatgagaaaatagacggaagtgagagaggaggcactgagcatccaacaatggccttgttctctgctaccgcaaccgttcttcctcggaacctcgcattcgcttcctccaccaaactctccctctctcacagtcactctcttctacatcacttcctttcattccccactcccaaatcatcaaaccctcgcaaccgggtcgcaatctctctccaaaccccacgcgctcaatccggcgcgtccgcctccgcctccttccatggcctctgctacgtcgtcggcgacaacatcgacaccgatcagatcattcccgcggagtacctcaccctcgtcccttcgaagcccgacgagtacgagaagctcggctcctacgccctcatcggcctccccgccacctacgccgcgcgtttcatcgaacccggcgagatcaaaaccaagtacgccatcgtcatcggcggtgccaacttcggttgcggctcctcccgcgagcacgcccccgtcgcgctgggcgcctccggcgccgccgcagtggtcgcggagtcgtacgctaggatcttctttcggaactccgtggccaccggcgaggtgtatccgctagagtcggagggacgcctctgcgaggagtgcaccaccggcgatgtggtgacgattgagctcggagagagccgcttgatcaatcacaccaccggaaaggagtatcgcttgaaaccgatcggcgacgcgggtccagtgatcgaggccggtggcatctttgcctatgccaggaaaaccggca

SEQ ID NO: 2426 - DNA, 409 bp, Glycine max
accacgcgttcattcgggtgccaaaagaccaccgaaagggaacttacaattaacaatggggttggtccccttcggccgcaaccggtcttcctcggaacctggcattcaccaaactctccctctctcactctcacactcttctaccgcgcttcctttctttcccaactcccaagtcatcaaaccctcgcaaccgcgtcgcagtctctctccaaaccccacgcgctcaatccgccgcgtccgcttcttcctccgcctccttccacggcctctgctacgtcgtcggcgacaatatcgacaccgaccagatcattcccgccgagtacctcaccctcgtacgtaccaagcccgacgagtacgagaagctcggctcctacgccctaatagacctccccgacacctacgccacgcg

SEQ ID NO: 2427 - DNA, 439 bp, Glycine max
cattggaagaaagagaaatggaggagactctttctctcagtctcatccacgtaaacaactcattggttttcaccaatagactacacatcatcctccatttcactgctctatgtttcttggtttactacaggctttgtttcttctttcagaatccacaaaccagacgaggaactactttgttcccttggcttcttgtttttgcctctgaaatcattctctccttcatttggattcttggtcaaggtttccgctggcaccccatttcaagaactgtgtttcctgaaaggttaccacaggatgacaagctccctctcattgatgttttcatatgcactgcagacccaactaaggaaccaactttggatgttatgaacactttgctatcagccatggcgcttgattacccgccagagaagctgcatgtgtatggttctgatga

SEQ ID NO: 2428 - DNA, 751 bp, Glycine max
gcatcacacgcgtccggtaacattgggttgtgatttgtgagggaagaaggggtagaaagaagaatcaggagaaggaaataatcatcaaccatggcagggagattgacgaacgcagcatcgaggatcttaggcggaaacggcgtcgtttaccgatccgtagcttcctctcttcgcctccgctccggcatgggcctccccgtcggcaaacactatgttcccgacaaaccccttcccatgaatgaggaactcctgtgggacaacggcactgcatttcccgaaccgtgtatagatcgtattgctgacactgtcggaaagtatgaagcattggcctggctgtgtgggggattgagttttttcgcgtcgctgggattgttggctgtgtggaatgacaaagcctccaagacaccgtttgcacccaaagtatatccatatgacaatctgcgagtggagcttggtggtgaaccataggtagatccaaggcaatgataggatgggaagttcttatttgatgtatttttctttttacgtttatttgtacttttgtgtagttcaaaataagggatcgtggaggacttgctgaaaccatctaaaggaatggaagagccgtatctggttgttcttttgatcatgctaatgcttatggtgactattgtgaggagtgagtaagtattatgcccagcatgtgtttggatatgcatttaccgaattgattttggatcaatgagtttataaaattggtgttaatatactc

SEQ ID NO: 2429 - DNA, 474 bp, Glycine max
tcattgttatagtccatgtatcctgattgcactcttgcttgtattaatggccaccttctttttgatattttcgtcttttgaagcttcttatacagtgctattttgcagctgtccagtacttatgctgattgagttttgttattttctttgtatcaggcacccaaagtatatccatatgccaatctgcgagtggagcttggtggtgaaccataggtagatccaaggcaacgatcggatgagaagttcttgtttgatgtattgttcttctacgtttatttgtgcttttgtgtagttcaaaataagggatcatggaggacttgctgaaaccatctaaaggaatagaagagccgaatctggttgttcttttgatcatgctaatgcttatggtgactattgtgaggagtgagtaagtattatgcccagcatgtgtttggatatgcatttaccgaattgattttggatcaatgagtttat

SEQ ID NO: 2430 - DNA, 685 bp, Glycine max
atttgttagaggagaggaagcatgtgggtgcctggtgggatgacattagcagtagaccatcatggaacaaggtatgaaaccaaatttattgaagagattgtcgagaaggtctataaaaagatacctcctaaagcattatacaccaatcaaaaccctgttgaacttggcgcccgcataaaagaagtaatgtcacttctagacatgaaatactggtgataatgtactcatgttgggcatatatggacttggtggtatcggaaatacagaacttgccaaagctttgtaggacaacattgtgcaagactttgatgctgcaagttttcttgccgatgttagagagaaatcactactagaataagccttttctaagtcggtcgattagacccttctaatcgatgttaatcaaacaaaatcaatggcctggaagatctacagaagacccttcttttagagatgcaagaggagttagaaactgaattggggggcagtaaaagtaaaagaatgtatgaaataaaacgcaagcttcgccgaaagaaagttcctttggttcttgatgatgttgatgacaaagacaagttagaaaagctggcaggagggtgtgattgctttggttcaggtagtaagatcattataacaacaagagacagatgtactaattgcttatcaagttgaaaaaatttatcaa

SEQ ID NO: 2431 - DNA, 1039 bp, Glycine max
gacatctatgagggactttctttctcccacgctgcatttctggtacatgtacttttgtatatgtttggtttctgctttgactacttcacatgtagaggcaagcactataagtgtgctgatcaaactataactatataagcggttcttccatttgactcttgttctgaacgacttttcaagagaatcaaaccatggcagtgaaagtatacggtccccactgtgcttccaccaagcgggtgctggtttgtctggttgagaaggaagtcgaatttgaggttgtccctgttgatgtcactaagggggagcagaaggatcctgagtacctcaaactacagccatttggagttgttcctgtcatcaaagatggagattataccttatatgaatctcgtgctataatgaggtattatgcagaaaaatacagatctcaaggggttgagttgctgggaaaaacaatagaagagaggggtctagtggagcaatggctagaagttgaagcacacaactttcatccacaagcctacaacttgtgtcttcatggtttgtttggttcactatttggtgtgactccagatcccaaggtgattgaggagagtgaagcaaagctggtacaagtgttgaacatctatgaggagaggctctcaaagactaagtatttggctggggatttcttcagcattgctgatattagccaccttccatttcttgattatgttgtgaacaatatggggaaaaagtatttgttagaggagaggaagcatgtgggtgcctggtgggatgacattagcagtagaccatcatggaacaaggttctccagctctacagagctccaatctagttgctaaatgagtttcagggaaactgctattagtgtatcatctttgaatatgttagtcaagaataaatgtacttttagcagattccaatgaaaggaagaaagtgggtagtgttcaacttaatggaatgtgttgaatttctgctttctttcattttcagttgtttgcttgtgtttaatttggatattccttgtggtcatgc

SEQ ID NO: 2432 - DNA, 427 bp, Glycine max
acgtccggttgttgctttcagtgactaattcacatgtagaggcaagcactatatataagtgttgtgttgccactaactaagcaataatataactatataagcggtcttcatttgactcttgttctgaacgacttttcaagagaatcaaaccatggcagtgaaagtatacggtccccactgtgcttccaccaagcgggtgctggtttgtctggttgagaaggaagtcgaatttgaggttgtccctgttgatgtcactaaaggggagcagaaggatcctgagtacctcaaactacagccatttggagttgttcctgtcatcaaaaattggagattataccttatttggttacactttgtgcttctttgttctgtttttctacttatagtttgtttggtggttaaaccgtactatttcacttgcttttta

SEQ ID NO: 2433 - DNA, 1073 bp, Glycine max
gaggcaacaacaactatctctcatccttcttctttctgtatccgtaacacttgcaacacacatggctacaatcaccaacactttcatattcaaaccccccatctctcatcacccaaagcagcttctttattcccaccgctcttctctacgctttctcaccaaatttaaaaccccctccggagcgaattctcggcggctggttccgaaagccacggcggctcccggggccaagaagacagaaaagccgcacgagagagtccagcgagtccacagcgtggaggagttcgagtcggcgctcgaatccgccaaagacaggcttgtggtggtggaatacgctgccagcgacagcgaggagagcagccagatataccctttcatggtggagctgagccgcagctgcaacgacgtggagttcatcctggtgatgggcgacgagtcggagaagacgaaggagctcctgaagcgggagaaggtggagaatgtgcctcacttcagcttctacaagagcaaggagaagatacacgaggaggaagggattggtcccgacatgctggtaggggatgtgctatactacggggacaaccactctggtgtggtgcagctgcacaacgtggaggacgtgcagaagctcatagaggaccacaagctggatcacaagctcatcgtgctcgatgtgggtctcaaacattgtgggccctgcgttaaggtttatcctacagtggttaagctctcgaggcagatggactcggtggtgttcgctcggatgaacggggacgagaacgagagctgcatgcagttcttgaaggacatggaagtcatccaggtccctacctttctcttcatcagagatggcaacattgaaggcaggtacgtcggttctggcaaaggggagctcattggggaaattctcaggtaccaaggtgttcgtgtcacttattaattttcttactacacatacttatttctacttctattaagttcagctcaacaaacacatgtttactaaactttctgagaaaggaacttgctttgctttatagtcaacccctggatgcgtaatattattttgtggt

SEQ ID NO: 2434 - DNA, 1564 bp, Glycine max
cttctttctgccacttctcttctatataataacacccacttctttggttcaacttcccttcaattcatcacataataacaacactataaacattgattttggctctttgttgcagccgagaccaaaatgtctttcactgcaaccaagttttcaccttctcctctccctctcacttccaccacccccagatccaatgacaagcctctctctttctccttcgatcactccaaacccaacccttcttcctccttccttggatccactcgcaagcttcttcgcttcaatgctctcgctaggcctcatgctcaccctcgtgcttcttcttcccctgctgctgctgttcttctcgaacgaacctccaatctgcttgtcacaaaagaggaagggttggaactctatgaagacatgatattagggaggttttttgaggacaagtgcgctgagatgtattataggggcaaaatgtttggttttgttcacttgtacaatggccaagaggctgtgtcaactgggttcatcaagcttctgaagaaggaagattctgtagtgagcacctacagagatcatgttcatgcattgagtaagggggtcccgtctcggcaagtgatgagtgaactgtttgggaaggcaacagggtgctgccgaggtcaaggtggttcaatgcatatgttctcgaaagagcacaacttgctcggtgggtttgcctttattggtgaaggaattccggtggccaccggggctgcattttcgagcaagtacagaagagaggttttgaagcaggcagattgtgatcatgtgacgttggcattttttggagatgggacttgtaataatgggcagttctatgaatgcctgaacatggcagctctgtggaaattgccaattgtgtttgtggtggagaataatttgtgggctattgggatgtcgcatctcagagcaacctcagatcctcagatatggaagaaagggccagcatttggaatgccaggggttcatgtagatgggatggatgttttgaaggtcagagaggtggcaaaggaggcagttggaagggctagaagaggtgagggaccaactctagtggaatgcgagacctatagatttagagggcattcattggctgatcctgatgagcttcgtgaccctgctgagaaggaacactatgctggtagggaccccatcactgcattgaagaaatacctttttgagaacaatttagccaatgagcaagaattgaaggccatagagaagaaaatcgacgagatcctcgaggacgctgttgagtttgcagacaaaagccctcttccaccccgcagtcagcttctggagaatgtctttgctgatccaaaaggctttggaatcggaccagatggaagctatagatgtgaggatccaaagttcactcaaggcacagctcatgtctaatcttttcttgcttgcaagttggaactttcatttttgtatgactcttctttttcatatgccttatttagtgatcaaatgttacacaatgtctaatataaacaggatttgctctttaggttggtaatttggttttacgtgt

SEQ ID NO: 2435 - DNA, 824 bp, Glycine max
cctcgagccgaatcggctcgagcgagctcgagtgatgctgaaaaccacagttccgaagccggtcttcggcttgtggaaagcttctcagcatgcagtgttgagtctgttcagccaactaaggttgattcccctcctagcagtgtgtcaacaaatggggtttcttccccttcagtgccagcaaactcagaatcatctgatgctgctgcttccaagtctcccattcaggagcaagtttcaggcaccaaagaggacaaaaatgtggataccaaagatagtgagagtgattcctcaagtggggttcctagtgaatcattccctaagcctgttgtgactgtgaacattgaacccgagccaaaggtcgtgcagcaggatatagtagacatgtacatgaaaagcatgcagcaattcactgagtcactagcaaaaatgaagctccctatggacttggaaagtgaaccaactagttcaggaaattcaaccactgagcagaaactacagccatcaaagagcaataattctcgtgtgttttatggcagcagagctttcttctgatcttttgcttcccttgttcaagggaatacgagcagtcactgtagattcttagaagaaaactgattttagtagtgaagtgaaataatcaatgtactatcctgtgtggtttccccttctgtatttcatcacatgttggttgtagcttacagggaatataactttgtactctcacaagcttgttgctatcttaactgctacctgaacttgggagacttggaagcagcagcatcagatgattctgagtttgctggcactgaaggggaagaaacccc

SEQ ID NO: 2436 - DNA, 748 bp, Glycine max
tttgaaaaaccatatatgaagagctccatcttattggtatccctacaacgtaataataaccaaaacagcagagagaagagaaggtgtagacaaacacaatctctaatggcactcaggatgtgggcttcttccactgccaatgcactcaaagtctcttctacctccagacctcatctcttgcatcctttttctttctccagatgcttgtcttccgtcttggatggacttaagtatgcagattcacacgaatgggtcaagcacgaaggctcagtcgccaccattggtatcactgaccatgcccaggaccatcttggagaggttgtgtatgtggagctgccagaatcaggtggcacagttacccagaagtctggcttcggagccgttgaaagtgttaaagcaacaagtgacataaactctccaatctcgggggagatcgttgaggttaacaaaaagctcacagaaacgcctggcctggtcaactcaagcccatacgaagatggatggatgatcaaagtaaagccaagcgatccatctgaattagattccttgatgggtccaaaggagcacacaaaattttgtgatgaagaagatgctcgtcattaaagtttgaattgaattggctcctgcagttatgtgtgggactgactgttcttcacatgtttatgatcttattaccttctgaacaggtttttaatatgcaacagaactgtttctttccatttttacttcccctgctattgtctcttgt

SEQ ID NO: 2437 - DNA, 1830 bp, Glycine max
tttccttctttccccacctaaatccttatgattttaaaatgtacaaattgatctacatgcagcgctgcagcatcatccatggctgctttaaaacagccaacaattagagttgttgctattattgctgaaggagtacccgagtcagacactaagcaattgattgcatatgcccgatcaaacaataaggttgttattggcccagccacagttggaggcattcaagcaggtgcttttaaaattggtgacacagctggaacaattgacaatataattcagtgcaagctctacaggcctggatctgttggatttgtttctaaatctggtgggatgtccaatgaactatacaacactattgcccgcgtaactgatgggatttatgaaggcattgctattggaggagatgttttccctggttccacactttctgaccatgttttacggtttaacaacatgccacaggttaaaatgatggtagtacttggggaacttggtgggcgtgatgagtattccttagtggaggccttaaaacaaggaaaggtatccaaaccggttgttgcctgggtcagtgggacatgtgcacgactattcaaatctgaagtacaatttggtcatgcaggagccaaaagtggtggtgagttggagtctgctcaagcaaagaatcaggcactaagggatgctggagctgttgttcccacatcatatgaagcttttgaagtttcaattaaggaaacatttgataaattggttgaagatgggaagatcacaccaatcaaggaaatcacacctccaccaatccctgaggaccttagtactgcaattaagagtggaaaagtccgtgctccaactcatattatttccaccatttctgatgacagaggagaggagccatgctatgctggtgtacccatgtcttccattattgaaaaaggttatggtgttggtgatgttatctctcttttgtggtttaaacgaagccttccccgttactgtactcaatttattgagatatgcatcatgctatgtgccgaccatggtccttgtgtctctggtgctcacaatactattgtgacagcaagggctgggaaggacctagtttccagtcttgtatcaggtttgctaacaattggtcctcgatttgggggtgccatcgatgatgctgctcgctacttcaaggatgctcatgacagggcacttactccttatgagtttgttgaaggtatgaaaaagaagggaattcgtgtggcaggaatagggcacaggatcaagaatagggacaacaaagataagagagttgagctgctacagaagtttgcacgcacacattttccttctgtgaaatacatggaatatgctgttcaagttgagacctacacgctcacaaaggcaaataatttagttcttaacgtagatggtgcaattggatctcttttcttggatcttcttgctggtagtggaatgttcaccaaacaagagattgatgaaattgtggagattggctatctgaatggcctctttgtgctggcacgctccattggtctgattgggcacacctttgaccaaaagcgattgaagcaaccactttaccgtcacccatgggaggatgttctctacacaaagtgagaaagttttgtgcgactgtaagaactttggcatgcttcaaattagcaatcttttgggaaatcatgcacatctgaaatatgctggagtggttttgtagctgttagactagtgttgtacgatctattggtgaaaagtcatcttccatttgtaacttgtattaaatttcataaagagagaacttggtcatttttaaaattatatttctcttga

SEQ ID NO: 2438 - DNA, 948 bp, Glycine max
cccacgcgtccggtgcggcagacgagtgtctcggttatggaggatcaaagcggggaagggggggtaagggtcccttttccttccgccgctccgcctctcgccgccgacccaagaagaccgccgccccgcctcctcctccgtctccgccgcagcctccctacgcggccggaatcgccacctcacccgacgacaacaacaaccgtctcattgctgccggcgccggcagcagcgccttgacgaaggcgaagaagaagaccggcggcgcccgcttgtggatgaggtttgaccggtcgggccggtcagaactggtggagttggagaagaacgccatcatccgccacgcagcgattcccgctagagacctgagaatcttgggccccgtcttctcccactcctccaacatcctcgctagagagaaagcaatggtgggtaatttggaggttataaaggcaatcgtgactgctgaagaagtgttattgcttgatcctcttcggcaggaggttcttccctttgttgagcaactcaggcaacagcttcctgggaaaagtcaacctaaacttctcggcggcgcggaggagcaggaaggcgaaatgcatgtctctaatggcaggcaatggttgcctacgccggaggcggccgatggtttgcagtcagagcttccgtttgagtttcaagttctggagattgctttggaggctgtgtgtacttatctggactcgaatgtggcggaccttgagcgaggtgcttaccctgtgttggatgaattggctcggaatggtagcaccaagaatcttgaacatgtgaggagtttgaagagtaatcttacgcggttgctggcaagagtgcagaaggtgcgagatgaaattgaacatctgttagatgacaacgaagatatggcacaactatatttgacgaggaagtggttacagaatcaacaatttgaggagg

SEQ ID NO: 2439 - DNA, 598 bp, Glycine max
cgttcgcgtcacctcccaactcgccctcgactcacatccttgtccgattccgcgaacgagtcgagtgaatcgggttggtaagatctattctgtttcttcgtcatggcaaccggacaactattctcgcgtactacacaggctttgttttacaactacaagcaacttcccatccagcggatgcttgattttgacttcctttgcggcagggaaacaccatcagttgctggaataattaaccctggttctgagggatttcaaaaacttttttttggtcaggaggaaattgccatcccagtgcatgctaccgttgaagcagcttgtgctgcacatcctactgccgatgtcttcatcaactttgcttcatttagaagtgctgcagcatcatccatggctgctttaaaacagccaacaattagagttgttgctattattgctgaaggagtacccgagtcagacactaagcaattgattgcatatgcccgatcaaacaataaggttgttattggcccagccactgttggaggcattcaagcaggtgcttttaaaattggtgacacagcttgaacaattgacaatataattcagtgcaagctctaca

SEQ ID NO: 2440 - DNA, 411 bp, Glycine max
agcccacgcgtccgctctttcattatttaataacaattattattctcaatgggcaagactcctttctcctttcgtcgctccgcctctcgccgccgccccaagaagaccgccgccccgccccctcctccctctccgccgcaacatccctacgcggccggattcgccgcctcacccgacgacaacaaccgtctcatcgccgccgccgccggcagcagcgccttgacgaaggcgaagaagaagaccggcaacgtccgcttgtggatgaggtttgaccggtccggccggtcagaactggtggagttggagaagaacgccatcgtccgccacgcagcgattcccgctagagacttgcgaattttgggccccgtcttctcccactcctccaacatcctcggtattccaatccccccc

SEQ ID NO: 2441 - DNA, 282 bp, Glycine max
ttttcaactcgccctggactcacttccttgtccgatgccccccaacgaggccagtgaatcagatctatctgcttcttcgtcatggccaccggacaactattctcccgcactacacaggctttggtttacaactataagccacttcccatacagcggatgcttgattttgacttcctttgcggcagggaaacaccatcagttgctggaataattaaccctggttctgagggatttcaaaaactttcttttggtcaggaggaaattgccatcccagttcatgcc

SEQ ID NO: 2442 - DNA, 625 bp, Glycine max
acttgttgtccctattcttgatcctgtgccctattcctgccacagcaatttgcacgaacacattttccttccgtgaaatacatggaatatgctgttcaagttgagacctacacactcacaaaggcaaataatttagttcttaacgtagatggtgcaattggatctcttttcttggatcttcttgctggtagtggaatgttcaccagacaagagattgatgaaattgtggagattggctatctgaatggcctctttgttttggcacgctccattggtctgattgggcatacctttgaccagaagaggttgaaacaaccactctaccgccacccatgggaggatgttctttacacaaagtgagggggttctgtatggcaggaggacccttgttatgcttcaaattagcatcttttgggaaattatgcatcatgctggaatgatttagtttttagctgttcgacgagtatacgggtctactggtatctagccatcttcagtttgtaagttgtattaaaaattcattcatgagataacttggtcaaattgaaaattattccttctcttgatgaagatcttctctgttctactatgggttcaaaagaaaatggtcaccaaattcgagcgc

SEQ ID NO: 2443 - DNA, 513 bp, Glycine max
agcaactccatcgatgttaaattatctaaaaataccattgaaactggagatgattgtgtttccatgattcaaggagtcaacaatattactatcaacaaactgaaatgtggccctggacacggtcttagtattggaagtcttggaaagtatgcggatgagcaagaagtgaaagacattcgcgtcaagaactgcacgatggttggcacacccaatggcctcagaatcaagacatggccagagtcctatccacgttcagcatcagctatcaccttcagtgacattgtcgtggaaaatgttaaaaatcctatcatcattgaccaagagtatgattgcgaaccagcaaactgccaaaagaagccttcacttgtaaagataaacgatgttgttttttgaaacataaggggaaccacacttttaccaattgcagtggattcaaagagtagcaagcagttcccatgccaagatgtttaacttaagaacataaacctgaaccttggacccaagccgttgggt

SEQ ID NO: 2444 - DNA, 651 bp, Glycine max
ctcccttatttttaattgctgtaacagtagtagtatttattttgagctttccatttttctctctttttcaactttcaattcaagcagctttggaaaaaccaaccagccaacccgtcgggtttttttcacctcctgaaatttgtgttggtttggtaatataggccttggagtggaaattcaatatttgtatggcagccagagaaggtattagttctggggttacagtgataggtgcagaagctccatcagcttaccatgtggcgccaaggagtgaagctccaaaccaggttcatgtccctgatagtggtggtgctgctgctacagctgcacctgttggtgtctcacctgtgagtgcggtgttggatggaacagcagttaagaagaaactgggtacgccgacgaaatatgggcctgatgggtcagtcactatcgcagtgtcaccaatgccaatttcgtcgtcggctccgccttctaatgacttttcctccgggaagcgggggaaaatgcgggggatggactataagccatcaaaaaaagttggtttggattatctaggtgacttgaatgcatgctctgatggtacaaattttatgccgcatatcatcactgtcaatgctggcgaggacatcacgatgaaggtgatatcctttt

SEQ ID NO: 2445 - DNA, 363 bp, Glycine max
gttaagttctggagggaactgaaaagaaatcttaatacaagattacaccttcagaagagtcttgctgaagtgtgtgcatggacaggtcatgatctttgtattctgaacagtattcagagtttgatgtcgattttggttagattgtgtagacttaggagtgaatagtttgatatatgcatggaaggaagagaagggataagttctggggttacagtgataggagcagaagctccatcagcctatcacatggcaccaaggagtgaagctccaagccaggttcctccacctgttcctgaagcaacagctggagctattggtgtctcaccagcgagtgtgggattggatggaacagcagctaagaag

SEQ ID NO: 2446 - DNA, 593 bp, Glycine max
  unsure (1)..(593): unsure at all n locations
tttataattgctgtaacagtagtatttattttgagctttccatttttctctctttttcaactttcaattcaagcagctttggaaaaaccaaccagccaacgggtttttttttttttcacctcctgaaatttgtaagttgctttgaattgaattttccagaacatatacactgttttcttcttcttcttcttcttcttcttcttcttctttgtgttttttctttctttcattttgtttttgtgttttcattttctggggtgagttcagttgagttaatgagtatcttgttgagctgaaaaagaaatctgaatacaagttttcagctttggaagaagcttgctcaagtgtggaatcacagtgacaggtgttggtttggtaatataggccttggagtgaaaattcaatatttgtatggaagccagagaaggtattagttctggggttacagtgataggtgcagaagctccatcagcttaccatgtggcgccaaggagtgaagctccaaaccaggttcatgtccctgatggtgggcggtgctgctgctacagctgcacctgtttggtgtctcacctgtgagtgcggngttggatgga

SEQ ID NO: 2447 - DNA, 424 bp, Glycine max
acgcgtacgcagaattcggatccagcttctgctgtaacagtagtaattattttgagctttccatttttctctctttttcaactttcaattcaagcagctttggaaaaaccaaccgcccaccgggtttttttttttcacctcctgaaatttctttggaagaagcttgcacaaggtggtgtcgcagagacaggtgttggcttggttatataggccttggagtgaaaattcaatattttgcatggaagccagagaaggtattagttctggggttacagtgataggggcagaagctccattagcttaccatgtggctccgaggagtgaagctccaaaccaggttcatgtccctgatggtgggggtggtgctgctgttacagttgcacctgttggtggctaacctgtgagtgaggggttggatggaaca

SEQ ID NO: 2448 - DNA, 1209 bp, Glycine max
ctgacactaaactaataataggtgtgtctcacagtgagagtttaggataagagaaaagatatgcgagatatatgcgccagagttgaagcgagaaggaagggtccgcgcgccatggctggcatcaccacctcccccttcaaactctctcactttccgactctcttctcttcttctgattccaaactcttcggccttcccctctccaatccctattccctcaaattcgacccttcttctctctccactacctctctctcctacgtcaaagcccgctactacggcggcggcggcggccctccccgctcccccaacgactcccgcttccgcaagtcctccgattccgacgacgacgataaagctctcgacctctccactctcaggtcagataccgtgaggcttattgatcagagccagaatatggtcggagtagtgtcaattgatgacgccattcaaatggctgaagatgtcgaacttgacttggtaatattatccccagatgcagatcctcctgttgttagaataatggattacagcaaatatagatatgaacagcaaaagaagaaaagaggacagcagaagaaaagtgctgctaatcggatggatttgaaggagctcaaaatgggatacaacatagatgaacatgattattcagtgcgtttgaaagctgcacagaaatttttgaaagatggcaacaaggttaaggtcatagtaaacctcaagggtcgtgaaaatgaattccggaatatggctattgcgcttattacacgttttcagaatgatgttggggagcttggaatagaggagacaaaaaacttccgtgacagaaatatcttcataattttggttccaaataaagttgctgtgcagaaaactcaagaaccaccaaagaaaagagacaagtcagctgcagatgaagtctccgttagtgcccaagcataaccgcaaacttccacgctagtttctaattgtagaatggatattgtgagtaacttgtattggtccgagttggaaaattttccgagcattatataattgtataattcatgtgcaataatagcatataaattcacgagaattttaattatagaggcagccttggccttttcaacacaagtttctgaagggatacatcatatatcataaaagaacaatcgcacgtggataatttatgctcattttaatttttgaagttgacagcaatatttgcat

SEQ ID NO: 2449 - DNA, 440 bp, Glycine max
attcattccaatgggatcagtttgtgaagagcgatggataacagttaccatcacaacggtggcattggtgatagcttcttcagcaccattattattggcggcatgcccttacacctccatcttcagcttcggtgattcacttgcagacactggcaacttgtatttcagcccctacccacccaccaaccactgccttttccctccctacggcgaaaccttctttcaccatgtcactggacgctgctccgatggccgcctcatcatcgatttcatcgctgagtcactggggcttccgcgggtgaagccgtacttgggattcaagaaatttgggggatggagtatggaagagggagcaaattttgctgttattggagcgactgcgctagacttcagtttctttgaagagaggggcatttctattccaaccaattattctttga

SEQ ID NO: 2450 - DNA, 377 bp, Glycine max
cataagcccaataataataatcttcagctcagctccacgaaaagcaaccttaataatcttaggaagtgataaatcaaaaatccaactaagaaccgagctagttttccttttacgtcctctgattccggctacgtactcgcacttcactttccttactcttatcgagagtgaggtcatttaagcaattgtatcccgtgtcgtgtgatttgtaagctgctacagtcagaaaacgaacagaagacaccaaaactgttgcatttttttgccgaaggattaccaggaagcaaccatggatgttgatgcacagccaacgatggatgaaacaattctggttggtgatgatttaatgacaggtcctccatcacctgtagtaccac

SEQ ID NO: 2451 - DNA, 564 bp, Glycine max
gaaattgtctttgtggatgctggggttgctcaaattgacattgaaactaagaagatgaaagaagagcaaaaaatgaaagaagcacaggcaagagcagtggcagagcatggagagttagcactaattactgtagaaggtatccagtctgccaaggaagacagaatagcattgaggccaccaatgttgcaggtggttcggttggcttcatttcagcatgctccttcagttccacctttcatatcattaccaaaacaatctagagttgatagtgatgactcttggatggcaacagaagagagaaaggcaggtgaggtggcagttggtggtggtggggtgtctgtggcagttactcgttttccaatggagcagaagcgtcctgttgggcctcttgtggttgtaggtgtcagggatggagttctttggctaattgacaggtacatggttgctcatgccgtatccttgagtcatcctggtattcgttgccgatgtcttgctgcttatggtgatgctgttagtgcagtaaaatgggcaagtagacttggaagagaacaccatgatgattta

SEQ ID NO: 2452 - DNA, 843 bp, Glycine max
gatcccaagctcacacaccaaaccaaagcaagaatagtgttctaagagtgagcaacttcaaacaccatagtgaaatggcttccaaggctgcacttctcttgtgtctcaatgttctcttcttcactgtggttagctccacatatgtgccatgcaacccaccccccaaaactccaaaacacccacctgtcccaaagccaccttccccaaagcaagcaagttgccccaaagacactattaagtttggtgtgtgtgctgatgtgttaggtttgatcaacgtgcaacttgggaagccaccaaagaccccatgctgcaacctcattcagggtcttgctgatcttgaagctgcagtgtgcctctgcactgctctcaaagctaatgtgttgggcatcaacctcaatgttccagtgaacttgagcttgcttctcaactactgtggaaagggtgttcccaagggattcgtctgctattaaatcaacacttctataatgtgtagtttcctaaagttaagtatgcttaaggttctattttgctatattggttatttattcataatattctgtgtattttggtattctgtttggcacgtgccatttaatctgtgcttgtttttctgttgagcaagcttcaaatgttcgttcaacgaaaagtaacacgtactcttaggcactcttaggaaacgaacatttcgttcgtactagcttggtcattattattgtggtgatggttaaagcatggaaggctccttggtcttccctgtcagcctcactagtcctttgtaatctaagtgaaatttctactaattaataaaagttctatatttaagctaaaaaaaaaaaaaaaaaa

SEQ ID NO: 2453 - DNA, 705 bp, Glycine max
  unsure (1)..(705): unsure at all n locations
nnnnnnnnnnnnccaccatcttctgaaaaccgaattatcatttattaactgtaacttgctttggaacaattcaagttcactaacaacatccatgaaatccaatcattaaaaattggaaaaccaaaccaaaccaaaccaaaccaaacttattccaacaccactcatcaaacagaaaaacaatccaaactttcaaaactcacaaactcaagaacaacttgaaattactactaacaaaaacaagaccaattggtcaaaaaccatgaatcttgatctggtccttcctgacaaggccagcctgaacgaggaagtgggagacgttcttacgctggtcgccttggagttggatgatcttgccaagctccttgtcctgcaccacggttccgttgcagcagaactccttcttgaggtccttgaggatcttctcgtagctgaactccttcttcagcccttgcactgtggtcagactcttcttcccattcctctgctgaattcgaatatgcacatactcctttgctccgggggcatccgattctctcgcctcggcaaacgggtcgaatggggtggggacctggatttccaaatcaaccatgtactttgcttgttggagacttagtaacaccaaacacagatagcttctagaagagagagaaagaggcttcgagagacttgagaagcaaacaaagagggaggcggacgcgtgggcga

SEQ ID NO: 2454 - DNA, 643 bp, Glycine max
cgaagaggttaataatccgcgggcgccccttttttttttttttggtccatgaaagcacaacatgaagtagtaatatatataaccactctcaaagactattcttggattttcaatcatacagaaagaaaatgacaaaatattccaaactcaaactccttacttatttcataaacgctgccataggtttaatttcataatagaagaaaggtggtagctagtggtagtgggttaaaaaccatgaatcttgatctggtccttcctaacaaggcgagcatgaatgaggaagtgagaaacgttcttgcgctgatcaccctggagttggataatcttgccaagctccttgtcatgcacaacattgccattgcagcagaactctttcttgaggtctttgaggatcttctcgtagctgaactctttcttcagcccttgcactgtggtcagactcttcttcccattcctctgttgtatgcggatatgcacatactcttttgccccgggagcatctgtttcttttgcctccgcaaatgggtcgaaagtgctcgtagggatctgataaatacccacttcaaccatatatatatgtacactaatcaccaccacctagctgtgagaaaggaggacttgtaaacgagccgctcgagcc

SEQ ID NO: 2455 - DNA, 484 bp, Glycine max
gtcagaggtatagtgttctacgagtgcggaacttgtgagacatggcttccaaggctgcacttctcttgtgtctcaatgttctctttggcactgtggtgagttccacagatgtgccatgtaatccaccccccaaaactcccaaacacccacctgtccccaaagacactattaagttcggtgtgtgtgctgatgtgttaggtttgattaatgtgcaacttgggaagccaccaaagaccccatgctgcaacctaattcagggtcttgctgatcttgaagctgcagtgtgcctttgcactgctctcaaggctaatgtgttgggcatcaacctcaatgttccagtgaacttgagcttgcttctaaactactgtggaaagggtgttcccaagggattcgtctgctattaaatcaaacacttataatgtgtagcttcctattgctatattcgtcattcatcattattctgtgtatttcagtatttgtgccc

SEQ ID NO: 2456 - DNA, 620 bp, Glycine max
gtcccatccaacacttgtctgttttcccttctttccgtttccgggatttcggtttctctccctattttatccccagaaaatggaagttcgccggcgagtcctccgtcccgctcccgccggcgaacccttgaagcccaaacaggacccacacccacactcccagcagcaatcgtacctcaccaacgccgtgttcttcgggctgttcttctcgctggcgtacttcctcctccaccgatggcgcgagaagatccgcacctccactcccctccacgtcgtcacgctctccgagatggctgccatcgtctccctcatcgcctccttcttctacctcatggccttcttcggcattaccttcatcctccacccattccttaattaccgctcttcccccgacgacgacctcgacctccacattcccaaattacctgtccccactccctcctcccctgccccccctccaaaactccctcctcccccactccctcaccacgacgaggacatcgtcctcgccgtcgtgtccggctccatcccctgctactcgctggaatcgcggctcggcgattcccaccgagccgcgtcaattcggcgcgaggcggtggagcgtatcaccgggaggtcta

SEQ ID NO: 2457 - DNA, 713 bp, Glycine max
cacacactaaaccaaagtaagaggtatagtgttctaagagtgagccacttgtgagcacatggcttccaaggctgcacttctcttgtgtctcaatgttctctttttcactgtggttagttccacatatgtgccatgtcatccaccccccaaaacttcccaaacacccacctgtcccaaagccaccatccccaaagctagcaagctgccccaaagacactattaagttcggtgtgtgtgctgatgtgttaggtttgattaatgtgcaacttgggaagccaccaaagaccccatgctgcaacctcattgagggtctcgctgatcttgaagctgcagtgtgcctctgcactgctctcaaagctaatgtgttgggcatcaacctcaatgttccagtgaacttgagcttgctactcaactactgtggaaagggtgttcccaagggtttcgtctgctattaatgaataaacacttctataatgtgtagtttcctaatgtaaagtatgtctcaaggttctatttcgctatattcgttattcatcatcctttgtactttgtacttttgtattccgtatagccaacgaacatttcgttcgtaattggttattattattgttgtgatggttgaaacttgaaaggcttcgatctttcttgtagtctcacttctcttgtgtattctatgtgaaaaattctactaataaaaattctgcatttaagct

SEQ ID NO: 2458 - DNA, 694 bp, Glycine max
  unsure (1)..(694): unsure at all n locations
caccatgtgccacgtcccttcgaaggcgctagtgatggtagcgccatgcatgacatgctggtcgccttggagttggatgatcttgccaagctccttgtcntgcaccacggttccgttgcagcagaactccttcttgaggtccttgaggatcttctcgtagctgaactccttcttcagcccttgcactgtggtcagactcttcttcccattcctctgctgaattcgaatatgcacatactcctttgctccgggggcatccgattctctcgcctcggcaaacgggtcgaatggggtggggacctggatttccaaatcaaccatgtactttgcttgttggagacttagtaacaccaaacacagatagcttctgcagaggaacaaaccaccaaaattccatgtcaattgtacaatacaagaagaaatcaaagagttcataaattggctatagtcatccaccatattggggaaccaatgaatcatgcatcaaacttgatacacatgaacataactaagaaacaattcttcaagtattgttctctgatcagaattagagtttcaactcggtatcaaaattaattttgcaaccctaattatctagattaccagtgtgtgaacaccaattatgattgaaaaaacagtaccaaaaaagcaccctagaatataaacgggatctaagttcatcatatttataatc

SEQ ID NO: 2459 - DNA, 291 bp, Glycine max
caagttcactaacaacatccatgaaatccaatcattaaaaattggaaaaccaaaccaaacttattccaacaccactcatcaaacaaaagaaacaatccaaacttttcaaaactcacaacaacttcaaattactactactactaccacaacataaacaagaccaatcgttaaatcaaaaaccatgaatcttgacctggtccttccggacaagaccggcctgaacgaggaaatgggatacgttcttgcgctggtcgccttggagttggataatcttgccaagctccttgtcct

SEQ ID NO: 2460 - DNA, 846 bp, Glycine max
ggtgtgagttcattaacatatacaaattctctgtgttgtgttgtgtacttgttacatgacttattaattgtgttaagaaatttaagtgaggagctagagaatgatgatgaagtctgctatgtgtgcagtggtggttgtagcacttcttcttctggcggaggtggggcccatggctgaggctgtgacatgcaccccaacagagttgagtccgtgtcttccagcaatcacttccggtgctaaaccttccaatgcttgttgcacgaagctgaagcagcaaaaaccatgcttatgtggctacctcaaaaacgctagcttgaagcagtatgttaactctcctaatgcccgaaaaaccgttgcttcttgtgggattccctttccaacttgttaattaattaagccttcttataattaaagtgtgggatatatatatatatatagataaacagtttaatttatacacactttgatcctacaaagcatcttgacacaagcattcaataggatttcaccactttatcgcaacattttaacatgatgcggtaataaagtaaattcttgttgaatatttggataacgatgttatatactcatagtttgtgtgtataaattaaacttatatttattatttactctatatatgtcactctacgtttgtgtgatatattatacagttaagtatttagctatctttgaatatgttaaggatgatcatatcagataaagctctctagagttgaatatgaccagtatacatgttgtatccagggaattatatgtgttaagagctataaataaataaataaataaataaataatgatgttctagagtggcgtatatgtcctctc

SEQ ID NO: 2461 - DNA, 846 bp, Glycine max
  unsure (1)..(846): unsure at all n locations
gaagacgacagaagggtgtgtgagttcattaacatatacaaattctctgtgttgtgttgtgtacttgtgttaattgtgttgttgttgtaggaaatttaagtgaagagagaatgatgatgaagtctgctatgtgtgcattggtgcttgtggcactggttgtggttgaagtggggcccatggctgaggctgcggtgacttgcaacccaacacagttgactccttgtcttccggcaattaattcaggttctgcaccttcgagtgcttgttgccagaagctgaaggagcaaaagccatgcttctgtggctacctcaaaaaccctagcttgaagcagtatgttaactctcctaatgccaaaaaaaccgttagttcttgtggtattgcctatccaacttgttaagcacctcttatatatatatataaaatgtgtgaacaatatatatatattgattaaaaaatatagtttaatttatatacacactttgatcctataaaaacatcttgacacaagcattcaatagaatttcaccactttatcatgacattttactataatgatgtggtaataaagtaaattcttgttgaatattttgtataaagatgctttatactcatggtttctgtgtataaattaagcttatatatatttacactatatattgccactttacgtttgtgtgatattaattatacagtcaagtatttattagctatctttgaatatggtgtatacactagtatacatgttgtatccagggaattatggttaaagagctatataaattgagaaataatgatgttctagagtgacatatcctctcttgtcgtttttgaccnnnnnaaanaan

SEQ ID NO: 2462 - DNA, 454 bp, Glycine max
  unsure (1)..(454): unsure at all n locations
ggtgttaagaaatttaagtgaggagctagagaatgatgatgaagtctgctatgtgtgcagtggtggttgtagcacttcttcttctggcggaggtggggcccatggctgaggctgtgacatgcaccccaacagagttgagtccgtgtcttccagcaatcacttccggtgctaaaccttccaatgcttgttgcacgaagctgaagcagcaaaaaccatgcttatgtggctaccctcaaaaacgctagcttgaagcagtatgttaactctcctaatgcccgaaaaaccgttgcttcttgtgggattccctttccaacttgttaattaattaagccttcttataattaaagtgtgggatatatatatatatataaattaaacttatatttattatttactctatatatgtcactctacggttgtgtgatatattatacagntaagtatttagctatct

SEQ ID NO: 2463 - DNA, 797 bp, Glycine max
cccacgcgtccgaagaaatttaagtgaggagctagagaatgatgatgaagtctgctatgtgtgcagtggtggttgtagcacttcttcttctggcggaggtggggcccatggctgaggctgtgacatgcaccccaacagagttgagtccgtgtcttccagcaatcacttccggtgctaaaccttccaatgcttgttgcacgaagctgaagcagcaaaaaccatgcttatgtggctacctcaaaaacgctagcttgaagcagtatgttaactctcctaatgcccgaaaaaccgttgcttcttgtgggattccctttccaacttgttaattaattaagccttcttataattaaagtgtgggatatatatatatatatatatatatatatatatatataaacagtttaatttatacacactttgatcctacaaagcatcttgacacaagcattcaataggattgcacgcggtttatcgcaacattgggacatgatgcggtaataaagtaaattcttgttgaatatttggataacgatgttatatactcatagtttgtgtgtataaattaaacttatatttattatttactctatatatgtcactctacgtttgtgtgatatattatacagttaagtatttagctatctttgaatatgttaaaggatgatcatattctctagagttgaatatggtgtatacaccagtgtacatggggtattcagggaattatatgtgtttagagctataaatatattaattaattaataatgatgttctagagtgacggatatgttcttttt

SEQ ID NO: 2464 - DNA, 534 bp, Glycine max
cggcacagctgtcagaatacgacagaacggtacagctgtgaggatacgagagaacgagaatcatgtcatgttatttctttttttctcgtccatcccgtaaccatgtctcagactgttgtcctcaaagttggtatgtcatgtgaaggatgtgttggagcagtgaagagagttctaggaaaattggatggtgtggaatcatatgacattgatttgaaggaacaaaaggtggtagtgaaaggaaatgtccagccagacacagttctgcagaccgtttccaaaactgggaagaagactaccttctgggaaggtgaagcagcagcatctgaaactagcacagcaactgcctaaaacatttcgctctattctgttcagaagaagtagctgcgtaaatcaaatactattttatggacttgaaataacgatgggacttgttatctggtgtattttagtgtgtcacaacaaagattgctgtatatgactgctttcaacatctgtgctactgtattaatgtgcttttattgagagtttaacttc

SEQ ID NO: 2465 - DNA, 440 bp, Glycine max
ggtctcatctcacgccacccaaagttgtctttcgacctttctctctcaaaacctttgcttttgcgttggctatatatatataaaactaacttccccaaaacccaatcatatatcatttcatttctttttttctcgtccatcccgtaaccatgtctcagactgttgtcctcaaagttggtatgtcatgtgaaggatgtgttggagcagtgaagagagttttaggaaaattggatggtgtggaatcatatgacattgatttgaaggaacagaaggtggtagtgaagggaaatgtccagccagacacagttctgcagaccgtttccaaaactgggaagaagactaccttctgggaaggtgaagcagcagcatccgaaactagcacagcaactgcctaaaacatttgcctctattctgtgcagaagaagtagctgtgtgaatca

SEQ ID NO: 2466 - DNA, 683 bp, Glycine max
cgggaccaaagactcccttatccaagtagatcattcgaacttgctcattgctctcgctgtagaatcgattggcttcagagagatggtatacttctgcttgagctggataggttactgaggccaggaggttatttcgcgtactcatctcctgaagcctatgcacaggatgaagaggataggaggatatggcgagaaatgagcgctcttgtggagaggatgtgctggaaaatagctgctaagaaggatcagactgttatttgggtcaagcctctcactaatagctgctacttaaagagattgcctggtactaagcctccactctgcagatctgatgatgatcctgatgctgtttggggagttaaaatgaaagcttgcatctcacgttattcagatcaaatgcacaaagcaaaaggaagtggtttggctccttggcctgctcgattgactactccacctcctcgtctggcagaaattcactattctactgaaatgtttgagaaggacatggaagtttggaaacaacgagttcctaattactggagcaagctagccagtaagattaagcctgacacaattcgcaacgtgatggacatgaaggcgaatttgggttcatttgcagctgctttgaaggacaaagatgtttgggttatgaatgtggtgccagaccatggaccaaacactct

SEQ ID NO: 2467 - DNA, 367 bp, Glycine max
ctcggcaattccattctctttgcctgcctagtttcaattctgtccaatttccaaaaccaaaacaagccacacaagttcatggcaactcccaataacagactctctcttgccatggagagaactgggcaatgggttttctctcaagacataccaactgatgttatagtggaagttggagaaacaactttctctctgcacaagttcatgctagtggcaaaaagcaactacataagaaaactgatattggaatcagatgagagcgaactcaccagaatcgacctctctgacataccaggaggcccttcaatcttcgagaaaaccgcgaaattctgttacggcgtcaacttcgagataacggtccacaacg

SEQ ID NO: 2468 - DNA, 2153 bp, Glycine max
actttccccatcccatgtgtctccctgtcagagtatgatatgaggaactaactctataaataaaactttctgaatcaaacacatcacacacacgtaacttcatctgggttgcagggaaaaagaaaaaggaaaacaatgggttccgataatcaccaaacttggagttcttgaaggagatcggtttgggctcctccaacattggttcttacattaatggccaatggaaagccactggttcttctgtcacttctgttaatccttctaacaatcagagtatagctcaagtgactgaagcgactttgcaagattatgaggagggattgcgagcttgcagtgaagcagctaagacatggatgactataccggcaccgaagagaggtgagattgtgagacagattggtgaagcattgagggccaaattggatcctttgggtaggctggtgtctcttgagatgggaaaaattctcccagaaggaattggggaagttcaggaaattattgatatgtgtgattattgtgttgggctaagcagacaattgaatggatcaattataccatcagaacgtccagatcatatgatgtttgaggtatggaacccactaggaatagttggtgtaatcagtgctttcaactttccatgcgctgttctaggatggaatgcttgcattgctttagtctgtggtaactgtgttgtgtggaagggtgctccaacaactcctttgataactattgctgtgacaaagctagtagctgaagttcttgagaggaacaaattacctggtgcaatattcacctctttctgtggaggtgctgacattggtcaggcaatagcaaaagacactcgcattcccctggtttcatttactggaagttcaaaggttggcttgatggtccagcaaacagttaatgagagatttggcaaatgcttgcttgagttaagtggtaacaatgcaataatagtcatggatgatgcagatatcaaattggctgtacgatctattttgtttgcagctgtgggtactgctggtcagcggtgtacaacttgccgtagactgtttctgcatgaaagtatttacgcagatgtactagaccaacttattggagtctacaaacaagtcaaaattgggaatcccttggagaaggggactctagttgggcccttgcatactcctacttcagtggaaaactttcagaagggtatttcagtcataaaatctcagggagggaaaatcctaaccggtggatctgtattagagtcgggaggaaattttgtacaaccaacaattgttgagatttctccagatgctcctgtagttaaagaagaattgtttggtccagttctgtatgttatgaaatttcagactctggaagaagcaattgccttgaacaattctgtacctcaaggattaagtagttcaatctttacccaaagacctggaactatattcaagtggattgggccacgaggtagtgattgtggtatagtgaatgcaaacatacctacaaatggagctgagattggtggtgcctttggtggagaaaaggcgaccggtggtggccgtgaggcgggaagtgactcgtggaagcaatacatgcggcgttctacatgtaccatcaattatggaagtgaactaccattagctcagggaataaactttggctagaaagctatccttgcaaatgaaactgcacaaataatgcgattttgcagcccgaaagagagatgttagtctggctgacatgggttcaaagtgttgtattaacaagatctgcctgctgtaaggatggtaccttcacatgacagtttcaatgtataagatatcttaaatcttaaataaatttagctgcaaaagttcttatttcccagtcaaaaaaaaaaagttttttttttttttttttacacaagtgtcttatatataatgtagactggaacctgagttgaggactcatgacaacgattaatattctcacacatattacagcaacaattaaagatcagggtgatatgtgatgattgatattgagatgtatataatagtgtcaattttttagatctttatttgtggttttttttttttacattatatatttatttgccgacaggcataaataaaccaatcgatttatatatggtctttatttttgtttaaaaa

SEQ ID NO: 2469 - DNA, 887 bp, Glycine max
aattgggagcaaaacaactttttacacaagtgttttatttttaatgtaaactggaacctgagttggggactcatgacaaccattaattttttcacacattttacagcaacaattaaagatctcaagataaaatgttggataataaataacacttggtttattaatttatcgactaagttctccgatgaagcctcaccacaggaattaccacgagcaagaggaatgcttatgatccaatcagtgacacaccaatcgaagcagccttttgatcacaaaatttcccaaagacattgcacaccttgttccaattcacatgagagtttcctttgtagccaaggataccgactgccgcagcggcgccgttgccggaaaagagcaaagccaccatgaatgtgtcgagaacagcgatcaatgtccacaagcctttgcttttacctctgtttacgagggcaaggagtagagacatggctgcatacgtgcatgctattgcattggtcaccagaaagtacacaaaggcagacatttggtgccacttagcagtaagaggaacgttcaaaggtggtaaggaatctgaaagctggatgggaacaaccttggtctgcttatcgaccgcaatgactatagcagcgacaagagtgactgtgaaggccaacagcctcagaagcaaatcactgacacctactactgcaactggttttgccaccatcacttctctttctttgctctcaaccccctccatcctattcctaacatcacacaaaactttattacaacacaagcacggatgcgtcttaaatactactactcatgtcatgacataagggggattttcattttccaagtaacttgctccaaagaaagtggaaaatctggaaaagaatactctc

SEQ ID NO: 2470 - DNA, 1033 bp, Glycine max
  unsure (1)..(1033): unsure at all n locations
ctttatgaatcaattccattcgattttgttgacctactaaatactaaattgtttctctgatttttctcatgcgtgaaaaaacatgcagctattataagttacaaagcttttcccctaaagaaggaagtgaagaaattgatacaccttgttttccatgccatcgcattaatacttggaatagttggaatttatactgccttcaagtttcacaatgaaagtgggattgccaatctctacagcttgcattcatggcttggaattggggttattgtcctttatggcattcagtggatatatgggtttgtgatctttttcttccctggtgggactccagacattagacgcgcctcacttccttggcacgcgctatttgggctgtttgtatttgtcttggctgtgggcactgctgctcttgggtttctggagaagctcactttccttgagaactcaggattggacaaatatggttctgaggctttgcttgtcaacttcactgccattatcacaatcttatttggtgcctttgttgtgttatctgctctagctgatgctcccccagcccctgcagcagatgactatgaagccatatagacacttgtaagtttgtatcatatttttattttatggaataatctcatgtctgctataaaagtttgtattgggagttggaggaaggaaataatttgttgtttgtattcttggatctaaagcttgtatttaatcatcaatttcaatatattaaccctaaaatgtgaaattagtcattgggttatatcagttnnnnnnnnnnnnnnnnnnnnnnnnnnnnnnnnnnnnnnnnnnnnnnnnnnnnnnnnnnnnnnnnnnnnnnnnnnnnnnnnnnnnnnnnnnnnnnnnnnnnnnnnnnnnnnnnnnnnnnnnnnnnnnnnnnnnnnnnnnnnnnnnnnnnnnnnnnnnnnnnnnnnnnnnnnnnnnnnnnnnnnnnnnnnnnnnnnnnnnnnnnnnnnnnnnnnnnnnnnnnnnnnnnnnnnnnnnnnnnnnnnnnnnnnnnnnn

SEQ ID NO: 2471 - DNA, 1311 bp, Glycine max
acgtaagatcgaaattcggctcgagagaaaaaaaaaaaaaaacagaacaacacagaaactcaaaaccaaaataaaattattatggatcacattcataggttacgttgttttgggacaatacccaaaattccttttctattgctactttccctgcttctcttcagtttcgttaacgcatccttcgacctcgctactatacccttcaacgacggctattctccgctcttcggagctagcaacgttgttcgctccgaggatggatacggcgtacaactccgcctcgatcgctacacaggttcgggtttcatttcctccagtatgtaccagtatggattcttcagcgcgagaatcaagttaccatcgaattatagtgctggtatttgcgtggccttttatacatcaaacggtgatgtgttcgagaagtcccatgatgagttggactttgaattcctaggtaacgttgccggaaaaccatggcggtttcagacgaacttgtacggcaacggcagcacaaatcgtggccgtgaggagcggtaccgtctgtggttcgatccaaccaaagaattccacagatacagcatcctttggaccgcaaagaatgtcatattttacattgatgaagttccaattagagaagtgctacaaagtgaagaaatgggaggtgactacccatcaaagccaatgtcattatacgccaccatatgggatgcatcaaattgggccacatccggtggaaaatacaaagtgaactataagtatgcaccttttgtgaccgaattcaaggacctagtcctaaagggttgctccgccgatcccattcaagaggttaccggcaccaagtcttgctccgaccaacacgccgatctcgaggctcaagactatgccggcgtgacccccatgcgccgcctcaccatgcggcggttccgtcagcgttacatgtactattcatattgctatgatactttaaggtaccctgtgccacaacccgagtgtgtcattgtaccctccgagaaacaaaggtttaaggagaccggaaggttgaaatttggcggcagtcaccaccggcaatctcgacggaggggccgtacaacaactccggtggatcataccgatcagggtgatatgtgatgattgatattgagatgtatataatagtgtcaattttttagatctttatttgtggttttttttttttacattatatatttatttgccgacaggcataaataaaccaatcgatttatatatggtctttatttttgtttaataaatgtgttttggtgttaaaaaaaaaaaaaaggaagggcggcc

SEQ ID NO: 2472 - DNA, 1247 bp, Glycine max
aaaaaaatatttgacaggttcatcatcataaccttcaatgaaaagaaatggctgaggcaagcattggcagcaaaagcagcagatggtctttacagggaatgacagctctcgtcaccggtggatccaaaggaatcggatatgctatcgtggaggagttggcacagcttggagccactgtgcacacttgcgctcggaacgaagctgaactcaatgaatccttaaatgaatggaacacaaaaggatacagagtaactggttccgtctgtgacgtggcgtctcgtgcagaaagacaagacctcatagctagagtctccaatgagtttaatggcaaactcaatatccttgtaaacaacgtgggaacaaacgtaccgaaacatacccttgatgttacggaggaagacttctcatttctgataaatacaaatcttgaatctgcttaccacctaagccagcttgcacatcctctcctgaaagcttcagaggctgcaaacatcatttttatatcctccattgctggtgtgctatcaataggtataggatccacttatggtgcaacaaaaggagcaatgaaccaactgactaaaaatttggcatgtgagtgggccaaagacaatataaggactaattgcgttgcaccagggccaatcaaaacccctctcggtgacaagcattttaaaaatgaaaaacttcttaatgctttcatttcgcaaaccccccttggacggattggagaagcagaggaagtgtcttcattggtggcattcctctgcttacctgcagcctcttacataacaggacagaccatttgtgttgatggtggattaacagtgaatggtctctatataaattagagaagtactaccaacacactctctaacacacttctcttgacacatattctaccataagttacaaataataaaaaattacaaaatcatgaaaataagatctaggacccatatatttttgtgatatctaaaaaatttcaagcaataaaaaaaatgtattgaaaagagtgtataagataatgtgttgttagcatttttatataaactatgttaagagcaaggtctgatgcatacgttgctagtttttatattagtattgagaataaatagctgaaagtcccttggttcaatctatatcatttgggagggggaatttgttgggaataaatttgtatgtccacgatccaatcatcatgtaatcaattttaattttaataataaagtattattttattttcc

SEQ ID NO: 2473 - DNA, 681 bp, Glycine max
gaagaattgtacggtccagttctgtatgtaatgaaatttcagactctagaagaagcaattgccttgaacaattctgtacctcaaggattaagtagttcaatctttacccatagacctggaactatattcaaatggatcgggccacgaggtagtgattgtggtatagtgaatgcaaacatacctacaaatggagctgaaattggtggtgcctttggtggagaaaaggcgacaggtggtggccgtgaagcgggaagtgactcatggaagcaatacatgcggcgttctacatgtaccatcaattatggaagtgaactaccattagctcaggggataaactttggctagaaagctatcctagcacatgaggctgcacaaaataatgcgattttgcagtctgaagagagttctatatataccgagatgttagtctggctgacatgggttcaaagtgttgtcttaacaagacatgcttgctgtaaggatggcaccttgatatgacagtttcaatgtataagatatcttaaataaatgttaaatgaataagctgagaattcttttcccagtcaaaaagtgtttgatgtttaaattcgtgttttgtgattttggccattgaaaaaataatatatatatatatatatatgtatggcatgtattcattgctataaaaaatttattcttttt

SEQ ID NO: 2474 - DNA, 526 bp, Glycine max
gttccacacaagcaccttcaacataaaaattcaagtatcgaagaagaagatggctttaggtgttcctgctcttccgttgacatacgtggctcacgttctggcagttgttgccagcgtcttggtcgtggtctgggtcgtcaatttcaggggtggcttggcttgggattctgataacaagtccctcatcttcaacattcatccagttcttattgttattggcttactagttcatgggggtgaagctattataagttacaaagcttttcccctaaagaaggaagtgaagaaattgatacaccttgttttccatgccatcgcattaatacttggaatagttggaatttatactgccttcaagtttcacaatgaaagtgggattgccaatctctacagcttgcattcatggcttggaattggggttattgtcctttatggcattcagtggatatatgggtttgtgatctttttcttccctggtgggactccagacattagacgcgcctcacttccttggcacgcgctattt

SEQ ID NO: 2475 - DNA, 802 bp, Glycine max
atgttaagtaacttttataatttttaataaattttagttaataacaaaattatgtttaaaagagtatggtgctaatgttttttgtttttttttttcatttgttttaattcctttatgtggagtgagggtatcttatcattatttccttgcagcattttaaaaatgaaaaacttcttaatgctttcatttggcgaaccccccctggtcggattggagaagcaaaggaagggttttcaattgtgggaattcctcgctttacttgcagcctcttacataacaggacagaccatttgtgttgatggtggattaacagtgaatggtctctatataaattagagaagtactaccaacacactctctaacacacttctcttgacacatattctaccataagttacaaataataaaaaattacaaaatcatgaaaataagatctaggacccatatatttttgtgatatctaaaaaatttcaagcaataaaaaaaatgtattgaaaagagtgtataagataatgtgttgttagcatttttatataaactatgttaagagcaaggtctgatgcatacgttgctagtttatatattagctctagactatgccggcgtgacccccatgcgccgactcaccatgcggcggttccgtcagcgttacatgtactattcatattgctatgatactataaggtaccctgtgccacaacccgagtgtgtcattgtaccctccgagaaacaaaggtttaaggagaccggaaggttgaaatttggcggcagtcaccaccggcaatctcgacggacgggccgt

SEQ ID NO: 2476 - DNA, 395 bp, Glycine max
cacagaaactcaatcatgataaagatttattatggatcataggttacgttgttttgtgacaatacccaaaattccttttctattgctactttctctgattctcgtcttcagttacgttaacgcagccttcgacctcgctactatacccttcaacgatggctattctccgctcttcggagatagcaacgttgttcgctccgaggatggcaacggcgcacaactccgcctcgatcgctacacaggttcgggtttcatttcctccagtatgtaccagtatggattcttcagcgcgagaatcaagttgccatcgaattatactgctggtatttgcgtggccttttatacatcaaacggtgatgtgttcgagaagtcccatgacgagttggactttgaat

SEQ ID NO: 2477 - DNA, 609 bp, Glycine max
cagaaatgcggtatgatttgtggacacgtggcgagaatcgagcggataaggaaaaagatctggaaggtcaaaacgatgggggacgctagcaataatcttttatagtgattgcagttccagacagtgtcgaagaagaagaagaagaagatggcattgggtgttcctgctcttcccctgacatacgtggctcacgttctggcacttgttgccagcatcttggtcgtgctctgggtcctcaattttaggggtggcttggcttgggattctgataacaaggccctcatcttcaatgcagctattataagctacaaagcattacccctgaagaaggaagtgaagaaattgatacaccttgttttccatgccatcgcattaatacttggaatagttggaatttatactgccttcaagtatcacaatgaaagtgggattgccaatctctacagcttgcattcatggcttggaattgggggtattgtcctttatggcattcagtggatatgtaaacaaaccactgtataagactaaactaaactatcctataaatgtagtataccttgaagacatgatatgattatggttaagtttataatttcagtttaagcacca

SEQ ID NO: 2478 - DNA, 367 bp, Glycine max
acgcccactcgtccggttccagacagtgccgaagaagaagaagaagaagatggcattgggtggtccggctcttcccctgacatacgtggctcacgttctggcacttgttgccagcatcttggtcgtgctctgggtcctcaattctaggggtggcttggcttgggattctgataacaaggccctcatcttcaatcttcatccagctcttattgtcattggcttactagtccttgggggtgaagctattataagctacaaagcattacccctgaagaaggaagtgaagaaattgattcaccttgctttccatgccgtcgcattaatacttggaatagttggaatttatactgccttcaagtatcacaat

SEQ ID NO: 2479 - DNA, 381 bp, Glycine max
  unsure (1)..(381): unsure at all n locations
tttttcttaaatcctatacaaaacaggcgcattcagcgctgtctcccagatccattaaagttttggcaaagatagcaagcttagaatcccttcataaactggaggaaatagtgcaagctctctgatgggatcatggtggctcggggtgaccttggtgtcgaaataccacttgaacagattcctacagtccaagaggatataatttacgtatgcagacaattaaacaagccagtgattgtagcttctcagcttcttgagtcaatggtcgagtatccaacgccaacacgtgctgaggtancanatgtttctgaagcatttcgacagtatgctgatgctttgatgtggtctggagagtcagctattggatcatatggacgaaaa

SEQ ID NO: 2480 - DNA, 428 bp, Glycine max
cccacttgtgcctgtggctgccagaacaggaggaactgtgtcaagagtgactctaaacgtatcaacatggtggggattcacactccaaagaaagacaatgaaccattgctacagtgcactcatcatatgtgtccaataagggtgcactggcacgtgaagctcaactataaggactattggcgagtcaaggttgctgtgacgaatttcaactacaggatgaattactccctctggactcttgctgttcagcatccaaatcttaacaatgtcacccaagttttcagctttgattacaagcctttacttccctatgagtccataaatgacactggtatgttctatggcatgaaatactttaatgatctcttaatggaagctggaccaactgggaatgttcaatcagaaattcttcttcagaagaaccagga

SEQ ID NO: 2481 - DNA, 1265 bp, Glycine max
gaattgcattgcagtgtaagtatttacaaagcaaagcgaaagggccattttctgaatgcgctctatctatctcttccgatctggctactaaccctaacccgcttcgaaccgtggcttcctcggcctcgcagaacctctctcgaagaaaaccttcttcttcttcgtcttcgtcttctcaacaaacacccgggtcgacccggatcgtttaccgagaatctcggatcccatcggaatccgatttcccgatctggcagcagaactggttcatcgcattgctcttcgtcatggctctcggattcttcgccctcgccattttcctcttcctcactctcgactctgacatcgctccttcttccaccgcctccgcctccgcctccgccgcttcctccgaaggcgtcgaggtgcaggttacttacggcacggttctgaagcttatgcacgagaagaccaaatttcggttgcattctcatgacgtgccctacggttctggcagtggacaacaatcggttactggtttccccagtgtcgacgattccaatagttactggattgtaagacctgagccaggaacttctgctaaacaaggtgaccccattaaaagtggcacaatcattagattgcagcacatgagaacaaggaagtggctgcacagccatttgcatgcatccccgatatcaggcaatcttgaggtcagttgttttggaggagaatccgaatctgacaccggggactattggaagcttataatagaaggaagtggaaagacttggaagcaggatcagaggattcgccttcagcatattgacactggaggctatctacatagtcatgataagaaatacagtcgtattgctgggggtcagcaggaggtttgtggtgttcgtgaaaagcgtgctgacaatgtgtggttggcagccgaaggtgtctaccttcccgttacggaaagcaaatgagttacttagtatcgatacttattctaaacgggtaaaccatggatagtgggagtgggtggctggcaccggttctgataacaaatgcaggtttttctattgaaggataaatatacaggagcatttaggattagataacggtagtaatattttgtcataggtacactttgttatgtagtaagtgcatgccccattttcattttcccccccgaaaatactgtggtgtctgttgttttgtgaacgccatataccattcctctaataggactacgaaacgcaatgagtctatttttcaattgaattattattcgggtt

SEQ ID NO: 2482 - DNA, 1746 bp, Glycine max
agcccacgcgtccgacaggagcgaaagggacacagaacggggttcaaagcacgccgtgtttcgctgtctctcccatcctttcgcattctcaatacccttttgatttgtgaaaggaaagcaaacatggttgatcaggtccaacaccctacaatcatggacaaggttgctggccagctccatctccgttctggtgtttctggtattaggagttatgaaggagcctactgccaccccacaatgtaccaaagaccctcttttgggaattactcgaatgctgcattgcagtatcctgtgatgcccacatgcaaagctaccatggatttgtctgctactgcaacatctgcctcacccgtctttgttgctgctccagcagagaaaggccattttcttttagactttctcatgggaggtgtttcagcagctgtctccaaaactgctgctgctcccattgaacgtgttaagcttttgatccagaaccaggatgagatgatcaaaactggtaggctttctgagccctacaaaggtattggtgattgtttcaagagaacaatggcagatgagggtgctatttctctatggagaggaaacactgctaatgttatccgttatttccccacccaggctttgaactttgcatttaaggattacttcaagaggcttttcaactttaagaaggatagagatggctactggaaatggtttgctggcaacttggcctctggtggtgctgctggtgcatcatcccttttgtttgtttactctcttgactatgcccgtacccgtcttgccaatgatgcaaaggctgcaaaaaagggtggagagagacaattcaatggtctcgttgatgtctacaggaagacattggcatctgatggtgttgccgggctctaccgtggtttcaacatctcatgtgttggaatcatcgtgtatcgtggtctgtactttggattgtatgattctgttaaaccagttgtcctcacagggtcattgcaggatagcttttttgccagctttgcccttggatggctcatcaccaatggtgcaggtcttgcatcatacccaatagacactgttagaagaagaatgatgatgacctctggtgaagctgtcaagtacaagagctccttggatgcattcacacagatcctcaagaatgagggtgccaagtccttgttcaagggtgccggtgccaacatcctccgtgccgttgccggtgctggtgtgcttgctggttatgacaagttgcaggttcttgtgttcggcaagaagtacggctctggtggggcttaagttctaatgctgagtcagtactattatttgtttttagatggcgatgaaaaaaaccatttgagttccaagagtcttagactaattgctgccgcaaattttgtttaataaatttactagatgggatattgtcccaaaaaccgtttttaaatttcatcatgatggaaattttacatttgagaatatgatttatttgagtggcagggaaaagctgtcacttggaattccaattttatgatttcaaaattttatacaatattgttcaagattgtcttatttttagaatgaagtgctgatgaatgttttgctttcttatgattatcgctattggtcaaaagtattttgcccatataacctaaccgaattgatcttttattctttttaggtctacaggtgttatatggattctgaaattttgttttcgcttgtctatatgaagttttgcttgattgagcttta

SEQ ID NO: 2483 - DNA, 275 bp, Glycine max
ggggcgccccttttttttttctttgtttttttttttttgaaagcaaaacaatcatcagcactttattctaaaaatatgacgaattgacaatcttgaacttgaacaataatgtgtaacatttgagaatgatttatttgagtggcagggataagtggctgtcacttggaattccaatttaatgattttaaaatgttacacattattgtccaatttaatgatgttaaaatgttacactttattctaaaaatatgacgaattgacaatcttgaacttga

SEQ ID NO: 2484 - DNA, 383 bp, Glycine max
  unsure (1)..(383): unsure at all n locations
tcgtcncaagtcgccagcaaaccatttccagtagccatctctatccttcttaaagttgaaaagcctcttgaagtaatccttaaatgcaaagttcaaagcctgggtggggagagacaattcaatggtctcgttgatgtctacaggaagacattggcatctgatggtgttgccgggctctaccgtggtttcaacatctcatgtgtcggaatcatcgtgtatcgcggtctgtactttggattgtatgattctgttaaaccagttgtcctcacagggtcattgcaggatagcttttttgccagctttgcccttggatggctcatcaccaatggtgcaagtcttgcatcatacccaatagacactgttagaagaagaatgatgatgac

SEQ ID NO: 2485 - DNA, 392 bp, Glycine max
  unsure (1)..(392): unsure at all n locations
cagcaacaaagacgggtgaggcagatgttgcagtagcagacaaatccatggtagctttgcatgtgggcatcacaggaaactgcaatgcagcattcgagtaattcccaaaagagggtctttggtacatagctgggtggcggtaggctccatcacgccttctcaatacccttttcatctgtgacaggaaagccaacatcgttgaccacgcccaacaccctacaatcatggaccaccccccttcttctctccatcttctcccttgtcctttatctggtattatatcttatgatggagcctaccgccacccagctatgtaccatagaccctcttttgggaattacccgaatactgcactgcatcttcctgtgatgcccacatgcanagctaccatg

SEQ ID NO: 2486 - DNA, 1280 bp, Glycine max
ctttcataaatatttctttcgtataactcggtcccacttgccttcttctgtaacgtgtaaaaaacaaacactataaatctcccgcacccccgagcccggaaagagatctagtgtgtctgtgactgtcagaaacaaacattatttggttttctgaattgtttggattgcgagaaaaaaaaagggggggaaatggcaaaggatattcgattcttcgacctcaacacgggcgccaagatcccttcagtcggcttgggaacttggcagtctgatcctggccttgttgctgaagccgtcgcggcggccatcaaggttggttaccgccacattgattgtgctcaaatctatggcaatgagaaggagattggctctttgttgaagaatctgtttgaggagggtgtagtgaagcgcgaggatttgtggattacatctaaactctggaatactgatcatgctccagaagatgtaccactggcactggaccggaccttgaaagatttgcagctggattatgtagatttgtatcttatccactggcctgctccgatgaagaaaggatcagctggctttaagcctgaaaatcttgtgcaaccaaacatacctaacacctggaaggcgatggaagcactctatgactctggcaaggctcggaccatcggtgtaagcaatttttccaccaagaagctctcggatttgctgctaattgctcgtgttcctcccgctgtcaaccaggtggagtgtcatccttcctggcagcaggacaagctgcaggctttctgcaattccaaaggtgtccacctctctggatattcacctttgggttcccctggaacaacctggcttaaaagtgatgtcctcaagcatcaagttataaatatgattgcggagaaactaggcaagacgcctgcacaagtagctcttcgctggggacttcaaatgggccatagtgttcttcccaagagtacaaacgaaactagaataaaggaaaattttgatgtttttggctggtctatacctgaggacctgctcgccaaattttctgagattcaacaggcaagattactcaggggtaccacatttgcccatgaaacttatggtgcctacagatcccttgaggaactttgggatggtgaaatctgagaaatctatctgtaaatttgataagtgaatggatcgaggagtgagagttctgtgaaactgtgaatcagtatactcctttgttgacttgagcaaattttattttattcctggtttgatgaaactttgcatcatggcattcatgc

SEQ ID NO: 2487 - DNA, 919 bp, Glycine max
ccgtaagttcagtttcacgccgatcttcacagggatcagtatcaccactgcagaaatctgccagtgttagtgattggatgttggattccaaacaaatgtccaccaaagattctatcaccaacggtatctctgcatcatttcttacgactcaccttcaaaatcttttacagcaaacatctattcaacaggatcttataatgaatctgttaaatagtgtgcaatctgctgaagcaattgaagtttctcagaatggaaagctgccaccattacctcgcagttcagaaatcaatggaagtgttgatacagcagcttcagagagggaacgtcttctgctgctcaaaattttagagcttcagactcggataatcactttgactgatgagctgactgctgagaagttaaaatacatgcagttgcaacaacagctaactctctacactcaggaacaaaatatggacaagagagaggaaattgcatgaaagctgattaattatgatctgatcattccttaatgaagtacatgcacatccacttgagtgatgaacctctgccgaaggagaacgggatttggatattgaaaacaaaagagttgtatatcatccgcgatccaacttgccttgccattaataagtttctatgaatacctatagtttagcaaggccaatatacagagttgcagacataatatctcagttaatctcactgtttatttcatacaaaattccgatgtaaccaagcttccctgctgtatcttctgcttcctgataagtttgcagatccacacgggttgttgtcaatgtagaatatcgctacatatttaactgttaatttcatagcagctaaagcttgtatataattaattaatgtgttgtaccgattgaaaaggccaaatatttgagctattcaaaattagttcgtc

SEQ ID NO: 2488 - DNA, 627 bp, Glycine max
atcggcatttccgaggagtgcgcgtgcgtttggtgtggtcaacggaagcgagataaatacacagagagagagagagagagagagagaggtgtgtttgttctctgagtagaagaagatcaagatcaaggaagaggatgtcgaaagaggatgtgtttgttggcgcgatcgaccaaggaacgagcagcagcaggttcataatatacgacgcgaagactggagtagtaggatgccaccacgtggagttcacccagttctacccgcaagccgggtgggtggagcatgaccccatggagatcttggagagtgtgaaggtgtgcgtggccaaggccgtcgataaggccaccgctgatggcttcaacgtcgataaaggcttgaaggccattggtctcaccaatcagagagagaccactctcctctggagcaaatccaccggcctccctcttcacaacgccattgtttggatggatgctcgcacttcttccatttgcaggagattggaaaaggagttatctggcggtagaaaccattttgtggagagttgtggcttgcctattagcacatacttcagagagggaacgtcttctgctgctcaaaattttagagcttaagactcggataatcactttg

SEQ ID NO: 2489 - DNA, 255 bp, Glycine max
aaaggagttatctggcggtagaaaccattttgtggagagttgtggcttgcctattagcacatacttcagtgctttgaagctgctgtggttgatggaaaatgtagatgccgtaaaggaggccataaagaaaaaggatgcgctgtttggaactattgacacttggttgatatggaatctaactggtggggtgaatgggggattgcatgttaccgatgtttcaaatgcatctcgtacaatgctcatgaatctaaaaac

SEQ ID NO: 2490 - DNA, 252 bp, Glycine max
tgctctgcaacgaacccaagaagcatctatatgatgtatcatttcttacttgcttgatataggaggctcatttatcttctattgaatctatttctcttcaccaattcatcagtcctccaaagattctatcaccaacggtatctctgcatcatttcttacaactcaccttcaaaatcttttacagcaaacatctattcaacaagtgcggaccatgttagaatttttataatcaaaactgtgaccttgccaatt

SEQ ID NO: 2491 - DNA, 780 bp, Glycine max
ccacattaaggcaaaaatattatggagttttttaataaatttttaaaaaaagagtttgatgggattaaatttataattagaaaataatcaataaaatcaaggggtttgtaaaatataaaaaatctaattttaggagattaaaaggtttttattggaaagcctgagaagaagaaagaaagatggtgaaagtggcgacgtacttcgcgatgacgcttggagccttcgtgttctggcagtccatggacaaactccatgtctggatcgctcttcgtcaagacgaaaagaaagagaggttggagaaggaagcggagatcagaagggttagagaagaattattgcagcagcaggccagtcagaaggattctctttcttgaattcgaattatgttgtaattttgctttgtaatttccccttgcttctgtttttccaatgcaatgtcttgtgctcaaataaaatctgctactcccgagcacttcaaatttaattgcgtggatttctattgtgttcctctacacatgcacttgtttcattaactgctatgtgtcagtaattgttggaacacttctatcgggttatgaaccagattttaagcgtttaaaaaaaaaaaaaaaaaactcgagactaggttaatctttcagctgtggcttcggttcgcctatttaatttgtggatttcgttattttggagagaaaacaaaaaaaaagtcattttgaatggtttttccatagaaaactgtttatgtggtttgtcatgtaatctatcactggattgtgatgaaac

SEQ ID NO: 2492 - DNA, 415 bp, Glycine max
tcgcccacgcgtccgacgacagaagggggattacaaggggaaaagaaaagagattctgagactgaaagtaaatcgaagcagagaagaagaaagaaagaaagatggtgaaagtggcgacgtacttcgcgatgacgctaggagccttcgtgttctggcagtccatggacaagctccatgtctggatcgctctccgtcaagacgaaaagaaagagaggttggagaaggaagccgagatcagaagggttagagaagaattattgcagcagcaggccagtcagaaggattctctttcttgaatttgaattatgttgtaattttgccttgtgctttgtaattttccttggttttggttttccaatgcaatgttcttgtgctcgaataaattctggtactcccgagcacttcaaatttaatt

SEQ ID NO: 2493 - DNA, 358 bp, Glycine max
gagggaaagcctgagaagaagaacgaatgctggtgaaagtggcgacgtacttcgcgatgacgcttggagccttcgtgttctggcagtccatggacaagctccatgtctggatcgctcttcgtcaggacgaaatggatttttaggttaaattgagccattgaggaactatgacgcattggctatactgactggcatcagcagtctagagtagaagatgttaatcagagtagtgaatagtggggtgccattattgtgctatggctgagcattgtagctgccagtcacttcatggcactcctaccatcgcgtggttagtggctgaattgcagtagacagcacaattgtaccaacaagtggc

SEQ ID NO: 2494 - DNA, 690 bp, Glycine max
tcaactttaccaatcttggcatgcacaaattaacccccacccaattttacactccctccctcctcccatacccatcatcttataatacacaaaggttttgaatatcaaaatacatgacaattcacaacaacaaaatgacttcaattgccaccaatagcactgttgtcgccactagaatgctagttgtgatcactttagtccttgcactagtatgttgtgtcacatccgcgcaatcaccggcagcagcaccagccccggagagcaacgggtgcttgatggcactaacaaacatgtcagattgcctgacatatgtggaggatgggagtaagttggcaaagcctgacaaagggtgttgccctgagttggcagggttgattgatagcaaccccatttgcttgtgtgagttgctaggaaaacctgactcgattggcatcaagattgattggaacaaagccctcaagcttccttctgtttgtggagtgaccactccccctgttagcacttgttcagctgtgggagtccccgtgtccttgcctccatcaatgagtgaaggttctttgtcaccaggtattgcaccaggagtctccagtccttcaaatacagatgctagtcctgctcctagtcctggtggtccaggcccttcctctgaggaagctgctgccagcccttctcaaaacaaaaatggagttt

SEQ ID NO: 2495 - DNA, 475 bp, Glycine max
gacatgccaaaattaacacccctgaatttcacactccctctcccaaactcatcatcctataatacaaagggtttggaatatatatcaaatatcaaaatacatcacaacatcaaaatggcctcaattgttactatggccaccattgtcacattagtcctcgcactagcatgttgtggcatgtctgccccgacctcagtgccgaaaaccactgcagcggccccggccccggagagcaatggctgcttgatggcactagcaaacatgtcagattgtctgacctatgttgaggatgggagtaagttgtcaaagcccgacaaagggtgctgccctgagttggcagggttggttgatagcaaccccatttgcttgtgtgagatgctaggcaaacctgactctattggcatcaaaattgatttgaacaaagccctcaagcttccttctgtttgtggagtgaccactccccctgttagcacct

SEQ ID NO: 2496 - DNA, 637 bp, Glycine max
gagcttcaggtcagagagagtgagagacggcaaagacggaggagaggtcgcaaacgcaaaaatggtgaagtttctgaaaccaaacaaagccgtcatcgtccttcagggacgctacgccggcaaaaaagccgtgatagtgcgaaccttcgatgaaggcacgcgcgagcgcccctacgggcactgcttggtggcagggataaagaagtaccctgcgaaggtgatcaagaaggattcggccaagaagacggccaagaagtcgcgtgtgaaggcgttcgtgaagctcgtgaactaccagcacctcatgcccacgcgctacacgctcgatgtcgatttgaaggacgcggttacccccgacgtgctccaagccaaggataagaaggttactgctctcaaggagaccaagaagcgcctcgaggagaggttcaagaccgggaagaatcggtggttcttcaccaagctcaggttctgagcagtaatcttatcgagttttgttattcgaatgcttttggatcttgctttaattgatactttataatgctggtgttgagattagattttggaatttttggctaaattttggtcatattggatgattaaggtggtttattgagactgatatcataggctaatgttgttt

SEQ ID NO: 2497 - DNA, 605 bp, Glycine max
agaagggggtgtacctgtggagcaatagcagcagaacagagagagcaaaaccctagagcatccatcacaagcagaggaagaagatggtgaagttcctgaagcctaacaaggcagtgatcgtcctgcagggccgctacgccgggcgcaaggcggtgatcgtgaggaccttcgacgagggaaccagggagcgcccctacggccactgcctcgtcgccggaataaagaagtacccaagcaaggtcatcaagaaggactccgcgaagaagaccgcgaagaaatctagggttaaggccttcgtgaagctcgtgaactaccagcacctcatgcccacgcgctacacgctcgacgtggatctaaaggacgctgtaccccctgatgttctcggcaccaaggacaagaaggtcactgctctcaaggagaccaagaagcggttggaggagaggttcaagaccggcaagaataggtggttctttaccaaactcagattctgatctcgcaatcgtgaggttttattattagggcttttggaatgttgccttttttttaatattgtatccgtgttttgcaaatcttatcaaaactattattctgctcttaagatttgt

SEQ ID NO: 2498 - DNA, 328 bp, Glycine max
ctttatctctgttcgacgaaattgcgatcttggtcatcgagaaggactccacgcagatgtccgtgctagctctctatggttcaggtcttcgtgaagctcgtcaactaccagcacctcatgcccacgcgctacacgctcgacgtggacctgacggacgcggttacccccgacgttctagccacgccaaggccaagacggccaccgctctcaaggcgaccaagaagcgcctcgaggcgcggttcaagaccgggaagaaccggtggttctgagcggccagcatacatgttcaccaatgaccaaaggcaacaagaacgaactgggcgatatg

SEQ ID NO: 2499 - DNA, 1114 bp, Glycine max
ggaggtgagctggcctaggctgtgatattggggcagcgatacgtaataagttctatcattgaggaagtttcctgtgcatcgtctccgaaaatgaacgacgcagatgtctcaaagcaaatccagcagatggtgcagttcatccgccaggaagctgaggaaaaggccaacgagatctctgtctccgccgaagaggaattcaatatcgagaagctgcagttggtcgaagccgacaagaagaagatcaggcaagaatacgaacgcaaagagcgccaagttgaaattcgcaagaagattgagtactcgatgcagctgaatgcttctcggattaaagttcttcaagctcaagatgacgtgatcagttccatgaaagaagctgcatccaaggaactgttgaatgtgagtcatcatcatcatttgaatctactgagtcatcatcatcatgagtacagaaaccttctgaaagatctcattgttcagtgtttgcttagactgaaagaaccttcagtcctattgagatgtcggaaagatgacctgcacttggtagagcatgtgctggattcagctgctcaggagtatgctgagaaagcaaatgtcgatcccccagagatcattgttgacaaccaagtctatcttccacctggacccagtcgtcacaattctcacgatctctactgctccggtggggtggtgttggcttctcgtgatggaaagattgtgtgtgaaaatactcttgatgcacgtcttgatgtagttttccgtaaaaagcttccagagatccgaaagcagctctttggacaaattgttgcttgaagattttgattgtaatgtttggttacccctggaactatatcccgaagcataagcttgtcttcatgtcttggacctgaatagctatcaagccattgcttctgtgaacttataattattgtcccttaaattacgtcattttcggtagtccagttgtccggcgttcttgatttgatttacttctgattgttatgacctaagtttttccggcttatttcagctttgagcttcttggcaataaagtagcaagatgtaaacattactgttaatgttattaaaaaaaacattactgtcaatattgtgacag

SEQ ID NO: 2500 - DNA, 1149 bp, Glycine max
ctccagccgctcgagccgattcggctcgagaaagagaggtgaggtgaactcgtgtggggtgtggtagtgtggcagcgacacgtatcaacttcaataatcgcatcgcagaagcagtttccggtgcatctcatcgtctccgaaaatgaacgacgcagatgtctcgaagcaaatccagcagatggtgcggttcatccgccaggaagctgaggaaaaggccaacgagatctctgtctccgccgaagaggaattcaatatcgagaagctgcagttggtcgaagccgacaagaagaagatcaggcaagaatacgaacgcaaagagcgccaagttgaaattcgcaagaagattgagtactcaatgcagctgaatgcttctcggattaaagttcttcaagctcaagatgacgtgatcagttccatgaaagaagctgcatccaaggaacttttgactgtgagtcatcatcatgatgatcatgtgtatagaaaccttctgaaagatctcattgttcagtgtttgctaagactgaaagaaccttctgtcttattgagatgtcggaaagatgacctgcacttggtagagaacgtgctggattcagctgctcaggagtatgctgagaaagcaaatgtcgatcccccagagatcattgttgacaaccaagtctatcttccacctggacccactcatcacaattctcatgatctctactgctctggtggggtggtgttggcttctcgtgatggaaagattgtgtgtgaaaatactcttgatgcacgacttgatgtagtgttccgtaaaaagcttccagagatccgaaggcagctctttggataagttgttgcttgaatattttgattgtattgtttcgttacccctgtaatgtttatatcccgaagcataagcttgtctttggagattaatagctatcgtgccattgcttctgtcaacttataattgtcttttagataacaccatatttcggtagtccagttgttcccatattgtgtatgatgggggggcatgcgttgttctagattttagcgtatgtaatatattgaacattactgtcaacattatgacggaaatataacgttctatattgtcgtatctgatgcaaagtaaaagcccatatagaatatgggttggtttgatcc

SEQ ID NO: 2501 - DNA, 461 bp, Glycine max
ggacccagtcatcacaattctcatgatctctactgctctggtggggtggtgttggcttctcgtgatggaaagattgtgtgcgaaaatactcttgatgcacgacttgatgtagtgttccgtaaaaagcttccagagatccgaaagcagctctttggacaagttgttgtttgaagattttgattgtatggtttggttacccctgaaatgtttatatcccgaagcatcattagcttgtctttgacctgaaaagctgtcctgccattgcttctgtgtacttataattattgtcttttaaataacaccatatttcggtagtccatttgttcccatgtcgtgtatgatgggggatgcatcgttctaagttttctttcgtgatgacttttatctcattgacaataagtgtttgctccggctcattgctgctttgattttaaaaaaataaaataaaacagggattattt

SEQ ID NO: 2502 - DNA, 403 bp, Glycine max
aagattgtgtgtgaaaatactcttgatgcacgtcttgatgtagttttccgtaaaaagcttccagagatccgaaagcagctctttggacaaattgttgcttgaagattttgattgtaatgtttggttacccctggaactatatcccgaagcataagcttgtcttcatgtcttggacctgaatagctatcaagccattgcttctgtgaacttataattattgtcccttaaattacgtcattttcggtagtccagttgtccggcgttctagatttgatttacttatgattgttatgacgacaagtgttttcagctttgagcttcttggcaataaagtaccagatgtaatatatattgaacattactgtcaatattgtgacaggaatatagtaaccgttgtcgtgtc

SEQ ID NO: 2503 - DNA, 385 bp, Glycine max
cacgtatcttcatcaataatcgcagaagcagtttccggtgcatctcatcgtcttccaaaatgaacgacgcagatgtctcgaagcaaatccagcagatggtgcgtttcatccgccaggaagctgaggagaaagccaacgagatctctgtatctgccgaagaggaattcaatatcgagaagctgcagttggttgaagccgaaaagaagaagatcaggcaagaatacgaacgcaaagagcgccaagtcgaaattcgcaagaagattgagtactcaatgcagctgaatgcttcccggattaaagttcgtcgggctcaagatgacgtgatcacttccatgaaagaggctgcatccaaggaacttttgaatgtcagtcatcagcatgatga

SEQ ID NO: 2504 - DNA, 796 bp, Glycine max
aaaaactgaaactctccatcaaatcttgtttcccttacaaaaggacagcgaatcaaaacctgaaagatacacgcgtataatcagataaataatagcatcataaattctacaactcgtacatgggatatcacagcaaaatatctgagtttagagttggttgcattgcatcaaatcaaacagaacctagataaaataaaagtcgcaccacgatcagcaccttagacagtcacgatgcaagcacgatgaatggaatggaacatgcaatcataggttcaaaagacccacctgtatggcaaaagtgaaaggcagacaatatgtgcaacttgtcccagattggggcgcgagacaagagtgtttaacagagtcccattatgccttcacgttgacctttacacaacagagtatttgcccggttgagttccaccaggaagttgcaaagcctgatttgtgatgtcttccaaaacacgcttcaagtctgctttagctgacttaacggagtgctcagtaggaccttcatatgaacaaggaggtgagctggtctgggctgtggtagtggggcagcacagcaatacgtatcattgaggaagtttcctgtggatcgtctccgaaaatgaacgacgcagacgtctcaaagcaaatccagcagatggttcggttcatccgccaggaagctgaggaaaaagccaatgagatctctgtctccgccgaagaggaattcaatatcgagaagctgcagttagtcgaagccgagaagaagaagaccaggcaagagtacgaacgcaaagaacgccaagtc

SEQ ID NO: 2505 - DNA, 611 bp, Glycine max
gatagctcgttcaggttacctcgttctgcgttctccttcaacacaaccgcgaaaaccttaactcagagctcgttcaccataccacccaaatcaattgtccaaaatcgcggctcaaaccgaacattcgaacttgaatcaggaattttggggcaaggttgctagtgttggcaggattcaggagtaactatagttcaaacctaatagtagaagaaaaggaacttcagctggttttatttgatagagaaaccactgttacagaaatatggaagaggaagaggtgaatcgatgccagattcaggaatggtatccaaagttcaaatctgtatccttcaagaccttaattcgtcaacttccggaatcatttattcagtaccttttagatgactcggggcccttcttgttgcatgtttctgtcttaaatgaagatgcattacccaatagaattcataacccagatgaggaagatgattttcaggtgtcagagggatctggtgatgaagcagaagcagggaattttgatcctcccttcctgttgctctcctaaatggcatttttcaacaatcatgtgagggctaaatttgagtcagaaaactacgcatttgatgtatgca

SEQ ID NO: 2506 - DNA, 985 bp, Glycine max
agcctcgcgagcacaaagcaaagagaacagtactgtggattcccttctcaaactactgaagaaacattcagttgagcaagtgaagagaagtagtggaggcagaggaaaagattttagttcagaccagttgcaagaaagtaaccaatacaatggaggacggaactctaaaatttctgatttagatagttctccaaaggatgagccccaagaggacattgtcttctcttcctcggtagccaggcctcggtcaaatttccaaagaaggtctcccgttccatcgtttaagatagcagcatgtctctaacgatgagaatgaaatgactgtagtgccagtaggtactgacgatacagagaacaatcacgatcagatagatttgaagcttgatgacgaagctgaatctgactttgaatcggatgttgattcaaaggatgagtttttcttcccaaacatagggatggctgaattgtctgaggatgatgattctgagcaaacctataatgatgagagtgtggaggagcagccggcagctcaacacaaggatttgagtgcactgaagctgtctgaattgagggcacttgcaaagactcgtggcctgaaaggattctcaaaaatgaagaagagtgacctcgtggagttgctaactgagagctgattctgatggaatgatatacgagaagaaaaagggacaaaacaacacatgccatagtaaaatagattttttttttcttttcttgcttttgacttgacattctatccgatgtttctttgtgttcttttttttttgtcacactctaatttaatttttccaagtacttgaggttgagagtttgtggaacattatactattagagtaattatgatatctttgcctcggagaatttttgaacttgtagttatattcccgggatgatatcttgtggcatttggttattatgtgatccaatgacctatctggctagtgagagattacatcattgtagtagt

SEQ ID NO: 2507 - DNA, 1447 bp, Glycine max
gttcagagaggatcaaagaaattattgttcagttcaaagggagctttgtgctagaattgcagcagagggctattgaattcaattcgattattgcaaagcatcaaaatattaggtctacacttgtagaaaggatgccagttttggatgaggcaacttccattggtaggagggctgggtctctgccaggcgcagcttcaactccaactgcaccttcatttaaatcttccaaatggagcagccaaacctgtggctcctcttgtagatctacttgatctaagttcagatgatgctcctgctccgagctcttctggtggaggagatattcttcaggaccttcttggtgttgatctgtcaccagcatcacaacaatctgttgctggccaagcttcaaaaagtggcaacgatgttcttttggatcttctgtctatcggatcaccttctgctgaaagcagctcatctacagtagacatcttatcctccaattcgagtaacaaagcaccagtttcttcatcattggatggtctctcatctctttcactttcgacaaaaacaacttcaaatgctgctcctatgatgaatttattggatggttttgcccccagcccgccaacagaaaacaatggatcggtttatccatcagtaactgcatttgagagcagctccttgaggttgacattcaatttctcaaaacaaccaggaaacccacaaacaacagttatccaggctacttttatgaatttgtcctccaattcatatacagattttgtttttcaagcagcagttcctaagtttcttcaattgcacttagatccagctagcagcaatactcttcccgcaaatgggtccataacccaaagtttgaaaattactaatagccaacatgggaagaaatctcttgtcatgcgtataaggatagcatacaagataaatggcaaggatacactggaggaaggacaagtcaataacttttcctcatggtttatgaagcccaatgatcaggggtcattaaggtgatgcacaaaacccatcgttttccccagcactccataattattggtgcggttttcatgtttcattccttcaattgaggaaggtatggttcgagaatctggaccactttttggcttaaatttgaagtcgatttggtggcttcacatcgttgttttacctttttcttttacttaggtgatttatgtacattagtacaacatattcctgtatgaaaatgccatagtcaaatttttcctctcaagccactgagagttgtgtcctattgagtacttgaagtgctttcttgctatttttttggaggtagtcgctcggttttgctgtctaaagttatagtgttgttgaatgcaatttggtatcttttagacgattgatatatttgattttatgtaatgtttccccctcaagattaatggaatgtaatctccaaattatatcc

SEQ ID NO: 2508 - DNA, 1041 bp, Glycine max
accagatcaccatcaatgtcttccatgggctctctgaagatgatttcgtccctcaaactctcccgttcaagttgttctatctctccccttcaaacccaaaagcaagtaggttcaagtctctttcaatccttcccaaccaaaaccttaaaattctcagctacccctcaagtatctacatccagaagaagtaccaacaagaccactaccactgcattcttcttcaataaccaaaagcagcatcaagattcctcacagccagccaaagttcaagaactctttgtctacgagatcaacgaacgcgaccgaggaagtcctgcataccttaggctaagccagaagccagttaactctctaggagacttagtgccattcagcaacaagatatactctggagacttgcaaaagagactagggataactgcaggcttgtgtgtgctcatccagcatgagcctgagaaaaagggtgatagatatgaggccatttacagcttctactttggtgactatggccacatatcagtgcaaggagcctatctcacattccaagacacatatctggctgtttctggaggctctggaatctttgaaggtgcgtctggacaagtgaagcttcaccaacttgtgttccctttcaagctgttctacaccttctacttgaagggtgtgcctgatttgcctcctgagctgcttgggaaacctgttgaaccttcaccaagtgttgagccttctcctgctgctatggctaccgagcctcatgcctgtttgccaaacttcaccaactgataatgattatgatgatgcaattgagccttttttgtttttcaggaaattttagttttgaacccaaaataaagtctaggtgttgcatattgactgtataccaaaattcgccaactgatgatgatgcaattgagtccttttcttttgcagaaaattttattttggacccaaaataaaatctgggtgttgcagatttactatattattgaatcttgttttgcttgtgttggactagatgtggtagatgtattaggtaaaaaa

SEQ ID NO: 2509 - DNA, 1767 bp, Glycine max
tgatataaaattaacattgaattttgacctgttgcataatagtttgggatcaagaatcatggtgaatcacctatctttctataaataccacaaaattgaagctgaacgcatgagttctaatatatcattcaaaagtttttgaaatgttgtcaccccttcttctatttctatgcctaactcttcctttgtttttgttgtccttcttcaaataccgtaaaaccttcaagaatccaccacttccaccaggtcctagaggccttcccataatagggaatcttcatcaactagatagtccttctcttcatgagcagctatggcatctctcaaagaaatatggtcctttattttcccttcaatttggattaaggccagccatagttgtttcctctccaaaattggccaaagaggtaatgaaagacaatgaccttgagtgctgtggacgacctaaattactaggccaacagaaactaacctataatgggttagacatgggattttcctcatacgatagttattggagagaaatcagaaaaatttgtgttgtccatgtccttagctccaaacgtgtccaaagctttacctcaataagacattttgaggtcaagcagatgataaaaaaaatatctaggcatgcctcatcttcaaaagttacaaatttaaatgaagtgcttatatctcttattagtactattgtatgtagaattgttttggggagaaggtatgaagaggagggatctgaaggtagcagattccataagttgttcaatgagtgtgaagctatgttgggtaacttctttgtttcagattatattcctttcatgggttggattgataaactcaggggactggatgcacgtcttgaacgcaatttcaaggagatggataagttctaccaagaagccattgatgaacacatgaattctaagaaaaagactccagaggaagaggatttagttgatgtcttacttcaactgaaagagaacaacacgtttcccatagatctcaccaatgataacatcaaagcagtgctcttgaacttacttgtaggagctacaggtacaactgaagtcacaacaatctgggccatgactgaactaataaaaaatccaagcattatgaagaaagtgcaagaagaaattagaggcttaagtggtaagaaagatttcttggatgaagatgatattcaaaagttttcctacttaagggcagtgataaaagagacacttagattgcacttaccagcaccactacttataccaagagaaacaaataaaaaatgcatgttagatggctacgaaattccagccaagacattattatatgtgaatgcttgggcaattcatagagatcctaaggcttggaaagatccagaagagtttatacctgagaggtttttaaattgcgacatagatctttatggacaagattttgagtttattccattcggtgctggtcgtagattgtgccctggtatgaatatggcatttgctgcattggatcttatacttgctaatcttctttattcctttgactgggaattgccacaaggaatgaaaaaggaagacattgatactgaagtgttgccaggagttacacagcataagaagaatcctctgtgtgttgtggccaagtgctatatgtaaaatccaaaagtcgtaactactgctgaaaaaaataaaataaaataattaatgattgtactcttccaacgaagattattaaataaagatgtaagcactccaaaataaaaatatttctgttgtgttt

SEQ ID NO: 2510 - DNA, 922 bp, Glycine max
tcaggcaaaaaaacaacaaaagggggagcaaaaccctaatccctatttttcctcttcctcagtagtgtcatttacgcttctcttctctgcagcaactatgcctaaccctaaggtcttcttcgacatgaccatcggcggtcaatctgctggccgcatcgtgatggagctctacgccgacgtcactccccgcaccgccgagaacttccgcgcgctttgcaccggcgagaagggcgtagggcggagcggcaagcccctccactacaagggctcgtccttccaccgcgtgatcccgagtttcatgtgtcagggtggcgacttcaccgccggaaacggaaccggcggcgagtcgatttatggcgccaagttcgccgacgagaacttcgtgaagaagcacaccggtcccggcatcctctccatggcgaacgccggtcccggaaccaacggatctcagttcttcatttgcacggagaagacagagtggctcgacggaaagcatgtcgtgttcggacaggtcatcgaaaggattgaacgttgtcaaggacatcgagaaggtcggatccagctccggcaggacctccaagcccgttgtcatcgccaactgcggtcaactctcttagacgacgttgacccgcggctttaatctctgaatctgtgttatttctttcggtgtcgtttttgccttttttttctcttcttttctttctcgtgtcgtcgtttaggggattgtggtgttaaggatatcatttcgaaacccttcccctttccttttcaatatcagtatcatgtggttggttggttggggttcatagagtgagtgaatggagtctgttatgagaagcataaaaaaaacatgatgagctaccttcaataaaattaggacatctataattcgcctaataatactctttgctcttcggtttct

SEQ ID NO: 2511 - DNA, 889 bp, Glycine max
  unsure (1)..(889): unsure at all n locations
acgncgatgcacgcctacggaaggctcgaaatccggttcgggtcccctaagtagtgcgattttcgtttctcttctctgcaactatgcctaacccgaaggtcttcttcgacatgaccatcggcggtcaacctgccggccgcatcgtgatggagctctacgccgacgtgactccgagcaccgccgagaacttccgcgcgctctgcaccggcgagaagggcgccgggcggagcggcaagcccctccactacaaaggctcgtccttccaccgcgtgatcccgaacttcatgtgccagggcggcgacttcaccgccggaaacggcaccggaggcgagtcgatctacggcgccaagttcgccgacgagaacttcgtgaagaagcacactggtcccggcatcctctccatggcgaacgccggtcccggaaccaacggatctcagttcttcatctgcacgacgaagacggagtggctcgacggaaagcacgtcgtgttcggacaggtcgtcgaggggatggacgtcgtcaaggagatagagaaggtcggatccagctccggcaggaccgccaagcctgtcgtcgtcgccgactgtggtcaactctcttagatagacgacgttgaccctaggcttttatctctgtgtcggtggctctgaatgtgtcgtttctttcggtgtcgtttttgccttttttttctctttcccatgtcgtttaggggattgcggtgttatggatatcatttcgaaacccttcccctttgaatccttcctttcctttctaaaatatcagtatcatgtggttcgttcatagagtgaatggagtctgttatgagaaacataaaaaaatatgatgagctaccttcaataaaaattaggacctctattattcgcctagt

SEQ ID NO: 2512 - DNA, 1245 bp, Glycine max
  unsure (1)..(1245): unsure at all n locations
cactcccaacccccacccgtagtttctaccaccttcagtcacggcgtaatacactaaccaacccaccatgtcgctgcctgcttgtcccgccgaacaactggcccaacttctcggcccaaacaccacagacgcctccgccgccgcctcccttatctgcggccagttcgccgccgtggacagcaagttcgtcgacacggccttcgccgtcgacaacacctacctcctcttttccgcctacctcgttttttctatgcagctcggcttcgccatgctctgcgccggctccgtccgcgccaagaacaccatgaacatcatgctcaccaacgtcctggacgctgccgccggcggcctcttctactacctcttcggcttcgccttcgctttcggcgccccctccaacggcttcatcggccgccccacgtgattcagattctggtgattgctgggtgggttagtgcgaccatgggacccttgttttgggggttgaataaactgaagctgttgaggatttcttcagaggatgagcttgcggggatggacatgactcgccatggaggctttgcttatgcttatgaggatgatgagacgcacaagcatgggatgcagttgaggagggttgggcccaacgcgtcttccacacccaccactgatgaatgatctttttttcccatatgcatgtctcattagtcaaacattaaatttggatacatattccttgtaaggattcaaaccttggttacttgttacttctgttagatccaactccggttgatactcatgactttttacttctttttttttttatttgtcttgggtcttcttttttcgtagatttttctttttatgatgatgggcaattagggattttgatttgtaattgtcattggtcgtgcattggtggatgctggaagttaaagattctggtggaagatgcgtacgtttctgtggggggtggttgttgactaaggcatgttggtcctggaaatgacagatggctgtggaaaatggaaatttgtgggatttatttttgtagttttcaccaaaaaagaaggaagaagattggtatatagtagaaatactactgtttggccgtgaggcatatagtttttttttcttttccttaatttgagacttttatgttaaactttttcattatgtctaatgtaaatatatggaagtagtttttatattttactgcctgnnnnnnnnnnnnnnnnnnnnnnnnnnnnnnnnnnnnnnnnnnnn

SEQ ID NO: 2513 - DNA, 1977 bp, Glycine max
agcggagtgagtgagccagaaaaaaaggagaggaaagatatctaaatacgtagggttgaggaggagccaacgaatcccgaactcaatctgtaggattccaacacaatatttgaggaggatttattcgcgcatgtgatttataattgaaagattccctctgcagctctcaaaaccactaaccctaatagctgaactccaaagagatataataacagcaagtggccctcatcaattctaagtatatatataaaatcattgccgccatcacttcttctccatactcttgtctcactctaacagccaaagcatggcttctctctcttgctccgccaacgaccttgccccactcttcaacgacaccgccgccgccaactacctctgcgcccaattcgattccatttctagaaagctcgccgaaacaacctacgccgtcgacaacacctaccttctgttttcagcgtatcttgtcttcgccatgcagctcggcttcgccatgctctgcgccggctccgtcagagccaaaaacaccatgaacatcatgctcaccaacgtcctcgacgccgtcgccggcggtctctcctactacctattcggctttgcattcgccttcggcggcccctccaacggcttcatcggccgcccaaacttccgcctacgagattacccgatgggctcctctatctccagcttcttcctctaccagttggtcttagccatcgccgacgcaggaatcaccatctctcccttcggcgactacagcttcttcctctaccagtgggccttcgccatcgccgccgcaggaatcaccagcggctccatcgccgagagaacacagttcgtggcttaccttatctactcttctttcttaaccggtttcgtttaccccatcgtttcgcattggttctggtcctcagacggttgggccagcgtcgactcgtagccacggataatgttttattcgggtctggagtcatcgacttcgcgggctcaggcgttgttcacatggttcgcgggatagcgggcctgtggggggctttaattgacggcccgagaatcggccggttcgaccgttcgggccggtcggttgctttacgtggccacagcgcgtctttagttgtgcttggtacgtttttgttatggttcggctggtacggcttcaaccctggttcgtttctgacaatagccaaggggtatgaaagtggagggtattatggtcaatggagcgctatagggaggacagctgtcacgacgacattggctgggagcactgcggctctgacgacgttgttcagcaagcggttattggctggccactggaacgtgattgacgtgtgtaacggcctgcttggcgggttcgctgccattacatcgggctgtgccgttgtggaaccgtgggccgcgattgtgtgtgggtttgtggcggcgtgggttttgattgggcttaataagcttgccgcgaaggtagagtacgatgatccgttggaggcggcgcagcttcacggcgggtgcggcgcgtggggggttttcttcacgggattgtttgcgaagaaagtgtacgtggaggagatttacggtgttggaaggccgttcggggctttgatgggtggcggagggaggctgctggcggcgcaggtgattcagatattggtggtgtgcggggtgggttacggcgaccatgggacccttgttttgggggttgaataaattgaaattgttgaggatttcttccgaggatgagcttgcggggatggatcttacccgtcatggaggatttgcttatgcttatgaggatgatgagtcgcacaagcatgggattcagctgaggaaggttgggcccaacgcgtcgtccacacccaccactgatgaatgattacgatcacgattaattcggccccgacagtattatcttcaattgaaattacgtgtgacttagaagaagaaaaaaagatgatgatgattttgtttgtaatttatttt

SEQ ID NO: 2514 - DNA, 899 bp, Glycine max
  unsure (1)..(899): unsure at all n locations
cacgcgtacgtaagctcggaattcggctcaaggtcctgcgaaccttcttgctttggttcggttggtacggatttaaccccggttcatttaacatgatcccacttacttacggtggctcaggaaattactacggtctatggagcgcggttggcagacccgcggtcaccactaccctagcggggtcaacagctgccttgaccacgctattcggtaaacgggtgacatccggtcactggaacgtgaccgatgtctgcaacgggctgttacgccgtttcgcggcgataacagccggttgctccgtggttgagccatgggcacccatcgtatgcggttttgttgcttctatagtattaatagcttgcaacaaattagcagagaaggttaagttcgacgatcctctggaggcggcgcagttgcacggtgggtgtggcacgtggggggtgatattcacggcgttgttcgcaaaaaaggagtatgtgaaggaggtttacgggttggggagggcgcacgggttgctcatggggggtggtgggaagttgctggcggcgcacgtgattcagattctggtgattgctgggtgggtgagtgcgaccatgggacccttgttttgggggttgaataaattgaaattgttgaggatttcttccgaggatgagcttgcggggatggatcttacccgtcatggaggatttgcttttttgcctttgttttctctttcccatgtcgtttaggggattgcggtgttatggatatcatttcgaaacccttcccctttgaatccttcctttcctttctaaaatatcagtatcatgtggttcnttcgagtagtgaatggagtctgttattttagaaaggaaaggaaggattgaaaggggaagggtgggggagtgatatcgata

SEQ ID NO: 2515 - DNA, 769 bp, Glycine max
ctcccaacccccacccgtagtttctaccaccttcagtcacggcgtaatacactaaccaacccaccatgtcgctgcctgcttgtcccgccgaacaactggcccaacttctcggcccaaacaccacagacgcctccgccgccgcctcccttatctgcggccagttcgccgccgtggacagcaagttcgtcgacacggccttcgccgtcgacaacacctacctcctcttttccgcctacctcgttttttctatgcagctcggcttcgccatgctctgcgccggctccgtccgcgccaagaacaccatgaacatcatgctcaccaacgtcctggacgctgccgccggcggcctcttctactacctcttcggcttcgccttcgctttcggctccccctccaacggcttcatcggtaaacatttcttcggcctcaaggacatcccttcatcctcctacgactacagctacttcctctaccaatgggccttcgccatcgccgccgccggcatcaccagcggaagcatcgccgaacgcacacagttcgtggcctatctcatctactcctccttcctcaccggcttcgtctaccccgtggtctcccactggttctggtccccagacggctgggcctctgcctttaagatcaccgaccggctattttccaccggcgtaatagacttcgccggttccggcgtagtccacatggtcggcggaatagccggcctatggggagcgctgatcgaaggcccaagaatgggacgtttcgatcatgc

SEQ ID NO: 2516 - DNA, 426 bp, Glycine max
agtagatttagctggcagtgagcgtgtggtgaaaactgaagctgaaggagaaagactgaaggaatctcaattcataaacaagtctctatcagcacttggtgatgttatttctgcccttgcatccaaatcagcccacataccttacaggaactcaaagctcacccatatactccagagctcgttaggaggtgattgcagaactttaatgtttgtccagataagtccaagtgcagcagacttaacagagacactttgttctctgaattttgccgcacgtgtatgaggatgatgagtcgcacaagcatgggattcagctgaggaaggttgggcccaacgcgtcgtccacacccaccactgatgaatgattacgatcacgattaattcggccccgacagtattatcttcaattgaaattacgtgtgactt

SEQ ID NO: 2517 - DNA, 372 bp, Glycine max
gaattaaacaccgcgcccaacccttttcctctcccttctcccacctcaaacgccgtcgtttcgaccaccttcttcggtcgcggcacaaccaataaccatgtcgctgccagattgtcccgccgtccaacttgcccaactcctgggcccaaataccacaaacgctgccgccgccgcctccttcatctgcgaccggttcaccgccgtggacaacaagttcgtcgacacggccttcgcggtcgacaacacttacctcctcttctccgcctacctcgtcttctcgatgcagctcggcttcgccatgctctgcgccggctccgtccgcgccaagaacaccatgaacatcatgctcaccaacgtcctcgacgccgccgc

SEQ ID NO: 2518 - DNA, 446 bp, Glycine max
ctcctactacctattcggctttgcattcgccttcacgggcccctccaacggcttcatcggccgccacttcttcggcctacgagattacccgatgggctccttctccctccggcgactacagcttcttcctctaccagtgggccttcgccatcgccgccgcaggaatcaccagcggctccatcgccgagagcacacagttcgtggcttaccttatctactcttctttcttaaccggtttcgtttaccccatcgtttcgcattggttctggtcctcggacggttggtcgcttctgccatttccagcgcagatcatgtattctcccccggagaccggctattgtccaccggcgtgatagacttcgccggctccggcgtagtccacatggttggtggagtagccggcttctggggcgcactgatagaaggcccgagaatcggacgcttcg

SEQ ID NO: 2519 - DNA, 868 bp, Glycine max
cggaatcggtcgagcaaaatctggattctggtgttgtgagtcgccggcgttttccactcgaagcacacaccagccataatcgattacacaccgtgataagataagattgaaaagatgtttagggacgtgtcaagctgcaacacgtacaactacggcgaggctgggtattgggacgcgcgctacatccaagagggtggttccttcgattggtaccagcgttactctgctctcaggccttttgttcgcaatttcatccctctttcttccaggattctcatggttggttgcggcaatgctgttatgtctgaggatatggtcaaagatggttacgaggacatcgtcaatattgatatttcttctgttgcaattgacatgatgagaacaaaatatgagtacatacctcagctaaaatacatgcagatggatgtcagagatatgagctagattccagatgaatcttttgatggtgttattgataaaggaactctcgattcattgatgtgtggtactgatgctccaattagcgctgctcagatgcttgccgaagtttgtagactactaaaacctggagggacctatattttgattacatatggcgatccaacagtaaggatgcctcatataagcagaccggtgttcaattggaaaattacgctgtataatatcccaagaccaggatttcataagcccgagagtagtacaccatcaagaaaatcatacttggagcccatcgctcttactgaaaagggcttactttcagcagatttcgttctggacgatccagattctcactatatatatgtttgtaaaaagataaatgacacagagatagacaataatacctgcataccaattaacagctgatgtt

SEQ ID NO: 2520 - DNA, 513 bp, Glycine max
gcaattctggttgttatgtcagaggatatggtccaagatggttacgaggacatcgtcaatattgatatgtcttcaattgcaattgacatgatgagtagaaaatatgagcacatcccacagctaaaatacttgcagatgatgtcagagatatgagcttgtctccagatgaatcttttgatggtgttattgataaagatactgatgctacttttgcacccatgctttgttgatgcttgatctaggaactcttgattcattgatgtgtggtactgatgctccaattagtgctgctcagatgcttgctgaagtttgtagactactaaaacctggagggacctatattttgattacatatggggatccaacagtaaggatgcctcatataagcagaccggtgttcaattggaaaattacgctgtataatatccgtaagatttcacctgtttcatctttactggaactggaccaaaagcctttttcttcatcctaaatgcggacaaattgtccttttaa

SEQ ID NO: 2521 - DNA, 729 bp, Glycine max
  unsure (1)..(729): unsure at all n locations
gcattctcgaatttaacacgaagttttcctcgtactcattgttacattctataaatcaagttcgatacaaccccatcgcaaaatcagtgtgcaagcattccaatcgctcccaaaatcttttctaatttgttcataactcaataattctcatcatgggctccttgattgttccaggtgaacatgatcacaaactaaagcttgtttctcttccctttgtatcaaccagtcacctcattcccgtagtagacatagctaggctctttgccattcatggtgttgatgtcaccataatcaccaccacagccactgccgccattttccaaagctctatcgatcgcgaccgtgaccgcggccacgctattagaacccacgttgtcaagttcccatgtgaacaagttgggttgccagaaggagtagagagcttcaactccaacactcctcgggatttggtccacaaaatctaccagggactcaccattctccaagaccaataccaacaactcttccatgacttgcagcctgatttcttgttcaccgacatgttctacccctggactgtggatgctgctgctaagttgggaattccacggctcatttatgttggtggaggttaccttgctcactcttctcagaacacaattgaacaattcttacctcacaccaaggtactggtggattacatgacangcaagaggatattctcatattctattctttttcatatttgac

SEQ ID NO: 2522 - DNA, 1524 bp, Glycine max
gtagagagcttcaactccaacactcctcgggatttggtccacataatctaccagggactcaccattctccaagaccaataccaacaactcttccatgacttgcagcctgatttcttgttcaccgacatgttctacccctggactgtggatgctgctgctaagttgggaattccacggctcatttatgttggtggaggttaccttgctcactcttctcagaacacaattgaacaattcttacctcacaccaaggtagattcggatactgagagttttctgcttcctggattgccccatgaattgaagatgacgcgtttgcagttaccggattggcttagagcaccgacaggttatacttatttgatgaacatgatgaaagactcggagagaaagagctatggatcgctgttgaatactttttatgagcttgagggagattatgaggagcattacaagaaggccatgggaactaaaagttggagtgttggaccagtttccttttgggtgaaccaagatgctttggataaggccgatagagggcatgccaaagaagagcaaggggaaggagaagaagggtggctcacatggcttgattccaagacagagaactctgttctctatttgagttttgggagcatgaacaagttccctactcctcaacttgttgaaatagctcatgcccttgaggattcagaccatgatttcatttgggtggttaggaaaaagggtgaaagtgaagacggggaaggcaatgactttctccaagagtttgataagagagtgaaagcaagcaacaaggggtatctaatatggggttgggcaccacaacttctcatactagagcatcatgccattggagctgtggtgacacactgtggatggaacacaataatcgaaagtgttaatgctggtttgccaatggctacttggcctctgtttgctgagcagttttacaatgagaagttgctggctgaggtgctgagaattggggtgccagtgggggcaaaggaatggaggaattggaatgagtttggagatgaggtggtaaaaagggaagagataggaaatgcaattggtgttttgatgggtggtgaagagtctatagaaatgaggagaagagcaaaagcacttagtgatgctgctaagaaagctattcaggttggggggtcttctcacaacaatttgaaggaactgatccaggagttgaagtcactcaaactgcagaaggccaaccacaaaagttaggccaactcttggggataattgcaatcaattcaggacatagcactgtgattctaaataagtgacatgcctcattcaaaaatagtgtgaaatataatagtattgttacctagtaattgtactacttatgaaataaaagaattctaagtgtttgtatgtttttggttaaattagagtagtgtgatccaatgatttgaaagattttgcaactggacacttctttctgtaatcatgttattagtgtcaacataattaggtaaatctttgatttgttgcttttcc

SEQ ID NO: 2523 - DNA, 997 bp, Glycine max
ttttttttttaatgaagaaaaatttattataaaggttataaggtcttctaagcgtataaatagatttaatggccagtgaccaatataacttcacaccatttaacagaatatggttctagcattgatccaacacgtttaaaaatatagtaggtcaaggactcccaaataaagccattcaagtttgaccacatcttgtaagaaaggtacaaactttggctgatttagtatacaaacccacataaaagtgaaaaaataataataaatactatttatcatctcagtttcaacttctgctttccagatattcaactgacacaactctattacttggggccaatgtccttaagggcacaaatctgctcctcccccatggaagacataacagacacaaccagatctttgccctcagcaaatccatccttgatctgcgaaagcagattttcatcggttggaagcctaaggtcatccttagtaccaccagtctcagtcagcagactcacaaatccatcctctgagatgtcaatgagctggtagtcaatgcgattaacatggggaacatcacagttatgggaagatgggacaatatcctcaagctttttcccagtgaagatgtcaattgcaacaaagtgacactttgcgtgtccatgcttgccagttttggaagttgaaacctccacaaccttgcatggcctgttcttgatgacaatgtaaccgtttttgcggatggttccagcttgctggggaaatgtctttgatgctccagcatcagcctttgactcgaagtggtgctcctcgtctgacatggttatggttccggcaccaggcagagcacagaagattccaagactgggccaaaccaggctctatgggcaaacaatacttcctaggactagagaagggtcttggaggttctggtgagccagcttatccaggaggacctttcttcaacacgaacagtgtgtaggagtctgcccagtagttgtaggttcctgctcgt

SEQ ID NO: 2524 - DNA, 1146 bp, Glycine max
actgcttgtacatgcgggccaaggtagtggctcagcgtgccccatatcttccaccctttggctattcctaaccattgagtacaacttcacattttagaagaataccccctcttttgctgcatcagaggagttgtaaattaagagcatggctgcacaagctcttgtatcatcatcttctcttaccttctcagcggaggctgcaagacaaagtcttggaccaagatcactccaatctccatttggcttctccagaaaagcctcctttcttgttaaggcagctgctaccccccctgtcaagcaaggatcagacagacctttgtggtttgcatcaaagcaaagtctttcttacttggatggcagccttccgggtgactatggatttgaccctctgggactttcagaccctgaaggaacaggagggttcattgagccgaaatggctagcatatggtgagataatcaatggtcgttatgcaatgttgggtgcagttggtgcaatagcacctgaaattctaggcaaggctggtctgatccctcaggagacagcactcccatggttcagaaccggtgtgttcccacctgcaggaacctacaactactgggcagactcctacacactgttcgtgtttgagatggcactgatgggatttgcagagcacagaagattccaagactgggccaaaccaggctctatgggcaaacaatacttcctaggactagagaagggtcttggaggttctggtgagccagcttacccaggaggacctttcttcaacccactaggctttggtaaggatgagaagtccttgaaggatttgaagctcaaggaagtgaagaatggaaggttggctatgttggcaatcttgggttactttgttcaagctcttgtcacaggtgttggcccataccaaaacctcctagatcatttggctgaccccgtgcacaacaacatcttgaccagtctcaagttccactgaatgtattatatgttattttacatattctttacgttgccaaaactcaactacctttctacctttctatatcatgtggacattttgttccttggtgtggcgctgtaagaaatgacatgtaaaacaactagaaacattcgccaaaaaaaaaaaaaaaaaaaaaaaaagggcgg

SEQ ID NO: 2525 - DNA, 828 bp, Glycine max
cacgcctacgtaagctgggtattcggctcgagtctgaagttcattagcaccagaaatgctaggcaaggcgagacttatcaattaggatacagcactcccatgagttcagaaccggcgtgttcccacctgcatgaacctacaactactgggcaaactcctacacactagttcgagtagagatggcactgatggtgattacatagcacagaagattccaagtctgggccaaacgcacgctctatgggcaaacagtactgcctacgactagacaaggggcttggaggttctggtgagccagcttacccaggagggccctttcttcaacccactgggcttgggtaaggatgagaagtccttgaaggatttgaagctcaaggaagtgaagaatggaaggttggctatgttggcaatcttgggttactttgttcaagctcttgtcacaggtgttggcccataccaaaacctcctagatcatttggctgaccccgtgcacaacaacatcttgaccagtctcaagttccactaaatgtattatatcatattctttaccctcttggtcttggttcttgttcgcttcgcagttaccaaagctcaaccacctttctatatcctctctttgctctttgggactctaccatcatctggacattttgttccttggtgtgccgctgtaagaattgacatgtaaaacaactagaaacattcgacatctttatctttttgctcgttagattaaccgtacccaagtttttatttatttgaattgcacaagtctgaataatgttacaattttataaactgtatatgttgtgagagaattttaaaaaa

SEQ ID NO: 2526 - DNA, 506 bp, Glycine max
ccgcggacgcgtgggtcaatatccaccaggagttggatactggtcgtgctagctagcgggccaaagtagtgcctaagtcttcctcatatcttccaccctttggcttattagtgggagcaatacatatcattcattcagaggcaacaaaggagttgtaaattaagagcatggctgcacaagctcttgtatcatcatcatctcttaccttctcagccgaggctacaagacaaagtcttggaccaagatcactccaatctccatttggcttctcaagaaaagcctcctttcttgttaaggcagctgctactccccctgtcaagcaaggatcagacagacctttgtggtttgcatcaaagcaaagtctttcctacttggatggcagccttccgggtgactatggatttgaccctctgggactttcggaccctgaaggaacaggagggttcattgagccgaaatggctagcatatggtgagataatcaatggtcgttatgcaatgttgtgt

SEQ ID NO: 2527 - DNA, 401 bp, Glycine max
tagcttaaaagaaaaggggaatgaataagggacacaagtgcaactgaaatcttacaaatccatcctctgagatgtcaatgagctggtagtcaatgcgattaacatggggaacatcacagttatgggaagatgggacaatatcctcaagctttttcccagtgaagatgtcaattccaacaaagtgacactttgcgtgtccatgcttgccagttttggaagtggaaacctccacaaccttgcatggcctgttcttgatgacaatgtaaccatttttgcggatggttccagcttgctggggaaatgtctttgatgccccagcatcagcctttgactcgaagtggtgttcctcgtctgacatggttatggttaataacacgcatcataatgtgtgatgcgtctgc

SEQ ID NO: 2528 - DNA, 2053 bp, Glycine max
  unsure (1)..(2053): unsure at all n locations
ttgaaggacaaaaagtaatgagcttggaacattcaagtctctgtatggttaagaaaaagcttacttttgtataaattgtgatggtgaagataaaaaattgttatagtaagaaaatatggagatggagggtggtgttgtgattgggatgattcgctcatgagttgtttttggtattgggtttcattattattagtggagtttggtggagaagaatctaatctgtttgtcctgtccactccattccactccaccatggctatctatctttccctttgtttgtgtttctttctaaatataattgaataaatagtaactctaatctaacacgctttctctgctgtgtctttgcagtgagtttcattgcaaagctacttttctctgtttggggataaataaaatgggttgcttttcatgtttcgattcgagttccaaggaggatcacaatctccgtcctcagcaccaacccaatcaacctctcccttctcagatttccagattgccctctggagcagacaagttacggtccagaagtaatggaggttccaaaagagaactgcaacagcctcctcccaccgtccaaattgctgctcaaacatttactttccgtgaacttgccgctgcaactaaaaactttagaccagagtcctttgttggggaaggtggttttggaagggtctacaaaggcaggcttgaaaccactgctcagattgttgctgtcaaacagttagacaaagacggtcttcagggtaatcgggaattccttgtagaggttctcatgctcagtcttctacatcaccctaaccttgtcaatctcattggatactgtgcggatggggatcaacgcctcctcgtttatgaatttatgcctttgggatctttggaggaccaccttcatgatcttcccccggacaaggaaccattagattggaacaccaggatgaaaatagctgctggggcagcaaaaggattggaataccttcacgacaaagcaaaccctcctgtcatttatagagacttcaaatcatctaatatattacttgatgaaggttatcatccaaagctttcagactttggtcttgcaaagcttggtccagttggtgacaaatcacacgtttcaacccgtgtcatgggaacttatggttactgtgccccagaatatgctatgactggacagctgactgtgaagtctgatgtatatagttttggggtagtcttcttggagctgattactggccgtaaagccattgacagcactcgaccccatggagaacaaaaccttgtcacatgggcacgtccactgttcagtgaccgcaggaagtttccaaagttagcagatccacagctgcagggacggtatcccatgcggggtctttaccaagctctagctgtggcatcaatgtgcattcaagaacaggctgcagcacgtccactcattggggatgtggtgacagccctttcttttctggccaaccaggcatatgaccataggggagctggtgatgataaaaagaacagggatgataaaggtggaagaatattgaaaaatgatgtaggtggaggatctggacgcagatgggatttggaaggatctgagaaagatgactccccacgtgaaactgcaaggatgttaaacaacagggatcttgatagagaacgtgccgtggctgaagccaagatatggggagagaattggagagaaaaaagacgacaaagtgcgcagggcagttttgatggttctaacgcttagtctcgattgtacaattcccatacgcgtcttctgtatctcagctgtgccccaggtggagctttttgggagctcatctttcataaagctggtgtaggacaagtctgaaaggccgttttggccatttactaggttctgttttgtttagaatttgtcttgtggccatttcttgcagtggctgcaaccaaacataatgaaccgggtaccaaaatcttttctacatcagccttttatgcacttagntttcttttatttattttcatttacagagtgtacacaagcatattggagttggagagtgtacattat

SEQ ID NO: 2529 - DNA, 524 bp, Glycine max
tttacattcaagaatctgttttaggattggaagatgaggctttgattgcgtgtgtgtgatcaaggaggaaagtggaatgggttgtttttcgtgcttcgattcgcgggaggacgagatgctgaatcccaatcctcagcaggaaaatcaccaccatgaacatgaacatgatcatgatcttaagccccctgttccttctcgtatttccagattgccgccctctgcctctggagacaagctacggtcaacaacaagtaatggagagtccaaaagggaattggctgctgctgttcaaattgccgctcaaattttcactttccgtgagcttgcagccgcaacgaaaaacttcatgccccaatcctttttaggggaaggtggttttggaagggtctacaagggcctcctggaaaccaccggtcaggttgtggctgttaaacagttagacagagacggtcttcagggtaatcgggaattcctcgttgaggttctcatgctcagtcttctacaccaccctaatcttgtcaatc

SEQ ID NO: 2530 - DNA, 386 bp, Glycine max
gttctaggcttggaagatgaggctttgattgatttcgtagatcaaggaggaaagtggaatgggttgtttttcgtgcttcgattcgcgggaggacgagaagctgaatcccaatcctcagcaggaaaaccaccagcatgaacatgaacatgaacatgatcttaagccccctgttccttctcgtatatccagattgccgccctctgcctctgcctctgcctctgcctctgcagtaggagcagacaagctacgctcaacaacaaaagtaatggtaatggagagtccactgctgttcaaattgcggctcaaacattcagttttcgtgagcttgcagccgcaacgaaaaacttcaggccccaatcctttttgggtgaaggtggttttggaag

SEQ ID NO: 2531 - DNA, 621 bp, Glycine max
aaaataataacaaaggaatcttctctttctctctctctctctctctttgagttgagtttcgagttgcgccattttcacctgtcctctctctctctctctctctctgtcaccgtgttgcaagtatgaaggactgttggttttttgacaacaatttcaatggtctgtcggatgagagtcttgatgatgtgatggacatggagcttttggatttgccccttgactttgaggatgtggaaactgatgctgtggaagaacaagattgggatgctcagctcaaactccttgaagacccaccaccaccacttggagttttcccactacaacaatcctctgcattctgtggacaaactcggaatgagaatgcgaaactcggcagcaagagtttctctgcttctctagcgaagactgtcagacctgcatatggcaaaactattcctgtccagaaagtctctttaaaaggaaaagatttgctccaattccaaaccaacagcccagtttctgtttttgaaagcagtagtagttctccctcggttgagaactccaactttgagttacctgtcatcccaacaaagcgtccccgtaccaaacgccggcgtctctcaaacatcagcctgctttact

SEQ ID NO: 2532 - DNA, 744 bp, Glycine max
tatggggtttctccttatcatattgaggttgcagcgaagacggagagggaatgaaatgagcaatacctaatccagttatccataatttcataagcataaacgagaaattgagagagaatgtctcgtatctctacactctatcttctcgcttacaactcctttcaggccattggatggacgatttccttaactaagattttgtacaatcttctcgtcactgcatccatcaaaggaacctatgcttccgccgccagcttaatctgttttctgcaatgcgctgcattcttggaagttatacacggagccattggcattgtgcccagcggggttttgcttcctcttatgcaatggggaggaaggacgcactttgtgcttgccattgttaggaaacttgatgagcttcaggaattaccttcagttcttatcaacttttcttgcatggagcatggcggaggtcattagatattcacattatgctttcggttgtttgggaaattgtccttcttggatgacctatctcaggtacactgcgtttattgtgctgtatcctttgggagtgggtcctggtgaaatatgggctatgtaccaggctcttccagttataaaggagaagaatctctatgcagattccttttcaagcctcccatttagttattatgatttccttaaggtggtacttatagattatccatttctctggttcaaactttacctgcatatgttcaagcaacgacgtacaaaact

SEQ ID NO: 2533 - DNA, 782 bp, Glycine max
ttgctttattatctcagtgggtttcatcactttttggtttctaggttggattgttggggatgggtcgcacacttcaaagggatctgaataggattgcagcagttgctgatacatcaccttcagaaggtctgcattatgtattgacagagacaaccctagctttgcttcggcatcctgattactgtatctcagcgtattcatctgtggacataaagcagggtattgaagatggggagaaacgtttcaatcaactttcaattgaagagcggggcaagtttgatgaagagacactagtcaatgctaataacataaagagacaaagcacaagaagccagagagcgaatgggttcagcaatgaatacatagtgataacaatcttggctgctgccgaaggagaccataaacttccaagcatcaatggaagtggagacttgaagcaagctttacagaaacttggttccattccgtcgagcagattattggcagttgaggtgttatggacaccacagaatgagaacgatactctctcagaacgtgagttacttgaagattacccacttttacggcctttgtaagttgtgaaggtatgcttgtcattctgcttctagccttctagagctatgaactgaaattgggttgtgattgcacaattaaggatcatctccagtagtactgaactaatatcgttaaaactgatgagattgtcctgctactcaatctgcaaggcaattttcagctgcggctaatgacgttgtatcacttatcaaggttcaatattaaat

SEQ ID NO: 2534 - DNA, 1097 bp, Glycine max
tggagttctatgcaattctgaaaatgggtgtgaggattttccttgcttttgcttctgggtttgaggctgtgttctttggatttgatttgtttggggtttgttagggtacagctgctacaaaagtcaaaatggcacagaaagtggctcagggggttgctgagaaaagaagaggaagaaggggtccgggcagtgttattggatccagtgctgctggttgcatttgtgctttcctcacaatttttggtgttgggggagaggcattttctcggctatggagacttgggtttgttgccagtttctgtaccaagttgagtgacactgtctcaagtgagatcgggaaggcatatggaaaaacaacgtgagtggtgaattcaggtacctagttacaactttcaagatagtcccaagaggcacagaaggggctgttagtgttgaaggaaccttggcagggattttagcatccatagttcttgcacttgtcagttttctcatcggtgaggttggttcacatgaagcaattatatgtgtactagctgctcagattgctaatcttggtgagagcataattggtgctgcacttcaagagaaggaaggatttaaatggcttaacaatgatgcagtcaatgtcatcaacatatcaatgggcagtatcatagcagtcttcatgcagcaagcactccagatctggggttcctaaacttgatgccaaggttttcacggagctcaatcatattaacgtagtgaccatcttcataagtgcttatctagaacacgggtttgagcaatggagcagtgcagataaaatgattattcatttatttgtccttgaaaaccgactcagatgtttatacttatttaaacatggatagaaacccattcttctgatcgtactcaaagcatgttggtagttacagaaattaatagaagtggcaatggaaaccacaaaactcagtaagctgtaaccatgattcaagtgtcttgtatgggaagcagtggttctttcaaaatgtagatgtgaacttccctttccttgatccaacttacttttaagaaatagaacagtttctcctaagcatttctgtctatcattttatccc

SEQ ID NO: 2535 - DNA, 393 bp, Glycine max
aacatatcaatgggcagtatcatagcagtcttcatgcagcaagcactccacatctgcggttcctaaacttgatgcagggttttcgaggagctcaatcatattaacatagtgaccatcttgataagtgcttatctagggcacggatttgaacaatggagcagtttggataaaatgattattcgtttatttgtcattgaaaactgacttggatatttatactcctggatgtttgagtgccatatgagaagcagccttctctgacacaagattcatctgcaaatttaaaatggctagaaacccgtccttctgatcatacgcaaaccatgttggttgttacaaacgtgtggcaatggagaccacataactcagtaagctgtatccatgattcaactc

SEQ ID NO: 2536 - DNA, 1880 bp, Glycine max
cctcctcttgttaaccttgttctgtttctctcttcccccttctctccgtctcctctctctctcactctttcgaggtaatttgcaatggctgaaccttccaaggtcattcacgttcgaaatgtggggcatgagatatctgaaaatgatttgcttcaactatttcagccttttggagtaataacaaagcttgtgatgttgcgtgccaaaaatcaggctcttcttcaaatgcaagatattccttctgcagttaatgctttacaattttatgcaaatgtccagccaagcataagggggagaaatgtttatgtccagttttcctcacatcaagaactaactacaatggatcaaaatcaagcacgagaagatgagccaaatcgaattctcttagttacagttcatcacatgctgtatcctataacagcggatgtgctacatcaagtgttttctccccatggatttgtggaaaagattgtaacatttcagaagtcagctggctttcaggctctcatccagtatcaatcccgtcagagtgctgttgcggcaagaagtacacttcagggacgcaatatttatgatggttgctgtcagctggacattcagttctcaaaccttgatgaattacaagtgaactacaataatgaccgttcaagggacttcacaaaccctaatctgcctacagagcagaaaggtcgatcttcacaacctggatatggtgatgcaggaggcatgtatgctcattctggagccagggcaggtggattctctcagatggccaatgctgcagccattgcagctgcctttgggggaggtctgcctcctggcataactgggacaaatgacaggtgtacagttcttgtatcaaatcttaatcctgatagaattgatgaggataaactattcaacctgttctctatttatgggaatattgtgagaattaaacttctccgaaataaaccagatcatgcacttattcagatgggagatggttttcaagcagaattggctgtacactttctgaagggagccatgttgtttgagaaacgattagaggtcaacttctccaagcatccgaacataacccaaggtgctgacacacatgaatacatcaattcaaatctcaatcgtttcaaccgtaacgcagccaaaaactaccggtactgctgctccccaacaaagatgatccatttgtccacactcccacaagacatcactgaagaggagattgtgagccttgtagaggaacatggaaccattgtcaacagcaaagtctttgagatgaacgggaaaaaacaggctctggttcagtttgggaatgaggagcaggctactgaagcccttgtgtgcaagcatgcaagcacactttctggctcagtaatccgtatctccttttcacagttgcagaatatatgagtccttattaaggagttgtggacaaccagagcaacggttattgaacacaatggggacaaggattctgaatttgggaaggatattttttatgctgatgatggtcaccttcattgtcattgtaatggtctctttgcttgctaatttactgataaaacctgaactactttttttttctctttgaatcatttatcttttcatctccattgcctctactagatatttaggtttctaacataatattgtggggcaagctttattattgcagatggatgtagtcttaaagaatagaaaaaggaggagggaagttactaccttcttcggggttgagggattgccttagggttttttataatgattgttgtatattttctgtaattcaggctaagtaggccttttctgttgtattctcaatccatttcaattttcttgtccaactcagtaaaatgctactacatttttgtttttggttc

SEQ ID NO: 2537 - DNA, 556 bp, Glycine max
gacagatggataagttttggtagcggtgtgatgagagaccaaaaaagcgcgagcaaatcttcacacttggaaccttaaattcaattaaggttctctctcttgtaaaatgctccaagggaagggagttttataacatgacctagtaacgattcaccacatcatgcgtgccactcctctttaactctctcatcctttttctctttccgtgtcaccctctttcaggttaatttgcaatgactgaaccttccaaggtcattcacgttcgaaatgtggggcacgaaatatctgaaaatgatttacttcagctgtttcagccttttggagtcataacaaagcttgtcatgctgcgtgcaaaaaatcaggctcttatccaaatgcaagatgttccttctgcagttaatgccttacaattttatgcaaatgttcagccaagcataagggggaggaatgtttatgttcaattttcctcacatcaggaattaacaacaatggagcaaagtcaaggacgaggagatgagccaaaccgaattctcttagtcacagttcatcacatgct

SEQ ID NO: 2538 - DNA, 566 bp, Glycine max
attgctgctctccaacaaagatgatccacttgtccaccctcccgcaagacataaccgaagaggagattgtgagccttttggaggagcatggaaccattgtcaacagcaaggtctttgagatgaatggaaaaaagcaggcacttgttcagtttgagactgaggagcacgctactgaagcccttgtgtgcaagcatgcaagcccactttctggatcggttgttcgcatctccttttcccagttgcagaatatatgagccagactttgataagggctgaagggaaacagttttatggttgctacttgataatcttattagggacaaggaattctgaatttgggaaggataatttttatgcagataatgtcaccttcattgtcattgtaatgcgtctctttgtttgctaatttactgataaaacctgctctacttttttctctttgaatcatttatcttctcatctccattgcctctactagagatgtttaggtttctaacataatgttgtggggcaagctttattattgcagatggatgtagacttgaagaatagaaaagtggggaggg

SEQ ID NO: 2539 - DNA, 521 bp, Glycine max
ggattttcttgtaattttgaaaaaacacagtgaaagtggtggcacggcagcaaaacaagcgacggggaagcacttcctcttccgatttgggaactaaccaaacagatcacagcttctagggttttaggttccgtccaattagcggtttctctctctctctcttcagaaatggataacagtagctcagaacagaccgtgcaagatggcaaactctacagaaacctcaattctctcatcgtcgctcatcttcgcgacaacagtctcactcaggctgcaagtgctgttgcttcagcaaccatgactccactgaatgtagaagcccctcctaacaggcttctcgacctggtcgctaagggtcttgcagtggaaaagggcgacatcacaagaggcactggtttcactgctacactgcctctgcctcacacaacagctattgatttcagctctgtgcctgatgtgaaaggttcatcaaagagcttcccaaagcatgaaacgcgacacctttcagaacacaagaatat

SEQ ID NO: 2540 - DNA, 1211 bp, Glycine max
agaagggggattacgattatttctagtcccaaagagctaacaagagattcaagaccggcatggctaatgaagaggaacagaaaaaccacctcttcggcatcaaagatctcggtcacaagactctccttcagagtgatgcactctatcagtatatacttgaaaccagtgtctatccaagagagcacgagtgcttgaaagagatacgcaagatgactgcaaaacacccactgaacatcatggcaacaccagcagacgaaggacaacttctgagcatgcttgttaagctcacgaattcaaagaacgccttggaaattggtgtattcactggttactctctgctctccactgccctggctcttccccctgatggaaagatcttggctttggatgtgaatcgcgaatactatgagttaggattgccaataattcaaaaagctggagtggctcacaagattgatttcagagaaggacctgctcttccgtttcttgacgagatgcttaaagatgaaaataaaaaggggtcgttggatttcgttttcgtggatgctgataaggacaattacttgaactaccacaagagggtgcttgagcttgtgaagattgggggactgatcggctacgataacaccctatgggctggatctgtggctgcaccacccgatgcaccattgatggattacattaagcctcttcgcggccatgtgatggagctcaacaagtatctggctcaagattcgaggatcgagatttgccagctccccgtgggtgatgggattaccctgtgccgccgcatcatctgatcattttctcttcatctagatttttcatgacagatattcctttcattaaaacaggttgcgtgaatggtggagttctcaaatgttctactgtcttttctagatctttgtgtgtttcttgtcacgctagaaatttagctgaaaggatacaaatcaacatttatcttatttatctacttgctaatcctgtattcagctttggaatagagttgcaaaaaaatgattttaataaaattaagagagaagctatgttaaaaaagcatacttttcatggataaaatatggaaattaattttgaaccgtagatctaattggccttaatataaaaaggataaatgacaccgaattgtatccgatcataacatgtacaatattgtcgtggttggagttgctctgggtctattgaaaaattaa

SEQ ID NO: 2541 - DNA, 1070 bp, Glycine max
agacgacagaaggggatagcaaatattcagagaattccaactgataaaaagaatattcagagaattccaaagacagagatgactgtcattaaggaagagcaacaaccaaaccaaatagctggccacaaagaacttggtcacaaaagtctccttcagagcgatgcactctatcagtatatacttgaaaccagtgtgtacccaagagagcatgagagcttgaaggagctacgagagttgacggaaaaacacccttggaacctgatggctacaccacctgacgaaggacaacttctaggcatgctccttaagcttatcaatgccaagaacaccatggaaataggcgtcttcactggttactccttgctttccactgcccttgccctcccttctgacggaaagatcttagctatggatgttaaccgggaatattatgaattggggttgcccgtgattgaaaaggctggagtggctcacaagattgacttcagagaaggacccgctcttcctcttcttgacgttctcattaaagacgacaagaataagggagctctcgatttcatctatgtggatgctgataaggacaattacttgaactaccacaagagggtgattgagcttgtgaagcttgggggactggtcggctacgataacaccctatggaatgggtccgtggtggccccacccgatgctcctctcatggattatgttaagtattatcgcgattttgttatggagctcaacaaagctcttgcacttgattcaagggtcgagatttgccagcttcccgttggtgatgggattaccctgtgccgccgcatcatctgatcattgtgctccttccctccccttttacctacttcacctgccacatatggaaaaaacacaaccttctactattttacctaatccttaaataaacataatgtgtgtctgcttggatagttactctgttgttgagtttttgtcttctacgcaattatattcataatgtttctcttccttaaaacaaacacatgttttgaatcaaaatcgtataagatatatatatggaatgtgtaagcaattattag

SEQ ID NO: 2542 - DNA, 463 bp, Glycine max
gaagacgacagaagggatcatttaaaaattatatttttactatctctttttctgggtaattgtttttattaatattttaaaaaataattaagtaaaaatatgtgagaaaaaataattaatatgtctaaaaattaaaaaataatcttataaaaaacaaataaatttatgaaaaaaatttataattaagattaaaggtattacactatcatgtattaagtcatgaatttaatttaatatttatagcttatttacttgcatggtttacatattagatcttggctttggatgtgaatcgcgaatactatgagttaggattgccaataattcaaaaagctggagtggctcacaagattgatttcagagaaggacctgctcttccgtttcttgacgagatgcttaaagatgtgggtgtacagtttctcaccatctcaagttttatccatgattttttgttaacattggg

SEQ ID NO: 2543 - DNA, 683 bp, Glycine max
  unsure (1)..(683): unsure at all n locations
tcccgggcntnngcaggaatatcggcaccgagcacgctttctttgacgagatgctatacaagatgcaaaataacaaaggggggtcgttggattttcgtttatcgtgggatgcctgataagcgaccaattaccttgacacttaccanncaagagggtatnnttagagcttgtgnaagaattgnngaggactgatctggataccgataaccactccttatggnngctggatctgtggctttgcaccacaccgatgcaccattgatggattacattaagcccttttcgcggccatgtgatggagctcaacaagtatctggctcaagattcgaggatcgagatctgccagctccccgtgggtgacgggattaccctgtgccgccgcatcatctgatcattttctcttcatctagatatttcatgaccagatatttccttccattaaaacaggttaattaggcaaattggcaaaaacgttgttctcaccttctcgctaagccaatctgtcggtttagcgagcatacgctaagcgcgacactcagtggctaagcgcgaggaagaatctagaagaagatgagctgtcaggttcgctgagcgcaccgctccaggtcatcaagcgcactacttcagctcaactgctaagcgagagaagcgcgctaagccacaatccacttatgcgtgccaag

SEQ ID NO: 2544 - DNA, 1171 bp, Glycine max
tcccactccaaaaataacccaaactctcttttaaaaaaaaacccgaacacatagaaacagagaaagtgtgagtatcgccgccgtagccctaccctctcttcatattattctattgcctttctttaactccctcactttttcagttttgaagcgcttccagtggcgtatttacggttatacccttcttgttatgatagcttccaatcggcgtcagcacagagccgaagctcttggcttccacacatattttcggtgctgtcgattgagatacaaagccgccaagccagccgagccaatcttcaaattccaactttacccctaccggttaatattctcctcttttaacggctatttcgatcatgccaaattcgaagaacaaccgtaacggacagggcgagcctcaccgccgggggaagttaacgaaaaaatcatcgtccttctacggtcactcatcaccggctgccatgtccggcgatccaatcctgcgaccgaagacggtgccggatcttttgtcggagaggcatcgtgcggcagcgacgccgctggtggaagttgtgccaaaacagccgccaaagttgttgttgaaggttactcccatgggaagcttgggaccggtgcaggttgtgatgacgccggaatcgacggtcggagatttagtggcggtgacggtgaggcaatacgtgaaggaaggtcgccggccaattttaccgtcgaacgacccttcgcacttcgacctccattattctcagttcagcctacaaagtttggatagggaggagaagctgatggatattggatcgagaaacttttttctgtgtccgaggaagtgtggtggtaatggggacgagggtagtggaacgacgccgtttggttcgtgttcaagagaggctgacaaaacgaacaagggtggcgcgtttggttggttaaggttcatggatttctctcggtaaaaattattattattattggaggctactagtgtttgcccatgccagccacatgttatttggagatatttttttattatttttaattttaattttagaatgcctcagtgagtgaatggcccgctgttgcttgtaaaaaaatacgtctgtgatgtttgacccgggtataatgtctagactcttgcgtaataaaagtcactgatgtttgacatttagatgtcggg

SEQ ID NO: 2545 - DNA, 267 bp, Glycine max
caatttaaaaacccaaaaggattaaaaacacaggggcacagggtccttagcgccgccgttgccctaccatcttcatattatcctattgctctttctttcacgttttcctggtttttaagcccttccagtgccctatttacgcttatacccttctggttatgatagcttccattcggcgtcaccagagagccgaagctcttggcttccacacatactttcggatacgtcgattgagatactaagcctcctaggagacgagtaatcctc

SEQ ID NO: 2546 - DNA, 1164 bp, Glycine max
gcatcaaatggaagtgtttcttcatggggttttggagatgaaactaaaccgtgggcgactaagcttgtttactcggttgatttatggcaagatcaagttcgttgcttcatagaagaggtcattggtgaaccagtctatcttgtgggcaactcactaggaggattggttgcattgtattttgcggcaaacaaccctcatttagtgaaaggtgtcgcattgcttaatgcaacacctttttgggggtttctgccaaatcccataaaaagtccaagactagcgaaaatatttccatgggccggaacattccccctaccttcaagtataaagagacttacagagttattgtgggagaaaattagtgatcctaaaagtattgctgaggtacttagtcaggtttatgcagatcattcaacaaacgtagataacgttttttcacgcatagttgaaaccacaaggcatccagctgctgcagcgtcatttgcttcaatcatgtttgctcctcaaggagaactatcctttaatgaaacattatccagatgtcgagcaaacaatgtgccaatctgcctcatgtatggaaaagaagatccctgggtggggccaatttggggtctccaggttaaaaggcaggtgcctgaagctccatattatcaaatcagccctgctggtcactgccctcatgatgaagttcctgagatcataaatttcttacttcgcgggtggatcagaaacctagagtctcagggttctgtgtcattaccattgcttgaagatctagacagtatgaagcactctattattgacagggaattagaatttcccagagaaggttcaaaaaagtcagtgatggtcagatatttcgcttccaatttctcactttgggacaggataagatctttcatcagatctcaatccaagttcagtaatattctggcagccaaacctcaatgacagggtgaatcatatggcatcttcaaatataaatcaactttgtatactgtcttctctttcatagtttgtataaagagaaaacaaacacaaatgctttagaatcataggtaaaatcttgtatatataatatacctataattactcaccaagaaagcatgctagtgaacaactattactcaggagatgttttatgttatacatacgagcatttttttt

SEQ ID NO: 2547 - DNA, 858 bp, Glycine max
cgacaaatgtagatagtgtattttcacgcataattgaaaccacgaggcatcctgcagcggcagcagcatttgcttcaattatgtttgctccccaggcagaattatctttcagcgaagcgggtgtctagatgtcagaaaagcaatgtgccaatttgcctaatgtatggaaaagaagatccctgggtgaagccgctttggggactccaggttaaaaggcaggtgcctgaagcttcatattatcaaattagccctgctggtcactgccctcatgatgaagtccctgaggtcataaatttcttgctacgtgggtggatcagaaatctagagtctgagggttctatctcattgccactgcttgatggcctagacaatctgaaacaagccaatgccagggagttagaatttatgaaagaaggttcaaaaaaatcagtgatggtgagatttttcgactccaaattctccctttgggacaggataagatcttatatcaaccctcgattcaagttgagaaattcggcaaccaaatctcagatttagtttaataatgtacatttaaaattattattttttgattgatccatgtacattagacattagtcattctataggattcggctgcccctctcgtataaaaaaaaaaaaaaaaaaaaaaaaaaaaaagggcggacgaataaaaaagaaacaaagcttacgaacgcgtgcatgcaacaaaataggggcggctatttttagaggttaacaagctatcgaccgcgcgcatgcaaagaaatacctttcttataaagccctgtaattaaataacttggtcgccgtttaacaaattcgtgtttgggaaaaccgtgtcataaccaaaattaa

SEQ ID NO: 2548 - DNA, 759 bp, Glycine max
agcgaaatgaaatagaaaatgtaaaagatatataccaccgaatattagatgggtccgaagtccgaagcgatcggcaggcagtgatagcaaagagaagatcatttcataatcagactcacctaactccgccatggctgctgttccctctactttcgctctaaccaaatctgcattgtccataaacaagctggaccactctctggtcaagatcaaaccatacagcttctctctgaatctaaaccgtctagggaggatggaaacatctttaaccagaaggcctctaacaattcaagccacatatagtgatggtggaaggcccagcagtgctagtgtatttgttggtgggtttctcttgggaggattaatagttggtactcttggttgcgtgtatgcacctcagatcagcaaggccctagctggagctgacaggaaggagttaatgagaaaattgccaaagtttatatatgatgaagaaaaggctttagagaaaacccggaaagtactggctgagaagattgaacaactgaatgctgccatagatgatgtttctgctcagctaaggtcagaggaggcctcaaatggagtagctgtgaactctgatgaaattgaagctgccacatgagactgctgcagtgatgtcatggtacacaatcggctattactctgtccagtaaaaatcttgttggtacaaaatgtatttgactttcttggaaatctttctatttcttcttaataataaactaaatgggtttttggttt

SEQ ID NO: 2549 - DNA, 411 bp, Glycine max
gatccgcatttgtctgaagtctgaacccatcggcagagaagaaagtgtttagctttctcttacttacatcatcacttgctcgctgtgatattatctaacaaattattcatttcattgttcatactcactcgcacctaactccgccatggcttctcttcccaccactttcgctataaccaaatctgcatcctccataaacaaggtggaccactctctggtcaagatcaaaccatacaacttctctctcaatctaaatcgtcaagggaccatgcaaacatctttaaccagaaggcctctaacaattcaagctacgtatagtgatggtggaaggcccagcagtgctagtgtatttgttggtgggtttctcttgggaggattaatagttggtactcttggttgcgtgtatgcacc

SEQ ID NO: 2550 - DNA, 969 bp, Glycine max
gtccaaccaagccttcgttccggcgccaaaaaaccaccagggggggactcgaagtgtgaagcactgagcagttgaggaaatgggaacccttgggagagcgatctacagcgttggtaactggattcgagaaactggacaggccattgatcgtctcggttcccgtcttcagggcggttactacttccaagagcagctctctaggcatcgaactctgatgaacatatttgataaggctcctgttgttgataaggatgtatttgttgcgccaagcgcctccgtcattggagacgttcaacttggaagaggatcatccatttggtatggagttgtcttgagaggtgatgttaacatcatcagagttggaaatggaactaacattcaggacaactctctggtgcatgttgcaaagtcaaatttaagtgggaaggtgttgcctacaattattggggataatgttactgtcggccacagtgctgttatccatggttgtactgttgaggacgaggcttttgttggtatgggtgcaatactacttgacggtgtagtagttgagaaaaatgccatggttgctgctggtgcccttgtgagacagaatacaaggattccttctggcgaggtatgggcaggcaatcctgcaaagttcctgagaaagctcactgacgaagagatagctttcatctcccagtcagctaccaattatactaaccttgcacaggtccatgcggccgaaaattcaaagtcctttgatgaaattgagtttgagaaggtgctacgaaagaagtttgcacgcaaagatgaggagtatgactctatgctgggtgttgtgcgtgagatcccaccagagcttattcttcctgataatgtcttacctgataaagcagataaagctcttaaaaaatctggtatttaaaagcagtgtttttctattccaatcttgaaatgacatcatgggactctattgttttttgc

SEQ ID NO: 2551 - DNA, 782 bp, Glycine max
cgccgcccgagatggggttgttttgcttgtggatttgagggtaagctctatgtgatgggtggaaggtcaagctttactattggaaactccaagtttgttgatatatataaccccgagagacatagctggtgtgagattaagaatggttgtgttatggtcactgctcatgcagtattaggaaagaagttgttctgcatagagtggaagaaccaacggaagctagctatattcagtccagaggacaattcatggaaaatggtaccagttccattgacaggaagctcaagcattggttttcgaattgggatactagatgataagttgttgctattccctctggaagctgaaactgcttttcaaacattgctgtatgatccaaatgcaactctggggtcagagtggcaaacttgtgacataaggccatctggtttgtgcttgtgttgtgtaacaatcaaggcatgaaaccttgtcttatctggctctatggagtgatggatacatctatggaattctctgcattttatcaagaatgaagacagcagtgagtgtgagtgttcctcacgatcacatcatactattatctgattttaattttgtgttttagcttgtttgtggctgttagttacttggctcctagtgttatgagggactaattcccttggtcttgtgattgtctacttttgagtagcactatttcaaaccgtggtgggtgagttaattgtttattgttctcttttgggctttttgatataatataaatcaagcgatagctttagaatttt

SEQ ID NO: 2552 - DNA, 431 bp, Glycine max
ctcgagccgctcgagccgggaaaatcttctctcttccctaggaaggttgaatgatttggaaaaatgagttctggcaatgtgaagccagaagaagaagccctagaaaaggagaatgtaggtgttcctgtccctgaaatttcagaaccaaaagagcagaaggctggaagtaactgcaagggaattgagcagattcctttgtctggggaaaatgaagaggatgtgctagttaatataactgggagtgggtccataatttctggtggcaaggcagtggaagatgcttctgaggatgtcactgatgccacgccttgcagttccagttcttttggtgatacagattctggcttagaggatgcctcagcctcggcgttcaccaatacggtagtggaatcgcctttgtgtgatggtgatcaaagtaagacttctctttg

SEQ ID NO: 2553 - DNA, 886 bp, Glycine max
ctgttgtgtctgaaagttggagtgttttctcgtttgctgtgctcagctccttatggagctctcactctctccaacttcacatcgagttccttccacaattcccactttgaattccgctaaactatcatccactaaggccaccaagtcacaacaacctttgttcttaagattttccaaacacttcaactcaattgggttgcaccatcacagtcacagatgctgctcaaatgctgttcccgagagaccccagagacccagttccataagggcttgcactggagttggagcttctggatctgatcgtccattagctgaaagacttttagatctgaaagatgcttgttggagatttttaaggccacatactatacgtggtacagcactaggttcatttgctttggtggcaagagcattgattgagaacaccaatttgataaagtggtctctttttttcaaagctttctgtggtctttttgctctgatttgtgggaatggttatatagttggcatcaatcaaatctatgacattagcattgacaaggtaaacaaaccttatttacctatagctgctggagatctttctgtccaatctgcatggttcttggttatattttttgcagctgctggcctgtcaattgcggggttgaactttgggcccttcattttttctctttacacacttggccttttcttgggtaccatctattctgttcctccattgaggatgaaacgctttcctgttgcagcatttcttataattgccacggttcggggttttctccttaactttggtgtgtactatgccactagagcttcccttgggcttgcatttgaatggagctctcctgtggtttttatcacaacatttgtaacatttttcgcactg

SEQ ID NO: 2554 - DNA, 276 bp, Glycine max
ggagtgggtgaggagaatcgagatgatgcagctgcggccgaagattttggcggcggtggagagtgcgtggcggcgggttccgccgtggagggaggcgttttacggcgccggaatgaggccggtgcagttaagccagtttgcggattttcaagcagagtgcctgttagcgaactcgcaaagcacagggagttcacgtggcacaacgccagaccgaactggtgcttttctggcatgatagggccattggttgccacgtcagcatggcgctgtgacaac

SEQ ID NO: 2555 - DNA, 1506 bp, Glycine max
ccatcgagccgaatcggctcgagcttcaaacacaacacacacacacacactgtgtttgtgaaactccctctcacacacaagtcacaaaaacaacttgtgttgttccaatggcatcagcaacaccccttttgaaagatgagctcgacatcgtgatccccacgatcaggaatctggatttcttggagatgtggaggccattctttgagccttaccatctcataattgtgcaagatggtgacccttcaaagaccatcaaggtccctgaaggctttgactatgagctctacaaccgcaatgacatcaacaggatccttggccccaaggccaattgcatctccttcaaggactctgcatgccgttgctttggctacatggtctccaaaaagaagtacatctacaccattgatgatgactgctttgttgccactgatccatctggacacaagattaatgcacttaaacagcatatagaaaacctcctctgtccatccacacccttttttttcaacaccctctatgaacctttccgagaaggtgcagattttgttcgcggttaccccttcagtctccgggaaggtgtaccaactgcagtttctcatggtctttggctcaacatcccagattacgatgctcctactcagcttgtgaagccacttgagaggaacactaggtatgtggatgctattttgaccataccaaagggcactttgtttcccatgtgtggaatgaacttggcctttgatcgtgatctcataggagcagcaatgtactttggtctcatgggtgatggtcagcctattggacgctacgacgacatgtgggctggctggtgctgcaaggtaatctgtgatcacttgggattgggaatcaagactggtctgccctatatctatcacagcaaggccagcaacccatttgtgaacttgaggaaagagtacaaaggcatattctggcaagaagacattatcccgttcttccagagcattgttcttcctaaagaagctaccactgttcagaagtgctacattgagcttgccaagcaagtcaaggaaaagcttaccaaggtagatccttactttgacaagttggcagatgccatggtcacttggattgaagcttgggatgagcttaacccagctggagcatcagtggccaatggcaaagcatgaatcagttttggttaactgcataacaacagccacagaacttgaagtggaactatttatatactgtattttttccccttagtatttattttcaacttaacttttattcttggcttgaattttgcagcattgttagctgtaattctatttagtaacttaatgatttgagcttagaaagaacaagtacacccgtagggcgttactttctttttattactgtttaatgggtagagttcacatggcagcatttcgttacatgtgaaataatagaaaggttattgatgtatgtcttgtttattactgagtataggagtatagatccatagtggtcaatttttaa

SEQ ID NO: 2556 - DNA, 653 bp, Glycine max
ctcgagccgaatcggctcgagctcctttgagacgcgtcactcccaaacaccgtttttgtgagtgagttcaaagcaaacaaatactaaaaccatataaggttctctcgctcttgttactaattccaaattacaaacaacaacgcagtcctctctctctctctccctctgctaatttaaactccgttttccatttccttttataggaaggaggaaggaacgaagctgaatctgaatctgaatcggaatcgctttgtctttgaaattcgcactctctctctctctctctctctctctctctctctcgtgtctctatattgagccacttcgaatccgtcgcctcagctgcagatcacatcgagtttcacccgaatgctctttctggactcgatttagatcgagttcttcataccctgatagtgtgggaggatatacatgaagaacgggataatggaatgcagtgtttgccattccaaattggtttccccctccgccaaaactatatcaagggcttatgatcgccacaaaagtagaatatcgtccaagcaacgtgcactcaacgtctttttggtcgttggtgattgtgttctagttggcttgcagcctatccttgtctatatgtccaaggaggatgggaaattcaattttagcccaat

SEQ ID NO: 2557 - DNA, 1542 bp, Glycine max
cagggcgcaaggtgttgagtgtactcggcgtcgagatcggcgaagctgagggacactcactctttgactcttcttcgtctcaaacctcttcgttccttcgattcattccatttcttccaaaatggccaaagacccagttcgcgttctcgtcactggagccgcagggcaaattggatatgctcttgtccctatgattgctaggggagtgatgctgggtcctgaccagcccgtgatcctccacatgcttgacattcctccagcagcagagtcattgaatggggttaaaatggaattggtggatgctgcattccctcttcttaaaggtgttgttgctacaaccgatgtggttgaggcatgcactggggtcaatattgcagtgatggttggtggattcccatagaaaagaaggtatggagaggaaggatgtgatgactaagaacgtctccatttacaagtcccaggcttctgcccttgaaaagcatgctgctgccaactgcaaggttcttgttgttgctaacccagcaaacaccaatgcattgatcttgaaagaatttgctccatctattcccgagaaaaacatttcttgtttgactagattggaccacaatagggcactgggccaaatttctgagagactgaacattcaggtttctgatgtaaagaatgtcattatctggggcaatcactcatcaacccaatatcctgatgttaaccatgcaactgttgcaacctcagctggggagaagcccgtccgcgagcttatagctgatgatgcctggttgaatggtgaattcattactactgttcaacaacgtggtgctgcaattatcaaagctagaaagctttcaagtgcactatcagctgctagtgctgcttgtgaccatattagagattgggttcttggaactcctcagggcacctgggtgtcaatgggagtatattctgatggttcctacaatgttccagctggactgatctattcattccctgtcacttgtgccaatggggaatggacaatagttcaaggacttcccattgatgagttctcaaggaagaagttggacttgaccgcagaagagctttctgaggagaaggcattggcttactcatgcctaaattagagaccatcgctccttcttggctactgtccttgttagtaggttcccatggtttgcccacagaagtgtagcttcaattttgaataatgctccttctaagataccaaggaactatcactcgagagagtttgtctttcattggaattacttgtatttcaacatctaatccttttaggaggatagtatatttgagctttacagttttagtcatggaattagaccatgggccgcatattgaattttggatcagtcctctaattttatgtgttagtgccccttttttatggctagaactttttgctgtgtttgtggtggctgtacaagatttcttgatgtatgtgggatgcacaagcgtgcaaactcatacgtagagtattatgcactgctattacgcaataaggtcatcatggattatttttaaaaa

SEQ ID NO: 2558 - DNA, 1278 bp, Glycine max
actccgccgcccccacctccaccccgaacccgtgcacctccgttatcagcttctcgttatagtactggtccccgaaagccggcattgtcaccatcggaaccccggagctgacgcctccgccaccgcgttccacccgcagtgcgttaaaaatcctcccaccgcagggtggttcaggatcaacggctgcggcgcccatcccttaatcagcatgcctctgttctccttagctatcttttcctcaaaccctgccggcaaccactttccggaagaagaagaagaatctccttcttctccgtctttgtttttgcgatgcaccacccaaagaaaacaatgccctgacccttcgagtccggtagcaatctggtaaagctgctcgtcggagatgagagaaaggcttccgaaacaaatgtagagaaccgaagattctttctttgagtcaagccacgtgagacaatcgtgtctactctcatcaacagtactacttttcaccgtcttttgcaccatgagggagcttggcccaacatgccacaccttgcgccctgtaagtttctggtagtgttgagtgtactcggcgtcgagatcggcgaagctgtttacgatgacgccgtgactgtcctgttccccgtcgaggagagattcggttaaggcggcgaaaccgggggaaggcttgacggggagagttaaagggtggggtagatcaggaattagaaaaggcccagagtcggaagcgaaggcttcagggtgggttttaatggcgtggatcatgcagacgtcgaagatggaaatagggttgaagactagccgcgagatggagagtttctgggagaagtctttggtccaggtgaagaggatgtcagggatgaagacgtccggtggagagtgtttgaccagagactcgagctggggcatgatgagatgcgccgccatgtggatcttgtaggcggtttcattgttggtggcggcggagaggtgctcgatgccttccggtagccctacgtgggcgttggggaacttgatgatgtggacgcggatgtggtggccggaggcggtgtccttgtcgatgttctggtcgaagagttgagcgttggcgggggtggtgatgatggtcacgtgctggcctcgtgccgccaccaagcgagccagctggaccagagggattaggtgccccggtgagaagaatgggaggaagtatattttcagtggccgagatactgatgctactctttccatctcttctcttactcttactctctctagtctgatcgcgtgggtccagac

SEQ ID NO: 2559 - DNA, 721 bp, Glycine max
cacaacggggccgcgatttacaaagtaaaaagcttttcaggtgccctatcagctgtaagtgcgcttgtgacaatattagagattgggttcctggaactcctcaggggcacttgggtaatcaatgggaagtatattctgatggttcctacaatgttccagctggacttatatattcattccccgtcacttgtgccaatggggaatgggcaatagttcaaggactttccattgatgagttctcaaggaagaagttggacttgactgcagaagagctttctgaggagaaggcattggcttactcatgcctaaattagacaccattgctttttgtctactgtccttgttagtaggttcccatgttttgcctatagaagtgtagcttcaattttgaataatgctccttctaagatacaaaggaactatcactggagaagagtctgtttttcattggaattacttgtatttcaacatctaatccttttaggaggaggatatttgagcccatgggccgcatattgaattttggattagtcctaattttatgtgcgttagtgcccccggttgaactatttggtgtgtttgtggtgggtgtacaagatttttgatgtatgtgggatgcacaaagcgtgcaaacatatacttctaggccttgtggtcgagtattatgcactagtattacgcaataaggtcatcatggatatgctttttaaaaaaaaaaaaa

SEQ ID NO: 2560 - DNA, 1344 bp, Glycine max
  unsure (1)..(1344): unsure at all n locations
gtgtaaatctcaagatcagatcctcatctaccaccattccaggtgtagccatcaaaacaacgtttgtttaacaaaacccattatcagatcagatccgatcagatcctcttcagattcggatcaccgccgagtccatgagcacgccagcgctttcagggggcacgggcctcttctctggattcacgcgtttatgcaagggccttgcggtggtgcttgtttgcggtcacattgcggttcagtttatcccttcagctgttaactatcttgctcttattcccgccaggacaatcccatttgcctggaatctcattacagctggatatgttgaacaatctatatatggggtagtggtcagcacattaagtctcctgtttattgggaagctgcttgaaccaatatggggctccagggaattctttaaatttatctttgtggttaatcttctaacttcagtatgtttattcatcactgctattgccttatactacattacaaggctggagacttacctttacatgccactttctggatttcatggagttgtatctggtttcttggttggcattaagcaaattataccagatcaagagcttcctttcattaagataaaaacaaagtggttgccatctatcactgtattgctttccattgctattagcttctggacactagaagctacagcatatcttccaaccattatatctggcacgtatataagctggatttatcttagatactggcagaggaaaccagaaactaaacatagaggtgatctgagtgaagattttgctttctccacatttttcccagaatttttaagaccagtcatagaccctatcgcttcaatatttcatcgaatgctctgtggaagatatgatgcttctaatgatgatggctacagtctggaaaatgagcctttaccaggttcagactcaattgaggcatccaggagaagagaaagaggtgctcgagcactggaagaacgattggctgcagagaggttggctgctgcacgacgtgagttgcaaagagaggctgaggaaaatgtataattccccagcgtttgtaaattttggatcagttcaggcaatatgcacctattaggagtgatattttcagaggtcgtacagtaattagaaattttttgtttaggtcaaggaaaattttaatgtggttttgccatggactatgatctttacaaaaccgaaggtttctctttcttttgtcagataaatatatttgactttcttgtgtactttacacaaatacatagaatctaaagagtttttccnnnnnnnnnnnnnnnnnnnnnnnnnnnnnnnnnnnnnnnnnnnnnnnnnnnnn

SEQ ID NO: 2561 - DNA, 411 bp, Glycine max
tgccggttgcgagatgacgacagatggggggtctctgaagatcagatcctcatcttctaccatttcaggtgctcactttcttcgcccatttttatttgtttgttgttttaacaaaacccataatcagatccgatcctcttgagattgggatcaacgccgagtccatgagcacgccagcgctttcagggggcacgggcctcttctctgggttcactcggttatgcaagggccttgcggtggtgcttgtttgcggtcacattgcggttcagtttttcccttcagctgttaactacctggctcttattcccgccaggacaatcccatttgcctggaatctcatcacagctgggtatgttgaacaatctatatatggggtaatggtcaacacattaagtctcctgggtattggga

SEQ ID NO: 2562 - DNA, 952 bp, Glycine max
gggataaggatttgatacccaaatcagccaatgtgttaagagggccttcaacagccacgaccgtgatcttgcacgtgccccttttttgttgttgtggtgtttcatttgtgaaactaacaacaacacaaggccatcatcatggcagctgcttccccaatggcaagccaactcaagtccaccttcactaggactcttgtagctcccaagggcctctctgcctcttcaccactccacctcctgccttctagaaggcaatttagcttcactgttagggccatccaatcagagaagccaacctatcaagtgattcaaccaatcaacggtgatcccttcattggaagccttgaaaccccagttacatccagccccttgattgcatggtacttatcgaacctgcccgcatacaggaccgcagtgagcccactactaagagggatcgaggtgggcctggcccatggctaccttctggtgggcccattcgtgaaggccgggcctctgaggaacaccgagatcgccgggcaagcgggctctctcgccgctggtgggcttgtggtgatcctcagcctttgcctcacaatctatgggatttcatcttttaacgaaggagacccatccactgccccgtcactgaccttgacgggccgcaagaaggagcccgatcagctccaaactgctgatgggtgggccaagttcaccggaggcttcttcttcggaggcatttcgggtgttatttgggcctacttcctcctctacgtcttggaccttccttactacatcaagtgaagaaagtgcttattatctttgtttactttttgttgttattcattctctatgaatggacaatgggtggaaatggatccttatttgtgcaatagagatggatgtaaatgatgtattgtatgactctcaacatgttacaatgttaaattctctctctcctgttctggccttc

SEQ ID NO: 2563 - DNA, 452 bp, Glycine max
gtgaaggccgggcctcttaggaacaccgagatcgccgggcaagcgggctctctggccggcggtgggcttgtcgtgatcctcagcctttgcctcacaatctatgggatttcatccttcaacgaaggagccccatccactgctccgtcgctgaccttgacgggccgcaagaaggagcccgatcagctccaaactgctgatgggtgggccaagttcaccggaggcttcttcttcggaggcatttcgggtgttatttgggccctacttcctcctctacgtcttggaccttccatactacatccaatgatgaatgtgcttactagctttctttactttttcttattcattctccatgaatggactatttgtgcaatagagatggatgtaaatgatgtattgtatgactctcaacatgttataatgttcattcctctctcccactctccccctttttt

SEQ ID NO: 2564 - DNA, 435 bp, Glycine max
  unsure (1)..(435): unsure at all n locations
ggtttttgatacgaatatcagccaatgagataggaggggcttcaacagccacaaccttgatcttgcattgagccatgaaactacttagccacttgggttcctcactagagacacttgtctattaactcttttttgttgttgtggtgtttcatttgtgaaactaacaacaacacaaggccatcatcatggcagctgcttccccaatggcaagccaactcaagtccaccttcactaggactcttgtagctcccaagggcctctctgcctcttcaccacttcacctcgtgccttctagaaggcaatttagcttcactgttaaggccatccaatcagagaagccaacctatcaagtgattcagccaatcaacggtgacccattcattggaagcctggaaacnccagttacatccagccctttgatcgcatggtacttgt

SEQ ID NO: 2565 - DNA, 361 bp, Glycine max
gggataaggatttgatacgcaaatcagccaatgagataagagggccttcaacagccacaaccttgatcttgcacttagccagttcggtccctcacttaagccactgtgtggaactaacaacaacacaaggccatcatcatggcagctgcttcccctatggcaagccaactcaagtccaccttcactaggactcttgtagctcccaagggcctctctgcctcttcaccacttcacctcctgccttctagaaggcaatttagcttcactgtttaggccatccaatcactgaaggtacaccaccttctccaatttacgttctaattagtaattactctcttttcttgttatttatctatctaat

SEQ ID NO: 2566 - DNA, 2489 bp, Glycine max
ctcgagccgctttcttcccagcttcctctccttctttctttctgcttaaggtctacacaagttctctgcttcttctccccctattgacctttggtcatcacaagcgaaaacccacttctggatcttctggtgtaaaggccattagaagctttagaaattttctaattgagttggtgtatagtgttgaagggggtgaaatctggagcccagtttgttagttgttactcacttcatctgtaagctcataggttgaaccctctttttttggagacttacctgggaaaagatgatgatgtttgaagatatggggttttgtggcgatttggatatgttatgtgtttctcttggagagggggatattgctgtgagacaaactgaaccggatcctgtagttgaggatgactacagtgatgaagaaattgatgtggatgaacttgagaagaggatgtggagggacaaaatgcgtcacaagcgattgaaagaacaaaccaagtccaaggaagggactgatgcagcaaagcaaaggcaatcccaagagcaggcaaggaggaaaaagatgtcaagagctcaagatggaatactgaagtacatgctgaagatgatggaggtttgcaaggcacaagggtttgtttatgggataattcctgagaaggggaagccagtgactggagcatcagataatcttcgtgaatggtggaaggataaggtcaggtttgatcgaaatggtcctgctgccatagccaagtatcaagctgataatgcaattcctggaaagaatgatggatgcaattccattggtccaacaccacacaccttgcaagagttacaggacacaaccttgggttctctcttgtcagcacttatgcagcactgtgatcctcctcagaggaggttcccattagagaagggtgttcctccaccatggtggccaactgggaatgaagaatggtggcctcaaattggtctacctaaagatcaaggccctccaccttacaagaaaccacatgacctaaagaaggcatggaaggttggtgttctcactgcagtcatcaagcatatgtcccctgatattgccaaaattcgcaagcttgtgaggcagtccaaatgtcttcaagacaaaatgacagcaaaggaaagtgcaacctggcttgccatcatcaaccaagaggaagccttggctagagagctttaccctgattattgccctccattttcctctgctggaggtaatggatccatggtgatcaatgattgcagtgagtatgatgttgatggggctgaagaagagccgaacttcgatgttgaggaccggaagcccgaccatcttcatccatcaaaccttgggatggagagaatgatgggaaggatgccaattcagcaaccttctcatcccatgaagggagatgttgtcacaaacctagatttcatccggaagaggaagatttctagtgacttcaacatgatgatggatcagaaaatctacacatgcgagcatccccaatgcccttacagcgaagttcgccttggtttccatgataggtctgctagggacaatcatcaattgaattgtgcatacagaaacagttctgcagattatggtggtggtcccaatttccatgctactgaggataagccagtcatattcccccagtcctttgttcaacccaacactacaacacagtctgcaagtttggttgcaccttcatttgatctaactggtcttggagttccggaggatggacagaaaatgattagtgaccttatgacaatctatgatacgaatgttgtaggaaacaagaacttaagttcctccaactgtgtagctgtagaaaatcataacctttctcaggccagcttacaacaacaagaaagttatttccctggtcaaggaatggtgttggaagggaacttctttgcacgagaggaaggtcaatttgaccggttcaaggccaccatgaacatgaacactcataccccttttgataccaaccacaacaacaataatatccatttgatgtttaattccccttgtgatttgtcatcctttgatttcaaggaggatatacaaggagtaggaatggattctcttcaaaaacagcaagaggtttcaatttggtaccagtgaaaatgcgaagagggaaactcgtgtatcacggacttttattgtgtcattaaagagggtcatgtgaaagtcccttgactcaaaaagcagttaatgcatttttcttcccatgtaatagtttaggtcttagatattttatgctttgggaggtctggtctggtctggtggcattatattatgggttaataaatcatgggtgttcccataatgtaaccctttttatgtgtctctttatgtgttagccctatgttacttatatcatatgtacgactgtgatataaataaaagatttttattctcttataaaatcatatttccattgctacattcatagttaacgaatctgaatatatggctcttttattat

SEQ ID NO: 2567 - DNA, 731 bp, Glycine max
gttttccccttctctctctctctctctctcttccaaccttttctctgtttcttctaaaagtctcagcacagcataacataacccttcttcatcttcttcttatgtgattgacttgtgtccaccacggtgacccatttctgtatcttctggtgaaaagctaatttgttcactctaataggtgtacagtgctaaagggtaaactttgaaacctagcttcctagttgaatcatcagaagcttataagtcgaatccatatttttctggacgtttagactttctttgatttccctgggaaatgatgatgatgcttgaagatatgggattttgtggggatttggatatgttttctgctccccttggagaaggggatattaccgcccggcaaactgagccagaggtgatagttgaggatgattatagtgatgaagaaatcgatgtagatgagctcgagaggaggatgtggagggacaaaatgcgtctcaagcgattgaaggagcaaagtaaacctaaggaaggatttgatgcagtcaagcagaggcagtcccaagaacaggcaagaagaaaaaagatgtcaagggctcaagatggaatcttgaagtacatgctgaagatgatggaggtttgtaaggcccaaggttttgtctatgggataattcctgagaagggaaagcctgtgactggggcatctgataatcttcgtgaatggtggaaagataaaagttcgtttgatc

SEQ ID NO: 2568 - DNA, 478 bp, Glycine max
ctcactctttcttcccaccttcctctccttcttttctcttctttcttcttcttccatctctttttttctgcttaaggtctacaaaagttctcttcttcttctcctcctattgaactttggtcatcacacgagaaaacccacgtctggatcttctggtgtaaaggccattagaagccttttagaaattttcaaattgagttggtgtatagtgttgaagggggtgaaatttggagcccagtttgttacttcatttgaaaggtcatagtttgaaccctctttttctggagatttacctgggaaaagatgatgatgtttgaagatatgggattctgtggcgatttggatatgttatgtggttctcttggggatggggatattgctgtgagacaaactgaaccggatcctgtagttgaggatgactacagtgatgaagaaattgatgtggatgaactcgagaagaggatgtggagggacaaaa

SEQ ID NO: 2569 - DNA, 595 bp, Glycine max
ccttctcgctttctttcttcccaccttttctctgtttcttcttcttcttccattagttcctgctgaaagtcctaacacaacaccacccttcttcatcttcttatgtttttgacttgtggccaccactgtgacccatttctgtatcttctggcaaggttctatccgtttcttcttttggatcacccttttcactgttcgactccttcttgctatctgcttcgtcaatctgattattcatgggtgaaaagctaatttgttcacttgaataggtgtacagtgctaaagggttaagtttgaaacctagcctgctagttgcatcatcaggtcaaatccataactttctgggaatcaaacgatgatgatgtttgaagatatgggtttttgtggggatttggatatgttttctgctccccttggagaaggggacattaccacccggcaaactgagccagaggtgatagttgaggatgattatagtgatgaagaaattgatgtagacgagctcgagaggaggatgtggagggacaaaatgcgtctgaagcgattgaaggagcagagtaaacctaaggaaggaattgatgctgtgaagcagagg

SEQ ID NO: 2570 - DNA, 453 bp, Glycine max
cttcttttctcttctttcttcttcttccatctctttttttctgcttaaggtctacaaaagttctcttcttcttctcctcctattgaactttggtcatcacacgagaaaacccacgtctggatcttctggtgtaaaggccattagaagccttttagaaattttcaaattgagttggtgtatagtgttgaagggggtgaaatttggagcccagtttgttacttcatttgaaaggtcatagtttgaaccctctttttctggagatttacctgggaaaagatgatgatgtttgaagatatgggattctgtggcgatttggatatgttatgtggttctcttggggatggggatattgctgtgagacaaactgaaccggatcctgtagttgaagatgactacagtgatgaagaaattgatgtggatgaactcgagaagaggatgtggagggacaaaatg

SEQ ID NO: 2571 - DNA, 573 bp, Glycine max
  unsure (1)..(573): unsure at all n locations
tcgggatggagagaatgaggtttgatggaagaagatggtcaggcttccggtcctccacatcaaacctcgggatggagagaatgaggggaaggatgccaattcagcaaccttctcatccaatgaagggagatgttgtcacaaacctagatttcatccgtgagatgttgatatctagtgacttcaacatgatgatggatcagaaaatatacacatgtgagcatccccaatgcccttatagcgaagttcgccttggtttccatgataggtctgctagggacaatcatcaattgaattgtgcatacagaaacagttctgcatattatggttgttgtcccaatttccatgctatttatgataatccactcatattcccatatacaaatttttattctaacactacatcacattttttatgaactgttgcattttaatactattttatcttttcttatatatttttgtactttttcaaatatttcttatattttttattacaatannnnnnnnnnnnnnnnnnnnnnnnnnnnnnnnnnnnnnnnnnnnnnnnnnnnnnnnnnnnnnnnnnnnnnnnnn

SEQ ID NO: 2572 - DNA, 436 bp, Glycine max
ggtggccccaaatcggtttatcaaaagatcaaaattctcctccttacaagaagcctcatgacctgaagaaggcgtggaaagtcggtgttctgactgcagttattaagcacatgtctcctgatattgcaaagattcgcaagcttgtgaggcagtccaaatgtcttcaagataagatgacagcaaaggaaagtgcaacctggcttgcaatcatcaatcaagaggaggccttagcaagagcgctataccctgattatatccccccattagcctcagctggaggtagtggatctttggtgatcaatgatagcaatgagtatgatgttgaagggggtgaggatgagcctaactttgacgtggaagactgcaaacatgagaatcttcacacatccaatcttgggatggaaagagtgagggtaactctgccagttcaacagcc

SEQ ID NO: 2573 - DNA, 553 bp, Glycine max
ctcattttgcaaaaggggatcaatcttcgtctcagaagaagtcaaggggaaggggtcgccattcatccaatttcactgaggaagaagatgaagaataccgaaaaggagaagaagatggtctagcaaacacacgtctggtgacacaaccatcattcaattaccattcagtgtttggaagcacttcagtttttgcagtcttggactaataatacattgtgacttgaagccggagaatattttggttaaaagctatagcacagatgtgaggttaaggtcgttgatctgggaagtagctattttgagacagagcccctttgctcgtatgttcagtccaagtcttatcatgctcctataggacaagaaggttattttgtggcttctatatcacaagaagattgatatttggtcacttggatgcatcttggcagaactttatacttataatgttgtataaattatttattttatattataatcattttacaaaattatttgagcatatatatatatatatatatatatatatatatatatatatatatatttctttatt

SEQ ID NO: 2574 - DNA, 2220 bp, Glycine max
attgacgctgacatgaacaatagagggaaggggcgtctgaagtatctcttgcagcagactgagctgtttgctcattttgcaaaaggggatcaatcttcgtctcagaagaagtcaaggggaaggggtcgccatgcatccaatttcaccgaggaagaagaaggatgaagaatacctaaagggagaagaagatggtctagcaaacacacgtctggtgacacaaccatcatgtatccaagggaaaatgagggattaccagctggctggactaaactggctcatacgattgtatgagaatggaataaatggaattctggctgatgaaatggggcttggtaaaactttgcaaactatatccttattgaggttatttgcgcgagttccgaggaatcaaaggtcctcatatggtggttgctccaaaatctactcttggaaattggatgaatgagattcggcgcttttgtcctgttcttcgtgcaatcaagtttcttggcaaccccgatgaaaggagacatatcagagatgaattgctggttgccgggaagtttgatgtttgtgtcacaagttttgaaatggcaatcaaggagaagtctgctttgcgtcgatttagttggcgctacataattattgatgaagctcatcgaatcaagaatgagaattccttgctgtccaaaacaatgaggctctacagtacaaactaccgtctccttattactggcacaccacttcagaataatcttcatgaactctggtctcttctcaactttcttctgcccgaaatttttagttctgctgaaacttttgatgaatggtttcaaatctctggtgaaaatgaccaacaggaggttgttcaacaattacacaaggtcctccgcccatttctccttcgaaggttgaagtcagatgttgagaaagggttgccaccgaaaaaggaaactattcttaaggtaggcatgtcccaaatgcagaaacagtattatagagcactacttcagaaggatcttgaggttgtaaatgctggtggtgaacggaagcgcctcctgaacatagctatgcaactactcatatgttgtaatcatccatatcttttccaaggtgctgaacctggtcctcccttcactacaggagatcatcttattgaaaacgctggtaaaatggttcttttggataagttacttcctaaattgaaagagcgcgattctagggtccttatattttcacagatgactaggctactagacatactcgaagattatttaatgtttcgtggatatcaatattgtcgcattgatggaaatactggtggggatgatcgagatgcttccattgatgctttcaacaaaccaggaagtgagaaatttgtcttcttgttatcaactcgtgctggaggtcttggtattaatcttgctactgctgatgttgtcattctgtacgatagtgactggaacccacaagttgacttgcaggctcaggatcgtgctcataggattggtcaaaagaaagaagttcaagttttccgtttttgtactgagtatacaatagaagagaaagtcattgaaagggcctacaaaaagcttgcacttgatgctctggtgattcagcaagggcgattggctgagcagaagacggtaaataaagatgaattgcttcaaatggttagatttggggctgaaatggttttcagttccaaggatagtacaattacagatgaagatattgatagaattattgctaaaggagaggaggcaactgctgagctagatgccaagatgaagaaatttactgaagatgccatcaaatttaagatggatgacactgccgagttatatgattttgatgatgagaaggatgaaaacagatttgatataaaaaaaattgtgagcgagaactggattgaaccaccaaaaagggagcggaaacgcaattactcggagtctgaatacttcaagcaaacaatgcgcaaggtggtcctaccaaaccaaaagagccccgtattcctaggatgccccagttgcatgatttccagtttttcaacacacaaagattgactgagctgtatgaaaaggaagtacgctatctcatgcaaacacaccagaagaatcagataaaggattcaatagatgttgatgaaccggaagaggtgggagatccattgactgctgaagagttggaagaaaaggagcgcttgctagaagagggattttcttcatggacccggaggat

SEQ ID NO: 2575 - DNA, 499 bp, Glycine max
gcttcttatgtatgtcaataggcatgatccttcagacaagtaccaccttctaagattgtatgattacttctattatagagaacatttgttaatagtatgtgaactacttaaagccaacttatatgagtttcacagattgaatcgagtatcagggggtgaagtgtatttcacgatgccaaggttgcagtcaattaccattcagtgtttggatgcgcttcagtttttgcacagtcttggactaatacattgtgacttgaagccggagaatattttggttaagagctatagcagatgtgaggttaaagtcattgatctcggaagtagctgttttgagacagatcacctttgctcgtatgttcagtccaagtcttatcgtgctcctgaggttattttggggctttcatatgacaagaagattgacatctggtcacttggatgcatcttggcagaactttgtactggcaatgttctcttccaaaatgattcccctgcgacatta

SEQ ID NO: 2576 - DNA, 1344 bp, Glycine max
acgcgtacgtaagctcggaattcggcccacattcaaatccaaatggccctttacattacactaataattggcctcctagtaaacaccctagtactctataaatagcatttgcatgcaccttagtcttcaccaaaatactcctcttggcatcttgtgttgtgtccctcttttaagctatttccttctcttaacacaattggttgtgccaattgccatagtcaccaaccaattaacaaaggtatatatatcatcatatcatcaccaaatgaaaaatattgggttgttttttcttgtggtggtggctacttttgtggtggcagccacagctggtagcttttaccaagactttgaaataacgtggggtggtgagcgtgccaaaatctatgagaatggaaaccttctcacactctcccttgacagagcctctggctctggctttcgttccaaaaaagagtacttgttcggaaaaattgacatgcagctcaagcttgtgcctggtaactctgctggaacagtaactgcctattatttatcttctctggggcctactcatgacgaaatagactttgagtttttgggtaacttgagtggtgatccttacactctccacacgaacgtattcagccaagggaaagggaacagagaacaacagttccatctatggttcgaccccaccaaggacttccacacatactccgtccaatggaatcctgcaagcatcatattctctgtggacgggaccccaataagggagttcaagaatttggagacaaaaggggttccattcccaaagagccaacccatgagaatatactctagtctttggaacgctgaggattgggccacaaggggtgggcttgtgaaaacggattggagcaaggccccattcacagcctcatacagaaacttcaattcccaaacctcttcctccactggccaatcactggacgccacggggcaggcaaagatccgttgggtgcaaaagaattacatgatttacaattattgcactgatatcagacgtttccctcaaggccttcctccagaatgctccattgcatgagaatatttaattcaatgttgcatatcattataaaatgatcctcatgaacgtgacacacatgtgttgcctattacgttaatttactttcttgtgtaaattaatgcaactaaaactgttattattgttggtttgtgctttgttgagcactactccattgtttgtggcgaaagataattatagcgtgcaaaattatattcatggcagtgtatatgtgctgaaattgtaaagtattttcattaataaaattgttggagttttattattcaaaaaaaaaaaaacaa

SEQ ID NO: 2577 - DNA, 655 bp, Glycine max
  unsure (1)..(655): unsure at all n locations
tcctttacgcgtccggcatattgtgccctccctctttctagctatttccctctcttaacacaattaacaaagatatatcatatcatatcaactccaaatgatgaaaaatattgggttgtttcttcttgtggtggtggctacttttgtggtggcagccacagctggtagcttttaccaagactttgaaataacatggggtggtgagcgtgccaaaatctatgaaaatggaaatcttctcaccctctccctagacagagcctctggctctggctttcgttccaaaaaagaatacttgttcggaaaaattgacatgcagctcaagctcgtgcctggtaactctgctggaacagtcactgcctattatttatcttctctggggcctactcatgacgaaatagacttcgagtttttgggtaacttgagtggtgatccttatactctccacacgaacgtattcagccaagggaaagggaacagagaacaacagttccatctatggttcgaccccaccaaggacttccacacatactccgtccaatggaatcctgcaagcatcatattctctgtggacgggacacccataacgcagctcaagaactttgagacanaaagcgctcctttcccaaagaaccaacccatgagaatatactctagc

SEQ ID NO: 2578 - DNA, 554 bp, Glycine max
accagcaaagaaccaacccatgagaatatactctagcctttggaacgctgaggattgggccacaaggggtgggcttgtgaaaacggattggagcaaggccccattcacagcctcatacagaaacttcaatgccctaacctcttcctccactggccaatcactggacgccacggggctggccaagatccattgggtgcaaaagaattacatgatttacaactattgcactgatattagacgtttcccacaaggcctccctccagaatgttccattgcttgagaatgttcattattcaattcaatgttgcatattattatatatataaaaaaaatggtccccatatacgtgacacgtgtatgcctattacgttgatttactttcttgtataaactaatgtaactaaaactatgattattgttggttggtttgtgctttaatttgttgagcactactccattgtttgtgatcacaaaagatgattatagcctgcaaaattatattcatgcccgtgtatatgtgctgaaattgtaaactatcttcattaataaaattg

SEQ ID NO: 2579 - DNA, 763 bp, Glycine max
cacacacacacaccacatcacgaggcagttcctccgctttgggcgacggaggctgcaacagtctcattctcaactacactacacgacgccgctttgctttttccaaacctgtcaagctgtactattactatagtttcatttcatggagacggaatcacatgaagatttacagcacccgtcggtttcttcgaatgacacgcacagtgatgatgcgtcgaaccacagagacgctgagcaaaagcaagatgtttcgagggaagaagttgtgcagattctacaagttattgcatctacggggaggttctggcatgactgggataagttgaagagtatgctatcatttcagctgaagcaggtactgtcagaatatcctgaggcaagaatgacaagtgagcagcagtacgcgtcatttggtgaatcctacattgagttggtcaacaaatttggatgaaggtatcttaatcaatagttccatagccaaggttttaaagtccaaacattcattgaaccaacaaagagactgtcttggttcaatgtgtccaaactgtgaactagaaatattgctatttttatgagtatcattaattgggagaatttagttttgctatttctatattaaaaattataacaaacaaatatagttaagaatagatataatctaagattgttaaactcacaaccaatggcctagttgttgaagtctcctgttcaaagctatgggatccatgtttgatactcacttctccattttgatgcattttat

SEQ ID NO: 2580 - DNA, 645 bp, Glycine max
cgaaatcctaaaagcacacccccttaaactatctctgtttatctcttcactcccttttatcttcttcaagggcaatggacagtggaggacactacaacccccgcaccgtcgaagaggttttccgggacttcaagggccgccgggctggcatgatcaaagccctcaccactgatgttgaggaattttaccagcagtgtgatcctgaaaaggagaatttatgtctgtatggattccccactgaacaatgggaagtaaatttgcctgctgaagaagttcccccagaacttcccgagccagcactgggcataaattttgctagggatgggatgcaagaaaaggactggctatctttagttgctgtacacagtgatgcatggctacaatcagtggctttctactttggggcaagattcggttttgataaagctgacagaaagcgcctgttcactatgattaatgatttgcctacaatatttgaggttgtaactggatctgcaaagaaacagacaaaggagaagtcatcagagaacaatggcaacaaatcaaagtccagttcaaaagggcgaggatctgaacccccaaagtattcaaagctagtgaaggatgaggaggagggattggacgaagaagacgatgacgagcatg

SEQ ID NO: 2581 - DNA, 763 bp, Glycine max
  unsure (1)..(763): unsure at all n locations
gctgccgaacctcagcagtctcatgcacttggatctccgaaacaacctcttctccgggcccattccaagaaacttcggttctctcagcatgctgagccgggccttgctcagcggaaacaggctaagtggggccatcccgagctcggtttctcagatttaccgtctggcggatctggatctgtctcgtaaccagatttctgggcccattccggagtcgctgggtaaaatggcggttttatcgacactaaacttggatatgaataaactctctgggcccattccggtgagtctgtttagttccggaatcagtgacttaaacctgagccggaacgccttggagggaaacataccggacgcgttcggcgtgaggtcttatttcactgctctggatttgtcgtataataacctaaaaggggccatacctaagtccatatcctctgcttcctatattgggcacttggatttgagtcataaccatctctgtggcaagattccccttggctctccttttgatcatctcgaagcctcctcctttgtctacaacgattgtctctgcgggaagcccctcaaaccttgctactagctcaccattacatgcaaactcaaatatcttgggaaaatatatgtatatttgcagttagaccagtgtggacccacccttagttaactcatcggtccgtttcatgtatcaatttgttgtttgttatcgcgatcgtgccatagtaaatgtagtactccatccctgggcctncgctacgctaaa

SEQ ID NO: 2582 - DNA, 1491 bp, Glycine max
ggcgagaaataacgaagcacgttactgaagtggaacctctggatctctctctctctctgtctctgcgatggagtttcgcgtttccgtcatttggagccttctcctcattgtctctttcttctctcctcaaatcaagggtgaggcttctggttccgtcttcttcgtcgatagctccagtaatcaattcattcgcgccagatcatccaactatgagcaaccttcactgttgctagaagaagctggtgctgttgtgtcagtcttgcttggttttgctcctccttccacccttccagctgccagctcatccaagttgaatgatgttctgattcctaacccattcaagaggcctcgtgctgtgtttttgctggaagtgaatggaatcaatggtcttggaaatattgtccaggataatccaatgttcagcaattcattttggagtacaaattcagataaagttgacattcaacttccagatgaaaatgatgtttctgtggtttctttggatgagcaactggaagactggactgacaaagaaattagtgatttttcttcttcgataggtgggtcatatgctcctgatgcccttgagccattaaatggagtgcttaccattccattggcaaatggtgcctcagtgaatctccatatgtcaaagaaagcagaaaggaagttcatcataggtcttatgtctctcacacgtaatgtccaaagagcaattcaaatgcatgacaatttatcacagagtgcaaagagtcctgctgagttgttaacaggatgcttcaatggcattaaggttttgcaagagcaatatgaaactggaagtattgctcagcatggagttgaattgctatatgcaactttgacaaagatatttagttcactgcaagaagcatataaaggtcaaattgttggaattatctactgtcacgtggccactactcaagagtcgggcaagaagtttgatgtgatctttactcctcaccatccgtatgctcgatggttggcagaaacaaatgcagtgaatgcaacattgccagaagtggtgctggttaggagaacccttgcttgggtaacaggaataatattgctcatttcaacctttatggggatatgctacctcatgaatatgccgcttacaagggacacgcttctatattctaatgtcaagcttgattaggcatggatcatggtgcgtacgaagacgaatcttttcaaccaacgaatggaccggtgtagccaattactatattcataatatgaggtattggaaactagtccaatcaggatttgggtcttagaggataggggattattgtaccgatgttgtttaaatgtgaagcattgtgcccccgtgtttaatcaggacgtagatagtcatagtaggtgtgttattattccagccatttaccataatgggtgtaccccgtggttatcattttgatcgaaattatttcaattctattgtaaaataatgatcatttctgtttctaa

SEQ ID NO: 2583 - DNA, 710 bp, Glycine max
gcaagaagcatataaaggtcaaattgttggaattatctactgtcacgtggccactactcagagagtcgggcaagaagtttgatgtgatatttactcctcaccatccgtatgctcgatggttggcagaaacaaatgcagtgaatgcaacattgccagaagtggtgctggttaggagaacccttgcttggataacaggaattatattgctcgtttcaacccttatggggatatgctacctcctgaatatgccgctcacaagggacacccttctatattctaatgtcaagcttgattaagcatggatgcgcaccaagacaaatcttttcaaccaacgaaggagaaccggtctgccgctgaagcttgtaattgggggagtctttttcttgatgcctctaatccgtgtgcatgattatattattgttatagcttttgttacttgtgtttaatggcccggtgtagccaattatattcatataatgaggtattggaaactagtccaatcaggatttgagtctagagaataggggattattgtgtacccatgttgcttaaatgtgaagcattgttcccccgtgtttaatcaggacgtagatggtcatagtaggtgtgttattattccagccatttaccataatgggtgtaccccgtggttatcattttgatcgaaaccatttcaattctattgtaaaataatgatcatatctgtttct

SEQ ID NO: 2584 - DNA, 1007 bp, Glycine max
aaaaaacttgtcttttaagttttaactctaagccatggctcttcccctgttcctcctctgcttcatgctctgcatttcactcacacaccaaacgattatgttacccctaacacactcaatttcgaaaacccatttcaacagtacccaccagcttctcaaatctacctccactcgctcagcctcacgcttccaccgccaaactcatcataactccgtagtctctctcccactttcttcaggaagcgactacaccctttccttcaacttaggctcacacccttctcaatccataaccctttacatggacacaggcagcgacctcgtgtggttcccatgcgctcccttcgaatgcattctctgcgaaggcaaattcaacgccacgaagcctcttaacatcacgcgctcccaccgcgtctcgtgccagtcccctgcatgttccacagcacactcctccgtctcctcccacgacctctgcgcaatcgcacgttgtcctttggacaacattgaaacctccgattgctcttctgccacgtgtcctcccttctactatgcttacggcgacggaagcttcatcgcgcacctccaccgcgatacactctccatgtctcagctttttcttaagaacttcaccttcggctgcgcccacactgcgctcgccgaacccaccggcgtcgcaggtttcggtcgggggattactgtccctccctgcgcaacttgcgaccttatctccgaacctcggtaaccgtttctcttattgcttggtctctcactctttcgacaaagaacgagttcgcaaaccgagtccactcattctcggccactacgatgattattccagcgagcgtgttgagtttgtttacacctccatgcttcggaatccgaagcattcttatttctactgcgtcggactcaccggaatctctgtagggaagaggactattctggccccggaaatgctacggagggtggaccgcaaaggggacggaggcgtggtgttgacagcggaa

SEQ ID NO: 2585 - DNA, 2003 bp, Glycine max
ctcgagcgttttatgtttgtttttgcgagcgtaaggttgaggagaagagatggtgggagcacggccacgggacatagatgacttgcccaagaacgccgccaactacacagcgcttacgccgttgtggtttctagagagagctgctacggtccaccccaccagaaactccctcatccacggatctcgtcgctacacgtggcagcagacttaccaccgttgccgtcgattcgcctccgctctttctaatcattccatcggtcttggaaacactgtagctgttattgcacccaacattccagctctttatgaagctcactttgggattccaatgtcaggggctgtgttgaaccctgttaatattaggctaaatgcatccacggtagcttttcttcttggtcattgcacagctgcagcagtaatagttgatcaagagtttttttctttggcagaagaagctttgaaaatatggtctgagaaggccgagaccttcagccctccacttttaatagtcattggtgatgaaaattgcgaccctaaggcacttaaatatgctctgggcaaaggagccgttgaatatgaggattttctccaaagtggtgatcctgagtatgcatggaaacccccagaggatgagtggcagagcattgcattgggttacacatccggtaccactgctagtccgaagggtgtggttttacatcaccgtggagcctatctcatgtctctgagtggagctcttatttggggaatgactgaaggtgctgtgtatctttggacacttcccatgttccattgcaatggttggtgctacacttggacacttgcagctctgtgtggtactaacatatgccttcgccaggtaacagcgaaggcagtgtatggagccattgccaagtataaagtgactcatttttgtgcagcaccagtggttcttaacacactaattaatgccccagctgaggacaccattcttcctctaccccatgttgtgcatgtgaatacagctggggctgcacctcctccttctgttctttccggcatgtctgaacgtggatttcgtgtcacacacacttatggtctctcagaaacctatggcccctctgtctactgtgcctggaaaccagaatgggaatcacttccccctgaaaaccaagcccggctcaatgcaagacaaggtgttaggtacattggcttggaaggcctggctgttgtgaacacaaaaaccatggaacctgttcctgctgatggtaaaactgttggtgagattgtgatgcggggtaattctgtgatgaaaggctacttaaagaaccctaaggctaacgaggagacctttgcaaatggatggtttcattctggggatcttgctgtgaagcacccagatggatatatagaaattaaagacagatcaaaggacatcataatctctggtgctgaaaatatcagcagtgtagagatagagaatactctttactcacatccttcaatactggaggcagcagtggttgcaagggcagatgaaaaatggggcgagtctccctgcgcttttgtgacattaaagccaggagtggataaaagcaatgagcagcgtataattgaggatatactaaagttcagcagggccaagatgcctgcttattgggttccaaaatcagttgtgtttggagccttacctaagacagctactgggaagatacagaagcatatactgagggccaaggcaaaagagatgggacctgtaaagttgagcaagttataaacatattgaaatgatcatgacgaaaaacgaactagttataaacatattgagtactttataaacatattgagatagcctatttgtgattgggattctgcatacttatctataataatatagccgaaccttttatatgtggttcaaaagtagttgttggataagaccaacgtgtcacttatctattttgaagtcaataaatccatcctggcttccattatataatttttaacgtgtatttttctccatt

SEQ ID NO: 2586 - DNA, 528 bp, Glycine max
gaagcattgtgtcagaccccacgtactacccagttagattcgacaacaaagcttacttggcacgtccatggaagaatttctcaaggaccatcttcatggactcctacattggtgatttgatcacacctgatggttacatgccatggcaaacattggagggttttagtggaatggatacttgtttctacgctgagttcagtaaccgtggccctggttcagacaaatccaagcgtgtgaagtgggaaggagttaagacccttgattcacatggaatcacatacttctggccacccatgtttctccatggagacgactggattagggtcaccaggattccttactaccctggccaggtctcccacactaactgaagttgattcattattttttaggagagaacgcatgtgcctgcgtgttgccaaattaaacaactaattattaatgattgtgctgtaccacctttgtcttttgtcttccataatttcattgcactgaaatgcaagtgtgtctgaactgtcattttcttgc

SEQ ID NO: 2587 - DNA, 2109 bp, Glycine max
cgtgtacgcgtgggggccaacagaactctctagaacctctctcacacaatagcaaagaagggaagactaaaactaaaaccccactctctttttccgagtcttccagtgaaagaaaggcagcgatggaagaagacttcgacatccccggcggcgaggaaatggatctcggcgaagacgaggtcggcgaggagagggagatcggctctggcggcctcaagaagaagctcctcaaggaaggtcaaggctgggaaacccccgaagtcggtgacgaagtccaagttcattacacggggactttgctcgacgggactaagttcgattcgagccgcgacagggattctcccttcagcttcacgctcggacaagggcaagtaattaaaggatgggatgaaggtattaaaaccatgaagaaaggtgaaaatgctattttcaccatccctcccgagctagcttatggtgaatctggttcccctcctactattcctcctaatgctacactccaatttgatgttgagctgctgtcatggactagtgtaaaggacatatgcaaggatggcggtatatttaagaagatacttactgagggggagaaatgggagaaccctaaggatcctgatgaagttttggttaagtatgaagttcatctagaaaatggaaagcttttagcaaagtctgatggggtggagttcacagtcagagagggtcattattgtcctgcattgtcaaaggctgttaaaaccatgaagaagggagagaaagtgcttttgacagttaagccacaatatggatttggtgagaaggggaagccagaacaaggggatgaaggtgcagttccaccaaatgcaacattgcagattactcttgaattagtttcatggaaaactgtttcagaagtaactgatgacaagaaggtcataaagaagatcctcaaggaaggggaaggatatgagcgtccaaatgagggggccattgttaaagtgaaactaattggtaagctacaagatggtaccgcttttttgaaaaagggccatgatgaagaagagaagctgtttgaattcaaaacagatgaggaacaagttgttgatggacttgatagagctgtattgactatgaagaagggtgaggttgcgttgttgaccattgcacctgattatgctttcggtacatcagagtcccaacaggagttggctgtagttcctcctaactcagccgtgtattttgaagttgagctagtgtcatttgagaaagagaaggagtcctgggatctgaacactgaagagaaacttgaagctgctggtaagaagaaagaagagggaaatgtcttgtttaaagctagtaaatatgcaagagcttccaaaagatatgaaaaggccgtgaagtacatagaatatgattcctcctttggtgaggaggagaaaaagcaggccaagaccttgaaggttgcctgcaatctgaacaatgctgcttgcaagttgaagttaaaagactacaaagaagcagagaaattgtgtactaaggtgttggaccttgagagtacaaatgtgaaagccctctatagaagggcccaagcacatatgcagttgactgacttggatttggctgaacttgacattaagaaagctcttgacattgaccctaacaacagggatgtcaaattggagtacaggactttgaaggaaaaggtgaaagagaataatagaaaggaggcgcaattttatggaaatatgatcaacaagatgacaaagattggttcctgatagcaataaaccagctacgaagtaccaacggtattgaatccggggttgacaactaaatctagatgtcatccaatatggaacacgaatctgtttagtccccgtttttctggggtttgatcttccttgtatggtttgtgcactaggaaaatttgatggacattcatttcgtatttattatggaatattaacataattgacttaattatatatccccatgaactataatgatttgttcgagaggttcctttaagaaatggaattgattaggtcaaggtctgcggggacaacagacaagtgtgtttggattaaataaaaagaacgtcttaaaataaaattcattagtgttatgtat

SEQ ID NO: 2588 - DNA, 529 bp, Glycine max
ctctctggaacccctcaccgctgcttctccttttaaaccctattcgctacttcacaacacatctctctgaactgaattaaactacatagaaaaataaaaccaaacctttcttcctactactcccattcccacatttcgacaacatggacgaggacttcgacatgccgacggcggaggcaatgggcgaggacttcgacttcgccggcgccaccggcggcgacctcgacggcagcagcagcaaccccatcttgaaggtcggcgaggagaaggagattggaaaagagggtttgaagaagaaactacttaaagaaggtgaaggatgggacactcctgaagttggtgacgaagttcaagttcactatactgggacgttgcttgatggcactaagtttgattccagcagagataggggaactcctttcagtttcacgcttggacaagggcaagttattaaaggatgggatcaaggtattataacgatgaagaaaggtgaaaattcccttttcaccatcccggctgagctagctta

SEQ ID NO: 2589 - DNA, 466 bp, Glycine max
  unsure (1)..(466): unsure at all n locations
cggctcgagaaaactaaaactaaaaccccactcagtcttccagtgaaaaaagaaaggcagcgatggaagaagacttcgacatccccggcggcgaggaaatggatctcggcgaagacaaggtcggcgaggagcgggagatcggctcccgcggcctcaagaagaagctcctcaaagaaggtcaaggctgggaaacccccgaagtcggcgacgaagtccaagttcattacacggggactttgctcgacggaactaagtttgattcgagccgcgacagggattctcccttcagcttcacgctcggacaagggcaagtaattaaaggatgggatgaaggtattaaaaccatgaagaaaggtgaaaatgctattttcaccatccctcccgagctagcttatggtgaatctggttcccctccaactattcctnctaatgctacactccaatttgatgttgagctgctgtcatg

SEQ ID NO: 2590 - DNA, 543 bp, Glycine max
caaactactcacttatactcactctgatcccattgccgtggaactctctggaaccctttccccttttaaaaccctcttttcttccccctccaccctaacccgattcgcttcttcacatctctcttttcactcaaaactacaaactttatttcctctccgtattctcacatttccacaacatggacgaggatttcgacatggcggcggcggagcccatgggcgaggacttcgacttcgccggcagcggcagcaaccccgtcctgaaggtcggcgaggagaaggagattgggaaagagggtttgaagaagaagctcctgaaagaaggtgaaggatgggacacccctgaagctggtgacgaagttcaagttcactatactgggacgttgcttgatggcacgaagtttgactctagcagagataggggaactcctttcagtttcacgcttggacaagggcaagttattaaaggatgggatcaaggtattataacaatgaagaaaggtgaaaatgcccttttcaccatcccagctgagctagcttatg

SEQ ID NO: 2591 - DNA, 408 bp, Glycine max
  unsure (1)..(408): unsure at all n locations
acgcgtacgtatagctcggaattcggctcagttgcaactcttctaatttatgtggagctgntgncttggactagtgtgaatgacatatgtttggatggaggtttatttaagaagatacttaccaagggggagaaatgggagaacccaaaggatcctgatgaggttttagtcaagtatgaagcatgccctgaagatggaactcgcgtggcaaaatctgatggagtggagttcacagtcaatgatggttatttttgtactgctttgtcaaaggctgttaaaaccatgaagaagggagagaaagtgcttctgacagtgaagccacaatatggatttggtgagaagggtaagccagcacatgatgaagaaggtgcagttccaccaaatgcaacatctgagattatcttgagt

SEQ ID NO: 2592 - DNA, 289 bp, Glycine max
gaagacgacagaaggggggtgttgaattaaaaaaaaaaggaagactaaaactaaaactaaaaccccactcagtcttccagtgaaaaaagaaaggcagcgatggaagaagacttcgacatccccggcggcgaggaaatggatctcggcgaagacaaggtcggcgaggagcgggagatcggctcccgcggcctcaagaagaagctcctcaaagaaggtcaaggctgggaaacccccgaagtcggcgacgaagtccaagttcattacacggggactttgctcgacggaacta

SEQ ID NO: 2593 - DNA, 759 bp, Glycine max
actcaggggagcctgcatccacccaagtcctgcaaaggctagaggcgccgacctaggggttcatttaagacactagcggaaactgcttttgcaatcagcaagttgcccttggttaaagctaaaaggtacttggaagatgttcttgcgcacaagcaggccattccgttcagacgtttctgtcgtggtgttggaaggacagcccaggctaagaatagacactctaatggccaaggacggtggcctgtcaagtcagcaaaattcattcttgatttgctcaaaaatgctgagagcaatgctgaagtgaaaggtttggatgttgatgcactgtacatttcgcatatccaagtcaatcaagcacagaagcaaagacgccgaacataccgagcccatggaagaatcaatccttatatgtcatctccgtgccacatagagttaatattatctgaaaaagaagaacctgtgaagaaggagcccgagactaagttaacaacaagcaagaaatcccaagctcttcgaagtggcgcttcgtcatagaatacaacttaattgtttgaggcacaatattcctagattatgtcaagaggagagttttgtttgtttaatttttgttatggtttggtatgagttttatactatgcttcaaattaatttaagttattcgaaaaacttagtttggatttctttcggtgtttcctttggatggatatttccaagtagtttcaaaagaaatactaagtattagaagataaatcgattgtt

SEQ ID NO: 2594 - DNA, 1064 bp, Glycine max
cggacgcgtgggcggactcgtgggcggactcgtgggcggacgcgtgggttgatctctgacaaccccaacacttccgaaccttgcattgtatctacccacttctcaaccaacaatggcaatggcaacccaagcctctctcttcaccccacccctctccggtctcaaacccagcgaccgagccaccgcgccatggaaacaatcctccaccctctccttctccacctcgaagcccctcaagttctcgcgaacaatcagagcagcagccaccgaccagaccacagaggcaccggttgggttcaccccaccggaactggacccaaacaccccttccccgatcttcggaggcagcaccggcgggctcctgcgcaaggcccaagtggaggagttttatgtcatcacatgggactccctgacaagccaatcctttgtgtaggtgctcaaccctagtaagccgcaatggtgaagtactcaagggagcctgacaatccaactaagtcttgcaaggctagaggcgccgaccttagggttcattttaagaacacaagggaaactgcctttgcaatcaggaagttgcccttggtcaaggctaaaaggtacttggaagatgttcttgcccacaagcaggcaattccattcagacgtttttgtcgaggtgttggaaggacagcccaggctaagaatagacactctaatggccaaggacggtggcctgtcaagtcagcaaaattcattcttgatttgctcaaaaatgctgagagcaatgctgaagtgaaaggtttggatgttgatgcactgtacatttcgcatatccaagtcaatcaagcacagaagcaaagacgccgaacataccgagcccatggaagaatcaatccttatatgtcatctccgtgccacatagagttgatattatctgaaaaagaagaacctgtgaagaaggagcccgagactaagttagcaacaagcaagaaatcccaagctcttcgaagtggcacttcatcttagattaccacttgacataatctaggaatattgggcctcaaacaatttagtggcggacgcgtggg

SEQ ID NO: 2595 - DNA, 747 bp, Glycine max
  unsure (1)..(747): unsure at all n locations
acccttccttccggctgcaaaaagacaacaaaagggcaacacttgtattgtctcaagcaaccatggcaatggcaacccaagcctctctcttaaccccacccctctccggtctcaaagccagcgaccgcgcctccgtgccatggaagcaaaactccagcctctccttctccagcccgaagcccctcaagttctccagaacaatcagagcagcagccgccgacgagaccacagaggcaccagcaaaagtagaggctgcaccggtcgggttcaccccaccagaacttgacccaaacaccccttccccgatcttcgggggcagcaccggcgggctcctgcgcaaggcacaggtggaggagttttatgtcattacgtgggactcacccaaagaacagatctttgaatgcccactgcgcgccgtatatgagggaggggtctacctctcaagtgccagaagagcagtgctgctctgggactagctcagtcagacanatcaagacagtctacaggcttctatggaagttcatattgacctaagaggtgttacctagaagtcacgccgacgcaggtggtcaactcagtctatgtagatgtagtctatgggcaagtactgcagcagctatatgtgaccacacttatctatatcatatccggctccttaatgctaaatctatggaatcagactatgcattatatgccaatatgctaaaaaaaaaaaaaaaaaaaactnaggggcggcccatcccctta

SEQ ID NO: 2596 - DNA, 1068 bp, Glycine max
atccacaccatccatccacaatctcctccagcctactactttactctgtttccttgtgtctcttattgatctctgtcaaccccaacacttccgaaccttgcattgtatctacccacttctcaaccaacaatggcaatggcaacccaagcctctctcttcaccccacccctctccggtctcaaacccagcgaccgagccaccgcgccatggaaacaatcctccaccctctccttctccacctcgaagcccctcaagttctcgcgaacaatcagagcagcagccaccgaccagaccacagaggcaccggttgggttcaccccaccggaactggacccaaacaccccttccccgatcttcggaggcagcaccggcgggctcctgcgcaaggcccaagtggaggagttttatgtcatccgtgggactccccgaaagaacagatctttgaaatgcccactggcggcgctgctatcatgagggagggtcctaaccttctcaagttggccaggaaggagcagtgcttggctcttgggactaggctcaggtccaagtacaagatcaagtaccagttctacagggtcttccctaatggggaggttcagtatttgcaccctaaggatggtgtttaccctgagaaggtcaacgccggacgccaaggggtgggtcaaaacttcaggtctattggtaagaatgttagtcctattgaggtcaagttcactggcaagcagccctatgatttgtgagcacacaactctatcttcatcatcatcatcccccgtgcttcctttatatgctatatattctcatgtgatatcatgtacctattgtcaattttattatgccacaaatattgcttaaactctgtaccttaattttacacttctttttcgctattttggtgattattatttgtgccaactgcatggtttggattaatattgatttgcttcaaaaaaaaaaaaaaaaaaaaaaaaaaaaaaaaaagggaggccgatataaaggatcaaaaattaaaaaacgcgcgcatgctacaaaaaaactaaaatttcgggccacctaaattaacatcat

SEQ ID NO: 2597 - DNA, 701 bp, Glycine max
gtccggttgcaaaaaaacaacgaaggacgaaccaagtttgcttgcgtgtatattcattttagcatcaaggttgaatctcagagaaaaagaaacatcgacaagcatgtctggaagaggaaagggaggcaagggtctcggaaagggaggagccaaacgacaccgtaaggttctgagggataacattcagggaatcaccaagcccgcgattcgccgtctggccagacgtggtggcgtcaagcgtatcagtggtcttatctatgaagaaactcgcggtgttctcaagatctttctagagaacgtcattcgcgacgctgtcacctacactgaacacgctcgccgcaagaccgtcactgccatggacgttgtttacgccctcaagaggcaggggaggaccctctacggatttggcggttagacaattggggatttctgcactgcgtcctcgattagggtttcttatagtgtcagtcaatttcgctgtttatattctgcaatggttctttagctgtagcttgaggtttagcgattgttctttgagtcgtagttatgagaactttctttaatcaaattgctctccgcagcagccacacttcttcgccgtttcagctgaagagccatccgcaggtaagcaatggttaagcataataatgttatccccaatgggcacttccggaaacactggcaaaactatgtgaagactt

SEQ ID NO: 2598 - DNA, 800 bp, Glycine max
ctcacgcgttcgtcgacacgttcgctctcaagcaaccatggcaatggcaacccaagcctctctcttaaccccacccctctccggtctcaaagccagcgaccgcgcctccgtgccatggaagcaaaactccagcctctccttctccagcccgaagcccctcaagttctccagaacaatcagagcagcagccgccgacgagaccacagaggcaccagcaaaagtagaggctgcaccggtcgggttcaccccaccagaacttgacccaaacaccccttccccgatcttcgggggcagcaccggcgggctcctgcgcaaggcacaggtggaggagttttatgtcattacgtgggactcacccaaagaacagatctttgaaatgcccactggcggcgccgctatcatgagggagggtcctaaccttctcaagttggccaggaaggagcaggctcttgggactaggctcaggtcaaagtacaagatcaagtaccagttttacagggtcttccccaatggggaggttcagtatttgcaccccaaggatggtgtgtaccctgagaaggtcaacgccggacgccaaggggttggtcagaacttcaggtctattggtaagaatgttagtcctattgaggtcaagttcactggcaagcaaccctatgatttgtgagcaactctatcatcattcccccatgcttcttccattcgtttatatgctatattgtcatctcatgtcatgccaggaatgctataactctttaccttaattttacacttctttttcgctagctatttggtgattgttt

SEQ ID NO: 2599 - DNA, 950 bp, Glycine max
gaatcccggtcgacgacgcgtccgcccccgctgtgtctctccgcagcagccacacttcttcgccgtttcagctgaagagccatccgcaggtaagcaatggttaagcataataatgttatccccaatgggcacttccggaaacactggcaaaactatgtgaagacttggtttaatcaaccagcccgaaagaccagaagacggttggctcggcagaagaaggctgtcaagattttccccaggcctactgctggatctctcaggcctattgttcatggccagactctgaaatacaacatgaaagtcagagccgggagaggattttcactggaagaattgaaggctgcaggaattcccaagaaacttgctccaactattgggatttctgttgatcaccgaaaaagaatcgttctttggagagtctgcaggccaatgtgcagaggctcaaaacctacaaggctaagttggttgtgttcccaagaagggcacacaaggtcaaggctggtgattctagccttgaagagctggcaaatgccactcaagtccagggtccattcttgcccattgtgagggagaagccaactgttgaccttgttaaggtaacagatgaaatgaaggccttcaaagcatactataagcttcgtcttgaacgcaccaacaaacgccaccatggtgcccgcctaaagaaggctgctgaagcagagaaggaggacaagaaataaggtccttgagaagacagtttgtaatccatattatagttgtgagaaatttttgtttgatggtctgcgcccttagctttatggagatcatgagttttaaagcaccacccttacaatttttgtttgaactcaagtctgttaatttaattagcactctggtctgttttgattatttctttggttttgcccttggttgttcaagttgtcttttttaattgttagcatgcacctcgt

SEQ ID NO: 2600 - DNA, 716 bp, Glycine max
gagtacagaaaacgcagttctcaccatttccctctcggtaatttccaattactactaattttgccatgctttcttcatcttactcttaatcctctttggttagtacagaaaacgcagttctcaccatttccctctcgattgtgagacttgttgttgttaactgaacttttctgagcaagaatgtctgggcgtggaaagggaggcaagggtttgggaaagggaggagcgaaacgacaccgtaaggtgctgcgcgataacattcagggaatcaccaagcccgcgattcggcgtttggctcgtaggggtggcgtgaagcgtatcagtggtctcatctacgaagagacacgtggcgtgctcaagatctttttggagaacgtgattcgtgacgccgttacctacactgagcatgctaggagaaagaccgttacggcaatggacgtggtttatgctctcaagagacagggaaggaccctctacggatttgggggctaggtttttttattttattgttaggttcttttgttttggaggctaatctggatttgagaaacccttgctgttatggatatagtaaaaagaaatggcaaggattgggtgtgggaagttgccggtggtgttgcagtaacttgtaatgcagtctttagctgttattgctggcaagtttgtaattgaatcactatatcttgctaatgttagactcttggtattagtattat

SEQ ID NO: 2601 - DNA, 609 bp, Glycine max
cccacgcgtccgtccatatccacatccaaaatctcctactttactctctctctctctctgacaaccccgacacttgtattgtctcaagcaaccatggcaatggcaacccaagcctctctcttaaccccacccctctccggtctcaaagccagcgaccgcgcctccgtgccatggaagcaaaactccagcctctccttctccagcccgaagcccctcaagttctccagaacaatcagagcagcagccgccgacgagaccacagaggcaccagcaaaagtagaggctgcaccggtcgggttcaccccaccagaacttgacccaaacaccccttccccgatcttcgggggcagcaccggcgggctcctgcgcaaggcacaggtggaggagttttatgtcattacgtgggactcacccaaagaacagatctttgaaatgcccactggcggcgccgttatcatgaggaagggtcctaaccttttaaagtgggccagaaaggaccagtgctggcttctgggaactaggcttaggtccaagtccaagatcaagtaccagttctacagggtcttccttaatggggaggttcagtatttgcaccctaaggatggtgtt

SEQ ID NO: 2602 - DNA, 624 bp, Glycine max
cgggattggtaccgcgaaacgcacatttcactattcattctcgtttccctttcgactgtgattgtttgttaactgaacttttcgagcaaaatgtctggacgtggaaaggggggcaagggtttgggaaagggaggagcgaaacgacaccgtaaggtgttgcgcgataacattcagggaatcaccaagcctgcgattcggcgtttggctcgcaggggtggtgtgaagcgtatcagtggtctcatctacgaggagacacgtggcgtgctcaagatctttctggagaacgtgattcgtgacgccgttacctacacttgagccaacggcccttttaggggggaaaggggggggaaaaaaaaagggggaaaacccccgtacggaatggatgtgtttatgctctcaagagacaggaagaaccctctacggatttggaggctaagtttgtttttttttttttttttttaatttttattgttaggtttcgtttggtttggaagtttatgtgggatgtaagagacccttgctattagggagatatgtaatcaaagggcaaggatttggtgtagtaagtcgctggtggtgttttaggtataagggtttctataacatgtaatggattgagctata

SEQ ID NO: 2603 - DNA, 509 bp, Glycine max
acgacgtacgcccacgcgttcgcccacgcgtccgcccacgcttcctttagcaaccatggcaatggcaacccaagccggtctcttaaccccacccctctccggtctcaaagccagcgaccgcgcctccgtgccatggaagcaaaactccagcctctccttctccagcccgaagcccctcaagttcttccagaacaatcagagcagcagccgccgacgagaccacagaggcaccagcaaaagtagaggctgcaccggtcgggttcaccccaccagaacttgacccaaacaccccttccccgatcttcgggggcagcaccggcgggctcctgcgcaaggcacaggtggaggagttttatgtcattacgtgggactcacccaaagaacagatctttgaaatgcccactggcggcgccgctatcatgagggagggtcctaaccttctcaagttggccaggaaggagcagtgctaggctcttgggactaggctcaggtccaagtacaagatcaag

SEQ ID NO: 2604 - DNA, 622 bp, Glycine max
  unsure (1)..(622): unsure at all n locations
gaccaagttagtttaatttgagtgtatattcagagagaaaaacgaagaaaacatcgtgaagcatgtctggaagaggaaagggagggaagggtctaggaaagggaggagcgaaacggcaccgtaaggttctgagggataacattcagggaatcacgaagcccgcgattcggcgtctggcgcgacgtggtggcgtgaagcgtatcagtggtctcatctatgaagaaactcgcggtgttctcaagatcttcctcgagaacgtcattcgcgacgctgtcacctacactgagcacgctcgccgcaagaccgtcactgccatggacgttgtttacgccctcaagaggcagggcaggaccctctacggtttcggcggttagacaattggggatttcagcactgcgtcctcgattagggtttcttatagtgtcaatttcgatgtttatatcctgcaatagttctttagctgtagcttgaggtttagcaactgctcttgtttcgctttgggttgtagctatgagaacttttaatatggtaatcaagattaacttccaccttttattgnaaaaaaaaaaaaaaaannnnnnnnnnnnagcggccggtctagaggatcccagcttacgtacgc

SEQ ID NO: 2605 - DNA, 704 bp, Glycine max
tccggtctcaagcaaccatggcaatggcaacccaagcctctctcttaacccgacccctctccggtctcaaagccagcgaccgcgcctccgtgccatggaagcaaaactccagcctctccttctccagcccgaagcccctcaagttctccagacaagaagatgaatttgggtccgggtatggtggaaggaaggaggagtctgaatatggatctgggtatggtgggagaaagcaagaatctgaatatggatccgggtatggtggaaggaaggaagagtctgaatatgggtcaggatatggaggaaggaaggaggaatcagaatatggatcagggtatgatgggagaaaggaggagagtgaatatggatccgggtatggtggaaggaagcaatgagtctgaatatggatccgggtatggtggaaggaagcaagaatctgaatatggatctgggcatggggggagcaggcttggctatgaatatggatcccttggtcaggggtaagaaggacttggaagatgttcttgcccacaatcgagcaatgccattcagacctttttgtcgaggaggtggaaggacaggccaggctaagagttgacactctaatggccatggacggtggcctgtcaagtcagcaaaattcattcttgatttgctcaaaaatgctgagagcaatgcttaaatgaaaggtttggatgttgattcac

SEQ ID NO: 2606 - DNA, 465 bp, Glycine max
gctcgagcaaccacgagttatccgaggtacctacaactaaccctcccaaagatgaaaaacccgaacacaaggaagaacagaaacccgtggaggaagaaaagaaggaacatgctgctgacgtggcagaagagacagaaaaagaagctgcagaagttacggtaaccgaaactgaggttgttgaagagaaagtggcggtttctgcttctgctgacgaggatggagcgaaaaccgttgaagccatcgaagaaagcgttgtgtctgtgacagtgactgtctccgaggaaccaaaggtggaagctgtttcactttctcgcttctcccgaagaggtttgcatttggggtgtgccgcttctcgctgatgacagaagcgaacgtgattctgttgaagtttctctcgtgctcgggacttcaaggtgaaggaggcattggcgatgataaagagcacgattcggtggaggaaggagt

SEQ ID NO: 2607 - DNA, 664 bp, Glycine max
gaacaccaaaaggggtatctaccgcgaaacgcacatttcactattcattctcgtttccctttcgactgtgattgtttgttaactgaacttttcgagcaaaatgtctggacgtggaaaggggggcaagggtttgggaaagggaggagcgaaacgacaccgtaaggtgttgcgcgataacattcagggaatcaccaagcctgcgattcggcgtttggctcgcaggggtggtgtgaagcgtatcagtggtctcatctacgaggagacacgtggcgtgctcaagatctttctggagaacgtgattcgtgacgccgttacctacactgagcacgctaggagaaagaccgttacggcaatggatgtggtttatgctctcaagagacaaggaagaaccctctacggatttggaggctagtttggttttttttttttttttttaaatttttattgttaggtttcgtttgttttggaggtttatgtgggatgtaagagacccttgctattagggagatagggaaaaaaattgcaaggatttggtgtagtaagttgctggtggtgttttaggtataagggtttctataacatgtaatgtattgagctatattgctgccaagcttgtaattgtatccccatatgccgctaatgtcagattcttgtttttctgtcc

SEQ ID NO: 2608 - DNA, 427 bp, Glycine max
agagtacaaccttttcaactccgaaggcgagccacgatgtcaggaagaggaaagggaggcaagggtttgggaaagggaggagcgaagaggcaccgtaaggttctgagggacaacatccaggggatcaccaagcctgcgattcggcgcttggcgaggcgtggcggcgtcaagcgtatcagcggtctcatctacgaagagacacgtggcgttctcaagatcttcctcgaaaacgtcattcgcgacgctgttacttacaccgagcacgctcgccgcaaaaccgtcactgccatggacgttgtttatgccctcaaaagacagggcaggaccctttacggtttcggtggttagttaggacattatggtaggctcttactcttattagtatcgaatcatatgttgctagatggatcttcacattgtaatggct

SEQ ID NO: 2609 - DNA, 313 bp, Glycine max
gaccgcgaaacgcacatttcactattcattctcgtttccctttcggtaatttccaattactagttactaatttctccatgctttcttcatcttacgcttaatccttatggtttcgtttaattgttgttctaattgccgcttgttgcagactgtgattgtttgttaactgaacttttcgagcaaaatgtctggacgtggaaaggggggcaagggtttgggaaagggaggagcgaaacgacaccgtaaggtgttgcgcgataacattcagggaatcaccaagcccgcgattcggcgtttggctcgtaggggtggc

SEQ ID NO: 2610 - DNA, 393 bp, Glycine max
gaccgcgaaacgcacatttcactattcattctcgtttccctttcggtaatttccaattactagttactaatttctccatgctttcttcatcttacgcttaatccttatggtttcgtttaattgttgttctaattgctgcttgttgcagactgtgattgtttgttaactgaacttttcgagcaaaatgtctggacgtggaaaggggggcaagggtttgggaaagggaggagcgaaacgacaccgtaaggtgttgcgcgataacattcagggaatcaccaagcctgcgattcggcgtttggctcgcaggggtggtgtgaagcgtatcagtgggctcatctacgaggagacacgtggcgtgctcaagatctttctggagaacgtgattcgtgacgc

SEQ ID NO: 2611 - DNA, 395 bp, Glycine max
ctgatattcagaagggattggttttgtgttgatccgtgcaattaaaaactcttaacataaacttgctctacagtattatacacataacattctacactcttaatttcttctagctagtaatcttcctatgcatgaagaaaagagcaccacccctaaattgtttgaggcccaatattcctagattatgtcaagtggagagttttgtttgtttgttttatttttgttatggtttggtatgagtttcatactatgcttcaaattaatgagttaattgaaaacttagtatattttgatttccttgttatccttcggatgaattacttaacattagtttcaaaagagaaaaaaaaaaaaaaaaaaaaaggggggccccccaataagtgacctcgccgccc

SEQ ID NO: 2612 - DNA, 372 bp, Glycine max
gaagtttattggcgcccgttcgcattttggcatcgggggtgtatctcgtcggagagagaaaaaccatagccatttctggaagaggaaaggggggcacccctctaggcaagggaggagcgaaacgacacccgaaggggctgagggataacattcagcgcataacgaagcccgcaattcgccgtctcgcgagacgtggcgccgtgaagcgtatcagtggtctcatctacgaagaaacccgcggcgttctcaagatcttcctccagaacgtcattcgcgacgctggcacctacactgagcacgctcgccgcaagaccgaaaatgccatggacgatggttactccctccagacgcaagacaagaccctctaccgtt

SEQ ID NO: 2613 - DNA, 282 bp, Glycine max
taatttgagtgtatattcagagagaaaaacgaagaaaacatcgtgaagcatgtctggaagaggaaagggagggaagggtctaggaaagggaggagcgaaacggcaccgtaaggttctgagggataacattcagggaatcacgaagcccgcgattcggcgtctggcgcgacgtggtggcgtgaagcgtatcagtggtctcatctatgaagaaactcgcggtgttctcaagatcttcctcgagaacgtcattcgcgacgctgtcacctatactgagcacgctcg

SEQ ID NO: 2614 - DNA, 279 bp, Glycine max
ggggataacgttgttatgcttaaccatatcttacctgcacggaagaccagaaggcgtttagctcggcagaagactggctgtcaagattttcccaaggcctactgctggacctctcaggccaattgttcatggccagactctgaaatacaacatgaaagtcagatctgggagaggattttctctcgaagagttgaaggctgcgggaattcccaagaaacttggtccaacataggattcgtgacacggagaaatcgttcttgaatccagcatgtgaagtca

SEQ ID NO: 2615 - DNA, 137 bp, Glycine max
tcgccctttcgtccgaggtgctcaaccctagtaagccgcccatggtgaagtactcaagggagcctgacaatccaaccaggtcttgcaaggctagaggcgccgaccttagggttcattttaagaacactagggaaact

SEQ ID NO: 2616 - DNA, 1527 bp, Glycine max
gagaaacttcggacgtggcaacaagaaaaccattgacattagcttgagtcatccaataagagttggccttatcctatcggaaatcttactcacagcagagccaccaaatacttgtgttgtgtcgattctctgccatccatgactcacaaaaaccacttacaaagtagtactacttggtttcaatcaaaacaaaaactcacactttggtggccacagcaacaataacaatggcagcctcactacaagctgcagctaccttcatgcaacccaccaaggtgggcatggccactcgcaacctcaaatctacacaatgcatttctaaggcttttggcttggaacccgctgcagctaaactcacttgctcccttcagcctgatctcaaagattttgctcaaaaatgtgtcgacgctaccaaaattgcaggattcgcccttgccacctctgctctcgttgtttctggagcaagtgcagaaggtgttccaaagaggctaaccttcgacgaaatccagagcaagacatacttggaagtgaagggaactggaactgctaaccagtgcccaaccattgaaggtggagtggactcatttgccttcaagccagggaaatacaatgcccagaagttgtgcctggaaccaacttccttcacggtgaaggcagagggtgtggccaagaatgcccccctcgaattccagaacaccaagctcatgacacgtttgacctacactctggatgagattgagggaccctttgaggtgtcttctgatggcactgtgaagtttgaggagaaagatggaattgactatgccgccgtcacagttcagctaccgggaggcgaacgtgtgcccttcctcttcaccatcaagcagttggtggcatcagggaagccagacagctttagtggggagtttctagtcccatcctaccgtggaagctctttcttggaccccaagggaagaggtgcctccacaggttatgacaatgcagttgctttgcctgctggtggaagaggagatgaggaggaacttgccaaggaaaacaataaaagtgcctcatcatccaagggcaaaatcaccttgagtgtcaccaagaccaagcctgagacgggtgaggttatcggtgtgttcgagagtgttcaaccatctgacactgatttgggagcaaaggctccaaaggatgtcaagatccagggcatctggtatgctcagcttgagtcatagagtgttttgttttctgttttgtttgttggctcagattttgttagtaacttcatgcatggtgttgctgcattatcccttgacccaactttcctagcactactgagagtactgtcatggttgtatattatatcgacctccaattacaatgtttaaaattcaaggtttaaattgatggtgtgtgtgagttttcgagctcaattttttactagttggaattgcatcgtgttatgtgtttcattacacctaatatgctagtcactagctagggaaacactgcatttgaagatgattgcaattgacccttggagag

SEQ ID NO: 2617 - DNA, 894 bp, Glycine max
acgaggtggcatcttagtcagcaaaactctgacagaaagacgaaagtatctttatcccaattgagaagaatgcaacgtggcaaccaagagaaccatttgcattagcatgaatcatccaataagagatcaccttatcctattcgctatcttactcaactcaccatagccaccaaataattgcactctctcctctctccactctccaccaacacaaaagcacttgcaaactagttttgttttgggaacatcatcacattacattagattggtggtaatggcagcgtcactacaagcagcagctactttcatgcaacccaccaagttgagcaggagcaacactttgcagcaaaagtctactcagtccatttccaaggcttttggtttggaacctgttggagctaaaaaggtcacatgctcccttcaggctgatcttaaggacttggctcacaagtgtgttgatgctaccaaaattgcaggattcgcccttgccacctctgccctcgttgtctctggggcaagtgctgaaggtgttccaaagaggctaaccttcgacgaaatccagagcaagacctacttggaagtgaaggggacaggaacagcaaaccagtgcccaacaattgatggtggattggactcatttgccttcaagccggggaaatacaatgccaagaagttgtgccttgagccaacttcattcacagtgaaggccgagggtgtggccaagaatgctccccttgagttccaaaacacaaagctcatgactcgtctcacctacaccctggacgagattgagggtcccttcgaggttagatccgatggaatcgtgatattcgatgagatagacggaattgactatcctgctgtcactgttcagcttcccgggggagagcgtgt

SEQ ID NO: 2618 - DNA, 613 bp, Glycine max
  unsure (1)..(613): unsure at all n locations
caccaaataattgtactctctccactcttcattctccaccaacacaaaaacacttgcaaactagttttgtttttggaacatatcgcattacattacattagattggtggcaaagcaatggcatcgtcactacaagcagcagctactttcatgcaacccaccaagtttttgcagctaaagtctactcaggccatatctaaggcttttggtttggaacctgctggagttaataaggtcacatgctcccttcaggctgatcttaaggacttggctcacaagtgtgttgatgctaccaaaattgcaggctttgcccttgccacctctgctctcgttgtttctggggcaagtgctgaaggagtaccaaagcggctaacctttgacgaaatccagagcaagacctacttggaagtgaaggggacaggaacagcaaaccagtgtccaacaattgatggtggattggagtcatttgccttcaagcaagggaaatacaatgccaagaagttctgccttgagccaacttcattcacagtgaaggcagagggtgtggccaagaacgctccccctgagttccaaaacacaaagctcatgacacgtntgacctacactctngatga

SEQ ID NO: 2619 - DNA, 523 bp, Glycine max
cagtggggagttcctagtgccttcttaccgtggttcatctttcttggaccccaagggaaggggtgcctcaactggttatgacaatgctgttgctttgcctgctggtggcagaggagatgaagaggaacttgctaaagaaaacaacaagagtgcttcttcttccaagggcaaaatcaccttgagtgtcaccaagaccaagcctgagactggtgaggttattggggtcttcgagagtgttcagccttctgatactgatttgggggctaaagctcctaaggatgttaagatccaaggcatctggtatgctcagcttgactcatagaccctttttcttaatgctgtatttctactttcttgtaactcccccagttggcgaagcactcagagcgttatcacgtgtgtatattatattgacttcgattataatgcttaaaattaaaaatgtccaacttaccttttcagtttcacttctgccaactattaattatcaacgtatacgtgtttctgattgcccttgagtgct

SEQ ID NO: 2620 - DNA, 430 bp, Glycine max
ccccaagggaaggggtgcctcaactggttatgacaatgctgttgctttgcctgctggtggaagaggagatgaagaggaacttgccaaggagaacaataaaagtgcttcatcttccaaagggaaaatcaccttgagtgtcaccaagtccaagcctgagactggtgaggttattggggtgttcgagagtgttcagccttctgatactgatttgggggctaaagctcctaaggatgttaagattcaaggcatctggtatgctcagcttgactcatagaccttttcttaatgttgtaactctactttcttgtaactccatccacggtcttgtgaccccagttggcgaagcactcagagcgttatcatgtgtgtatattataatgacttcgattataatgcttaaaattaaaatgtctgagttaccttttggagc

SEQ ID NO: 2621 - DNA, 293 bp, Glycine max
gtgagtcgtatgtcgtttgagtcggggatggtcatggaggaacacgactcggagaaggtggagatcgtcctcaaaaccattggtcctgcacgaccctctcgcctcctcgttccttcttctatcaaggtgtgtgatttgaggagattaattgctaggaatgataatttgcaaatttacaacttgagtcttattttacgcggaagtgcactgtatgacacgaaaaatggagatgatgtatacatacaacttaatgatggagattgcttgattgttgctgtcaaaccaaagccaca

SEQ ID NO: 2622 - DNA, 844 bp, Glycine max
cctgccaagtacgcttacctgtacctgccagacttctggcatcatcacctttccattagaatcccccatcccacccttggcgcatatatatacccctctcacactcttctcttcccatcataacttattctcttgctcactcctcacccaccccaccccaaccaaaccatataacaaacgccatagtttcctttcttttctctactgttttctccaaattaatacaacccattttccttcagatgaagcagctcatccgccgcctctcgcgcgtggctgactcctccaactacacgctcctccgttcggactcctcccaggcctgccaccaccgccgcccacgcgccgagtccttccgtctctccgccccatccaagatccgccgctcctccgcggcggtggttccggaggggcacgtcccgatctacgtcggcgacgagatggagcgcttcgtcgtgtgcgccgagctcctcaaccaccccgtcttcgtcaagctcctcaacgaatccgcgcaggaatacggctacgagcagaaaggagtgctccggctgccgtgccgcgtcttcgtcttcgagcgtgttctcgacgcgcttcgtctcggactcaacgcgcgtgacatcgccgagctcgtaaatttctcgccggaagagttttcctgagaaacaaagcaaaaaagaaaatacgaaatccgttaattggcgagatcttttgctggttttgtttttttttttttttttgtaaatatactacgttaggatcttgaggaaaagaaatgaggcacaatgttaggatttgtagttgttttgggttctttttttcttgctgttgttcgattcaatctcgt

SEQ ID NO: 2623 - DNA, 895 bp, Glycine max
aacttattctctttctcactccaaccacaacattttcaccaccaccaataacaaaaaacaaacaccaccgcttccctcgatatcaatataataaattttcttctctgtttctttttttgtttttctcttccgacgacgttaataactaatccgtcgtgactaattctttcgatcttgaagatgaagcagctgatccgccggctctcgcgcgtggccgactcctccaactacacgctcctccgcgcggactccgccgcctcccagcgctgccaccaccgccgccgccgtgcggagtcctttcgcctcgccgctgcggcgaagatccgccgctcctccgcggtggtgccggaggggcacgtgccgatctacgtcggcgacgagatggagcgcttcgtcgtgtgcgccgagctcctcaaccaccccgtcttcgtgaagctcctcaacgaatcggcgcaggaatacggctacgaacagaatggagttctccggctgccgtgccgcgtcttcgtcttcgagcgtgttcttgacgcgctccgtcttggactcgacgcgcgtgacgtggcggagctcgtaaatttctcgccggaagagttctcctgagaaacaaagaaaaagaagcaaaaaagcaaaaaacacaaaaaaacaaaatacgaagatcgttgattagtgagaacttttgctggttttggtgctctgtaaatatactacattaggatcttgatagaaaaaaaaaaaatgaggcacataaatgttagggtttgcaatttctttttgtttggggttcttttttctgattgattgttgtagttgtagttcgatgctctctcgttgtaaaggtaaagatatttttcactttgttgttgcagaatgagaatctcttttgaattttccattc

SEQ ID NO: 2624 - DNA, 1604 bp, Glycine max
ttttcaaactcataacaacaactccttctgttcacaaactcatcttcaattccttttctgatctacgcaaggttaaggttaattttatctatctacttggacatgaacgaaatcgatgttccttcgttctttctctgccccatttcgctagatatcatgaaggatccagtgacggtctcaacgggcatcacctacgaccgtgaaagcatcgaaacctggctgttctcgaagaaaaacacgacatgccccattaccaaactgcccttgatagattacaccgatctcacaccaaaccacacccttcggagactcatccaagcgtggtgttccatgaacgcttctcacggcatcgaaaggatcccaacccctaaaccccccgttaacaagaaccaaatttcgaagcttctcaaagacgcttctcattcccctctcacatgcctcagaagactcaaatccatctcttccggaagcgaaacaaataagcggtgcatggaagcttctggtgttgttgaatttctagcatcaattgtaatcaacaacaaccgcaacatcgtttcttcacatgaggctgactcaaacgacggatctggattcgagttgaaaacaagtgcatgcgatgaagcgttgagtttgcttcataatcttcatttatccgaacaagggttgaagactctcttaagcttcagaaacggcgagtttattgagtctttaacaagagtcatgcaaaaggggttctttgaatcacgcgcttatgctgtgttcttgttgaaatctatttccgaagtggctgaaccagtgcaactattgcatctaagacaagaactttttgtcgaactggtacaagtcctgaaggatcaaatttcacagaagacatcaaaggcgacccttcaaaccctgatccaattctctccttgggggaggaacaggatcagagctgtggaagcaggtgctgttcctgttttgattgagcttcttctcgattgcaaggagagaaagccttgcgagatgatgctggtgttgttggaaattctatgccagtgtgctgagggaagagcagaacttttgaatcatgcagcaggtcttgccattgtgtccaaaaagattctaagggtttcgactttggccaatgatagagctgttaagattcttctgtctgtttcgagattctctgcgactccacatgttgttcaagaaatgcttaaacttggtgtggtcgcgaaattgtgcttggtgcttcaggtggatagtggaaacagggctaaggaaaaagctagagagatactcaaattgcatgctcgggcgtggaggaattctccatgcataccgaacaatttgcttaattcatacccgaattatgtgtgaaacaaaacgagaattttgaatggtgcctcttttagaaattttaatgtacagaattatttggaaaggatacagttaggtgtaagttataaatatgaggtgcaactaagcattgattgccccacaaaaaaagtataggtgggtagtgagatttcaggttttgatttgtatttcctgacaatcccgtgatggatttttgttttgctatgcattgaaacagcaatgagacgaacaaagggttaatc

SEQ ID NO: 2625 - DNA, 484 bp, Glycine max
cgttcgcgtgggcaaacacaaaatataccactcttcaattcacaaaaaaacacacaaacctcttcagttcacaaaccacacaacctcttctaatattcgttttctgatctacgcaaggttaaggttaatttgcttctatctacatggacattaacgagatcgatgttccttcattctttctctgccccatttcgttagaaatcatgaaggatccagtgacggtctcaacaggcatcacctacgaccgtgaaagcatcgaaacatggctgttctcgaagaaaaacacgacatgccccatgaccaaacagcccttgatagattacaccgatctcacaccaaaccacacccttcggagactcatccaagcgtggtgtaccatgaacacttctcacggcatcgaaaggatcccaacccccaaaccccccattaacaaaaatcaaatttccaagcttctcaaggacgcttctcattcccctctcacatg

SEQ ID NO: 2626 - DNA, 742 bp, Glycine max
acggctcggaagacgacagaagggggagagtgaaactgcgtcaaaccctctcctcgccgtcatcgccgcagcattggccaccatcagtttctccggctacgtgttgcagaatggagtcaaatcaggcagcttcttctatggaagttgagactgtcccatctgaagccaaacttttgccaccaaagccaaagtttgagcctttgaagcctcatgagatgtctgatggtcaggtacagttccgcaaggtgaatgttccacctcatcgttatacccctctcaagaaagcttggatggatatctatagtcccatatatgaacagatgaaaattgatgtccgtatgaatttgaaggctcgtagagtggagctgaagacaaggcctgatacacctgatattagtaacctgcaaaaatgtgctgattttgtccatgctttcatgttgggttttgatgtcatagatgccattgctcttctgcgtttggatgagctctacattgagtcctttgagatcaaggatgttaaaacacttcgaggcgatcacttgtctcgtgctattggaaggttatctggtaaaggtggtaaaacaaagttcgccattgagaatgcatcaaagacaaggattgtgattgctgacaccaaaattcacatattgggatctttttccaacataaagattgccagagactctctctgtagcctgatcctgggatcacccgcaggaaaggtgtattcaaaacttagagc

SEQ ID NO: 2627 - DNA, 297 bp, Glycine max
ctctcactctcgactcgtcttctcgcgccgccgccgccgccgccaccgcacaccgcttccatcggcgccatcgtaaccgtctctttcttcacttgcagaatggagtcaaatcaggcagcttcttccatggaagttgagactgtcccatctgaagccaaacttttgccaccaaagccaaagtttgagcctttgaagcctcatgagatgtctgatggtcaggtacagttccgcaaggtgaatgttccacctcatcgttatacccctctcaagaaagcttggatggatatctatagtccc

SEQ ID NO: 2628 - DNA, 548 bp, Glycine max
cggctcgagtgagtgactagtgccttaaatgggatgtgtgtgggcagtggttcagctctttatagattgttggcctgccacaaccaaaactgtacctcactcactcactcccctttccatcaccaccacacactttcatgtcttgctcttttgattcagtcagaatatgaatcctctgtgctgcattgctccggtttccatcgatcgggaccgccccaaccacgtgctggcaaaatcgcccgctcagtgtcagttgagggctcgatgcgtccatcaggacggtgaaccacgcctccaaatccagctcctccacgcaggattcctccgtcgccgtcgactctgtcaaggccacctccgccgtcccggatctcccggaggaggaggagccacgcgattccaaggccttctccggcgggaacggcggcggagtggctgggagtgtcgccgggatcctgtacaagtgggtgaattacgggaaggggtggagatcgaggtggttcgtgttggaagatggagtgctttcgtattacaagattcacggaccggac

SEQ ID NO: 2629 - DNA, 1479 bp, Glycine max
cccacgcgtccgcccatagctattcccagttcccaaattcattttaatcctaattctgcacttcttgatcattcgatttttctcctcaagatgcagatattcgtaaaaactttgaccggcaagaccatcacccttgaggtggaatcctccgacaccattgacaacgtaaaagctaagattcaagacaaggaagggatcccacctgaccagcagagacttatctttgcgggtaaacaacttgaggatggtcgcacccttgccgattacaacatccaaaaggaatcaaccctccatctcgtgcttcgcctcaggggtggcatgcaaatctttgtcaagactttgaccgggaagaccatcacccttgaggtggaatcctcggacaccattgataatgttaaggccaagatccaggacaaagagggcatccctccagatcagcagaggctgatttttgctggtaaacaacttgaggatggaagaacccttgctgattacaatattcagaaggagtctaccttacacttggttcttcgtttaagaggtggcatgcagattttcgtcaagactttgacgggaaagaccatcaccttggaggtggagagttcagataccatagacaatgtgaaagccaagattcaagataaggagggtatccccccagaccagcagaggcttatctttgctggtaaacagcttgaagatggacgaacccttgcagattataacatccagaaggaatctaccctgcacttggttttgaggcttcgtggtggcatgcaaatctttgttaagactttgaccggaaaaacaataactttagaagttgaaagttctgataccatcgataacgtgaaggcaaagatacaggacaaagaggggattccaccagaccagcagaggcttatctttgctgggaagcagctggaagatggtcgtactcttgctgattataatatccagaaggagtccactctgcatttggtgttgaggcttcgtggaggtatgcagatatttgtgaagactctgacagggaagaccattaccttggaggtggaaagctctgatactattgacaatgtgaaagctaagattcaggacaaggaaggtatccctccagatcagcagaggctcatttttgctgggaagcaattggaagatggtcgtaccttggcagattacaatattcagaaggaatccactttgcatcttgtccttcgccttcgtggtggttgctaaggggaatcccttttatgaagtgttctcatatgtcttatctgtttgttcagtgtctcccttgaacttgtgctttgcatctctggtttaagtgctgctgtttattatgttttaaaatgatgtattgaactcgtttcagcgaaagtatgttgtttatgtttttattttaaatatcaatatcgtttcacagttagttagttgtttaatatttgattaaccaatcttaagaaaattaagattctattt

SEQ ID NO: 2630 - DNA, 776 bp, Glycine max
aaattcattttaatcctaattctgcacttcttgatcattcgatttttctcctcaaggttcgtctctgtttcatctcttttcatcatcgcagcctaattagccttagtttattgatttagctttggtctttcaccatggttacatttttacgtttctatctttcgatttgtgattttttacgttaatatgtgtataccggttttgtcgttgttgaatccgaaactttccattcgactttctgattccgtatctcgtttgtcacatgcaaaatctttcccgatttttaatctggctatctgatttgatttgattttgaggaattagggttcgtggtttgatttgattctgtgattcgcttgttatatgtaaaatattcccggttcctaattttagggtctgcgatttattttcttttatcacttttgaggaatcagggatcgtggtctgacttattgtgcattatttagttgtatgctgcaaaatctttccttattttttaattagggtttacggtttgcgatttgtcatttttgggaattatggttctgtggtttattgattatgcaattcgggtttgctttctttccggtttttaatcagagttcctgactttgatgtttcttttttgtgattgaacagatgcagatattcgtaaaaactttgaccggcaagaccatcacccttgaggtggaatcctccgacaccattgacaacgtaaaagctaagattcacgacaaggaagggatcccacctgaccagcagagacttatctttgc

SEQ ID NO: 2631 - DNA, 1219 bp, Glycine max
  unsure (1)..(1219): unsure at all n locations
cgggtcacccacgccgtccctaattcttatttcttcatcggtcgaatcttcttcttctaaaaatgccaatctttgtgaaaaccttggccgggaagaacattaaccttggaggggaagtcttccgcccccatcgataccgggaaacctaaaattcaaaacagggaagggatccaacctgaccagcaaaaactaatttttgcgggtaaacaactggaggatggtcgaacctttgccgactacaacatncaaaaggaatccactctccacctcgtccttcgcctcaggggtggcatgcaaatctttgtcaagactttgactggcaagaccatcaccctcgaggtcgaatcctcggacaccattgataatgtcaaggccaagatccangacaaggagggtatccctccagatcagcagaggttgatatttgctggtaaacaacttgaggatggaagaacccttgctgattacaacattcagaaagaatccacccttcactaggagcttcccttgagaggtggtatgcagattttcgttaaaactttgaccggaaagaccataaccttggaggtggagagttcagataccatagacaatgtgatagctaagattcacgacaaggaaggtatcccaccagaccaacagaggcttatctttgccgggaaacagcttgaagatggaagaacccttgctgactataacatccagaaggaatctaccctgcacttggtgttgcggcttcgtggtggcatgcaaatctttgttaagactttgactggaaaaaccataactttggaggttgaaagttctgataccattgataatgtgaaggcaaagattcaggacaaggagggcattccacctgatcagcagaggcttatttttgctgggaagcaactggaagatggtcgtaccttggcagattacaatattcagaaggaatccaccttgcatctcgtccttcgccttcgcggtggtttttaagcgtgttttttttcaagtgttcttgttttaagcgtgtcttttttcaagtgttcttgtatgtcatgtctgttatgttcaatttctcccttgaacttgtttgctgttctggtttaggtgctgctttttatgttttaatatgatgtattgagctcgtttcgccaaaagaattaaatatcaatatcgtatcatagttaaattcatatttcgtattattacttcaaatatatagttttttatt

SEQ ID NO: 2632 - DNA, 533 bp, Glycine max
gggcgtaccctggctgattataatatccagaaggaatccactctgcatttggtgttgaggcttcctggtggtatgcaaatatttgtgaagactctgacagggaagaccgtaaccttggaggtggaaagctctgataccattgataatgtgaaagcaaagattcaggacaaggagggtattccaccagatcagcagaggcttatttttgctgggaagcaattggaagatggtcgtaccttggcggattacaatattcagaaggaatccaccctgcatcttgtcctccgccttcgtggtggtttctgagtctgtctgttatgtccaatattagttgaattctctgttgttatgtccagtgtatgttgaactcgttggttgcagctgttatttaggtgctgctttaatgtttttagttttaaggctatgtctgtgacatagcttgctatgcacggtctcgtgcaaaagaataaaaaaccattatcatctcacaattactttttattttattaaaattactacgaatagtttctgat

SEQ ID NO: 2633 - DNA, 383 bp, Glycine max
  unsure (1)..(383): unsure at all n locations
gtatctgaactctccacctccaaggttatggtctttccggtcaaagaaggtatcccaccagaccaacagaggcttatctttgccgggaaacagcttgaagatggaagaacccttgctgactataacatccagaaggaatctaccctgcacttggtgttgcggcttcgtggtggcatgcaaatctttgttaagactttgactggaaaaaccataactttggaggttgaaagttctgataccattgataatgtgaaggcaaagattagcctctgttcggatctggtgggatacctgntccttagtcctgaatcgttagctanttcacattgtctatggtgcatctgaactgctccacgctccaagggttatggggtctttccggt

SEQ ID NO: 2634 - DNA, 343 bp, Glycine max
  unsure (1)..(343): unsure at all n locations
gtttggttgtaagcagaaacttctctgttttaaatcattgtttgtgatttagctctattttttatggttctgtttgtgattgaacagatgcagatcttcgtgaaaactttgaccggtaagaccatcacccttgaggtggagtcctccgacaccatcgataacgtgaaagctaagattcaagacaaggaagggatcccacctgaccagcagagacttatctttgcgggtaaacagcttgaggatggtcgaacccttggccgactacaacatccaaaaggaatccactctccacctcgtgcttcgcctcaggggtgcatgcannatcttgtcaagactttgactg

SEQ ID NO: 2635 - DNA, 847 bp, Glycine max
cccacgcgtccgcccttgggtttccttctctctttcaccaatcaacacaaactaagttcttccttctgttgaaagcgatagcaatggccacgaatccaatcgaagcggggaacggcgacgctgctcccaaccctaacgcgactaccaaatcctccgtgtacctgcaagactcggaggagctgaagcgagtcttcagccgcttcgacgccaacggcgacggcaagatctccgtctcggagttggacaacgtcctccgctccctcggatccggcgtcccgccggaggagctccagcgtgtcatggaagaccttgacaccgatcacgacggcttcattaacctctcggagttcgccgccttctgccgctccgacaccgcggacggcggcgacgccgagctccacgatgctttcaacctgtacgatcaggacaagaacggcctcatatccgccacggagctctgccaggtgctgaaccgcctcggaatgaagtgctccgtggaggaatgccacaacatgatcaaatccgtggattccgacggcgacggcaacgtcaacttccccgagttcaagcggatgatgagcaacaatcgcgaaaatgctagcaatgctgaagaaaaaacagattaggccctttggatttgaattttatagataggctaggcactttcgctgcacaatctcttgactaataaatctaggtctgttatgatccgctatttcttttctcctcgtttcctctttttatatatatatatttatatatatttagaaatcgaatgaaaactattcctatgcttgccgtttcaaaaaaaaaaaaaaaaaaaaaaaaaaaaaaaaaagggggggcc

SEQ ID NO: 2636 - DNA, 451 bp, Glycine max
ggcgacgccgagctccacgatgctttcaacctgtacgatcatgacaagaacggccatatctccgccacggagctctgccaggtgctgaaccgcctcggaatgaagtgctccgtcgaggaatgccacaacatgatcaaatccgtggattccgacggcgacggcaacgtcaacttccccgagttcaagcggatgatgagcaccaatcgtgaaaatgctagcaatggcgaagaaaaaaccgattaggcgctttggatttgatgtttatagctaggctgggcaaggcacaatccctcttgaataataaatctatgcctgtttgttatgatcgatttgttattacttttacccctcgtttcctcttttttttttctataaatataaatatatttgtgttgaatcgctgcgcagaattagaaatcgaatgaaaaactattcctatgcttgccgtttt

SEQ ID NO: 2637 - DNA, 858 bp, Glycine max
tctcgagccgaatcggtgacacaccaaatcaaagacacctgagccattcaattcccctcctttattgctttcaagtttcaacactaattttattatctgaaaaaatggctttcaaagtttcgtttttccttgcacttgttctagtttccaatatcctcctccttgatacaacagctgctggacgcagcattggcgaaaactccaactcagaggaaaagaaagagcctgagttcttgttcaagcatgaaggtggggtgtatattccagggattggacctgttggatttccacataaatttcatctcacacctcaaaatccattacctggtggcaatggaaatggaggagcaggaaccgcaacaggatcaggatcaccaccaggtagcagttatgttcctggtggtgatgacacttttgtcccaaaccctggttatgaggttcccattcccggcagtggtggaagtgttccagcaccagctgcaccatgagttaactcatgcatgattaatgtgatgcatggtagttaataaggtggttatgcttaagtttgtctttttctttctgttttctagccataataataacttatcataaataagtatgctccatgtgcacattggtgtatatggtgaacaccatggattgccaagtcattctgtttgttcttgtagtcttgttttaagatgaattgagtgtgacgtaagcttatttgtttttcgaagtagttgctgatgaatgagtcctcaaaaataatttctgttatgattccaatttgatattctcttttcatgcacagttttatgtgtttgttccttgaatgataataggtgcacacctttacgtatggtacattatatt

SEQ ID NO: 2638 - DNA, 880 bp, Glycine max
agcattcaagatttgttccacccaagagcgcagcctctcactttagaatttctattcttttcttccaaatcttaaatgcttggagcattcaacatttgctccacgcataacaccctttcggctcttaacttttcggttcggccttggattcattctcttccctctctctcaaaaaacactgaaacccataatcgttaaaattagggcttcggtttggtatcttctctccttttcatgggcaacatctcaagcagcggcggcgtcggcggcggcaatccccgtcgccgacacagcggggcttcacggcggagtcaccctccgccacctcctccggtgacgccgcagcctgagatcgccgcgaatccattcgtgtaccatggtgctgcttcaccgtacccgaaccctcccctgcattaccctcagtaccattaccccggttactatccttcggtgccacctcccatgcctcatcatcctcatcatcaccatcatcaacatcatcatccacacatggacccggcgtggattcaggggcgttacccttgtgggcccatgatgcctaaccctgcacctttcgttgagcatcagaaagccgttaccataaagaacgatgtcaatatcaggaaagagacccttaggctcgaacccgatgaacaaaattctggccacctcctcgtttcgttttccttcgatgccaccgtttctgggagcattgccatatatttctttgcaaaatgaaggttgaaggctgcatcctcacaccaatgaaggaaaaccatcttgcaccggtgactgtgcatttcgagcaaggtcttggccagaagtttagacaagcagctggaactggtattgatttttcagtgtttgaggagtctgagtt

SEQ ID NO: 2639 - DNA, 430 bp, Glycine max
aggccgcaaaacaaaacaacaaccatcaccacaaacaccgggggtgtacggaaaatcaaatcaaaccaattcaattcaattccccccacccctccaaaaaaaaaaaaaaacaaacaccgaaacccataatcgttaaaattagggcttcggtttggtgtttttagtccttttgatgggcaacatctcaagcggcggcaatccccgtcgccgacacagcggacttcacggcggagcacccgccgccgccgccgcggcccgttacgccgcagcctgagatcgcggcgaaccattcgtgtaccatggtgctgctgcaccgtacccgaaccctcctctgcattaccctcagtaccattaccccggttactaccctccggtgccacccatgccttatcatcctcatcaacatcaacatcatcatcgacacatggac

SEQ ID NO: 2640 - DNA, 662 bp, Glycine max
  unsure (1)..(662): unsure at all n locations
gaggtttcaaactcaaccaatctgaaacccccccattacaaattgcagaggcagaatctaaagtgtatctcccagatcttggcaagggcttggggtgtgtggttcaaacaaaggatggaggctacttgacatctacgaatcctttacataatgctgtggctagaaatgagactccaaagctagccatgcagatgtcaaagccttatgtgttggcatcaaatcagtccccaaatgggttagagttgtttcagaaattggctggcattggtcttgatgaactcagctgtcaagttttctccatgatgcccctagatgaactgataggtaaaactgctgaacagattgcctttgaaggcattgcttctgccatcatacaaggaagaaacaaagaaggagccagttctagtgctgcacgtatagtttctgccctcaaaggaatggcaaatgcaatgagttcaggaagacaagaacggatttcaacaggactttggaatgtggacgaaaccccatttacagcagagaatattctggccttcacaatgcagaagattgagttcatggcagtggaagggttgaaaatccaagctgacatgacagaggaagaagctccctttgatgtttctccacttagcactgaggaagggaacanagagaatgaacta

SEQ ID NO: 2641 - DNA, 458 bp, Glycine max
ctggacccagacccagttcctttgttcaacacgttacaataatggcccatttttctctctcccctctctcctgtgcaccttctcctctcccacctcgccgccgaatctttctcgctcctccccgaaccgccgcatcttccgccaccgacgccgcttcctcttctacttcctcttccgcttcgaatttcgctcccaaagtcgtcgtcaccagagagcgcggcaagaacgccaagcttatcgccgctctggctaaacatgaaatcaattgtttggagcttcctctcattgagcacattcaaggacctgatttaggcaggcttccttctgtactaggtgacaatgcatttgattgggttgtgataacgtctcctgaggcaggctcagtctttctagaggcatggagagcttctgggatgcctcatgtcaaaataggtgttgttggggctggcactgcaagc

SEQ ID NO: 2642 - DNA, 1190 bp, Glycine max
tcacccacctttgagtctttcttcctttgtaatagaaagcacgcgtttctctctctccctctctcaacgaatatttgtgtacttcctcttttgtgggtagattcaatttaccatgtcgagttcatcggaatactctcaattttccggccagaaaccggcgaggtcgccggagaaatcgagcttctctcagacttgtagcctgttgagtcaatacatcaaggagaagggtagcttcggagatcttaccctcggaatgacatcatgtgggtcacctgagacatcttgtcaatctgctacaaccatgaacttgtttcctaccaaggaaaacaacgtggcaccaaaggacctgacagctatggatttgctctctccacaagcttcctcctatggtccttcagaggagattccaaccttggttaattccagcgcaattaagtctgtgagcaagggtgctaaaactgcacagatgacaatcttttatggtggacaagttgttgtctttgatgattttcctgctgacaaagcaagtgagatcatgtcctatgccaccaaaggggggatcccccaaagccagaacaattctgttttcacctacacacagagccagccttcatttcctgctaatttggtcagaacttctgctgattcaagtgctccaattattcctagtgtgaacattaccaactccattcatgaacaccctcaagcatcatccagacctgttgtttatctgccaattgctagaaaagcttcactccaccggtttctggagaagagaaaggatagaattgcttcgaaagcaccatatcaagtagcaaatgggccttctaacaaggcagctgagtccatgccatggcttgggctgagtgcttcttcacctcaaatctgagagcagctacagttatatgtaatttttaagcattatttttgttgtgaaaatgctaactagtcagaagtattttttttgccagaaatcttgactaagtttctggttatatttttttcctgactgcatagcattgttactcttttttttttctttaaatgttttaaagatgttttatgggcttcttgttagccctttatttgtcatagtaatttcggctctgctgggtcgtatcatagatctaactattggttagttgatgctgctctaattatagtgattcaatatattcattgttatgatt

SEQ ID NO: 2643 - DNA, 767 bp, Glycine max
cccacgcgtccgcattgcatcgtaggagtctcttattttcctttgtaatggaaagttagaaaccctcatcgtcaaagcacgcgttttttttaatctctctctctcaacaaatatttgtgggtagattcaattcaccatgtcgagctcatcggagtactctgaattttccggccagaaaccggcgaggtcgccggagaaatcgagcttctctcagacttgcagtctgttgagtcaatacatcaaggagaagggtagcttcggagatcttaccctcggaatgacatcatgtgggtcacctgagacatcttgtcaatctgctacaaccatgaacttgtttcctcccaaggaaaacaacgtggcaccaaagaacctgacagctatggatttgctctctccacaagcttcctcctatggaccttcagaggagattccaaccttggttaattccaggtgggttgtttggttggttgctttgcttctttaatttgttgtgaagtcaattaacagtgtacccgtttgttcccacttgctgtggaagaaaattaatgagctatgacttcataccaattcttaaaactatatatatatatatatatccaacttcttttgtggctatttggttattaataaaatatccactatatcaatactaatacaatcatgtgataccaaggtgtttagcttaattgattgagtaaaatgcgtgagttattgtaaatcttatgatacctgtctttgaatcttaccgttacaaaaaatactaatat

SEQ ID NO: 2644 - DNA, 437 bp, Glycine max
tgtttttgcagaattgcttccaaagcaccatatcaactagcaaatgggtcttctaaccaggcagctgagtccaagccatggcatggactgagtgcttcttcacctcgaatctgagagcagctatagtttatatgtaatttttaagcattatttttgttgtgaaaatgctaactagtcagaagcttttttgccagaattcttgactaagtttctggttatatatttttttcctgactaaatagcattattacttcttttttctcttttttttcgccgataaaaaaacctcttttttttttttctttaaatgtttttcagatgatttatgggcttcttgctaggcctgtatttgtcatagtaatgttggctctgctgggccgtatcatagatctaactattggttagttgatgctgctctaattatagggaattcaata

SEQ ID NO: 2645 - DNA, 291 bp, Glycine max
atcttaggagtctttcttcctttgtaatagaaagcacgcgtttctctctctcgctctctcaacgaatatttgtgtacttcctcttttgtgggtagattcaatttaccatgtcgagttcatcggaatactctcaattttccggccagaaaccggcgaggtcgccggagaaatcgagcttctctcagacttgtagcctgttgagtcaatacatcaaggagaagggtagcttcggagatcttaccctcggaatgacatcatgtgggtcacctgagacatcttgtcaatctgcta

SEQ ID NO: 2646 - DNA, 939 bp, Glycine max
  unsure (1)..(939): unsure at all n locations
aaaatcttcaggaaaaagtaaagacaaaaactgaaattcctgaacaactccacctttgtaggagttagttttatctttgttggcctatcctttctttccttcaaaaaaaaaaaaaaaaaacaccaaccctttaaactctccaatcaactactccaaaaatcaagagcaaaatcaatagaaagaaaaggaaacaaacaccaacaccaacacctcatacacttgtctgtcatagggtggtctcctttggtgagaattgagaagccaagccactcaattcatcaccttctccctctccttttccaaggaaaaaagaaaaaaaaaatcatcaattccaatggaggtttcatgcaaaattttgagaagatcaattcacagttttcttcaaaactaccactatttcacctcaactgcagcttttctagcccttcctttctccgcatcaatactcctatcagaagcttttgtgccagcctcttcatccctcttgcctcagatacacagtcacctaaggactctctttgatgccgcaggctttccttccacatcacaattgtttaccattctcaaccttaaggtttctcaaacaatcacttcctcaatcttcacccttcctttcactctcacattcctcctcattgcaaaagcatccataattcaagctctaagtcaccacaaaccaactttgccaacttccttcacttccatcttgtaccattacaagcctcttctcctcacctatatctacaactctttcttcattctctcagcaaatgcatcttgcttttgcctcctctttttggccttcacctttgctgaagggctgggatacacttcaccaagttccacactttttatgtcagctgcagctgcagttctcttttctgttatccttgccaatgcactngtgatttgcaacatggcactgacactatctggcat

SEQ ID NO: 2647 - DNA, 548 bp, Glycine max
gtatttataagaaacagaaactcagtgcttctccctctaatctgcttcaaatacctgacgtagtggtgactcatccagcaagaacaactaatggaaacataagatgcagaatggtagtcaaactatctgacaacatgcggaatgttaccacttccatgttttttgttcgcacaagaagttcatatggagtgcaaccactgattgtaagtaggcagcagattcaaaatcaggttgttaggccattccttgactgttgcagagtagtgtcaatactttgttgaggtgacttaccactgtgatgaaacacaaatcctttctgaatagatttggttgtttccatgacagtacaccatgccaatgagttcaggtggaaaaactgtagataccattcatggacttcagaaatcagaacatacacttacaattttgacaaaatgctggtgtaatttcaattgttgaactgctgctactcgtattcagtaatcacttgccaatgaaatgtgtatcctattacatcactataaaattcgttttgtattgttgtgtac

SEQ ID NO: 2648 - DNA, 1044 bp, Glycine max
  unsure (1)..(1044): unsure at all n locations
ggacaactcagtcgttatgggaacattgaactcagtccatcagctgctgtcccaaactctggtccgggtttattcgaaggcacgaaagcatacagaacagaatatgggggcttgctactcttccgtccagaagaaaatgccattcgcatgaagactggtgcccaaagaatgtgcatggcatcgccttccattgatcattttgttgatgctttgaagcaaactgtcttggctaataagcgttgggttcctccaccgggcaaaggatccttgtaccttaggcctctgctcctaggaactggtccggttttgggtttggctcctgcacctgaatacacattcctcatatttgcttcccctgttcgcaactatttcaaggagggctctgctccactcaacttgtacgtggaggaaaactttgaccgtgcttctagccgcggcactggaaacgttaaaaccatttccaattatgcaccggtcttgatggcacaaattcaagccaagaaaagaggattttcggatgtgctataccttgattcagacaccaagaaaaatctcgaggaggtctcttcttgtaacatttttattgccaagggcaaatgcatctcaacacctgctaccaatggaactattctttccggaattacccgaaaaagtgtcattgaaattgctcgtgatcatggctatcaggtagaagagcgtgttgttaacgtggatgaattaattgaggctgatgaagttttctgcacaggaactgcggtcggtgttgctccagtagggagtatcacataccaggataaaaggatggaatatataacaggttctggaaccatttgtcaagagttgaacaatacgatttcaggaattcaaacgggtactattgaagataagaagggatggattgttgaagttgattaacaacgcgtgtttataattgtttattccaatgttattaaacaaattttaaactataatgattgtctatacctaaagtgaatgaaatactgtgttgttcgttatctnnnnnnnnnnnnnnnnnnnnnnnnn

SEQ ID NO: 2649 - DNA, 475 bp, Glycine max
  unsure (1)..(475): unsure at all n locations
cccacgcgtccgcccacgcgtccgctcctcctatctctggtgcgtttctctttctctctccattatttggtgtgcatgctctcgacacacacacaccccaccaccaccaacactgagttttagcagaaggatagagagcagaatgattcaaagaactgtgtcctttcccagtttaaggaaattgcttcttcgggctggttgttctaaatctgcttcgtccaagatcggaacttacaattgctttgcttctcagtcctcccctctaccgagccacaaccctagttaccgtgatgacgagtatgctgatgtggactgggacagtcttggatttggactgatgcccactgattatatgtatattactaaatgttgtgagggccaaaattttggacaaggacaactcagtcgttatgggaacattgaaactagtccaatcaagctgtgtccctaaattatggtncagggttattcgaag

SEQ ID NO: 2650 - DNA, 405 bp, Glycine max
ctcctatctatcgtgcgtatctctttctctctccattttgatttatatatttctctccattatttggtgtgcatgctctagacacacacacaccccaccaccaccaacactgagttttagcagaaggatagagagcagaatgattcaaagaactgtgtcctttcccagtttaaggaaattgcttcttcgggctggttgttctaaatctgcttcgtccaagatcggaacttacaattgctttgcttctcagtcctcccctctaccgagccacaaccctagttaccggtaaaggtttattcgaaggcacgaaagcatacagaaaagaaaatgggggcttgctactcttccgtccagaagaaaatgccattcgcatgaagactggtgcccaaagaatgtgcatggcat

SEQ ID NO: 2651 - DNA, 446 bp, Glycine max
gtctctgtagcccataaacgcattcccccttgtctgctacctctgtttctcaacctcattctcattttccggtttctctctctctctctctctcatggcgaatctagcacacttctccaagagagccctaagaagcgcacacgcgctcgcaaggcaccacgtgcagccgcagctgctggcagcggaacgcgcttttgcgacggaggcggcgaaatcgatatccccgtcggcggatcgcgtgaagtgggactaccgagggcagaggaagataatcccgttagggcagtggctccccaaagtggccgtggatgcttacgtagcacccaacgtggtcctcgccggccaagtcaccgtctgggacggagcctccgtctggcccggttgcgtcctccgcggcgatctcaacaagatcagcatcggattctgcttcaacgtccaggaacgct

SEQ ID NO: 2652 - DNA, 383 bp, Glycine max
gacagttgccatgccctatgtatttagatatttggctgccgagttagcagcaatgaatataaaaatgactcttaagctcagtgatggagctggagccggagcctgatatgttatacttaaattgattggatgtgttaagtttgtgatttgtatcacaacaggaatgttcaatggaggctcagatgcttgctcacatcatggggagttaaaaaatttccaggccatgcattcatataggtgacatcacagactaatctgaattgctggctgcttttaacagatcctgatagtcgtgcaaggattgaagttagtcatgtgaaaatattgtttaatggattcaaatggtgggaggagataggtagattttataatgtcgtaaattg

SEQ ID NO: 2653 - DNA, 425 bp, Glycine max
  unsure (1)..(425): unsure at all n locations
tnnnttttntnnnctgtacctgcaagtcaataccgggctgcatatctaccattttttctaaatagaatttctcaaactgtcatgggtctcacgattcagtacctggaggcatcagttgccgcaattattggcataatcttagtttcttacttcatcaaaagggctacagcaggttctgcccgcaagccaccggcagcaggcggtggctggcctttgatcggtcatcttcacctcttaggtggttccactcagccaccttacataaccttaggatccttggcagacaagtatggcccaatattcagcatgagaattggtgtgcatcatgctgttgtggtgagctcttgggagttagcaaaagagtgtttcaccactcttgacgtcactgtctcctctcgtcccaaattcaccgccgcaaaaatctt

SEQ ID NO: 2654 - DNA, 368 bp, Glycine max
gttgatccacaagtcgttacagcgctcgcaacttgtcatggacgcagcaacgggtgttggagtttgtgtcttcctattaatttcttacatggcgttcttaatcaaacgggctacagcaggttctgctcgcaagccaccggcagcatccggtggctggcctttgatcggtcatcttcacctcttgggtggctccggtcagcctctttacgaaaccctaggaacgttagcagacatgtatggcccaatattcagcatccgaattggtgttcaccctgccgttgtggtgagctcttgggagttagcaaaacagtgtttcaccactcttgacgtcactgtctcctctcgtcccaaattcagcgccgcaaaaa

SEQ ID NO: 2655 - DNA, 2271 bp, Glycine max
acgcgcacgtaagctcggaattcggctcgagctcgagccgaatcggctcgagcggctcgagcggctcgagctcgagccgaatcggctcgagcaaacactagcaaagggaaggaaaagtaccttccccaataacccttctctccgatttggcttctctcatcggagggaaacaatcaataaaagaaaaaaaaaacccacaaaaagattataacaaaaaaagtatgaaaggaaaagtactaggttccgcagtttctctcatcctagtggtgggtgtggtaattggcgtggttgctgtagttcaaagcccaaagggcgtgaacaacaacaacaatggaggagaattgaaaaccagcaacagggccgtgacagcgttgtgccaaggctcagacgaccagaaactgtgccacgaggttctgtcatcttcgaacagcacagacccaaaggagtacatcgcaaccgtggtgagaacctcgatggacagcgtgatcaaagcgttcaacatgagcgacaggctgacggtggaacacggcaacagcagcgccggaatgaagatggctctggaggattgtaaggacttgttgcagtccgccatccacgacctagaggcctcaggcgtgttggtcaaagagagcagcctacaggacgtgcaccagcgcaccgccgagctcaagaactggttgggagccgttgttgcctaccagcaatcgtgcctggacggcttcgacaccgacggcgagaagaaggtgcaggagcagctgcaatctgggagcttggacaacgttggaaaactcactggcttggcactcgatgtcgtgtcagggatttcacacattctccaatccttggacttgaaccttgctctcaagcccgcctctcgccgccttctggaggtggaccaggaaggctaccccacttgggtctccgctgctgatcgcaagctcttggccaacgatcctgttttgccccatgctactgtggctaaggatggtagtggtcaatttcatactgttttggacgctattaactcctaccccaagcatcaccagggtagatatgttatctacgttaaggctggtatctatgatgagtacatcaccgttgacaagaagaagcccaatcttctcatctacggtgatggcccctcaaagaccatcatcactggccgcaagaactttcacgagggtaccaagacaatgagaaccgccaccttctctactgttgccgaggatttcatggcgaagtcaattgcatttgagaacaccgctggtgcagaaggacaccaagcagtggcacttcgcgtgcaaggtgatcgttcagtgttctttgattgtgctatgcgcggttaccaagacacattgtatgcccacgcccatcgtcagttctaccgcaattgcgaaatctctggaacaattgatttcattttcggatactccaccaccttgatccaaaactcgaagatcttggtgaggaagcccatggcaaatcagcagaacatagtggtggcagatggcacagggcagaagaacatgcccacaggaatagtcctccataactgcgagatcatgccggaccctaccctcttggcagaccgcttgagcgtgaagacttacttggccaggccatggaaggcattctcaagggcagtgttcatcgagaatgttatcggggacttgattcagccagatggttatattccatggaacccaattgaaccaaacacacaggattgctacttcgctgagtttggcaacactggaccaggttccgttgctcaagcaagagccaagtttggcaaaggtctcattagcaagcaggaggctgcacaattcactgctgagccttggctccaagctagcacttggttgcctgctgctggcgttcctttcgatgctagcttcaccaaagcttaaggatccgagacaaaccagcatcttgagtgttataatctcttttttagcctacctaaattaataaaactataaacaggaaatcgattacctaatttcaatgcagtcacacatagccactccattgtctgaggagctgatttgtaatcattcaataagcttttcatatttatgatttatgcctttttgtatcaaccacttcatctctgtcttcagtatgcatataacatagactgatgatgggagaagcaatgggaattttgcttttggctatttaatggaaactacttaatttgccaaaaaaaaaaaaaaaataaaaaaaaaaaaaaaaaaaaaaagggcggccgccggttagctcgtcgac

SEQ ID NO: 2656 - DNA, 390 bp, Glycine max
ctcaaacactagtaaagggaaggaaccgtaccttcctcaataaaactttctctccgatttggcttctcagtttcggttgtcatcgtcggggagaaacaaaaaaaaaacccacaaaaagattataacccaaaaaaccagaaatagaataaaatatgaaaggtaaagtactaggatccactgtttctcttatcctagtggtgggtgtcgtaattggcgtggttgctgtagttcaaaggtccaaagggcgtcaacaacagcaatggaggagaagtgaaaagcaccaacagggcagtgacagcgttgtgccaaggctcagacgacaagaaactgtgccacgatgttctgtcctcttcaaaaagcacagacccaaaggaatacatcgcaaccgtg

SEQ ID NO: 2657 - DNA, 608 bp, Glycine max
ctcgagccgattcggctcgagcatctatctctcctctatccttcgtgcccacagtcaataatgtctcttccaactccatcgctcccccttctccgttgcatccattttcacgattccaatccattaaaaatagaaagccaaaaccccatcacattcctagaatcacattcagtggaaaccaaaacaatccaacaccaaaccctaattcccagggagaacctccacatattgtaggacataggaggaacgttctacttggcctaggagggctttgtggtgctgttactcttaacaacaacaacccttttgcctttgcagctccaatatctcctcctgacctaaacacgtgcggtccaccagacctacccgcaggtgtaaaacccaccaattgttgccccccatcttccaaaatcacagatttcaagttctctccctctaaccaacccttgagggtaagaccagccgcacatttggtcaacgatgagtatctagccaaatacaaaaaagcccttgacctcatgaaaaaactcccctctgatgacccgcgtaatttcacccaacaagccaacgttcattgtgcttattgtgatggtgcatatcaccaagtt

SEQ ID NO: 2658 - DNA, 1804 bp, Glycine max
cccattcttccgccatcgaagcaaaaaatgaaaacccaaagtgcttctctcctctgtctttttctctctcttgctatccttttggctagtggcactgctgcaagtgcaactccaagaagcgcagtgccaagccaccatgtttcaacattcaacagaagcctttttccttccacttttctctttggaattggttcttctgcttaccaggcagaaggagcagcaagtgtagatgggagaggaccaagcatatgggacacctacactagacagcatactgaaaagatttgggatcatagcaccggtgacatgggagctgatttttatcatcgatacaagggtgacataaaaatagcgaaagaaattgggctggactctttcagattctctatctcatggtcaagaatattcccaaagggcaagggagcagttaacccccttggggttaaattctacaacaatgtcatcgatgagatcctagcaaatggtttaaaaccttttgtcactctttttcattgggactttccacaagctcttgaagatgagtatggaggattccgtagtcctaaagtagtggcggattttcgtggctacgcaaacttctgcttcaagacctttggagacagagtcaaatattgggtcactttgaatgaacccttatcatttagtctcaatggctacaatggtggcacctttgcaccaggtagatgttctaaatacgttgccaattgtagtgctggcgattcatccactgaaccctatatcgttggacactacttattacttgctcatgaatctgctgccacattatacaagacaaaatatcaggctcgtcaaaaaggacaaattgggatcactaatccaacacactactttttgccaaaatctcaaagtgctgcagattacaaggcagcaagtagagctctggacttcttctttggttggtattctgatccggttttctatggtgactatccggagagtatgaaatcttcagtaggttctaggctcccaaaattcacaaaagctgaatctgaaggtctaaaaaattccatagattttcttggtgtgaattactacaccacttattatgcggaacatgctgaacctgtcagtgccaaccgaaccttctacacagacatactagccagtctcagtacggaaaggaatggtctacatgttggaaccccgactgatttgaattggctctttatctttccaaagggaattcatcttcttatggcacacataaaggataaatacaagaatcttcctatttacatcactgaaaatggcatggctgaatcaaggaatgactcaataccagtcaatgaagcccgcaaggatagtataaggattagataccatgatggccatcttaaattccttcttcaagcgatcaaggaaggtgttaatttgaagggctattatgcatggtcattttcggacagttttgaatgggatgctggttacacagttcgattcgggctcatatatgtggattacaagaacaacttgaaaagataccccaagttctctgctttttggttgcaaaagttccttctcaagtgatctgaatttagtgttcctttgacatgtctagtgtttttcttgtttatttccctagatttcatcgtatatcacttgtgttggatgtaatcaagagatcattttatcaaataaataatgccaaatggcatgtcgaagtaaaataccaccggttcattatagtggccatgagttctagaggttcattttgaggaagaatgctaattaataataatcttatcactctttttacgttctc

SEQ ID NO: 2659 - DNA, 1270 bp, Glycine max
aacttaatggatcctttatgcaaggaattccaagttaattgcaagaacggtgtctacaatggagatatatcacgggagtaagaagaatggtttttctggactaaaaaaccagaaatttctcttaccataacaactgtgattaaattaccagagtattttctttttgtaccagactctattcacatttgcagtccggaatttcctatctgtacattttttttttcttcttcttatttagtagaaaattaaatgaggtattcataatacattaggaaaagtgcatctgggtgatctttaggcagcttgctgacatagagataaaaacgcaacaagtcctctttagaaactgtttcagcatcaacaacatcatcattacaagttaatacccatagatcctccgaattaactctcctcaagctaccacggcaaaaaggacaagactctgactttctgttccacttgcggtagcatttaatacacatggcatggcagcaaccaggtaaaaccattttggtgcaaggctctaagcaaatcccacattcatcttctctttgcaaatcaacattggcggttagtttcacaccttcttcaatgaccttcttgccataacttggaccttctatgcttgactggccttcttctttaacaacctccaacttctccaaactaccatgaagccgttggagagatggtaatataacggcataaaagtccccaatggtagccttccttccatgagtagtcatgattgatctaccatcattatgtaccttgtatacaagtatgtggaagaggtcgagatacctatggagaaagcctgcacaagaacattccatccactgtagcaacaacaggaagagaggagccaagtggttgtacaccaatttcatttgcagaagagtcccacccttggctctgggaattgcagcagccaaagcatttgcatgctgtatatcagcctctagcagtttgagggaatccgagtaaggtaaacggcaaaggtggtaaggaatcattgccatctttctactttactttgtggaaagctgaagcacagaatcaactcagaacacacacacagagagaagggttcctcctagtaagagtaaagtgggtgaaggtgatgatcaaatttagagttgaaaaattgaggagggttatcctaattcccaccgaaaaggaaaatgaagaaagagaagtgatgatcaatgaagatagaagaaaaaaagtagggcgtcccaaaggttgaagctttagggggaggatatat

SEQ ID NO: 2660 - DNA, 511 bp, Glycine max
tttcctagtacccaaaaaaaaggggaagttaataaattggtgaagaaaatttaaaggggaggagtagggaaaaactaacaagaaaactcacaaagcattggcgtgctgtatatcagcctcaagtgctttgagggaatcctggtaaggtaaacggcaaaggtggtacggaatcattgccatctttccctttactttgtggaaagctgaagcacagaatcaacacagaacagagagagagagagaagggttcttccttgtaagagtgaagtgggtgaaggtgatgatgatcaaatttagagttgaaaaatagaggagggttatcctaatccccaccgaaaaggaaaatgaagaaagagaagaaaacaaagtgggaggggcgtcccaaaggttgaagctttagggaggataaatgagaagagagtcgggttggggctttggtttatgggtattgtgttgcggtgggtgaggtaaggaatgccgtaagacaaacgatgcgtcttcccattatatc

SEQ ID NO: 2661 - DNA, 672 bp, Glycine max
  unsure (1)..(672): unsure at all n locations
gctccagcggctcgagcggagcaagaccatcatcgtcatctacaactagtaacaaagatccaacaagcagatcaatctctctctctctctcccaaccataatagtcatgggtttgaaggaggattttgagcagtatgctgagaaagcaaagactttgccaccgactcaatcaaacgaagacttgcttatcctttatggattgtacaaacaggccaccgttggacctgtcaacaccagccgtcctggaatgttcaacatgagggacagagctaaatgggatgcatggaaggctgttgaagggaaatccaaggacgaagcaatgggtgattacatcattaaggtgaaacagctgctggaagcagctggcttgcctgcttgataacattgtcatgccttgctttctgattctgtgctagaagttcacaacagtttggaaataaacaattgcagtgtttgaagcttttattatcataatcatatttatttctaatgatttagacatgttgcttttgagtttagttatctgtatcactgttattggaaatgcctgtagacagatgctgaggacctgaaaatttctgtctagtataaacttaagttgcttgattcgcaaaaaaaaaaaaaaaaaactcgagnnnnnnnnnnnnnnnnnnnnnnnnnnnnnnnnnnnnn

SEQ ID NO: 2662 - DNA, 1341 bp, Glycine max
cacaaaactaaattaattcagaccacaccacatcgcgcacagacacacacacacttttgtcaaggcataggattggtgaggcaaacttgaattgaagtgaagaaggagatggctgcaacctcttccttgtgctcatcgaccctccaatcccagatcaatggattcttccttcacaaaacctctctttcccatactccttccctcactttctccaggaggaaaatttcaaccacagtgaaggctacatctcgagtcgacaagttttcaaaaagcgatatcattgtctctccgtccattctttctgcaaacttttcaaaattgggagagcaggtgaaagcagtggaattggctggttgtgattggattcacgttgatgtaatggatggtcgctttgttccaaatattacaattggacctcttgtggttgatgcattgcgccctgtgacagatcttcctttggatgtacacctgatgattgtagagcctgaacaaagggtaccagattttattaaggcaggagctgatatagtcagtgttcattgtgaacaatcttccaccatccatttgcatcgtactgttaatcaagtgaaaagtctgggagctaaagctggagttgtcttaaaccctgctacccccttaagtgcaatagaatatgtccttgatgtggtggatttggtcttaattatgtccgtaaaccctggctttggtggccagagttttattgagagtcaagtaaagaaaatttctgacttgagaagagtgtgcgcggaaaagggagtgaatccatggattgaagtagatggtggagttggtccagcaaatgcttacaaggtgattgaggctggagccaatgctctggttgcaggctctgctgtgtttggagctaaagattatgccgaagctataagaggaatcaaaaccagcaaaagacctgaagcagttgctgtgtgaaatgcccatgtggttcaatattcaccgtatgctccaacacagtactcatgaattagtggcctatcgagcaccattatgttgcctggcctgctgtcaccactggcaatttgcttttctctggaaataactataagaaatcagtccaagtaaggctgctgctgtgatgcgtagtttgtgtataatcttttggagtatcaggacaagtttaattcaagataaagccctttactctgtatcaccttgtagcctgtcaattctattcccccatattgtaaagcagttgtgatttctatcaatacaagttttgaacaaaaccagctaaatacattatatatatatatatatatatatttttttttttttgaaaaaaaaaaagcataaaataaactg

SEQ ID NO: 2663 - DNA, 603 bp, Glycine max
aagtaaagaaaatttctgatttgaaaagattgtgtcggagaagggagtgaatccatggattgaagtagatggtgcagttggtccagcaaatgcatacaaggtgattgaggctggagccaatgcactggttgctggctctgctgtttttggagctaaagattatgccgaagctataagaggaatcaaaaccagcaaaagacctgaagtagttgctgtgtgaaatgcctgtgtggttccatattcaccgtacgctccaatgtaagctgtattttttgccccatagaggtttctccattaaattttggcatatcgttttactgattgggtggttgaatataagcaaaattgactgccagtatgagaaacaatcaagtaaaataatggcagacattgcttatgcgccagtttcaaagtcaactatattatataattaagttatgcttgtggctcaatcatcacatgtatctgactgataattactcaatactagtagaaattttacatttggttgtgttaaaaatgctccattggagttacaaaatgtagaaggtattgtcctggctctgagcatgatctcaatctaattctcactgcgggttttac

SEQ ID NO: 2664 - DNA, 695 bp, Glycine max
gaggaccaagaagaagaaacaacctcaaaatccctttcttgtgtcgattagattactttcacaccagagtcgttcgagtacttcaccttctttctctctaagcgcaaaacctcgtactgtttttggcggttaaggatgtcggggaaaggagcgaaggggttgatcacaggcaaaacctccgccgccaacaaagacaaggacaagaagaaacccatctcgcgttcttctcgtgccggccttcagttcccagttggtcgtatccaccggcttttgaagtcaaggacaaccgctaatggtagagttggggccacagctgctgtctactctgctgctatcttggagtatctcactgctgaagtattggagctggcagggaatgctagcaaggatctcaaggtcaaacgtattactccccggcatttacaactagcaatccgcggggatgaagagttggataccctgataaaaggaacaattgctggaggaggagtgattcctcacattcacaagtctcttatcaacaagtcttccaaggagtagattactagtgaataatagcttgcttgatggaaaatttctctctactaattgtgtaatttttgcatggcacttgaaaaacaaagtagggccttttatttatgactttgttgcctgttgttgatcatggatataatatttagtctttctctttgttg

SEQ ID NO: 2665 - DNA, 344 bp, Glycine max
gaggagcaagaagaagaaacaacctcaaaatccctttcttgtgttcgattagatattgccttcacaccagagtctgagtcctctgagactttccttcagtccttcaccttctttctctctaggcgcaaaacctcgtactgtttgtggcggctaaggatgtcagggaaaggggcgaaggggttgatcacaggcaaaacctccgccgccaacaacaaagacaaggacaagaagaaacccatctcgcgttcttcacgtgccggccttcagttcccagttggccgtatccaccggcttttgaagtcaaggacaaccgccaacggtagagttggggccacagctgctgt

SEQ ID NO: 2666 - DNA, 638 bp, Glycine max
gactctgctcttgctttagccatcactaacactcagtctctgaattggggctgagggtttcgagtaacgtttatttttcacgagtttaagatatcatgggtaaagagaaggttcacattaacattgtggtcattggccatgttgactctgggaagtcaaccaccactggccacttgatttacaagcttggaggtattgacaagcgtgttattgagaggtttgagaaagaagctgctgagatgaacaagaggtcattcaaatacgcctgggtgcttgacaagcttaaggctgagcgtgagagaggaattaccattgatattgcattatggaagtttgagaccaccaaatactactgcactgttattgatgctccaggacatcgtgatttcatcaagaacatgattactggaacttcccaggctgattgtgctgtccttatcattgattccacaactggtggttttgaagctggtatttccaaagatggacagactcgcgagcatgctctacttgccttcacccttggtgtcaagcaaatgatctgttgctgtaacaagatggatgccactacccaaagtactctaaggccaggtatgaagaaattgtgaaggaagtttcttcctacttgaagaaggtag

SEQ ID NO: 2667 - DNA, 1453 bp, Glycine max
gttttcatttcgttcttttttttccttccaaactcactcatctcacacttcctcttcctctctcactcagattcagcaattttctattttcttctctcatggcttcagattccaaaaaggatttccctgctgatgacaaagctggaacagcagagaataaagcatccaaagatgaaacgtcatctaaagattctccagcagcacaaagagctactacagctacttctggacctgcaactggttttccaggcaacccttttgatttctctgcaatgtctggcctgctcaatgatccaagtatcaaggaattggctgaacagatagcaaaagatccatcattcaaccagatggctgagcagcttcagaaaacttttcaaggagctccacaggatgctatgcctagctttgataatcaacaatatttttcaaccatgcaacaggttatgcagaatcctaattttatgaccatggctgagcgcctgggtaatgcattgatgcaggatccgtctatgtctgccatgcttgaaagtttttctaatccatcaaataaagaccagcttgaagaaagaatggcacgcatcaaagaggatccatctctgaaacatattttggaggagatagagactggcggtcctgctgctatgatgaggtactggaataatgaggaggttttgcagaagttgggacaagccatgggtcttgccaattcgggagatgcaggtgcctctgctgaaaattctggggcagatgagaccgaagatttgggaaatgaagatgaatcaattgttcatcatactgctagtgttggtgatgtggagggcttgaaaaatgcactagcctctggtgctgacaaggatgaagaagattcagagggaagaactgctttgcattttgcctgtggatatggcgaggtaaaatgtgctcaagttctcctcgaggctggagcaaaagtggatgctttggataagaataagaacactgctctccattatgcagctggttatggcagaaaggaatgtgtggcccttctccttgaaaatggtgctgcagttactctccagaatatggatggtaaaactccaatagatgttgcgaagctaaacaatcaaaatgaagtcctgaagctacttgagaaagatgcttttctgtaattgcaatgcatgatgccatgctgtcaccaacaagcaaaggggaaactgaggggaagaaggcacggtgacttcgttattttctcttttggtttcttccagccatttagtgtgttaaactaaattgattagcgttgttggatgagttaccatagaatttgttatctatgttcttgtaatgcatttattgtcacactgcatgattttgaagattagtgccgtcatgattttattcatgcttcaattttacttgtactacattgcttcgtggcaaaattctggttcaaatggtttcgtccaagaat

SEQ ID NO: 2668 - DNA, 703 bp, Glycine max
cacactgcctcttcctctcagattcaggttccaactcttctctctctcgccgtctaggtttttctctcaaaatttcgaaaccccgattttctctcaattcgaatctgcgattcatcgtaacctaaattattagatagttatattatctctctgcgtttctttcagcaattttctattttctcctctcatggcttcagattccaaaaaggatttccctgctgatgacaaagctggaacagaagagagtaaaacatccaaagatgagacttcatctaaagattctccagcagaacaaagagcgacagctacttttggacctagacctggacctgctgggcatccaggcaacccttttgatctctcagcaatgtctggtctgctcaatgatccaagtatcaaggaattggctgaacagatagcaaaagatccatcgttcaatcagatggctgagcagcttcagaaaacttttcaaggagctccacaagatgctatccctagcttcgataatcaacaatatttttcaaccatgcaacaggttatgcagaatcctaattttatgaccatggctgagcgcctgggtaatgcattgatgcaggatccgtctatgtctgccatgcttgaaagtttttctaatccatcaaataaagaccagcttgaagaaagaatggcacgcatcagagaggatccatctctgaaacatatt

SEQ ID NO: 2669 - DNA, 269 bp, Glycine max
ttcatccaaactctcacactgcctcttcctctcagattcaggttccaactcttctctctctcgccgtctagcaattttctattttctcctctcatggcttcagattccaaaaaggatttccctgctgatgacaaagctggaacagaagagagtaaaacatccaaagatgagacttcatctaaagattctccagcagaacaaagagcgacagtaacttttggacctagacctggacctcctgggcatccaggcaacccttttgatctctc

SEQ ID NO: 2670 - DNA, 1649 bp, Glycine max
tctttccgttcacgcgtcatgctacaagcccaacaaacttggttttaattggtataggcgtgccaaggtcttgttaattttgagcgttaagtgctgcaactaatcagatcccaagaccttggcctaccttgccatacagaaaaaaaaaaagcaaaaaaaaagccaaggtttggagccaacaaaaataaacacaaagcacaagtcatggaaagaataatggttggaagtgcaacaaaggttgctttcaccctcttggccactttcgccattgtcattccatgccttgaggctggcattgctgagtttgacgattttctcaaagcccaagctgatgaagcccataaaattgctcttgattcctatgtcccagagccccacgatgtcgcccatgaactcaatttccatgttcatatggcactggaaaactccacaaggagggaactaaggcagaggaaacttagaggaggaggcaaatgtcaagcctccaaccccattgacgcttgctggagatgcaataaagactgggccaatgaccggttcaggctagccaagtgcggcaaagggttcggaagacgggccaccggcgggctcggtggtcccatctatgtcgtcaccgataattccgatgacgacatggtgaaccctaagccgggaactatccgtcacgctgtcacccaaaaaggccccttgtggatcatcttcggacacagcatgatcatcagtttgaggcaagagctgatgatttcctccgacaagaccatcgatggtcgtggcgcaaacgtgcaatttaggggcggtgctggcctcaccattcagttcgtgaacaacgttattatccacggagttcgcatcaaggacatcgtacctaaggatggtggcatgattagggactccgccgaccattatggattgagaacaaggagtgatggtgatgccatctccatttttggatccaccaacatttggatcgatcatgtttccctctctaactgtgctgatggtcttatcgacgtcatccagggctccactgccatcaccatctcaaattgccacatgaccaaacataacgatgtcatgctgtttggtgctagtgactcatacagcggagacaagatcatgcagatcacagtggcattcaaccacttcgggcaaggactggttcagaggatgccaaggtgcagatggggtttcgtgcatgtcctcaacaatgactacacccactggatgatgtacgcaattggtgggagctcagggccaacaattctgagccaaggaaaccgtttcattgctccgaacaacgacaacgccaaggagatcactcacagggactacgccggaccccatgtgtggaagaattggcagtggcaatcagaaatggacctgttcatgaacggtgcacagttcgtcccttcaggctcacccatcaagacgacctacaaaaagggtctcctcatgaagccaagagatggaactcatgccagcaggttgacacgacatgccggtgccctaaactgcttcgttggcaggccttgttagacaaattagttaacattaattgttgttgctgttggttttttttttcttcctccatttttttaaaatgttagaaagcatgcacccatgcatgcatgcacagaagattcatgtca

SEQ ID NO: 2671 - DNA, 516 bp, Glycine max
atgcaacaagccaaacaaacttggttttaattggtataggcttgccaaggtcttgttgattgagcgttaagtgctttaactaatcaatcccaagaccttggtttaccttgccacacaaaaaaatatataaaaaggcaaaataataataaaaaaaagagaaggcttggagccaagaaaataaacacaaagcacaagtcatggaaagaataatggttggaagtgcaacaaaggttgctttcaacctcttggtcactttcgccattgtcattccatgccttgaggctggcattgctgagtttgatgactttctcaaagcccaagctgatgaagcacaaaaaattgctcttgaggcctatgtcccagtgccagaagatgtcaccgacgaactcaatttccatgttcatttgtcattagaaaactccacaaggagggaactaaggcaaaggaagggtagatcacgaaaaaaatgtgttgccagcaaccctattgacactagctggagatgcaacaaaaact

SEQ ID NO: 2672 - DNA, 632 bp, Glycine max
ggttgatgtatgcaatcggtgggagctcagggccaacaattctgagccaaggaaaccgtttcattgctccgaacaacgacaacgccaaggagatcactcacagggactacgccggacccgatgtgtggaagaattggcagtggcaatcagaaatggaccttttcatgaatggtgcaaagttcgtcacttcaggctcacccatcaagatgacatacaaaaagggtctcatcatgaagccaagagatggaactcatgtcagcaggttgacacgacatgctggtgccctaaactgcttcgttggcaagccttgttagagaacaacaaacattaatgttgttgttgttgttcgctttttctttttttttttggaaagaaaaaaaaaaccacattgcacagaagatttaagctactcctcttgctaggatgagtttgcgtcttctgcaaaacaagcttgttgttggccttgtaagagctagaaaaagagagaatttgttgcttgggttcaaatgagaagaaataaagttccaacttgtttgtaactttttttttgggggggtttaagttgtttgtaactttgtccccttttgtttttctttaatataatttgtgcctgttgaaaggcatgtttcgaa

SEQ ID NO: 2673 - DNA, 907 bp, Glycine max
cgcgtacgtaagctcggaattcggctcgagatagatctgaatggagagcgaggtggtgtccattgcagttttctaatgaaaacaacaaaatagacacctgttaagaaggaggacaacgatggtgctgccgctatttactgctttcattctctttgcttttattccgaatggattgttagcagttccttccaccgtcccggcattcctttggtcatcacattatgaactggcctctgaaaatatattgaaggaatctgtaaattaccaagtcatttctccgaaggatctagcaaaatctattttatctgaagcaggctggtcaaattttctgtgcaaaggaaagaaatttcatgagcctctggatctggcactcttattcgttggtagagagttacaatcttcagatttaagcatgaacaaacatgcaaactcagctcttttggacctgctcaagaactctttcgccagatccaacacttctgtggcatttccctatgtttctacatcagaggatgtgcttttggaaaactcgttggtttcaggatttgctgaagcctgtggagatatgggaattggcaatgttgctttccatggatcttgctccattgatgatgcaaatcatgaagaaatcacaactttgcactcagttcaagactatttgatcaagaggatggaagagagtcacagagggaaaacagatttggttgtgttctgcaatgaaggctctcaagctcttgagaatgttgacaggacacaatctgaaggggaagttttatccaatcttatcagttctgtggaggaatctggtgcaaaatatgccgttctttatgtgtcggatccctccaggtcaatccagtatccttcttacagggatctgcaaagatttctagcagaaagtacagccggg

SEQ ID NO: 2674 - DNA, 618 bp, Glycine max
tttaaagagtggtgtccattgcaatttttctaataaaaacaagaaaaataataatagcaaaatagacaccattaggttttcattctctttctctctctctctgattcgatcgatttcgattgttgaattcatcccatcgtggagccttcaaatttgtagttgaacaacgatggtgctgccgctatttgctgctttcattctcttttttgcttttattccgaatggattgttagcagttccttccaccgtccccgcattcctttggtcatcacattatgaactggcctctgaaaatggattgaaggaatctgtaaattaccaagtcatttctccaaaagatctagcaaaatctgttttttctgaagcaggctggtcaaattttctgtgcaaaggaaagaaacttcatgagcctctggatctggcactcttatttgttggtagagagttacaatcttcagatttaagcatgaacaaacatgcaaactcagctcttttggacctgctcagaactctttcgcagatcaacattctgggatttcctatgttttacataagaggctttgaaactctgttcagattgtgagctggaattggatggatgtgttcatgactgtcatg

SEQ ID NO: 2675 - DNA, 317 bp, Glycine max
gttctctctctctgattcgatcgatttcgattgttgaattcatcacatcacggagccttgacaacgatggtgctgccgctatttactgctttcattctctttgcttttattccgaatggattgttagcagttccttccaccgtcccggcattcctttggtcatcacattatgaactggcctctgaaaatatattgaaggaatctgtaaattaccaagtcatttctccgaaggatctagcaaaatctattttatctgaaccaggctggtcaaattttctgtgcaaaggaaagaaatttcatgagcctctggatctggc

SEQ ID NO: 2676 - DNA, 2515 bp, Glycine max
gatgggtaccgttgattcatgcgcgatacatgggtgaggccaagacatttacgcctacccaagtgtttggaatgatgctgtcgaatcttaaggaaattgcggagaagaatctcactacggcggttgtggattgttgcattggaatcccggtttattttactgatctgcagagaagggcggtgctggatgcggccacgattgctggtctgcacccacttcggttgattcaggaaatgactgccactgccttggcctatgggatttataaaacggaccttccagaaaacgatcagctgaatgttgcgtttgttgatgttgggcatgctagcatgcaagtatgcattgctggatttaaaaaggggcagctgaaagtgttgtcccaatcatatgataggtccctaggtggtagggactttgacgaggttctgttcaatcattttgctgcaaagtttaaggaggagtacaagattgatgtattccaaaatgccagggcttgtctgaggttgagggctgcctgcgagaagctgaagaaggtgcttagtgctaatcctgaggcacctttgaacattgagtgcttaatggatgagaaggatgtccggggcttcatcaagcgagatgagtttgagcaactaagtcttccaattttggaacgggtgaagggacctctggagaaggcacttgctgaagcaggtcttaccgttgaaaatgtacacacggttgaggtggttggttcaggttctcgggtgccggccattaacaaaatattgacagagtttttcaaaaaggagcctaggcggacaatgaatgctagtgagtgtgttgctaggggctgtgcgttggaatgcgcaattcttagtccaacgttcaaagtacgagaatttcaggtcaacgaaagccttcctttctcgatttctctttcatggaaaggttctggtcctgatgcacaggacagtggaccagaaaatcagcagagtacccttgttttccccaagggaaatcccataccaagtgtcaaggcactgaccatctacaggtcaggaaccttttctattgatgtatcagtatgatgacgtgagtggtttgcaaacacctgcaaagatcagcacatatactattggccctttccaatctacaaaaaatgaaaaagcaaaagttaaagtgaaagttcggttgaatgtgcatggaattgtatctgtcgaatctgcaactctgctggaagaggaagaagaattgaggttccagtttccaaagaaccagcaggagaaaataccaagatggaaactgatgaagctcctgccaatgttgctgcacctcctagcaccaatgacaatgatgttaacatgcaagatgctaattccaaggcaactgctgatgcccctgggtccgaaaatgggacccctgaggcaggagataagcctgtgcaaatggatactgataccaaggttgaggctccaaagaaaaaagttaagaaaataaacattcctgtggtggagttagtttatggagcaatggcagctgcagatgtccagaaagctgtagagaaggagtttgaaatggctttgcaagatcgtgtgatggaggaaacaaaagacaagaaaaatgcagttgaggcttatgtttatgacatgagaaacaagcttaatgacaaataccaagagtttgtcactgcttcagagagagatgattttactgctaaacttcaggaggtggaagactggctatatgaggatggtgaagatgaaactaaaggtgtatatattgccaagcttgaagaactcaaaaagcaaggtgatccaattgaagagcgttacaaagaatacatggagaggggtacagtaatcgatcaacttgtctattgtataaatagttatagagaagttgcaatgtcaaatgatcccaaatttgatcacattgacatcaatgagaaacaaaaggtcttaaatgaatgtgtggaagctgagaactggctcagggagaaaaaacagcatcaggactcgcttccaaaatatgccacccctgtacttttgtcagctgacgtaagaaagaaagctgaagctgtggacaggttttgtaagccaattatgacgaaaccaaagccactgccacccaagccagctacaccagaagcaccagcaaccccacctcctcagggtggtgagcagcagcaacaaccacctgaggagaatcctaatgccagtactaatgaaaaggcaggggacaatgctaatccagccccaccaccagcatctgctgaaccaatggagactgacaaaccagagaacacaggctctgcttaatttttgttgattttgtctggtctctacgttttgtataacaatttgaattgtacctggaaaaatcgtcgtgggtgagagttgatgctgggattctttgctggaaaaattggtaatgggtgaattatctgagattcggattatttttggtcaaatctacgttctataagtggaattacaatgcttgtttacatttgagttaaatgaccctattttccttt

SEQ ID NO: 2677 - DNA, 384 bp, Glycine max
agaatcctaatgccagtactaatgaaaatgctggggacaatgctaatccagccccgccaccagcatctgctgaaccaatggagactgacaaaccagagaacacaggctctgcttaatttttgttaattttgtctggtctctacattttgcataactatttgaattgtgcttggaaaaatagttgtgggtgagagttgatgctgaaattctgctggaaaaattggtaatgggtgaattatggtccctgagattcggattatttttagtcaaatctacgttctctaggtttttagattattatatgtgtaccattttctataagtggaattacgatgcttgttttcctttgagttaaatgacctgattttccttttgcgtggcatt

SEQ ID NO: 2678 - DNA, 368 bp, Glycine max
gtccattattggcacgaagctagcagcagaggagaagaatcagaatttagaaggcctggcgctgaaggaagaagcgaagaagacaaagacgacagaaccatgaagcgccttcttctcacgacaaactgtctcttactcaccatcggcacctccggtgggcccctcgtcatgcgtctctacttcctccacggcggccaccgcgtctggctctccagcttcctcgaaaccgctggcttccccctcatgctacctccccctcgccgtctcctacctccgccgacgtcgcaccgcctccgccgccggaatcgccaaaccgaaattaatctcaatgaagcctcctctcctcgccgcctccagcttcatcggaa

SEQ ID NO: 2679 - DNA, 462 bp, Glycine max
tatatattcttcagcaatctacatcgatgagatgttgacaaagggagcgtgttgtacaaggggcaattttttcaaaacctttttctctctcgcaacctcacctcttcctccttcaatctctttcggaatttcccaaaatccttagtgggaggaagagatggttctgactcagaagcttcacgaagccttcaaaggcaccgtcgagaggattactggcccccgaaccgtttccgccttcaaagaaaaaggagttctcagtgtctctgagttcgtcaccgctggcgataatctcgttgccaaatgccccacctggtcctgggaatcgggtgatccaggcaagaggaagccatacttgccacctgagaaacagttcttgattactagaaatgtgccttgtcttcggagagctgcatctgttgaagaggaatatgaagctgctggagggggaagtctactcgatga

SEQ ID NO: 2680 - DNA, 807 bp, Glycine max
gaaccacacactcacttatttgtttctttcaaccgagacactcacaagtcacaacacacacacacatagcaatggcatctatggcggctataggttctctcaatgttccacgttctgcttcttcccgttcatcctttgtgggaagaaaaagcgttccacgcagcctttccttctctgcatcacaactttgtggagacaagattcccacagattcagttttattggcaccaaaaataggtcgcagtccagttatcgttactcctaaagcagtttctgattcccaaaactcacaaacgtgccttgatcccgatgctagcagaagtgtgcttggcattatacttggaggtggtgctgggactcggctttatccactcaccaagaagagggcaaagccagctgttcctcttggagctaactataggcttattgatattcctgttagcaactgcttgaatagcaatgtctccaagatctatgttctcactcaattcaattctgcgtcgttaaaccgacacctttctcgtgcttatgcaagcaacatgggtggctacaaaaatgagggatttgttgaggttcttgctgctcagcagagtcctgagaatcctaattggttccagggtactgcagatgctgtgaggcagtatttgtggctttttgaagagcacaatgttttggaattcttggttctggctggtgaccatttgtatcgaatggattacgagaaatttatccaagcgcatagggaaactgatgctgatatcactgtggctgcattgccaatggatgaagcgcgtgccactgcatttg

SEQ ID NO: 2681 - DNA, 322 bp, Glycine max
gcacgcatacgtacgttagctctttagctcgctccagttgcatagtaaagagagtcacaagccaattctgaaccacacactcacttatttgtttctttcaactcactcacagagtaatggcatccatggcggctataggttctctgaatgttccttgttctgcttcttcgcgttcatcgaatgtgggaagaaaaagctttccacgcagcctttcattctctgcatcacaactttgtggagacaagattcacacagattcagtttcattcgcaccaaaaatcggtcgcaatcctgtaattgttacccctaaagcagtttctga

SEQ ID NO: 2682 - DNA, 477 bp, Glycine max
gccccttctcggtttctacgcgtgggctgagaaaccctccactctcgagtccaaactctcctcctacccaaaatggatgcaagggcatcatcttcttcagcttcctcgattcttttccttgcagcaattgtagctgcttatttctattcatcagaagcagctgtgtccaaaggatcttttgaggacaatttcagcataatgtggtctgaggaccattttactacctctaaagatggacagatctggtatctctcactagacaaagacacaggatgtggatttcaaacaaaacaacgctacagatttgggtggttcagtatgaagctgaagttggtagcaggtgactctgctggtgttgtgacagcttattatatgtgctcagaaaatggtgcgggaccagaaagagatgagcttgattttgagtttttggggaacagaacaggagagccttatttgattcagactaatgtatacaag

SEQ ID NO: 2683 - DNA, 530 bp, Glycine max
ggacacaaacatgcacatttgtgttcatctccagggggggggggttaagatattcagttacagaagcctgttgcataaaccccatacggaaattttaaagatgagacattatatacattaaattgggatgtattcaataggagtgcaaggaggataacccttacgcgacttagccccctttcacagtaagtagccttaaaaaaggagccagcatatgatataactatgagtaaggactccatttcagcttttggtgcattggccttaggcagaagacatggatttctaattaaggatccaagtttcatcgacgctgttgattgcacatttgacatgtggtggcagacttaacattggcataggtacagtgctcacaagaccaatgattatcatcagtcattctgctggatatagttcgaatagtcgcttttcctcttcctcctctccccttgctgctccctgcagcattttttgagctcgttgctttgctggaagcagctccattactatccacatcaactaaaccattc

SEQ ID NO: 2684 - DNA, 383 bp, Glycine max
caaaagctgaaatggagtccttactttggtgcattggccttaggcagaagacatgtatttctaatgaaggatccaagtttcatcgacgctgttgattgcacatttgacatgtggtggcagacttaacattggcataggtacagtgctcacaagaccaatgattatcatcagtcattctgcctaaggccaatgcaccaaaagctgaaatggagtccttactttggttatatcatatgctggctcctttttgtaatgctatttactgtgaaaggggcttaagtcgcttaagaagggttatcctgcttgcactcctattgaatacatcccagtttaatgtatataatgttttatcagtaagattttcgtatggggtttctgcaaca

SEQ ID NO: 2685 - DNA, 1173 bp, Glycine max
ctttgcataaattagtaaataactttgaaggggagcttcttgatggaaaccatattattaattgatctttgttattttacagttttatcctgtaaaagattggttgacaggatcatccttgccttctaaatttagcccaagtgttatccaaatggtactagatcagctttctccaaacaatgttcggtaggtgtactaaaattaaaactgtaaatttatgtataagaagcatgtgaaggactaactctcctaaaagcttagctgttatttcactcaacatagaaaaaactattaaggtgtttgagaatttgtattagtggggctgtttgttataattaaatttaagctaactcattctcgagcagaatcttttgggagtctaaaaaatttgaagggcttacggataaggtagcgccatggtatggaactgcatattcccttgagaaaatcactggctctgcaattcaggggtgggtgctttctgctccagatgaaaatatgcatcttccagctcctaacaaattcattccaactgacttgtcacttaaaattgtgcaagaaaaagtaaagtttccagttttgttaagcaggtctacttattcagccttatggtataagccagatacattgttttctacacccaaggcttatgtaaagattgatttcaattgcccatattctggaaactctcctgaggctgaagttttgacgcatattttcacagagttattgatggattacttgaatgaatatgcttattatgctcaggttgctggtttatattacagcataagtcacacagatggtggtttcgaggtgactctccgtggttacaatcacaagttaaggattctacttgaaactatagttgaaaagattgcgacatttgaagtgaaaactgacaggttttcagttatcaaggaaatggtaaccaaagaataccagaatttcaagtaccaacaaccttatcaacaggctatgtactattgttctttgatcttacaagatcaaacctggccttggatagaacagctagacgtacttcctgctcttcaagttgaagatcttgctaaatttgtaccagcaatgctctccaggacctttttagagatttatatagcagggaacattgaaagccatgaagcacagtcaattgttaagcacatagaagat

SEQ ID NO: 2686 - DNA, 570 bp, Glycine max
ttttgatctccgttctttaccttcctgaacgacaccgagaccagacacggtttggggcacagttaaggtggtagcagtagcattgttaggccatatctcctttttttctctgccttgtattgaggtaaaactcacaaatattataactttgatctggggaagcaatggcatggagaggacatctttcgaaaaacataaaagaacttcggtttttgatgtgccagtcatctcctgcaagctcacctgcaagggcttttgtggagaggaattataaggaactaaagacattgaacccaaaattgccaatattaattcgtgagtgcagtggagttgaacctcaattatgggcaagatatgatttgggtgttgagaaaggcatcaaattggaaggcttgtccgaagcacagatctttaaggcacttgaagatttgtcaaaagcaggacagtctttgaaagcttgatattgctgcttatgcactgtcttaagtggaataaatgctctcttgctgctcttgttattgcaaattgccttttggtttaaaataagccaggtctttttctatgtcccat

SEQ ID NO: 2687 - DNA, 474 bp, Glycine max
gataatatattggcatggtaagtcctcaatttggtcccgaatcgcacctcaccacaacctctctttctcgtctccgtccgtgcaacctgggaagcaatggcatggagaggaaatcttttgaaaaacataaaagaacttcggtttttgatgtgccagtcatcacctgcaagctcacccacaagggcttttgtggaaaggaattataaggaactaaagacattgaacccaaaattgcccatattaatccgtgagtgcagtggagttgaaccccaattatgggcaagatatgatttgggtgttgagaaaggcatcaaattgcaaggcttgtcagaggcgcagatctttaaggcacttgaagatttggtaaaagcaggacagtctatgaaagcttgatatcgctgcttatgcactgtctgaagtggaataaatgctctctagctgctcttgttattgcaaatagcttttggttaaaat

SEQ ID NO: 2688 - DNA, 613 bp, Glycine max
ggttgtaaacatcccttctttcatctttcaactctctctctccccccctctttctctcacacacaaatgtctaaaataacaataacctctccaaaacactgtgctgacaaagaaggactaaaaatcaagaactacaagaagatctacttcactttctcagcatttttcatcacaatcctactactaatacttgttatatggctcatcctccaccctgcaaagcctcaattctccctcaaagaagtcgacatcttccaacttaacctttcaggcccaaacctcaactcctccatccaactcaccctcctctccaaaaacccaaaccagaaagttggcatttactacgacgagattcaactctatgcaacctacaagggccaacaaattactggtgatacccctgtgccacccttttatcaaggccaagaagagagtaatctcataacagcttctttggtgggaaatgctttacccgtggctccgtctcttggctatgaacttggtcgtgatcaaattgttggaagactagtcttgaatctcaaagccaatggaaagcttcgttggaaagtgggaacatgggtctctggacgttacaggttcaatgttaattgtg

SEQ ID NO: 2689 - DNA, 456 bp, Glycine max
acgacagaaggggaactaaaggagagtgcaattacgtagtgtgtgggagacaaagagagatggctaagtggtgtatgttggtgttggttcttgctctagctctggctgtggccacaagtgccagagatgcacccgaagatgttggtctcaaggaccagaagaacttcatcagctatgctggagttggtggctattcaggaattggaagcaatggactaccttttggaggtgccggaataggtggtggcaccaccgggataggtggattgggaggattcggaggtcccattggcggtggtactggtggcagtgttggaggtggcgttggcggtggtagcatacctcatcccaccccttgagtgaatgaacatgcatgcatgcatgcatatggaaatttctctttccgcttctttaatttggattatcttagtcgagctagctctctttttcgctcag

SEQ ID NO: 2690 - DNA, 878 bp, Glycine max
  unsure (1)..(878): unsure at all n locations
gaagttagtccttgctccttaatgtcacaagagtaagcaacattatccctcttgaagccacagctcttaagtggatcatgttccagattatcgataaccttatcctcccaataccaggtaaagaaaatcccacgtaggataacctacaggtgccacgtcaacataaaatctccagttaacaccttgcatcttatcgtgtccatttcgtgatccactctctgagccccaatctcttgagcagcagaatcttcaggccaagccaggtaagcacaaccaaagcaacaccccaaatggcttcagcttctgttcccatggcgttgtcactgagctctgttaccaacaacaacaagccttcatccgaagccttcttcaggccactacccctacgccaaccaaagaggaccctcttcaccacgaaggcagtgtcaaactccaagcctcaaatcaatgcatctttgaaggagaaggcagttgccggactcacagcagcttctgtgacagcatctatggtggttccggaggtggctcatgctgctggatatgagttctccccttccctaaagaactttctgctaagcatctttgctggtggggttgttctagcagccatatttggagccgttattggggtttccaactttgatccggttaagagaacttaaatcatgcatgctccaatgcttttcattttctctctctctttttcactcttcttctagcttcttgtttcatgcaagttatatgcaactggtatctgttatatgcatactatctatatcccagctgcactttattttatgttatattctccttatatatgcttattaatcttcatggttcgatgttnnnnnnnnnnnnnnnnnnnnnnnnnnnnnnnn

SEQ ID NO: 2691 - DNA, 1885 bp, Glycine max
gtccagcttataaattgcattgtttgttttgatttgatgtctgctgctacaaaagtctcccttccaatgatcatctgaaattacataggatttatagggtcatcaagaactcttcagcatcacaaaaggtgatttataatcaaaaagcaagggacagacacacagaagttgttatcttgaatcagaaaacatgatgctaagaagctcttcaacaccagttcttggatccctcctctcatccttcccagatagtcctaacaacaatattcactcagaaacctgtcatgcacttaaacactttccaccaaccagtgtcccacaaccttatcacaaacttacttgccaccaaacccggtcctttgcatgtggttcttctccaatctctccctcaattggtgagcttgaaaggcaaaacaaaggctttagaagagtccaatctgatgggaacttgcaagacttggcctacttttcttgcaacaatgaagaaaggttggagtatttagacccttccaagaggttttcagctagacacaggagcttggtgctggagacaattccttcttactctactgctaagcacaatggcttgagtgaagaagaggaagatgaagaaatggaaagtgagagtgaagatgggttcagtgtgctgaatggtgggaagggtgtaatattcagtgaagaagtgagggtgaaggatggagtttgtagggtgagttttggtgaccaggaagaggttggtagtggtaaagaaatgtatcttgcaaagggacttggtgtagagtgctgtggtgatggcataggtggttgtagaggcggcggtggggtggtggtgatcataatcccttgggttctggaggaaatgatggagataggcatgcagtggaagaatattacaagaaaatggttaaggaaaatcctggggatccattgtttctgaggaattatgccaattttttgtatcagtacaaacaagactgtgaaggagcagaggagtattattcccgcgccatacttgcagacccggatgacggagaagttctatcacagtatgggaagttagtttgggagctacatcatgaccaagaacgtgcctccagctattttgaaagagcagtccaagcctctcctgaagacagccatgtacaagcagcatatgctagtttcctttgggacacggaggaagacgaggatggtagcaacgaaccacaatgtttgccgccacattctcttcaaggagctatagctactgcaggtgcttgaattggtggtgaagtttgtacgtgcaagagagtgtctcatgatgtaaacaagttcttatattgaagccaatgttgtagctgttgagaaagcagtaaataactgaatgcataaactcatgtgtagtagcactaagacaagcgaccacccttttaattaatcaacgtggcttatttgggactactagtacttgtatgttggtttgttgcatcaaaggcactgcaatttaagcaactttacacggtgctattaagatggaatcagaacatgttccaaaagccagcttgaacgctcgagaaaaggttctagaagacctaaatatgaacggaaatttgacaggctaactattctgttcttgtttttcgcaagggaatcagggatcacagttatggttgtggaagttgtaggtgcagtattatgaccatggagaatatttcatgttattaagggtcttgacgatagaaggaacaggaaggattgaatgttattgttgaataggtaatacgatattttgctgattgcttgcatgtgttgtgaagaaacaccccaatctaaactctagactgtcaaattggatttttttttttttacatattattggtatggaaacttagttgacaatttttag

SEQ ID NO: 2692 - DNA, 634 bp, Glycine max
  unsure (1)..(634): unsure at all n locations
cggaattcccgggtcgagccaagcgttcggccaagccttcctaccggttgcaaagaacaccaaaaggggaaccaaaatcttcaggccaggggaggtaagcacaaccaaagcaacaccccaaatggcttcagcttctgttcccatggcgttgtcactgagctctgttaccaacaacaacaagccttcatccgaagccttcttcaggccactacccctacgccaaccaaagaggaccctcttcaccacgaaggcagtgtcaaactccaagcctcaaatcaatgcatctttgaaggagaaggcagttgccggactcacagcagcttctgtgacagcatctatggtggttccggaggtggctcatgctgctggatatgagttctccccttccctaaagaactttctttacttcaaagcccaaatttcctttttttttttggggcccttttttgggggggggttttgggttgttctagcagccatatttggagccgttattggggtttccaacttttgatccgttaagagaacttaaatcatgcatgctccaatgctnttcatnttctctctctctttttcactcctcttctagcttcttngttcatgcaagttatatgcaactggttcttgtatatgc

SEQ ID NO: 2693 - DNA, 721 bp, Glycine max
cggacgcgtgggctgctacaaaagtctcccttccaatgatcatctgaaattacataggatttatagggtcatcaagaactcttcagcatcacaaaagggtattgttcttttcttctctgtcttcctttaccaaccccaaacatttcttttgtgttaaatttactgattctactcagcaatcagcaatcagcaatcagcaatcagcaatcagcatcattacttttccttgtagccatgtcaatttgttttctgtttcaaaaaccaatatgtctttctctttttctagtttttttcttattttcctgaagtaggtaatttgcagttttgttctattttcccagtgatttataatcaaaaagcaagggacagacacacagaagttgttatcttgaatcagaaaacatgatgctaagaagctcttcaacaccagttcttggatccctcctctcttccttcacagatagccctaacaacaatattcactcagaaacctgtcatgcactgaaacactttccaccaaccactgtcccacaacattatcacaaacttacttcccaccaaacccggtcctttgcatgtggttcttcaccaattgacggcgcgcttggagaagaaccacatgcaaaggaccgggtttggtggcaagtggttcttctccaatctctccctcaattggtgagcttgaaaggcaaaacaaaggctttagaagagtccaatctga

SEQ ID NO: 2694 - DNA, 492 bp, Glycine max
gttcttttcttgttctccttcttcctttcccaaccaaaacatttcttttgtgttatttactgattcctctcagcattcagcaatcagcatcattattacttttccttgtagccatatcaatttgttttctgtttcaaaaaccaatatgccttatgcctttctctttttctagctttattttcctgtagaagtaagtaatttacagtttgttctattttctcagtgatttataatcagaaaacaagggacagccacacagaagttatcttgaatcagaaaacatgatgctaagaagctcttcaacaccagttcttggatccctcctctcatccttcccagatagtcctaacaacaatattcactcagaaacctgtcatgcacttaaacactttccaccaaccagtgtcccacaaccttatcacaaacttacttgccaccaaacccggtcctatgcatgtggttcttctccaatctctccctaattggtgagct

SEQ ID NO: 2695 - DNA, 639 bp, Glycine max
cggatggagcagaggagtattattcccgtgccatacttgcagacccaaatgatggagaggttctatcacagtatgggaagttagtttgggaactacatcacaaccaagaacgtgcctccagctattttgaaagagcagtccaagcctctcctgaagacagccatgtacaagcagcatatgctagtttcctttgggacacagaggaagacgaggatggtatcaatgaaccacaaagtttaccgccacattctcatcaaggagctgtggctactgcaggtgcttgaattggtgatgaagtttttatacgtacaaatacaagcgagtgtcttgtgatgtaatgacgctcttatgttgaagccaatgtttataaataactgaattcacaaactcattacccatgtgtagtagcactaagacaagcgacgagtttgtgtgcaacccttttaattaatcaacgtctactgattggtaacttgtatttgggactactagtacttgaatgctctggtttgttgcatcaaggcactgcaatttaaaaaggaaaaacgagattagaaaaagaaaatggcctacagggaagaaccaacatgttacgtcattacattattacagataacaggacaatgacacatgagacgg

SEQ ID NO: 2696 - DNA, 252 bp, Glycine max
gtgcaaacaagaccgtgaaggagcagaggagtattattcccgtgccatacttgcagacccaaatgatggagaggttctatcacagtatgggaagttagtttgggaactacatcacaaccaagaacgtgcctccagctattttgaaagagcagtccaagcctctcctgaagacaggtatgctgcatgtcatgtgcttcataacattcagtttatgatatattactatcaagcagtctagttcagcttgctaag

SEQ ID NO: 2697 - DNA, 1794 bp, Glycine max
gtcatttcaccgatttttattccgtgtttcaaaagagggactcctattttgtttcagacaaagttttgttgcaaagcaaaaaactacgaggagctttcctccatacgaatccaaggaggagagaggagacacagacacaaaggaaacggaaaaagcaacacacacaaaaaaggtctgtgcctcctcttatatgtaatagatagtttctgaaacaaaagaaaaaaataaaataaaaataaaaggaccacatggattatgaaaacaacagttggatttgggagggggtaaactactacccgcgtgtgtttggtggtctaatggttacagcagccttgctgggcttgtcaaccagctactttggtgggattggggttccatatttgtcactgccatgttcctggtctaatttggggatttttcacaagaagaaatctgggaagaggcgcattcgggtgtacatggatggctgttttgatctgatgcattatggccatgccaatgcactcaggcaagcaaaggctctaggagatgaattggttgtgggtctagtgagtgatgaggaaatcgtggcaaataaaggaccacctgttttgtccatggaggagaggctggcccttgtcagtggattgaagtgggtggatgagacggaactgatgcatatgctgcagcaaagaaagctggtcgttacaagcaaattaaacgtactgaaggagtttccagtacagacatcgtaggaagaatactgtcttctttaagagatcaaaaaaattgtgaagatcataatggcaccgaggtaaaacctcaagaagaaaaccagtcaaaggcttcccacatagcccaattccttccaacttctcgacgtattgtccagttttcaaatggcaagggtcctggaccaaatgcacgtattgtatacattgatggggcatttgatctcttccatgccggccatgttgagatacttaagagggctagggagcttggtgactttcttctagttggtatccactcagatgagacagtgagtgagcatagaggaaatcactatccaattatgcatctgcatgagcgtagccttagtgtgttagcttgccgttatgttgatgaagttattattggttcaccttgggaaattacaaatgacatgatcaccactttcaatatctcagtagttgtgcatggtactgttgctgagaagacattaaattgtgaattagatccatatgaggtccctaagagcatgggaatattccacttgctcgaaagcccaaaagatattactactgccacagtagcccaaaggataatggctaatcatgaagcttatgtgaaacgcaatgctaagaaaactaggagtgagcagagatactacgaagagaaaaaatacgtctctggagactagagtgtatataatgatcttttacattagtttggtactgctcttcaagtttgaccctgtcacagagatgctacctatagtatgaatctagacacgctttgtgaaggacatgtggtgcagggtatgtataacataggagtggtcataactcaggaataccgatgtactttaatgtcctgatgttttacttttgtcatctgaaaggcaaccatgtggtttgctcaccagttttatgccatttggtttttgctatggttttggtgtttttagtgtactccagttccagttagagattccttactctgatagtatatatattgtgactatcagaagttatacgcatcagaatggctttgcctttatttatttctatttagcagcagcagaattatttt

SEQ ID NO: 2698 - DNA, 941 bp, Glycine max
aaagagcgacgcgacgcctattttgtttcagacaaagttttgttgcaaagcaaaaactactacgaggagctttcctccatacgaatcaaaggaggagagagagagagagagagagaggagacacagacacaaaggaaacggaaaaagcaacacacaaaaaaaaagaggtctgtgcctcctcttatatgtaatagctagtttccgagacaagaaaaaaaataaaagtaaaaagagaacatggattatgaaaacaacagttggatttgggagggggtaaactactacccgtgtgtgtttggcggtctaatggttacagcagccttgctgggcttgtcaaccagctactttggtgggattggggttccttatttatcgctgccatgttcctggtctaatttggggattttccaccagaaaaaatctgggaagaggcgcattcgggtgtacatggatggctgttttgatctgatgcattatggccatgccaatgcactcaggcaagcaaaggctctaggagatgaactggttgtgggtctagtgagtgatgaggaaatcgtggcaaataaaggaccacctgttttgtccatggaggagaggctggcccttgtcagtggattgaagtgggtggatgaggtcataactgatgctccttatgcaattaccgagcaattcttgaatcgtctctttcatgaatataaaattgattatgtcatacatggtgatgatccttgcttgcttccagacggaactgatgcatatgctgcagcaaagaaagctggtcgttacaagcaaattaaacgtactgaaggagtttccagtacagacatcgtaggaagaatactgtcttctttaagagatcaacaaaaattgtgaagatcataatggcaccgaggtaaaacctcaagaagaaaaccagtcaaaggcttcccacatagcccaat

SEQ ID NO: 2699 - DNA, 1253 bp, Glycine max
ttcggctcgactcgagccgattcggctcaggccatggccatggccaagtctacacctttcgctttcactcctcttcatctccgttctcgaatacaacaacaacaacatcatcacaacgccaatttcccacaattcaaatatctcgctccctcaccccacaatccctttttcctcctcaacgtttccccctcctctcagttccgtcccttctttgccttccctcgacaacgccccaatttcgctataaaagctctcgattccgacgcagcaaatcaggaatcagttcacgttgggaaaaatgaaagttaccagcaatgggattcgcttaccgccaaattctccgctgccgccaattttccctttctgttactgcaaatgcctcaaatcatactcaatgctcgaaatctgttatcgggaaataaactcgctctctccgctgtcccctggctgggaatgctaactagtttgcttggaaacttgtctctgctttcatactttgccaagaagagagaaaaggaagccatggtagtgcagacgttgggtgtggtttcaacatacgtggtccttgttcagctggcattggctgaaaccatgccgttgccttactttttggctacttcagttgttgtcatctctggccttgttctgaatttcttgaattactttggtatactgaatgctggaatctggcgcttttgggaagatttcattacaattgggggtttatcagtgcttccccaaataatgtggtctacatttgtcccctatgtacctaacagcatcttacctggggccacttcctttgtgatagctgtcttggcccgtaccttggcaagaaccggaaaactttctgagaaaggtgtcaaatttgttggaggaatatctggatggacagctacgttactctttatgtggatgccagtttctcaaatgtggacaaattatctcaatcctgagaacatgaaaggcttgtcagctttttctatgctccttgccatgcttggaaatgggcttatgcttccacgtgctctcttgattcgcgatttcatgtggttcactggttcagtgtgggctactcttttttatggatatgggaatattgcttgcctatactatttaaacattagcagcaaggaattcttcttatcagcaaccgttggtctgatttcgtttataggaacagctttctggagagacagcgttgtccatggttacagctcaccttcggcttctttacgtgacctggtttttgg

SEQ ID NO: 2700 - DNA, 744 bp, Glycine max
cccacgcgtccgcccacgcgtgcgaaaacagctagatagttttggcttattatatacccccataagccccataggccataccactctcaattctgttctcacatttcctatatatatttgccactctttctgtgagcttctcaacagaaagacacaatgggcaaagaaagtagtacttgtgttcttctatcccttctcattctttcactctttgtggctgaaatatatggaaatagacaagttcaagctcttaacaaactgcacaagtccaccaagttcagaggaaattcacaaattgataggagtgagtttgaggtagaggagcttgcttatgatggcattgttcactctcaagagggtctcaaagagaaagatagaattgagagtcttccaggacaaccccctgtgagtttttctcactatggagggtatgtcactgtggataaagtggctggtcgtgccttctattattactttgttgaagctcaacgttctaaacaaacactcccacttcttctttggctcaatggaggtcctggatgttcatctcttggctatggagcaatgcaagaacttggaccttttcgagtaaacagtgatggtaaaacactccacagaaatatattttcttggaacaaagttgcaaatgttttattcctggagtcacctgctggagtaggattttcctattcaaacaaatcaaaagattatgatacgaatggagataagaaaacagctgcagac

SEQ ID NO: 2701 - DNA, 953 bp, Glycine max
aacagataagggcgctctccgtaccatcttcctaatcctccttacatttgcagtgttcccatgtctcctacccactgaagtcgaacccctatttttcctctccctaatggcttctcaagttcttcttcaacaggcactgtttgcccccaagctaagtttcccttcttcttctcgtaacgtcgcgttaatttctagggttccttccaccccaatttcatggcgttgcactcccctcattgctaagcctagtttcgttgtgagagctgactccaacgtcgaaggcgctggtgaagccaccgaggatgttccttcgtataatgttgatgaagtttcggaaggcgaaggagaacaagtttcggattctgaagctccaaaatctcccagaaaaccccgagtcaagctcggagacgtcatggggatactgaatcagagggcaattgaggcatccgagaagcaaagaccaactccagacattaggactggggatattgtcgaaatcaaattggaggttcctgagaacaagcgtaggttgtccatttacaaagggattgtcatctcaaagcaaaatgctggtattcacacgactattcgaatccgaagaatcattgccggcactggggttgagatagtcttcccagtttactcaccaaacatcaaagaaatcaaagtggtaagtcaccgtaaggtcaggagggcaagattgtactatctgagagacaagcttccgagattctccactttcaagtgatactcggataccccacctttcctcacgttattcgtcgaactagtctgctgatccaggataagtgctgcggagctttaatttttttaatttcaatttgttctgttgtagaatacatcatttttcttcccctttgtgtatcttcccttaaatcgaaacaagtgtactgaaccttgatagtattgagaaatttgaagtgtttcttctg

SEQ ID NO: 2702 - DNA, 420 bp, Glycine max
gggaacggacagaaacagataagggcgttctctttaccagctaacatttccagtgttcccatgtctcctgcccactgaagtcgaacccctaatggcttctcaagttcttcttcaacaggcactgtttgcccccaagctaagtttcccttcttcttctcgtaacgtcgcgttaatttctagggttccttccaccccaatttcatggcgttgcactcctctcattgctaagcctagtttcgctgtgagagctgactccaacgtcgaaggcgctggtgaagccaccgaggatgttccttcgtataatgttgatgaagtttcggaaggcgaacgagaacaagtttcggattctgaagctccaaaatctcccaggaaaacccgagtcaaactctgatacgtcatggggatactgaatcacagggc

SEQ ID NO: 2703 - DNA, 476 bp, Glycine max
gttttgaaacggactcgggctggcaccagggctgctgttttggctgatgaaggacctatcatggaggatggagttgaggaggatgaggacaacgaggatgaagagtatgatgatgactatgagagtgagtacagtgaagatgaagaagatggccagaacacaaaaaataagaaacaagctgtcaatggcgccgtgaataaacatggcaaagctgcagaaagttcaggctctgatgaagaatgagaagttttttctaacatcacagaatcgtaattttcatctttttccttcttggatggtagaactatcaacttgtagcagtaatagtctaatattgtccattatgtttatcagttggacagcgttgatgcttggatttctgttcgtatcctagttcagctgatatcgtgattaaattgtcatatcatccgaaaatttttatggtaaaaatgagagtaaggatttaatttttattt

SEQ ID NO: 2704 - DNA, 422 bp, Glycine max
gcagcactgacatgaccacaacaaggctcgagttcataacataaagagtatagagcagcaaacgtaaaagtggatccaagaaggctacatggcaagcttccactatcttcacaagcatcagaggagaaagaggacacagtagaagagtttgatgcttataataattatgcatcttggtcttcagaaactgacatgtctgaaatggtttctgctcttgctcaagttatgggaactaccaatcggaacccatacatgccacaatcaacctcctttcctttctcaacttccgtggtcaaagatcaacctcaaccgtacccatctcaacctcctccagatcaagaggtggcaaagaagccacactacagaggagtgaggcagagaccatggggggaaatgggcagcagaaatccgtgacccaaaaa

SEQ ID NO: 2705 - DNA, 409 bp, Glycine max
aaaaaaactgattcatatttcactgtttggacactgcactgttgcaaaaccagtgaagaaaaagaaaaattcctggttttaattgtgtttggcactttggcttccatttagttgttgtagaaattttttaacactatttaactataaattgttacgaaatgttgttttctcatggaaatttactgtcatattgctttcatctttcaatttgttatctgggttgcaatcactgctaatttttattttacaggtatacttcaaggctacagatcctttcaatgagcgctggcaaagtgcttggatcatcactgcattctgggacattctagcatttgcattactctgtgttatatgctatctctgggccccatcccaaagctctcaaaggtatgcatattcggaggaagtg

SEQ ID NO: 2706 - DNA, 351 bp, Glycine max
gcatgtttgatattatggatttttacatctcttaacgagaacactcgagcagttacaggcaaaccgagttctgtcaagttggatatatataggaagttctcaaatgcattagcagtaacggtgatctcctcagttgcttggattggatatgcggtatacttcaaggctacagatcctttcaatgagcgctggcagagtgcttggatcatcactgcattctgggacattctagcatttgcatcactctgtgttatatgttatctctgggccccctccgaatacgcatacctttgagaggacatgggagaagattctgatgacgaagaagctcaatctctcaccaagggaaag

SEQ ID NO: 2707 - DNA, 2549 bp, Glycine max
  unsure (1)..(2549): unsure at all n locations
ggaatccttgttcgtgttttgtgttgctgttgaaaaaagtgaactgacaaaacttaaaccttgttgcggttgatgataaggccagactgaagccaacgaaactaatgaagccccacactccggcttcttctttcgtcactcgtctcccgcacgtgccttacttccgcggcgccactgccgcacgtgccgcgccatcggaccctcctcatgacgcccccggaggcctcgaattccgccgcgtctcgaccgccaaacgccgccgcgtcagcctttccgtctgccacgcgagtcgcgtcaccgccgcctcgaatcccggtggttccgacggcgacggcgatactcgagctcggagcagccggcgcggcgtgctgatggcgccgttcttagtcgccggcgcatcaatcctgctctcggcggcgacggcgagggcggaggagaaggcagcggaatctcctctggcttcggcgccgaagccggaggagccgccgaagaagaaggaggaggaggaagtgataacttcgaggatttacgacgcgacggtgataggagaaccgttggcgatagggaaagagaaagggaaagtgtgggagaagttgatgaatgctcgagtggtgtatttaggtgaagcagagcaagttccggttcgagacgatagggaattggagcttgagattgtgaagaatttgcataggcgctgtttggagaaggaaaaactattgtctctggcgcttgaagtttttcccgctaatcttcaggaaccgctcaatcagtatatggataagaagatagatggagacaccttgaagtcttacacgttgcattggccgcctcaaagatggcaggagtatgaacctattctgagctactgtcgcgaaaatggaattcatcttgttgcttgtggtacaccactgaagatcttaagaactgtccaagcagaaggaattcgtgggcttacaaaggatgaacgtaaactatatgcacctccagctggttcaggcttcatatctggctttacttctatctcacgcagatcttctgttgatagtactcaaaatctgtctattccttttggtccaagctcatacctttctgcacaggctcgagtagttgatgagtattctatgtcccagattatcttacaaaatgtgcttgatggaggggtcactggtatgttaatagttgtcactggtgcaagccatgttacatatggatctagaggaactggagtgccagcaagaatttcaggaaaaatacaaaagaaaaaccatgcagttatattacttgaccctgaaagacaattcattcgcagagaaggagaagttcctgttgctgattttttgtggtattctgctgccagaccctgtagtagaaattgctttgaccgtgctgagattgctcgggttatgaatgctgctgggcagaggagagatgccctcccacaggatcttcaaaagggaattgatcttggtttagtatcaccagaggtattgcagaacttctttgatctagagcagtatcctctgatttcagaactcactcaccgtttccagggattcagggaaagattgttggcagatcccaaattcttgcacagattagccatagaagaagctatatcaataacaactacattattggcccagtatgaaaagcggaaagaagactgtttccaagagattgactatgttattacggacaccgtcagaggatcagttgttgatttctttacagtgtggcttcctgcaccaactttgtcattcctttcatatgctgatgagatgaaagcacccgacaacattggttctctaatgggacttcttggctccatcccggacaatgcatttcaaaagaatccggcagggataaactggaatctcaatcataggattgcatcagttgtatttggtggtttaaaacttgctagtgtgggatttatttcaagcataggagctgtcgcttcatcaaattctctatatgcaattcgtaaagtccttaatccagcagttgtcactgaacaacggattatgaggtccccaatactcaaaactgcatttatatatgcatgctttcttggaatatctgcaaatctccgttatcagataattgctggggtagtggagcatcggctttctgaacagtttgcttctcaaacattctttgtaaatatgctttcttttgtagcacggacagtcaattcatattggggaacccagcaatggattgacctagcgcgctttactggcctacaagttagaaagacagagccatcagcatcagatcctccgaatcctgctgcaattttatgcaacgaaacagaagaagccagcattgatgagagagaaaaataaatgtggtgaaaatacgttgcatcatttttttttcttggtaattttgtactattcttgaaaagctggtaaaataggcacaaaggaataggttctggttttcatcacaatctggttttcttggtaattttatactattcttgtatacgtttttgatatttcccatttcatagttnggtgaatgtaatatttttatttttaaat

SEQ ID NO: 2708 - DNA, 650 bp, Glycine max
tttgtttttgcagcagaaatgggtgatcctgaggcacagtatgcattgggttgtcatctaagagttgtgaatgactatgtccagtctgatcaacaagctttttattatttggagaaagctgtggaccagttgcatccaggtgctctttacctcctgggtgctgtatatttgacaggcgactgtgtcaagaaagatattgcttctgcattgtggtgtttccacagagcatcggaaaagggccatgctggggctgctatagcatatggatctcttcttcttaaaggtgttgaggttccagaatcggtaataaagttcagtttgacgagaggtgctgcagctcatagacggggcaggaataagggagctcttgcaattgatccagtagagatggcaagagaaaagtttcagatagcggcaaaagcagggtgtgagcttggattcaaatggcttgcaaggttagaggaggaagagaaacgggcactcacgggggaacattgagatgaaattgagaagtgtagtgtgctttttgtttcgttcttttttttttcgtagcagaatccgatctgaatcatatgatttagcttgtctgaattgtggattttaatcatcggtgaaaaacaataaataaaggtgaggatttttgtcattgt

SEQ ID NO: 2709 - DNA, 867 bp, Glycine max
  unsure (1)..(867): unsure at all n locations
cgacccgccccgttgccatgcctagttttcccctcccctttcttctccccctcccctgcactagaaaggcatttgattaacccgtcaacccattcgaacccacccgttttggacatcttcttgaccgggtggaaaggactgcacaccgcgcatcccctttcttcacttcttcatgcttcgactcttctgcgccttacctccgccgtcgtctgagtcgcgccgccgtgacgccgattggcttcgccggatttctcctatgttcgcctgacgagacagagtgaatcctgaatcgcacttcgaacgtgttctcttcgacatcttcacttaagccttcgatttgtcagataagatgcttccgagggctttattggccaaattcattctcaaaccctccactgtttctccattccagttcaatcagcagagagcattgcatagtaggaacaagaaagccttggagttcattgcaaaaggctggaatgctttgaaggaggttgatagagtcatcgattattccgatcccaagcattcgggcattgtttctcttctcaggacagctaaggagaatttcgagcttgctttggaagctgataataccaatacccatgctaggtattggttgtccagattgcatatgaaataccctgttccaggagctaataaagctgtaggggcagcattattggtagaagcagcagaaatgggtgatcctgaggcacagtatgcattgggttgtcatctaagagttgaggtgagggtactctaacccttattttgggacatatagccaactttgcaaactgagtttatgattgtaataattcgttgatgcctccttgaatcactctntgcagatttaagattctg

SEQ ID NO: 2710 - DNA, 545 bp, Glycine max
ctacgccaccgctccaccctcgccacgtaaggacattcccgtctggaagcttatgtgaagtgaccagatggaagaatgaaaatgaggagtacgatggtgtggggttttgtgctgtctattggtgcaggaatcgtggttaactgagttttattaagctactgaagtgaactatgtggatatggcttctatgtgcatcagaaatagccaagtaaaattctgaagaactacttactaccttggtattcgggggttgttcccagcttcttccttctgttatcaattattttatttaactttattcgcaccttgctaaattcttaagcttaggctggtgaatttccttttgttcagttatagaaagagaaggaaaatatgatttgactcctgagaaacaggggttgtaccggatcaagaaaaatgttttgaaatcggatggttgttgtgtctaattgtctatagcagctgatattatttattagcataccatttctgctgttgagggtaggtgatgaatgatgaggattcttatttgaaaaaaaaaataa

SEQ ID NO: 2711 - DNA, 408 bp, Glycine max
gaaaatgagttgtacgatggtgcatgtgggggttttgtgctgcctatagatgcacgaacccccacatgcaccatcgtagttaaatgggttttaagctactgaagtgaactatgtggatatggcttcttgtgcattagaaatagccaagtaaaattctgaagaactacttactaccttggcattgagattgaggggttgttctgttcccagcttccttcttccttccgttatcaattattttattcaactctatcgcaccttgctaaaattcttaagcttaggctgttgaatttccttttgttcaattatagaaagagaaggaaaatatattgatttgactcctgagaaacaggggttgtaccggatcaagaaaaatgttttggaatcggatggttgtttgttgtgcct

SEQ ID NO: 2712 - DNA, 833 bp, Glycine max
cacaagacagcatccactgtctctctctctctctctctttgtttcagtgtttgacaaatcacaaacgcaagggcgatctgagtggatgagatgagcacttcggagctgattcgccatcgccttccaacaaaacttcaaattagtataaataaaactttatttccttccccttttatttttcgtttcactttttctatcctcttttttttttttcttttgagattttcaattttcgagattacgttctatttttgtcttgctacggattctccaatatttcagaagctagatctaattgatatgctgtttggttgctcaggaattcgtgatcaggtatatcactgttaaaaaaaatacatatgcttttgcctctctttttgtttcgtctttggatttattaggctttgattattcttatgtgaattaacttcataagaacaattttgtccataaaagaagaaagttgttacagctaacaagttcagtggagaacccaaaagcgtgtatttatgggttagcgtttgcgaatttgattttgggtgaagaattggttttgcttaaatatcgatttttattgaagtttttggtttgaaaatttgtttcttaaatgtaagtttgtaatcagacttatatgaaattttcagcccaatgcaaagagtttttttaagttgaacaatttttggtaaagtacatttctctttagcaaacgggaatttttgagctatgcaatcatagatcaaatatgttagatgtttgattttgttcttgctatgttggattgctcttgctgtgctggattgcaggtatttcatcttcagatgccgaacattgaa

SEQ ID NO: 2713 - DNA, 384 bp, Glycine max
gcatttgcaaacacacaaccctctcctctcctaatccataaaaactatctttcatttggcctcgagtagaagagaaagatgagtgtagaaattttggatggtgccaccattgtcaacttccttcaggatgaagaagcattcagtgcctcagttcttaaccggttcgcctaccttgacacagacaatgatggccttctctcgtatgcggagatgttgaaggagctccaaagcttgagggtgttggaaacgcactttggtattgatgtggagccagacccagatgagcttgctcgtgtttatgaatccttgttcgtacaattcgatcacaacttgaatggcaccattgatctcgacgaattcaagaaggaaacgaagcagatgatg

SEQ ID NO: 2714 - DNA, 882 bp, Glycine max
accacgcgtccagccaggcgttcgtaaaggcgccaaagggacaccgaggggtgagttgagaggatcgtgagaggggcagtagccgagattccgtgagttgcaaaaatgaagacgattctttccaccgagaccatgaacatcccggacggcgtgagcatcaaagttcatgccaaggtcatcgaagttgagggcccccgcggaaaattggtgcgagacttcaagcatttgaatctcgattttcagctcattactgacgaaaacggtaaaagaaagctgaaaatcgacgcgtggtttggttctcggaaaacatccgccgccattcgcaccgccttgagccacgtggagaatcttatcaccggcgtcaccaagggctaccgctacaaaatgaggttcgtttatgcccattttcccatcaacgcaagcatcggcaacagcaacaagtctattgagatccgaaatttccttggcgagaagaaggtgaggaaagtggacatgcttgagggcgtgtccgttgttcgatctgaaaaggtcaaagatgaattggtcttggatggaaacgacattgaacttgtttctaggtcatgtgctctcattaaccagaaatgtcatgttaagaacaaggatatccggaagtttcttgatggtatttatgtcagcgagaagggaacaatattggaagagtagaggatgaaaacatttgtattggtttttggtttggagacccttttttggtaacttgtcaaacttttccttttgggattattttttgttaattttttatttctatatatgctttggtattgaatattctctggaattagtaatctttcatgcatttctaaaaaaaaaaaaaaagggcggccgctcgcgatctagaactag

SEQ ID NO: 2715 - DNA, 723 bp, Glycine max
actcgagccggatccggcagcagttgagaggaggcactgtggcagaagtcctaggagtgtaaaacagagacgcaaaatgaagacgatcttgtcgtctgagaccatgaatattcccgacggcgtgagcatcaaggttcacgctaaggttatcgaggttgagggccctcgtggaaaactcgtgcgagacttccaccatctgaacttggacttccaacttattaccgacgatggcggtaaaaggaagctcaagattgattcttggtttggttctcgtaaaacctccgccgccatccgcaccgccctcagccacgttgagaatttgatcaccggcgtcaccaagggataccgatacaaaatgagattcgtgtacgcacattttccgatcaacgctagcattggcaacaacagcaagtccatcgagatcagaaatttcctcggcgagaagaaggtgaggaaagtggacatgcttgagggcgtgtcggttgttagatctgaaaaggtcaaagatgaattggtcttggatggaaacgacattgaacttgtttctaggtcatgtgctctcattaaccagaaatgtcatgttaagaataaggatatccggaagtttcttgatggtatttatgtcagcgagaagggaacaatattggaagagtagaggatgaaaacatttgtgttggtttttggtttggagaccctttttgttaacttgttgagatatgattt

SEQ ID NO: 2716 - DNA, 812 bp, Glycine max
atcgtgagatgtacggtagcagacattccgctagttgccaggatgagaacacttgtttctgcagagaccatgaacatccccgacggcgtgagcgtcaaggttaatgccaaggtcatcgaaattgaggaccctcgaggaaaattggtgcgagacttgaagcacttgaatctcgatattcagctcatcactgacgaaaacggttaacggaagctgaaggtggaggcctggctcggttctgggaaaacattcgccggcattcgcaccgcactgtaccacgtggagaatctgatcaccggcgttaccaatggctaccgctacaaaatgaggttcgtttatgcccattttcccatcaacgcaagcatcggcaacgacaacaagtctattgagatcagaaatttccttggcgaaaagaaggtgagaaaagtggaccttcttaacggtgtttccgttgttcgatctgaaaaagttaaagatgaattgattttggatgggaacgacattgaacttgtttctaggtcctgtgctctcattaaccagaaatgccatgttaaaaagaaggatatcaggaaatttctcgatggcatttatgttagtgagaagggaacaatactggaagagtagatgttgaaaacaacaagcaccttgattgtttagtttggggtccttttttgttaactcgttcagattggattttacaattttgtgttgtcaaacttttccttttgggaatatttttttttagaaatcgttacttctatatgctttggtgttgactattctctggaattagtaatctatcttgcatttctgtc

SEQ ID NO: 2717 - DNA, 557 bp, Glycine max
cggctcgagcggctcgaggcgagaaagacgacagaaggggtgtacgctcattttcctatcaacgctagcattggcaacaacagcaagtccatcgagatcagaaatttcctcggcgagaagaaggtgaggaaagtggacatgcttgagggcgtgtcggttgttagatctgaaaaggtcaaagatgaattggtcttggatggaaacgacattgaacttgtttctaggtcatgtgctctcattaaccagaaatgtcatgttaagaacaaggatatccggaagtttcttgatggtatttatgtaagcgacaagggaacaatattggaagagtagaggatgaaaacatttgtgttggtttttggtttggagaccctttttgttaacttgttgagatatgattttacaatttgtgttgtcaaacttttccttttgggatttttttttaaaaaaatttatttctatatatgctttggtgttgaatattctctggaattagtaatctttcatgcatttctatatatgctttggtgtgcaatatatgatgcattgttgccccttct

SEQ ID NO: 2718 - DNA, 913 bp, Glycine max
ctccctctgtctctgatgcggtggggagtggggacagggagggtttgtcatttctcaagcattcaacccttccttttctccttgcctctgtcctgacccgttcttttcttctccatgcattcccagaaagttgtagagatggaagacaagacagaaagtcatatgagttcagctgcggcctttgttgaaggggggattcaagaatcctgtgatgatgcttgcagcatatgccttgaggagtttggtgcaagtgatccttcgacggtcactacctgcaagcatgagtttcatctgcagtgcattctcgaatggtgtcagagaagctcccagtgtcctatgtgttggcaacctattagcttgaaggatcctactagtcaagaattgtttgaggcagtagagcaggagagaagcttgagggctaccccatcaagaaatgctgctatttttcatcacccagcctttggtgattttgaattgcagcatttacgcatgagtgtaaatgatgctgattttgaagagagaattattcaacatttagctgctgctgcagcaatgaggagagctaaccaacttggttggagggaagggcagcgagctcgttcatcagctcatggtcatccacaattcttagtgttctctaatcagcctattgcaccttcatcagttgctggaggagaaaatgacccaactgcaattcctaatagaagtccatctaccccaataacatccgttggaaatgaagcatcgcagcagatcctgcaccttcaaactcaaagttcttcttcagcttctggatctcctgtcatggctacaaatcctcgaggaatttactctaatgaaagaggctctactgcttgttcttcaccagcaaaccaagatagagcagagccatcagagttgcagtcattttctg

SEQ ID NO: 2719 - DNA, 1044 bp, Glycine max
gctcatggccgtccacacttcttagtatactcaactcagcctagtgcaccaccatcagctgcaggagggggaagtgaaccagctgcaattcctgtaggaagtccatctaccccacttacatttgacggaaatgagcaatcatcactacagcagatcccccatgttcaaactcagagttcttctttaacttctgcctctactgtctcaacaacaaatcttcaaggagttcactctaatgatagaaggtttgcctctcattcttttcctgcaagccaagacagagcacagccatcagaacaatcattctctgattctctgcgctccagatttaatgcagtatccacgagatacaaagattcaatttcgaagggcacaaggggatggaaggagaggctcttctctcccaattcttctatgtcagaacttggttcagaagttaggagagaattgaatgctaaaattgctagcgtgtcccgattgatggagcgccttgaaacaagagaaaataatagtgctgcaggaacttctttatcaaatcaaatcatttggtgaaccgttccattgcagagacaagcaaccaaagcaatgtggaagctcgtggagagaactctttgcgtgacaatagtactccaactacattttctgctagctcagattcaaaatgagttccagtttgcttctgtgaatgcatctttgctcagcatatcatgcttgaaggctaactgtttgctcaggcatgacatgatgaggaatatatgctcgaggcagttgttggattccaataaataaaaaaaagaatctgagacacctgtgtcctagagctaaaaactttttcttttgtgtatatattatataagccgagaaccgtagggagtatttaaggagtaatccaagggagaaagtgttgtgaaattccatcagacttgtgtccataatctgtccctgtgatttactttttggagtcaatggaaatatagatcaaggtggcaactgtagttcttggtgtttctgctaaaactatcattacgctaaaactttgttttg

SEQ ID NO: 2720 - DNA, 466 bp, Glycine max
gacacaaaaataagtgcgtccaacggaatataaagcatgagaaaaatgccctcccctctggtgtctctgatgcggttgggagtggggacagggagggtttgtcattaggtaaaggtaaagcagcacaagtgtcattcatttctctgcaatggatatggatctctagcattcgcattcatcccctccttttctccatgcctccgtcttcacccgttattttcttgtcctgaatgcattcccagaatgttgtagagatggaaggcaagacagaaattcgtatgacatcagctgctgcctttgttgaaggggggattcaagaatcctgtgatgatgcttgcagcatatgccttgaggagttttgtgcaagtgatccttcgacggtcactacctgcaagcatgagtttcacctgcagtgcattctcaaatggtgacagagaagctcccagtgttctatttgctggcaacc

SEQ ID NO: 2721 - DNA, 680 bp, Glycine max
gatctctcaattcaattggatcttttgcattctagctctctggtgtctgatttcagggttgatcttctcttcactgggttcaagaagcttgtgatgatgcttgcagcatatgccttgaggatttttgcaaaagtgatcctgccactgtcactaattgcaagcatgagttccacctgcagtgcattcttgaatggtgtcagagaagctcccaatgtcctatgtgttggcaacctatcagcttgagggatactacaagtcaagaactgcttgaggcagtagagctggaaaggagcttgaaggataccccatctagaaatgctgcgatttttcatcacccagcccttggtgattttgaattgcagcatttgcccatggatgcaaatgatgctgactttgaagagagaattattcaacatttagctgctgctgcaacgatgaggagagtgaaccagcttggtcggagggaagggcagcaaactcgttcatcacctcatgttcatccacacttcttagtggtctctaatcagcctattgcgccttcatcaggtcttgatccagtttccagaggggaaaatgacccaacagcaattcctaattaaagtccatctgccccaataacatctgatggaaatgaagcatcgcagcaatcctgcaccttcaaactcaaagctcttcttcag

SEQ ID NO: 2722 - DNA, 381 bp, Glycine max
atcgctcaattcaattgggatctcttgcattctctctctctggtgtctggattcaggtcttgatcttctctccactggggttccctccgtttcttgagcccctttttttcttttccgggcctttgccaattctcaatggaggttccagaaatggaaggcaagactgaaagtcatatgacatcagcagcagcctttgtggaagggggggttcaagaagcttgtgatgatgcttgcagcatatgccttgaggatttttgcaaaagtgatcctgccactgtcactaattgcaagcatgagttccacctgcagtgcattcttgaatggtgtcagagaagctcccagtgtcctatgtgttggcaacctatcagcttgagggatgct

SEQ ID NO: 2723 - DNA, 1702 bp, Glycine max
cggctcgaggttgtaagtatgttttgggtcgaatgatacgtgaagttgcattttgtattttctctaatttgtcctaatattacaggttgcaatcaagaaaatgaaaaagaaatattactcttgggaggagtgtgtaaacctgagagaagtcaagtcattacggaaaatgaatcacccaaatattgtgaagctgaaggaagttatacgagaatgtgacactctgtgccttgtttttgagtacatggaatacaacctgtaccaacttatgaaagacagggaaaaactgttttctgaagctgaagttagaaattggtgttttcaagttttccaaggtcttgcttacatgcaccagcgtggatacttccatcgtgacctgaagcctgaaaacttgctggttaccaaggatttcatcaaaatcgctgattttggcctagcccgagagatcagttcacaaccaccctacactgagtatgtctccacacgatggtatcgtgctcctgaagtgctgcttcagtcttatctgtatacctctaaagttgatatgtgggcaatgggtgctataatggctgagcttttctctcttcgtcctcttttcccaggtgccagtgaagcggatgagatttacaaaatatgtggtgtgataggcaatccaacctttgaatcatgggcggatggactcaaacttgcaagggatattaactaccagtttccacagcttgccggtgtgcatctttctgctttgattccgtctgctagtgatgatgcaatcagccttattacatcactttgctcctgggatccctgcaagaggccaacagcttcagaggctcttcaacatcctttcttccagagttgcttttacattcctccatcccttcgcaacagagcagtagccagaactcctccacctgctggaaccaggggatcactggatcggctgggcctcaagagatactctggtgctttgcctaatacaaaaatcaccaacaattttacttccccaaaagtacaagcttctatagcttcaggtgtgcaaaggaagctggatatggcaaatgaggatggaattaagagcaagaaatcattgaagactactcaacaatcaaaatatcgattaccaggaaaaggcagcccaacttctataaacaaggggaggactgcacgtggggtttcagaaacagctgagaagttggtcaatatgtcaatcggtactcgaagactgtccttgggacaaacccgtccgcctcccatgaaggctggagtcaattggatttctgaatctggaaacttgctcaggtccggacaacaaattccaactgaaagaactttgacaagaaaagttgccggtgtgctaatacgaagcttctaatgatgaatgatatatgggtttgcacctgccctgatgagtttggtgatgatttttgtttctattacgggtttgatatatttttgtggaacatacgtcagttttacatttggctacacagttgtgcggatgcgtttgtctcgtatatagtagtttcattaatgtggagtgctcagcaggttgtaatgacataaagggaaaaatgacatgtttttaattctaactttgccacccttgcagactaaaatgactaaagtactccctactactattgtttaatgtattctaaatatggaatagtatttattaatgtaaatagtatttttttcagttttt

SEQ ID NO: 2724 - DNA, 701 bp, Glycine max
agtctcgagttttttttttttttttttaaaacaaaacttaatagtctcgtttgttcataagtaatggccttttcaaccaaaaagggacaaaaaactcaaaacaaaaaactactgaaaccaacaatcaaacaggtagacaaactaataacctcccttgaggtcattgacaacatcatatgggatgggggtaactgtctcaagggtcgcaccctccaccatgaaaccgggtttgggaccctgaggctgtctcttggtgctgatcttctcacccttgaccttggcttcggcctttagctgatcattcttaatcttcctgaggcggaactcctcagtgcaccttgaaggcataacatgctctacccgcacatgaatcctcttccttataattctgttgccgacctgcttgttgacttcgaccccaacagcacgtttggtgacattccagacgcgaccggtgcggccatggtagaacttgtggggcattcccttgtgaacggcgccgttaaccttgacgtcgacataatcgccgacgtggtaggttctgaggtatgtggtgagggcgatggtacccttcttcctgaagggacgagagaaggaatctctggtgcgggatctcaaaccgtgaccagccggcatttttgctagggtttctctctctcgctgctcggctttagttagtgtagaaggatcactctccccgt

SEQ ID NO: 2725 - DNA, 620 bp, Glycine max
  unsure (1)..(620): unsure at all n locations
tcgcaaaaacgcattaattaagtgcctgttgggaattgggtgagccaaagagagagaaagagaagaagaagaagaagaagaagaagctctggattccacctcttcccgtccttcgagacggttgttgtgctgcttgctcttcagacaaatctgacatggatttactaagatttgtccatgttcttgcgttctaggttgacctgggattgaatctaaagaatcttgatttacattttgagatatggagggagtttgtttctggacaaattgctaccagtatcggttttttgcattccaagaagtgcttgattggcgagttttcatccttggagattttcttcgggtttcctttgttaattgcacttagggttctgctccgctttaatgatcagcacagggtacgtgatgctacattcttctgatacaggtgctgcatcttaagtgcacttgtacaatgtaagcgcttattcttattctttgcaaaactccgatccaaaaagaagtttcttgataagtgttcctttggcagtgcattgctgacccaacattcagttaaaacttttggtanatcttcttcttggggctgaagcatatagatttgtgacttgatattggattct

SEQ ID NO: 2726 - DNA, 1002 bp, Glycine max
atcaaggctgattgcatcatcactagcagacggaattaaagcagaaagatgcacaccggcaagctgtggaaactggtagtgatgatgcaatcagccttattacatcactttgctcctgggatccctgcaagaggcaacggcttcagaggcacttcaacatcctttcttccagagttgcttttacattcctccatcccttcgcaacagcgccgcagcgagattcccctccacccgctggaacaagaggagcactggatcagcacggactcaagagctcttccggtgctttacctacttcaaaggctcttcaataatttttctttccatgaaatgacatcctcctttagcttcaggtgtgcaacggaagctggatatggtaaatcaggatggatttaagaacgaaaaaccaatgaggactactaaaccaaattttcgtcagccaggaaaggacagcccaacttctatgaccaaagggaggtctgtacgtggggtttcagaaccagctgaaaagttgggcaatttgcctgtttccagtcgaagacaatcatcaatggggcaacctcgtcctcctccaccaatgaaggctggaggcaattggatttctgaatctggaaacttcatccttgggcccgcacagcagattccgactggaagaacttttgcaagaaaagttgcctgatgacaagtatgaatgagtaaaatactccaggttcatcttgctctatccattctgtctccaaatcactggcattgctcattgaacgctcgtctctagaagggggggttgtccttgatgcttccacggatgaagctgcatggaaattttggccaccaccaccttgatccatagcttcagaagggttattccctgagggtttatagtgattcctgggtgtccagtcctttaaagacattgagtgcatggggctatcatgtccagatgtcattcttgagtaacaagaatctctttgctgttcaaaggcaataaataatgtacattga

SEQ ID NO: 2727 - DNA, 556 bp, Glycine max
aaaacgcataaattaggtgcgtggggggttttctaatctcttgggtgtcttgaaagaggaaaagaaaaaaaagaaaggtatcgtataggaagaagaagaagctctggattccacctcttcccgtccttcgagacggttgttaggctgcttgctcttcaggttggcctgggtttcaatctaaaggatcttgatttacattttgagacatggagggtgtttgtttctggacaaattgctaccagtatcggttttttgcattccaagaagtgcttgattggcgagttttcatccttggagattttcttcgggtttcctttgttaattgtacttagggttctgctcccctttaaagatcagcacagggtacgtgatgctacattcttctgatacaggtgctgcatcttaagtgcacttgtacaagtaagcgcttattcttattcttctttgcaaaacaccaatccaaaaagaagtttcttgataagtgttcctttggcagtgcattgctgacccaacattcagttaaaactattggtaaatcctcttcttggttaagata

SEQ ID NO: 2728 - DNA, 731 bp, Glycine max
  unsure (1)..(731): unsure at all n locations
nnnnnnnnnnnnnnnnnnnnnnnngagtaaaagcacatttatgacgagcgaaacaaaaacatatccatgtatttagaacatcaaataaaacaacaaaaatattttaatagtctgaattgtttctcttccaacacaaaaaaggactaataatccccaaacaaaaaaactacgcagaccaacaacgagaatgaaactaataacctcccttgaggtcattgacgacatcatagggaataggggtaactgtctccaacgttgccccctcgaccatgaaacctggtttgggaccctgaggctgtctcttggtgctgatcttctcacccttggccttggcctcagccttgagctgatcattcttgatcttcctaaggcggaactcctcagtgcaccttgatggcataacatgctccacacgcacgtgaatcctcttccttatgattctgttgccgacctgcttgttgacttcgaccccaacagcacgtttggtgacattccagacgcgaccggtgcggccatggtagaacctgtgtggcattcccttgtggacggcgccgttacccttgacgtcgacataatcgccgacgtggtaggttctgaggtatgtggtgagggcgatggtacccttcttcctgaagggacgagagaaggaatctctggtgcgggatctcaaaccgtgaccagccggcatttttgctagggtttctctctctcgctgctcggctttagctcgt

SEQ ID NO: 2729 - DNA, 1646 bp, Glycine max
gtaacgcataaattaggtgcgtgttgtgaattgtgtgagccaaagagagacaaagaggtgtcgtagaggaagaagaagaagctctggattccacctcttcccgtccttcgagacggttgttgggctgcttcctcttcaggttggcctgggtttcaatctaaaggatcttgatttacattttgagacatggagggtgtttgtttctggacaaattgctaccagtatcggttttttgcattccaagaagtgcttgattggcgagttttcatccttggagattttcttcgggtttcctttgttaattgtacttagtgttctgctcccctttaaagatcagcacagggtacgtgatgctacattcttctgatacaggtgctgcatcttaagtgcacttgtacaatgcattgctgacccaacattcagttaaaactattgggctgaagcatatagatttgtgactgaatattggattctgcctgcatctttgagtgaagcatttgcactgaatcagtgtggactgtagttattgaaatttttctccgtgttgctctcaatgggtattgttgctgacaatacatcagttaccggatgtttctgaaataaatcctacatagattagatgaagtagaccttactatagttctgaagtcttgggtcaaggtgattttagctagagagtgatgctatcgctttgatcagccattttagtgggacctgagaagtgtcagtatgatctctggttcttgctcatttctaccacctttgtcctgcaactattttaaagccgtgggtctattaatgaataaggctgagcagcccatccatctgaaagtttctgcttccatgccttcttttgctatgacagaaaattgatggtggattttgctggaccagcaggaacctgttaatattttatacgcctctgagcatcatctacatgagataaatgccatttatccttagtgtttttgttttcatttgttgaataaaggaagtgctgctttgtgttccacgggaacaatggagaggtacaagttaattaaggaagttggtgatgggacttttgggagtgtctggagagctattaataagcaaactggtgaagttgttgctatcaagaaaatgaagaagaaatattactcttgggaggagtgtgtaaacctgagagaagtcaagtcattacggaaaatgaatcatgcaaatattgtgaagctgaaggaagttatacgagaatgtgacactctgtgccttgtttttgagtacatggaatacaacctgtatcaacttgtgaaaaacagggaaaaactgttttctgaaggtgaagttagaaattggtgttttcaagttttccaaggccttgcgtacatgcaccagcgtggatacttccatcgcgacctgaagcctgaaaacttgctggttaccaaggattttatcaaaatcgctgattttggcctagcccgagagatcagttcacaaccaccctacactgagtatcgtgctcctgaggtgctgcttcagtcttatctgtatacctctaaagtgacatgtgggcaatgggtgctataatggctgagcttttctctcttcgtgcttttttcccaggtgccaatgaaagctgatgagatttacaaaatatgtggtgtgat

SEQ ID NO: 2730 - DNA, 481 bp, Glycine max
gctttaattttgtgcgtgttgtgaattgtgtgagccaaagagagagaaagagaagaacggctcgaggaggaagaagaagaagctctggattccaccgtcttcccgtccttcgagacggttgttagtgctgcttgctcttcaggttgaccatgggattgaatctaaagaatcttgatttacattttgagatatggagggagtttgtttctggacaaattgctaccagtatcggttttttgcattccaagaagtgcttgattggcgagttttcatccttggagattttcttcgggtttcctttgttaattgcacttagggttctgctccgctttaatgatcagcacagggtacgtgatgctacattcttctgatacaggtgctgcatcttaagtgcacttgtacaagtaagcgcttattcttattctttgcaaaactccgatccaaaaagaagtttcttgataagtgttcctttggcagtgca

SEQ ID NO: 2731 - DNA, 605 bp, Glycine max
gagctcgagccgctcctttagcttcaggtgtgtaacggaagctggatatggtaaatcaggatggaattaagaacgaaaaaccaatgaggactcctaaaccaaaatatcgtcagccaggaaaggacagcccaacttctatgaacaaagggaggtctgtacgtggggtttcagaaacagctgaaaagttgggcaatttgtctgtttccagtcgaagacaatcaatggggcaacctcgtcctcctccaccaatgaaggctggaggcaattggatttctgaatctggaaacttcatccttgggcccgcacagcagattccgactggaagaacttttgcaagaaaagttgcctgatgacaagtatgaatgagtaaaatgtgagtgatgatgattctataatgctcaatgatgtgattgtgaatgtatcctaatatcaaataaaaataaaaataaatgtatggttagacattctgatgactttgtcgatgtctaaactacaaaactagtactgcccgtgtgttattacttgttggtaatcgtttcgtacttttgggacatacagagctaagttgatgctttttactattactataaataaatgctatttgt

SEQ ID NO: 2732 - DNA, 565 bp, Glycine max
gaggtctgtacgtggggtttcagagacagctgaaaagttgcgcaatttgtcagttaccaatcgaagtcaatcatcaataggaatagggcaaccccgtcctcctccaccaatgaaggctggagggaattggatttctgaatctggaaacttcatccttgggcccgcacagcagatttcgactggaagaactttcgcaagaaaagttgccggatgagtaaatgtgggagatgattctataatgctcaatgttgtgaatgtgtgtcctaatataaaatataaatgtgtggttagacatatattctgatgactttgccgaagtcgtctaaactacaaaactagttgtactgcctgtgtgtgttattacttgttggtaatcgtttcgtacttgtgggacatacagagctcagttgatgctttttactataaatataaataaaggtttcccccctatttgtatcatttggaatattctacagctgtgagcctgtgacttggtacacacattgggtaggggtgttcataaatcttgtctatgttctctctataagattataataattttgtt

SEQ ID NO: 2733 - DNA, 751 bp, Glycine max
ctttttactcgttgaatatctggtgccagacattaagaaaaattcacgatctcactcaatagagtagcttctttttggttttactgtgctggactgatatgtacttcacgcatcaattatttcttttctctaattttgttgtgatgatatttctgtttcttatgaaggatggaattaagagcaagaaatcattgaagactactcaacaatcaaaatatcgattaccaggaaaaggcagcccaacttctataaacaaggggaggactgcacgtggggtttcagaaacagctgagaagttggctaatatgtcgattggtactcgaagacaatccttaggacaaacccgtccgcctcccatgaaggctggagtcaattggatttctgaatctggaaatttcatgctcaggtccggacaacaaattccatctgaaagaagtttgacaagaaaagttgccgggtgagatgatgagaagtatttgctgactttggagattctttgatgatcaatatttttaagtcttctaatgatgatattgggtttgcacctctgcccctgatgcgtttggtgatgatttttgtttctattacgggtttgatatgttttttttggggagatactgtcagttttacatttggctaaagttgtgcggatgcgtctgtctcataagaaggttttcatttatgtggagtgctcaccaggttgtaatgacccaataaaggggaaatgtcatgtttttaattcgaactttgc

SEQ ID NO: 2734 - DNA, 387 bp, Glycine max
actcctcagtgcaccttgaaggcataacatgctctacccgcacatgaatcctcttccttataattctgttgccaacttgcttgttgacttcgacgccaacagcacgtttggtgacattccagacgcgtccggtgcggccatggtagaatttgtggggcattcccttgtgaacggcaccgttaaccttgacgtcaacatagtcgccgacgtggtaggttctcaggtatgtggtgagggcgatggttcccttcttcctgaaaggacgagagaaggaatctctggtgcgggatctcaaaccatgaccagccggcatcttttcttcttacctagggtttctctgactccccctctccctctttagggtagatagaggatcacctcgagccg

SEQ ID NO: 2735 - DNA, 1356 bp, Glycine max
gacatcaaaccaacattcagttcataatttcttccaacaaattatatttttcttacaaaaaaaatggcaggtgaggtggtgaagaaggaagactctctcaacctgaaagtcactaacaagagtcatgttcaacctgaggagaaaattggaaggaaagagtaccagctggtcacttttgatcttccctacttggccttttactacaaccagaagctcttgttttacaagggtgaagatttcgagggcatggtccaaaaactcaaagttggacttggtgtggtgctgaaggagtttcaccaacttgctggtaagttagggaaagatgaagagggggtgttcagagtgaaattggacctctcgcttcctgagcccaacggcccaccaacttccaacggtgaggcaaagcccgcgccagcacttagggaaaagatcttcaaattctccgagtcagccatcgacaagatcaagtcaacggtcaacgagaaccctccatccgatggctcaaaaccattctcaacatttcaggctctttcctcccacgtttggcgccatgtaagccatgcacgtaacttgaagccagaggactacacggtgttcaccgtcttcgccgattgtcggaagcgggtggacccaccaatgccggagaattatttcggaaacctaattcaagctatttttaccgttacagcggttgggctattagccgcccatccgccacaatttggggcttcattgcatgcagaaagccattgaagcccacaatgctaaggctattgatgaacgtaacaaggagtgggagagtacacccaaaatttttcaattcaaagatgctggggtgaattgtgtggctgtgggaagctccccaaggtttaaggtttatgacattgattttgggtgggggaagccagagaatgtgaggagtgggactaataacaagtttgatgggatgatttatttgtacccggggaagagtggaggaaggagcattgatgtggaactaaccttggagcctgaggctatggggaggttggagcaagacaaggattttcttttggaagcatgaaattgctagggtaagtgcaataaaattaaaaaaaaaaagtggctagaaaagtacgtggagcaaatttggaagtagtactgctcagattgttgaaggggtcgacttcaatgtccaattatgaattctgatgtgattcatgcatgcaatttaatttaaagttgtgctgttttaggattttatatattttgtggttctacgcttgattgattttgaacctactaatgtctgttccatatgtatggtcaatgattgtagttcatgacaagtgaaaggaattattgtgagttttaatt

SEQ ID NO: 2736 - DNA, 805 bp, Glycine max
gatcaaaccaacattcagttcataatttcttccaacaaattatatttttcttacaaaaaaaatggcaggtgaggtggtgaagaaggaagagtctctcaacctgaaagtcactaacaagagccatgttcaatcagaggagaaaattggaagaaaagagtaccaattggtcacttttgatcttccctacttggccttttactacaaccagaagctcttgttttacaagggtgaagatttcgagggcatggtccaaaaactcaaagttggacttggagtggtgctgaaggagttccaccaacttgctggcaagttagggaaagatgaagagggggtgttcagagtggagtatgatgatgacatgcttggtgtggaggttgttgaagctgttgtagctgatgatgaaattggtgtggatgatctaactgtggctgaaattagtaacactaatttgaaggagctgataccttatagtggtatcttgaatttggaaggcatgcataggcccttgctggctgttcagttaacgaagctcaaagatgggctcgcaatgggcctagcgttcaaccatgctgtcttggacgggactgccacgtggcagttcatgacctcatgggccgagatctgcagcggttcaccttccacgtcagcaccacccttcctggaccggaccaaggcccggaacacacgcgtgaagctggacctttcgctaccagagcccaacggcccaccaacttccaacggtgaagcaaagcccgcgccagcacttagggaaaaaatcttcaaattctccgagtcagccatcgac

SEQ ID NO: 2737 - DNA, 642 bp, Glycine max
  unsure (1)..(642): unsure at all n locations
gcacgaggaaaggctcatgaggttctgtgattggctccaagacaataatgacaatttttctggtttgttttgcccaacacgagatgttttgttattatgaactatgtagttcaggaggcaaccccctgatgtcccatcaaattgtctttgccagtgtagttgtctaaagtgacatataccatgtaaaactgtaggtcagagatcctagagaagtgaactagatgttgggaggaatttagacatgtttctggcttccttgttgaagagaatttctgaggttctggagctgcaatttgcgtggctctagcattcttggttttctcttaagattattctttttcccttcaaaatagatgtacgacagttttgactatgagctaaatgaaatcaattcattattgtttcgtttaaaaaaaaaaaaaaaaaaannnnnnnnnnnnnnnaaaaaaaaaaaaaaaaaccggccccagtgacattgattttgggtgggggaagccagaaaatgtgaggagtggaactaataacaagtttgatgggatgatttatttgtacccggggaagagtggagggaggagcattgatgtggaactaacattggagcctgaggctatggagaggttggagcaagacaaggattttctt

SEQ ID NO: 2738 - DNA, 476 bp, Glycine max
ttgtgttttggtttgattccaaatagggtgatgtgcatgtgattgagtacagtacccaggttgggaattagtgcctttggtgatcatcatgttccttcttagaaggcaaacccagaataaccaggagaatgattcctcatatcaagatacaaaggtggctgaactcaagacaggtcttgggcccctctctggtcgtcgattaaagtattgcacagatgcatgtctaaggagatatttagaagcaagaaactggaatgttgataaagccaagaaaatgctggaggaaacactcgagtggagggcaacttataggccagaggaaatccgttgggctgaaatagcacatgagggtgagacaggcaaagtctccagagctaacttccatgatcgacatgggagggctgtgcttattatgaagccaaggatgcaggtttgaactagaatgtactttcaataaggcttctctgtacatgact

SEQ ID NO: 2739 - DNA, 400 bp, Glycine max
tcgcgtgagtgagtgtgcgtgaatcgtgatttagtagtgaaaaacgcacactcacacaaacgtcctcttccatattctctcttctctcttctcaaaaatctcatgccataagtttggtactactaaccttttagctgcttttgcttacaagctcctacattctctctccaggttgggaattagtgcctttggtgatcatcatgttccttcttagaaggcaaacccagaataaccaggagaatgattcctcatatcaagatacaaaggtggctgaactcaagacaggtcttgggcccctctctggtcgtcgattaaagtattgcacagatgcatgtctaaggagatatttagaagcaagaaactggaatgttgataaagctaagaaaatgctggaggaaac

SEQ ID NO: 2740 - DNA, 475 bp, Glycine max
ggagtggagggcaacttataggccagaggaaatccgttgggctgaaatagcacatgagggtgagacaggcaaagtctccagagctaactttcatgatcgacatgggagggctgtgcttattatgaggccagggatgcagaatacaacatcggctgaagataatatcaggcatttagtctatctgttggaaaatgctatcctgaatctttctgaaggtcaagaacaaatgtcatggttgatagacttcacaggattatcacttagtacaaatatgtctgttaaaacatctcgtgatattattcacattttacaaaaccactatccagaaaggcttgctattgcttttatgtacaatccaccaagaatattccaggctttctggaaggccatcagattcttcctggatcccaagacagtccagaaggtgaagtttgtttatcctaacaataaggacagtgtggagctgataaaatca

SEQ ID NO: 2741 - DNA, 373 bp, Glycine max
cgaatcgtgatttagtagtgaaacgcacacactcgcacgtccacttccatattctcaattctctcttctccaaaaatctcataccataagtttctactacttacctttagtagctgctttggcttacaaacacctacgctctctctctctctctctctctctctcttcaggttgggaattagtgccttgggtggtcaccatgttccttcttagaaggcaaacccagaatcaccatgagaatgattcctcatatcaagatacagaggtggctgaactcaagacagctcttgggcccctctctggtcgtcaattaaagtattgcacagatgcatgtctaaggagatatttagaagcaaggaactggtgtgttgat

SEQ ID NO: 2742 - DNA, 604 bp, Glycine max
cactgttcctacaccatcacgtatctgccaccaaaccccacaaacacagtattcccaacttgtttttattatttatacggtaaacaaaacacaacacaccaacatcatttgatcatactcattgctgttcaccattttcaattcattcctgtgttagattccaagtggtttggtttggtttgacataaataaacctttcaagatctcagaggggcagaagatcaaagccaagacaacacactctcatatataaaagagtgtctctgataatttgatctttgtttcttctctttctctcctttgagatttttcagcaccccaccaaggttttgtccgaaaagcttgaatttttcgcctaccctttacaatgatctcttcattgagacaacctgttgtagggatcagtggttctgatcttcttttgaggcaaagacatgcaaccctaattaaggcaaggtcctttttaccctctttgtcaagagaaaagggtcaaagatctcttgtttcagttcaaaagccacttcacattgctgcttctcttggtgttggaaattttgtgtcagtgaagagtgatgatgacaaagggggtgattggtgaagtgtg

SEQ ID NO: 2743 - DNA, 509 bp, Glycine max
tttatttttgtttttctcctatgcttttgagtgtcgtcttgaattttctgctgaaaaatctcctttttattttttaattattattattattattgttttgcagtggtttggcttggtttgacatacataaacctttcaagatctcagaggggcagaagatcaaagccaagacatcctctcgtatataaagagtgtctctgatttgatctttgtttcttctctttctctcgtttgagatttttcagtactccaccaaggttttgtccgaaaagcttgaatttttcgcctaccctttacaatgatctcttcgttgagacagcctgttgtagggatcagtggttctgatcttcttttgaggcaaagacatgcaaccctaattaaggcaaggtcctttttaccctctttgtcaagagaaaagggtcaaagatctcttgtttcagttcaaaagccacttcacattgctgcttctcttggtgttggaaattttgtgtcagtgaagagtgatgatg

SEQ ID NO: 2744 - DNA, 2450 bp, Glycine max
ctgggatctgggtcctataaaatgtgccaatgtgagccatagcatctcacttcacaactcacactttcaacccaatccaatcctcgcacacatgcatgctgtctctgccaaagttggggccaagtcataactacatttccattgttacgattctttctttccatcccaaccacttattaagcgtctgatccaatttctttctctcaccatggatcatcgcaaaccattgttacccacttcctctgacgatgctccaaatccacgcactcggaaggaccttgttctaatgatttgcggtttgtttttgctctcttcccttgttgcctttggagggtacagggcctccaacgcgccacatgctgacgtgtcatcgccagcatcgaacgatgaacaacctagtcccacatcggtgccttctccgaaatggtacccggtttcacggggtgtttcttctggggtgtcggagaagtcatcaagcatgttgtttgcggttaaagatggagcttcggaagcatttccttgggacaatagcatgctgtcttggcagagaactgcttttcatttccaaccagagaaaaactggatgaacgatcctaacggtcctatgtactacaagggatggtatcactttttctaccaatacaacccgaacggtgcagtttggggtgacatagtttggggacatgcagtttcaagggacatgatccattggcttcaccttccactggcaatggtggctgatcaatggtatgacatgcaaggtgtgtggacaggctcagccacaatcttaccaaatggtgaaatcatcatgttatacacaggttccaccaacgagtcagtgcaggttcaaaaccttgcataccctgcaaacccctctgaccctctccttgtggattggatcaaataccctgggaaccccgttttggtgccaccaccaggcattggggccaaggactttcgtgacccaacaacagcgtggctcacctcagaagggaagtggcgaatcaccataggttccaagctcaacaaaaccggcattgcgttggtttatgacactgaggacttcaagaactatgagctcaaggaggggctgcttcgtgctgtcgctggcaccggcatgtgggagtgtgtggacttcttccctgtgtccaaggagaatgagaatggattggatacttctattaatggggctgaggtgaagcatgtgatgaaggtgagcctggatgatgatagacatgattactattcaattgggacttatgatgagaagaatgttctgttcacaccagatgatgctaagaatgatgttggcgttggattgaggtatgactatgggatattctatgcatccaagacgttttatgatcagaataaggagaggagagttttgtggggttggattggggagtctgacagtgaatatgctgatgtggccaaaggttgggcttcagttcagagtattcctagaactgtggagcttgataggaagactggcagcaacttacttcagtggcctgttgctgaggtcgagagtttgagattgagaagtgatgaattcaaaaatttgaaggctaaaccagggtcagtcgtgtcaatagatattgaaacagccacacagttggacattgttgccgagtttgagatagacaaggaaacccttgagaaaacacctgaatccaacgaggagtacacgtgtggcaacagtggtggatctaaacaacgtggtgccttaggaccttttggtcttttggttttggcagatgaggggctttctgagtatactcctcagtatttttatgtcattaaagggagcaatggaaatcttaagacttccttttgtgctgatcaatcaaggtcttctcaggcaaatgatgttcgcaagcaaatcgttggcagcgctgttccagttcttaaaggcgaaaagttttccttgcggatactggtggaccattctattgttgaaagctttgctcaaggtggaaggacggttgtgacatctcgggtttatccaacaaaggcaatctatggagctgctaggttgttcttgttcaacaatgctaccgaggccactgtgacagcctcactaaaagtttggcaaatgaattctgcatttatacgcccattccaccctgatcagaagagttaaaaatttgaattggagatagaagagctatagtcacaaaggattggaatacatcttgggttggcaatttgtacttatcagttgtaatgtcctcccctgaataaccgacataaggttatggttcttgctcaaagcgcattccttcatttttgcccagttatgtttatcagaatttttgttgtaattttatcatatcatgtgaaatgatgcttacaagagaatctgttcaaagaaatatgatgttaatgttatccaattctatgctaaaaatatttacatatggaaaagtttggtttttgtttctgtc

SEQ ID NO: 2745 - DNA, 882 bp, Glycine max
cggctctcatccacttagagagacattgtggttacccatagtctcatatagtgtcatacagcaaaaaaattcagcaacacaaaacaatgggttctcttatggcaggatggtattctacccacatggatcctcaatcagccacacttaaaaggaaccgctcactcactaaggatgaaattgatgcttactggaaatcaaagaagaagatagaggaagaacaccttagagctatttccaatgtgtcagagactattcaggctagcaaaaacacagagcctgaaaagaagttgcagaagtcaatgaccatgccagttacccgtgcacgggactacttaaatatggtggacattgacacaagtttggagcaacttattaagcgaaatggctggtggaccaagagtagctgggcgtttctgaatgagcctccagtgactgaagctgcgtccaataagtatgcatcgcagtttcacgtagcaagcatgagatcatcaaaatttaacccccgagatggaattagtgcttgatacatatgaatctaactaattactatataaaactactcaaccatatatatatatatatatgtgtgtgtgtgtgtgttttcactagtactagtgttcgtatctacacgaatactattatataatatgcgaagtgttgttgaaccaattaatagtgagcttcgttggtctctagtcatgtgaggaatcaattaatgtatgatggatcttggtactagttagttctctttttgctggccggtcctagttctccaacttcactgtgttgtgatgtctggtttgtttgaagagggtaatgtgatataatccaaagttccaaacagttaatgaatgaatttgatgtgctaaaaaaaaaaaaaaa

SEQ ID NO: 2746 - DNA, 908 bp, Glycine max
  unsure (1)..(908): unsure at all n locations
cccacgcgtccgcccacgcgtccgcccacgcgtccgaattcggctcggttatttatccatttagaaagacattgtggttacccatagtctcatagtgtcatactgcaacacaaaacaatgggttcccttatggcaggatgggactctacccacatagatcctcaatcagccacacttaaaaggaaccgctcactcaccaaggatgaaattgatgcttactggaaatcaaagaagaagatagaggaagaacaccttagagctatttccaacttgtcagagactattcaggctagcaaaagcacagaacctgagaagaagttgcagaagtcaatgaccatgcctgtgacccgtgcacgggactacttaaatatgggcatagacacaagtttggagcatcttattaagaaaaatggctggtggaccaagagtagctgggcatttctgaatgagcctccagtgactgaagctgtgtccaataagtacaaatcgcagtttcacgttacaagcatgggatcatcgatcaaaatttaacccccgagatggaattagtgcttgatatatatatgaatctaactaattactatataaaactactcacccatatatgtacatatattttttcactagtactagcgttcgtatctacatgaatactataatataatatgcgaagtattgaaccaattaatggtgagcttcgttggtctctcgtccgtgttgtaatgatggatcgggtactagctagttctgcagttccactgtgttgtaatgtctggttttgtttgaagtgcttataagcatgattaatttgctgtgttctgcagtagatgaatgaatctgatgtgcttatcaaaaaannaaaaaaaaaaaaannnnnaaagcggccgctctagaggatcccagcttac

SEQ ID NO: 2747 - DNA, 501 bp, Glycine max
ctcacactttcaaccccatccaatcctcacatgcatgctgtctctgccaaagtgccaagtcacataacatttccattgttaccattctttctttccatcacaaccacttattaagcctctgatcctcactttctctcacacaaaaacacactcaccatggatcatcgcaaaccattgctacccacttcctctgatgctgctccaaatccacacactcgcaaggaccttcttctagttatttgcggcttgctattactctcttcccttgttgcctttggagggtacagggcctccaacgcgccgcatgccgacgtggcatcggcaacatcgaacgatgagcaacgtagtccgacatcggtgccttctccgaaatggtacccggtttcgcgaggtgtttcttccggggtgtcagagaagtcatcaagcatgttgtttgcggttaaagatggagcttcgaaggcatttccatgggacaacagcatgttgtcttggcagagaact

SEQ ID NO: 2748 - DNA, 540 bp, Glycine max
cgctgatcaatcaaggtcttctcaggcaaatgatgttcgcaagcaaatcgttggcagcgctgttccagtacttaaagatgaaaagttttccttgcggatactggtggaccattctattgttgaaagctttgctcaaggtggaaggacggttgtgacatctcgggtttatccaacaaaggcaatctatggagctgctaggttgttcttgttcaacaatgctactgaggccactgtgacagcctcactcaatgtttggcaaatgaattctgcatttatacgcccattccaccctgatcagaagaattaaaataaataattaaattggatataaaagacttgtagtcccaaaggatcggaaaacatcttggggtggcaatttgtactcatcgattgtttaccttcccataaacccccacataaagttatgggttcttgctcaaagcccattccctcattttttgctcatttatgtttatgagaatgtttatcataattttatcatatcatgtttaatgattcttacaagagaatctgtttttc

SEQ ID NO: 2749 - DNA, 670 bp, Glycine max
accggtgggaaaaccacagaagggggtaggctcataatggtatactggaacacaaaacaatgggttcccttatggcaggatgggactctacccacatagatcctcaatcagccacacttaaaaggaaccgctcactcaccaaggatgaaattgatgcttactggaaatcaaagaagaagatagaggaagaacaccttagagctatttccaacttgtgagagactattcagggataggcttgcaaaagcacacaacctgagaagaaggtgcacaagtcaatgaccatgcctgtgacccgtgcacgggactacttaaatatgggcatagacacaagtttggagcatcttattaagaaaaatggctggtataaatattattttactctttcagttatttatagttgtacaattaattgacttattttattacacttttatttagttaattatttcggatcatataaatttaattatgttttggatatggttaattgggtgcatgcaggtggaccaagagtagctgggcatttctgaatgagcctccagtgactgaagctgtgtccaataagtacaaatcgcagattcacgttacaagcatgggatcatcgatcaaaatttaacccccgagatggaattagtgcttgatatatatatgaatctaacttattact

SEQ ID NO: 2750 - DNA, 717 bp, Glycine max
  unsure (1)..(717): unsure at all n locations
ccggggcgacccacgcgtcacccatntcttacaacacctcccagaagttttcccaacgggggaagaggactaaaagaaaacagaggacagcgaggagtgagagagaacaaaagacgaatccagagagagaggagaagaaaagaaagaaaaaggaagtggctgctaacaaggatatactgtgatgccgactctaagaattcatggatatgccttgcttgtttcatcttgtttcatcatcctcatagcagcctcacaaacagatccttcagaagtaaatgcactgatagacatcaagaaaagtttgattgatcccatgggcaatatgaggaactggaattcgggagatccgtgtatggcaaactgggcaggggtttggtgctctgatagggaggaggctaatggttacttccatgtccaaaagctctacttaatgactatgaatctctcgggaagtttagcaccccagcttggtcagctatctcatcttaagatactgtgagttgtgtaatgtcataaattgttgtctggaagaaggaaaaaaacagtatcagaggagatggcacggggagggcctcacttcatgcaccccagaggaggccaaagtacaagagcggtcctcttggaccccctggtgttgcatatcattctatgtattccctggctgcaccagtgtttgaagtggagaatggggggagttttatggcaggttcttcattt

SEQ ID NO: 2751 - DNA, 794 bp, Glycine max
gggcaaagactcgtgggaaaccaactaaggaataccctttcaaaatggcttcttctgtgtcatccatggtttctaccaccctcctcctaattaccatctgcacactgtcctcacttctgtcagttgcatctgcagcaacagaggagggacgaacaaggccattcaaaagggtctatgcctttggagactctttcacagacactggcaacacccaaaatgcagaaggtccaagtggctttggccatgtttcaaactctccctatggaaccactttctttaaccactccaccaataggtactcagatggtaggcttgtgattgattttgtggctgaagcactttcactgccttacttgcccccctaccgtcatagcaaaggcaatgacacttttggtgttaactttgctgttgctggttccacagccataaaccatttgttctttgtcaagcacaacctctcccttgacatcactcctcagtccatccaaacccagatgatatggttcaacaggtacctggagagccaggactgccaagagtcaaagtgcaatgattttgatgacactctgttttggtttggggagattggagtcaatgactatgcctacactcttggatctaccgtctcagatgagaccataaggaagcttgcaatcagcagtgtctcaggagctttacagacgttgcttgagaagggtgccaagtacctagttgtgcagggtttgcctctaactgggtgcttgacattgtccatgtacctggctccaccagatgatagggatgacattggatgt

SEQ ID NO: 2752 - DNA, 710 bp, Glycine max
gcaccacacagcaacccatcggaatattccctttcttcgttttgaatcactggacggcatggccacttccaatggcttcgtcgacggcacttctccggaatccgcattgatctttctcggcagcggttgttcgagcatggttcccaacgtcatgtgcctccttcagccttctgaccctccctgccccgtctgcgtccagtcattgtctatccctcccgaacgaaaccctaattacaggtgcaatacgtctctcttaattgattactgcggcgacgccaacgctggtgatcgtaagtatatattgatcgacgtcggcaagaccttcagggagaccgtgcttaggtggttcgttgcccatcggattcccagagttgattctattattttaactcatgaacatgccgatgcagtccttggattggatgatgtacgtgctgtgcaggcttttagtccaacaaatgatattgatcccacacccatatacttgagtcagcattcaatggatagcatagcagagaagtttccttatttggttcagaaaaagcgcaaggaaggagcagaaatacgaagggtggctcaaattgactggaacattattgcggatgactgcaatcaacagttttttgcgtcgggattaaaattcactcctttaccagttatgcatggagaggattacatctgtttgggctttctttttggtgagaaaaaca

SEQ ID NO: 2753 - DNA, 435 bp, Glycine max
cacacctcatcggaatattcctttcttttcggtttcaatctctggatccgtcgtgacagacggcatggccacttccaatggcttcgtcgacggcactccctcggaatctgcattgatctttctcggcaccggttgttcgagcatggttcccaacctcatgtgcctccttcagccttctgaccctccctgccccgtctgcgtccagtcattgtccatccctcccgaacgaaaccctaattacaggtgcaatacgtctctcctaattttcttttctctttcaagaaatttcctcaagatctcgatttgcaggtgcaatacgtctctcttaattgattactgcggcgacgccaacgctggtgatcgtaagtatatattgatcgacgtcggcaagaccttcagggagaccgtgcttaggtggttcgttgcccatcggat

SEQ ID NO: 2754 - DNA, 967 bp, Glycine max
  unsure (1)..(967): unsure at all n locations
ccggaatnncggggccgacccacccgtccggacaacaattgtgagtgagagagcgagcgagcgagcagtttcaaagagaggatttgggattgggatgggagggattgcgctgcgtctcttcctcttctctttcgatccatccctcattcataatcttccaatccaacaacctcagcctcacactcacacatacacacatctgaacgcgtatcgtccctcctatggcttcaaagcgcatcctcaaggagctcaaggacttgcagaaagacccaccaacttcttgcagcgctggtccagtagctgaggacatgttccattggcaagcaacaataatgggtcctgctgatagtccttatgctggaggtgtattcctagtcactattcacttccctccggattatcctttcaagcctcctaaggttgcctttaggactaaggtgtttcacccgaacatcaatagcaatggtagcatttgtcttgatatcctgaaggagcagtggagccctgcactcaccatctctaaggtactgctttctatctgctcattgctgactgatccaaatcctgatgatccacttgttccggaaatcgctcacatgtacaaaactgaccgggccaagtatgaggccactgcacgcagctggacccagaagtatgccatgggctgatttgtgtttggataatgtatattgaaatggattgcatctatgaaaacttttgtgggtttgcttttcacttcctgtttttttggggtaagattatgtttctgttatgaggggatagggaagggcggtgtcttaatttgataaaaaaaataactgtgttcaacaaccactgtgatgtttttatcatgatgcgaacgcatgaacaagatgttatttgtgtcatggctgtggtgttactctatgaagtaatgtagaaatagtcatatgttttaaacagctttttccaagaaaaataaannnnn

SEQ ID NO: 2755 - DNA, 417 bp, Glycine max
gggtgtgggcatatatccaaccaaaaagggacattttgcgggtatttgtgagtgtgtgagagagagagcgagcagtttcagacacagagagaggggtttgggattggagggattgacgctgcgtctcttcctcttctctttcgatccatccctcattcctaatcctccaatccaaccacctcagcctcacactcacatatacacatatctgaacgcgtatcgtccctcctatggcttcaaagcgcatcctcaaggagctcaaggacttgcagacagacccaccatcttcttgcagcgctggtccagtagctgaggacatgttccactggcaagctacaataatgggtcctgctgatagtccttatgcttgatgtgtattcctaatcactattcacttccctccggattatcctttca

SEQ ID NO: 2756 - DNA, 345 bp, Glycine max
ttgatatcaagacaaatgctaccattgctattgatgttcgggtgaaacaccttagtcctaaaggcaaccttaggaggcttgaaaggataatccggagggaagtgaatattgaaatggattgcatctatgaaaacttttgtgggtttgcttttcacttcctgttttctgggtaagattatgtttctgttatgaggggctagggaagggaggtgtcttaatttgataaaaaaaaataactgtgttcaaacacaaatcagcccatggcatacttatgaggccactgcacgcagctggacccagaagtatgccatgggctgatttgtgtctggataatgtatattgaaa

SEQ ID NO: 2757 - DNA, 595 bp, Glycine max
cttcatttcttccctcgccgctttgtgctgctgctgctgcaaaacctagggttgagcctttttttgaggttttcagcgcttctttctcacaatggttcttcagaatgatattgatttgctgaatcctccagctgagttggagaagagaaagcacaaactcaagcgtcttgttcagtcaccaaactctttcttcatggatgttaagtgccagggatgcttcaacataacaactgtgtttagccactctcagactgttgtggtttgcggaaactgccagactgtgttgtgccaaccaacaggcggacgggcaaggttaaccgaagggtgctcttttaggaagaagggagattgaatggtttgttaaccagacttttctttgtcaatgattgaaaattttcggttgttaggtttttgaaatggaatccatttccgttatggtatattaattttgttaaattgtaagacaatatctctctcagccttccacaagacatagtagccaatgttgaatttttctttattaaagtggatgtggttttgttcgacaacatttactaaaatcaatatggtttagtttgatggttatttttacaat

SEQ ID NO: 2758 - DNA, 618 bp, Glycine max
cccacgcgtccgcggacgcttctcccgccgcaactcacactgtcttccttctctagggtttttagctcctccaaattcttcgcccaacatggttcttcaaaatgatattgatttgctaaatcccccggctgagcttgagaagaggaaacacaagctcaagcgtcttgttcagtcaccaaactctttcttcatggatgttaagtgccagggttgcttcaacataaccactgtctttagccactctcagactgttgttgtatgcggaaattgccagaccgtcttgtgccagccgacaggcggccgggcaaggctaaccgagggatgctcctttaggaagaagggagactgagtggattgccatctttttttgtttgtgattggagagtttcagtaatgccttcttttgttttggttatggtatgttaattttgttaaatttgtaagacttgagtctacaagcttatccaagacattagggattacacctaattttgcatttctctttactgcaattgggttcatgtggctatgttagatgcttacttttaaattaaattaaagtgcatgttatggtaaatgtatctttgtttcttcagtatggtagactatttttctgat

SEQ ID NO: 2759 - DNA, 434 bp, Glycine max
accagagagagagagagagagagagagagagagagagagagagagagagagagagagagagagagagagagagagagagagagagagacaaatcctatgtttgagccttttgctcaggttttcagcgcttctttcttactatggttctacagagcgatattgatttgctgactcctccagctgagttggagaagagaacgcacacgctcaagcgtcttgtgcagtcaccactctctttcttcatggatgttaagtgccagggctgcttcaacataacaactgtgtttagccactctcagactgttgtggtttccggaaactgcctgactgtgttgtgccaaccaacacgcggacgggcaaggttaaccgaagggtgctcttgtggaaggctgagagagatattgtcttacaatttaacaaaattaatataccat

SEQ ID NO: 2760 - DNA, 751 bp, Glycine max
ggcaccaaaaatatgtagtcacgctcacacatgggatccaccttgatgcaacttttcttcttaaaaagatagatagaatctaatcacgctctttctccgctgcctgtaactcaaaatggcagagaattccaacggcaatggcgtctacgtcgatgaagaagaagaagaagaagaaataaagttgaagcagaaaaagcaaagactgaaagagaccttgccggaggtccttaaccgcatcgcctccgccattctcttccaggaacccgccgatgccggatccctacttcgccggatcaaggtctccgtcgccgacaacgctactctcctccccgaagcttccagaaactccgcccgcgacgttctcatctggactcgccgcggcactcccttccgcccgctcttcgtcatctccgttgggacggtcacttttgttgctttgacagggctgcttgtgtttatgcttttctttctagctgcgaccgtaaatgccattgtcatatcgttactgatgtctttggcagctgcaggaggattcctggctcttttctttgcttttgttacagctatatacattggagcattatcaattgccatatttgctatttcagttaccacattttgggcaattgtggctattctgatgatcacaggctcgagaaaagtggaaagaaataagggctctttatcatgattgtatacatccaatattgagccctgtagtttattaccatgataacttctgtcttattgt

SEQ ID NO: 2761 - DNA, 734 bp, Glycine max
taggaatgggacttcaggtgttaagggtaaactgtttgaatgggaggaagaataattgtgaggcgagggtaaggtcgcgttgtgttgcgtcgtgtcgtgcgctgttcctctgtctgtcgtttttgttttcagaccaaaccctagctccgcatcgcaaccatgtcgaccaagcaaggtggaaaagctaagcctttgaagaaacccaagtctgataagaaggattacgacgaggttgacatggctaacattcagaagaaaaaggaagaggagaaggcgctaaaggagttgaaagccaaggcgcaacagaagggaagctttggaggttctgggctcaagaaaagtggaaagaaataagggctctttatcatgattgtatacatccaatattgagccctgtaattacagttgctaccatgataacttctgtcttattgtggccttctttattgctctaatgttagtactgaactgaggtatttcgtgatgtaagctgcaacaagttacttgtttgtagctttattgtgtggcccttcatggggttctgataattacatccttttagtagtgttgtggatttggcatagacttgttcaagtaaataatggcatggcttgcgaaattttatttgtcaattctaatattatcatccctaatctgttgccaactgcctaacatttgtcagtgattgatatgaattctcaagtcaatacccaattgtctggaatttggtttcc

SEQ ID NO: 2762 - DNA, 459 bp, Glycine max
cagacgacagatgggggaatcggcggaagaatacttgtgaggcgagggtaaggtcccgtagtgttgcgtcgtgtcctgcgctgttcctctgtctctcgtttttgcggtcagaccgaaccctagctccgcatcgcaaccatgtcgaccaagcaaggtggaaaagctaagcctttgaagaaacccaagtctgataagaaggattacgacgaggtcgcccgggctaaccccctttggagttatcttgttttttttaatattctatttatcgtggtcaaagattagaatttccatgcttgatggacttcggttttagaattggcaatcagtttaaggaagagataacacaggattgagatctttaggctcggttgaattattaggtgttttcaatatgaagctttgcaaaggtttactacataatcatttaatgtatattgctactattcttgctgctgcaat

SEQ ID NO: 2763 - DNA, 367 bp, Glycine max
gttgctttgacagcactgcttgtatttatgcttttcttgctagctgcaaccataaatgccattgtcatatcgctgctgatatctttggcagctgcaggaggattcctggctcttttctttgcttttgttacagctatatacattggagcattatcaattgccatatttgctatttcagttaccacattttgggcaattgtggctattctgatgatcacaggctggattggattcatttacactgtgtggctggtaactagaaaaagctttggatttgctaaacactccttggacgtgaccggctctgcaatttcatcttacacgtactgcacggcatgcccaccacctaatacacacgaattcaaag

SEQ ID NO: 2764 - DNA, 725 bp, Glycine max
  unsure (1)..(725): unsure at all n locations
aattcncgagctcgacccaggcgtcagcccacgcaaccgcccacgcgtccgaaggctgccgctctctgagaaaaacagatagtgtgggagagagaagagcggaagagaaaatgacgaccaggttcaagaagaacaggaagaagagaggtcacgtcagcgccggacacggccgtatcggaaagcaccgcaagcatcccggaggtcgcggtaacgccggtggcatgcatcaccaccgtatcctcttcgacaagtaccatcctggtttcttcgggaaggtaggcatgcgctacttccacaaacttcgcaacaaattctacaatccgatcatcaacatcgacaagctgtggtccctcctcccccaggaggccaaagacaaggccaccgccgacaaggcacccttgctcgatgtcacccagttcggttactttaaggttttgggtaaaggggttttgcctcagaaccagcctcttgtcgtcaaggccaagcttatttccaagatcgctgagaagaagatcaaggaggccggtggagccgtcgttctcaccgcctgatttttttggggtatttttatttaaaaggattttgagatctgttgttatttttggttttggttcttgttttaatctctctgaactggattagtttaaatggttttttttatattctcagtgttctggattctatcgtttttgttgcgtgttatgttatgtgatgggagttttccc

SEQ ID NO: 2765 - DNA, 339 bp, Glycine max
tctcgagcgattcggctcgcggagaaaaacagatagtgcgggactagaaacgagcggcagtgaaaatgacgaccaggttcaagacgaacacgaagcagacaggccacgtcagcgccggtcacggccgtatcgggaagcaccgccagcatcccggccctcgcggtaacgccggtggcatgcaccaccaaccgcatcctcttcgacaggtaccatccgggttccttcgggaaggtgggcatccccaacttcaacaacttcggcacaaattctaatggcccaaccttcacaatgattagctaagggcccccctaacccaagaaggccaaggacaaggccacc

SEQ ID NO: 2766 - DNA, 737 bp, Glycine max
cttgcatcttcttttcaaaattcttccccaccccacaagcaaagcacccttaacttttccacttcatttttttttttttggttcctctttatttctttctctctaccccatttttctttttctgggtttctgtgctttttgttgggatctacttcacaatgggtttctcacaagacccctgcactgattccaatgccccaacctcaacctcttccaccttagttgtagatcactactgtgactacgacaagctcaaattcaaaacctttctcagaaaaatgttctgggaattcggtctcgcctgtgtggccaacccttcccagcgccggagaagctccggcgacggcaaaaagacgaacatggagaacaacaaggcgtggctgcttgcggagtctggtgggtgtggagcagaattgcccaatgctgaccctcaatcggttcactcctctttcaggttcagcttctgttctcaggttgagttggagtccctgaacatgagttcttcggctgctgcaacggttttgatggtgaatttggacaatggggtgagtgaatcgcgcgccaatgaaatgaagtggaggagaatggagtcgttggagaagagcatatcccctgtggctcacaccttgatcaggtttagctatggtgaaattatgtctgctactagaaatttctcaaagggagggtgttggggagaggagcattgagctgtgtttttagagggagagttgggattt

SEQ ID NO: 2767 - DNA, 1568 bp, Glycine max
gattcataaacccacaagacacaagacagaacacagcgcacacttgtccattctccaaaacaaaatgaagagcctcctcttctctctcttcctcttcctcttcttagcctcctccgccgtcgccaccgtccccgcccacaacatcacccgcatgctggccgcacaccccggcttctccaccttcaaccactacctctccgtcacccacctggccgaagagatcaaccgccgccagaccatcaccgtcctggccctcgacaatgccgccatgtcctccctcctcgacaagcacctctccctccccaccatcaaaaacgtcctctccctccacgtcctcgtcgactacttcggcgccaaaaagctccaccagatcaacaacagcaccaccctcgtctcctccatgttccaggccaccggctccgcctccggcaccgccggctacgtcaacatcaccaacctcaaggccggcaaggtcggcttcgccgccgaagacaacgacggctccctccactccttctacgtcaaatccgtcaaggaaatgccctactacatctccgtcctccaaatcagcgccgccattagctccgccgacgccgaggcacccaccgccgccccctccgccatcgacctgatctccattatgtccaaacaaggctgcaaggccttcgcggaccttctaagaggctccaaagcgcttccggctttcaaggaaaacgttgacgggggcttaacggttttctgccccaccgacagcgccgtcagcggtttcgcgccaaagtacaagaacctgaccgaagctcagaaggtttcacttctgttgtaccacgcgactcccgtgtacgagtccctgcagatgctgaaatcgagcaacggaatcatgaacactctggccacagagggagccaacaagtacgacttcacggtgcagagtgaaggggaagacgtcagcctcaagaccaaagtcaacacagccagcatagtggggacattgatagatcaggatccattcgtggcatataagataaacagggtattgatgcccagagagctcttcaaggccagcgacgcggcggatgcacctgcccagtcgccaaagcccgccaagaagaagaacaagaacaagaacaacagccatgcggcggatgcaccggcggacggaccatccgacgacgacgctgattcggaagatcagaaggctgcggatgaagacagcaatggagtaagcggattgcacgtgagattcttcatggtcttcttcagtttaattatggcttttttggctctatgaaacacccacatggattatggagtgtcgctactatacacttgtttcaattaagattcttttctttctttaatatatgtcaaggaaataaaacgctgccaccgacatgtaggaggccatgtgtacttttttttattataggttttgtatttgttgtttgtctgttttccgaattattttattggcctcttttttttcagtgtgggtagatccggtttgtgctacctgccagctatgggatgtgtgcatataaacacttttcaactcattagttttttatgtc

SEQ ID NO: 2768 - DNA, 593 bp, Glycine max
caagacccccaaataatgaggatcatctgcaatgtcttttccacatattcactcaattactaactgggacccattacataaagatcggccatctatctcagtaaattagacataacacccggtatttgagatccgaactgtccgatctttattcaatggttacaaatgccctaactgtgtgagggcaaggaataggagactgccccgaatccagttggccaataaacatgcagattctctcatattttcaataggaatagtgattctgtatttgttcccctgctgaaggtatcccctgctgaaatgaatgagctcaacactcctacttcctcggttcttcccctgttatccacccaaattgaaagtggccttttttattttccgtgggaaaattttcagttctatttgattattgtttgaagtcttatcgatactatttagattaagccaactttggtataaatataagttcctcacaagtgacctctcaatgttgttgaccttttacttcagtaactttgctgcaacccgatcttcgctttggataggattccctattgtaaaaaaatacagtatttaatgtaataaatcta

SEQ ID NO: 2769 - DNA, 1289 bp, Glycine max
gggccacaggagtcgcctcgtgtttccgtttccgtttcaatttcctctcacaggctttaaccttaccagctcgagataagacatggaccggatcaaaggcccatggagtccggaggaggacgaggctctgcagaagctggtggagaaacacgggcccaggaactggtctctgatcagcaagtccatcccgggccggtccggcaagtcctgcaggctccggtggtgcaaccagctgtccccccaggtggagcaccgggccttcacggccgaagaggacgacaccataatccgggcccatgcccgcttcggcaacaagtgggccaccatagcccgcctcctccacggcagaactgacaacgccatcaaaaaccactggaactccaccttgaagcgcaagtgctcttcaaccatgatcgacgacaacacccaaccgctgaaaagatccgtgagtgccggcgcggctattccagtctctactggactctacatgaacccgcccacaccgggtagtccctccggatccgatgtgagcgagtccagcttaccggttgcatcctcttcgcacgtgttccgtcccgtgcctagaactgtcaaggttctaccacccgtagaaaccacgtcgtcctccaatgaccctccaacttcactttctctatcactccccggtgttggtgttgttgactcatccgaagtctccaatcggacaactgagccgattcattttacaccgccaatgccacatcggtcgaatactatgcctttgctgccaatgatgacgtcggtttcagcgacggtgatggcgccgtttaattttagcgcagagtttcggtcggtgatgcaggaaatgataaggaaggaggtgaggagttatatagagttgcacaatcagaatgggatgtgttttcaggctgcggtgaatgatgggtttaggaacgcttccgtcaagcgtattggaattagcagggttgattcgtaaatagtatcatcggagaaaagaatgttcatttgctcctcctaatgggaaaaaaataagaagaatctgtttttttccctgttcttttttatttttaatcaatgtttttaggcaataattatggttaatgtacagtgagacataactcgatcgatccgaaggagaatggtaatcggaagaaagagggagatagataggtgttattacccattagataaaatctgaaatctatgttgtaactttttttttttttttaatcctctctgggtcatgttccccagtgaaaccaaaaagaaaatccatttttattttaacc

SEQ ID NO: 2770 - DNA, 859 bp, Glycine max
attccagtctccactggactctacatgaaccctcccactcctggtagcccctctggatcagatgtgagtgagtccagcgtactggttgcatcctcctcacatgttttccgacccgtgcctagaacaggcgcggttctaccacccgtagaaacaacaacgactttgtcttccaatgaccctccaacctcactttccctatccctccccggtgttgactcatccgaagtttccaatcgaacaactgagccgattcatgccgcacctcctccgccgccacagccacagccacagccacagccgttgaatactatccctttgctcccaatgatgacggtgccctcggtttctccgacggggatggcgccgtttaattttagcgcagagtttctggcggtgatgcaggaaatgataaggaaggaggtgaggagttatatggagttgcacaatcagaagaatgggatgtgttttcaggctgcggtgaatgatgggtttaggaacgcttcggtgaagcgtattggaattagcagggttgattcgtaaatattatcatcgaagaatggaacaacacaagtagagatgaggaaaaaaactaagaacctgtttttttccctgtttttttttaatcaatgttcttaggcaataattttggttgatgtacagcgagacagaactctcgatccctaaagaggctgaatggaaattggaacgaaagagggagatagatgttacccattagataaaatctgaaatctctgttgtaactttttgtatcctctctattggtcctgttctcttttgaaaacaaaaagaaaaaatactcttggaataaacaaattcctccaaatcaaattgtaataat

SEQ ID NO: 2771 - DNA, 420 bp, Glycine max
cacaggaggagcttcctgtttccatttcctctcacaaaaatcacttattatgaacacacgaaaagacatggaccggatcaaaggcccatggagcccggaggaggacgaggctctgcagaagctggtggagaaacacgggcccaggaactggtccctcatcagcaagtccatcccgggccgctccggcaagtcctgcaggctccgctggtgcaaccagctgtccccccaggtggagcaccgggccttcacccacgaagaggacgacaccattatccgggcccatgcccgcttcggcaacaagtgggccaccatagcccgcctcctccacggcagaactgacaacgccatcaaaaaccactggaactccaccttgaagcgcaagtgcacttcaaccatgattgacgacgacaacactccccc

SEQ ID NO: 2772 - DNA, 1127 bp, Glycine max
  unsure (1)..(1127): unsure at all n locations
gttagcgtcaaccgtccctctcgggccttcgttcagcacagttaggaaatacataaagaagaaacgcgttttgtcgtccctttctgagcgtaactctttgttatcggacttgacccctaaattcgcgcccattcccaccacatcacatccctcttttctataaattcccaatccctttcccagtttccaccaaaacctaaacctaaacctaaacctaaacctaaacataaactgaatttcccaaatccccttcccaattttcaccaaaacctaatactcccaaaccaatcttcgatcatggacgccgaatcacaacctcaactactcgaagagagaacagaggagcaagaactgaagtacctggaattcgtgcaattcgcgaccatacaggctctgatgcgctgcgccatcctctactcctacgccaaggagcgcgcgggtcctctgaagcccggtgtcgacaccgtggaggaggccgtgaagaccgtcgtggctccggtctacgacaggttccaccttgtccccggcgaggtcctcaaatacgccgatcgcaaggtcgccgaattggaccgccacgttccctccaacgtgaagaaggtctcctcccaggcccgctccgtcgtctccgaagtccgccgtgatggtgtctccgcctacgccaaaatcgtttactcgaagtatgagcccacggcggagcagtgtgccgtctccgcatggaggaagctcaaccagcttccgctcttccctcaggttgccaatgtcgtgttgcccaaggctgcctactgcactgagaagtacaatgaggcggttgtttcctctgctgagaaaggttatagggtttctgcttatcttcctttggtgcctactgagaagatcgccaaagtcttcggtggaaactgatctcgttctattgcgttttttaatttctattgttcttactttctttacataccaaggtggtgttgctagttaccacacttgtggtaggtttaagtggaatcgataattgaaaaagggaaaggtctggtttgtttatttcccctttccttattttaaataaattctttcccaaaaaaaanaaaaaaaaaaaaaacgaaagcggnccgcggatgcgagctcacgtctgc

SEQ ID NO: 2773 - DNA, 971 bp, Glycine max
cggacgcgtgggcggacgcgtgggcggacgcgtgggcggacgcccacttgacccctaaattcgtgcccattcccacaactgcacattcttctttctatatattccaaatcccttttccgatttccaccaaaatctaaaccgaaattcccaattacccttcccaattttcaccaaaacctaatactcccacaccaatcttcgatcatggacgccgattcacaacctcaacaactcgaagagagaacagaggagcaagaactgaagtacctggaattcgtgcaattcgcgaccatacaggctctgatgcgctgcgccatcctctactcatacgccaaggagcgcgcgggtcctctgaagcccggtgtcgacaccgtggaggaggccgtgaagaccgtcgtggctccggtctacgataggttccaccttgtccccggcgaggtcctcaaatacgcggatcggaaggttgccgagttagacagccacgttccctccaacgtgaagaaggtctcctcccaggcctgctccgtcgtctctgaagtccgccgcgatggcgtctccgcctacgccaagaccgtttactccaagtacgagcctacggcggagcagtgcgcagtgtctgcatggcggaagctcaaccagcttccgctcttccctcaggtggccaatgttgtgttgcccaaggctgcctattgcaccgagaagtacaacgaggcggttgtttcctctgctgagaaaggttacagggtttctgcttatcttcctttggtgcctactgagaagatcgccaaagtcttcggtggaaactgatctcgatctattgcggttttgaatttcttattgtttttactttctttacaaagtgttgttgctagttgctactgttagtgtgtgagttggattggatatatgatgatgtgaatgttctgttttgttaattactatataataatatagaataatgttactcaaaa

SEQ ID NO: 2774 - DNA, 741 bp, Glycine max
cccacgcgtccgcccacgcgtccgcccacgcgtccgcccacgcgttcgcctaaacctaaacataaactgaatttcccaaatccccttcccaattttcaccaaaacctaatactccgaaaccaatcttcgatcatggccgccgaatcacaacctcaactaatcgtacgttctatccattttatttgctttccatccttattattctattttccatgtgttggtttgaattttcagaatgagactattctatttccgacatgtttgttgttatctacggttttgctttgattggttttttttggaatgagagtattctattgttcaggttttgttatttatctagggtttgaatttgattgaaattccaggacgagattctatttgccatgtgttgtttatttatctagggtttgaatttgattgaattttcaggaagagagaacagaggagcaagaactgaagtacctggaattcgtgcaattcgcgaccatacaggctctgatgcgctgcgccatcctctactcatacgccaaggagcgcgcgggtcctctgaagcccggtgtcgacaccgtggaggaggccgtgaagaccgtcgtggctccggtctacgataggttccaccttgtccccggcgaggtcctcaaatacgcggatcggaagggttgcgagttagaccagcacgttccctccaacgtgaagaaggtctcctcccaggcctgctccgtcgtctctgaagtccgc

SEQ ID NO: 2775 - DNA, 873 bp, Glycine max
gatacttcaaaatccaaatctagcgattaattatagtttaggcagcaaattatggaatcccatgatgaggagcatgctgccaaactacttagagctcaaacccacatatggaatcacatatttagcttcataaactccatgtcccttaaatgtgtggttgacttaggcataccagatatcatacacaactatggccaacccatgccactctcaaacctcattgcttcactaccaatccacccatccaaaacttgcttcgtccatcgcttgatgcgaatcatgatccattctggcttcttctctcaacaaaaccatgacttggagaatgagctagaagccaagtatgtgctaaccgatgcatctgtactattgcttaagaaccatccgatgagtgtgacacctttcttgcatgccatgcttgatccagttttgacaaatccatggaatcaattttctacttggttcaaaaatggtgacactacaccatttgaaacggcacatgggatgatgctttgggattacgctggcgctgatccaaaacataataacttgttcaatgatgccatggcaagtgatgctcgatttgtcactagtttggtgattgagaaatgtaagggagtgttcatgggattggagtcattggttgatgttgggggaggcacagggaccatggcaaaagccattgctaaatcattccctcgggtggaatgcattgtgtttgatctaccacatgttgtttctggcttgaaaggaagtgagaaccttaaatatgtttcaggggacatgtttgaggcaattcctccagctgatgccattctgttaaagtggatattgatgactggacatgataggagtgtgtggacatattgaaga

SEQ ID NO: 2776 - DNA, 1169 bp, Glycine max
cttctctgtctcacctcacttgcgttattagggtttagtgagatagtggcggggtagtgacattacagtgtgggcataaaattttcaaagtcgaagcgagaacttgccatttcgagggttttagggttagggttttctcaaattgcaagaacatgggtttcaacattcaaccctatgggattcagtccatgctcaaggaaggccataagcacctttctggcctcgatgaagcggttctcaagaacatcgacgcctgcaaacaactttccactatcactcgaacttccctcggtcccaatgggatgaataagatggttataaatcacttggacaagctttttgtcacgaacgatgctgggacgattgtgaatgaacttgaagttcagcatcctgctgccaaggttttggttttggctgggaaggctcaacaagaggagattggggatggagctaatttaactatttcatttgctggggaactcctgcagggtgctgaggaacttatcaggatgggtttgcatccgagcgagatcatcagtggatacactaaagcgatcaacaagactgttcaaatattggatgaactggttgagaatggttcagagagtatggatgttcgtgataaggaacaggttgtttctagaatgaaagcagctgttgccagcaagcaatttggccaagaagataccttatgttcgcttgttgctgatgcatgcatccaagtgtgtcccaaaaaccctgcaaactttaatgtggacaacgttcgtgttgcaaagctcttgggagggggcttgcataacagtactgtcgttcgaggattggttctgaaaagtgacgctgtcgggactataaagcaagcagaaaaggcgaaggttgctgtgtttgctggtggtgttgatacatctgcaactgagactaaaggaactgtcctcatacatacagctgagcagctagaaaattattcaaaaactgaagaggctaaagtagaggagctcatcaaggcagtagcagattctggcgccaaagtgattgtcagtggaggagcagtaggagagatggcgttgcatttctgtgagcgttacaagcttatggttctgaaaatcagctcaaagtttgaactacgtcgattttgccggacaaccggctctgttgccatgctaaaacttggc

SEQ ID NO: 2777 - DNA, 1727 bp, Glycine max
attaaagagaccaaaccctatctctgcatattcacttaatttcattccaaaatcttcatattcatcaaactcatcaaaatgaatctgtaccactcctccaccaccaccaccaccaccaccatcttcaccgtcatattcctcctccttgcaatattattcactctcacaccccacaaggccaacggtgccacgtgtcaccctgaggaagaagcgggcctgttgggcttcaaatccggtatccgatccgacccgtccggcctgctcagtaactggatatcgggtacggactgctgcacatggaccggagtagaatgccactataacagcacccgggtccaaagattattcttaacgggtcaaaaacccgaaaccatcttatcgggtaccatctcacccaccctctcaaaactcaaactcctcgatggactctacctcataaacctcatcaacatttcgggtcccttcccaaattttcttttccaacttccaaatctccaatttatctatctagaaaacaacaatctctcgggtcgaatacccgataacatcggtaaccttacccgattagatgtactcagtttaactggtaaccggttcatcggacccgtaccgagttcaataaccaagttgactcagctcactcagctcaaactcggtaacaattttctcaccggaacagttccccaaggaattgccaagctcgttaatttaacctatttgagtctcgaaggaaaccaacttgaaggtaccataccggattttttctcttccttcacggatcttcggattcttaatttttcttacaacaaattttccgggaatatccccaactcgatttcttccctggcgccgaaactgacgtacttggagcttgggcacaactcactttccgggaaaatccctgattttctgggaaaattcaaggcgcttgacacgcttgacctgtcatggaacaagttttccggaacggtccctgcgagtttcaagaacctgacgaaaatcttcaacctgaacctctccaacaacctcctggtggacccgttccccgagatgaacgtgaaagggatagaatcgttggacttgtcgaacaacagttttcacctggggagcattcccaagtgggtggcttcgtcgccgataatattctctctgaagcttgtgaattgcggaataaagatgaggctagaggattttaagccttcggagacttatttctatgattttattgatctttcggggaatgaaatttcagggagtgcaattgggttggtgaatagtactgagtatttggtggggttttgggcttcggggaacaagttgaagtttgatttggggaagttaaggtttggggagaggtttaagtttttggatttgtctcgtaattgggtgtttgggaaggttccaaacagtgttgttgggcttgagaagttgaatgttagctataaccatctttgtggtcagcttcccaagaataagtttccggcaagtgcttttgttggaaatgattgtctctgtggttctcctttgccaccctgcaacaaagcataagtgtagtaagctttgttgttgatgatttcaagtgtttaatttccttttactgctaagttttccaataattatgtaatttaataagtaaattgtaattttaactttcaatatatactatatatatttactttaaaacagtaagttgaatgggtataataattaatataatttgctctttt

SEQ ID NO: 2778 - DNA, 1419 bp, Glycine max
gattcacagccattctttatctctatttttttaggctcataaatcttttttatgggtttcagggtcactactactctgtctctgctctccctgttttggctcttgtccctgcaccaagcaagagctgcaaagttccacaatgtgagtggcttgagagggaaaaagccagttgtagcaaatgggtgcaatttgttcctgggaagttgggtggttgacacgtcttatcctctctatgactcttcaacatgccccttcattgatcccgagtttgattgccaaaagtatggaagacctgacaaacagtacctcaaatacgcttggaaacctgattcatgtgccatacccaggttcgatggtgcggctttcctgaacagttggaggggtaagaagataatgtttgtgggtgactcactgagtctcaacatgtgggaatcactgtcctgtatgattcacgcgtcggtgccaaatgccaagaccggctttttgagaaaagaatcactgtccactgtgaccttccaggactatggagtaactatacagctataccgcacaccgtatttggtagacataattcgtgaaaatgtggggcgagtgcttacattggactccattgttgctggaaatgcgtggaaaggcatggacatgctgattttcaactcgtggcattggtggacccacactggaaaatctcaggggtgggattatattagagatggacccaatcttgtgaagaacatggaccgtttggaggcctacaataaaggattaaccacttgggctaattgggttgatcagaatgttgatccctccaaaactaaagtcttctttcaaggcatttctcctacacactatcagggcaaggattggaatcaaccaaaaagaagctgtagtggagagcttcaaccattgtctggatcaacatatccagcaggtctacctccagcaactaccatattgaacaatgtgttaaggaagatgagtactccagtttatctacttgatataacactcctctcacaattaaggaaggatgctcacccttctgcttatagtggggaccatgcaggcaatgactgcagccactggtgcctaccaggattaccggacacttggaaccagctcctatatgcagctctcaccaaatgaaggtgaaggccccatacaaattgatccttttcttcatcccttggttatatattcagctagtgtttttagaatttctttattatttgggggatatatagatactacagaggggtgaaactcaattgtaaaattatatataggattcttggaagaataatttacaaaacaaaataagttccttagagatcaaaattgttgcatactaagatgagtactttgtttacaagggttcgtaaactaattttattgaatcacagaatgatgttgaattct

SEQ ID NO: 2779 - DNA, 1255 bp, Glycine max
ggaagttcttggtaatatgtgccactcatcaggccaagtgagggaggctctaggggttaccctttctatattgtgctctaacattaggctctatcattcaagccgtcatgataatgcacaggatgagagaaacgacgatgttgatagtttgatgaaagatgaaagctgggttccgtttcttacagagcgagcagctgaagcagttgtcaacattcagattgctacccaatcagataaagtagtgaatcctgtagattcaagttctcaaaatgggcatctagatggtgattcacaagatgacattaaatggatggaaacgctactctacttcatcatctcatcattgaagtctgggagatcctcatatctgctcgacgtgcttgtgggacttctatatcctgtgatttgcttgcaggaaacatcaaataaggatttgtcaacattagccaaggtagcatttgaattgcttaaatggatgattgtttgggaacctcaccttcagaaggctgtatctgtgattcttactgctgccaatgattccaactggcgaactagatctgctacattgacatatctgcgcacattcatgtacaggcacacttatattctctcaagttcaaagaagcaagaaatttggagaactgttgagaagttactagtagacaatcaaattgaggtaagagaacatgctgcagcagttttagcaggcctaatgaagggcggagatgaagatcttgctagagatttccatgatagagcttataaggaggcaaatattgtacagaagagaagaaagtcgagaaatgcaagttctggattatcaatagcatctgttcatggtgctgtactagctttggtagcttctgtattatcagccccatatgacatgcccagttggttgcctgatcatgttacactacttgctcgcttcagtggggagccatcacccgtgaaatctacagttactaaagcagttgcagagttccggcggacccatgctgatacatggaatgttcagaaagaattatttactgaagagcaacttgagattctggcggatacatcctcctcgtcatcatattttgcttgataaaaaaaattccaaagatattgttgggggagggtagggtactgaaataattggttagggaaagtatgcttttcatttttggtgtattgactgtattcatagttgtaaaaatagcttttatttacattttgtatcattgatcatctaagaaatttatttcttaat

SEQ ID NO: 2780 - DNA, 764 bp, Glycine max
gatacaccttccaagaaacccatgtggagaggagttattttggcatacataggagttgcattctgctacttacctgttgccttcattggatactatatgtttggaaactcagttgatgataacatcctcatcacactagaacgccccgcttggctcattgccgctgctaacctttttgtctttgtccacgttgttggaggctaccaggtgtttgccatgccagtgtttgatatgatcgaaacctgcatggttacgaaattaaattttccaccttctactgcactccgagtaacaactcgcactatttatgttgcggtgacaatgttaattggcatatgtgttccgttctttggctctcttcttggatttcttggaggctttgcgtttgccccgacatcatattttttgccctgtatcatatggcttaagcttaaaaagcccaagaaatttggcttgtcttggacaattaactggatctgcattattcttggggtagtgttgatgatagtatctccaattggtgctctaaggaatatcatattatcggccaaaaactacgagttcttctcataaactattgatgcaatcattgattccccaaccgtttttaaagttagatgggtgaaactaaataacaagaaagcacgcagacatgcgttatacattgaatatagataatagatagcttcataggatttgtggaagtgatagacacacaactagccttgcacaaaattgaagcaactatcttgctcactatgtag

SEQ ID NO: 2781 - DNA, 663 bp, Glycine max
cccacgcggcacgccacgcggcattgctcgagaaactctaacgaaagagcgagaaagcgaagacagccatggcgtcgtttcttcaatcgtttctggatccgaagaagaactggttcgccgctcagcacatgaaatccctctccaaacgcctccgcaaatatgggctccgatacgacgatttgtacgatccttactacgatctggatgtgaaggaggcgctgaatcggcttccgaaagaggtggtggacgctcgccacgcgcgtcttaaacgcgccatcgatctttccatgaagcacgagtacctccctgacaatctgcagtcaatgcaaacaccattcaggggctaccttcaggatatgctgactcttgtgaagagagagagagcagaacgtgaagcattgggaggtttgcccctatatcaacgatccattccttgagtgcatcaagtatttcatgaaggtattttgattgaagtgggaggtttaaattgtattgatgttgtgatagaatgttttcttttaaagaagaaaatatggacaagctttgttggtataaactctatatggaatgcattttttaatggtatcaacctgcctcgggcattttctaataaatggcaacaacagactttttttgccttgaaaaaaaaaaaataaaaaaaaa

SEQ ID NO: 2782 - DNA, 452 bp, Glycine max
aaaaaacaaaaagtttgaaaaaacgtcttatatctttctcttcttctccgtggagaatgcatctctgtggcctggtttcttgttaaccaggtcctcaccagcttttaaatacttaaatttcaatcaatcccaattttctcacattccctttttgccctttctatctctctcgtctttctcccacaatgaacgatcttctaacggaatcatttgaaattccacgtggccaaggtcacggaggtggtggtgacattgagttaggagaatatgcaaggaattcaggagacctgggcttggatagtttcttcaagaaggttcaagagcttgataaacaatatgctaagctggataagcttttgaaagagctccagtatgctcatgaggaatcccaagctgttgaaagagctcttccatgaaggctatattgccgagaatggagaaagatgttgatg

SEQ ID NO: 2783 - DNA, 1119 bp, Glycine max
ggatggtgctggtcgtgtcgggaagatgctctttgctcgccaaggaaagaaatttgattatgacctcaaacagctgcgcttcacaggtgatcttctcatggagttgggtgctggagttgaactcgctactgctgcagtgccgcatctctttcttccattggcttgtgctgctaatgtactcaagaatgttgctgccgtaacatcaacctcaactcgcacaccaatttataaagcctttgctaaaggagaaaacataggggatgtcactgctaaaggagaatgtgttggcaatattgcagacctgttaggaactggtttgagcatattgattgccaaaaggaatccatcgcttgtcaccacattttccctcctttcatgtggatatatccttagctcttatagagaggtaaaatctgtggttttgcacacacttaactgtggaagattcagtgttgcagtagagtcttttctcaggacaggacaagttcccactttgcaggagggcaatatgaatgagaacatattcagttttccatggaaagataggcctgttgtccttggatcaagaatcaaggaagcattccaagaccctagtgcatattttgccatagagcccttgtttgatagggagagatatattgtaacatataacccctcaaaacacaaggtttatgcggtgctcaaggatcaggcaaagtcagatgacattctgaaagcagcattccatgctcatgtgctatttttcagtttgatgaaatcattgaatgaaaataaggcctcatctttgaagcaaagggaggatctctcaaacatgacacacacagttgctgatatcgaggctcgtatggctggtacttgcaagaccgtggcagattcttatgggtgtttcaagaataatgccaaggagcagggttggacgatgtcagaatcacatctaaatcctggtcgagcacggcttcatccagttgataatagatgagatgctcatattctcagctggcggctgctgggttttgactgtcaaagttcttgggactgctctggatgtgaaatgagtcgggcaactgaagcttaaaatcaccacgatgcaatgagaacatacaatgctcatggaatcgt

SEQ ID NO: 2784 - DNA, 399 bp, Glycine max
cagatgacagctcggtcctatccaggtttaaagacatcccatcttataaaagggttatgttattgaaggataaaatgggcgacgtaccaagacaaacagtggaagaaataaagaagcatgcggatgcagtgaatcttccaaaaacctcaattatcaaagtatctaattccatcttagtaggaatgacaaatgttgtcaaagagttgaaagatgcaaacctcacagtattcgtccataatctcaaaaacgaatacacaaccctggcattcgactattggtctgatcctaatgtcgagattgcaacttacgtccaaactgccaaggttgatggaatcgtgaccgattttccagccactgcaagtagattcatgaggagtccatgtagcgatccgacccatg

SEQ ID NO: 2785 - DNA, 1166 bp, Glycine max
ttattttcacacgtaatctcttaacatatagaacactaccctgaacatagtaaagaagccagtgctaggatttgttagtgaagcaatggctcaaaccatgttgctcatgtctagtgtctctagcagttattccgtggatttgaagaaagaccttttcctccaattgcagagtcaaagtttaaggcctaagttctctcagctctcattcaacccacttccatcatcaacttcttccttttcttcaccccgtacattcacaactctggccctcttcaaatctaagaccaaagccgctcctgctaagactaaggttacaaagccaaagcaaaaggttgaagatggtatctttggcacttctggaggatttggttttactaagcagaacgagctctttgtgggtcgtgttgctatgcttggttttgcagcatcactgttgggtgaaggaataactgggaaaggaattctagcacaattgaatctggaaactggaattcccctttatgaagcggagcctcttcttctgtttttcatcctcttcaccctgctaggagccattggaggtttaggtgaccgtggaaaatttgttgatgacgaacctactactggaggtgttattcctccaggcaaaggcttcagggaagctcttggtcttggttcaggtcctttatttggattcacgaaagcaaacgagctatttgtgggaagattggctcaattgggtttcgttttctcattgattggagaaattataaccggaaagggagcactagcccaactcaacattgagactggggtaccaatcaacgaaatcgagcccctagtgttgttcaatgttcttttcttcttcattgctgctttgaatcctggaactggcaaattcgttacagatgagggggaggatgattagacactaacccttttgtttgtttgtgtttaaacaaatactcgtttgctcatctatcataaaatgcattgagttcatcataaacaataaatctatatcatttttctcaatagttgcacgcgtctcgatgtcatgattagacatcattttttcctttagtaaattaaaatcatagtacttcgatttatctgtaaaaatcataatggaacccaaatttaatctcccatgggcccaatattaaatgggatatcattccgcgggg

SEQ ID NO: 2786 - DNA, 1075 bp, Glycine max
cttaaaatatagaacacactaccctcaacatagtaaagcagctggtgctagtgaagcaatggctcaaaccatgttgctcatgtctagtgtctctagcagttattccgtggatttggttttactaagcagaacgagctctttgtgggtcgtgttgctatgcttggttttgcagcatcacttgttgggtgaaggaataactgggaaaggaatcctagcacaattaaacctggaaactggaattcccatttatgaagcggagcctcttcttctgtttttcatcctcttcaccctgctaggagccattggaggtttaggtgaccgtggaaaatttgtcgatgacgaacctactactggaggtgttattccttcaggcaaaggcttcagggaagcccttgggctcggttcaggtcctttattcggattcacgaaagcgaacgagctatttgtgggaagattggctccctttccagtaataatttctccaatcaatcttgtatacactcttgtttatcatatgagggacctcctatagagtattacgagattgttgaggacgaggctgagattgaggaagagcggacactgaatgatatcagtagaccactccttgtagaagctgagtggcctgacattgagcagaaagagactgaacattctaagactccctttattgccgggatctttaaaagcatctcgggtgtttcctcgtccaatattcctgagcttgaagtcacagcagaaagtggtgggactagtagtccaaaatccattagatgtttggctgaacctagagttgtcaggaggattagaattgttgctgaacaaactcccattcagcacattcttcaacccccaacaatcgcctctctattggctatcatcattggcacagtgcctcagctgaaagctgtgttcttcggatacgatgctccattatctttcattacagacagtttggagattttagctggggcaatggtaccttcggtgatgcttatattggggggtatgcttgctgaaggaccaaatgagtctaaacttgggcttaaaactactattggtattacttttgcaa

SEQ ID NO: 2787 - DNA, 496 bp, Glycine max
agagcacggacctcgcatgcacgcgtacgttagctattcatctcgatctcgctcctttttctactaccctcaacatagtaaagcagctggtgcaagtgaagcaatggctcaaaccatgttgctcatgtctagtgtctctagcagttattccgtggatttgaagaaagaccttttcctccaattgcagagtcaaagtttaaggcctaagttctctcaactctcattcaacccacttccaccatcaacttcttccttttcttcaccccgtacattcacaaccctggctctcttcaaatctaagacaaaagccgctcctgctaagactaaggttacaaagccaaagcaaaaggttgaagatggtatctttggcacttctggaggatttggttttactaagcagaacgagctctttgtgggtcgtgttgctatgcttggttttgcagcatcatttgtgggtgaaggaataactgggaaaggaatcctagcacaattaaac

SEQ ID NO: 2788 - DNA, 263 bp, Glycine max
acgtggtgactctagttgcctgtcatcaagtattacaccacatcgacacccttgttaacttaaagatgttattcccattctatcacattttggtaatctcttaacatatagaacactaccctgaacatagtaaagaagccagtgctaggatttgttagtgaagcaatggcttcaaaccatgttggtcatgtctagtgtctctagcagttattccgtggatttgaagaaagaccttttcctccaattgcagagtcaaagtttaa

SEQ ID NO: 2789 - DNA, 222 bp, Glycine max
tcgcctattgagaaaaatgatatagaattgtttacgacgaactcaacgttcttttcttcttcattgctgctttgaatcctggaactggcaaattcgttacagatgacggggaggatgattagacactaacccttttgtttgcttgtgtttaaaatactcgtttcctcatctatcataaaatgatatagaattgtttacgacgaactcaatgcactcgaacaa

SEQ ID NO: 2790 - DNA, 1813 bp, Glycine max
tggtcaccggggtggagcaatgcagacaaggcattgacagcattcgtaaacggtgctttgatcgaatactcgaagaatcgcaggaaggcagacagtgccacaacctcatttctctcaccacatttgcactttggtgaggtgagtgtgaagaaagttttccaccttgtccgcatcaagcaagtgttttgggccaatgaaggaaacaaggctggtgaagagagtgtgaacttgtttctcaagtctattggcctcagagagtattcgagatacattagtttcaaccacccttatagtcatgagaggccccttctagcccaccttaagtttttcccttgggtggtgaatgaaggatactttaaggcttggagacaaggcagaacagggtaccctttggtggatgctggaatgagagagttgtgggcaactggttggttgcatgatcgaatacgtgttgtggtttcaagtttctttgtgaaggtgctgcagcttccttggagatggggaatgaagtatttctgggacacccttttggatgcagatcttgagagtgatgctcttggttggcagtacatatctggcactctccctgatggtcgtgaaattgaccgaatagataatccacagtttgagggctacaaatgtgacccaaatggagaatatgtgcgacgctggcttcctgaacttgctagattaccaactgaatggatacaccatccatggaatgcaccagagtctgtactccaagctgctggaattgaacttggttcaaattatcctcttcccattgtgggaatagatgcagcagaagtaagacttcaagaagcacttattcaaatgtggcaacaagaggcagcttcaagagctgcaatggaaaatggaacggaggaagggcttggagactcatctgaatcagcccctattgcctttcctcaagacatacaaatggaggaaaggcctgaacctgttaggaacaacccccctcacggtactcggcgctaccaggatcagatggtcccaagtatcacttcttcccatgtgagagtggaagaggaagaaacatcttctgatcttcgaaactcagcagaagagagcagcagagctgaagtgccagtaactgcaaatgcacaacaaaatgcaggagttgcattgaacgaacggatgttgcagaccactaataggaatacacaaacccaatacaatactacgatggacctgagaaatgtagctgatgattctgcagtagaatcttcaagtggtaccaggagagaaagggatggaggtttagttccagtatggtctccaccagcttccagttactcagaacaatttgtaggagatgaaaatggtataacaagcagttcatcttacttgcaaaggcatcctcaatctcaccaaatgctgaattggaagcagctacctcaaactgggtaattcatatataaagcaattagactagatggagggaggtggaagttacgctaccactcttctgttgagacttgagagaaagtggggtgttgaagccgcattgaacatacatgtgttaatttccttctcctttaccaccacctgacctccaatgtgtatggaaatttcaattcatacggcagttcatctgcagtcccttctgctttcttgtacaatatttgcaacttgctgtatagtatagtttgtgtagtgagggagaaagagccaccataggatctttggtctactaataaactcagatttaaaatgttacatctaaaaaatactatttatttttatcaaagtatatttatataaaaaaaaaaaagaattaaacaaaccataa

SEQ ID NO: 2791 - DNA, 581 bp, Glycine max
gcctgaacctgttaggaacaacccacctcacggtactcggcgctaccaggatcagatggtcccaagtattacttcttcccatgtgagagtggaagaggaagaaacatcttcagaccttcgaaactcggctgcagacagcagagccgaagtgcctataaatgtaaccacacaacaaaatgcaagagagacagtgaatcaaggggtgttactgaatacaaatagaaacactcgagtacagaataatcctacaacgtggctgagaaatgcagctgaagattccacagcagaatcttcaagtagtactaggagagaaagggatgggggtgtagttccagtatggtctcccccagcttctaacttctcagaacaatttgtagatgatgaaaatggtataggagccggttcatcttacttgcaaaggcagcatcctcagtctcatcaattgatgaactggacacggctacctcagacagggtaatttacgtctagaacatgccgattaatatcagggggaaggaaaatgcactctcccctcttcttctgggaatcgtgggatggtgaaccgcattggacatacatgt

SEQ ID NO: 2792 - DNA, 409 bp, Glycine max
gattccggtcgccacgctccgaaggctctaatctacaatgctgaatgaagcactcctatactgggtatcatatataaagcattagactagatggaggaggggaagtacgataccactcttctgtgagacttgaaaaaagtgggtgttgaagccacattggacacacatgttttaatttcctactcttttatcagtagctgacctccaatgtgtatggaaatttcaattcatacggaagttcatctgcagtccctattgctttcttgtacaatatttgcaacttgctgtatagtatagtttgtgtagtgagggagaaagagccaccataggatctttggtctgctaataaactcagatttgtgctttcacttaaggcggatatattaattatgatccgagctttatttac

SEQ ID NO: 2793 - DNA, 555 bp, Glycine max
cggctgctagaaacgacagaatgggaccctaggtcccaccgtaagcatttctgcatgcgttccagcaccttcttcttcgttcacctccttccccgtcgcaacacaaagctacgctgcagcaattcaccactgcagagttttccaagtccaatctcagttcacttctcgccagggtttaatctgaatttcttttgtgttgccactgaggttgttatcatttttcttccaaaatggcgacggtgatgcagaagatcaaagacatcgaagatgagatggcaaggacccaaaaaaacaaggctactgctcatcatttgggcttgctgaaggctaaattagcaaagttgcggagggaactccttacaccttcatcaaaaggagctggaggtgctggtgaaggttttgatgttactaaaagtggggattcaagagttggtcttgtgggcttcccttcagtcggcaaatctactctactaaataagttgaccgggacattttctgaggttgcttcctatgagtttactaccttaacttgcatcccaggtgtgatcacatatc

SEQ ID NO: 2794 - DNA, 507 bp, Glycine max
gtctgaatgggcaaagccccaacaggctactgtaccagctgataaaaggtggccaagtgcagaatctaatccttccatttcttattcactggcatcaccgttgcaaatgtcaccccaacatgctaagtccgaaacacaatatatgccagctggaggtgattttaagaaccttcagtctggagttgccagggaacaattaatcatgatgcagcggccccaaactgtaaatgcaaagcaagttccagccacaagcatgagttcatcacctcctggaatagctgctagttggtatccaactaacagttctgatgctgtcagatctaataatggctttatatctcatgctcctagcactagaagcctcagtccaaactatctcaattctaatcaaatgtaccaccaacttcagtatcaacctcaacaatatcagtttgttggtggcagcagcagcaattcagtagatcaccaatggaatagcatatggaatagaacaggtgcaactacacc

SEQ ID NO: 2795 - DNA, 423 bp, Glycine max
caaaagacaaaaaaataaccaccaaataaacatctttctccacaaacctagcgggtctccacttatccaaaaaaagaattcactatccatcatggacattaggaaggttacctgtgccgttctcattgccgctgcctccatgagtgcagcattggctaccacagaggtctctgcacccgcccctggccctagcagcggtgcctccgccgccactgttggctccttggttggtgcctcagtcttgtccttctttgccttgttccactaaaatgtgcagggttatggggaaagaatgttgaaggaacatgcagctcaaggaagaaggctgcatatatttacttagatacacttatgtatggaataaagtgtgaacacaagagttatgtgcatagatatgtatcatcaacattgttaacaatgtag

SEQ ID NO: 2796 - DNA, 359 bp, Glycine max
gcttttctgagtcgcagcatcagcagtagcatggaatccgaatccaagaacgacacccaagtcgctccggccttaatcgccgttcaccccgaccaatcctccgtcgccgtcgcagtgggcccgcacctccgggtcttcgacctccttagcggttctgcagcttctttaaccgacgactctgatggcgccgtcccgttccacaaggacaacatcagagccattcgcttcggcgcaaaaggaaaactcttcgtgtccgcaggtgacgataaaaccctcaaggtctggtcaacacagtcctggcgttgcatcaccaccgtgtcctccgagaagagagtaactgcagtagcaatcagcgacga

SEQ ID NO: 2797 - DNA, 377 bp, Glycine max
aattcactttggttccctcgaagtttagcttgcgttacatcggtggatcacatagtgctttgtttaagtatgagtcaggagctgaaaaaagctgcctctaagggtcatgagaaaatggtaacatcacaagaagagcaggcaaagatcactgaggttagagggttgatagggccactatcagataaggaatctgtgtactgttctgatgcttccatctcaaggtatttaaggtcgcgaaattggaatgtcaagaaggcagctcaaatgttgaaacagagcctaaaatggagaaaagaatacaaacctgaagagattcgctgggaagaggttgctgaggaagcacagacagggatgatgtataaaccaaattatcatga

SEQ ID NO: 2798 - DNA, 292 bp, Glycine max
gaggaaccaaagtgaataactcttattacgataaattgaaattggtactgatcattgctgtgctcaactgttcattgttaatttttagcgtccctatactaattaaacagcatgagtgtggatttgaacaaaactgcctccaacggtcatgataaaatggtaatatcacaagaacatcaggcaaagatcactaaggttagagggttgaaaggccactaacaaattaaggaatccgtgtactgttctgatgcttccatccccaaggtacttaaggctccgaaattggaatgtc

SEQ ID NO: 2799 - DNA, 590 bp, Glycine max
gagaattaatgaaagaaagcaagaatttgaaggaagaggggatatgaatacaaggagctagttgtctatttgcaataacataacatcatcaagcaggatcatcgatccaaccttagtattcaacccagagagatttgtagtaataattactacaacaacttaaaacaatggcaggaggaggttatgtagattcgggaaatgcaaagcaatttgaagggaaggtcactgcattcgtattggttacatgctttgtggcagccatgggaggcttactcttcggttatgatcttggaataaccggaggagtgacttccatggaaccatttctcatcaaattctttcccggtgtctataaacaaatgcaagatgatgtcggccatagaagccaatattgcaaatttgacaacgagctccttacactcttcacctcttccttgtatcttgctgcattagtagcttctttctttgcttccaccactacaaggatgatgggacgcaaggcctccatgttcttaggaggcttgtttttccttgtgggggcattattaaacggcttcgccgtcaacattgaaatgctgatcataggccgc

SEQ ID NO: 2800 - DNA, 449 bp, Glycine max
tttcactcggacagaaagaagttctaaggaagagggaatatgcagaatacaaggtgctagttgtctatttgcaataacaacatcagcgatccaaccttagtattcttcaacccagagagatttgtaataataaattacaacaacttaaacgatggcaggaggagcttatgtagattcgggaaatgcaaagcaatttgatgggaaggtcacggcattcgtattggttacatgctttgtggcagccatgggaggcttactcttcggttatgatcttggaataaccggaggagtgacttctatggaaccatttctcatcaaattctttcccggtgtttataaacaaatgcaagatgatgttggccatagaagccaatattgcaaatttgacaacgagctccttacactcttcacctcttccttgtatcttgctgcattagtagcttctttct

SEQ ID NO: 2801 - DNA, 153 bp, Glycine max
agaactatatgcataaagtcttgcgtcttagatggcaagaatgctgcttattttaaccttcaacctttgaactttgtgatgtatttttcttgccataactgttgcccttttctcttgaactactatatgcgtaagttatattgcttgtcgtgg

SEQ ID NO: 2802 - DNA, 1777 bp, Glycine max
cttacgcgtggtcgcacgcgtgcgcaaaaaaatactactaaagagatgagttttgcaggttttctttctcttcaatcaatgtctgctacctgcggcttcttcttcttctccttcacccttctcttctccttcttctccttcctcgtcttcatctccaggatgaagccctggtgtaactgcgatctttgcaagagctacttgacggtgagttggctgaaaaagttccccaatctctgcgactggtacactcatctcttgcgtaaatccccaaccggcaccatccacgttcacgtgctggggaacaccatcacctcgaatccccacaacgtggagcacattctcaagacgaatttccaaaactaccccaagggaaaacccttctccaccatcctcggcgatcttttgggaagaggaatcttcaacgtcgacggcgaatcgtggaagttccagcgcaagatggcgagtctcgaactcggcagcgtggcgattcggacgtacgcgatggaattagtcaacgaggagatccacgcgcgactgatcccgatcatggaatcaaccgcgcgtggcgaattaaactccgtctgcgttttggatttgcaagatatactacgaagattctcgttcgacaacatatgcaaattctcgttcgggctcgacccgggttgtctcctaccgaatctcccagtctcggacctcgccgtcgcgtttgacctggcctcaaagctctccgccgaacgcgccatgaacgcgtcgccgtttatttggaaactaaaacgactcctcaacataggatccgagaagaaactgagagaaacaattaacgtcgtaaacgacgtcgcaaaagagatgataaagcagagaagagaaatggggttcaagacgcggaacgaccttctctcgcggttcatgggatcaatagacgacgacgtttatttaagagacattgtggtgagttttctattagcgggtcgtgacaccatcgctgccgggttaacgggcttttttatgttgttatcgaaaagcccggaggtggaggagttgattagggaggaggtgggccgggtgatgggcccgggccaggagtttccttcgtttgagcaaatccgcgaaatgcattacctgaacgcggcgattcacgacagcatgaggctgttcccaccgattcagttcgattcgaagttcgccacggaggatgacgtgttgccagatggcactttcgtgagaaagggcagtagggtaacttaccacccttacgcgatgggccgaatggaaaatatttgggggcccgattgtcttgacttcaggcccgaaaggtggctgcgtgatggggtgttcgtgccagagtgtccctttaagtaccctgtttttcaggctggtgtaagggtgtgtttggggaaggacttggctttgatggagatgaagtccgttgtggttgcgttggttcgcaggtttgatattcgggtcgcccaaccggatcaggagccccggttcgcgcccggtctaaccgctactttgagaggggggtttccggttcgggtttgtgaaaggaaatgaatagataaaggagttcacaacatgaatgtgaatggaatcatgaaatgaatgagtgaatgaaggaacagttttcgtgtaaataatataatgttgcagttaaatcgaacgtttttctttttttttctcctcttttaaacaggcgtctttttgaatttgcgtttatgtttattattgcccagtgaagtaaatactaaagccattgcaaattttggattatagtaag

SEQ ID NO: 2803 - DNA, 859 bp, Glycine max
tttgtactccaaaaatttactactaaagaggggagggttgctttgaatctttctgggggatcaatgactgctacctgcggcttcttcttcttctccttcacccttctcttctccttcttctccttcctcggcttcatctccaggatgaagccctggtgtaactgcgatctttgcaagagctacttgacggtgagttggctgaacaagttccccaatctctgcgactggtacactcatctcctgcgcaaatccccaaccggcaccatccacgtgcacgtgctggggaacaccatcacctcgaaccccctcaacgtggagcacattctcaagacgaatttccaaaactaccccaaggggaaaccgttctccgtcatcctcggcgatcttcttggaagaggaatcttcaacgtcgacggcgaatcgtggaagttacaacgcaagatggcgagtttggagctcgggagcgtcgctattcgaacgaacgcgatggaattggtcaacgaggagatccacgcgcgtctgatcccattcataatgggatcagtcacgcacgacgaattaaacgactccgtctgcgttttggatttgcaagatatattacgaagattctcgttcgacaacatatgcaaattctcgttcggtctcgacccgggctgtctcctaccgaatctcccagtctcaaacctcgccgacgcgtttgacttggcctcgaagctttccgcggaacgcgccatgaacgcgtcgccgtttatttggaaactaaaacgactcccaacgtaggttccgaaagaaaactgagagaagcaatcacgttgtaaacgacgtcgctaatgagatgatcaaacagagaatagaaatg

SEQ ID NO: 2804 - DNA, 446 bp, Glycine max
gcggagaacatttgggggcccgattgtctcgagttcaggcccgaaagatggctgcgtgatggagtgttcgtgccagcgtgtccttttaagtaccctgtttttcaggctggggtaagggtgtgtttggggaaggacttggctttgatggagatgaagtccgttgtgcttgcgttggttcggaggtttgatattcgggtcgttcaatcgggccaggagccccggttcgagcccggtttaaccgctactttgagaggcgggttgccggttcgggttcgggtttgtgaaaggaaatgaatagcaagtatgtggttgataaagtcataaagccataaaggagttcacaactagaatgaaatcatgaaatcaatgaggggatggaagaaccgttttcgtgtaaataataatgttgcagttgaattgaaagttttctttttcccccttttttt

SEQ ID NO: 2805 - DNA, 852 bp, Glycine max
ggctttcggaccacgaaagtgcaattttgaaaaacagctagtgcattaccgaacacaaagtagaaaagagatacaacaaccatctggaatagtaatccaagggggatccattgtgtctgatcctgagttctactcagtgagatttgagaacaaggcttacctagctcgtccatggaagaattactctaggaccattatcatggacacatacattgatgatttgattgacgctgatgggtatttgccatggcaaggactagagggtccttctggtatggatacttgcttctatgccgagtaccacaacattggccccggttcagacaaatccaagcgtgtgaaatgggctgggatttggaacctcaattcaaaagctgcacgttggttctcaccatctaagttttttcatggaactgattggattgaggttactggaattccttgctttcctggcgtgcccaaacaccataggcacaaaaagacaatacttaattggcaataaaagtaatgagttgcgaaagcaagcaatataaattaattaaaaagtaatgattgtgcttctttattctttaattatttttatttcattaattaactttagagttagctacatttttttatctcaaggaattgaaatcaatgtaacacaattcctctcttgataactttttttttagtggctaataaatgggtcttctagatattttacccattgtatttcctaagaaagggtatcgaggctaatggtgtgacaatgtaaggatcttttgtgtcaaaagtattcctataaatgagaacatgtacttatgacaacttttcaaagtcacaataactaacaaaacatgttcaatc

SEQ ID NO: 2806 - DNA, 360 bp, Glycine max
gacaaatccaagcgtgtgaaatgggctgggatttggaacctcaattcaaaagcagcacgttggttctcaccatctaagttttttcatggaactgattggattgaggttaccggaattccttgctttcctggcgtgccgaaacaccataggcacaaaaaggcaatacttaattggcaataaaagtaatgagttgcaaaatcaagcaatataaattaattaaaaagtaatgattgtgcttctttattctttaattattttcatttcattaattaactctagtgttaactgcattttttattatctcaagcaattccatagtgtgtatctttgtttatagtgaagcttttctcttatgtactt

SEQ ID NO: 2807 - DNA, 901 bp, Glycine max
cacaggcgtccgaaggtgacagatgacgacaccacgggacttatttacgtaaaagaaaagaaaaaaaaaaaactaaaaggaataattatacataaattttggatttcgcacgtagctagctacagaagacaaaggagccttgagtctcgagatcttgtcagatcggaacgcaaccgcaactgccaccgagattgctttgtgtgttatgggaagggaagttactggcatacaggttatggaaaagaagccaaatggtgccatagcggcttcaaatggcagtttaagtgatagaatgcgtgtttctcccaaaattgcagcaatggttcaagcaatggatcatgagataaaggaatctgctgaagctaattcgtttgagaaacatcacgagaggaaagatagtttgagtgccaaaaacacaaaattaaatgctggcttgccagaagaggagaatgagaaatctgatcaggttccaagcccctctgctccacagccatctgatcaggttactgaaaagcatgtcacccatgcacaggctgttgatactgaagctgatgcaagtggtgtgaacttatctcctaaatctaacaatatacagtcgcctaattcctctaagaattcagagccaagctcacctttttcaccaaggaagtccttgcatcatgatgataagaagcaccatgatgatgaagataattggtctgttgcttcctctagcgttgcatctgcacgcactgccaaatctaaggtaactgtaggttcagcccctacttttagatgctcggatcgtgcagagaaacggagggagttttatctgaagttagaggagaaacatcgagctcttgaagaagaaaaaaaccagtatgaggcaacgaataaggaagaggaagatgcagccattaaa

SEQ ID NO: 2808 - DNA, 291 bp, Glycine max
catatataaattttggatttcgcacgtagctagctacagaagacaaaggggccttgagtctcgagatcttgtcagatcggtacgctaccgccaccgagtccgttttgtttgtgggtgtcgtgcgcgagattaattcattggcgtcacttagcttgggccacaagatgctttcaagcgttatgggaagggaagttactggcatacaggttatggaaaagaagccaaatggtgccataggggcttcaaatggcagtttaagtgatagaatgcgtgtttctcccaaaattgcgg

SEQ ID NO: 2809 - DNA, 1341 bp, Glycine max
ctcgaggaatcggctcgagcccggtcgctccactccgaagaaggttctcaattttcgagaaaccgccacgtggcttctggaagcagcaagtttggtctagaaagatcccaaggagtcggtccgaacgaggatccacccccttccttgacgaacacagagacgtgtgttttggattctatttgtgccgtggtttgagatttagatgcaaataaatatataccctgtcttgtgccgtgtcccctttaagccaattgcaatcaaacaaagtttcggttattggtgttcatttttcttcctccatctttatcttaaacataacttgaactctccattccttaaattttagctacgagctagttccgacacagacaaagcaatggcaaagaccgagttagaggtgactgttgagagcaagaacaaagacctcaagcacctggggtttgtgaggattgctgctattcaaacatttgtgattgtgtcaaatctgtatgagtacgcaaagcagaattctgggcctttgagatccgtcgtaggaacggttgagaacactgtaaccaccattctcggtcctgtctgcaacaaattcaaggacgtccctgatgatgtccttgtttttgttgacaaaaaggtggatgaagcttcccacaagttcgatgagcacgctcctccttttgctaaacacattgcggatcaagccaagggtgtgattcagaaagtgacttgtgaggcagggaaagttgcaagtgaagctcaatctggggggtcaagagctgctgttcattttgttgctacagagtcaaagcattttgtgttgataaattcagtaaagttgtggaatggactcacccactatccaccattccatgcattggcagagatagcagttcccactgttgctcactggtcagagaagtacaatcatgtgatcaaggccatgactcaaaagggttacagtttcgttgggtatctacctttgattcccattgaagagatagccaaggcattcaagcagggagaggctaacttgaaaggagataatgcagcctctgaggaacagagatcagaatcatctgattctgattaaattgagctttacttcttcaaaaaatttgcttttgagtgaccttgttttatgggttgtgacattgtggggcatgtggtggttgtgactagaaaaacttttaagttagtaaagacttggcaagactgtgtaactaatccatgtagaaaatagggtttatgtaaatgaatggtgcggatgataatgctcataaaggttgcttcctccttttatatgcatataatataataatattgctcagtgctctttattgtgacgac

SEQ ID NO: 2810 - DNA, 452 bp, Glycine max
tgactcaaaagggttatagtttcgtcgggtatctacctttgattcccattgaagagatagccaaggcattcaagcagggagaggcgaacttaaaaggagataatgcagcctctgaggaacaaagattagaatctgcatctgattctgattaaattcagctttacttcttcaaaaaaatttgcttatgagtgaacttgttttgtgggttgtgacattcctggccaatgtggtggttgtgactagaccttacttttaagcttgttaaggcatggtaagactatgtaattaatccatgtagaatccatgtagaagatacgatttatgtaaatggtgcggataatgctcataaaggttgcttcctccttttgtatgcatataaaatattgcttagtgctctttattgtgactacatttggtggttgcaaacctgataagcacaatactgggtattt

SEQ ID NO: 2811 - DNA, 469 bp, Glycine max
cacagacaaagcaatggcaaagaccgaggttgcttggcataatttatatacattagaggtgactgttgagagcaagaacaaagacctcaagcacctggggtttgtgaggattgctgctattcaaacttttgtgagattgtgtcaaatctgtatgagtacgcaaagcagaattctgggcctttgagatccgccgttggaacggttgagaacactgtaaccaccgttctcggtcctgtctgcaacaaattcaaggacgtccctgatgatgtcctggtttatgttgacaaaaaggtggatgaagcttcccacaagttcgatgagcatgctccttcctttgccaagcaccttgcggatcaagccaagggtgtgattcagaaagtgatggagcaggagtgcagaactattgggggaaactgtgtatttgtgtcaatcaacattggtgtaatcggagtggatgataccattacat

SEQ ID NO: 2812 - DNA, 467 bp, Glycine max
  unsure (1)..(467): unsure at all n locations
aattcggtcgaatcgagagctcgagagatcgagcggtcacgtggcttctggacgcagaagtttggattgnnagataccaaggagtcggtccgaacattgatccattcccttcattgacgaacacagagacgtgtgttttggattctatttgtgccgtggtttgagatttagatgcaaataaatatataccctgtcttgtgccgtgtcccctttaagccaattgcaatcaaacaaagtttcggttattggtgttcatttttcttcctccatctttctctaaaacattaattgaactctccattccttaaattttaccaacgagctagttccgacacagacaaagcaatggcaaagactgaggttggctggcataattatatttttggcttttcttaaaattccttctttgattgatgtttttttctcttcccatggaggtggagattgtaatttattgaactaaagta

SEQ ID NO: 2813 - DNA, 356 bp, Glycine max
caagtttcagtttttggtgttccatttttcttcctccatctttatcttaaacataacttgaactctccattccttaaattttagctacgagctagttccgacacagacaaagcaatggcaaagaccgaggttgcttggcataatttatatacagtatttggtttttcttaaaattccttctttgattgttcttttattttttctctctcttttcccatggaggtggagagtgtaatttattgaactaaaaaagtaacttgtgattcaactttatgcctgcagttagaggtgactgttgagagcaagaacaaagacctcaagcacctggggtttgtgaggattgctgctattcaaac

SEQ ID NO: 2814 - DNA, 919 bp, Glycine max
  unsure (1)..(919): unsure at all n locations
ctttgcagtgcgcctagtgattctagtgacgcaactcgacaacagagtgaatatttttggcgcttcaacgtcgtcgttttacttctcctttgtttgattagggttttttcgcttcttctatcttcactctgttacggtgcaacctaacagcctccaaatccaatggcttcagagaagaaactttcgaacccaatgagggagataaaagtgcagaagctcgtcctcaatatctctgttggcgagagtggagatcgtctcaccagagccgccaaggtgttggaacaacttagtggccaaaccccagtgttttccaaagcaaggtacactgttcgttcctttgggattagaagaaatgagaagattgcatgctatgtcactgtcagaggtgacaaggcaatgcaacttttggagagtggtttgaaggtgaaggaatatgaacttctcagaaggaacttcagtgatactggttgctttggctttggtattcaggagcatatcgatttgggaatcaagtatgatccttcaactggtatttatggaatggatttctttgttgttctggagcgtcctggctatcgtgttggacgtcgccgaaggtgcaagtcccgtgttggaattcagcaccgtgtcacaaaggaggatgctatgaagtggttccaggtgaaatatgagggagtgatccttaacaagtcccaggctattctttagttagattgagttcactttaggagtgtgttatcagttttgtcaactatagctcgatctttctgtgatagcatctttatacttgacgcaagctctgaatcaatgctactcattaccaacatcacgactacgcacatgtactacacaatacaccctactagacgacgcttgtattgctacaagcatctngtgagacccctgtctactcaacacg

SEQ ID NO: 2815 - DNA, 1051 bp, Glycine max
gatctcattaacgtttcttctcttctctctttcacactgccgctgcatcaatggcttcagagaagaaactttcgaacccaatgagggagataaaagtgcagaagctcgtcctcaatatctctgttggcgagagtggagatcgtctcaccagagcctccaaggtgttggaacaacttagtggccaaaccccagtgttttccaaagcaaggtacactgttcgttcctttgggattagaagaaatgagaagattgcatgctatgtcactgtcagaggtgacaaggcaatgcaacttttggagagtggtttgaaggtgaaggaatatgaacttctcagaaggaacttcagtgatactggttgcttcggctttggtattcaggagcatatcgatttgggaatcaagtatgatccttcaactggtatttatggaatggatttctttgttgttctggagcgtcctggctatcgtgttggacgtcgccgcaggtgcaagtcccgggttggaattcagcaccgtgtcacaaaggaggatgctatgaagtggttccaggtgaaatatgagggagtgatccttaacaagtcccaggcaattgtttagttagattgagttcgctgtaggattgtgttatcagttttgtcaactatagctcaatctttctgtgatagtatgttaattttgaggcaggttttgaatcaatgtttatcatttcagtttcgtcatgaagcatatggattagccctgattaaacggcacttttattgcaaagaactcctgaaccccgcgttatgcaatgatgttgggcaatttacttagttttctttgcaaccaaataagagaagcatgtgcaaaacattttacttgcgagggccagaactagctaaatatacctcaatacggtggaaaatactcctccccatttactgatgtagacacaatgtgttcatatctcctactggaaaattccactaaatggaggagtattttccactttttaaatgtattttctcttggttaaaatttattgaaaatatcaaattttgtgggtgttatat

SEQ ID NO: 2816 - DNA, 697 bp, Glycine max
cctacgcgtccgccctttgtttggggttttctgattaactctttcttctcataactctgccgccgcaacagccccaaatccaatggcttcagagaagaaactttcgaacccaatgagggagataaaggtgcagaagctcgtcctcaatatctccgttggcgagagtggagatcgtctcaccagagccgctaaggtgttggaacagcttagtggccaaacccctgtgttttccaaagcaaggtacacggttcgttcctttgggattagaagaaatgagaagattgcatgctatgtcactgtcagaggtgacaaggcaatgcaacttttggagagtggtttgaaggtgaaggaatatgaacttctcagaaggaacttcagtgatactggttgctttggctttggcattcaggagcatatcgatttgggaatcaagtaagttgaagaacccttggatttttatgctggtgttttgacttttgcctgaggtaaacattttaggacttaagggaagctgattatttgatatgggttgtggtgtgcacaatgcattttcaaaattttggatatgacataacatatctcttcccctttaatgctgcattccagttttgacttgaaccaaatgctaactggtttataaataatgggaagttaagaattttccttttggtggtttggactttggtgcttatatgaa

SEQ ID NO: 2817 - DNA, 501 bp, Glycine max
ccgaaattaaaaaattaactcttttcacaaactctaattatctttacattttgttttcttaatttattgttttgttatgaattggattgcccgctgcttcatttcaggcttcagagaagaaactttcgaacccaatgagggagataaaagtgcagaagctcgtcctcaatatctctgttggcgagagtggagatcgtctcaccagagccgccaaggtgttggaacaacttagtggccaaaccccagtgttttccaaaggttagttctcaataagtttctaaatgggtagtattcagggatgctggtaatggccatagatctcacatctgtgttcattgaaacgttttgttgatcattttttgtgattctatcattttcctaaaatatagattgctgctggtgaagtgattttgaagaattcctaaggtttacggtagtttattttagtgtttttaatggagagtttgttttgtttttttaattgtattgtcaacattcaaa

SEQ ID NO: 2818 - DNA, 819 bp, Glycine max
aggggtttgattagggtttgtcattagcacttcttcttttcacactgccgctgcaacaatggcttcagagaagaaactttcgaacccaatgagggagataaaagtgcagaagctcgttctcaatatctctgttggcgagagtggagatcgtctcaccagagccgccaaggtgttggaacaacttagtggccaaaccccagtgttttccaaagcaaggtacactgttcgttcctttgggattagaagaaatgagaagattgcatgctatgtcactgtcagaggtgacaaggcaatgcaacttttggagagtggtttgaaggttaaggaatatgaacttctcagaaggaatttcagtgatactggttgcttcggctttggtattcaggagcatatcgatttgggaatcaagtatgatccttcaactggtatttatggaatggacttctttgttgttctggagcgtcctggctatcgtgtgggacgtcgccgaaggtgcaagtcccgtgttggaatccagcaccgtgtcacaaaggaggatgctatgaagtggttccaggtgaaatatgagggagtgatccttaacaagtctcaggcgattgtttagttagattgagttcatttcaggggagtgtttttatcagttttgtcaactatctttctgggatagtatcttaattttgaggcaggttttgaatcaatgtttctcatttcagttttgtgatgaagcacatgtattaacaatagcccttttaaacgacacttttattgcaacaagaacatgtgagacacttttaaatgcattctctttattgattattt

SEQ ID NO: 2819 - DNA, 429 bp, Glycine max
gggttttgattagggtttgtcattagcacttcttcttttcacactgccgctgcaacaatggcttcagagaagaaactttcgaacccaatgagggagataaaagtgcagaagctcgttctcaatatctctgttggcgagagtggagatcgtctcaccagagccgccaaggttcacttcactcattgctcccgcttttttttttttttaaatttttaatttcggttttcctccttgcaggtgttggaacaacttagtggccaaaccccagtgttttccaaagcaaggtacactgttcgttcctttgggattagaagaaatgagaagattgcatgctatgtcactgtcagaggtgacaaggcaatgcaacttttggagagtggtttgaaggttaaggaatatgaacttctcagaaggaatttcagtgatacg

SEQ ID NO: 2820 - DNA, 411 bp, Glycine max
aactctttcttctcataactctgcccccgccaccgccccaaatccaatggcttcagagaagaaactttcgaacccaatgagggagataaaggtgcagaagctcgtcctcaatatctccgttggcgagagtggagatcgtctcaccagagccgccaaggtgttggaacagctgtgtggccaagcccctgtgttgtccaaaggtatgatccgttaactggcatttatggaatggactgctttgatgttctggagcgttctggctatcgagtctgacgccgacgtatgtgcaagtcccgtgttggaattcagcaccgtgtcacaaacgaggatgctatgaagtgtgtccatgtgaaacatgatgcagagatccgtaacgagatccaggcgatcgttcagctagagcgagttcac

SEQ ID NO: 2821 - DNA, 296 bp, Glycine max
taactctttcttctcataactctgccgccgcaacagccccaaatccaatggcttcagagaagaaactttcgaacccaatgagggagataaaggtgcagaagctcgtcctcaatatctccgttggcgagagtggagatcgtctcaccagagccgctaaggtgttggaacagcttagtggccaagcccctgtgttttccaaagcaaggtacacggttcgttcctttgggattagaagacatgagaggaatgcatgctatgtcactgtcagaggtgacaaggcgatgcaacttttggag

SEQ ID NO: 2822 - DNA, 1965 bp, Glycine max
ggagagcgcaatcgtatcgtatcgctctcttatatcttcagacaaaacaaaccaaaaaccaaaccacccccaattcccgaaaccctaaccctacctcctcgcccccatgcccatggctaagaaacgaaagcttcgatcctccaacccagaacccaccaaacccgtcgagccacagcaacagaaccatgagactgttgaactcgaccaacagcaacccatccccgaaccaaccctagaagactccaacaccatggccgtcgacgaaccaaaacaggaagaagaagaagaagacgaagaaccccaaaacgccgaaagcgaagaagaggaagaggaagctgaggaacaacaagaggagcggccaccagaaaccctagaagagcaacaggatccagaaaccctggcggctgcaaaccacgccgaagtgaacggcggcaatgaaggaaacaacgaagaagaggaagaggaggatctcactctcgaagaagagcccgtggagaagcttctggaaccgttcacaaaggagcagctccactctctcgtcacgcaggccgtggatatgtttcccgaattcgtcgatagcgtgcgccggcttgctgacgtggaccctgcgcacaggaaaatcttcgtccatggccttggctgggacgccactgccgatactctaaccgccgtgttcgggaaatacggcgagatcgaggattgcaaggccgtcaccgacaaggtctccgggaaatcaaagggttacgcctttatcctcttcaagcacagggacgatgctcgcaaggcgctgaaacaccctcaaaagaagatcggaaaccgcaccacctcgtgccagctggcctccgccggccccgttccggctccaccgccgagcgtgaccccggtgtctgagtacacccagaggaagatttttgtgagcaatgtgaatgctgagattgatcctcagaagctgcttgaattcttcaagcagtttggggaggttgaggatggtcctcttggtttggataagaacactgggaaacctaagggttttgcgctttttgtgtacaagtctgtggagagtgccaagaaggctttggaagagcctcataagaactatgaggggcatactttgtattgtcagaaggctgttgatggtcctaaggggagcaaggggtatcatcatcaacagcattctcattctcatcatcaccatcaccaccatcagcctcattatcagaggaaggagaagaacaagtattcctccggtggtggtggaccatcacatggaagtggtcatttgatggcgccctcgggctctgctgtggggggtttcaaccctggtgtgccggcccaggggttgaatccggtgcttggacaggcgttgactgcattgattaatcagggagctggattggggcttgggaatctgcttggagggcttgggggtgccccagttaaccaggcgggacctcctgctccgtatgcgaatcagcctgctatggggtatgggaaccagccagcaatgcaacccggataccagaatcctcaaatgggacagggcagtggtgtgagacctcatcctggtgctggtgctccttacatgggtcattagataccctcataagatgcatcaatcatttagttttggactctgctgattcttctgaagtaccaggcactattcaaatgcatcttttcatttgtaattttagttactatttgattaattaagaaccagattctgaaacttgtattttttcccttatcttagtagatttcccccctgacatatttttaaaatcttgttatacctcgtattcctttatggaatattgaggaacgggtgaattttggggaagagaaaactttatgataataattttttaagtgtgttgtggaccattttttcttcttctgaacttccaattctgtttcacttggcttcgcaaaagataactgactcgagtataagttgcttgtttt

SEQ ID NO: 2823 - DNA, 531 bp, Glycine max
ttcttatcgctctcttatatcttcagacaaaggaggccaaaaaccaaaccacgcgggattcccgaaaccctaaccctacctcctcgcccccatgcccatggctaagaaacgaaagcttcgatcctccaacccagaacccaccaaacccgtcgagccacagcaacagaaccatgagactgttgaactcgaccaacagcaacccatccccgaaccaaccctagaagactccaacaccatggccatcgacgaaccaaaacatgaacaagaagaagaaccgcaaaacgccgaaagcgaacaagaggtagaggaagaggaagaggaagaagatgaacaacaagaggagcaggaaccagaaactcgagaagggcaaccgggaccagaaaccctagaagctgcaaaccaagccgaagcgaacggtagcaatgaaggaaacaacgaagaagaggaagaggaggatctcacactagaagaagagcccgtggagaagcttctggaaccgttcacgaaggagcagctccactctctcgtcac

SEQ ID NO: 2824 - DNA, 419 bp, Glycine max
ctttttcgtgggatcgtatcgtatcgctctcttgggtcttcagacaaaacaaaccggggaaccaaaccacccccaattcccgaaaccctaaccctacctcctcgcccccatgcccatggctaagaaacgaaagcttcgatcctccaacccagaacccaccaaacccgtcgagccacagcaacagaaccatgagactgttgaactcgaccaacagcaacccatccccgaaccaaccctagaagactccaacaccatggccatcgacgaaccaaaacatgaacaagaagaagaaccgcataacgcccaaagcgaacatgaggtagaggaagaggaagaggatgaagatgaacaacaagaggagcaggaaccagaaactcgagaagggcaaccgggaccagaaaccctagaagctgcaaacc

SEQ ID NO: 2825 - DNA, 1098 bp, Glycine max
ctatgacgtcgcattgccccctacctaagcttcggattccggttcagggttaaccctttttcaccttccccctttgtttctcaacatcattctcctcattcccctacctacccccaattttcccttctgtatttctctttttcaattctcgatttcccttctcccttttgtgtcttcataatccagatcctctcttcgatctagggtttctggcttaattaacaatcaaatgtttaaggaagaatttctatgacgattcgcaaccccatgcgacgaatccgtctcctccactccttctccgtcgtcttcctctactggttctacgttttctcatgaactaactccctctcaatcccctaccctaattcctccaatttccccattttttttctaattaatcagatttgcaaaatcctaatttctctatcctaacaaaaaccccaaattcaaacaaatccaatggcttcgattccgcgtccggcgagttcgggatcttcggagggaggaggagatccggctgcgatggacgagagaaagaggaagcggatggagtcgaaccgcgagtccgcacggcgatcgcggatgaagaagcagaagctgctcgaagacctatccgacgtagcgagtcgccttcaaggcgagaacgtgcgcttagcgcagagcataaaggcgaaggaggaagcgtacgttgagatcgaagccgcgaacgacatcctcagagcacagaccatggaactcgccgaccggttaaggtttctgaactccattctcgagatcgccgatgaggtcggcggcggtggtgaatccttcgagattccgcagattccagaccctctcttcatgccctggcagatcccccaccctatgatggcaacgccgcctgacatgttcttccatggaaatgaaggcctgtttgcttgatagtacttctaattaggtttattgttgatgttcgttccctagtgttgttggtgaataaagacagggaatggtggtgtatggtgttaattaatgagtcatgtcgcgtgttggtgtgctttttgtgtgtgtgtgttttagatccgtgactatgttttgtgtatgcagtatcgttacatg

SEQ ID NO: 2826 - DNA, 625 bp, Glycine max
aacctcactttttttctctataaaatccaacctaaacactctaagagaaccttctcccgataaaccttttttcaccttcccctttgtttctcaacatcattccccaatttccccttctgtattgtttttcttcatttctctttttcaatccccgatttcccccttcttcgttttgtgtcttcataattcagatcctctcttcaatctagggttcctggcttaacgaaatcaaatgtttaaggaagaatttctatgacgattcgcaaccccatgcgacgaatccgtctcctccactccttttccgtcgtcttcctctactggttctacgtcttctcatgaactaaccccctctcaatcccctaatttctccaacatttccccctttttctaattaatcagatctgcaaaaccctaatttccctaaccctaacgaaacccccaaatccaatggcttcgattcaacgcccggcgagttcgggatcgtcggagggaggagatccggtgatgtacgagaggaagaggaagcgtatggagtcgaaccgcgagtccgcccggcgatcgcggatgaagaagcagaagcagctcgaagacctaaccgacgaagtgagccgattggaaggcgaga

SEQ ID NO: 2827 - DNA, 2291 bp, Glycine max
ctcgtgattctcaccttcgttaacgtaaaaatcctaactttgtttcctttatcaattggggtccccttgaaaaagacgccatccctcatcattattcaattcggtgaaccaggccaggtgtccatgtgaactcctttactctctctccctctctattgcccttcaaacacagacacatatctgcacttcacaaccctccaaaccacatttaactatatataaaaccatcattatgaacatggggtttactctcttctcattctgacccttcttcttcttcttcatctacattagtagttttgttattcattattcattctcagcttcttttcttctggggggcaaaaggggtcacttttcagatccgagattgagctcctttacccatcatcatcatggagctcctcgggtacctgaatcagggtcacccttctagaggaacaacacttgttattactctttcattggtgctttcgacacttgtgtccttctccactttcacacatgccttctcttcttctgcgtttccggaactgaatcctataaaacctaggcactcacgtcttctcaggagtgccgtgcaacatgaaactcctacatcacagctttctgaaatatggtcacctctggaaagccaaggatggaaaccttatgttgaatcaaataagccaacattaccagagaagtccgagggatatatccaggtctttcttgatggaggtttgaaccaacaaaggatggggatatgtgatgcagttgctgtggcaaagatactgaatgctactctggtgattccataccttgaattaaatcctgtatggcgagattcaagtcattgatgtattgaaggatgatatttctatagttaaagagctgcctaaagagttcagctggagcacaagagagtactatggcttggctattcgagaaacccgaatcaaggctgcgcctgtgcatgcatcagcccattggtatctggagaatgttttgcctgttctacagagttatggtattgctgcaatctctccattttctcacagactgagttttgacaacttgcctatggatattcaacacctacgctgtaaagtcaacttccaagctttaacctttgttcctcatatcagagcacttggagatgcccttatcagccgccttcgctatcctgaaggctcagctggagaaatgggctccaactaccttcaagaggtcactggtgcaggtgctaggaaaaatgcagggaaatttgttgttctacacctccgatttgataaggatatggcagcccattcggcctgcgattttggtggaggaaaagctgaaaaattggcccttgcaaagtatagacaggttatttggcaagggagggttcttaattcccaattcactgatgaagagttgaggagtcaaggccgttgccctatgacaccggaagaggttggattgttgctagcagctatgggatttgacaatagcactcgtttatatcttgcctctcacaaggtctatggtggagaggcaaggatttcaactttgagggaattatttcctctgatggaagacaagaagagccttgcttcatctgaagagcgttctcagataaagggaaaagcttctctattagctgcacttgactactatgttggcttgcatagtgacatcttcatctctgcttccccaggaaatatgcacaatgcattggttggacaccggacatacttgaacttaaagactataaggccaaatatggcattgatgggtcagcttttcctgaataaaaccatagagtggtcagagtttcaggatgcagtggttgaaggtcaccaaaatagacaaggggaactaaggctgaggaagccaaaacaatcaatatatacgtatccagctcctgattgcatgtgccaagcttagtagtgactagtagtagtatatacttaaattattattattgctcacggatgtagcctgtgtattttatagttcggtgtcttattatttaacattatatctagtgaaaataaaaaagctaccggggtttgttatgatgctcttgataagagtgcttgagagagttgggtattgtgtgggagatgtatttatcatatgacggcccccttagcgggagtcagccatattaatatatataattttacaattcaataacatgagccatattattgtttattattcaattatatcagattataccatagttttcatactaatggagttactgtaggaaaacattattgtatggtgtcttaactaatattttatcatatatggaattg

SEQ ID NO: 2828 - DNA, 635 bp, Glycine max
gagcattcaacacctgtgaccctttctttattcttcgtgattctcacctttgttaacgtaaaaatcctaactttgtttcctttatcaattggggtccccttgaaaaagacgccatccctcatcattattcaattcggtgaaccaggccaggtgtccatgtgaactccgtgactctctctctctctctaatgcccttcaagcccagacacatatctgcacttcacaaccctccaaacaacatttaactatatataaaaccatcattctgaacaccatgtttactctcttcttctctcttcttctacattagttcttgttattcattattcattctcagcttcttttcttctggggggcaaaaggggtcacttttcagatccgagattgagctcctttacccatcatcatcatggagctcctcgggtacctgaatcagggtcacccttctagaggaacaacacttgttattactctttcattggtgctttcgacacttgtgtccttctccactttcacacatgccttctcttcttctgcgttgccggaactgaatcctataaaacctaggcactcacgtcttctcaagagtgccgtgcaacatgaaactcctacatcacagctttctgaaatatggt

SEQ ID NO: 2829 - DNA, 325 bp, Glycine max
cagctcctgattgcatgtgccaagcttagtagtgactagtagtagtatatacttaaattattattattgctcacggatgtagcctgtgtattttatagttcggtgtcttattatttaacattatatctagtgaaaataaaaaagctatttccactcctattcctaatggagtttgttatgttgttcttgataagagtgcttgagagttagttgtgtattgtgtgggagatgtatttatcagatgatggcattcttagcaggagccagccatattattaatttataattttataattcaataaaaaaaaaaaaaaagggcggccgc

SEQ ID NO: 2830 - DNA, 385 bp, Glycine max
aatcaaataagccaacattaccagagaagtcagagggatatatccaggtctttcttgatggaggtttgaaccaacaaaagatggggatatgtgatgcagttgctgtggcaaagacactgaatgctactctggtgatcccataccttgaactgaatcctgtatggcgagattcaagctccttcatggatatatttgatgtggatcatttcattgatgtattgaaggatgatatttctatagttaaagagttgcccaaagagttcgcctggagcacaagggagtattatggcttggctattcgagaaaccagaatcaaggctgcacctgtgcatgcatcagcctactggtatctggagaatgttttgcctgtcctacagagttatgg

SEQ ID NO: 2831 - DNA, 239 bp, Glycine max
atcattatgaacatggggtttactctcttctcattctgacccttcttcttcttcttcatctacattagtagttcttgttattcattattcttcatactcacacagcttcccctgaggggcataaggggtcatttttcagatccgaggttgtcctcctctacccatcatgatggagctcggatacctgaatcagggtcagccttctaagaggaaccacaccacttgttcatcttccattg

SEQ ID NO: 2832 - DNA, 942 bp, Glycine max
agatacaagagtggtggatccgtttaccgcagcaaacactcttctgagttctgagctagcgaggttgcaatggcgattatctccgatttcaacgaagaggagcagaaacccactcactcttcaccaccgcaaccccaatcctcttcctcttcctcttcctcttcgttcagtgctgcttttgaccggtcaaaccctatcgcttttctggagagagtcttccagttcgtctccgaacacagcgactttctggcgacggagagcgccgagaaggagatagcgttgctggtgcgcgccgccgggaagaagaagagggagtttctcaagtcggagagagaaaaggccgagaagaagaagagagaggacctcaaggcctcggaggagagggaaaaatccgacaagaggttgaaggaagagaaggaacccaaagccgaagacaccagcaaagacgaaagcacctccaaagttccaaacaaaggtaatggcttagatttagagaaatactcttggactcaatcacttcaagaggttaatgtgaatgttccggtgccaaatggaaccaaatcgagatttgttaccgttgagataaagaagaaccatctaaaagttggactcaaaggccagcctccaattattgagggggagttttataagtctgtcaagcctgatgattgctattggagtatagaggatcagaatgcaatttctattcttttgaccaagcatgatcaaatggaatggtggaaatgtctagtgaaaggtgatcctgagattgatacccaaaaggttgaacctgaaaacagcaaacttggtgacctggatcctgagactcgacagactgttgaaaaaatgatgtttgaccagaggcagaagtctatgggcctccctaccagtgaagagctccagaagcaggaaatgttgaagaaatttatgtcgagcatccgg

SEQ ID NO: 2833 - DNA, 290 bp, Glycine max
gagtgtaaatattgtttcaagaaaaagaataagagtgaagagtcgatccagttatcacttaccacagcaaacactctagagttctaagcaatggcgattatctccgattccaacgaagaggagccgaaacccgctcactcttcaccaccgcaaccccaatcctcttcttcttcgtcttcgttcagtgctacttttgaccggtcaaatcccatcgctttcctggagagagcttcgaattcgtctccgaacagagcgactttctggcgacgcagagcgccgagaaggagata

SEQ ID NO: 2834 - DNA, 575 bp, Glycine max
ggtcggctcgtcccttctgccggcgattcgctcctgtcctgatcctgctactgccggcctttctggaccagtttgtccattttgccgtggcaccattcttcaattactggttgctaagattaacaaaatcagtgatacagaagtggaatctggccctatgaagccaaggagatcacggaaatcaaatttcagtgaaggaagcagcagcttcaagagcttgtcggccatgggctcatttggaaggattgctggccgcaattccgggaagattacagatgaaaagcaatgggaggtttcttgaagcttgataactgttgatgattattttaattccaagtcggcaagaaattatatgaatgatggttttaatttctgtggaatagctgcctatattggtatcttatttgtattcattttgtcactattgtccaaagatcactaagatcatgagagacaacagtttgtgatcggtttgagttttttacttctgtaatctgattctcagttggaattggagaatcagaacagttatgtaatttttttcccccaaatatcaaatatagtatgcatgagtt

SEQ ID NO: 2835 - DNA, 1209 bp, Glycine max
  unsure (1)..(1209): unsure at all n locations
agctgcccgaacgtgtgagcgggcacgtccaaactccaagaagagtccaatacttagcttctctatctatcaccctcagagtcgaaccagacacacttccacgtcaccaccaccaccgtggaaggtggagcgtgaggctgtttccggtaacctctcccggcggcgctgagtggtgatcaaggaaatgggtcagacgctgagttgcgtgcaacagcacacgaggaccatggtgtgctcttccctgcacttgcaagtggagaattggaggttgttgaggccatggtggaggaagaccccactgtgttggaacacaccattggctgtgacaggctttctcctctgcatgtcgctgctgccaatggtcggatcgaggttctttccatgttgttggataggtctttcaatgttgacgtattgaatcgccataaacagaccccgttgatgttggctgtgatgcatggaaagactggttgtgttgagaagcttattcatgccggagcaagtatattgatgtttgattctatacgtcggagaacttgcttgcactatgccgcttattatggaaatatagactgccttaaggtcattctttctgctgctcattccacacctgttgcagattcttggggatttgcaagatttgtcaacataagagatggaaacggtgccacccctctgcatcttgcagctcgccatagacggtcggaatgtcttcatgcccttttagacaatggtgctcttgtttgtgcttcaaccggtggatatggttaccctggaagcacgccacttcatatggctgcccgtggtggttctttggactgtgtccggatgctgcttgcttggggagcggatagacttcaattagattcttctgggaaaataccattcgaaaagcaatgataaagtggtggtgattattttgattccaagccggcagnaaattatataaatggtggttttaatttctgtttgataactgcctatattggtatcttatttgtattcattttctcacaattgtccaaagatcactacggtcatgagagacagctgcttgtagtcggtttgagttttttacttctgtaatctgattctcagttggaattggagaatcagaacagttatgtattcccccccaaatatcaaacatagtatccatgagttaaaggtagttttcttcaatgctttaactagagtaaaaaaaaaaaa

SEQ ID NO: 2836 - DNA, 697 bp, Glycine max
acgaggggatttgcaagatttgtcaacataagagatggaaacggtgccacccctctgcatcttgcagctcgccatagatggccggaatgtcttcatgcccttctagacaatggtgctcttgtttgtgcttcaactggtggatatggttaccctggaagcacgccacttcatatggctgcccgtggtggttctttggactgtgtccggatgttgcttgcttggggagcggatagacttcaattagattcttctgggaaaataccgttctcagttgccctgaagcacaagcataaggcatgtgctgccctgctggatccgtcgtcagcagcaccgcttgtttggccatccccattaaagttcatcagtgagctcaatcaagaagcaaaagccttactggaaaaggccttgctagaagctaacagggagagggagaagaccatactaaaggagactgacatgcctccatccccactgaattctgagagtgaagatgataacattgcctctgaggtacaaaattttcctttcttgactgcttcagagtttagatttataagttttactttgatgcatttcaatgtttagtttggttaaagattatatactttggtagaagtcccaagaatgttctttgggacccatgaatgttatacaatactatttcatctgcaatgtagtctttggtaggttagtcact

SEQ ID NO: 2837 - DNA, 817 bp, Glycine max
attaaagttcatcagcgagctcaatcaagaagcaaaggccttactggaaaaggccttgcaagaagctaacagagagagggagaagaccatactaaaggagactgacatgcctccatccccactgaattctgagagtgaagatgataacattgcctctgaggcctgcggtatggagttatgttgcatatgctttgaccaagcatgcacaattgaggtaagaccctgtggccatcaaatgtgtgctcattgcaccctagcgctatgctgtcacaaaaagcttgatcctgctactaccggcctttctggaccagtttgtccattttgccgtggatccattcttcaattactggttgctaagattaacaaaatcagtgatacagaagtggaatctagccctatgaagccaaggagatcacggaaatcaaatttcagtgaagggagcagcagcttcaagagcttgtcggccatgggctcatttggaaggattgccggccgcaattcagggaaaattacagatgaaaagcaatgataaagtggtggtgattattttgattccaagccggcaggaaattatataaatggtggttttaatttctgtttgataactgcctatattggtatcttatttgtattcattttctcacaattgtccaaagatcactacggtcatgagagacagctgcttgtagtcggtttgagttttttacttctgtaatctgattctcagttggaattggagaatcagaacagttatgtattcccccccaaatatcaaacatagtatccatgagttaaaggtagttttcttcactgcttt

SEQ ID NO: 2838 - DNA, 485 bp, Glycine max
attcccggtgtcgacgccacgtcgtctcgtcttcgcttctccttctcaatcttgtaattctatttcctccaccataatgctgcgcaagcttgtgtgagggccacgcaagaacaagcctggcacagttcccgttcacctcaacgtctatgatctcaccccaatcaacggctatgcctattggcttggccttggagtctaccattctggggttcaagttcatggattggaatatggttttggtgcgcacgagcacgacacaacggggattttcgaagtccaacccaaacactgccctgggttcactttcagaaagtcaattttcatcggaacaacagatctgggtccgaaggatgttcgagcattcatggagaagctggctcaggattactccggcaacacctatcatctcatttccaagaattgcaaccatttctgtaacgatgtttgtctcaaattgaccggaaagtcaatccctcgttgggtca

SEQ ID NO: 2839 - DNA, 1459 bp, Glycine max
gtaagatagtgaaagaggtgtgagtgggtgataataagagtgagaccttatctgaggcaatggcatcatcacagacatggggtctctgcctctgcaattcagcgggctcaagtgctccccactctcatcttcttctctcttctccaaaccttctctttggacccaacaatcccaaaagcgcgtttcaattaccattgcgaactcaatagcaatagccaatgcgcagaacaaagagagagcgaggcttaagaaactcttcgaagaagcctacgagagatgccgcaatgctccaatggaaggtgtttccttcaccatcgaagacttcactgctgctcttgacaagtacgacttcgattctgaagttggcggcaagattaaaggcactgtgttctacacagataacaatggagcagttgttgatatcactgcaaagtcttcggcatatttgccactgcaagaggcgtgcatccacagggttaagcatgttgaagaagcaggcttagttcctgggttcaaagaggagtttttgatcattggtgagaactcaatagatgatagcttggtcttgagtttaaggtctcttcagtttgaccttgcatgggaacgttgtagacagcttcaagctgaagatgtcacagtcaagggtaagattgtgggggtgaacaaaggtggagtggtggctgagttggaagggcttagagggtttgttccattgtctcaaatatcaacgaactcaaatgtagaagagcttcttgataaggagcttcctcttaagtttgtggaggtggatgaggaacaatctagacttgtcctcagcaaccgcaaggccgtagctggcaaccaggcacagctaggaattggatcagtggtcactggctctgttcaaagcctgaagccatatggtgctttcattgacattggtggaattaatggcctccttcacgttagtcagatcagtcatgaccgtgtaactgatatttcaactgtgcttcaacctggtgacatattaaaggtgatgatcttaagccatgaccgagagagaggtcgagtaagtctttccactaagaagttagagcccacacctggagacatgattcgcaatccaaagcttgtctttgagaaggcggaggagatggctcagacattcagacagagaatagcccaagcagaagctatggctcgtgcagacatgctaaggttccagcctgagagtggattgactatcagcggtgatgggatcctgggaccatttacttcagacttgcctgaagagggactggatttgagtgaggtaccaccagctgaagaatcatgattcagaattgcgtgctcttttctttctgtttgcttacatttttataatattgtttgtaactaactatcaattgttgccgaacgatgtcttgatgccaatgtattattgtgagttaaataaatagaactaattcatattatcact

SEQ ID NO: 2840 - DNA, 439 bp, Glycine max
cccacgcgtccgcccacgcgttcgcccacgcgtccgcccacgcgtccgaggtgatgatcttgagccatgaccgagagagaggtcgagtaagtctttccactaagaagttagagcccacacctggagacatgattcgcaatccaaagcttgtctttgagaaggcggaggagatggctcagacattcagacagagaatagcccaagcagaagctatggctcgtgcagacatgctaaggttccagcctgagagtggattgactatcagcggtgatgggatcctgggaccatttacttcagacttgcctgaagagggactggatttgagtgaggtaccaccagctgaagaatcatgattcagaattgcgtgctcttttctttctgtttgcttacatttttataatattgtttggaactaactatcaattgttgccgaacgatg

SEQ ID NO: 2841 - DNA, 1395 bp, Glycine max
gagattctctttctcgagatcatctttctttgagttgcgtgtgcaaagaaaagtggtctataaaaatctgctctcagtcccacttcccaattcattttcattccacgaaatatggcttcaactcatctgcttcccctggcaaccttcttcttagttctctccgcttcttatctccagattgctggggcgaaagcacaaccgttgactagtctcaagcttaactctccgatccttcaggagtctattgctaaagagatcaatgaaaatcctgaggcaggatgggaggctgctataaatcctcatttctccaattatacagttgaacaatttaagcgccttcttggagtcaaaccaacgcctaagaaggaactgagaagtacacctgctatatctcacccaaagtcattgaaattgccaaagaattttgatgcaaggacagcttggtctcagtgtagcactattggaagaattctagatcagggtcactgtggttcttgttgggcatttggtgctgttgaatcattgtcagatcgcttttgcattcattttgatgtaaatatctctctctctgttaatgaccttcttgcatgctgtggctttctgtgtggatctggttgtgatgggggatatcccttgtatgcgtggcaatacttagcccaccacggtgttgtcactgaagagtgcgacccatattttgatcaaattggctgttctcatcctggttgtgagccagcttatcggactcccaagtgtgttaaaaagtgtgtaagtggaaaccaagtttggaagaagtcaaagcactatagtgttagtgcatacagagtcaactctgatccccatgatatcatggcggaagtttacaagaatgggccagttgaagttgcatttaccgtttatgaggattttgcttactacaaatcaggagtttacaaacacatcactggttatgaactaggtggtcatgcagtaaagctaattgggtggggaacaactgatgatggggaggactattggcttcttgcaaatcagtggaacagagaatggggagatgatggttacttcaagatccgaagagggacaaacgaatgtgggattgaagaggatgtaactgctggtttgccttccaccaaaaacctcgtcagagaggtgactgatatggatgctgacgctgctgtttcattctgaatgcaaatatattattaccttaccaattatattctgtatgggtattgtaattgaaaaatcagaactagatgttgcctgtagtctgaacctctctgttttaaggggaacaatctaaattatgattacgatgttcaaagatgttaagcttttgttgtttatctgttatacgaaataagagattaactgctatagttactattcagtagttgg

SEQ ID NO: 2842 - DNA, 838 bp, Glycine max
  unsure (1)..(838): unsure at all n locations
aaagaaaaacatcagtcatctaatattattgttcaatgaagattcaattattcaaccatgatattttgtaggatcatacaggtggaaatggcaagtctagtaaaagaaagaagccaacacaatcttcagaatccaagtctggttggactgcaatgaaatgcaaacctccacaagcttttttagcagcttcccaagcttcagcttcactagttgtctcaggagttttcttataggtggaatatatataccgggtagaaattccactagaaagaatcaggcgagcacgagcagtatccgcttccaccgcgcaaacctccaatccatttatcaaagctgccaatgctgtagaattagaagacgcaacagacagtcctgggatcaatgtcttgtcatcaatgtcaagacccaataaatcaagatctagcccagaaccacaaactcctctctcaaatgtggatatctcctctcgaacagctttaaaataggtcgttatttaaagttagagaggtatatcctaggagaacaatttaaagcattaaacatacactttaatcatcttgtactaaaaaaatcatgggatgagaccattataatctatgtaacattgctagtacctaaaatttaaaatagaacatacaaataancagcattgataaataaaatgaaaaacatgtgccttagaccctgagtatcagaagagggagaaagagaaggctaccattcatttgtcaagcaattgtgaaagaaattgcatgaaatttcggcctctatacctgagtaaggtaattggacaaaagcccatctttccccataaagaatgtctggaagttctgttgga

SEQ ID NO: 2843 - DNA, 882 bp, Glycine max
tcatcaatgtcaagacccaataaatcaagatctagcccagaaccacaaactcctctctcaaaggtcgatatctcctctcgaacagctgagtaaggtaattggacaaatgcccatctttccccataaagaatgtcaggaagttccgtgggaaaaaggattatcaagtgccaaaagaggtttggatccttcttgaaatccaggatgttttttatatacggtctcatagcgctcctctagccatagaattattgacacgcaccgtttactaggaacaggccttatgcgaagctcattacacgcatttgtaataattgtctgcatctgcgacctaaagaagcgaatgtttctgggcaacgggacacccaactggtcactaacggcaacaatagcatccttcagcgtaatgctgttaatgacgttgttcgggaaatacttggtgtactgcaacgacagcgtcttgtcgcacacaacgagctcccaaatcttcttccctctgacgtcgagaatgggcctggagcagaagtccagttcccactccgtgatgctctcagggtcagtttctgggtccacgtagctcagttccgcagatgggtcatcatcatcatcttcttcttcttcttcttcttctccgagaaccgcttcgggtgcttctttctgggtgctttcggacaccgaacggggtcggaagtggagcagtttggggtggctgttggagggagtggtgcatggaattgtgatgcgttttgatggagtggtgagtttggaatgtttgaacgttggggattttattctaacagggttgaagcttagagtggccatggctgtggtatggttatggttatggttattctgtgtgagtgtgatgagtgttttgagggagag

SEQ ID NO: 2844 - DNA, 843 bp, Glycine max
cccacgcgttcgaggacgcgtgggctttgttgctcttcttcgatacaatggctaggagctggcttattgacattggaggatttgcaaagaaagtgaaaagcactactctatcttcagctgatcaaatcaaagattgtggggcatatcgtgaatgttcaaactgttcttatcatattgataacagtgatgtttctactgaggggcctggctttcctcttggtgtaaagtttgagccttctgatgtagaactcttagaacatttagcagcataatgtggcattggaaacactcagcaacacatgtgtatcaaggaggtcatcccaacactggaaggagaccaaggaatttgctacacacatccggaaaatcttccaggtgctaagaaagatgggagttatgtccatttctttcacagaacaaccaatgcatatgctactggtcaacgaaagcgtcgaaagattcatcatcaacagggtttgactgaagagcatgtgcgctggcataagactggcaagacgaaagctataatagaagatggagcacataagggctttaagaagatcatggttctctacgtaagatccagtgagaatgggtccaggtcttataaatccaactgggtaatgcatcagtaccatctagggactgtagaagaagaaaaggaaggtgaatatgtggtttcaaaaattttctgtcaacagcaaaagcagactgagaaaaatgagggcaatccaatggctgaagatcctgacaatataatatcacgaacaggtcctagaactccgaaaccaaatccccccaatccacctcgtgcgggaaaatctgttgattgtgatgataaca

SEQ ID NO: 2845 - DNA, 553 bp, Glycine max
agagggtgcaactttggaccctgttacaccaagccaatagccaagttattgcttgctatcagaactcagaagaggttgaatcatggagatgaaagtaaaggagaggattggtacagtattctgtaaactgtagttgattgaataatatgatagtacctatttataaaacaagagtgatagtcttctaattgctcacctaactaacatctaagttctaactaactcttctaaaagaatgacagctgcatgagttgagtatgttctctgatactatatataactataaattgcctaattacatgtataatttccacttatttatcaatgaaacggcatgcagaaaaaataaaagaccacagtaatgcagatgtaacggtagacgaatatcatcggtataaggaggatattggaatcatgaagtacatgaatttggatgcttatagattctccattgcttggtctagggtactaccaaaaggaaagcttagtgcaggtgtaaacaaagaaggaataaactactacaacaacctcatcaatgagctactggctaatg

SEQ ID NO: 2846 - DNA, 889 bp, Glycine max
tggtaattaaagagacgatgagttgattcgagatggggaacaactgaagatggggaggattattggcttcttgcaaatcagtggaatagtgaatggggagatgatggttacttcaagatccgaagagggacatacgaatgtgggattaaagaggatgtaactgctggtttgccttccaccaaaaacctcgtcagagaggtgactgatatggatgctgacgctgctgtttcattcagaataatttgtgtgtaactgcagctgatcggcctattaaagagatattagaaaaggaaaaaaaggagctggcttattgacattggaggatttgcaaagaaagtgaaaagcactactctatcttcagctacatgtttatcaatgagttcatcccaacactggaaggagaccaaggaatttgctacacacatccggaaaatcttccaggtgctaagaaagatgggagttatgtccatttgtttcacagaacaatcaatgcatatgctactggtcaacgaaagcatcgaaagattcatcatcaacagggtttgactgtcaattgcccgttttaatgtataatttccacttatggcatgcagaaaaaataaaaaatgtaagtaatggagatgtagcagacgactcatatcatcggtataaggaggatattggaatcatgaagtatatgaatttggatgcttatagattttccatttcatggtctagggtactaccgaaaggaaaacttagtgcaggtgtaaaccatgaaggagtaaactactacaacaacctcatcaatgagctcatggctaatggtcataatttattgacccaaatttcataactatgtattattattattattattattattattattattattattattattatt

SEQ ID NO: 2847 - DNA, 479 bp, Glycine max
ttattggtggatttgcaaagaaagtgaaaagcactactctatcttcagctacatgtttatcaatgagttcatcccaacactggaaggagaccaaggaatttgctacacacatccggaaaatcttccaggtgctaagaaagatgggagttatgtccatttgtttcacagaacaatcaatgcatatgctactggtcaacgaaagcatcgaaagattcatcatcaacagggtttgactgtaaattgcccgttttaatgtataatttccacttatggcatgcagaaaaaataaaaaatgtaagtaatggagatgtagcagacgactcatatcatcggtataaggtatatatggtttcaatagtagtattttagaagtagttttcatatgaataaagaatataattgatatgtagactcatgatagactggtccacctgttttaggaggatattggaatcatgaagtatatgaatttggatgct

SEQ ID NO: 2848 - DNA, 274 bp, Glycine max
cggctcgagatttgttagtcacagactggcaatatagagtatatttgctaattttctctacaggagctggcttattgacattggaggatttgcaaagaaagtgaaaagcactactctatcttcagctgatcaaatcaaagattgtggggcatatcgtgaatgtccaaactgttcttatcatattgataacagtgatgtttctactgagtggcctggctttcctctgggtgtaaagtttgatccttctgatgtagaactcttaaaacatttagca

SEQ ID NO: 2849 - DNA, 2207 bp, Glycine max
ctcatgttcttgagagagatctcaaaccccaagaaatctattattgaataattatattaagtttttgtttgttaatttatacatgtggtgtataaaagaaaataatagttgtagatattataattagatatagattggttttccgggaaaaggtggttctactagaacaaaaaagcgattaatttagaagaaagcaacgaataaagagggggtgttggggccttgagccgattaatcttaatttaggttatccagatatttgctggtgttgtttcttatcccatgcgtaattgagcagctgcagcccacagcgttcccctctgattgaaaactcagtctcctctgcctgcttcatccttccttcctttcttcattcactggcacccttccgagtcaagcataagatcaaagggagaccctttcttttccttgtctccccctgcatgcaaccatgaagattttcaatccctccaaatgctttctccagaacgtggtgtgtccttccgacaccctcctcatcattaaaaggatgaagcccttcgatctgggtctctcccacctccaccaattccaattcagatcctacaattgaaaaagaatacaacaatccctagaccacgttagcacccacaccgcttccttcactaccacaccccagccccgacatggaccggcgcacgggcagcacccgtaacatcctcttcaacaagtacgagatagggaaattgctgggacagggcaacttcgccaagtgtaccacggcagaaacctcagcaccaacgagagcgtcgccatcaaagtcatcaagaaagagaagctcaagaaagagcgactcgtcaagcagatcaagcgcgaggtgtcggtgatgagactcgtccgccatccccacatcgttgaactcaaggaagtcatggccaccaagggaaaaatcttcctcgtcatggaatacgtcaaaggcggtgaactcttcgccaaagtcaacaaaggaaaactcaccgaagatctcgccagaaagtacttccaacaactcatcagcgccgtcgacttctgtcacagccgcggcgtcacccaccgcgacctcaagccggagaatctcctcttagaccaaaacgaagacctcaaagtctccgacttcggactctccacgctgccggagcagcgccgcgccgacgggatgctcctaacgccgtgcgggacgccggcctacgtggcgccggaggttctcaagaagaagggctacgatgggtcgaaggctgatatatggtcctgcggggtcatcctctttgctcttctttctggctatttgccctttcaaggtgagaatgtgatgagaatttacagcaagtctttcaaagccgattatgcattccccgaatggatttcccctgcggccaaaaacttgatctccaatttactcgttgtggacccgcaaaagaggtattccattccagacatcatgaaggacccttggtttcaaattggcttcttgaggcccattgcgttttccatgaaggagtctgcgcttgaagataacattgatttcagcggggatgatgttcctagtcctggtagtgatgatggtaatagcagcagcaacaacgaggatggggagttgacgggggctaagcctgctcgtccgtcttacaacgcttttgagataatctcgtccttgtcgcatgggttcgatctgaggaatttgtttgagacgaggaagcggtcgccgtcaatgttcatttccaagttttcggcttcggcggtgatggcgaagctggagggggtggccaagaagctgaactttagggtgacggggaagaaggagttcgtggtgaggatgcagggggcgacggaagggaggaaggggaagctggccatgacggtggaggtattcgaggtggcgccggaggttgcggtggttgagttcgccaagtctgctggagacacgcttgaatacattaaattctgtgaggaccaagtcagaccttctctcaaagacattgtgtggagttggcaaggggacgctaattgccaccagtaacgcaatggagttactttccgttatgtcttaatcttttgcgtgtttccattatcacaatccgtttgggtttagatttattacccatgtaatgtaatattcttagttcttatttcctcctccaagcttatttatttatgactttaatttgtattccaaaaaaaaaaaaaaaaaa

SEQ ID NO: 2850 - DNA, 1333 bp, Glycine max
tgcgaagacctcatagtctccgtcttcggactctccacgctgccggagcagcgccgcgccgacggcatgctcgtaaccccgtgtgggacccctgcttacgttgcacccgaggtcttaaagaaaaaaggttacgacggttcaaaggccgatttatggtcctgtggggtaatcctcttcgctttgctttgtggctatttacccttccaaggtgagaacgttatgagaatttaccgaaaggctttcagagctgaatatgaattcccagaatggatttctccgcaggccaagaatcttatttcgaatctcctcgttgctgatcctggcaagaggtattccattcctgatataatgagggatccttggtttcaagttgggttcatgaggccaatcgcgttttctattaaggagtcttacgttgaagacaacattgatttcgacgatgtggagaacaaccaggaggaggaggttacaatgaggaaacctgccaggccgttttacaacgcgttcgagataatatcgtccttgtcgcacggctttgatcttaggagtttgtttgagacgaggaagcggtcgccgtcgatgttcatttccaagttttcggcttcggcggtgatggcgaagctggagggggtggccaagaagctgaactttagggtgacggggaagaaggagttcatggtgaggatgcagggggcgacggaagggaggaaggggaagctggccatgacggtggaggtattcgaggtggcgccggaggtcgcggtggtcgagttctccaagtccgccggagacacgcttgaataccttaatttctgtgaggaccaagtcagaccttcgctcagggatattgtgtggagttggcaaggggacgctaattgccaccagtaactattcaattcaatttagattattgcagcatgtaataaatatctggagtttgggatgttgattgaacataataagaattaagaatcatcttgattgacccttcttagttcttattatttcctcctcttaagcttatgactttctgttgtatttctttttaagattaagagttaagacagaggacatcccgttaatctgtatgatgtcagaatttgttctatgctagactactcgatctggtatttcagattgttcctgcaaaacggcaaaagagattgctaaattggtattacaagtccaagccagttactattcaaaagagattggtaatttggtggcattgtaagtccaagcctctctggttattcaaaaatgtgtatctgtacagcaatatattgattgccataggtttctagtataaaatagctctctaggtattcaaaaa

SEQ ID NO: 2851 - DNA, 435 bp, Glycine max
ctcatccagaactgaggtgagacacacccttctctcttccaaattccgctgctacttaatttttccttcttcgtcatcatacatgcatgatgaagattttcaacccttctgaatgctttcttcggaacgtggtatgtccatcggacaccatcttcctgaaaagcataaatatttctcatcgtctccatcctctcctggcccaattagctacaccacaattcacttaatttactgtaccactatacttgttctccgatggatccggaaaaccaactcacctctaacccgagaagcataatcttgaacaagtacgagatggggcgggtcctgggccaaggaaacttcgccaaagtctaccacggccgaaacctcaacaccaacgagagcgtcgccatcaaagtcatcaagaaagagaagctcaaaaaggaacgactc

SEQ ID NO: 2852 - DNA, 465 bp, Glycine max
atctactcattcccatcacacaccatcttgttcctaccagtcccactgggtattcttttttactttgcatcttcttcatcatacatgcatgatgaagattttcaacccctctgaatgctttcttcggaacgtggtatgtccatccgataccatcttcctgaaaagcatcaatctttcccatctgggtgtttcccatctctacctattcagaatgtccattctctcctggcccaattagcagctacactacaccccaatacaacactatacttcttctcctatggatccacaaaaccaacacccccctaacccgagaagcattatcttcaacaagtacgagatggggcgggtcctggggcaaggaaacttcgccaaagtctaccacgcccgaaacctcaacaccaacgagagcgtcgccatcaaagtcatcaagaaagagaagctcaagaaagagcgactcgtgaa

SEQ ID NO: 2853 - DNA, 540 bp, Glycine max
accgcgttcccctcacgccttaagcgctgcttttgcttttgcttcctccaacttgaaccctctctcctctcctcatacccatttcttcattctctggcaccctatttttggccttgttccgcatctcctacccctctcctctgctgcatgcaaccatgaagattttcaacccctccaaatgctttctccagaacgtggtgtgtcctttcgacaccctcttcatcattaaaaggtttaagcccttcgatctgggtctctcccacctccaccaattccaattcctatcctactattgaaaccaaatccctcgttcatctcacccacatcgctatcttcattcaccacaccccagcctccaaatggaccggcgatcccatcccacgggcaccgtcagcacccggaacatcctcttcaacaagtacgagattggaaaattgctgggacagggcaacttcgccaaggtgtaccacggcagaaacctcagcacaaacgagagcgtggccatcaaagtcataaaaaaggaaaggctccagaaagaga

SEQ ID NO: 2854 - DNA, 501 bp, Glycine max
tttagggtgacggggaagaaggagtttgtggtgaggatgcaggggacggaggaggggaggaaggggaagctggcgatgacggtggaggttttcgaggtggcgccgaaggtggcggtggcggagtttactaagtctgccggagatacgttggagtatgttaagttctgtgaggagcaagtgaggccttccctcaaagacattgtttggagctggcagggtgattgatactaataataactccaacagtagttactaagtcatttctcatttctgtgtcttttttttttatagtactagtactttctatgatccatcatggtcgtggtttaatttagtttgtctttgatttgcttaatttgatttcatacatactatgtaaatttggactgtggagtttgtgacggtgtttgatttgaatatactacactacagtagtatatatatatactagcaaaaataatcccgcaaatcatggaaaagtgaaaacattgttgttcactt

SEQ ID NO: 2855 - DNA, 1445 bp, Glycine max
cgcgcgccgcgcaaagcgcaaagcgcagttgttgctctttgaactcgaacgaagttctccgaagtcgaaacactcgttcgattcgctgaactctgaagttaatttttgttgcgaaaatgtcggtggcgaagaagttgattagatgcgtcatccttgacttggacggcacgctgctcaacacagatggcatcgtaggcaacgttttgaaggttatgttaggtaaatacggaaaggaatgggacggaagagaagctcagaagataattggaacgacgccgtttgaggccgctgctgcggttgtgcaagattatcaacttccctgctccgccattgaattcctctccgaaatttcgccactcttctctgaccagtggtgcaacattaaagcacttcctggtgctaataggttggttaaacatttgaagagtcatggagttcctatggccttggcgtcaaactctccaagggaaagcatcgaagccaaaatatcctatcatgatggatggaagaattctttctctgttataattggtggagatgaagtaagaacagggaaaccttcccctgaaatattccttgaagctgctaggaggttaaacatggagccttccagctgtcttgttattgaagactctctacctggggttactgcaggaaagactgctgaaatggaagtagttgttgtaccatcacttccaaaacagtcgcatctctatactgcagcagatgaggtgatcaattccctacttgatttgcgactcgaaaagtggggtctgcctccatttgaagattgggtggagggaactttgcccgtagatccctggtatattggtggtcctgttgtcaagggatttggtcgtggctcaaaggtacttgggatccctacagccaatttatcaacagagggctattcagatctcctttcagagtatcctgcaggtgtttattttggttgggctggattgtcggcaagaagtgtttttaaaatggtgatgagcattggttggaatccatatttcaacaacaaagaaaaggctatagaaccatggttactccatgactttaatgaagatttctatggggaagaactgcggcttgttatagttggttacatacgtcccgaggtcaatttttcatcccttgaaagcttggtagctaaaattcatgaagatcgaagagttgctgagagggctcttgatcttcccttatattcaagttttaagaatgattcgtatttgagaagctcttagtacaattttttttatcccttagcttcttgtcgaataaaaccctggtgttaattgttgtaagtgcaaaatccagttattcaactcgaaagcagtacgcatattataccctatgattcataatcatgccaatgcaatgtgatttggaacatgcataaagaaatactgaaaaaaaataagagtcattgtttgcatttt

SEQ ID NO: 2856 - DNA, 1306 bp, Glycine max
tatcgagccgattcggctcgaggcgattctggaaaataagatggaacgattacaaagagtatagagggaagggagggcaaagccaaaggggtttcgttgtgttgtgttactccgccagcggtagagatgagctcagccgatacctgtcaatgcgagttctgctgagtctgtcaaagaacctgttatagggtcaagtctagaagtaaaacaggatgatgctgaaataaaagctcaagttgatgccatgtgggaacaaatgaataaaggagtatctaataagaccctcaacaaatttacaagcaagcctaattccacttccaagaaaactgcaaaaaagtcatcttctaactggatgtcttatttggccttggcaccgaaggcaactgaatcccttgggcaaggtgcttccaagaatggacctggcattctgcagagcagtacaagtgatgaagccaagaagcttgctgctgctgctcttgcagcagtgaaagatgatgctgccatggctgcctcaagcagggggaaacttgtgattactgaggttcgggactttgctggtcaagaaattgaagttaaaaagcttgtagattctgactcaaaggaggcaatggaaagagccaaagctcctccaccttctgcagtggatactgtccttgaacaaatcaagaagaaacagaagctcagtgtactggataagaccaaaaaggactggggtgaatttaaggaagaatagaggctggaagaagagcttgatgcttataagaagagttctaaccagtatttggacaaggtttctttcttacagcgagcagattaccgtgagtttgagcgtgagagagatgcgcgactggctttgcaatccaggaagcgaccagataatatgcaagaggatgactgaaggtagttgaagactggagttactacctttggagaattatgtatggttttgtagtgagttatagttcctgggaaggtcttggtctctcaaaagaggtaaaagacctttgatcacattaaatggggtattgatggattttgaggtttgagatttgaaatgcttttcaatgacatggtactatatgtggggggtaaaaatagggtgctagagagaaacaagtataaattttagactgacattagttcattcccgttccttgagagcctcagaagacattcactactcgctgaaggtagttgcaaagaactcattttgtgtctgtccattatttggctgattgaattctcctctaaagtaaatatcgggacacgattatcttgcaaagcaattcgaacttagtttcaagac

SEQ ID NO: 2857 - DNA, 862 bp, Glycine max
tacgaacatcatttagaaccatgtctttctctaccaaattgcctttggtcctattattttcatcccttttcatccatgcatctttggctgagatggtgtgtgaggacctgccaaaggaagtgtgtgctttctcagtagcttcatcagggaagaggtgtttgttggagactgagaaggcagccgacggtggcgtcgagtaccaatgccggacatcggaagtggtggtggagaggatggcagactacatagagacagaccaatgtgtggaggcatgtggggttgataggaactctgttgggatttcatctgatgccttctttgagcctcaattcaccggcaagctttgctctcctgcatgttaccagaagtgccccaacattgttgaccttttcttcaacttggctgctggagagggggtatttttgccagaactgtgtgaaaagcacaagaccaaccctcgtcgtgccatggttgaacttgtgagctcaggagctgcccctggccctgtttctgacgtgtcagaggccattattgcatcagcacctgccccttctgccctgtaattttggtcccttgaaatttcactctccttttgcagagatggtgtgaaattgagggagacatttaccattattattattgttattgtgtcactatattagaaaatggagagtatattgcttcatttttatgggttgagttccgattaatgtaacggtaatcaagagttgcgcgtggtgttgataggtttatgttatgttgttgttttccaagtttctcaaattttggaattggatttgtttatgcttagtatattcgtttatgaactagtaataatgtgaaatatgtcttaatatgtgct

SEQ ID NO: 2858 - DNA, 528 bp, Glycine max
tcaacaatgttggggcacttctggtaacatgcaggagagcaaagcttgccggtgaattgaggctcaaagaaggcatcagatgaaatcccaacagagttcctatcaaccccacatgcctccacacattggtctgtctctatgtagtctgccattctctccaccaccacttccgatgtccggcattggtactcgacgccaccgtcggctgccttctcagtctccaacaaacacctcttccctgatgaagctactgagaaagcacacacttcctttggcaggtcctcacacaccatctcagccaaagatgcatggatgaaaagggatgaaaataaaaggaccaaaggcaatttggtagagaaagacatggttctaaatgatgtgtgtagtttggaaaatagagatattgttcttttgtgaaagagggagtaaaatgggttttgcgtatgtaatgaaaagaaaggaagaacaaattttggaattggattttttttcacattattactagttcataaacgaatatactaagca

SEQ ID NO: 2859 - DNA, 955 bp, Glycine max
gagtgtgaaccacgtgtggcaggtggggccctctgtcacggcggggaggattgacaggcatgactttggtccctccaatatgaattcgaagggcgttcttagcttcaacggggcgcaagttggtggtggtgccgtcgaccccattaccattaagaaaaatattcatggaattctaaatgctgtgagttggggcgttctgtttccccttggagtgatcatagcaaggtatatgagaactttcccatctgcagatccagcttggttctatcttcatgttggttgccaggtatctgcttacgccattggggttgctggctggggaactggcatgaaacttggaagcgaatcagtggggattcaatatagaagtcatcgctatattggaattgccctcttttgctttgcaacactacagatttttgcattgttcctgaggccagtgaaggatcacaagtataggtacatctggaacatatatcaccacagcgtcggatacagcatagttatcctgggaatcatcaacatcttcaggggctttagcatcttgcatcctgatcagaaatggaaatcaacttacactgcagttcttattgcacttggtgcagttgccttgttcttggaagtgatcacatggattgttgtgttgaagagaaagtcttacaagtccaccaaaacctatgatggatacaacaatggacaatctagggaagagccccttaacatataaaaatagagtgaacaaatttggcttggatgtgttctacttcttcccctccctctttcccgtccccttcttttacctttttttcttctatttatgacatatctttgtataatgcttgcgtatataatatagatttttcattctgtctttaaataggttgaagaaaacttttaccattgaaaacttattcacaagaggattgaattatgttctctccgtgcgggtgtttct

SEQ ID NO: 2860 - DNA, 1312 bp, Glycine max
cttcgagcgaatcggctcgagccctctccttaattcaacaatggcagataactcaattagcttattttctccatacaacaagatgggcaaattcaacctctctcatagggtggtattggctcccatgaccagatgcagagcgctcaatgggactccactggcagcacatgctgaatactacgctcagagatcaacaccgggtggatttctcatcactgaaggcaccttgatctctccaacttcttctgggtttcctcatgttcctggaatatactcagatgaacaggtagaggcatggagaaatgtagtggacgccgtgcatgccaacggcagctttatcttctgtcaactctggcatgttggccgtgcatcacatccagtgtatcagcctggtggggctccacccatttcgtccaccagcaaacccatatcagacaagtggaaaattctcatgcccgatggctcccatggcatctatccagagcctcgtgcacttaccacttctgagatatctgaaatagtgcatcattatcgccaagcagctattaatgcaattcgagcaggttttgatggaatcgagattcatggagcacatgggtatctcattgatcaattcttaaaggatgcaatcaatgatagaacagatgaatacggtggaccactagaaaaccggtgcaggttcttaatggaggtggttgaagctgttgtctctgccattggagcggaaagagttgctatcagaatttcaccagcaattgatttcaatgacgcctttgactctgacccacttgggctaggcttagcagtgattgaaagactcaacaatttgcagaaacaagtgggcacaaaactcgcttatcttcatgttactcagcctcgattcacacttttggcgcaaaccgagtcagtgagtgaaaaggaggaagctcatttcatgcagaaatggagaaaggcttatgagggaacattcatgtgtagtggtggctttactaggaagttgggaatggaagctgtagctgaaggccatgctgacttggtatcctatggtcgacttttcatctccaatccagacttggttttaaggcttaagcttaatgcacctcttaccaagtataacaggaagacattttacacccaggatcctgttataggatacacagattatcctttcctaagcaaagaaagtgagacaaaggagccaagggcacgcctttaactgtaatgttctttgactttttgaatactcatattgtcgtcatatgtataattaattggagtatcccaatctcaagtgaatgtcctcattatgaaa

SEQ ID NO: 2861 - DNA, 699 bp, Glycine max
cctcgagccgattcggctcaagttgttccttcacctttcttatattcaggaaagtaagatcatctgcatcgccgacgcttccaacaataacaatggccgataatgcaacaacgcaaggaagcaacaccctattttctccttacaagatggccaaattcaacctctctcatagggtggtgttggctcctatgacaagatgcagagcgttgaactggattccacaggcagcgcttgctgaatactacgctcaaagatcaacaccaggtggatttctcatcagcgaaggcaccttgatctcccccactgctcctgggtttccccatgttcccgggatatattcagatgaacaagtggaggcgtggcgaaacatagtggatgccgtgcatgccaaaggcagcattatcttctgtcaactttggcatgttggccgtgcctctcatccagtgtatcaacctggtggagctccaccattttcgtccaccagcaagcccataccggcgaggtggaggattctgcttcccgatgggtcctatggtgtgtacccagagcctcgtgcacttagcacttctgagatacctgaaatagtgcagcattatcgccaagcagcaattaatgcaattcgagcaggttttgatggaatcgagattcatggggcacatgggtatctcattgatcaattcttaaaggatggaatcaatg

SEQ ID NO: 2862 - DNA, 401 bp, Glycine max
ttttaaggcttaagctcaatgcacctcttaccaagtataacaggaacacattttacacccaagatcctgttataggctacacagattatcctttctttaatggaacaactgagacaaaattaagtaactagctaaggccatgcatgccctttaattttaatctccatatggctttttgaataataatgttcataacattcaaaactcttcagttgagtttatcctcagacaaacaaattaagtggttcattcacttgttagggtatttagatcttaggttaattagtctccggcattttgatttcattccaatttgtattcagtctttcattttgaataaaataatattaagttttttgccttaaaaaatatataattaatcgacatactcttgtttgact

SEQ ID NO: 2863 - DNA, 448 bp, Glycine max
cgtcggctggcagagacacagagggggagtagtgagaagagtgttatattgggtggcgaagaagaaaaggagcagcggtccatacaattcaggagcagcatataagaatccttcaacacaagaggcatcgcctacaacaatggcagataattcaactgctcaaggaagcaacaccctattttctccttacaagatgcctaaattcaacctctctcatagggtggttttggctccgatgacaagatgcagagcgttgaactggattccccaggaagcacttgctgaatactacgctcaaagatcaacaccaggaggatttctcatcagcgaaggcaccttgatctctctcactgctcctgggtttccacatgtgcctgggatatattcagatgaacaagtggaggcgtggagaaacatagtggatgccgtgcatgccaaaggcagcatt

SEQ ID NO: 2864 - DNA, 277 bp, Glycine max
ttctctcacacttgacaaagaggaggcaccatgacaagcactcttctgtctttgctcttcttgctcttctctcttctcactccaactctaatttcctcttcaccagttctaaaccctcaagaggtcgtacaagaggtcaacaagaaaatcaatggctctatagcaagacccagaaggaacttgggctacctctcatgtggtagtggcaaccccatcgatgattgttggaggtgtgaccccaactgggagcagaacaggcagaggctagcagactgcg

SEQ ID NO: 2865 - DNA, 695 bp, Glycine max
tcgagacactgcaaatcttgaggctgttagacaggaacttaaagaattacacccacatgatccccaaattgttgtcctcaaacacggagtgtggagagtaaaaggcattattcaggtttctagatctataggtgacgtatatttgaaacatgcacagtttaaccgggaaccacttaatgcaaaattcagacttcctgaaccaatgaacatgcccatcttgagtgctaatcccactattctttctcatcctctccaaccaaatgattccttccttatattcgcatctgatggtttatgggagcacttgagtaatgagaaagccgtggatattgtaaacagcaatccacatgcgggtagtgccaagagacttatcaaggctgctctacacgaagcagcaagaaaacgagaaatgcgatattcagacctccgtaagattgacaagaaggttcgacgccattttcatgatgatatatccgttattgttttattcttaaatcacgaccttatttccagaggcacagtgctagacccggcactttcaattcgaagtgctctcgatcactgacttgtatcattgtaagcagtcttgtaccgatacctgaagcatacgccattggtttgctaggtacctggctacaatatgccattcttgaggcacgataatttattaagttataacatattatttgaatttt

SEQ ID NO: 2866 - DNA, 405 bp, Glycine max
cgtgttcgttctttagtctttacccaaaaaggcaatgagagcgtcacagattctgttcgttggtttgctttggttcttctgcgtttatgccccttcttcgtttggcgcaaatgtcacgtatgaccacagagcattggtcatcgatggcaagcgccgtgtcttggtctctggttctattcattaccctcgtagcactccagagatgtggccagacctcattcagaaatccaaagatggaggacttgatgtgattgagacttatgttttctggaacttacacgagccagttcgaggccagtataactttgaaggtaagggcagatttggtcaaatttgtgaacgcagtagcagcagcaggtctatatgtgcatctccggattggtccatacgcatgtgctgaatgga

SEQ ID NO: 2867 - DNA, 391 bp, Glycine max
gttcaattcccttttgtctgaggtgtgtgcattcttgtttaactcctctttgttcctcagacatcccagaagggaaccaaaaataaaaaataaaaaaataaacacaatcaataaaggggagaaaacaaacatgtcattcacaggaactcttgataaatgcacagcatgtgacaagactgtctatgtggttgacttgttaactcttgaaggaattccttaccataaaaactgcttcaagtgcagtcactgcaagggatgtcttacgatgtgcacatactcctcaatggatggaattctttattgcaagacacattttgaacagcttttcaaggaatctggcaatttcagcaagaacttcgcaaagtcttctgagaagcaaaatgagttgaat

SEQ ID NO: 2868 - DNA, 926 bp, Glycine max
ctttccactgctcaaactctctctctctctcttctcttacacacacaagcactacaacattttctttggtctctcattttctctatagctagatgggttctggtgctttacaacttcttctgatcttgggtcttctggctagctcatgcttagcacaagccccaggtgctgcacccacacaaccacccactacaaccccatcaccaccaccaccaagatcagcacctgcaccagcacccaccccgccagcaacaccaccaccagcaacaccaccaccagcaacaccaccaccagcagcagcaactcctccaccagcaacatcaccaccagcaacaacaccaacgccaacaccaacagctgcacctacacctgcttcttctcctgcaacctcaccagtcccttccgctagttctccaccagcaccaggcacagccggacccgctcccggacccgcaggtggcgccgagccaccaccgccaccctccgccgcattctccgccagcaaggccttcattgctggctccgcactctctggaatcttcgtagccatggtcttggcttaaaaactttcgagagaagcattgtctttgatgattcgtccacgtggaggcttttccgcccttgatccttctttcccgcacacggacggacgagatccatttgatttgtttcatcctctggtcatatgttgagttagcggttttattttcttcgggttttgtgtttacttattttgttctagttttgtactttgttgatgtgtttgtccattcgagatttgggaggggtggtggccgttgatgatgattatttggtgattcatttgttttggtgttcacacgtgtatgtagattaccttgatcatttcattgtacatctaataattgaaagaataaaacagtttgtcattctttttaaaaaaaaaa

SEQ ID NO: 2869 - DNA, 421 bp, Glycine max
ttactctctctctctctctctctcttacacacacaagcactacaacattttctttggtctctcattttctctatagctagatgggttctggtgctttacaactccttctgatcttgggtcttctggctagctcatgcttagcacaagccccaggtgctgcacccacacaaccacccactacaaccccatcaccaccaccaccaagatcagcacctgcaccagcacccaccccgccagcaacaccaccaccagcagcagcacctcctccaccagcaacaacaccaacgccaacaccaacagctgcacctacacctgcttcttctcctgcaacctctccaacttcagaaccaagcccagcaccagtcccttccgctagttctccaccagcaccaggcacacccgggcccgctcccggacccgc

SEQ ID NO: 2870 - DNA, 392 bp, Glycine max
ctcgagccgaatcggctcgagcgctctctgcatcctttcttttctctctcctccgctttatctatgcctcttgcaccatatcaggatcctcctcctcttcgtaccgatcaaacacaagcaaagctctttcgtcttcttcggtgaatgattgatccctcatcatcatcatcatgggggtgttacaggagaagctctcgtcgttctacaagagccgctggctggttttcgtggccgcaatgtggctgcagtcgtgggcgggcatcgggtacttgttcgggagcatttcgcccgtcataaagagctctctgggctacaaccagaagcagctcgccatgctcggcgtcgccaaggaccttggcgacgcgtcggcttcatgacgggctgctctgcga

SEQ ID NO: 2871 - DNA, 1806 bp, Glycine max
ttctcacccacccacccacacacactctctccagcgtttctctcaattgggtattgtcatttactgtgtttaattgggatgtgttgctgttgcacaaattgagatattgccaagtgaaatgaaggccaggcacatctcattcttctcttgatatttctgatggcactcgctgcaaacaaagtttctagcagtcctattgtgactaaaagaacagctctttgcagatcacatgaaaaacactatttttcctcgtcaacaaggatcaatagaatacagttgtcaagacatagactggaacatggacatctgaactatagatgtctccacacacagagatcaaccttattcaatgactggttttggttctttaacggaaaacctgttggtttgatctccaagaaatcttctatctcatgtaaatcaacaggagcaaataatactgaagagaaagaaagtattacaacttatgatgatagggcacataccaaagatgagaaaaatgatcacactcttgttgttcatggcttggctgatgcttgtagattcgtttgtaatgatgcaaagtttctctcacgtggcataatgaggttggatgctcgtgcacgtcaagatgttgcttttcttgggactgaatttctcaaacttgatgctcgggcaagagaggatactgagaaaattgaccgtgatgtcaaggaaaaagctagccgacttagtcatattgctactatattgaaggataaagctcagtccagattaaaaaatgctgctgatgagcattggagtgatggggccttagaggctgatttacgtcttgctgacttacgtgctaagcaacgtgcgatggaagatccccttatggccttggagcttatcaaaaacatccacaacaggatggtgagcaagatgtataactttccacttcgcagagataaaggatccctttcagaaaataatgtaagaggtcgaataatgcttgaaaagaatggaaaaaccacaaattcctttcctggggatgtgaccacagaaaggattgctgctcttcaggaagcatactggagtatggcgtcagcactttctgaagcagatggaatcgattacactgatcctgaagagcttgagttgttggtcagaactcttatagatctggatgcaatggatggtaaacaaagtgtttctttattggcagagtgttctagttcccctgatgtcagcactagacgagctttagcaaatgcattggcagcagcaccatccatgtggactcttggaaatgcagggatgggggcattacagagactggcagaagatagcaacccagccattgctaccgcggcatccaaagctatttatgaactgaaaaaacaatgggaaatagaggaaggcgatagctggaggttcatgatggatgaaaacaccatggaagaaaaaggaagcatagaatctgataatgaagataccaaatgagaaatattttaaacattgcactgtacagcatagttgcctcccaagtatactaactagtataggattaacccacgcaatccctagaaagaaactactgctagtgtaagatgccaatatgctgtttatgtgcatcataaaatgcagttctttgctcatattcatagatcttagatgcacatttgtgattatactcgtttgtacgaaagaactcatattgctggctaaatatatatgatggaggcacctaacatgctgcatagtggggcttgttggtagtagtatagtaccaaggttgtttgaccattgtatacatgcaagcaatagagcaatttcgtccaaaaa

SEQ ID NO: 2872 - DNA, 621 bp, Glycine max
aagatagcaacccagccattgctgccgcagcatccaaagctatttatgaactgaaaaaacaatgggaaatagaggaaggcgatagctggaggttcatgatggatgaaaacaccatggaagaaaaaggaagcatagaatctgataatgaagataccaaatgagaaatattttaaacattgcactgtacagcatagttgcctcccaagtatactaactagtataggattaacccacgcaatccctagaaagaaactactgctagtgtaagatgccaatatgctgtttatgtgcatcataaaatgcagttctttgctcatattcatagatcttagatgcacatttgtgattatactcgtttgtacgaaagaactcatattgcttctgctacagcactttgggccgtttattgtcctaatatatatgatggaggcacctaaaatgctgcatagtttggtttgttggtagtactatagtaccaaggttgtttgagcattgcatacgtgcaagcaatagagcaatttcatcccttgatgttagattatttgaatattattagacaaaaggatttcattgttgaaataaacgtctactacaaagaaatgggattattttttttccttt

SEQ ID NO: 2873 - DNA, 780 bp, Glycine max
ggtttttaagaggactcagggcgtgtggggcggagtttcagccttacttcgttctcggggatttgtgggaatcctttcgggaatggagtgcttatggcgcaggagtgccacttgtactgaatgacaaggatagtgttgttcagtactatgttccgtatctgtctgggatccaaatttattcccagaatgtgaagccaactgtaaagtcaaggcaacttggggaggatagtgacagtgattttagggactcaagtagtgatggtagcagtgatagcgaacctgtacatggaaggggattgaggaatcttccccatctgtcagaagaggtgcctcaatggatgggcagattatctttgagagaccaccattcccttccaccagatgggttttctagtgatgatggagaatctgccaattctcagggttacttgatttttgagtatcttgaacgggaccctccttactgccgtgagcctttggctgataagataatggatcttgcttttcaattccctgaactggtgacccttagaagttgtgatatactaccatcaagttggatatctgtagcctggtatccaatttacaggataccaactggtccaacattaaaagatctcgatgcttgttttctgacataccattctctttatatgcccatgggaggttcacaaagagtccaggctcccatgccacgtcctactgacatggacaatgtccataggatgtctttacgtgtttttggtcgtgcgtcagatgggttcagaggatctctgtggg

SEQ ID NO: 2874 - DNA, 810 bp, Glycine max
  unsure (1)..(810): unsure at all n locations
gtccttccttcctctccttctctctctagaaattccatttcaaagagatgctcctatctgcatcttgctcccattaacgggagttttctttttctggtgatttgaggttggtgacaccattaagtaagggatagagctgtgttctccagtcctggttgatgagggtgctattggtgtggttttgttgatgtaagaagctgaatattgttgtctacatcagaatgggtgctgtttgttgtgttgctgccaaagataaaaccatacaaagtgcatctcccagtgaaatcttgcatcggaatattcgacattctccgacatggaacttccggtgggatcatcgagggcgtgtagctggtgaagatactgctgtaacttggttttctaacggtattagcgggaataatggattggagaataaaaatgaatcctcatatgtatcagaggatggagacccgttgcagaattatcaaattcaaaggaatagattgcaaaaatctccaatctctgaaggaactgctagaaatgtgataaattcatcttctgatcaaactatttcaaggaatgtctccataaaggtgagcatagaacaggtgaaggaattggctgaatcatcaactgtatcatgtccatatcccgcaaaacttccacattcattaccttctacttctttgtcagtatctactctgccatcccaaagtcacccacttccatccagctcaacaccatcaaggtggccctgccattccacaggacagcaactatcgcggcaggtttctgatagccgaatattgngatttaagacttctagca

SEQ ID NO: 2875 - DNA, 389 bp, Glycine max
gagtccttcccctttctctctctctgcaaaatactctctctctctctacaaaactctctctttctctctctagaaattccattttaaagagatgctcatgctcctctctttaccttgctcccgttaaagctacgcttccaactcggatagagctgtgttaactggtcctggttggtgagggtgctattggtgttgttctgttgatgtaagcagctgaatattgtttctatatcagaatggggtgctgtttgttgtgttgctgccaaagatagaactatacagagtgcatcagccagtgaaatcttgcatcgggatattcgacattctccaacatggaacttccgctgggatcatcgagggggtggtactggtgaagatactgctgtaac

SEQ ID NO: 2876 - DNA, 455 bp, Glycine max
tctaaaataaaaatgaagacattattcctatgctgtaaaactagattctaatcatattaaaatctagttttacagcataggaataatgtctctaaaataaaaatgaagacaaatattaaggagattgattgtgccttttttatatcatcaagaaatgtaatatattgtgggtggataaaaatctagcaaatgtagcacttctctttctagcgcccaaattgtgctgcctacaatgacaagaccaactcacctgcatagagtatagctgaactggtgaaggttcagtagaaaatagatacagatagctagtgagagtagaaccttagtgtcaatgtcattgatgcttaattggcaacgatgtaccatttatgacaatcataatgaaatcaatgtcatgagatattgttttaatcacaaggatttataaaacctatggtactgtatattggctagag

SEQ ID NO: 2877 - DNA, 990 bp, Glycine max
tggcaacaggtgcggctggggtccagaaacggccgggaagacgacagaagggggcatcaattcaaaatatatcatcaattataagcatgggtttgtggaacacaacgaatgcagtgtcttgccgctttcacaagtttggtgatgaccaaaagaatctggtcttccaaggtgatgccacgtcttcttccaggggcatagaactcacaaagttagacggtggaggaaaaccagtgggtggcagtgtggggagagtgttatactcttctccagtgcacctttgggaaagctctacagtggtcgcaagctttgaaaccgacttcaccttttccatctcatcagactctactactccaggtgatggccttgccttcttcattgcaccatttgacactaaaatccctccaaactctggtgggagcaaccttggactcttcccatcagacaatgttgttgctgtcgagtttgacacctaccctaatcgtgataagggggatccagattatagacacattggtatcgatgtcaactctattgtctccaaggcaactgctaggtgggagtggcaaaatggcaaaatagccactgtacatatcagctataactctgcctctaagagactcactgttgctgctttctatcctggcactcaaactgtgacactctcccatgatattgagctcaacaaagtgcttcctgaatgggttagggttggattatctgcttcaactggacagcagaaacaagcaaataccattcactcatggtctttagccttcaacaacagtatcggatgattctggtcattcactttccatcttaataaatctcatctagctatgctatgttgtgttgtgttgtgtgccaataattaaggacaaataaggagactagagtacgtactacctagtccactactgcttaattatgtacgtacgtgtctgttatttcacttttataagtaatgaatatgaatattatgttattaagagt

SEQ ID NO: 2878 - DNA, 811 bp, Glycine max
cggctcgagggctcgctcacctcacacactgcgctcactcgctagtcacgtcttaatcccaaaactgaacccaccctcttcgtccggttcacagttcactagcgttcgattcgtttctctccctctgtctctctatcatgggttcactcgaggccccaaccgccgcggaaaacggttccgctcccgccgccggcaacggaaaatccccctccgtcaacggcgcggaggcggcgctggagcccgacgcatcgaagcggcggagatcgtcggtgctcccactggaggtgggcacgcgcgtcatgtgccggtggagggacaacaagtaccaccccgtcaaagtcatcgaacgccgcaaggttcccaacgtcatccccaacgattacgagtactacgtccattacactgagttcaataggaggcttgatgagtgggtgaagcttgaccagttggatcttaattcagtggaggctgttgttgatgagaaagtggaggacaagggtgcgacagggttgaagatgactcgccaccaaaagaggaagattgacgagacacatgtagagggacatgaggagcttgatgctgccagtttgcgagaacatgaggaatttaccaaagtgaaaaatatagctactattgagcttggaagatatgagattgagacatggtacttctccccattcccaccagaatacaatgactgtttgaagctgtacttttgtgagttttgcctcaatttcatgaagcgcatagaacagcttcagaggcatatgaggaaatgtgatcttaagcatccccctggtgatgagatata

SEQ ID NO: 2879 - DNA, 1231 bp, Glycine max
gcgcagttagttgacggcgataacccgcaccaatacactcacagcgaggatgtgctactctgtgtgttgcctatgtttcatatctatgcgctcaattccattttgctctgcgggattcgttccggtgcggccgtgcttattttgcagaagtttgagatcactactctgttggagctcatcgagaagtacaaggtgacggttgcgtcgtttgtgccgcccatcgttttggcgttggttaagagcggagagactcatcgctacgacctgtcgtctattcgcgctgtggtcaccggcgcggcacccttaggaggggaacttcaagaagccgttaaggctaggctaccacacgctacttttggacagggatatgggatgacagaagcaggaccacttgccattagcatggcatttgcaaaagaaccctcgaagattaaaccaggtgcatgcggaaccgttgtgagaaacgctgagatgaaaatcgtggatacagaaacgggtgattcacttccaagaaacaaatccggagaaatttgcataagaggggcaaaggtcatgaaaggatatctaaatgacccagaggctacagagagaactatagacagagaaggatggttacacacaggagatattggtttcattgatgatgataatgaactcttcattgttgatcggttaaaggaattgatcaaatacaaaggattccaagtggctcctgctgagcttgaagcattgttgattgcccacccaaacatttctgatgctgccgttgtaggcatgaaagatgaagctgcaggggaaattccagttgcatttgttgtaaggtcaaatggttctgagatcgccgaggatgaaatcaagacatacatttcacaacaggtggttttttacaagagaataggtagagttttcttcacggactctattcctaaagcaccctcaggcaaaattctgcgaaaggtattaactgcaagacttaacgaaggtttggtggtggccaattaggtccataattgtgacagaggaaaatcgtggctgttttacttaccgtaccacaggcccttcctgttgtggtttttgttccaattttatatctcgttatcaatatatatatataatatgcaagtattgcatgaatttattcttgtgtaacttataatgttgtatatattggagaccagactctgaattacagcatgaacacattaaaattcagcaagttgttacgatctgt

SEQ ID NO: 2880 - DNA, 315 bp, Glycine max
  unsure (1)..(315): unsure at all n locations
aattcaacgtcctttggaacgcgtgtgattcgtataaagcagtcacacatatcacataatgttcccgcagagttttaacattagtggcggtggtgccgggcttgaacaactgttgcagcctcatcacttcccatctccaatggaacaacaacaacaacgttccaggtggaaacccagcgtcgaggtggcacccaattgccctcgctgcgccgccaccaacaccaaattctgttactacaacaactacagcttgtcccagccgaagtacttctgcagaggctgcangcgatactggaccaaaggcggctctctccg

SEQ ID NO: 2881 - DNA, 1067 bp, Glycine max
cgtacgtatgctcgggtttctgctctgcggctactcggggtcgtcgcgtgtactttcttgcgaaacagaagggcgaaggggcaaacacaacttttttgtttttttgtagagcgagagagaaaaaaatgttggggatcttcagcagttccgtggtgtcgccgccggaggagctggtggctgccggcagcagaacgccgtcgccgaagacgacggcggggaagctgctgaaccggttcgtggagaacaaggcgtcggcggtgtcgctgcaggtgggagaacacgtgcagttggcttacacccaccacaacgagtcaccgtggcagcccagatcctttgctgttaaggatgagatattctgcttgtttgagggggctctagacaatttgggcagcctgagacaacagtatggactggccaagtcagccaatgaagtattgttggtcattgaggcttacaaagctttgcgtgaccgagcaccctaccctgctaatcatgttgttggccatctcagtgggagctttgctttcatagtttttgacaaatctacttctaccctctttgtggcttctgatcaatatggtaaggtacctctatattggggaatcactgctgatggctacgtagcatttgctgatgatgcagaattgcttaaaggtgcttgtggcaagtcacttgcttctttccctcaaggatgtttctactctacagctgttggaggattgatgtgctatgagaatcctaaaaataagattactgcagttcctgctaatgaggaggaaatctggggagcgactttcaaggtggaagggccagcagttgtcgtagccagacaatagattttcctttctgctggtgagatgccatatgatgattagtggaggagactgtaaaaggcatccatgagggccaatgtaattaaatggcatggggagtgatcactggaattgggaaatattaggggggtaactctgttcattagataaagaatttgctgtttctatcaatgtacagttacgcttttcaatctaataaaatctggttttggattctctaaaaaaaaaaaaaaa

SEQ ID NO: 2882 - DNA, 599 bp, Glycine max
tttaaagttaaccttagaactcatttgaacgaaatttcactgaaccaaatggtagttgtcctatagaatatctttaaaactagagtcatataggatgccaccaagattgtaattaaattccatttgggtaataatctcagggaatcatcctcgtgctcacttaatgtcctttatttacatgtaggaagcgcttctattgtcttttaatctaattaatttctgtttaattttcataccacttggtttccagtatttcttgcatgcataatcttgtgtattcagctctccacttccaattacttttactgattttcaaattggtgagatgatatatcaggtggaagggccagttgtcgcagccagacagtagactttcctttctgctggtgagatgctatatgatgattagtggagactgtaaaaggtatgcatgaggggcaatgtaattgaattggcacggggagtcatcactggaatggggattgtaggggggtaactctgttcatcagataaaggatttactgtttctatcaatgtacagttacgcttttcaatctaataaaatctggttttggaaactctaaaaaaaaaaaaaaaga

SEQ ID NO: 2883 - DNA, 1075 bp, Glycine max
ctcgagccgaaccggcccaatgaagattctggtgaatgcgtagaaaaggaaaataaagaaattagcgtgaaaaatgttgggtgtgttcagcagctccatagtgtcgccgccggaggagctcgttgccgccggcagccgtacaccgtcgccgaagatgacggcggcggcgctgcggaagtggttcgaggagaagaacccctccgcagtgtcggtggaggtcggagagcatgtccagctcgcttatacccaccagaacgagtcgccgtttcagcccagatcctttgctgtgaaggatgaggtattctgcttgtttgagggagcccttgacaatttgggcaacttgagacaacaatatggattggccaagtcaaccaatgaagtattgttggtcattgaggcttacaaagcattgcgtgacagagcaccctaccctgctaatcatgttgttggccatctcagtgggagctttgctttcatagtttttgacaaatctacttctaccctctttgtggcttctgatcaagctggtaaggttcctctttattggggaatcacagctgatggatatgtagcatttgctgatgatgcagatttgcttaaaggttcttgtggcaagtcacttgcttctttccctcaagggtgtttctactctacagcagttggaggattgagatgctatgagaatccaaagaataagattactgcaatacctgctgaggaagaggaaatctggggtgcattcttcaaggtggaagggtcagcagtccttgcaggcacagagtaaaagattcattttcaaataaagtaccgtgtgatgtattaatggagtaatgtgtttatgtgcttgtgacggtaaggcttgcatgcggggccatgtaaatacctttaatgataactatgagaagaatgtgactggtagtagagtttatcatggtgttcattagctaggattttctctgtttctcttgtacagttgcgctttctaatgtaataaaagatatgcttttggcttgagattctcgaatattgagtctatgcagggtgtgtttgtatgaaggaggaagggagaaaaagg

SEQ ID NO: 2884 - DNA, 446 bp, Glycine max
gtcgggtgtactttcttgcgaaaccgagagagcgaaggggcaaacacaattttttttatcttcttttttattttttgtagagagagagagagagaaaatgttggggatcttcagcagttcagtggtgtcgccgccggaggagctggtggccgctggcagcagaacgccgtcgccgaagacgacggcggggaagctgctgaaccggttcgtggagagcaaggcgtcggcggtgtcgctgcaggtgggggaacacgtgcagttggcttacacacaccacaacgaatcaccgtggcatcccagatcatctgctgttaaggatgagatattctgcttgtttgagggggctctagacaatttgggcagcctgagacaacagtatggactggccaagtcagccaatgaagtgattttggtgattgaggcttacaaagctttacgtgatcgag

SEQ ID NO: 2885 - DNA, 447 bp, Glycine max
  unsure (1)..(447): unsure at all n locations
ttgagatgctatgagaatccaactgctgtagagtacaaacacccttgagggaaagaagcgggtgacttgccacaagaacctttaagcaaatctgcagcagttggaggattgagatgctatgagaatccaaagaataagattactgcaatacctgctgaggaagaggaaatctggggtgcattcttcaaggcggaagggtcagcagtccttgcaggcacagagtaaaagattcattttcaaataaagtaccgtgtgatgtattaatggagtaatgtgtttatgtgcttgtgacggtaaggcttgcatgcggggccatgtaaatacctttaatgataactatgagaagaatgtgactggtagtagagtttatcatggtgttcattagctaggattttctctgtttctcttgtacagntgcgctttctaatgtaataaaagatatgcttt

SEQ ID NO: 2886 - DNA, 495 bp, Glycine max
acctttgatctatgctgtttttgggagttcaaggcacatggcagtggggacgatagcagcagcatcgttgcttattgctcaaaccatacaaaccgtggtagatccagtagaagatccaacgttgtatcttcatttgattttcactaccacctttatcaccggtgttttccaggcttgtttgggtttttttaggctgggaatattggtggacttcttttcccattctaccattaatggcttcatgggagggacagcagtaattctcatcctccaacaactaaagggtgtatttggcatgaaacatttttcaaccaaaacgaacttggtggcagtggtgaagagcatagtcaacaatagacaagagattaggtgggaacctaccattcttggcgtgatctttgttgctttcttgcaatttaccaggcacctgaggaataagaatccaaaactcttttgggtaccggctatagctccaatggtgactgtagtagttgc

SEQ ID NO: 2887 - DNA, 532 bp, Glycine max
cgaacgtggttgatgatctaaggttgagtcatcccaccaaagtatcaagattcacttctgctgcggataaaaaaaaaaaagggattcacttcctagttttcagccctttaaatacctctttgcaatacaaggaactcatcaacccaagttagcataacttccttaacaacctagtatttcagaccattcttcttgatcagaatccttattaatcatcaatcatgcagacttcacttcttcaaattgttggaactccagtaatctcagcaacatatgatcagcttcaaaagtcagttaacagatacttacctggtcctgccactcaatgtcaatattcaaccacaacatcaaagcaaatgaggctgaggacaaatatatctgaaactgttaagagaaagataagtttaggggctcgcattcttcgagttggtggagtggaaaaagtgttcaagcagttttttagcatggaagaaggggagaggctgttgaaagtttcccaatgttatctttccaccacatctggtcctctagc

SEQ ID NO: 2888 - DNA, 436 bp, Glycine max
ggtcaagattcacttctgcggataaaataaaaaaaaataccacttcctagttctcatccctttaaatacctctctgcaatacaagggactcatcaacccaagttagcataacttccttagcaacctagaatttcagaccattcctgttatcaccgctgctgctaatcctttcaattaaacagaaagcttattaattatcaatcatgcagacttcacttcttcaagttgttggaactccagtcatctcagcaacatatgatcagcttcaaaagtcagttaacagatacttacctggtcctgccactcaatgccaatattcaaccacaacatcaaagcaaatgagactggggacaaacatatctgaaactgttaagagaaagctaagtttaggggctcgcattcttcgagtgggtggagtggaaaaagtgttcaagca

SEQ ID NO: 2889 - DNA, 864 bp, Glycine max
gtgggtcagtaattccaaagctcttttgttattcggtgcgtgtgtctaagtttgaaacccctgtgatctctcacacaattccaattcctctggatctcgtctcgatcgatcgatctcgaacatgagcactggggagcttctcaacatcgaacctctcgaactcaagttcccctttgagctgaagaagcagatctcatgttctcttcaattgtccaataagaccgatagctatgtggccttcaaggtgaaaacaaccaatccgaagaagtattgtgttcgtccgaacactggtattgtcacgccacgatctacgtgtgatgttatcgttaccatgcaagcgcaaaaagaggctcctgctgatatgcaatgcaaggataagtttcttcttcagagcgtaaaaactgttgatggtaccagtccgaaggatatcactgcagacatgttcaacaaggaggcagggcatgtggttgaggagtgcaaattgagagtgctgtatgtttctccacctcaaccaccgtctcctgtcccagaaggttctgaggaaggatcctcacctagaggttctgtttcagagaatggaaatgccaatggttctgacttcacacaagcggcaagaggatttactgagcgacctgaatcttaagacagatctgcagaggctagagctcttatctcaaggctgactgaagaaaagaataatgcaattcaacaaaatagcaagctctgccaggaactggtgagaatttacagtatgtcattgataattttatttacttatttgtctaatctatatttattttccttttggtgatggaggattttaatctggaatatgagctcccttctatagaaagagaatgattc

SEQ ID NO: 2890 - DNA, 709 bp, Glycine max
tccaagaaaatggaaatgccaatgggtccgacttcaaacaagccgcaagaagaattactgaaccaactgaatcccaagacaaatttgcagaaggtagagctcttatctcaaggctgactgaagaaaagaataatgcaattcaacaaaatagcaagctctgccaggaactggagctactgaagagggaaggcaacaaaagtcgtggtggagtctcatttgtcattgtcgtattaattggcttgcttggcataattatggggtatctcatgaagacaacctaagcatttctgcgattcaatctttcaccatagttttcgatcttagtttctttgttcctgactattcaagcaattatgaggaaagttaaaatagatcaattcagcagatgttggtttttctttttacttttgccgtttcttttcttttctttgggtggataacattttggaggtagaaaacattaggggaagttgtgggtctggtggttaagcatattgtgaactgactcatgctttcgttaacatgcattctttttgtaacttaaagaggggaagcttcttgttttcttctttttgtggttcgtctggtgactacatggtaatgtcaagttgtcaaggacgaccacgaataacatcattcttcatggactctctctctatcgtcttttcatgtcaagaatgacctttagatgacagaatataactctgtt

SEQ ID NO: 2891 - DNA, 284 bp, Glycine max
gttattcggtgtgtgcgtgtccaactttgaacgcactttgatactgccactttctccaccacaaagagaaaaaagagagaagaaaagcgaatcccctgtgatctctcacacaattccaattcctctggatctcgtctcgatcgatagatctcgaacatgagcactggggagcttctcaacatcgaacctctcgaactcaagttcccctttgagctgaagaagcagatctcatgttctcttcaattgtccaataagaccgatagctatgtagccttcaaggtgaa

SEQ ID NO: 2892 - DNA, 1400 bp, Glycine max
ttacaacaaaaacaatgaaatactaaaaaaaaaaaaaactactcttcacccaccaaaccaaagcaaaagggaaagaggacgatcgggaaagagagtgtctttaatttcacagtttcatagcaattatcgccgaaaaatccaaaatttccactcacatctctctttgtttatgacatctcaaacatctatctactctctacccactttctcagttccaggtcagcaagagaaacagtacttatccttattacagggttgtgtgaactgaagagggagggtactggtttgcggaggcagtgacacttctgcaagcctagaatcctctctcctagttttttgtgaaaacagatagtgtggtgcttttggaggatccttttctcaaagcttgcatgtaacactatctacattttggtgatcagttgaagtgtggaaaaaatcttaagctaaaggcaatttgggaagctggaacaatgggttctgtttgttgttgtttgagttttgatgattttgaagattatgtaaatccaaatagtcctgtatataggaactgtgtgtgtctcagttgcttgatacagaaccttttgattgtgtattcttcaatattccgtagaggggatgcacattcaattccttcatctattcaaggggcagcatctataacttcagcagcatcactcgataattctctatctgacatgtatcgctctcctccaaggccattaccatatgatgcagaacccagatatttccgctcgcaacgtgatggactagtttcaaggcgtgagaagggttcaagtcattcaaatgaggaaacagaacctctaagaagtaatgcagatgtggatccagaatccttaaattcaggagacaaatggaaggaaagtgcctgtgaagctggatcaaaggaataccgttctaagtcctcactaagacttcaatcaacaaaatattcaactggagttggtcttgtctatgcatcatcagaggaggaggatgtctgtccaacttgtcttgaagaatacactaaagagaatccaaagataatgacaaaatgctctcatcattttcaccttggttgcatttatgagtggatggagagaagtgacaactgtcctgtctgtggaaaggtgatggtattcgatgaaacgactttcacttgattacaaggtctgtgttgtggatgaagtcagcaactgaggcatggaagaatataagcttatagccattgtgaatactccatattaagggtctgtcatggatagtaagtatgaaaagtttccttaacccttgttgtgagttcattctaatcccccttgtttttgggtttaaaaatttccgcatgtccaaaaccgtgaagaaacaaagaatatctaattttagatggaaactttgtaatgatg

SEQ ID NO: 2893 - DNA, 623 bp, Glycine max
  unsure (1)..(623): unsure at all n locations
gtcaagacgtgagaagggttcaagtcatttgaatgaagagtcagaacctctaataggtgaggtatatgctgactcagaatctttaaattctgctggttaatggaatgataccagtgaacatggatcaaaggaataccgatctaagtccactgtaaggctctcatcagcaaaacttacaactggagctggggttgtctattcatcatcagaagaagacgatgtctgtccaacttgtcttgaagaatacactgaagagaatccgaagatagtgacaaaatgctctcatcattttcatcttggttgcatttatgagtggatggaaagaagtgacacctgtcctgtttgtgggaaggtgatggtatttgatgaaacgactgattgaaaaggtttatgtcgtggatgataccaacaacagaggaaaggaaatatacagtatagacattgtgaatacttcagattaagcgcttatcatgtatagtaagtatataacatttttattaaccatcactgtaagttcaatctcatccaagttgttcctatatttatacttttctcccttgccaaaacatccaagattaanaaaaaaaaatgccattttagatggcgactttgtcatggtttca

SEQ ID NO: 2894 - DNA, 298 bp, Glycine max
tgaaagagggtgtctttaatttcacagtttcatagcaattatcgacaaaaaatccaaaatttccactcacatctctcttcgtttatgacatctcaaacatttatctactctctacccactttctcagttccagttgaagtgtggaaaaaatcttaagctaaaggcaatttgggaagctggaacaatgggttctgtttgttgttgtttgagttttgatgattttgaagattatgtaaatccaaatagtcctgtatataggaactgtgtgtgtctcagttgcttgatacagaaccttttg

SEQ ID NO: 2895 - DNA, 1128 bp, Glycine max
aattcccgggctcgagcacgcgtcaggacgacagaaggggacacttcaaaatcctctagtaacccttcttttctctctctctctctttcttttgtgttctgagctgctagaagcaatggagaggaaaagaagccatgcttctttcaccatgtttgcaatgcttgttggattgctctctcagagccttgtcattcctgtaatatccaccactgttgcagatcagaagaactactacaccccagatccacatgctggaagtccccccacaggctcactcacacagtagtagtcctccatctcatggccatgggagctctccaccctcacatcacaatagtccaagtactccatcaacaccctcaggtggaaactgtggatcatcacccccacaacatcatgatccaacaccctcaactccatcaacaccatcaaaccctccctcaggtggatactatggaggtagccctccaacacctgtcactgtgagcccaccatctactccagttgaccctggcaccccaagcatcccctcaccaccactcattccttccccatctcctttcactggcacatgcaactactggaggaatcatcctgcaatcatctggggaatccttggctggtggggaaccctaggaagtgcatttggtgttacaggtactactgttccagggttcagtcctggcctgagcttgccacaagcactttccaacacaagaactgatgggctaggagcactctacagagaaggcacagcttccttcctcaactccatggtgaacaacaagttcccttacactaccaaccaagtcagggacaggtttgtggcctcactcaactccaacaaggccgcagaagcacaagcccagctcttcaagatggccaatgaaggaagaatgaagcctagaccatgatgagcaagatagattattaagtaatcttaattagtttaattttgtgtgttgattcactctaagaacatttatatttaagatttctgttagtttgtatcatttaaggctcttacatgtgttcattaatatgtcttgagatggatatcatgtttcttcgaaatttaatgcaaactttatggttttgggtttggaaaaaagataattcctcccaccc

SEQ ID NO: 2896 - DNA, 477 bp, Glycine max
ttcacggatccatccagacgctgccaaaacatgagagaaggggacacttcaaaatcctctagtaacccttcttttctctctctctctctttcttttgtgttctgagctgctagaagcaatggagaggaaaagaagccatgcttctttcaccatgtttgcaatgcttgttggagtgatctctcagagccttgtcattcctgtagtatccaccactgttgacagatcagaagaactactacaccccagatccacatgctggaagtcccccctcaggtttctccgattctctgtgctcacacagtagtactcctccatctcatggccatgggagctctccaccctcacatcatcacagtagtccaagtactccatcaacaccctcaggtggaaactgtggatcatcacccccacaacatcatgatccaacaacaccctcaactccatcaacaccatcaaaccctccctcaagtggatact

SEQ ID NO: 2897 - DNA, 1036 bp, Glycine max
cggctcgagaccaccctcaggtggtggtggaagttacaatccaactccatcaagtcctccagttggtggaagccatgatccaactccttcaccaccctcaggtggtggtggaagttacaatccaactccatcaactcccccaggtggtggaagctatgatccaaccccatcaccacccacagatggtggaagttacaatccaaccccatcaccaccctcaggcagcaactgtggcacaccaccacatgacccctctactccaacaccctcagtcccaacaacaccatcaaccccaacaacaccatcaaccccatcaacaccatcacaccctccctcaggaggaggtgggtactataactcaccaccaacttatggaggtggtagccccccaacaccaatcactgtgagcccaccttcaaccccaattgaccccggcacccccactatcccctccacacccccttaccttccttccccaactcccttcactggtacatgcaactactggaacactcacccaggaatcatttggggattgctaggctggtggggaaccttaggccatgcatttggtgtctctagtatgccaggatttggtgccagtctcagcttgccacaagcactttccaacactagaactgatgggctaggagcactctacagagaagggacagcttcctttcttaactccttggtgaacaacaggttcccttatacaacccagcaagtcagagacagatttatagcatctcttgcctcaaataaggcagcagaagcgcaagccaacctcttcaagatggccaacgaggggcgaatgaagccttgaccatgatgaaatacagattaagtagtagtactcttaattagttaattagtatggtgtgccaatttattgagttaagaccattttatatttaagatttctgttagtttgtgtcatttaaggctctcacatgatatgttcattaatatgcattgagatggatatcatgttaatttcttcgaaatttaatgcaaaatttatggttttggtttg

SEQ ID NO: 2898 - DNA, 1791 bp, Glycine max
gaaagcaaattgatccgctatatagaacaggtagcctcactcactcaaattccaagtagccacagctctcttctcacgttcatttctacacatccctagctctgtcgttccgtcgttgacgatggcgtttcgggtgcgaagccctgacctccgctctctctttcttctctctctcttgtccatcgcttccgccaatgtcttcttcgaagagcgtttcgatgacgggtgggaaaatcgatgggttaaatcagattggaaaaaagatgagaacgtggctggggagtggaaccacacctctggtcaatggaatggagacgctaatgacaaaggtattcaaaccagtgaggattacagattctatgctatttcagctgagtaccctgaattcagcaacaagggtaagacactagtctttcaattttctgttaagcacgaacagaagcttgactgtggtggtggctacatgaagttgctcagtggggatgttgatcagaagaaatttggcggggatactccttacagtattatgtttggcccagatatctgcggttacagtaccaagaaagttcacgctattcttacctacaataacacaaaccacttgataaagaaggatgttccttgtgagactgaccaacttactcatgtttacacatttatcctccgtccggatgcaacctacagcatcctgattgataatgtggagaagcaaactggtagtctctactctgattgggatcttctccctccaaagacaatcaaagatcccgaggctaaaaaaccagaagattgggatgacaaagaatttattcctgatccctgaggataagaaaccagaggggtatgatgacatcccaaaagagctcccagatcctgaagccaagaagcctgaagattgggatgatgaggaagatggtgagtggacaccccctaccattgccaaccctgattacaagggcccatggaaggcaaagaaaatcaagaaccccaactataaaggaaaatggaaggcaccattgattgataacccagatttcaaggatgaccccgacctctatgttttccccaacttgaagtacgtggggattgaattgtggcaggtgaaatctggtactttgtttgacaatgtcttaattactgatgatcctgagtatgctaagcagctggttgaagaaacatggggcaagcacaaggatgctgagaaggcagcatttgaggaggccgagaagaagagggaagaggaggaatcaaaggatgacccagttgactctgatgctgatgaggaagaggaagatgctgatgaagctggcaatgactccgatgctgaatcaaagacggaagctggagaagacaccaaggaagagggtgtacatgatgaactctaggaagtttgcaaaacggataaagagtgagcggaagttatattccggaaagttatatctttttcagttgtagtgtttttttgtttttatttttccctagataagcagaccgtggaaaactgcaagtgaaagctggagcttttgcttcaatcacatttgactatttcactgattagaacaggcaaagatgtctcttttgggttgatctttttatgtttcgatcaattgaattttccattatgacgctgtcctgaaaatctaattaattgcaaatttttataagaaaaatgattgattgatattccaaatttgaaattttatttcaaaaattgtaaatcgtttgctaagctagtagaaattttacttgtcaagtaatatatggctcatggttggctaaaaaaaattaaac

SEQ ID NO: 2899 - DNA, 682 bp, Glycine max
ctccacggctcgacgccacgcgtccgataattaattatattgatgttgacaaggacaggggcaaccctcactcactcactcattgtccttactcacccctctctctattagcattagcatcaaaaacactctcttggttatccaatccaaacaccacccttcttctcataccctgctcagttagcagcagctactctcattcctctaccggagcaaaactataaacaaaaaaaacaagtccatcgtatgggtctcttagcatcctcatgcttcattctcattgctctcctactcctcactcccaaaggtgttatgggtgccaccttcacattctttaacaaatgcgactacacagtgtggcctgggattctcgcaaatgccggtagcccaccactcgacagcaccggttttgagctccccaaggacacttctcgcgccttccaagctcccaccggctggtccggtcgtttctggggccgaaccggttgcaccttcgacggatccggcgccggctcatgcctcaccggcgactgcggctccggccaagtcgaatgcaacggcgccggagccgccccgccggcaaccctggcggagttcacgctcggcaccggaggtcaagacttctacgacgtgagcctcgttgatggctacaatcttcccatgatcgtggaaggcactggtg

SEQ ID NO: 2900 - DNA, 594 bp, Glycine max
cgggtcaaatacaaactcacaacacactttgtacactccgtccctcttccctgtctctcaaatggcttccctgacgcaaactttcatgtccctcgcctctcttcccaatctagtacccggtaccaggatctcccacccaagttcagtttccctctcaattaaggagggaagaagtttcccatccgttacattgcagcccagaggatgtcggtttcgatttagatgtgtggcaaaaccagagacagtgaagaaggtgtgccacatagttaagaagcaattagcactaccagaggaatcatctgttactggagagtctaaatttgctgcacttggagctgattctcttgacacggttgagattgtgatgggacttgaggaggaatttggtattactgtggaagaagaaagcgcccagactatcaccaccgttcaagaagctgctgatatgatcgataagcttcttgaaaccaaggcttaacaagcgtgtgcattttggagttttttgctatttcaatggaagggggttttaatttttatctttggtattacacctagttttaattttataaaactcgtgccatttcattcccgttg

SEQ ID NO: 2901 - DNA, 941 bp, Glycine max
acgagtaaatacacacattgtccctttcttccatcacttgagacacaaactcacacactttgtactctccgtccttccttcttcgatccagatctctctccttctccctcaaatggcttcccttctgcaatgttccatgcccctcgtctctctttccaatcgagctctggtacccggtaccaggatctccaacccaagttcagtttccctttcaattaagggaagaagtttcccatccgttacattgcagcccagagggcgtcggtttcagcttagatgtgcggcaaaaccagagacagtgaagaaggtgtgtgacatagtcaagaagcaattggcactgccagatgaatcagctgttactggagagtctaaatttgctgcgcttggagctgattctcttgacacggttgagattgtgatgggacttgaggaggaatttggtattaccgtggaagaagaaagtgcccagagtatcaccaccgttcaagacgctgctgatatgatcgataagcttcttgaaaccaaggcttaaactagtaaaaaggacaagcatgtccattttagagttttttgctatgtcgacggaaggggtttttaatctttatctttggtattacaacttgattgtctaagtaactgctagttcttttctggattgtattgcgattactataataatagttttaagaactcagtcattttgtttccgttgaatgaaattgattgtcaaaatcacgtccattaagtatttgaatttttttagacatttttctacttcaaaaaaaaaaaaaaaaaaaaaaaaaaaaaaaaaaaaaaaaaaaaaaaaaaaaaaaattaaaaaaaaaaaaaaaaaaaaaaaaaaaaaaggggccgcccaaaaggttcaaaccttacttacgcgtgaatgcaacttcaaaacccttccaaagggtccccaaaat

SEQ ID NO: 2902 - DNA, 1300 bp, Glycine max
cttacgcgtggttttgacatatctgctatcaagaaattcaatctgctatcaagaaattcaagaaattttttaaacttgacatatctgctatcacctcttccgtttcttgcgattcgacgatggccgatcaaaagcttttaggaccggcgtttagttttaagcatgatgaattgacgagtcgatttcttgaaaaactccgacttcttgaagaactccgacttcttcaagaccgactttttaaagaacccgagaacaatgatgaatgtaggaaaaatgggagcctgaaaaggttaaatgaccagagtgatgtctgtggatttagaagttgcttcaaaaatgattatgatttgcttcagaatcagaggtgcttgaggaatcgagaagaagtgattcaggagacgatggaaatggagttggaaaatatgatggaactgggcaccctcaagggcaagaaaacatattcttttaagaatggtacaagaagtgcgttgaaccttgagaacaccacaagatcctttctagataacaataaatcaaatgataataactggaatggcgaaatgactttgcccctgctagtagacaagtccaccgtctgtatgttaaacaaggatgaggaagtagacgagcccctcagtccgggcaaacacatgaaaactgcacaaagtgttttatcacttttgatagcgactattgcgcttctttggattctcaccgacctatgcagcctgttatcaattatcaagcttcagccagaacatggccccctccccattcggttttctttgcttgaacctgttggtttcatggtgtttgtttgggctgttgcagcaatgattgttattggtgcaccattttctcgtttggtgagtgccattcttttattttggggtatttggctgcttgtcagatcttctcaatcactcactacactatgccttccaatattgggaatccttctgatggtgtggcatctctgctcaaggaaaagcagctgccaaataaagggtaatgaacaaggaagtgaagctcccaaaattaaaccaatgcgtttcactcttgctgtctaacatgcactttcccgattgctagtgtttctgttttagtttgtcagtaattaataggtgttctactttcagggcagtgctctgaggtaatgctgttcgattttacttctcagtctactacagtgtgtatttggtaccaaacttttatgctaaaataatccaaggcgtgtgttttggacaattataattgttgtaacttttaatttcacatttttatattttcttggcaaaaa

SEQ ID NO: 2903 - DNA, 634 bp, Glycine max
  unsure (1)..(634): unsure at all n locations
ctcgagccgattcggctcgaggagaaaactttgcctagaagacccaagctcgtgtctaagcgctacggtttatgtgatgtcttcgtctattcccaattccaaattcaagaaattttttaaacttgacatatctgctatcaccttttccgtttcttgcgattcgacgatggccgatcaaaagctttcagaaccggcgcttaaacgtgagcagcttgatgaattcgtgagtagtctatattttgaacaacgaattcttgaactccgacttcttcaagacctcgagaacaatgatgaatgtaggaaaaatgggagcctgaaaaggttaaatgaccagagtgatgtctgtggatttagaagttgcttcaaaaatcattatgattcgcttccgaatcagaggtgcttgaggaatcgagaagaagtgattcaggagacgatggaaatggagttggaaaatatgatggaactgggcaccctcaagggcaagaaaacatattcttttaagaatggtacaagaagtgcgttgaaccttgagaacaccacaggatcctttctagataacaataaatcaaatgataataactggaatggcgaaatgactttacccctgctagtanacaagtccaacgtctgtatg

SEQ ID NO: 2904 - DNA, 336 bp, Glycine max
gacctctgtccttaaagctttgtggcaatcacattccaagtggccttaccctacagtggctacgaagactgagtcagatactagttgcagggaatgccattttatatgaatgtgttcagacagtaatgaccattgaggagaatgggggcttacgtgtacttgccattaatatcctgggaaggttcttgtcaggccagtgacaacaatatcaggtgaattgcttactggatatgcaagtgtttgtgtgtgtgtgagtgagtgagagcaagagagagtcttgaatgaatgacaacaatgtctataaaatcattagcataatgatctggtggatgtatt

SEQ ID NO: 2905 - DNA, 1138 bp, Glycine max
ctcaactaaactcatatttccaaaacgcagaaccaacaatgtcgttccccttcaaccactctcaccgcagggacgacgacgacgacgacaaacgacccgccgtttaccctcctccgggtaacaccttcaacaaccctccaccacccttctacggcgtccatcagccagaaacccacgtgtcccatgtcttcaacaacagcaactactccgctcccccgcctccaccaccttcccataaccaccaccatgactccttcactcacggaggcggcagcaccgtgcaccacacccctcacaacaacgcgccacccaccacctctgttcatcacttgagccaccaggttaacaccggtgttctctcgagcaaacccactgtgagagttttcaccaaagccaatcccaatttctctctcaccattcgtggcggccaagtcattctcgctccctccgatcccaccaatgagtaccagcattggtataaggatgagaagtacagcactagggtgaaggatgaagaggggtgccctgctttctctttgatcaacaaggccactggtgaagccttgaagcactccatcggtgccactcatcctgttcggctgataccttacaagcccgactatcttgatgagtctattctatggactgaaagccgtgacttaggagatggccacagagctataaggatggtcaacaatgttcatcttaatgtggatgcttttcacggtgacaagaattctggaggtgttcgtgatggcactacaatagtcctctgggactggaacaaaggtgataaccagcagtggaagatcttaccttactgatttcaattgacgaaattatcaatggctttgaagatgcatcaagttaagaggatagttggcccttgtatttgagtggtttggtgttgcctagagtatggaatggtgtgtagtgcatttgcttgtaccaagcaatcggcttttttcaatagattaagtgcgttttatgtaatatttattgcatacatgtgaccctggttaatgtgccgattgccatatatatattggtacacagttcatgtatgtccttatatcttaatatgattcagtgtgaacaactactgatgctgatgttacttgttagaaaaaaaaagaaa

SEQ ID NO: 2906 - DNA, 833 bp, Glycine max
gaagcagcttaacaacaaagcaccatttctcttccctcaactaaactcatattccaaaacgcagagccaaaccatgtcgttccccttcaaccactctcacgccacccacacccaccaccgcagggacgacgacgacgacgaacgacccaccgtttaccctccgccgggaaactccttcagcaacccgccacctccgttctacggcgtccctcaaccaccaccccctcagccggagacccacgtgttccattccgctcacgtgacaccaggacacgtgtcccatgacttcaacaactactccgctcccccgcctccacccccttcccaccatcatcatgatcgtcatcatgactccttcacccacgcttacccacctgctcccgctgcagctgattaccccgctcacggaggcagcagtaccaccgtgcaccacgtggctcacgagtctcaccaccacaccccccattccgctttctcctcccacaacaacgcaccccccaccactgttcatcacgtgagccaccaggttaacaccggtggtctctcgaccaaacccactgtcagggttttcaccaaagctaatcccaatttctctctcaccattcgtcgcggccaagtcattctcgctccctccgatcccaccaatgagtaccagcattggtataaggatgagaagtacagcacgagggtgaaggatgaagaggggtgccctgctttctctttgatcaacaaggccactggtgaggccttgaagcactccatcggtgctactcatccagttcggctgataccttacaagccagactatcttgatgagtctattctttggactg

SEQ ID NO: 2907 - DNA, 1625 bp, Glycine max
ggcgtgacttggcgcatgttgtattgtagagtttgtagtagaagttggcatttgtgtgagctcactctctattctaagtttccgcagccaccactcagagccagcgagtgatgatcgcttcgccgcagtaatcgccggaaacgaattcgccgtttccctgccgagatctctcaatctccgacgactcagatacctctattaattttcctccggttaggttgttagggtataaatagtacgtagtttttccttatttatggcttcggagaatgtgaagaccggggattccgccgtcaccaccatcgtcaatctcgccgaggaggccaagctcgccagagaaggcgtcgtcaaagctcccagctacgccctcgccagcatctgcaagtcgctcgtcgccggtggcgtcgccggaggagtgtcacgtactgcagttgctcctctggaacgattgaaaattttgctgcaggtccagaatcctcataacattaaatacaatggaacagtacaaggcctaaaatatatatggaggactgaaggatttcgtggacttttcaaagggaatggtactaattgtgctagaattgtccctaattctgctgtgaagttcttcagttatgagcaagcttctaaaggtatactgcatctgtatcagcagcaaactggaaatgaggatgctcagctgactcctcttttacgtcttgggagctggagcatgtgctggaataattgctatgtctgcaacttatccaatggatatggttcgaggcaggattactgtgcagactgaggcatccccatatcagtacagaggaatgtttcatgctttgtctactgtgctcagggaagaaggtcctcgtgctttatataagggctggcttccttcagttattggagttattccttatgtaggtctcaactttgctgtctatgagtctctgaaagattggttaattaaatctaatccattaggtctagttcaaaattctgagttgagtgtgacaacacgcctggcttgtggtgctgctgctggaactgttggacaaactgttgcttaccctcttgatgttattcgtcgaagaatgcagatggttggttggaaccacgctgcttctgttctaactggtgatggaagaggcaaagtcccacttgaatacactggaatgatcgatgcattcagaaaaactgttcagcacgagggatttggtgcattatacaagggtctggtgcccaactctgtaaaggtggtcccatcaatagcaattgcattcgtaacatatgaggtggtgaaggacattttaggagttgagatcagaatatcggactaaagtttgataacctcagatatctgttcacctggtgtggtttttctttgttttcttttttgtaggcaaggggatgcagagatggtaacttacagatattttcttgtttttcatctctccaaggatgagtttagaaactcttagagatagtgtccataaatttattcccttgttctatttgttttccttgttctatttgtccataataagtgttgtggaaaaacaatgcaaggacatatcttcctagctttctgcactagttgagaaatcatttttcttagtggaatttgcatttaacctcgt

SEQ ID NO: 2908 - DNA, 543 bp, Glycine max
atgcagatggtgggttggaaccatgctgcttctgttgtagctggtgatggaagagggaaggtaccacttgaatacacaggcatggttgatgcttttaggaaaactgttcggtatgagggatttggcgcattatacaagggtctggtgccaaattctgtaaaggtggtcccatccatagcaattgcatttgtaacatatgaggtggtgaaggacattttaggagtggagatcagaatatcagattgaagattcgcatgcatgtgatatttgattgcctgttattttcttgtaggcaaggggatgcagagatgataaattagggttactttcttgtttttcaactcttcaatgagttaggcagcacttgagttagcgtgtataaattaattcccttgcatcccatttgttttgccttgggaacatgatttagcttttagctttttattcatcttctatggcaataaatgttgtggaaaaacaatgcaaggatatatctgcatgcatttctgcagagtgaacagtgaagaaagcatttttattgat

SEQ ID NO: 2909 - DNA, 501 bp, Glycine max
cccacgcgttcgcccacgcgtccggtgggtgtagtgtagtagttggcattactgtgagctcccgcaggcagcagcagcactcatagagcttgcgagcgagtggtcacttggccacagttatcgccgtttccccgccgagatctctcaatctccgacgactcagatacctctattaatttttgttcctccggttaggttaggctataatacgtagtttttccttatttatggcttcggagaatgtgaagaccggggattcggccgtgacgacgatcgtcaatctcgccgaggaggccaagctcgccagggaaggcgtcgtcaaggctcccagctacgccctcgccagcatctgcaagtcgctcgtcgccggtggcgtcgccggaggagtgtcacgtactgcagttgctcctctggaacgattgaaaattttgctgcaagtccagaatcctcataacattaaatacaacggaacagtacaaggccctaaatatatatggagaa

SEQ ID NO: 2910 - DNA, 1491 bp, Glycine max
cgtcgaatgcacgcgtgcctaagctcagaattcagctcgagggaagaacaagtcttgcattgggtggagcatacttagaaacagcaactatgtctctcatgcagcttactagctcccctgttggctcactggtccgtttcattgtaatatttgctttatggtacagaaccatggctttggccaagttgccaccaaacgcttcatcagttccagcagttttagcgtttggagattccatcgtggacccaggcaacaacaacaacataaaaacattgatcaagtgcaacttcccaccttatggaaaggattttcagggaggaaacccaacgggtcgattttgcaatggaaaaattccttctgacttaatagttgaacaattgggtattaaggagtatttgcctgcatatttggatccgaatctcaaatctagtgatcttgttaccggcgtctgctttgcctccggtgcttcaggatacgatcctttgacacccaaaataacgtcagttctatcgttatctactcaactagacatgttcagggaatacataggaaagctgaaaggcattgttggagagagcagaacaaactacatcctatccaatagtctttatcttgtggtggcaggtagtgacgacattgccaacacctattttgttgctcacgccagaatattacagtatgacattccttcttacaccgaccttatggtcaactcagcctctaattttgtaaaggaactgtataatctgggagctcgtagagtttcagtactgggtgcaccaccgattggatgcgtgccatcacagagaactctggctggagggctaacaagaaagtgctcagaaaagtacaattacgcagccaggttgttcaattccaaactttcaaaggaacttgattccctcggtcacaacttgtccgataccaggatagtttacattgatgtttacacccctctgctcgatatcattgaaaactaccaaaaatatggctataaagttatggacagaggttgctgtggcacaggcaaactagaggttgcagtgttatgcaaccctttggatgccacttgttccaatgcttcggaatatgtcttttgggatagttatcatccaacagaaggagtttacagaaagctcgtaaattatgttcttgaaaagtacatagatcgattgttttgagctcgattaagtttgcctacgggaagtaatatcaattattagttatgttgatgtcaacgaagacaatgagtattttgatttgtcgagttttggtgtgattgttcggtactttttgtagatttcaatgttcacaggcatcgatccatctcacagacgttccacatttttcccgtgtgaaatatttacctttaaagtggatgtacgttgttgtattcaggtgtttaaatatgatttttgatgattttactggttggaaatagctatttccttgttagttggagttcccaagtaaaaatgttattttgttgtt

SEQ ID NO: 2911 - DNA, 690 bp, Glycine max
atccactctctcacacactctcttattgtctctccatcatggctcacattctccctttcctcctcctcaccctcctcgccgccaccgcctccgcccacaatatcaccgacattctcgccgccaaccccgactacagcgacttcaacggcttcctctcccaaaccggcctcgccggcgaaatcaacacccgccagaccatcaccgtcctcgtcctcaacaacgccgccctctccgccgtggccgcaaaacaccccctctccgtcgtcaaaaacctcctcagcctccacatcctcctcgactacttcgacaacacaaagctcgagaaggaagaaggctttcatagagagcaggagagaatacaaaccacccatgtagtttttggactatacatgggaatggctatgtaaaatggaatacatggaaagtttttccagttgcattataatcccgattcctgaagatgataaaaagcttttatgtattgtgctgaccatttcatgtacaataggaggcagcattgccatcatttttattttattccacataatttatgctgaattttcctgccatagtaatatttctggtgccgaattcggcacgagggggtttctgtagaaatcctatcgtactcttgtgcattgtattagaatatatgcagttcatttgcctcaataatcttctcagcattgc

SEQ ID NO: 2912 - DNA, 1483 bp, Glycine max
  unsure (1)..(1483): unsure at all n locations
gtacaagcctattccatatccagttcccgtgtataagcctattctaagacattttcccttttcagctttcattggtgtggcctagctgttttctcaatgagaaagccttcatctctgcaaagcgcacttttgcgctttggggttcccttgttgcttgttatcaccttctgttatgctacttctactgctgcagcaacaactcaagtttcagggaatgaagagctgccaaagacaaacctaaatgggcatgatgaagaagcaaaattcggattttttcatcataaaccaatattcaagaaacatattccaattccagtatataaacctgtaccaaagccatttccagtgtataaacctataccaaagccagttccagttccagtgtacaagcctattccaaagccagtgtataagcctattccaaagccagttccagtgtacaagcctataccaaagccagttccagttccagtgtataagcctattccaaagccagtgtacaagcctattccgaagccagtgtataagcctattccaaagccagttccagtgtacaagcctataccaaagccagttccagttccagtgtataagcctattccaaagccagtgtacaagcctattccgaagccagtgtataagcctattccaaagccagttccagtgtataagcctattccaaagccagttccagtgtataagcctattccaaaaccagtgtacaagcctattccaaagccagttcccgtgtataagcctataccaaagccagttcccatttataagccaattcccatttttaagccaataccgaaaccagttcccatttataagccaattcccatttttaagccagtaccgaaaccagttcccatttataagccaattccaatttttaagccagtaccaacaccaattcctttttttaagcctataccaaagcctgttcctattgttaaacctattcctattccagtttttaaacccatacctaaaccatttccaattgttaaacctatcccttaagccaaagtcattttttaagccagagactttcttcagaaaacctattcctaaacttcacccaaatctgataaagcacggtcttctacattttccaattcacaatacaattcctacaatttcaactccataagatgatttggccgtgtcctataaaattattgtacttagaacgttatcccattctatttccaatatagctacgtttgttctaaaacatcaacggggtttctgtagaaatcctatcgtactcttgtgcattgtattagaatatatgcagttcatttgcctcaataatcttctcagcattgccgttgtaaattgatttgtatgtattattccaagaatagaactaattctctatttttggtttaaataatatttgtatttcctttccgnnnnnnnnnnnnnnnnnnnnnnnnnnnnnnnnnnnnnnnnnnnnnnnnnnnnnnnnnnnnnn

SEQ ID NO: 2913 - DNA, 810 bp, Glycine max
aatacccggcccgacgcacgcatgcgctcgctcacacactctcttattgtctctctatcatggctcacattctccctttcctcctgctcaccctcctcgccgccaccgcctccgcccacaatatcaccgacattctcgccgccaaccccgactacagcgacttcaacggcttcctctcccaaaccggcctcgccggcgaaatcaacacccgccagaccatcaccgtcctcgtcctcaacaacgccgccctctccgccgtggccgcaaaacaccccctctccgtcgtcaaaaacctcctcagcctccacatcctcctcgactacttcgacaacacaaagctccaccagatccccaacggcaccacgctctccaccactctctaccaaaccaccggcaatgccaacggcaacgtcggctccgtcaacatcaccgacctcaaaggcggtaaggttggcttcggctccgctgctcccggctccaaactcgactcctcctacaccaaatccgtcaaacaaatcccctacaacatctccgtcatggaaatcagcgcgccgatcatttcgccggggatcctcgcggctccgcctccctcagccgacgttaccataacggcgctcatcgaaaaagccggatgccccacgttcgcctcactcatctcctctaacggactcattaaaacgtttcagtcaacggcggataaaggtttgactattttcgctcctaacgatgccgcgtttaaggcgaaaggcgtacctgatttgcgcaagctcacgaacgctgaagtggtttcgctcttacagtatcacgccg

SEQ ID NO: 2914 - DNA, 910 bp, Glycine max
attcccatcacttttcagtaaaagcattcttcctctcaatccacttgttttcactcctaaacgacaacgtcgttcatacacttcttctgcaaacaaaaaaaattcccgcattagggtttcctttctccggcgacaatggaggtagctgcgaacgcgcggaaccccgccgctaagcgaaaattcgacgacgccgtttctaacggcgtcgccgcccccgccgacgtcgatctctccctcctcgaagccatcgagaagtcgcagaacgcggtcgaagccctcgatctccgagccctaaagaagcacgtgctctccttcgagcgtcgcctgaaggataacatcgaagcgcgccttaaataccctaaccaaccggaccgcttcgccgattccgaagtagaactccacgaagagcttcagaagctgaaggtcctcgccggcgcgccggagctctacccggacctcgtcaacctcaacgtggttccctccatcgtcgacctcctcaaccacgacaacaccgacatcgccatcgacgtcgtgcaattgctccaggacctcaccgacgaggacgttctcgacgacaacgacgactccgctagggttttggtcgacgcgcttgtcgacaacagcgcgctcgagctcctcgtgcagaacctgcaccgcttgaacgattccgatcccgacgagaacgccgccgtgtacggctccctcgccacggtggagaatatgatcgaggtgaagcccgcggtggcggagctggtttgcgagaagacgaagttgctgaagtggcttctcgggaagataaaagtgagggagtttgacagtattaagcagtatgcttccgagattttggcgattttgctgcagagttgtactgtgaatcagaagactctgggacagatgaatggggttgatg

SEQ ID NO: 2915 - DNA, 833 bp, Glycine max
  unsure (1)..(833): unsure at all n locations
atgtgagaatttacattggcaagaatctactgctcaagtagatgagttgcagcatttgccaattgaatcactagattgtcaatcgtcattaagtgctgatgttgaaagaggggacaacactgagcaaaatcttgatgtgatgccaactgaagataatgctaatgaaattacccaacaaagcttgcgaattgaagattcagagcattgtaataatcaagaattcagtgaggtgcataatgagccgtctgagctgggtggtataaataatagtcaaaactattcttcaaattacaacattcatatggaggataatgttgttgatgatgtaaattggaatgaatctggtgctctagaaggagaacagccagaagaagtttttgaaaatgaaggaagtgagtggtatcagaataataccgaatggagaaatagcactgaggaaaatgtcgatgataatcagctcagcaatacagcaaatgagtggcctgacaacagtttggcaaacgaggatggagaaaactctcgtctgcaagaatctcatgaagtgtggcaagaagatggtggcttccaagaggctgtgcaaaattgggtgggaggaccttctgatcatgaaagtgctccagttggtagaattcgtggatgttagtttcctgaagatgacaacgtgtacagtgttgaactcagggaacttcttaataggagaagtgtctctaacctccttcgcagcagttttcgtgagagtcttgatcagttgatacagtcatatgttgaaaggcaaggtcatgctaacattgactgggaatttcaagaaacaactncttcttctgcctcagtag

SEQ ID NO: 2916 - DNA, 392 bp, Glycine max
gaaaaatatcttcatgagcataaagaggcatgaaggattggattttgaatatccacctagggaccctggaatgcctcattaccaaatgcatgattgggacaacactggaggaagattttctgatgcatctacaaataactcacatggggaagccagattgcataacttgattcctgaggatggcaaaagagatcctcatgatactgtgcacaatgatcatcctgacatggaagcaaatgaaaagaaccaaagccctataagatggaaacagaagcctcttgtagaccagcaacaaaacaagagcatttctgaccttgcaatgaactatgaaaataggaaaacattagatgaacatattatagaatttttggagccagaaatccctatcaact

SEQ ID NO: 2917 - DNA, 431 bp, Glycine max
gagttctcagtgttagttgatcgtgccactggtggagccagcatcaaagatggtgaggtggaattgatgcttcacaggcgtattctccatgatgatagtcgaggagttggggaaccacttgatgaacaagtttgcgtgaacaataataatacttgcgaaggactaacagtcagaggaaattattatatcagcatccacaagcttggagctggttcacgctggcgtcgtacaactggtcaggaaatttattctccattcttagtggctttcacacatgagatctcggaaaactggaagtcctctcatttgacgaaaggaactatcatggatccaaattacagcttgcctcccaatattgctctgataactcttgaggagttggatggtggaattgtgcttctccgtttggcacatctatacgagccaagtga

SEQ ID NO: 2918 - DNA, 1603 bp, Glycine max
ggaaaatagcaaggggcaaattcgtcattagatataaaaccctaatgcccctcgttcggtgcttccatttatagtctcagtcttcttctcttcttctcttcttctcttcttctcttctcttgtctcacgatctcaacggagcacctctcttcaggtcaccatctagactgcaatcatggctgatggaccacagcatccatcagttgttcagaagctagctggacagtcttacctggtgtccaggcttagccccaactttaactctaggaattattctgcaactggttcttacgtcaatggcggaatgcactcgcctgggttggctgttgtgtcacctgtatctccagttactgtgcatgctccagcagagaaaggagtgagtggatttctagtggattttctgatgggtggagtgtctgctgctgtgtcaaagacagctgctgctccaattgaacgagtcaaattgcttatccaaaatcaggatgaaatgatcaaaagtggtcggttatctgagccatacaagggaattggtgattgtttcactcgaaccatgaaggatgaaggggtgattgctctttggagaggaaacactgctaatgttatcagatacttccctactcaggctctgaactttgcttttaaggattatttcaagaggcttttcaacttcaaaaaggataaagatggctactggaaatggtttgctgggaatttagcatctggtggggctgctggggcttcctccctcttgtttgtctattctttggactatgcccgaactcgtttagcaaacgatgcaaaggctgcaaagaagggtggtgagaggcagtttaatggcttggttgatgtttacaggaaaaccatcaagtctgatggtattgctggcctttatcgtggtttcaacatctcatgtgttggaatcatagtgtaccgtggtctttactttggaatgtatgattctctgaaaccagtggtcttggttggtggattgcaggatagtttctttgctagttttcttttgggatgggggatcacaataggtgccggcttggcctcttaccccattgacactgttcgtagaagaatgatgatgacttctggagaagctgtgaagtacaagagctctttgcatgcattccaaacaatcgtcgcaaatgagggtgccaagtcactcttcaaaggtgctggtgcgaacatattgcgtgctgttgcaggtgctggtgtgcttgctggttatgacaagctgcagctcattttgtttggaaagaaatatggatctggcggcggctaaaaatgatgacgacaatttcctgggataatcatgccgattgccttgtcatttgaataattatggatgagaaatattggtattgatattttcccaaatttaggaccttgatacttagaacccatagtcttgcgatcaagaattttcatttttgttgtttcatgccatcagcttataatcctggagtttgagccccccccttttggttgaaataattaagactcgtttggattgctcatgcgtggttgaaatttgattgtctagtgaaagttttgttatatttaagctattttaatggttatgcaaatcttgatt

SEQ ID NO: 2919 - DNA, 691 bp, Glycine max
atcaagtctgatggtattgctggcctttatcgtggtttcaacatctcatgtgttggaatcatagtgtaccgtggtctttactttggaatgtatgattctctgaaaccagtggtcttggttggtggattgcaggatagtttctttgctagttttcttttgggatgggggatcacaataggtgccggcttggcctcttaccccattgatactgtgcgtagaagaatgatgatgacatctggagaagctgtaaaatacaagagctctttggaagcattcaagataatcgtcgcaaaagagggtactaagtcactctttaaaggtgccggtgcaaacatattacgtgctgttgcaggtgctggagtgctcgctggttatgataagctacagctcgtcttgttcggaaagaaatacggttctggcggtggaggttaatatacagataatgacgacgacaactatctgaggcaatgatgttgcttcccctttgcattgaataatttggatgaaaaatagtggttttgaagtttccccgaatgtagggtaggggctttataataagaaatcatagttttgcaaacttgaattttagttggttattacttgccttaagcttataatcgtgtagtttgttagaccttttggttgaagtaattgaagactactgttttatttgttcagtatcaaaaaaaaa

SEQ ID NO: 2920 - DNA, 537 bp, Glycine max
cccattcgtccgtccacgcgtcccggcgagtgtcgtttccttcccttccctaacgatctgaggaagacaccaatcttctctccacgcccttcttgggtaaccgtctgaagtgcagcaatggcagatggattgcattcgcagcatccatcggtagttcagaagttatctggacagtcttatcttgtgtccaggcttgctcctaatcactccagaaactgttctaccactggtagttacttcaatggaggtttgcagtcttcaggtttggttccagtcacggcacacgcgccggctgagaaaggggtgtctggatttttgttggatttcctgatgggcggagtgtcggcggctgtgtccaagacagctgcggctccaatcgaacgagttaagttgctcatccaaaaccaggatgaaatgatcaagagtggtcggttgtctgaaccatacaaaggaattggcgattgtttcactcgaaccatgaaggatgaaggggtgattgctctttggagaggaaacactgctaatgttatcagatac

SEQ ID NO: 2921 - DNA, 572 bp, Glycine max
  unsure (1)..(572): unsure at all n locations
taccccattgacactgttcgtagaaggatgatgatgacttctggagaggctgtgaagtacaagagctctttgcatgcattccaaacaatcgtcgcaaatgagggtgccaagtcactcttcaaaggtgctggtgcaaacatattgcgtgctgctgcaggtgctggtgtgcttgctggttattaccaggcgccactttgctttgttcgaaaagaaatacggatctggtggaggtggctaagatgatgacgacaatttcctgggataatcatgccgattcccttgtcatttgaataattttggatgagaaatattggtattgatattttcccaaatttaggtccttgatacgtagaaatcatagttttggaaacaagaattttcattttggttgtttcatttcatgccaacagcttataatcttgaagtttgagaaccccccccggttgaaataattaagactcggtttgattgctcatgtggggttgaaatgcgattatttttgaaaaaagtctcgtcaaattcaagctcgtttnaggtttnnnnnnnnnnnnnnnnnnnnnnnnnnnnnnnnn

SEQ ID NO: 2922 - DNA, 730 bp, Glycine max
ggcaaatggagtttttgcctttctctctcctctctgtggagagagagagagagagagagagacggaggaagtgacagactggcattaaggaggacgaccctttggtgtttggatcttcaagaaagagagacccttgggatttcgtcaccatgagtctcttcggtcttggaaacagaaaccaaaaaacatttcgtccaaaaaagagtgctccatctggaagtaagggtgctcaacttcaaaaacacatcgatgccacgttgggtagtgggaacttgagggaggctgttaaactgcctcccggtgaagatattaatgaatggctagctgtaaacaccgtggacttctttaatcaagtgaatatcctgtttggtactcttacagaattctgcacgccaagtaactgcccttcaatgactgcaggaccaaagtatgagtatcgatgggctgatggtgttactataaagaaaccaatagaggtgtctgctccaaaatatgttgagtatttgatggactggatcgaatctcagctagatgatgaaacgattgtccctcaaagattgcgtatgtatgacatattgataaagctagttggccagttagctgaatcatctggattgttatttgctaataatatgcatcatagcactattttaattaattgctgcatagctataagggcctcctttccaaccaatttccgagatgttgtcaagacaattttgaagcgatt

SEQ ID NO: 2923 - DNA, 354 bp, Glycine max
taacagactggcattaaggaggttaagcattctctgtctctctctatatatatttatatatagtcgttttggtcattcttcaaatttttggttttggggatttggataggacgacccttgggggttgggttcttcaagatagagagacccttgggatttcgtcaccatgggtctcgtcggtcttggcaacagatcaccaacagaacatttcgtccaaaacaagagtgctccatctggaagtaagggtgctcaacttcagaaacacatcgatgccacgttgggtagtgggaacttgagggaggctgttaaactgcctcacggtgaagatattaatgaatggctagctgtaaacac

SEQ ID NO: 2924 - DNA, 879 bp, Glycine max
  unsure (1)..(879): unsure at all n locations
ggattcccgctcgaccaggcgtccgtccacgcggcacaattctctcttatcatctttgttattacctctttccaaagtccaaattttctagttccaccaaaccaaaccaaaccaaaatggcagcagcctcagcctcatccatgatatcaacaccagccttatctccaaccatccaaaagcaccatcatttgaagccatccaacgtgtgcttccaaggtcttagacccctcgcaaggttcaccaaagcctcatcaaccaaagtgagcaccaccaccaaaagggttattccaaagggtggtgttagagctgaactcaactcagcccttgtgataagcctcagcactggcctctccctcttcttgggaaggtttgtgttcttcaacttccaaagggagaacgtggcaaagcaagtgcctgagcagaacggcctcacacactttgaggctggtgatacacgtgccaaggagtatgtcagcctcctcaaatccaatgaccctgttggattcaacattgttgatgtcttggcttggggctccattggccatgttgttgcttactacatcttggccaccactagcaatggctatgaccctgcattctttggctgatttaatttcatcatcatgttgttccaactgtgtttcttgcttactttttagtatgtaatgtaatcaatgtcatgatgtataggttctctctaaagatccaacaagttcagcatatgctaatttgatcactattttcggctgcaatttggtttgctattatgattaatggaaaatgggacttctctaaaaaaaaaaagaggnaanaaaacatactaaaacatacaactaaanaaatcttaaaaaaaaacaatctaatttcactgtacttgac

SEQ ID NO: 2925 - DNA, 597 bp, Glycine max
tcgacccagcgtccgctcatcactgggctctccctcttcttgttgaggtttgcgttcttcaacttccaaagggagaacggtgcaaagcaagtgcgtgagcagaactgactcacacactttgaggctggtgacacacgtgccaaggagtatgtcagcctcctcaaatccaatgaccctgtttgattcaacattgttgatgtcttggcttggggcttcattggccatgttgttgcttactatatcttggccaccactagcaatggctatgaccctgcattctttggctgattttcatcatgttccattgtctttctttgcttgctttttactatgttataatgtaatcaatgtcatcatttataagatctcttttacatccaacaagttcagcatattctaatttgatcactattttcggctgcaatttggtttgctattatgattaatggaaaatgggacttctctacgtattgaatttggattctctttatcatgttccgctgtgtttgttgctttatattttttttcttgctagtttgtaatgcgatgtataggttctctcttgttcaagcaagtccagcatatgctaatttggtc

SEQ ID NO: 2926 - DNA, 368 bp, Glycine max
tgcacgcgtacgtaagctccgaattcgggtcgagctttgctattacctctttttccaaactctaaaaatttttagttccacaaaaccaaaccaaaatggcagcagcctcggcctcatccaccatgatatcaacaccagccttatctccaagcacaagcatccaaaagcaccatcatttgaagccatccaacgtgtgctttcaaggccttagacccctcacaaggttcacaaccaaagtgagcagcaccaccaaaaagggttattccaaagggtggtgtcggtgttagagctgaactcaactcagcacttgtcataagcctcagcactgggctctccctctttttggggaggcttgtgttcttcaactt

SEQ ID NO: 2927 - DNA, 459 bp, Glycine max
ttctctctctctctctctccatgagcacagtaccgtaacgtaacgtaaccacgagatgcctctattctagcacttggaaccccaaatccgtgccaattcctccgctccttttcgcagacgaaggcacattctgacgttcacaagattggaaggcaagactaaagattccaccacctgatacaagctagaaaacagaggtttgatatggctgtgtcactgtggagaagtcgcactgcttcatcagcactgaacttgttcaacaatactcttcgctgtttctcttccgaggcaacaaactccagtcctcatagtacacgagagagtatgatgtattctgacataaactcacgaattgggagttgcatgccactgtctgcaatgcgcattggaacaatcattcacaacattgagttgaatccagggcaaggtggcaagctcgtccgagctgctggaactagt

SEQ ID NO: 2928 - DNA, 1283 bp, Glycine max
aggaaggtccaccgaagctaaaggtgcttccacacgcagcagattttacctccataaacccttcgttcttcttcgtctccctttgcttctctcacttcccatgtctgagtggcttcgacgccttccctcgccagaatgctaactcatctccgccgcgcggctgccgcatgcggtggtgctacctccgaccacttcctcgctctcaggcagttcagctccgccgtcgtcgccgtttcctccgtgtctgattccgatccaacacttccctcttcttccgattcacagagaaaagcatctagatggttgctatttctacctggggcaatcacatttggccttgggacttggcagattggtagaagagaagaaaagattaaaatgttggaatatcgagagaagaggttgcaaatggaaccattaaaattcagtagtgcttattcatcagatgaggaattagattctctggaatttaggaaggtggtgtgcaaaggatattttgatgataaaaaatcagtctatgtgggaccacgttcaagaagtatttcaggagtcactgaaaatggctactatattataacacctcttatgccagttcccaattgtcctgacagtgtaagcattccaattttagtcaacagagggtgggttccacgtagttggaaagacaaatttttagaggcttcacaagatgaagatttggaagatgctcttccttccccttctcacgttgatggaagtaaatcttggtggagattttggtctaaaaagcctgttattgaggatcaggttgcatctgttacacctatagaagttgttggcgtagttcgtggaagtgagaagccaagcatatttgtcccggcgaatgaccctgggtcttcccagtggttctatgttgatgttcctggcatagctcgtgcttgtggccttccagaaaataccatctattttgaagatactaacgaaaatgtgaatccaagtaatccttaccctgtgcccaaggatgtgaataccttgattcgaagttcagtcatgcctagggaccacctaaactatacattgacatggtattctctttctgcagcagttacatttatggcttttaagagacttagacagaaaaataagcggagatggcaaagtcggagatagcaaagtcattttgttgcctgttatagttgaaatttatggacacatactccctcatttggcatcttgatacatctatctatctatctccttggagcattgtcttcccaatcttttcttcaaatctcaactttcaa

SEQ ID NO: 2929 - DNA, 591 bp, Glycine max
gaggggtgtgaatgtgaatgctgttaggcccatcatgaataatcctcccagtgttgaagatgtggcagcagcagcaatggggaagaagaaagtgaagaaagagggtgagcagaaggtggggaagcgtgtggtggaggaagaggagagaaaggaaagtactagagacatggtgggtgtgggtgggtatttgcagcaacagcaacaaggtggtggcatgatgggttggaattgggaggagaatatgccattggtgggaggtgtggtggatgaacaaatgtcatggggctccacttggttccctggttgggacatggacttgttggggggtgatgctttcactgccttgtacaatgatgttctttgggatgatgatatctggaacctcaacaaccaaattccaattcccttagatactaagaggtttcatttcggctagagtagaggttgttctcaagcctccattcatgtctttatgtttcctttagcttaggaatggaattccagtgttttctcttcaatttatatagtatgttgaattcactattttttttttttaatgctaatttggctcgtcaagaatcccgtacatct

SEQ ID NO: 2930 - DNA, 573 bp, Glycine max
ctcgagccgttgtgctgtgttgtgttgcaaacaaagaggagaaaaatatgagttacttgaaccgtgtttggatggcggcgacggtggcggtggcgcagggccacaccgatcccggccacaagtgcaagacggcgctcacctccatccaccacaaccggagccgcctcttctccggcggagccctgtcagatctccggcctctttccggcgtcgtgggatctgacgtggccggctcggtggcggggagctccgacgtggagaatagggtgaggcaagccgacgactctctgaggaaagtgatgtacttgagctgctggggtcagggctgaaccacacgtggcgttatgaacggtggagattgaagtggtggccggagaaagtgacccgggtcgggttcggatctgagttgacctgaccgagtcagatcggatgactcggttggagagaaaaacttggaatgttctgatcttgtaaataggttatgtgtggatgtatgtgtacagaggataaaaatagtttttcccactcccgagtggatggagatgatgagatctgaaattaataagaatccct

SEQ ID NO: 2931 - DNA, 442 bp, Glycine max
cctgaattgtgttgtgttgcaaacagaaaggaaaaaagaagaaaataagagaaagaagaaaaatatgagttacttgaatcgtgtttggatggcggcaacggtggcggtagcgcaaggccacaccgatcccggccacaagtgcaagacggcgctcaactccatccaccacaaccggagccgcctcttctccggcggagccctgtctgatctccggccgctgtccggcgtcgttggacctgacgtctctggcgcggcagcggggagctccgacgcgaagaatagggtgagccaagccgatgactctctgaggaaagtgatgtactttagttgctggggtcagggctgaaccacacgtgatgaacggtggagattaaagtagtcgccggagaaagtgaaccgggtctgttttcgggtcgggttcggatctgagttgacctggccg

SEQ ID NO: 2932 - DNA, 1240 bp, Glycine max
tcttcgcgtccgcccacgcgtccgtgccacttttcttcatagcactcaaaaaacaacaactcatctcatcattattccctttctcactcagcacattctaaacagtagcaccatcaccaataataatggcatcatcctcatcaaccgttgctttgagaaccatctcctctttctctctgaaacctgccaccacaacaagatcattactcaacactagtacttcatccaccataaccctcttaccctttacatcagcaaactcatttctctccaaaaccctcaaactcaacacctcttccccacactctcacctttcactaccccacaagtctttcacttgtagaagccaggctgaaccatcttctgactcagccaaagtccaagaactgagtgtgtatgagatcaatgagagagatcgtggaagccctgcttatcttagattgagccagaaaactgtcaattcccttggtgatctagtccccttcagcaacaagttgtattctggatgtttgcaaaagagggtggggataacagctggaatctgtgtcttgatccaaaacaaagccgagaagaagggagataggtatgaggcaatctacagcttctactttggggactacggtcacatttcagtgcagggttcatacctgacctatgaggacacttatcttgctgtgactggtggatctggcatctttgaaggggcttatggtcaggtcaagctgcatcaaattgtgttcccctttaaactattctacacattttatcttaagggcatcaaggacttgcctcaggagcttctttcccagcctgttgagcccagcccagctattgagcccagcccatctgccaaggcctgtgaaccacatgctgttattgctggctttactgactgaggaacaatgaggatcgacatttttcttttgtttcttttttaaggaagaaactcggatacagtttcttaggtgttcttcgtgttgttttctggttagaattagagttttatttcgacaatttacataataaaagttttcattaaaggtttatacagattgtcgaagtgaaggcttaattttcatagaagaacagcacaaattaaaaactgtttaagttttctccttaatttttattttttttaattctcttcattgttggcttggtttggagacacttgcaacaagttcacaatttaaccacctgttacttgtattgaactttattaatgtagtaattgtgggtc

SEQ ID NO: 2933 - DNA, 940 bp, Glycine max
ataacataacctcttgttttgtcatctaagaaaacctagtgagagtaagcacacattgatcagcaacaatggcagcctactcaagccatgctttgaaaaccatccctttttcttcctttgtgaagcctgtcagtaccaaaccaacatcattcttcacaccttcacctaccaaacctttcttacccttcacctcaccaaaccactctctcaccaaaaatctcaagctgaactccactttgccacacttttgcttgtcttcagttcccaagaaatctttcacttgtagaagccaggctgagcctgttgactcagaaaaagtccaagaactgagtgtgtatgagatcaacgagcgtgaccgtggaagccccgtttatcttcgattgagctataaaagtgtcaattcccttggtgatttagtcccctttagcaacaaggtaactttcttccgttcttggacaaaatttagatatactttccttaggttttcctagtattgatctccaatgaatattggaaatttaactagataatctatattgaactttaacgcaaagggtcattatgcaaattaataaagtgtaacttcaattctaattagataacaacaataaaatcctcagaaaaactgtacatatgttttatccttcaatgttttgctgcatttgaacgcatttacttttgttatggtaattttattttaaaattataatattctgaattttacgtttatgttgaattatttgttgttttgtattatgttcaaaccttaactttattagctgtaaagggtacatatttgctgttgttaaattgttatgattcgaatgatgtagttgcaaatgttcaattttgcatgtaattgttggtttgatactatgcagttgtacactggagatttgcaaaagcgcattgggataacatctggtatctgtattttgat

SEQ ID NO: 2934 - DNA, 543 bp, Glycine max
tgggtttggacagggtatgggtgctactccaccactgttgcatcctcagtccatgatgaatcagggttttgatcctgcatttggccccatgggtagaatgggtagttacggaggctttcccggtgctccgacaccaccattctctgggattttgccttcattccctggtgttggaggtgttggtttgcctggagtggcacctcatgttaatccagccttttttggaagaggcatttcctctttctctgtgaaacctgttaccaccacaaccctcttaccatttacttcaacaaactcatctctccccagaactctcaaactcaacacctcttccccacatcctcacctttcactaccccacaagtctttcacttgtagaagccaggctgagccatcttctgattcagccaaagtccaagaactgagtgtgtatgagatcaatgagagagatcgtggaagccctgcttatcttagattgagccagaaaactgtcaattcccttggtgatctagtccccttcagcaacaagttgtattctggatg

SEQ ID NO: 2935 - DNA, 787 bp, Glycine max
tttctcgcgtccgcccacgcgtccgcccacgcgtggggttcaatgagagagagggtggaagccctgcttatcttagattgagccagaaaactgtcaattcccttggtgacctagtccccttcagcaacaagttgtactctggatgtttgcaaaagagggtagggataacagctggaatctgtgtgttgatccaaaacaaatcagagaagaagggagatatgtatgaggcaatctacagcttctactttggggactatggtcacattgcagtgcggggtccttacctgacctatgaggacacttatctggctgtgactggtgggtctggcatatttgagggtgttaaaggtcaagtgaagctgcgtcagattgtgtatcctttcaagattttgtacacattttatctaaagggtatcaaggatttgcctcaggagcttcttgtcaagactgttgagccaattccatctgttgaaccttcccctgctgctaaggcccttgagcccaatgctaccattgctggcttcaccgactaattcatcaactttttttgtatttgctttggcctttgtagtagtatgatttaagttactgaataataataacaagtggggactatgatgggttttgtagtggtggagtttctatttaacgaaaagcttgacattattcagttagtggtgtttaagcaaatataatgaataaggaaaggaaatataatgaaatgatggcaaacataattatacttcctttccttattcattatatttgccatcatttcattatattt

SEQ ID NO: 2936 - DNA, 591 bp, Glycine max
cttccatttacttttttttaccccattttaaacagaccgtggtttcccccttattccccataatgggggggatcccaacccttgctttgagaaacctctcctctttttctgtgaaaacctggtccaccacaagatcattactcaccaccttattcaccacaaccctcttaccatttactttaacaaactcatctcttcccagaactcttaaactcaacacctctttcccacattctcaccttttactaccccacaagtgttttacttgtagaaaccaggctgagccatcttctgattcagcccaagtccaagaactgagtgtgtatgagatcaatgagagacatcgtggaagccctgcttatcttagattgagcccgaaaactgtcaattcccttggtgatctagtccccttcagcaacaaggatgttactttttggtctttgtttaatactacctgcaaattttatgagcctttgttcattttacatatgaacttttattagtagtgaaagcataactttttgtattttcttttttcatttcaccttattatatttaatttaaaattccagtcatgggtttaagctaaaa

SEQ ID NO: 2937 - DNA, 342 bp, Glycine max
ctcgagccgaatcggctcgagtcacttttcttcatagcactcaaaaacaactcacctcatcgttattcactttctctcaccacattctaaacagacagtagtagcaccatcatccccaataatggcatcatccccaacctttgctttgagaaccatctcctctttctctgtgaaacctgttaccaccacaagatcatcactcaccacctcatccaccacaaccctcttaccatttacttcaacaaactcatctctccccagaactctcaaactcaacacctcttccccacatcctcacctttcactacccctcaacaagtctttcacttgtagaagccaggc

SEQ ID NO: 2938 - DNA, 480 bp, Glycine max
tgagggctaataaagatgttttcgagagtatgaggaaaaacccaaaagtaaaatatgatggggaaagattctcttacaagtcgaagcatgccgttagggacaaaaatcagctgcttttcctggtacgtaagtttccagagggcattgctgtggttgacctaaaagattcttacccaaatgtgatggaagacttgcaggctttgaaagctgcaagggagatttggctgttatccaactttgactctcaagaggacattgcctacccaaacgatcctaaagtgcccattaaggtggatgatgaccgaaagcagctttttcgggggattgaattgcctcgtgatatgattgacatagagagggatctacaggaagatggaatgaagcctgctaccaacactgcagagaggaggagtgcagcgcagatgggaggcatttcatccaggcctagacctaaggagaagagaaatgaaatcactaaga

SEQ ID NO: 2939 - DNA, 955 bp, Glycine max
  unsure (1)..(955): unsure at all n locations
cttccttcccccgttctacccaacaagcaccatttataccattgaggagtttacacaagtgaacataggcagcaatgattacatgggcaattacttccttcccccgttctacccaacaagcaccatttataccattgaggagtttacacaagttctgattgaagagttatctctgaatttacaggctttacatgacattggagcaagaaagtatgccttggctgggttgggccttataggatgcaccccaggtatggtgagtgctcatgggacaaatggatcatgtgctgaagagcaaaatctcgctgcattcaatttcaataacaagcttaaagctcgagtggatcaattcaacaatgatttctattatgctaattccaaattcatctttataaacactcaagcattggccattgagcttcgcgataaatatggttttccggttccggaaactccttgctgcctaccgggattaacaggggagtgtgttcctgatcaagagccgtgctataataggaatgactatgtgttttttgatgctttccatcccaccgagcaatggaacctactcaatgcattgacatcttataattctaccactaattcagccttcacttatccaatggatatcaagcaccttgttgatcatgaaattaagatggaattggagctcacaaatgagtccacttcacaacttagtgccactgaataagttctggttatcatgtagtcgttcatatggagttgaaataattgtgagttgaatatgtattaagtaatggcctgccactgaattgaacgacaaagtggaatgaatcaagtgaataaattggctatcctgcctcgaatatgatccaatttgtattgnnnnnnnnnnnnnnnnnnnnnnnnnnnnnnnnnnnnnnnnnnnnnnnnnnnnnnnnnnnnnnnnnnnnnnnnnnnnnnnnnnnnnnnn

SEQ ID NO: 2940 - DNA, 857 bp, Glycine max
gaccacaccaccctactacattcccacctttagtcttgttcttagagatggcttgtgaaaccaagtcatggttggttatgtttcttgttttcttggttgctaattgcatgcaacattgtgtccacggggtgtctcaagtgccttgcctttttatctttggggactctatgtctgatagtggaaacaacaatgaacttccaaccacttcaaaatctaatttcagaccatatgggatcgactttccattaggaccaactgggagatataccaatggccgaacagaaattgacataatcactcaatttctgggatttgagaaatttatcccaccctttgcaaacactagtggttcagacatacttaaaggtgttaactatgcatcaggtggatctggtatacgcaacgaaactggctggcattatggtgctgctatcggcttgggattacagttagcaaatcacagagtcatagtatctgaaattgctaccaaacttggaagtcctgacttagctcgacaataccttgaaaaatgcttgtattatgtgaacataggcagcaatgattacatgggcaattacttccttcccccgttctacccaacaagcaccatttataccattgaggagtttacacaagttctgattgaagagttatctctgaatttacaggctttacatgacattggagcaagaaagtatgccttggctgggttgggccttataggatgcaccccacgtatggtgagtgctcatgggacaaatggatcatgtgctgaagagcaaaatctcgctgcattcaatttcaataacaagcttaaagctcgagtggatcaattcaacaatgatttctattatgct

SEQ ID NO: 2941 - DNA, 514 bp, Glycine max
cccaaatgctacttgcagctctgaaaagaacattcctttcatcacgctgctatatcgtcctggtcactatgatatcctctatccaaaatgatgacttttttggggaaaagaccctttctttgttacttttttggtggtggtgtgaagccgcaacagctctgcactcagcccggttgctataggacatgtgtggtctgtaccttgttaatgttgaatggtcaattttcttgaacgttacctgtttagaagagattgatcaacaaagtacgtcaacattaacacgctaacaatttaaaacccagcttgatgtttgctgctttacatgttatccatgatttcattgttctcaatatctctccatgggggtttagtgattagtgtaatagcatggctccttgtagcttctgtagaatgaagcacgtgcattatctcaatggcaatggcaatggcagtttctgttttgcatgtgtgctcatttgttacacaataatattgcacaaatgatcattttatc

SEQ ID NO: 2942 - DNA, 788 bp, Glycine max
gcgacgcgtacgtacactcgtgcgaccacgttctattcgttcatattcctcagtgcaacacatccaacagcaagacgcaaactagtaacagagagaaagcatttcaaagaagaaacaaaacgatgtcgtttatgcgaggggattttctttctcgaacgaggaagctcgtgaagggtttggccaaggcgcaacccgcgtggctcaaagccatggaacaggcaccacctgcaacgtttcctcggtctgccgggaaaattccgaccattactcttcccgaggatgtttatgtgaagaagttttataagaaatatccggaatccaaatcccatgacgccataaagtttcatgcttttgatccccctccgtctcgtgtatttgccttgagggttcttgaattgaaggagcagggcattagtgaggagcaagctatggctatagctgatatggaatatctgacagagaagaggacaaagaagaaagcatatacccgtttgaaggaaattgcacgtcttcaacggaagagacttccgcaaaatccatatcctatctgccatcaaggagatacatgctgatgagaggaaatatgttcgtgatcgtttcttcagtcccaagatgcttgaaattgtggagaaacagaaagccgatgcagcagcggagagattgagtcgacgtggtgattggtgacttttacggcggctaagttacaatacattgagtgtttagctcttgaaaacatggctctgacaataacatttaccattcaggcactgacaagtgcgttcttcttc

SEQ ID NO: 2943 - DNA, 1119 bp, Glycine max
  unsure (1)..(1119): unsure at all n locations
gaccatcccgaacggactctaaaaatttcgacaaccaacgaagatacaacaaccatagtggttttctctctttttttctttttcctacgttgcgaccaggttgttcactttagctgcgaaagtgtttgtttggctcagtttgttgaattcgctggcagctacagctatgatcatcaacagcaccccttttcctctatgatcgattcgattccgtagagtgagaaatcagatcagaataatcatcgatgggtaatttgttcgtgaagaagcccaaggtaacagacgtcgataaagcaattctcgctctcaagacccagagacgcaaactcgcccaatatcaacagaagctagatgctgttattgaagcagaaaagcaagctgcacgagacttgattcgtgaaaagaagaaggacagggccttgttagcactaaagaaaaaaaaagacacaagaagaattgttgaagcaagttgatgcttggcttataaatgttgagcaacaattagcagatattgaactgactagcaagcagaangctgtgtctgaacgtttgaaagctggtaatgatgcaatgaaagccatacagagtgagatacacattgaagatgttcacaaacttatggatgacactgctgaagctaaagcttatcaagatgaaattaatgaaataatgggggagaagttatcagcagaagacgaggaggagattttagcagaatttgaggacttggaaatccagcttacagtccaagatcttcctgaagttcctccctcagctaatgaagaaattgaagaaaagttggaccttcctgatgtcccaaccaaagcacctgttaccagtgatgctgaagtatctacgaaaagaaaagttatggaggaaccattggcagcttgaagaacattgcgacccaaaacatgtcaattgctttgcaaaccaaggcataagatctgactttgtgtttgcctgtatccttcaaattctgttgcaaaattcgtgcagttactggagtttgattggttttaccatttgcagtgacattgaatttgtacagatttgcatgtataataatacatcagttttaacaagaattatatactgagaaaatcatattttgcaacc

SEQ ID NO: 2944 - DNA, 763 bp, Glycine max
cgtcgactgcccgcgtacctaagctaggaattcacccccaacgaagatatgtttttctctttttttcctacggtgtggccaggctgttcactttagcgaaggatcaaaaaccctgtgaaagtgtgtttgtttggtcgagttgattgaattcgctggcagcttacagctatgatcatcaacaacgccccttttcctctatgattgattcgattcgattgaagtcgattccgtagagagtgagaaatcagatcacaataatcatcgatgggtaatttgttcgtgaagaagcccaaggtaacagacgttgataaagcaatcctcgcactcaagacccagagacgcaaactcgcccaatatcaacaaaagctagatgctgttattgaagcagaaaagcaagctgcacgagacttgattcgtgaaaagaagaaggacagggccttgttagcactaaagaaaaaaaagacacaagaagaattgttgaagcaagttgatgcttggcttataaatgttgagcagcaattagcagatattgaactggctagcaagcagaaggctgtgtttgaaagtttgaaggctggtaatgatgcaatgaaagccatacaaagtgagataaacattgaagatgttcagaaacttatggatgacactgctgaagctaaagcttatcaagatgaaattaatgaaataatgggggagaagttatcagcagaagacgaagaggagattttagcagaatttgaggactttggaaatcagcttacag

SEQ ID NO: 2945 - DNA, 899 bp, Glycine max
cgaccgcgcgtgcggaccaatccatagccgaagagaaaaagagacaaggaccgtctagaattgatttcattgagtgtagcagcaaccaattccatttccagtttctgattcgtcaaacggacaaaggaagtgaaagggtttagggtgtgacctgagatcaacatgttgcggaggcttctctcttctcacctcaaaaccctagccgccaccgcttcttcttccactccccgatctgcttccgccgccgccagattcgccgctctctctcgctcctcccgctacttctcaacccagtccgaggatgctactgccatcaaaaagaaggttgaggatgtaatgccaatcgctactggtcacgagcgcgaggagcttcaggctgagctcgagggaaggaatattcttgaaatagaccatcccgaaggtccattcggcacgaaggaagcacctgctgttgtcaaatcttactatgataaaaggatagtcggatgcccaggaggtgaaggtgaggatgagcatgatgttgtctggttttggctggagaaagacaagccccacgaatgtccagtgtgcgcacagtattttgttcttgaagtggtaggacctggtggatcacccgatgggcatggcgatgatgatcaccattgattgcaatccttcaattaaatctggaataaattctggaaagatggagagacattgtttagcatacactctggcctttcaaaatcctgtggcctatgtttgattttgatttgtctataccttgttgtgttgcaacttttgagctagaaagtttatgcgattatttgaacgcaggatgctcatttgcttgagctaccaattctgttagactatgttttgtgcgttgtgaaataattgatagaacttgacgatttttt

SEQ ID NO: 2946 - DNA, 508 bp, Glycine max
  unsure (1)..(508): unsure at all n locations
tttcagcgttccatgggttgggtttggaccaatccatagccgaagaagagaaaaaagagacaaggaccgtcttgagttaatttgattcagtgtagcagccagcagccataagcaacgcaacaattccatttccagtttctgattcgtcacgtcagacaaaggaaggggttagggtgtgacctgagatcaaaatgttgcggaggcttctctcttctcacctcaaaaccctagcctcctccgccgccgccgccgccaccgccactccccgatctgcttccgcctccgccagattcgccgctctctctcgctcctgcctctacttctcaacccaatccgaggatgctactgcgatcaaaaagaaggttgaggacataatgccaatcgctactggccacgagcgcgaggagcttcaggctgagctcgagggaaggaatattcttgaaatagaccatcccgaaggtccattcggcacanaggaagcacctgctgttgtcaaatcttactatga

SEQ ID NO: 2947 - DNA, 842 bp, Glycine max
tggaggaagttcaacggtgaccggaggttttacctgcagaggcataggtttgccggttaccagtcagagattgcacgttcggtgttttgtttatgtcctctggggtgggccccatggagtccgaggctggtcgagtccgtcgccttgggttgcgtgccagttgtcatagcggacggtattcggttgccgtttgtctccgcggtgaagtggtcggagatatcggtgacggtggcggagaaagacgtggggaggctggctgagatactggagcgcgtggcggcgacaaacctgagcacaattcaaaggaacctgtgggacccagcaacgaggagggccctacttttcaacagccaggtccaggtaggggatgccacgtggcaggtcctgagggctttgagtgaaaagcttgatagatccttcagaagctcgagggtttcacgccaattggattttgacacgtaagagggtttaaagttaaactcgacgacaagttgtgtttatttcttcactcacccgtggtaatgaagatgacatttcaaaaacacacgctgcatggacaataataaaaataaagaaatagtgatgataatattaatatttggtggatgacagctggaatttcttgagagatggaatttaatgactcatgttggggcccaaagtagcagcttcaagactttcttcgagtatattaatggtgacgtggttgtggtgatgatgacatggcaagaattcattcgttggttttgcggcttggactgaaaaatatctgtggagttaaatcatttttgcttgtgaataaaaatataagaagaatacacaaattttcatttttgtatgtt

SEQ ID NO: 2948 - DNA, 863 bp, Glycine max
cggcccgagggctgagcgatgttttccctcctctaaggtcccaattttttcttaaaccctagaacacacactctctctcacagaagaagaagctgctgcagaagagaatttccaaaatgtcgatgtcgaagagttccaagatgcttcagtacatcaactaccgtatgcgtgtcaccattcaggacggtcgccagctcgtcggaaaattcatggccttcgaccgccacatgaacctcgtcctcggcgactgtgaggagttccgcaagcttcctccggccaagggcaagaagccagccgaaggcgccgaccgcgaggaccgccgcacgctcggcctcgtcctcctccgcggcgaggaggtcatctccatgaccgtcgagggccctcctccgccggaagagtcccgctccaaggcagtcggcgccgccgctctcgccggccctggcatcggacgtgctgccggtagaggtatcccgcccgcccccgtcgtccaggcccagcccggactcgccggccctgtccgcggagtcggcgggccccgcccccggcatgatgcaaccgcagatctcgcgcccgcctcagctcaacgcaccaccggtgtcttatcccggcggtggaccgcctgtgatgaggcctccggggcagatgccggggcaattcgctcctcctcctatggcgaggggtccgccaccgcctatgccgcctgggcagtttgcaccaccgagacctggtggccctccgccacagttccaagttccaccgccgcagtttggacagagacccatggggcctccccctcctggacagatggtgagaggacctccggctcctcctcgtcccgggatgccggctccaccaccgcctcg

SEQ ID NO: 2949 - DNA, 539 bp, Glycine max
aaggtcccaattttttcttaaaccctagaacacacactctctctcacagaagaagaagctgctgcagaagagaatttccaaaatgtcgatgtcgaagagttccaagatgcttcagtacatcaactaccgtatgcgtgtcaccattcaggacggtcgccagctcgtcggaaaattcatggccttcgaccgccaccgtcacctggaagtggtgtttcccgtgtttggtcctccttcgacctgtgcatgccccctccgcccgaacccttcaaatcaacagccaacaggtaatggggagaattgatttggtttcttactggtaattctgaagaatatggacctctgggcttccttgcacgcaattcaatatccagcttgtacgtttggacctgattgttgcttgtacaaccttgaagaatcactctcttcttagggattgtttttctgatgtctcgatgagaatgtgtaatgttagaagaacaactttatgttttggagggaattattctactagaacctgagcattagacatataagtcggc

SEQ ID NO: 2950 - DNA, 747 bp, Glycine max
agaagacgacagaaggggacgattactaccaagtgaaaaagcaattaactaagcatatatagcgtgtaagacagtgagaaaaaaagtgttgtgtagagagaaatggctaggtggtgcatcttggtggttcttgcccttgtcgtggttgcaagtgccagaaacatgcccaatgacgcaggtttggaggaccagaagaacttcctcgggtatgggttctctggagttggcaacaatgggcttccctttggaggagtgggttctgggtttgatggtaatatgggtgggccttctgggctcggtggatttggaggattcggtgggcctagcgggctcggaggtcttggtaacggtgaagggcccaaccttcctctcccttgagagttgagaccacacaccttcgtgtttcttattttcggtcgctattatcatagcctatatagtgtttcttttagtgtttagttcaagaaaataattatggcgtgaggtgttattgtcttctaagaaatctaggctttgtcgcctgaaaaggatagtagtggtacgtagtagtactagtgtggggttataaaaaaaaaagaaagagtggtagtagtagtgtggtttcatggtttgtaacgagtgggtgttttaatttcctacatgttatcatgtatggttctgttagttttatgggatgcatattttcacttggaatcagagcttatgcattttgtaatatcactaatatgtacgtgcttgcttctctct

SEQ ID NO: 2951 - DNA, 759 bp, Glycine max
  unsure (1)..(759): unsure at all n locations
acggcagcaagacaaaaagggaccaccactactaccaagtgaaaaagcaactaagcatagtgtgtaagaaagggagaaaaacaagtgctgtgtagagagaaaaatggctaggtggtgcatgatcttggtggttcttgctcttgccgtggttgcaagtgccagaaacatgcccaatgacgctggtttggaggaccagaagaacttccttgggtatgggttttcgggagttggcaacaatggccttccctttggtggagtgggttctgcgttagttcgcaatattgctggttactctgcgctaagaggacttggaggattcggtgggcctggtgggcttggcggactcggaggtcctggtaacggtgaaggacccagtcttcctctcccttgagagttgagaccacacaccttcgtgtttctttcggtcgctactttgctattatagcctatatagtctttcttttagtgtttcgttaagaaaataattgtggcgtgaggtgttatgttctaagaaatctaggctttgtcgcctggaaaaaatagtagtacgtagtagtactagtttgtgattttttttttgtttttataaaaaaagtagcaatagtgtgatttcatggtttgtaacgagtgggtgttttaatttcctacatgttatcatgtatggttctgttagttttatgggatgcatattttcacttgaaattagagcaacaaaaaaaagaaannnaagcggccgctctaaggatccaagcttggtgg

SEQ ID NO: 2952 - DNA, 992 bp, Glycine max
ttgcaataatgtaaaagttccacttgatattttaatatttaagttgatgaagacatatatgagatcatcatccttacgcaaggctgccttgagggccttgtcaaaaacattgactgcagatgaactctattatctgagggagcaatttgcactgctagaaccaagcaaaaatggcagcatatctttagagaatgttaacaaggccttgatgaaatatgcaacagatgccatgaaagagtctcgcatccttgacttcctttcatcgctgaactcgttacaatatagaaggatggattttgaagaattttgtgcagctgcattgagtgtgcatcaacttgaagctcttgatcgttgggaacaacatgcccgctgtgcatatgaactttttgataaagacggaaacagggctattgtcattgaagagcttgtttcagaacttggacttggtccctctatccctgttcatgtcgttcttcatgattggatacgccatactgatggcaagttaagttttcttgggtttgtcaaattattacacggtgtgtctagccgaagccttgcaaaggttcaatgaaatttaaagcagaagccctatggatatgctgaattttctctgccttgtgtggctcgaccatagttgaatttgtatctagtgcgtgctggaactaattattgttgtcttgttgctatctgaagctcttgctagcacacacccatttaaagtacaggttcataatgaaatgcaactctgattcttttgaagggagctcaaattgtaaaatagtctacagatctggtttaagaattaatatatgaattgtagatttagattagctttctcttgatgggtggtaataatttcctgtcacctgtattaatgaatacttttgtacacacggtacatttgtgagtcttcaaattttactcttatttttgttgttgtattttgtgttatgccacacattctttgaatcaattacttttcctcgtcc

SEQ ID NO: 2953 - DNA, 492 bp, Glycine max
gcttgtttcagaacttggacttggtccctctattcctgttcatgttgttcttcatgattggatacgccacacggatgggaagttaagctttcttgggtttgtcaaattattacacggtgtatctagccgaagccttgcaaaggttcaatgaaacttaaagcaaaagccctatggatatgctgaattcctctgccttatgtggctcgaccttagttgaagaactaattatcgttgtctcgttgctatctaaaatcccttgctagcacacccatttaaagtacaggttcataatgaaatgcaactgattcttttgaagggagtgcaaattgtaaaatagtctacagatctggtttaagaattaatatatgaattgtagatttagattaactttgtcttgatggggggtaataatttcctgtcacctgtattaatgaatacttttgtacacacggtacatttgtgagtcttaaaattttactcttatttttgttg

SEQ ID NO: 2954 - DNA, 873 bp, Glycine max
cgaaacttggttttgcggaaaaacaaagtatcacctctacacagcatccgatattacacacatattctgcttcttcttcttcttctctctctctctctctctaaatatttttctctctcttcagcgaattcgtttttctcttcaagcttcggctatggcgtctggatcctcgggtcgcggaaactctgcctccaaaggcttcgatttcgcttccgatgacatcctctgctcctacgacgactacgccaaccgcgattccacttccaacggcaatcacaccgatccggattttcacaaatcaaggatggcaagaacatcaatgtttcctactactgcttataatccacctgaagattctttaagtcaagatgtgattgcgactgtagagaagagtatgaaaaaatatgctgacaacctaatgcggtttctagagggaattagttcaaggctatcacaattggaattatactgttacaatcttgacaaatctattggagaaatgaaatctgatataaatcgtgaccatgtggagcaagattcaaggctgaaatctcttgaaaaacatgttcaagaagttcacaggtctgtacaaattttaagagacaagcaagagctagctgagacacagaaagaattagccaagcttcaacttgctcagaaagaatcatcttcctccagccattcacagtccaatgaggagaggtcgtcacccacaacagatcctaaaaaaactgacaacgcatctgatgcaaacaaccagcagttggctcttgccctgcctcatcaaatagctcctcagccgcagcctgccgcaccctcagctcaggctgctgcatcaaatgtgactcaagcccctcaacagcctccttatta

SEQ ID NO: 2955 - DNA, 595 bp, Glycine max
tcttggttttgcggaaaagcaaagtaacacaacatagcatccgatacacattcttcctttctctctcttcgtctctattcagtgaattcggatttttttttcctcttcaagctccggccatggcgtctggatcctcgggtcgcggcaactctgcctcgaaaggcttcgatttcgcttccgatgacatcctctgctcctacgacgactacgccaaccgcgattccagttccaacggcaatcacaccgatccgcaggattttcacaaatcaaggaggatgtttcccactactgcctataatccacctgaagattctttgagccaagatgtgattgcgactgtagagaagagtatgaaaaaatatgctgacaacctgatgcggtttcttgagggaattagttcaaggctatcacaattggaattatattgctacaatcttgacaaatctattggagaaatgaaatgcgatataaatcgtgaccatgtggagcaagagtcaaggctgaaatctcttgaaaaacatgttcaagaagttcacaggtctgtacaaattttgagagacaagcaagagctagctgagactcagaaagaattagc

SEQ ID NO: 2956 - DNA, 513 bp, Glycine max
ggcaacagcagatgtgttcaatgccattggattgctagaattcttctatgatcaatcccctgaagacatgcaaagtcttggaactacattcttcactagtgggatcggtgttgggaacttcttgaacagctttttggtgacaatggttgataaaataacaggaaggggtgacaaaaagagctggataggggacaacttgaatgattgtcacttggactactattatgggtttttgttggtcatgtcaagtgtcaatatggtggtttttctttgggtttcaagtagatacatttataagagggaatcgataagggtcaaggacggtctttgtgttcaaatggagggaggaaacccaactttggacgcctctcttggtttacaagtgtgctaactagctatagggtggtggtaggcctaggccatgataaaataaccaaccagtagtatcatattaaatctaaattttcttgacagattctgcggcaaactgataagtgattgtttatttgaatt

SEQ ID NO: 2957 - DNA, 679 bp, Glycine max
atttctgtctcgttctcctctttctctttctctttctctttctctttcatgaacaacacaaacacaaggatgataccgcaacagtgggcttctccatgtggaaaccaatgcaccaataaatacgctgccctaaccaaaatcccatggcgagtattctgcaaaaagggttgcgactcagatggagagacatgggaagaatgtttggaggactgcaatcaaatatgctacaaggatcccgtactaaaggaccagcagtggagtgcttatattgatcgttcccctggagctgccagttattcagaggaatgttttcatgcatgtgtatctggctgcggttacaagtttgaggttaaatcagaggaagctgataaagtctgtcctaacaggcaaccaaagcctgaaaccaagcctactaagaagccaaagccacaacctgtacgccccatcgatctgcctggtgatatacctgacacttctgcatagtgaaaaacatcagcatatttgacaaaaatccagcatgtatgtatacttgatactttgttggttatattctctcaagaatttttttttctttcgttttctttttttttttctttttaccttgagacatgctaattgttatcagcatgagttacttacattttgtggacaacaccatgagtggttgtgcctatttttg

SEQ ID NO: 2958 - DNA, 567 bp, Glycine max
ctttttctttattcccccggcgcacgatagcgccatcgctttcgtttcgcggttggtaaccgtctctctttcatcaccgtatttatttccattcacagaaccaacaaactctctctctcccgctcgagcttcttcactgttctctctctgagcaaaaccgaggatccctcatagtattggcaggtcaaatattggctaatgtggatggggcattcatctatgtacaagcgcactccttcgagagataattcaaacatggaggacgtggaagaaaactcagatcttttagacatcggcctggacaagggaacctcaaatccttcattgatgctttctttaccgcatgtacttgtggcgaccatttcttcattcctttttggataccatcttggagttgttaatgaaccacttgagagcatttctgtggatcttggtttccgtggaaatacattggcagaaggtctggtggtgagcatatgtcttggtggtgccttgattggatgtctactaagtggttggattgctgatggggtggggcgtcgtagggctttccaattgtgtgctctg

SEQ ID NO: 2959 - DNA, 930 bp, Glycine max
cgccgcacgcgtacgatcgctcgtataacggcaaacttcaacttgtaatcaagggagagagaaaatttcaagcacaaaaaatggcggagaagaaagtggtgatcctaggaggtggtgttgccggtgccaaccttgcaaaaactatacaacgtcaagccaacgtcacccttattgatccgaaggaatattttgagattccatgggcaagtttgaggggattggttgagccaacttttgctgaaaggatagtgatcaaccatagagagtacttcaaaaagggtaaccttgttgtatccagtgctgtcaacataactgaaactgcagtggtgactgaagatggccagcagattgcctatgactatcttgttattgccactggacacacagaaccaatccccaaaaccaggagtgaaagacttgaccaatacaaaggagaaaatgcaaagatcaaatctgcaagttcagttttgattgttgggggaggtccaactggtgttgagcttgcagcagagattgctgttgattttcctgataagaaggtcaccatagtgcataaaggaacgaggttgcttgaatacattgggacaaaagcttcaagcaagactttaaagtggctcaaatcaaagaaaattgatgtgaaactagaacaatcggtcgatttgagctcctcttctgaagaaaataagacatatcaaacttcaaatggagagactataaaagcagatcttcattttctatgcacagggaaaccacttggttcaacatggattagagaaactcttctaaagaatgacttggatgctgatggaaggatcaaggtcgatgagcacttgagagtgaagggcaagagcaacatttttgcaattggagatattacagatgttcaagtaagtgttactaaccaaaaccaagtcaattttggcttttaac

SEQ ID NO: 2960 - DNA, 413 bp, Glycine max
tttcccccctacaaacaaaaacaaagcaacattcccttttctatctgtttccttcgcgaaccagcaacaacccccggcgcacgatagcgccatcgctttcgttacgcggttggtaaccgtctctctttcatcaccgtttttatttccattcacaaaaccaacaacctctctgtgatttttcttcacttttctctctcggaacaaaacggaggatccgtcatagtattggtcaaatattggctaatgtgggtgggacattcatctatgtacaagcgcactccttcgagagataattcaaacatggaggacatggaagaaaactcagatcttttagacatcggcctggacaagggaacatcatatccttcattgatgctttctttaccgcatgtacttgtggcgaccatttcttc

SEQ ID NO: 2961 - DNA, 832 bp, Glycine max
attgggacaaaagcttcaagcaagactttaaagtggctcaaatcaaagaaaattgatgtgaaactagaacaatcggtcgatttgagctcctcttctgaagaaaataagacatatcaaacttcaaatggagagactataaaagcagatcttcattttctatgcacagggaaaccacttggttcaacatggattagagaaactcttctaaagaatgacttggatgctgatggaaggatcaaggtcgatgagcacttgagagtgaagggcaagagcaacatttttgcaattggagatattacagatgttcaagaaatcaaacaagggatgtatgcaagtgctcatgctcaagtggttgccaagaacctgaagctattgatagagggaggaggcaaagagcgtaagttgggaacatacaaggcacagccaccaatatctatagtttcacttggaaggaaaatagctgttgcacagttcccattcatgactgtgcttggaaggcttcctggcatgatcaagtcaggggatttgtttgttgggaaaaccagaaaggaattaggactcgaacctaatgttaaaaaatcttaaatttggtatattgagtgagtgttgtggtgtgtaattgtgtatatacacttcttcaactctttttcttccttgtcattgttgtgcatgtgtaagttgattgtatgtgtttactttcctattgtattcaacaaattactttgtatctgtaatgtttcttaatgattttgatgttgtcggtgttgtctcttgagatatgggattggagtcagaagcagaatgagttagagtgttattcattggacaattt

SEQ ID NO: 2962 - DNA, 597 bp, Glycine max
aaacatcttctctctttaccttccttgtctcaagtgaaccttttttctcaaaagcttcccttttgagttatatgttcaccaccaccattttgaattgaaactcgagaatgggagacaaagaggtaaaggaagaagaacaaaaaggtggattcagggcttccatgtttatttttgtgttatcagcattggacaacatgggttttgtggcaaacatggtgagcttggttctatacttttatggggtgatgcactttgatctgtccaactctgccaacaccctgacaaactttatgggctcaactttcttgctctcactcgttggtggcttcatctcggacacttacttcaacagactaaccacatgtttgctttttggatcactcgaagttctggctttggtaatgctgacggttcaagctggtctggaccatttacacccagattattgtggcaagtcaagctgtgtcaaaggtggcatagctgtcatgttttactcatcattgtatttgttggctttgggcatgggaggagtgagaggctccttgactgcatttggtgctgaccaatttgatgaaaagaagaacccaggagaagcaa

SEQ ID NO: 2963 - DNA, 592 bp, Glycine max
gaaaaacaaaaaatcaacgaatggcacttacggggggtaagcaacgaacgccaagagacttgggtggaggagtaatctcgaccactttgtagggaaggatgctacctcgttctctgtctctgtctctcttcctactgcacgaaacctcaaacgacatcgtctgctaaaagagagcgaaaacgagattaactaatgaagaatcatggaaaagatagaaaagtgggtgagtgcggtaccttctggcatgaagcgagacccatgttccacgacgccattacaattagcttctcttctcttcaattctcgtcacgcaaaatggcaacagcaaagccagaaaaaactccggattttttttgtggtgggacacgagtcacagggcgaggcctaagccaaagtaggagactacacagataatcctgggagttgcagactcccaaactatgagcaagaagcagtagcctaagagaggctggcctctgctaagatcctccaccattctgcaggcttgatgagcaagcacatccacacattgattagcttcgctataaatgtgagagatgcttatattgtcatgttgaataattaaattcct

SEQ ID NO: 2964 - DNA, 1083 bp, Glycine max
atcaaagtcggaacctgcatgcctttggtggctgcgtttcttccttggcgctgtgttggtggaatctctcgctctctctctgactctgtgtctctttcccaggccaggaccgcgcgaaacacgtaaattccccttcaaacacacaaacaaaacgcagtgtttgaagcatctctatatatacccccccttctcagccaaacaatccccattccctcttctctaaccctatcttctctcttgtcttgattccattcaatttaaacctcagggcgtggcaagtttcaacctttttcgagcacccattaacattaacatggccattccctacccccatttcatcgccaccgagaaagccgccatggacgccggcctcctccacccctcctccccctcctccgtcatcctcacccaagacgacctcaagaaaatcgccgcctacaaggccgtcgagtacgtcgagtccggcatggtcctcggcctcggcaccggctccactgccaagcacgccgtcgaccgcatcggcgagctcctccgccaaggaaaactcaaagacatcgtcggaatccccacctccaccaaaacccacgaccaggccctctccctcggcatccccctctccgatctcgactcccaccccaccgtcgatctcgccatcgacggcgccgacgaggtcgaccccttcctcaacctcgtcaagggccgtggcggctccctcctccgagaaaaaatggtcgaaggcgcatgcaagaagttcatcgtcatcgttgatgagtccaagctcgtaaactatttggggggtagtgggttggccatgcccgttgaggttattaagttctgttggaggttcaccgcggcgaggttgcagaagctttttgaggaggctgggtgcgttgccaggctcagaacttttggggagaaggagaaggaggagccttatgtgacggataatgggaactttattgtggatttgtatttcgagaggagtattggggatttgaaggctgctagtgatgctattttgcagcttgctggggtgtggagcatggcatgtttcttgatatggctaccactgttattgttgca

SEQ ID NO: 2965 - DNA, 598 bp, Glycine max
tggctgcgttcgttccttggtgtttttggaatttctctctctctctctgcgctgggggtttccgaggaccgcgcgaagcacgtaaatccccttcaaacacaacacaaaaacgcagtgtttccaccatctctatctctatctctatatataccctcacaaccaaacaatccccattccctctctaaccctatctaatctgtcttctcttacattcctttctccaccacacattcaattttaaacctctgggcgtggctagcttcaacctttaacattaacatggccattccctacccccatttcatcgccaccgagaaagccgccatggacgccggcctcctccacccctcctccccctccgtcatcctcacccaagacgatttgaagaaaatcgccgcctacaaggccgtcgagtacgtggagtccggcatggtcctcggcctaggcaccggctccaccgccaagcatgccgtcgaccgcatcggcgagctcctccgccagggcaagcttaaggacatcgtcggaatccccacctccacaaaaacccacgaacaagccctctccctcgggatccccctctccgatctcgacgcccacc

SEQ ID NO: 2966 - DNA, 517 bp, Glycine max
gacgttgagtaattttttttttcctcttccgcgtccccaccaacatcaccgagaccatgtccaccgacttgcacctccaccacgagctaccaaagctccgaatcgccgccgtcgtcaaaaccgacgacgacctcccctccgacgcccaagacgaccgcaacgccgtctcctccgccgtcacacaagccgaggccgaaaacgacggtgccatcaccgtcgatgtcggcgtcaaagtcaacgacgagagttgccgtactccgacgtcgaaggagagcaaaattccggcgacgatgacgtgtccgccggcgccgaggaagccgaagttcgcctcgtgtaaaagaaaactacttgaggagtttcagttcttcgatgtcacgaataaggaggacatggacgccttcttcagatccacttttcccaagaggggatgcactacttgtacatgatcaaaaaatttccaaccttagcttcctcgaacaaccataccttcgaccctgtcgaactacgtaaattacac

SEQ ID NO: 2967 - DNA, 436 bp, Glycine max
gacttcacgtttagtaatttttttattctcttctgcgttcttcccaccaacatcgaaaccatgtccaccgacttgcacctccacaacgacctgccccagctccgaatcgcctccgccgccgccgccgatgccgtcgtcaaaaccgacgacctcccctccgacgatgacgaccgcaacgccgtctcttccgtcatcactcaaaccgagaccgaaactgacggagccaccatcgtcgacgtcgccgtcgccgtcaacgtcaacgtcaacgtcaacgacgagaattaccgtactccgacttcgaaggagagcaaaattccagcgacgatgacgtgtccgccggcgccgaggaagccgaagctcgcctcctgcaaaagaaaacttcctgatgagtttcagtttctcgatgtcacgaataaggaggacatggacgccttct

SEQ ID NO: 2968 - DNA, 757 bp, Glycine max
ttctttttgtgattatcagaagaccaaatcgaggggtccggttagggaagaagagggggaacaagagagtggaaaaaacagaagatgggaatgaaacaagtcattaaaaacctcgacgcctttcctcgcgccgaggatcacttgttgcagaaaacccaatctggggctctcgtatccgtaattggtctcattataatggccacattgttcgttcacgagctcggttattatcttacaacttacaccgttcaccagatgtcagtggacttgaagcgaggggaaactcttccaattcatattaacatgacgtttccttctttaccttgtgatgttttgagtgtagatgccatcgatatgtcgggcaagcatgaggtggatcttgataccaacatatggaaacttcgcttgaacagttatggccatataattggcactgaatatatatctgatcttgttgaaaaggaacatacccatcacgagcatgatgataataaagatcatgatcatcatcatgagcattcagaacagaagattcatttgcaaaaccttgatgaatctactgaaaatattatcaagaaagtgaaggaagcattaaaaaatggggaaggatgccgggtttatggtgttttagatgttcaaagggttgctggaaatttccatatttcagtacatggactaaatatatatgttgcacaaatgatcttcgatggagcaaagaatgtgaatgtaagtcatttcatccatgatttatcatttg

SEQ ID NO: 2969 - DNA, 544 bp, Glycine max
gctaaataaaaggagaaaggaaaatgccataaattaaagagaatcctaaattctgtaggcgtgttgtgattatcagaagaccaaatcgaggaatccggaaagggaagaagaagaagaagaagagagtgggttgggttgcgtgccccgttccgttcgttcttcccctttcctttcaattctttcttttcaattctttttcttctgaacacagaaaaaacagaagatgggaatgaaacaagtcattaaaaacctcgacgcctttcctcgcgccgaggatcacttgttgcagaaaacccaatctggggctctcgtatccgtaattggtctcattataatggccacattgttcgttcacgagctcggttattatcttacaacttacaccgttcaccagatgtcagtggacttgaagcgaggggaaactcttccaattcatattaacatgacgtttccttctttaccttgtgatgttttgagtgtagatgccatcgatatgtcgggcaagcatgaggtggatcttgataccaacatatggaaacttcgc

SEQ ID NO: 2970 - DNA, 294 bp, Glycine max
cgacagaagggggtgttttgattatcggaggaccaaatcgaggattccggaaagggaaggagagattggtttcgttcttcccttttcgattcctttcaaattgttcctttttcatttcaattcgcatagaattcttttcctcctgatttgattagattagtgaagatgggaatgaaacaagtcattaaaatcctcgacgcctttactcgcgccgaggatcacttgttgcagaaaacccatctggggctctcgtatccgtaattggtttgattataatggccacattgttgtgca

SEQ ID NO: 2971 - DNA, 1381 bp, Glycine max
aattcccggtcgacgattcatacggtacgcgaagagatggcttctcctcttcttactccttacaagatgggcaaattcaatctgtcccatagagttgttttggcaccgctgaccagacagaggtcttacgacaacgtcccacaaccccatgccatcctctactactcccagagaacttccaacggaggccttctcattactgaagccactggcgtctctgacacggctcaaggctatccgcaaacccctggcatatggactaaagaccatgttcaagcttggaaacccattgtcgatgccgtccacgccaaaggcggtgttttcttctgtcagatttggcacgttggaagagtttcagattcagtttatcagccaaatggacaagcacccatatcttctacggacaagccactcacaccccaaattcgaagtaatggcattgatcaagtacaatttacccctccaaggagattaaggactgatgaaattccgcatattgtaaatgacttcagacttgctgcaaggaatgccatcgaagctggttttgatggggttgagatccatggggctcatggctacctgcttgagcaatttatgaaagataaagtgaatgaccgaacagacgaatatggtggatcccttgagaaccgctgccgatttgctttggaagttgttgaagctgttgttaatgagataggggcggacagagttggaattaggctatcgccattcgcagaatattcagagtctggagactctaatccaaaagaattggggctttacatgatgaatgccctcaataagtatggtattctttactgtcacatggtggaaccaagaatgaagactgttggagaaaaaactgaatgccctcatagcctggtgcctatgagaaaggccttcaatggcacttttatagccgcaggaggttatgaccgccaagatgggatcaacgctgtagctgaaaacagggctgatcttgttgcttatggccgttggttcttggctaatccagatttgccaaaaagatttgctctcaatgcccctctcaacaagtatcaccgggagacattctacacttctgatccggttcttggttatactgactacccctttcttgatgatgaagaatccaatgccgtagcatcctagggtagaacctccatttttaataaccttatcttcccctgcaaattcatatttgcaatttggttggtcggattttcattcgcgtgttctttacatgcttctcctgctatggttttggatcccccttacacattttctaaattgtaagggagtgtaatatgtagaactattattgttgtattaatatcactggatcctaataagtgttggccgtaaggcctttagctcttgt

SEQ ID NO: 2972 - DNA, 492 bp, Glycine max
cccacgcgtccgcccacgcgtccggtaatttcccccaccttttgctcctgccaaatactagtgtttcaaataccctgccaaatactaccatcatatccatggctgtgcaaattgtaggttttgatggggttgagatccatggggctcatggctacctgcttgagcaatttatgaaagataaagtgaatgaccgaacagacgaatatggtggatcccttgagaaccgctgccgatttgctttggaagttgttgaagctggtgttaatgagataggggcggacagagttggaattaggctatcgccattcgcagaatattcagagtctggagactctaatccaaaagaattggggctttacatgatgaatgccctcaataagtatggtattctttactgtcacatggtggaaccaagaatgaagactgttggagaaaaaactgaatgccctcataacctggtgcctatgagaaaggccttcaatggcactttta

SEQ ID NO: 2973 - DNA, 440 bp, Glycine max
atctcctcttcttactccttacaagatgggcaaattcaatctgtcccataggtatctctatctcgtgtttttccttgctatttccatagatttcaattgctgattaattttgcttgcagagttgttttggcaccgctgaccagacagaggtcttacgacaacgtcccacaaccccatgccatcctctactactcccagagaacttccaacggaggccttctcattactgaagccactggcgtctctgacacggctcaaggctatccgcacacccctggcatatggactaaagaccatgttcaagcttggaaacccattgtcgatgccgtccacgccaaaggcggtggtttcttctgtcagatttggcacgttcgaaaagtttcaaattcaggtcttttctttttctttaatgcccttaacttcttctttagaactggttt

SEQ ID NO: 2974 - DNA, 1128 bp, Glycine max
gaccacgcgtcagcaaaaattcaggaattaagaacgctgggccggtggaccccaaaggaaacacaaagtattgctaggaaaagaaatccatatatcgcagccgtttatttcgggtgcttcaaccatccaacggtgcaaattctgagaagcgaatttcgtaaccgcgtcgaagacaaacgagtaacaaacgtcacgtttctctccaatctgttcaatttcccgcaacagggattttttccttcgctacgaagatatccctctttctttctcatagttttctgcgaaatcgccgatgctagaatcggagctccacgatttatccgacgacgccgattacgccgcgtctcaacaacaaggatctgctagcgtgatgctgcgtagtgacagtgccaaacagagctcccctcgggaaggtgctgaaattgtatttttgaaggacaatgtcgcaattcatccgactcagtttgcgtctgaaagaatcagtggaagactgaaattgattaagcaaagctcgtccttgtctatgacttggataccttacaaagtgcatagttcagaggccaggctgtctgataaagacagaaacctttatatcataagggcggtgcccttcacagacatcaggtccatccggaggcataatcctgcttttgggtggcaatatgtcattgttgttctatcatcaggacttgctcatcctccattatatttttatagtggaggagtcaaagaattccttgctacaataaagcaacatgttcttcttgtgagatctgaagaagatgccaacgtattccttgtgaatgattttcagaatacactgcagaggactttgtcttccttggagatgcccagagctgttccccttacatgtggaccttcaaatacgtcagttgatgaatccattttgattgagaaccaagaaagggctgataatggtgccaatgatggaagattcagtgttaatcagttccacgggaagccaagacataaagtagatcctgctcgagacctctctattcaagttttagagaagttttctcttgtcacaagatttgcccgtgaaacaacttcacaactttttggagaaaaccagagtaatggatttagtcccattgacaggaggac

SEQ ID NO: 2975 - DNA, 916 bp, Glycine max
cccacgcgtccgcccacgcgtccgcccacgataggcctcagaagaagaagagagaggtctctcaacaatggccactgccactgtttcaatttcaactttatgcgctactttcggaacccattgcgccatttcccacaacccaaaacctctattttctcaacctttcaatctcaatcactttccttctaactcttacaagctcgctttctcgcctcgctcacctctttcaccccttcccaaggcctctgaatccgcggtagccgaaaccgaacccggttcggccgagcccgaaccggcccaaattttcccggcccaacctccctcctgggaacccggtctcttcgctgtcgtaatgattggcggacgccaatatattgttcacccggggcgacatcttactgttcagaggttaaaaggtgctaatgttaatgataagattgccttacacaaggttttactggttggcactgatacatcttgctacattgggaaaccaattgtaacaaatgctgtagtatatgcaacagtggaagagcagggtctagaccccaaactaattgtcttcacatataacaagaagaaacactatcgcagaaacattgggcacagacagccaaatacacgtatacggataaatagcattatgggctatgagaactacccaaaagttactatggacgacatcaaatcagacgaacccggatcatgaacaccttgtttactgtgcctatactgtagcttcttcctctttaaatatgaaattatttcgccattactagttttgctttaattagaaatgtaatttatggcatattgtaatattgtattgttgtaatctcctgtttccaaaaacattgctatttttctgtgcaactttctttcacgtgccaaaaactaaaaaaaaagggggggcccc

SEQ ID NO: 2976 - DNA, 805 bp, Glycine max
cttctctttcaagggtagatttctgaagaagaagaaaacccttacaaatctaactccgattgaaatttgaaagcgttaaaccctaaacccccaaattgattcattccgctcgttggtgtcatggcttcttcatcgagtagcggattgacgttcaagctgcaccctctggtgatcgtgaacatctccgaccactacaccagggtcaagtctcagatgaacccaacccacgcgccaccgcacaccaaggacgatgattcaactcgaggcgatggcgtcgtttcgccgctctccccgcgggtctatggctgcgtcataggggtccagaagggccgcaccgtggagatcttcaacagcttcgaactcctctacgatccttcctcccactccctcgatcgcaccttcctcgagaagaagcaagaactctataagaaggtgttcccgcacttctacatactggggtggtattcgactgggagtgatgcagaggaatcagacatgcatattcacaaagctttgatggatatcaatgaaagtccagtttatgttcttctcaatccttctatcaaccattctcagaaggatcttcctgtcagtatttttgaaagtgaactgcatgtcatagatgggattccacaacttatctttgttcgctcaagttatactattgagactgttgaagcagaacggatatcagttgatcatgttgctcatcttaagccatctgatggtggttcagctgctacacaattggctgctcaccttactggtacacacagtgccatcaaaatgcttcatagcagaataa

SEQ ID NO: 2977 - DNA, 450 bp, Glycine max
ttttgctttcaaaagatgagatagtacaaaagtgcttgtgagtatcgtatctatccagtgtgtttcttcttcttctctttcaagggtagatttctgaagaagaagaaaacccttacaaatctaactccgattgaaatttgaaagcgttaaaccctaaacccccaaattgattcattccgctcgttggtgtcatggcttcttcatcgagtagcggattgacgttcaagctgcaccctctggtgatcgtgaacatctccgaccactacaccagggtcaagtctcagatgaacccaacccacgcgccaccgcacaccaccaccaacaacaacaacgccaacggcggcgacggcgtcgtttcgccgctctccccgcgggtctatggctgcgtcataggggtccagaagggccgcaccgtggagatcttcaacagcttcgaactcctctacgatc

SEQ ID NO: 2978 - DNA, 297 bp, Glycine max
aaaacgtcatatctatccactcactcactgtctagtgtgtgatatgacatgatatgatattgatattacctgggggggtaatttctgagggagaagaaaccctaacaaacctaaactccggattaaatttgaatcgttaaaccctaaacccccaaattgattcattccgttggtcatggcttcttcatcgagtagcggattgacgttcaagctgcaccctctggtgatcgtaaacatctcggaccactacaccagggtcaagtctgatatgaacccaacccacgcgccaccgcacaa

SEQ ID NO: 2979 - DNA, 616 bp, Glycine max
gggattagaatttgtgaagtgttattctacagggaaagatctgatagaaaccagtggaacctctgctactgctgagcaaattgcatggatggtttctggtgcagctgatacttttgtcagaaaagagaaagaagggttgtcctttcccgggccttttcttttattccttgtaccctcccaagaaaaatctacccaggttcgaacagtttgcaagcctttaaaatctgttggaatacatacagtgagtattcatccaggtgcttccttagatcatcagattcaaggtctgaaaacttgtgagcctgagtttcttgtttctactcctgagaggctattggagcttgtttctacgaaggcaattgatatttctggggtatccatgctggttattgatgggcttaatactatctgtagtgctggccacgctgatacagtaaaatccatcaagaattgtatttctggcaatccccgtgttgtgattttcaatgattgtgtcagccacatgtcgatcccaatggttcgatatcttctgacaggattaatttgtagagtctctctcaataattcaattaacagcctaagttcgtacattatccaatctgttgacgtgtgtacg

SEQ ID NO: 2980 - DNA, 1216 bp, Glycine max
cctacccacaacaccccctttctccaattcctctcactcaccacaacaactcctttttttacctcttcacattctccatttcacagcatcaaggttctgatcatgttggggaagaggccccggccaatgatcggaaagttgtcggagttgttggtctcgagaggccgcacggtggcatatttggacaccaccggaagccctagaggcccattagacatgaagatgatgcaatcaccaagaggcttaaaaaattatgatcttggtggcgttggtcttggaattgtggtggctcttgataaatccaataacgaggttgctgcacgtgaagttttgcccaaacacaccgtttgcacctccaatttgaaccggtccggcccaattccggttcactacaccaaaaacccagatgaatttgatgtcgaggaatacacctatgtgacatgccgcgtacctaacaaaacgttcactaaggtatactatgatggtggtgaaggtgatattattcggagacaaaacaacaacaacaacaacaaaaacaacgttgtagttctcagaagaaccgaaccacaacctttgattgagcccgaatcatcgtaccccacatcgagttttctcagttcatgtcacttatgtggaaagaaactccacggcaaagacatatacatgtacagaggagagaaagcgttttgtagccctgagtgtcgttcgagtcaaataacgatggacgaaaggaaggaacggtgtagttcagaagcttcaaggtctgtggaaatgtcaagttcgccatatacaagggaacaaatattttcaactgggattcttgcgctttagcgtcactctctgggtgcggaaataaattaattaaccagagattgatgatgctactacgtacatacataataatatacggctatactattattcaagacagcttgatttgaaacaaaaacaaaagttttgatcggctaaaggggtagatattctgatgtattttttgttttatcaagaagccaaagagttatgaattttcagatctcagttgcacagattaagcttgttctgtttccgagttttctctctctggttaaaatacagactaaagcttcaatttcctaattagaaattacatgaataattgtattaatccttccaatatttggaccaccaaattagatatccaaatgtttgaaactttaaatgatagtcataattcatc

SEQ ID NO: 2981 - DNA, 258 bp, Glycine max
gggcgagagtagtactaggatgggtgacctcctgggaagtcctcgtgttgcacctccaatttgaaccggtccggcccaattccggttcactacaccaaaaacccagatgaatttgatgtcgaggaatacacctatgtgacatgccgcgtacctaacaaaacgttcactaaggtatactatgatggtggtgaaggtgatattattcggagacaaaacaacaacaacaacaacaaaaacaacgttgtagttctcagaaga

SEQ ID NO: 2982 - DNA, 251 bp, Glycine max
attgactatctggaattaatagtatatgagagttaattaagacagcttgattggaaacaacaaagaacagttttgatcggctaaaggggtagacattctgatgtatttttgtactaccaagaaggcaaagagttatgaatttccagatctcagttgcacacattagaggttgttctgtttctgagtgctgtttcagagatcatagattaactcagactgtttctgggtgttttttatttttttttgataaa

SEQ ID NO: 2983 - DNA, 253 bp, Glycine max
aacatctcctttttttacctcttcacattccccatcttccagggtcccgatcatgtcggggaagaggcccccgccaatgatcggaaagttgtcggagttgttggtctccacaggccgcacggtggcacttttggacaccaccgcaagccctagaggcccattacacatgaagatgatgcctatcatcaccacagaggcttaaaaaactatgatcttggtggcgttggtcttggaattgtggtggctcttgata

SEQ ID NO: 2984 - DNA, 1842 bp, Glycine max
tcaggctgcaacccacttcctccagagatatggcttttgcccaagtacgcccccattcatccagggaaaatgttatgctactgtcgcttagtttacatgcccatgtcatacttatttgggaagagatttgtgggtccaattaccgggttaatcatatctctaagagaagaaatgtacaaccagccttatgatcaaatcgattggaataacgcccgaagcacagttgccaaggaggatctctattacccacatcctctgattcaagatatgttatgggcatctcttcatcacgtggcagagcctcttctgaattgctggcccttttccatgctgagagagaaggcactagaagtcgcaattgatcatattcgttatgaggacgagaacagtggatacctttgtattggtagtgtagagaaggtgttgtgtttgattgcacgttgggtcgaagatccaaactcagaggcatacaagcttcatttagccagaatccctgattacttttggcttgcagaagatggattgaaaatccagagtttgggttctcaactgtgggatgctacattagctatacaagcaataatatcatgtgatttgagtgaagagtatggacctacacttcgtaaagcacaccactttgtcaaggcttcccaggtgcttgaaaatccatcaggtaatttcaaagcaatgcatcgacacatatccaaaggagcatggacattctcaatgcaggatcagggttggcaagtctctgactgcacagcagaaggattaaaggctgcacttctattgtcacaaatgtctcctgacctaataggcgagaaaatggaagatgagaggttctatgatgctgttgatgtgattttatctcttcagagcggcaatggcggcttccctgcttgggagcctcaaagagcgtaccgttggttagagaagttcaatccaacggaaatcttcaaagacactctcattgagatggagtatgtggagtgcacatcatcggcattgcagggcctggctttgtttagaaagttatatccaaaacacagaagaaaggaagtcgatctctgtatttctaaagcaatccgttacattgaaaaaacacaaaatcctgatggatcatggtttggctgttggggaatttgctatacctatggtacattgttttctgtaaaagggttaacagactgtggaaaaaactaccgtaatagtcctgccttgcgtaaagcttgcaaatttttgttgtcaaagcagcttcctaatggaggatggggtgagagttacttgtctagccaaaacaaggtttacacaaatctaaaaggcaacagggcaaacttagttcagacttcatgggctttgatgtccctcattgatgcagggcaggttgagatagatccaacacccgtagagcgtggaataaggttattaataaattctcaaatggaagatggagactttccacaacaggagatcactggagtattcatgaggaattgtacgctgaactattcttcatatcgaaacatttttctcatatgggctctgggagagtatcgtcgccgtgtctttacgcataaaagtcaaatacttagctccacctaactccaatccaactcattttgttgcctcaatgcacccattattatacttagcaactaagcgcagtgcaatttttgcggagccacccttcgcccttgtaaacacagcacatgttgcaagggtatctgccatgatgcttgttcactttagttcttatcattttttataggtcttatctcatgttacattatatttaaaaactttaatggtgaaactattcaaaaactttaaatgtctctcatt

SEQ ID NO: 2985 - DNA, 584 bp, Glycine max
taatgttctaaaaacgaacctcaaaaagaaatttcctttcttcttcttctgtcaactcggtctcatggctcaccctcgactcactaactcgctctgttcttctccccttcgcaatctcaatcccaatcccaaactcattcctctctgcacttgctcatgccgtcccttctcttcgcaatccctaattctccattctcaccctcttttcctcgccaaacccaaacctctcctccggttcgcccgccgaaccggaccgcccctcgtcctcgccgccgtcggccaggccgaacccgaacttcctcaaaccagtgcccccacggtcattcccgaagacgaggaggatttgccctcaaaatctcaacagcagcttaggaaccgggtggtttttggacttggcattgggattagtgtaggaggcattgttttggctggtggatgggtcttcgcggttgccctggctgctgctgtctttactggtgctcgagaatattttgaattggttcggagtcgtggaattactgcaggaatgacaccacctccacgctatgtgtcacgagtctgctctgtcatttgtgcttgatgcc

SEQ ID NO: 2986 - DNA, 972 bp, Glycine max
gaaggtttcgggggctgttttttgtattttgccccgattctcttctctctccctctggtgttgtgttttctcctttccctttctctcttctctgtcctttgagtttttctatactctagttcgcgtcgcccaaggctcaacagcatgacaaacgattgacaactcggcaaggtacatagtgctgaacgcacgctttaatttattttaatttcgttgtttatacttaccgtattcaattttacaatatataaattaacatgatgactcgcatgtaataagtttatagtctggtaattaaagcaaaaggcaatcgatacaatttacttcatatttaggtatttgttcatagtatatttttattttatggttttagtaaacaaatggtttatttgctcgtatgtatattgtcatgttgtttaatatttttgtgattagaattgaattgaaagtcttacaattaattgactatacaatcaatttccttcagaagagatcaatgtagattactactagctgtataatatatataaactatgacgtgtttattttcatgattaggattgaattcaaagtttcgtacaattaaatgactcgttcaatgttggtaatcggtatacaatctacttcaaaagacatttgcctggcagtacagtgctttatgttcactataatttgattaattaaaaattaactattaatcgtcgtcattgagaatagcaataatttttaatattggctttgagtttttaacttgttcaataactgaattaaagtggttttggatcatctaaaaatttctaacctatggataatttacgatgaaaaatgtgtaagtgcttagtttgcctacttcaaccagatgcatctaatcccatgttccaatatcttaagttgtaagtttattatttatgttcaagcgtaatttaatttttttttaaacccttttttaaaatttttaaaaattttttaaaa

SEQ ID NO: 2987 - DNA, 504 bp, Glycine max
cggctcgagagatactgtaattcttactcttattcaccgatttcccccaaatcttccatccaagaattttaacattttctcttccagatttcccccaatcttctccgcctctcttccttttcctttacatttctctctgattgaaacgccacacccatttgagaggatcttttttctagagaagccaacccaaagtgtgttttcatggggttgttgtgatcttgagaaatttgagagtggtggtagtttgctaatgttatgaggaagaaaaggaaaggaagcaaaactgatgggtctgcggatctggctgttattttggctcctaatcatggctctgcttcgtcgaatttgaagtcccattactcgctggaagattgttgtaggctgaagaagaggtgttgtaaggaggaggatgctgacactgagccggctacttcctttacgaggaggcttgctggcattgctactgccccaccttgtgggacgtcgtctttgatcacgccg

SEQ ID NO: 2988 - DNA, 758 bp, Glycine max
  unsure (1)..(758): unsure at all n locations
tgaattttaagagtctgactgcgcccaaaagccgaggcgcaagagccgcaagtaagtcattggactccgcgtncggtgactgggtcattgaggttgtagccagcccagagagcattaatcctcacgcacgtcccctaccagcatagcagctggctcagattttctcaatcccccgatctgccacgtccaggagttgtcaaggtgtgcctcggttattacggcctccagcaaaggctaaaacaggaatatcaccttgacaatgaataatcacctacgtacgtacccaagccttaattatcctcacaccacatgcccttgtttttgtttttacaagaacaaagaaaacaaatattcaaatacctaccttggatcatttttcttgttttttcttcaattattactattattttttcttaattattgtggtggtccgtgtccatggatccaaatgcatgttggtgtagcaattatacataatataaatatcgggtatatatagatgagggatatatatgcatatataaatgtcagggaaacaaacagaaagcaaaagcagcaaggaagtgtatgtaatgtaatgtaatgtagatctgtaaggaaagagaaagaaaggtgtaataatgcagggtggggtctgccacaaaggttgcagatctctccccttcttttatccatatgttttcattttcatttcccatcttgtttctctgttctgttatccaccaaataaaatatatattcttcccttttcaccaaaa

SEQ ID NO: 2989 - DNA, 723 bp, Glycine max
accaggagacccgacatggcttactttttcttcaccaaggacatcctccaagggaaaaccatcgacgtgtaccagacgcaggaggggaagcaggtggcccgtgacttcacctacatcgacgacatcgttaaaggctgcctgggagccctggacaccgcccagaagagcaccgggagcggcggcaagaagaagggccccgcccagctcagagtatacaatctggggaacacttcaccggtgccggttgggaccttggtgtccattctggaaggtctgctaagcaccaaggccaagaagcacgtcattaagatgccatcaaacggcgacgttcccttcacacacgccaatgtcagcttggcctacagggatttctcttacaatcccaccaccgatctcgccaccggtctcaggaagttcgtcaagtggtacctcggttattacggcctccagcaaaggctaaaaaaggaatatcaccttgacaatgaataatcacctacgtacgtacccaagccttaattatcctcacaccacatgcccttgtttttgtttttacaagaaacaaagaaaaacaaataattcaaatacctaccttggatcatttttcttgttttttcttcaattattactattattttttcttaattattgtggtggtccgtgtccatggatccaaatgcatgttggtgtagcaattatacataatataaatatcggggtatatat

SEQ ID NO: 2990 - DNA, 560 bp, Glycine max
acgtcgcacgcacgcgtacgtaaactcggaattcagctcgagcaatgctgattcaatggattacacatttaccatgccacaaagttccgtcgagcattatccggcagaggaggtagttgacaaggtggtgaaagaggcaataagcaaaccatggctacccttgcccttgggtttgaaacctccttccccagatagtgtgttggctgagctatccaggcaaggcatttccaacatccctccaaagggttcaaattcatgctgacctggatgcatgcaccaaagagagtggttctgatggtgaccaactacaaaagggttccacctgatcaaacaccctgttgcaattatttttgttttctctaagtgtatgaggttccaacttgtagtttgagtgggaatacgagttgttggagttgggaccattttgttttgtttatttggtcccaccaaaccaattttaaggtctctcctatgctgttgtcagctcgtacgtacaatactcacttaccatgatgcaacaaccaaagtattagtagacattgttcctatccgaagccaca

SEQ ID NO: 2991 - DNA, 987 bp, Glycine max
ctcgagccgcagtcttcctttcctctctctcttgtttgcattcatgtgagggtgattttgcagagagttaacagcacaaaccactcactctcttaacttgagattattttttttctttccccaaacccaaagaggcatgagttgcaacgggtgccgcgtccttcgaaagggttgcagcgagtcttgtatcctgcggccgtgtctacagtggatcgatacgcccgaagcacaaggccatgccactgtcttcgttgccaaattctttggccgtgccgacctcatgtccttcatttccaacgtccctgaaccccaaaggcccgctctgtttcaatctctgttgttcgaagcgtgtggaagaacggtgaaccctgtcaacggtgctgttgggcttttgtggaccggaaactggcacgtgtgccaggcggcggttgagacggtgctccgcggcggcaccgtcaggcccatgccggagcttctcggcctagacgctcccactcccaccgccgatgacgcttccgaaggggaagttacctgtaccgacaagtggagagtccgagatccgaacccgaatttcccgggaacccggttcccgggtttgaggtccgataaggccggttctggtggcaaacgcaagcgatttgaagagctcgccaagcttcagacggcgacgacggatctcaatctccggctgacgccgagttttctgcagaacgcggcgagcttcggctgccggcaggaaattcgctggccgggatctccgtcgatgaactccgaggagtccgggacgacgacagcgtgtttggagagcgggatcggagatcactacgctcccgacggagaccggaaagtgctgaaccttttcatttgagagttctctttcgctctccgagtttcgtcgttgagggttctcgctgacgcgtctttttgcctgtttttgtttcaaacgctttattgtgagaaagaggtttcccggaattgaatccggtg

SEQ ID NO: 2992 - DNA, 409 bp, Glycine max
cactcgagccgattcggctcgagcggctcgagttcctttccccgtttttcttctctctctcaatctctttcatgtgagggtagaaccacaacaaaacacaaaccacacactctcctaactcgaggttatttttttctttccccaaagaggcatgagttgcaacgggtgccgcgtccttcgaaagggttgcagcgagtcttgtattctgcggccgtgtctacagtggatcgatacgcccgaagcacaaggccatgccactgtcttcgttgccaaattcttcggtcgtgccgacctcatgtccttcatttctaacgtccccgaaccccaaaggcccgctctgtttcaatctctgttgttcgaagcgtgtggaagaacagtgaaccctgtcaacggtgctgtgggacttttg

SEQ ID NO: 2993 - DNA, 707 bp, Glycine max
ggaagaggtggatgcacttccggctatatatgctactgaaagtattagattcaaatatcatgttgtttgagatttgaatctaatactttcaatcgcatgttgggaaaagataaaactgccacgtccttggaagaggtggatgcacttccggctatatatgctactgtgttaaaattctcgtcatctgcgccatatgggtcaattccatcctatcgtataccttttcttcttggtgaaccttacaataaagattctgcatctcaagatgcctccctaagtattgttcctgttgatgttggaaatgattcccaggaagaggaaaaatatagagctattgttgagattgatttggagcccagggaacccacaccaggtatagttgatgttcacattgaaacaaatgcagaaaatagtcaaatcatccaaggtcaacttcaaggaatcacagtaggcatagaagacatgtttctcaaggctattgtcccaacagacatcccagaagatgaaatacctcgatacaactttgacttgttcaatactttatgggaggcatgtggctcatcctccagcactggccgggagacatttcagttgaaaggaggcaaagggattgctgccatcagtggaactcaatcagtcaagcttcttgatgtccctgcaacctctttaatccaggcaactgagcgccatttggcacattttgtcgt

SEQ ID NO: 2994 - DNA, 608 bp, Glycine max
ctcgagccgaatcggctcaggatagagggatcttttggggaggagcggtgcaacaacacgactgatttaattggttgagcaagatgtcgacctcgacgaacgtggtagtcctggacaacggcggcgggctgatcaaggcgggcatcggcggcgagcgcgacccctccgccatagtcccgaactgcctctaccgccccccgtcgtcgaagaagtggctccacctccactccggcgacgaggacctcacctccgccgccgtgcgccgccccatggaccgcggctacctcataaaccccgacctccagcgcgaaatctggtcccacctcttctcttccgtcctccacataaacccttcccagtcctcgctcctcctcacggagcctctcttcactcacccctccatccagcgctcggtggacgagctcgtcttcgaggacttcaacttccgggccctgtacgtggccccctccccctccctcgtccacctccacgaggccagccgcaacaacgccaacgggctcctctccaaggcccagtgcagcctcgtcctcgacgccgggttctccttcacccacgcctcccccgtcttccacaacttcgccctcaac

SEQ ID NO: 2995 - DNA, 611 bp, Glycine max
ctacaatctatccctgaagaacgtccttctatgaaagatgtagttgaggcattggaagccattgaagctatccaaaattagggatggaaatgagtcaagtcgcttgtcaagggcctatggctcggcctatttaaggctcggctcggcttggcttgtttactataaatgtcaagctcaagctttttaaaaagtttttttagataaaaaggccaaagccaaactataaaaaaagcttgttaagtttctttttttagttagtattttactaggttttaaaataattaattggttaaagaggtttttaagcagacttttaaataggcttgtaggccaagccagacttttatgtaagccaagccgagcctttaaaaaaagcttatgacaggtaatgagccaagctcaagctttgcgtattcaactcaagccaagctcaagcctagtaaaacttggcatggcttgactcatttctacccctatccaaacccacaattcgcagtgtacatctcatccaccccctcgacagggtcgtaagagtatacacaaatttatatggacaaaattactagaaatcgagattgattatccatagtaatgtgctcaatttaatgggt

SEQ ID NO: 2996 - DNA, 459 bp, Glycine max
tgaggtcagtgtttgatctccttgaccgcagaactgaaattgagcctgatgatcaagatgctactcctgttcctgatcgtcttcgtggtgaagttgaacttaagcatgtagacttctcttatccaactcgcccggatatgccagtttttcgtgacctcagtcttcgtgcgaaggctggtaaaactcttgcccttgtacgacctactggctgtggtaagagctcagttattgcacttatacaaagattctatgatccaacatctggtcgggtcatgattgatggcaaggacatcaggaaatacaacctcaagtccttaagaaggcacatttctgtggtacctcaggagccatgcttgtttgctactactatttatgaaaacatcgcttatgggcatgagtcagccactgaagctgagataattgtggctgcaactcttgccaatgcacacaagttcatat

SEQ ID NO: 2997 - DNA, 1318 bp, Glycine max
gttgcacacggtgcaagtcggctggctttaaattgcaatgggtggcttcctctcgcgtccgcccccgcgtccgggcgtcattggcttgaacaattgctggcacccagttctgatgccacaatgcctacattctctcattcaaattacttgtccttgccccttatgagtgtgctcaacatagctagagagtatggattgcaatcatctacagcctcctctgatgagattgacttttgtgctgtatgcctggagaggccatgttcagtggctgcagaaggatgtgggcatgagctttgtgtaagatgtgcactctatctttgctcaacaagcaatgtttcttcggagacgtgtgggcctcctggctctatcccttgtcccctttgtagacatggaattatctcttttgtcaaattaccaggttcccaagcaaaagaaaataaattacacgtgtccctcagcctgtgtaccccatgcatgctacatccatgtgacctagatcgaccgactgtttctcatacccctgagattcgaagaaaccgtgtagcttctgttccatcggagatgctttgccctgtcacttgcactccatttccatctgtagcaattcctctgtgtacatgcaacaatggtccttgtccatcatttgaaccccgggaagcagaagcacaaggtggatcgcctcgccactcgcatgctgcgatgatggatcaggataaaatggatggtccgaggctggagaaaacgacatgctcaggcatgttttggggtagaagaagttgcagccgggagcatcaatgcaattcacaaataaatgcttgacctaagaggctggggcatggccattcttattttgtggatacttcatacaatcttagatcaaaaaaggagtctatagtttatcttattaaccagcctcatatggtgaaagtccaatggatgtatatgtgaggtgatagataatcttgcatatcagcatcccaccacctttttagttctcagttatgatatttagagagcattagtaaaattagtatgagctgcttgttattgcaattgattgcaattggatttcttttttatcatagaaaaaccaggtgttatttcaaaaggagaggaaaaagaaaaatagctatctgttttggcttgtttcagataggaagttctgtgtaatatatgttgtttatcatttattttataggtttacaagaactttgaatgctgtaacggcttgttgctacatttgtaattgtcctttttgtgatctcgagggtgtttctcccatcaacactaaatgttatgctaaagaacttgttcaact

SEQ ID NO: 2998 - DNA, 1461 bp, Glycine max
ccgcttccaagtcctacaagaacaacccattccctccctcattgcccccactcttctccacttctcaatcctctgtaacttcaaaacatacacctcttctctctgtttctcttcactctctctctccctccctcttcaactaacatggcaattgaaaaccaagacaccgctgtcagagaaatcaagcccaagaacaggagaatcatgggtgctggagggcctgatgatgaggacaataggtggccaccgtggttgaagccactgctgaaagagagcttctttgttcaatgcaagttgcatgctgattctcacaagagcgaatgcaacatgtattgcttggactgtatgaacggtcctctctgctctctctgcctcgctcaccacaaagatcaccgtgcaattcagattaggaggtcctcataccatgatgtgattagggtcaatgagattcagaaggtgttggacatcacaggggtccaaacctacattatcaacagcgcaagggttgttttcttgaatgagaggcctcagccaaggcctggtaaaggtgtcaccaacacttgtgaagtctgcgagcgtagccttcttgattctttccgcttctgttctcttggttgcaagattgttggaacatctaagaacttccagaagaggaagaagcagtcaatggcaatgtcatcagattctgaggactcgtacagcagcaacagcgtccatggtcttaagaaaaactgcaaagtccagagcttcacaccatccacaccacccccaacttcggttaattacagaacggccaagagaagaaagggaataccacaccgtgccccaatggtgggactaatcatagaatattagtgatagtgggtatttttaggctattggctacaatgcccttaggtataaaaataccatagtatactaatgcgagtgtttcgacgtcgtttcatcaaaatccaatactcgagctttcctagggcaggtattgggaagtgtcaccgtccgtctttttatttttctttcttgtagtggtttctagcgttttgtatatatagaaagtccaatagaactggaaaaggctgaagaagtagaaataagacacctatgaaatagttgatggtgcagtgatcaaaagaatggcgtgtagcaaaataagcaaggctcttttcaaccttagttaaggtgatgatgtttggtaaggacttatagggtttggtttctaaggtaaaattatacctaagttttgggggtagaggatatgtaaatagtggctaagtgaggttggggaagaggacaaatgaaaatgtacttcttggaaaataggtggtatgtctatattatatgaaaatagaaaataaagatgtatttattattacaataatttctctatttttctttttcatcttgtttaattttgaaagagaaatttccaaatcttaatgtaacctgtgtctagtgacggtg

SEQ ID NO: 2999 - DNA, 1453 bp, Glycine max
ctcgagccgtcaaactttgtaacttcaaaacatactcctctgttctctctgtttctcttcaatcttcctgaaaaaacaaaaacacgaaaaatcatccaccctctcacattctctctctctctcctttcaactaatatggcaattgaaaaccaagacaacactgtcagagaaatcaagccaaagaacaggagaatcatgggtgctggaggccctgatgatgacgacaataggtggccaccgtggttgaagccactgctgaaagagagcttctttgttcaatgcaagttgcatgctgactctcacaagagcgaatgcaacatgtattgcttggactgtatgaatggccctctctgctctctctgcctcgctcaccacaaggatcaccgtgcaatccagattaggaggtcctcataccatgatgtgatcagagtctctgagattcagaaggtgttggacatcacaggggtccaaacctacattatcaacagcgcaagggttgttttcttgaatgagaggcctcagccaaggcctggtaaaggtgtcaccaacacttgtgaagtctgcgagcgcagccttcttgattccttccgattctgttctcttggttgcaagattgttgggacttcaaggaacttccagaagaagaaaaagtcagcggcaatgggatcagacacagaggattcttcgtacagcagcaacagcagccatgggaagaagaacagcttcacaccgtccacaccgcctccaacttctgttaattacagaacggccaagagaagaaagggaattccacaccgtgccccaatgggtgggctagtcatagaatactagaaattaagttagtagtaactttaggttatttgctataatgccccctgataaattttacctcaaaacgcaactttctccgtgcagtttcacccgtcacaacacactcgagctttttgctgtaaaaggccggtgctggaattgtgttcccttctctgttccttgttaatagcgtttgtctatataggaaaaatccaatagaagtgaaaaaaaggttgagaaagtagaaaaaaaataagacatgtgatctgtgaaatagtttgagagaaaaagaatggtgcagcaaaataagcaaatgttcctttcaaccaaagtacaggaagatgaggaacattataggtttggtttctagagcaattatacgtaagttttgggggtgggtgtaaatagtggcttggggaagaagacagtgacaatgtactctttccaaatagatggattgtttatggaatggtgaaaaataataatagtactaatagattttcttaaatcttgtgcctacattcattcagtgcaattacaattttaatacgttaatttaatgagttatagatcattgaattgttaatttgacacgcaaataaagggctgacgccgactattgagctcatcgagccgggaatta

SEQ ID NO: 3000 - DNA, 555 bp, Glycine max
tagaaaacaccctctaccgcctctaagtcctacaagaacccatcccctccccagccgctccggaaatctcactttctcttctcttcttcctccaaaacaagtaaacaaacaacactctcacattcaccacaacacaaacacaaacacaaacaaagacaacaaccttgtttgtctgcaatcaaaacctttcaagctggcgttcgagaaccaagacacccctgtccgagaaatcaagcccaagaaccggagaatcatgggtgctggaggccctgatgacgaggacaacaacaggtggccaccgtggctgaagcctctgctaaaagaaagtttctttgttcaatgcaagcttcacgctgattcgcacaagagcgagtgcaacatgtattgcttagattgtatgaacggtgctctctgctctctctgcctcgcttaccacaaagatcaccgtgctattcagataagaaggtcttcataccatgatgtgattacggttaatgagattcagaaggtgttggacatcacaggggtccaaacctacattatcaacagcgcaag

SEQ ID NO: 3001 - DNA, 514 bp, Glycine max
tggttcggagctaggtttgatcatgtgagacgactttgttgtatggataagaacgacttctctcaatctctctctagttctcactttctctctcgtaatacaatttctctctctagaataaaacagcttctaccgcctccaagtcctacaagaacccattccctctcacaccgcccccaaaatctcactcttctgccttctcttttctcttctcttcttcctccaaaacaagtaaacaaacaacactctcacattcaccacaacacaaacacaaacacaaacaaagacaacaaccttgtttgtctgcaatcaaaacctttcaagctggcgttcgagaaccaagacacccctgtccgagaaatcaagcccaagaaccggagaatcatgggtgctggaggccctgatgacgaggacaataggtggccaccatggctgaaacctcttctcaaagagagcttctttgttcaatgcaagcttcacgctgattcgcacaagagcgagtgcaacatgtatt

SEQ ID NO: 3002 - DNA, 387 bp, Glycine max
gctctttctctcttagaaaacaccctctaccgcctctaagtcctacaagaacccatcccctccccagccgctcccaaaatctcactcttcttactcttcttcctccaagagaagtaaacaaccctcacattcaccacagcagcacacacagacaaagacaaccttgtttgtctccaatcaaaacctttcaagctggcgttcgaaaaccaagacaaccctgtccgagaaatcaagcccaagaataggagaatcatgggtgctggaggccctgatgatgaggacaacaacaggtggccaccgtggctgaagcctctgctaaaagaaagtttctttgttcaatgcaagcttcacgctgattcgcacaagagcgagtgcaacatgtactgc

SEQ ID NO: 3003 - DNA, 282 bp, Glycine max
tactcctctgttctctctgtttctcttcaatcttcctgaaaaaacaaaaacacgaaaaatcatccaccctctcacattctctctctctctcctttcaactaatatggcaattgaaaaccaagacaacactgtcagagaaatcaagccaaagaacaggagaatcatgggtgctggaggccctgatgatgacgacaataggtggccaccgtggttgaagccactgctgaaagagagcttctttgttcaatgcaagttgcatgctgactctcacaagagcggatg

SEQ ID NO: 3004 - DNA, 948 bp, Glycine max
ccgtcggcaactacgacaatatagtagattgggagttcaagacaagtggttcaatcaagccctcgatatcactatcaggcattttggaagttaagccagtggacattactcacacagaccaaataaaggaagaccaacatggcacattggtctcagcaaacagcattggtgtttaccatgaccatttctacatattccatcttgattttgacattgatggtgtggaaaattcctttgtgaagaccagtctcaagactctacaagtcacagacaacagttccaagagaaagagctattggacaactagtaatgaagttgttaagactgaatctgatgcaaagacaaaactagggttcagtccagctgagatagtaattgtgaaccctaataagaagacttccactggaaatgaagtagggtaccgtttggtttcaaatgcagcggttcatcctcttctcacagatgatgattaccctcaaacacgtggtgctttcaccagttacaatgtttgggttacaccttacaacaagactgagaaatgggctggtggactttatgttgatcagagccgtggagatgatactttggctgtttggactaagcagaatagggggattgagaacaaggatattgtgatgtggtacgtggtgggaatccaccatgttccgtgccaggaagattttccaataatgcccttgttgagcaccggatttgaattgaggccaactaatttctttgagagaaatccagtccttaagaccctttctcctggcattgttaaatttccaggttgtgagaaaccctagatttgcttttgagctttgtcactttaagtacaatattgttgatcgatagatccggagaaacattatctttttactaatatcggtcatatgtgctaaggtgagaaaataataattttgaataatgattcctctatatcattgt

SEQ ID NO: 3005 - DNA, 1503 bp, Glycine max
gaaacaacgaatgaagagaaggaaggagaataagccgttgcaattccctccacacgttccagttaccttatctaccacctcagccttttctcttcactcttcctttccctccaaacaaacaaaagcaaccattaccaccaccaccttgaactttcccagttacactaccaccactttgattccaaataaccaccatcaccatgttcacggctagtaaactagccttcacattaacaccacctcgtccatgcactgcacccttgacaccaatctcttcagcttctggtgttcacctcattcagttcaatggcaggcacttatgcctccgccaaaggctgtttctactttctcctatggccactgcagatcaacaagggaaagttgaagaatttgaagatgattcaaatactgttgatagtaaaattctcccatattgtagcatagacaaaaaagagaagaaatcaattggtgaacttgagcaggaattcctccaagcactgcaagcattctattatgagggaaaggctatcatgtcaaatgaagagtttgataatctcaaggaagaactcatgtgggaaggaagcagcgttgtcatgctaagttctgatgagcaaaaattcctggaagcttcgatggcttatgtgtctggaaaaccaattatgagtgacaaagagtttgatgagttgaaactcaggctaaagatggaagggagtgaaattgtggctgaaggtccacggtgtagtcttcgtagtagaaaggtttacagtgacctgtctgttgactatttaaagatgttcttgctgaatgtcccagcaactgtggttccactaggattgttcttcttccttgatgatgtgactggatttgagatctcatatctgataaagattccagagccttttagtttcatcttaacttggtttgccgctattccctttattttgtggctggctcaatcgatcactagggcaattgtacaagattttctgattttaaagggcccttgtcccaactgtggtactgaaaatacctctttctttgggactatactgtcggtttcaagtggcgattccaccaacaaagtcaaatgtgaaaactgtgaaactaaaatggtgtatgattcaaaaacaagattgattacattaccagaaggaagtaatgcttaaatggaggcacgcttgatactattgtttcctgtaatgagatgagatcgtcataggtagaagctactgaaatcattgttctctatgggccatgaaatcattgttctcaatgtcgcacaccatatatgctagtgagttgtaatggtatgaactttgtatagcatacgtaggatcgtctaccagaagagatgaattatatgaggatattcttaacatcaagatttttaatttgtaggcacactttgggccttttgcaaaaatgctgtgcggccccattttttactaatggagcggtaaaaaaaaaacagaaaagaaagacgaatgattaaaacttgattac

SEQ ID NO: 3006 - DNA, 537 bp, Glycine max
  unsure (1)..(537): unsure at all n locations
aaacagcgccaccaccattatactctctgttgctaatcatggctagcaaattggccttcacactgacatacccgcttccacttacaccaatctcttccttgtcctcctcttctgcttctcgactccaccttcttcaattcaatggccgccacatatgccttcgccctcggctatttctgttttctcccatggccacagccgatcaagacaaggttgaggaagatgctgccgttgttgatagtaaaatcctacaatattgtagcatagacaaaaaagagaagaaatcagttggtgaaatggagcaagaatttctacaggcactgcaagcattctattatgaggggaaggctattatgtcaaatgaggaatttgataatcttaaggaagaactcatgtgggaagggagcaccgttgtgatgctaagttctgatgagcaaaaatttctggaagcgtctatggcttatgtgtctggaaaaccaatcttgagcgacnaagagtttgatgagttgaaactcaggctaaagatggaagggagtg

SEQ ID NO: 3007 - DNA, 493 bp, Glycine max
  unsure (1)..(493): unsure at all n locations
cacgttccagttaccttatcttccacctcagatacctctcttcactcttccatcatcttcctctccctccagacaaaacatcaccaccaccttcagcttaatttcccagttacactgccaccactttgattccaaatacccaccatcaccatgttcacggctagtaagctagccttcacattaacaccacctcgtccatgcactgcacctttgacaccaatctcttccttgtcctcttcttcttcttcttcttctgcttcagcttctggtatcaacttcattcagttcaatggacgccacttatgcctccgacgcaggctgtttctactctctcctaaggccactgcagatcaacaagggaaggttgaagaatttgaagatgattcaaatgttgttgatagtaaaatcctcccatattgtagcatagataaaanagagaagaaatcaattggtgaacttgaacaggaatttcttcaagcactgcaagcattct

SEQ ID NO: 3008 - DNA, 470 bp, Glycine max
acgaggcaaattggccttcacactgacatacccgcttccacttacaccaatctcttccttgtcctcctcttctgcttctcgactccaccttcttcaattcaatggccgccacatatgccttcgccctcggctatttctgttttctcccatggccacagccgatcaagacaaggttgaggaagatgctgccgttgttgatagtaaaatcctacaatattgtagcatagacaaaaaagagaagaaatcagttggtgaaatggagcaagaatttctacaggcactgcaagcattctattatgaggggaaggctattatgtcaaatgaggaatttgataatcttaaggaagaactcatgtgggaagggagcaccgttgtgatgctaagtatattattattatatatgtggctagcaatttcattcactgacagttgctagcatgcatgaattcctgctaactttgtaaattgat

SEQ ID NO: 3009 - DNA, 1531 bp, Glycine max
ttacttgttggcttttttagttctataaattccccgcttgaatcacacagagtcctctcttccactctctccctctttcctatcacactttctagatagctagcctgtaagatatatatatagatatttcatatatatcctatggtccgtgagtgcccttgttctgtaccaaccctttcttccacatgttgagtttcagcatcgtcctctcttgagtccccatatcaaatacccaccgaattcaaccccccatataacaaatctcctcccatcccatttttcagcaccaaagtttgaaacttttctcaattgggttgaggagagtttgactcaaatttttatttttctaacgaagcagtagctattagaagtgcaaaaattaaatgtccaacatcttcttgttgatgtttgagattcatgtatccgattctcagtgaaatcttcttttccgggtgtatgatcaattccactgttaggcgcaggacccatttagttcaatccttctcagttgctttcctctattggttgtactacgtttcatgatttctaaaccttccttagtctaataatcatctactactagctattattattattattattattatcatcatcatcatatataataaaatctatctgcaatattatttttctgagtttgtgtctagttagtgtctgggtcctggtcctgccaattgtgtcaattaattgtattgaatcataaaagatggcttcctcaagtggaacatcttcagggtcatctctgcttcagaactctggttctgaggaggatttgcaggcggtgatggaagatcagagaaagaggaagagaatgatatcaaaccgcgaatctgcacgccgatctcgcatgaggaagcagaagcacttggacgatcttgtttcccaagtggctcagctcagaaaagagaaccaacaaatactcacaagcgtcaacatcaccacgcaacagtacttaagcgttgaggctgagaactcggtgcttagggctcaggtgggtgagctgagtcacaggttagagtctctgaatgagatcgttgacgtgttgaatgccaccactgtggcgggttttggagcagcagcaacatcgagcaccttcgttgagccaattaataataatagcttcttcaacccgttgaatatggggtatctgaaccaccctattatggcttctgcggatatattgcagtattgagatccatggtctctgagtctgagatttgatgaggatttcttcttcttcttctaggtttgagtctgttgagaaattgtaatcactaccatatggtgataaggaataataataatgaatgtgtatcgtaaaacggatgggattgttgggtgctggttctgtaaatgtggcatgggccattactgtaatttgtcaccctcctttcctatattattataataataatattgacctacttctctgtctcgatattctttttattttttgtttttttatgaataaatattaatttttattagaaagattatttgaagagatttt

SEQ ID NO: 3010 - DNA, 1118 bp, Glycine max
cccacgcgtccgcccacgcgtccgctctctccctctttcctatcacactttctagatagctagccaaccagagtaagatctaaagatatttcttatatatcctatggtccgagagtgcccttgttctgcgccaaccctttcttccacatcttgcgtttcaacctcttcctctcttgagtccccttatcatcaaatacccttcttcttcaacctccaccaaattcaacccccacataacaaatctcctcccatcccatttttcagcaccaaagtttgaaacttttctcaattgggttgtagagagtttgactcatcaatttttatttttttatttttattttctctaaccaagtagaagtgcaataattaaatgtccaacatcttcttgttgttgatgtttgagattcatgtatccgattctcagtgaaatcttcttttccgggtgtatgatcaattccactgttaggcgcaggacccatttagttcaatccttctcagttgccttcctctattggttgtactacgtttcatgatttctaacccttccttagcttaataatcatctatctaaaatatcataatatcttctactagctagttttatttttattatcacaataaaatctatctgcaatatattgttatttttattttctgagaaatttgtgtctagttataagtgtctgggtcctggtcctgcctattgtgtcaattaaattgagaagggttgtattgtattgaatcatatatcgtatcatataaacatggcttgttcaagtggaacatcttcagggtcattatctctgcttcagaactctggttctgaggaagatttgcaggcgatgatggaagatcagagaaagaggaagagaatgatatcaaaccgcgaatctgcacgccgatctcgcatgaggaagcagaagcacttggacgatcttgtttcccaagtggctcagctcaggaacgagaaccaccagattctcacatccgtcaacctcactacccagaagtacttggcggttgaggctgagaactctgttttgagagcacaagtgaacgaactcagccactggttggagtctctgaacgagatcatccacttcttgaatgccactgat

SEQ ID NO: 3011 - DNA, 1014 bp, Glycine max
gaagacaatttttttttcccttgtttctttgttgatcgttttggatttgaaaaagactttcttattttcttttcatcaagttgctggcatggctttttggttctataaattctccggttgaagcatacagagtccccttccactttcttccttctttctcatcactcttttaagatatttttgttacatagtttatggtctacgagagccctgcctctgtagagtgtagaccaacctccttttctttgctttgagctcgctcgatcttcttccatttcatgtcttgttttattttattttatttatttaagccttttaaatgcccaacattttgttcttgatgtttgagattgatgtattcaattctgagtgaaatcttcttttccgggtgtatgatcaattccactgtgagacgcaggacccatttagttcaatccttctctgttgctttcctttactggctctactacgtttcatgatttctaaccccctctccaattattaattaaataaaaccctattatatgtctcttacatatttttatctgcaaaaaaaaataatctttttttgttcttgttcttgtttagtgtctgggtcctgcgaactccaagtacaagaagggtcaatttttgtttttctgttaacttttgattactatggcttgttcaagtggaacatcttcaggggcgacgtcgtcgatgcttcaaaataactcaggttcggaggaggagctgcaggcactgatggagcagaggaagaggaagagaatgatatcgaaccgcgaatcggctaggcgatctcgaatgaggaagcagaagcacttggatgatctagcatcgcaggtgactcagctcaggaacgagaaccaccagattctcacatcggtgaacctcactacccagaagtacttggcggttgaggctgagaactctgttttgagagcacaagtgaacgaactcagccactggttggagtctctgaacgagatcatccacttcttgaatgccactgat

SEQ ID NO: 3012 - DNA, 423 bp, Glycine max
cccacgcgtccgcccacgcgtccgcttccttgtttcttttaagatatttttggtcacatagtttatggtctgcctctgcgtagtgcttcaacagccccctgctcgctcgatcatcttgattattttttaagccttttaaatgcccaacatcttgttcttgatgtttgagattgatgtatccaattcttagtgaaatcttcttttccgggtgtatgatcaattctactgtgagacgacgcaggacccatttagttcaatccttctccgttgcttttctttactggctctactacgtttcatgatttctaattattattaattaaataaaagcctattatatctcttcttacatatttttatctgggtctgggtcctgcgtagtccatttttggttttggtaagtatttggtactactatgacta

SEQ ID NO: 3013 - DNA, 441 bp, Glycine max
cagcatcgagcaccttcgttgagccaatggaaggtgctcgatgctgctgctccaacttcaacccgttgaatatggggtatctgaaccagcctattatggcttctgcagacatattgcagtattgattgagatgcttcatctctgagatttgatgaggatttcttcttcttcttcttctgggtttgagtctgtcgagaaattgtaatcactaccatatgatggtgataaggaataatattaataatgaatgtgtatcataaaaacgggtgggattgttaatgttaggtgctggttccgtaaatggggcatggggcatgggccattactgtaatttgtcaccctcctttcctatataataataataataataataatagtactgaccgctctatgttattattctcccaatcttttgttatttttaatcgaatgatttgtttt

SEQ ID NO: 3014 - DNA, 684 bp, Glycine max
ctcgagccgattcggctcgaggtccacgccttcaattcaaagcaaagatgtgcactttggagaagagaggcagcatattcatcctaacactcaccggcgatggcgagcaccgtctcaacccaacactcctcgattccatccaatcctccctccgccgcgtccgccaagaagccaccgcctcctccgccctcgtcaccaccgcgcacggcaaattcttctccaacggctacgacatcgcctgggcccgatcctccgatgaggtcaaagagcgcatgatcctcatggactccctcctccgctccgtcgtctccgatctcctcaccctcccgatgccgaccatcgccgccgtcaccggccacgcctccgccgccggctacaccctcgccctcgcccacgaccacgttctcatgcgcagcgacaggggattcctctacatgagcgagcttgacatcaacctcgttattcccgcgtggttcgtggctctcctcgaagccaaaatcggctcgcccgcggctcggcgccacgttgtcctgaacgcggctaagctcactgccaaggaggcgctgcggctcggcgccatcgactcggctcacgacagcgccgctgagaccgttgaggctgcgctcgctttagccgcggatttggtgaagagaggatgggttggacacgtgtacgctcagaatc

SEQ ID NO: 3015 - DNA, 1581 bp, Glycine max
gtttaattatttgattcattaccacagtctctctctctctctccctttctttcattacttaaataccaccctctttccactcaacccttcagttcactccactctagcacacaaaacttgctatagcagtaagctataactcatttgaggctctgtgagaattgagaaatggctaaagatgttgaggttcaagagcaaggaggagagtactctgccaaagactaccatgaccctcctccagcacctttgttcgacccagaggagctcacacagtggtccttctatagagccctcatcgctgagttcatagcaacccttctcttcctttatgtcactgtgctcaccattattggctacaaaaggcagactgatacaacggtaggtggcaccgactgtgatggggttggcattttgggcatcgcttgggcctttggtggcatgatcttcatccttgtttactgcaccgccggtatttcaggaggacacataaacccggcggtgacattcgggttgttcctaggacgcaaggtgtcgttgataagggcgttgttgtacatggtggcacagtgtgccggtgctatctgtggtactggattggccaaggggttccaaaaagcatactacaacaggtatggaggtggtgccaactctgttgctgatggctacaacaatggtactgctttgggtgctgagattattggtaccttcgttcttgtctacactgtcttctctgccactgaccctaagaggaacgctagggattcccatgttcctgtactggcgccacttcctattggatttgccgtgttcatggttcacttggctacaatcccaattactggtactggcattaacccagcaaggagtttcggagcagctgtaatctacaacgaagacaaaatctgggatgatcagtggatattctgggttggaccaattgttggagcagcagtggctgcattttaccaccaatacatccttagagcagcagctatcaaggctcttggatccttcaggagcaacgcttaattaattaatcaattaagctagctaccttgattaatttgccaacaagggctatgcatggtgtttcccccgaagaataataatttctatgttgaggagtgctagtgatctgtctatgcagttccctaatttaggctttttcgtcttttcctctcatcagctacagttgttgggggtgtttggaagagaaggccaaaaccatgggggcatgcatcaaattgtagataagcatgcttgtgtccaagggtgtattttgtatcccttttgtgtcttttctttttctttttcttttttttaatttccatgtatgtattccttgagtgttccttttctgtcttgtgcatccttagtcatttctcattttactcttcataattaagtactcatcttctcttgtttattaaagctttattaatcatcatctatgaatgtaatgtaccttgacttgagtaatatttatatatattatgttgcaggtttttttttcaaaaaaaaaaaaaaaaaaggcgggcgaccactaagttagtcggcccggccggtttattccgtcccggt

SEQ ID NO: 3016 - DNA, 550 bp, Glycine max
attcccgtctcgacacacgcgtaagtacagagacagaagggggcacacaacactagctatagtaagctacacttatttgaggttggagaaatatggctaaagatgttgaggttcaagagcaaggaggagagtactctgcaaaagactaccatgaccctcctccagcacccttgttcgacccagaggagctcacacagtggtccttttatagagccctaatcgctgagttcatagcaacccttctcttcctttatgtcaccgtgctcaccattattggctacaaaaggcagactgatgccacgctaggtggcaccgagtgtgatggggttggcattttgggcatcgcttgggcctttggtggcatgatcttcatccttgtttactgcaccgccggtatttcaggaggacacataaacccggcggtgacattcgggctgttcctaggacgcaaggtttcgttgataaaggcgttgttgtacatggtagcacagtgtgccggtgctatctgtggcactggattggccaggggttccaaaaatcatactacaac

SEQ ID NO: 3017 - DNA, 1774 bp, Glycine max
ctttccaaaggatgttgttgacttggttaagaaggatcttgaagtcaagaaggcagctgtggagatagaatcaaatgggtatcatcttttgtttgattttctacatctgcataaggtggaccttaaaactggcttgcaacaacctatagctttgattgatgaggcagggtgctgttttttccccgaaatctatgctgcttctgatgaaaaaccttataatttgagcaaacaggaatgtggaagaagtccggactcatatgcatctaacgaaataaaattacatttagaagttgaaataaatggtgtggatcaatccaggttgagtgagtgtagtggggagtccaatgctctagttaagggtattcaaattgatactaaacaaaactgctgtcaatatgatgtagaagttgaagatagcattaacaaaaaggactgtggaaatgttggtgaagacattcagcaacatcaagacataggtttagatgcttatactgaatcagtatatggaaaattggatctgaattctgtacaaaagatgtttcttaagggaatgtgtagttttggcagtactgattctgacatagttgagatttaccactgctcaggtgcgtcaatgcaagcacgatgggagctgttccagaagcaagctgaaattaccaaaaaaaatcatggggaagctaacattcggtatgcttggcttgcttcctctaaaggagaactatctacaatgatgaactatggacttagtcattatggactatctggatcaaagtgcacatatggcattggtgttcatcttgctgctgttacttgccctgatgccagtgtgcgttattgtgatgttgacgaaaatggggttcgacacttggccctttgtcgtgtaataatggggaacatggagattcttcggcctggcactgatcagtttcatcccagtagttgtgaatatgataatggggtggatgccattgaatgtccacaatactatgtggtgtggaatatgaacatgaacacccacatctatccggaattcgttgttagcttcaaagtctcatctgatgctgaaggtcatttttgtggaagtgagggtaagaatgtttctggggttaattcagcctgtcagggtcctcatggcttgttacattcagaatcttctactgtagataatggaaaagctcctagtatggttgctagcaccccaaaagttccaaaatccccttggatgccttttcctttgcttcttgatgctatcagaaatcaggttcctcccaagggtatggatgtaatcaaaatatattatgaacaattcaggtcaaagcatatatcgcgggatgattttgtgaagatgctgaggttaatagttggagatggtctgttgagaactacaataacaaatcttcagttcaagataccttccggtggtgaattgaaaggctcaatcaagaaggaagtctgaggctgtatttctgtgaggtggagatctttctccttggagtcaattaatgtcaactttttgctggataaatcaaaatgaagttgtgatattgttatctcttaggcaaactatctttttcatttccttttgccatctttatttggacttgagacatacatgcaactagaactatattagagtttagtttgaactgttcgtgatcaggtgacctgtcaatcaatcctcttgtttatgttggattttatagtaaaaacctgaatttggatattccttttttttccactctaattttcaaaatgaagtcactttgtattgtgg

SEQ ID NO: 3018 - DNA, 576 bp, Glycine max
gttccaaaatccccttggatgccttttcctgtgcttcttgatgctatcagagatcaggttcctcccacgggtatggatgtaatcaaaacatattatgaacaattcaggtctaagcatatatcccgggatgattttgtgaagatgctgaggttaatagttggagatggtctgttgagaactacaataacaaatcttcagtataagataccttccggtggtgaattgaaagactcaatcaagaaagaagactgaggctgtatttctgtgaggaggtggagatctttatccttggagtcaattaatgtcaactgtttgctggataaatcaaaactatcttttttcatttccttttgtcatctatatttggacttgagacatacatgcaactagaactacattatagagtttagtttgaactgtttgtgattaggtgacctgtcaatcaaccctcttgtttatgttgggtttttatgataaaaaaaagaatttggatattccattttttttttcactctaattttcaaaatgagatccctttgtattgtaaatgtgatatattgaacttcttgttgtggt

SEQ ID NO: 3019 - DNA, 2192 bp, Glycine max
  unsure (1)..(2192): unsure at all n locations
ctcgagccgctcaaagcttgtgaaagctgatatcaatgggaaagacaaggagatatactcggtgaagttgcctggaaatcccaaattgggtgaagggaagcccgagaatcaaaatcatgcaattatatttacgcgtggaaatgcagtccaaacaattgacatgaatcaggataactattttgaggaggctttgaagatgaggaaccttcttgaagaatttcattctgatcatgggcttcgtcctccttctatacttggtgttagagaacatgtcttcaccggcagtgtctcatctctagcgtcatttatgtccaatcaagaaactagttttgtgactttagggcagcgagttttagcaaatccattgaaggtccgcatgcactatgggcatcctgatgtttttgatagaatattccacgtaacccgtggtggtatcagcaaggcttcccgtgttatcaacattagtgaagatatctattcaggattcaattcaaccttacgtcaaggaaatattacacatcatgaatatattcaggttggtaagggaagagatgttgggctcaatcagattgcactatttgaaggaaaagtttctggtggtaacggtgaacaagttctcagccgtgatgtatacagacttggacagctttttgatttcttccggatgctgtctttctattttacaacagttggatactacttttgtaccatgctaacagtgctgactgtatatgcctttctatatgggaaagcatatttggcactgtctggtgttggtgaaacccttgaagaaagggccaggataactaagaacactgcactgagtgctgctttgaatacacaatttctctttcaaattggtatcttcactgctgtgccaatgatcttgggcttcattcttgagcaaggtttcttgaaggccattgtcagttttgtcacaatgcaattccagctttgcactgtctttttcacattttccttgggtacaagaacacattattttggtcggacaattcttcatggtggtgcaaggtatcaagcaactggccgcgggtttgttgttcgccatatcaaattttcagagaactacagactctactctcgtagtcattttgttaaagggttggaggttgcgcttttgttgatagtatatcttgcttatggctataatgaaggtggtgcactctcatatattcttttgagtataagcagttggtttatggctctatcctggttgtttgctccatatttattcaacccatctggatttgagtggcaaaaggtggtggaagatttcagagattggacaaattggctactctaccgaggtggaattggtgttaagggagaagaaagctgggaagcttggtgggaagaagaactggctcatatcangagcttgggttcaaggatagcagaaaccattctgagtcttagatttttcatctttcaatatggtatcgtgtacaagcttaatgtgaaaggaacaagtacttcactgacggtttatggtctctcatgggtacgttctggctgtgctcataactcttttcaaggtcttcacctttagccagaagatatcggccaatttccagcttcttttgcgctttatacaaggaatctcccttttagttgcactggctggtttagttgtagcagttatattgaccgaactgtctttaccggacatatttgcttctatgttggctttcattcctactggttggggaattctgtcaattgctgctgcctggaagccggtgatgaagaggctcggactatggaaatccgttcgatcaattgctcgcctctatgatgctggtatgggaatgctcatctttgtacccattgccttcttttcgtggttcccatttgtatcaacattccaaactcgcctaatgtttaaccaggcttttagccgagggttagaaatttctcttattctagctgggaacaatcccaatactgggatatagttgtatttggctcaggccttgttcctaaacgagatacaatctatggtgtcttttaaattttgcgggggtgagtcggtaaatcttcttgtaggaagcctagatttctgtaaaaatcgtcagcattgtgaatagttgtatcatcaattttctagtgtatgtcatttaaatcgtcatgtagtattgggtttaatgcaatgcactatcagttttgaattt

SEQ ID NO: 3020 - DNA, 1303 bp, Glycine max
ttcggactcgatgtgcccaacagatttattatctcgtcttctaactgtaatgtcagctggccatgttctccatgtgttcattaacggtcaacttgcaggaactgtgtgggggggattgggaaatcctaaattgacatttagtgacaatgtgaagctgagggctggcaataacaagctttctttacttagcgttgcagttggtctcccgaatgttggtgtgcactttgaaacatggaatgcgggggtgttaggcccagtcactctgaagggtctaaatgaggggactcgagacttgtcccggcagaaatggtcttacaaggttggactgaaaggtgaatccttgagccttcacaccgaaagtgggagtagctctgtggaatggatacaaggatcattagtggctaaaaaacaacctttgacatggtacaagacaacttttagcgcaccggccggcaatgatccattggctctagatttgggaagcatgggaaagggtgaagtgtgggtaaacggtcgaagcattggtcgccattggcctggatatatagcacatggtagttgcaatgcttgtaattatgctggatattatactgatacaaaatgccggacgaattgtggacaaccttctcagagatggtatcatgttcctcgctcatggctgagctcaggtggtaactccttggttgtgtttgaagaatggggaggtgaccctaatggaattgctttggtgaaaagaacatgaagtgtgatattttatgatgctctcttaaaaggagcagcattgacaggcaatatatatcttgtaacaaatgtctaggaaatgcaaagaagctgtcaagtgagtcctatgcggttaggaccctatgatgcagcaatttaccaaatacgtgtggtttagatcatattaggttcagtatataaaaaatatttgaagttcataattggtgctccttgtcttctggttgttcaagtatacctcaaaagattgccaaggcctaatcatgcattgcctggccaaaaacaaagatttatataagagaatttggatgcgcaaagactgtgtatactgtacatagtcaagtcaggctattgtgctgaatattgccccatgtattacagggcttgtatcaatgaagattgagcccttacacatttatttaatttactatgatacaatggaaagaattgtagacacgcaaaatgtgtcggagagtatatttgctatattctgccagaaataattgtgttttcccattataattattatgtaagaacagattgaaagtaataaaatatcctttgt

SEQ ID NO: 3021 - DNA, 1004 bp, Glycine max
caatggcaatggcatttccgtccgtaacctctgtaactgtggagaacgtgacattccctcccaccgtgaagcctccctgctcccccaacaccttcttcctcgccggcgccggcgtcaggggcctccaaattcatcacgctttcgttaaattcactgccatctgcatttacctccaatacgacgccctttccttcctctccgttaagtggaaaaccaagtctgctcaccagttaacggaatccgaccaattcttctcagatatcgttacaggtccattcgagaaatttatgcaggtgacaatgatcaaacccttgacggggcagcaatactcagagaaagtggcagaaaattgtgtggccatctggaggtctctcgggatttatacagattcagaagccgaagcaatagacaagtttctttctgttttcaaagacctaacattcccaccaggctcctctatccttttcactgtctcacccaatggatcattaacgataagtttctctggtgatgaaaccattccagaagttacgagtgctgttatagagaataaactactctcagaggctgtgttggagtcaatgataggtaagaatggcgtttcccctgcagcaaaacagagtttggcctccagattatctcacttattcaaagagcctggggtttgtgaccctcaatctcataagtgaactcattatatcatcaacccaagatcaaaatcccttaccactctgctgtgactttcagtactgtgctactaataaataaagggcaaattacagtttttctaagtgctaaacttctagcaacattattgtgttgttcttactgtccatgtctaagtactgaactgctgtatttgatttttcgttgggaattgaagcaactaattacattacttaactgtttgcttattttagaattaatcaaacacgctccatcaagtgtgcatgaaaataatataaaataataaataagcacatgacatggctaaggtcttggtc

SEQ ID NO: 3022 - DNA, 1642 bp, Glycine max
ccttcgcgtccgctttctctctgttctgtgttatggtactgactgtgacactatagattgacacctgcaacggattctactgtgaaaacttcaagcccaacaagaacaccaaacccaaaatgtggactgagaattggactggctggtacactgattttggcggtgcagtccctcgtagaccagcagaagacttggcgttctcagttgcaagattcatacagaatggtggttcattcgttaactactatatgtaccatggaggaacgaactttggccggacatcaggtggcctcttcattgccactagctatgactatgatgcgccgcttgatgaatacggacttgaaaatgaaccaaagtatgagcatttgagagctttgcataaagcaataaaacaaagtgaacctgctttagtggctacagatcccaaagtgcaatcgcttggatataaccttgaggcccacgtgttctcggccccaggtgcttgtgctgcattcattgctaattatgacaccaaatcttatgcaaaagctaaatttggaaatgggcaatatgatctaccgccttggtctatcagtattcttcctgattgcaaaactgttgtttacaacacagcaaaggttggttacggctggctgaaaaagatgactcctgtaaacagtgcatttgcttggcagtcatacaatgaagaacctgcctcatccagtcaagctgattccattgcagcatatgcactttgggagcaggtcaacgtgacccgcgattcttcagattatttgtggtatatgacagatgtcaacgttaatgctaatgaaggatttctaaagaatggacaatctcctcttctaactgtaatgtcagctggccatgttctccatgtgttcattaacggtcaacttgcaggaactgtgtgggggggattgggaaatcctaaattgacatttagtgacaatgtgaagctgagggctggcaataacaagctttctttacttagcgttgcagttggtctcccgaatgttggtgtgcactttgaaacatggaatgcgggggtgttaggcccagtcactctgaagggtctaaatgaggggactcgagacttgtcccggcagaaatggtcttacaaggttggactgaaaggtgaatccttgagccttcacaccgaaagtgggagtagctctgtggaatggatacaaggatcattagtggctaaaaaacaacctttgacatggtacaagacaacttttagcgcaccggccggcaatgatccattggctctagaggtgggaagcatgggaaagggtgaagtgtgggtaaacggtcgaagcattggtcgccattggcctggatatatagcacatggtagttgcaatgcttgtaattatgctggatattatactgatacaaaatgccggacgaattgtggacaaccttctcagagatggtgagaattcatacaacttattttccaacagtgagtgatgtaaatgcttgaatattaacctattttccaacaggtatcatgttcctcgctcatggctgagctcaggtggtaactccttggttgtgtttgaagaatggggaggtgaccctaatggaattgctttggtgaaaagaacatgaagtgtgatattttatgatgctc

SEQ ID NO: 3023 - DNA, 1361 bp, Glycine max
ttcacgcgtgcgcccacgcgtcaaaccacacacctcacctattagaagtaacaaaagaccctccctctcaaaagaataaacaagtataaaaaagaaggcacttccctcaaacagaaactaccctctatctctctcttttcaagccttaaatgagtaaaaaagagtgaagaaaggaaagaaaggagcaccatttttggtttgagaaacataattagcaagagagttcaaaatggggaagagagagtttaatggggtggtgttgatgatgctgtgtttgtgggtttgtggtgtcacagcctctgtgacttatgaccacaaagccattgtggttgatggcaagagaagaattttgatctctggctccattcattatcctagaagcacacctcaaatgtggccagaccttattcaaaaggccaaagatggaggccttgatgtcattcagacctatgtgttttggaatggccatgaaccttctcctggacaatactatttcgaagataggttcgacttggttaaattcgtgaagctcgcgcagcaagcaggcctctatgttcatctccgtattggtccctacatatgtgctgaatggaacttggggggatttcctgtctggctcaagtatgttccaggcattgctttcagaaccgacaatgagccgttcaaggctgcaatgcaaaaattcactgcaaagattgtcagcttgatgaaagaaaataggttgtttcaatcccagggtggtccaataattttgtcacagattgagaacgagtatggaccagtggaatgggaaattggtgctcctggaaaagcttatacgaaatgggctgcacaaatggctgatggtctagacactggtgtcccctgggttatgtgcaagcaagaagatgctccggatcctcttattgacacctgcaatggatactactgcgaaaactttactcccaacaagaaatacaaacccaaaatgtggacagagaactggactggctggtacactgagtttggaggcgcggtccctcgtagacctgcagaagacatggcattctcagttgcaagattcgtacagaatggtggttcatttgttaactactatatgtaccatggaggaactaactttgatcggacatccagtggcctcttcattgccaccagctatgactatgacggtcctattgatgaatacggacttctaaatgaaccaaaatgggggcatcttagagatttgcataaagcaataaagctatgtgagccagctttagtgtctgtagatccaacagtgacatggccaggaaataaccttgaggtacatgtgttcaagacttctggtgcttgtgctgcattccttgcaaactatgaca

SEQ ID NO: 3024 - DNA, 842 bp, Glycine max
cgcacacacctcacctattagaggaacatatgagagctccctctcagagttaataaacaagcataaaaaagaaggcacttccctcaaacagaaactaccctctatctctctcttttcaagccttaaatgagtaaaaaagagtgaagaaaggaaagaaaggagcaccatttttgggttgagaaacataattagcaagagagttcaaaatggggaagagagagtttaatggggtggcgttgatgattctagattattatgcatgttgtgcgaagcactctaggtcgaaaaggtcttctcattctggggagctgcaatcaccattgcatgccaatgcagattccaatggaagcggaaggccattcatgtcaggtttttatcccatggtagatgcatgagctatgggcgaatgagctcattggtggaagtagtttaactcaaggcattttattcatttgattacactgcaacttccgggatttagaattctgcctctcggagctggactgcatgaaattactctatctagctaaaatggtgttgaatgttggccactgctttctttccttgcgttcaccttttcttctcatatagcattggcattttttacaaggctccagagaaagaataataggagcaggtgattgttcacatttttgagaatcggctttctataaattcgtgtatatgaccttattatcttttttagttagtcagatatctttgtcatcaatagacaattatgtagtgcgagagttttttttttttttttggttgaattggctgtgtgaatttgcaagtaatactgaattatcaagtttagataaaatgtagggatttccctt

SEQ ID NO: 3025 - DNA, 562 bp, Glycine max
gggtccgccacgcgtccgcagcaagaagacgacagaagggcttctcagagatggtatcatgttcctcgctcatggctgagctcaggtggtaactccttggttgtgtttgaagaatggggaggtgaccctaatggagagtgcgttggtgaaaagaacatgaagtgtgatattttatgatgctctcttaaaaggcattgacaggcaatatatatcttgtaacaaatgtctaggaaatgcaaagaagctgtcaagtgagtcctatgcggttaggaccctatgatgcagcaatttaccaaatatgtgtggtttagatcatattaggttcagtatataaaaaatatttgaagttcataattggtgctccttgtcttctggttgttcgagtatacctcaaaagattgccaaggcctaatcatgcattgcctggccaaacacaaagatttatatcagagaatttggatgcgaagactgtgatactgtacatagcagtcagctatgtctgatatgtgatgtatcaggctgacatgagatggcctaccttattatacatgtcatggagatg

SEQ ID NO: 3026 - DNA, 403 bp, Glycine max
gttatttattaaagtctttgcgtgcaatctgacatctcttttcaatctcaaaaaggcattgtgaagaaactaaaaacacaagcgcgtttctcttgttcccttcttctctcttggagttttttaaaatgtgtgaaggacactaatgggttcacgggttctaatcgagaatttaccaagggggaatttttgtaccctgctgttagttttgtgggtttgtgcagtcacagcctctgtgacttatgatcacaaagccattgttgttaatggccagagaagaattttgatctctggttccattcactacccaagaagcacacctgagatgtggccagaccttattcaaaaggccaaagatggaggcttagatgttatccaaacctatgtgttttggaatggacatgag

SEQ ID NO: 3027 - DNA, 1770 bp, Glycine max
ctcgagccgattcggctctctcacccttctttgactgttctcccacaccacacccatgacactcctcctgctccttattctcctctttcacgcggcggaagccaagggacagtggcagctcctccacaaaaacatcggcattgtcgccatgcacatgcagcttctccacaacgaccgcgtcatcatcttcgaccgcaccgacttcggactctccaacctaaccctccccgacggaagatgccgcaacaacccaaacgagttggtcgtcaaacgcgactgcaccgcgcactccatcgaatacgacgtcgcagccaacacattccgcgctctctttgtccaaaccaatgtctggtgctcctccggttcggtctctcccgacggaacattagtccaaaccggtggcttcaacgacggctaccgtgcggtcagaaccttcaccccgtgccgctcgtgcgactgggcagaagttcagcatggactcgcggcgcagagatggtacgccaccaatcacatcttgccagatggacgtcaaataattatcggaggaagaagacaattcaactacgagttttaccccaagacacaagccaagaatacttacagtttaccttttcttgctcaaaccaacgacgctaacgctgaaaacaatctctacccgtttgtttttctaaacgtcgatggcaacctttttatctttgccaacaaccgcgctatcttgttcgattacaataagaacagtgtggtgagaacgtaccctcaaataccaggtggagatccacggtgttatcctagcaccggttccgcggttttgcttcctttgaagaatcttcgagcacctaatgtggaggctgaggttctgatttgtggtggagccccgagaggagcttaccagaatgctttatcgggtaagtttgttccagcgttggaaacgtgcgctcggattaaaataaccgacccgaacccgaaatgggatatggaaacaatgcccggtgctagagttatgagtgacatggttttactcccgaacggcgacgttttgattgttaatggagcagccgtggggactgcgggctgggaattgggccgtaacccgctgctgagcccgtttctttataaacccaacaagcgggtcgggatgagatttgaggtccagaacccgtctcatattccgaggatgtaccactccggtgccgttttgcttcgcgatgggcgagttcttctcgctgggagcaaccctcacacgtattacaatttcaccaaagtgttgtttccaacggaactgcggttagaagcgttttctccttggtatcttgagcccggattctctagcgtgcgtcccgcaatagtgtctcctgcgtcccaaacaaaactcaagtacggtcagacgttgaggcttcggtttgaggtgatgagcgcgactttggttggggattcggtgtcggttacgatgctgtcgccgccatttaacacgcactcgttctccatgaatcagaggatgctggtgctggagccacacgatttgagtaaggttggggaatcgacgtacgaggttgaagttaccgcgccggtttccgctgttcttgcgccaccgggtttctatctgctgtttctggttcatcaagaaattccaagccagggtatttgggtccagatggtgtgaaactgtcaattttcctcgctgcctactcttcaacttcattccatttttattttttttatgaaaggcaaagtatctataaaataacaaaggagctcttcaacttccttccc

SEQ ID NO: 3028 - DNA, 593 bp, Glycine max
tctttggttaggatatcggtgtatgttaccatgctggcgccgccatttaaccagcactcgttctccatgaatcagaggctgttggtgctgaagccgcaccatttagtggggttggagaatcaacgcacgaggttgaagttaccgcgccggcttccgctgttcttgcgccaccgggtttctatctgctgtttgtggtccatcaagaagttccaagccacggtatttgggtccagatggtgtgaaattgtgaattctcgtctctgcctgctcgacaacttcgttcgtatatgttctttttattcaagttatttattgttgtgaatgtctgggagtgaacagattcttgagtgagtatttaaactgtaagatatgggaagataaaattcaaataaagccatttatggcctatggggcgtgtaaataataccctaggaagtttgtaattatagttcatggatatttctttgcaattcttaacattgtgtttggtcagaagtgtaaacaaaaaatttgaaaaaaaaatagaaaataaagttattttattaaaataaaaatgaatgaaaaaatatttaaattgaaacaggttgatagat

SEQ ID NO: 3029 - DNA, 490 bp, Glycine max
gcgaccccatattgcactgcaccttatctcacctctctttgactgttctccaccccagggtaatgcccacactaagttattcccaaaccacaccaatgtcgacctcttcaccactcttcctcctcctaattattattattattattcctatcctccactttcacgcggcggaagccccggccaagggacagtggcagctcctccacaaaaacatcggcattgtcgccatgcacatgcagctcctccacaacgaccgcgtcatcatcttcgaccgcaccgactttggactctccaacctaaccctccccgacggaaggtgccgcaacaacccaaacgaaatggtcgtcaaaaccgactgcaccgcacactctgtcgaatacgacgtggtagccaacacattccgcgccctcttcgtccaaactaacgtctggtgctcctccgcttcagcctctcccgacggaacactagttcagaccggcggattcaacga

SEQ ID NO: 3030 - DNA, 577 bp, Glycine max
ctcgagccgatttttcaatccggctaaagtctaattatccaacctaatgtttcatcaggctactatatatggtatagaccccaattggggacgcattgctgctgcagcttgttactcgggggtttcattccatcaagatttacttagggtagagctgggggatattttactaatgtatggtggggaaccacaattatttgaccgtgctggactacaccatacaacttgtagaaataggagtagagcacgatgctcccctggcattgatcattttctctttgcagtatgcccaagtcaatcacgtctattggaaatacaagatgaagcatattagatggaaaataacatcgaatgtatgtcctacttctgttttaagccacacaattttgtacttggttttggatctttactaaaacacttctaagattcctagtgactggtaatcactgaaataattgagaatgggcaagaaaataaaggtaagtgtgggaaacatggtaattagaatggcacaaaacatacagtttgtattccaattttaaacaatttatataattcaactagtcaattatttctt

SEQ ID NO: 3031 - DNA, 360 bp, Glycine max
aagctgcaaaagttgcgcgttcagttgcatcatcttcacttgtaaaggctgctatatatggtagagaccccaattggggacgcattgctgctccagctggttactcgggggtttcattccatcaagatttacttagggtagagctgggggatattttactaatggatggccgggaaccacaattatttgaccggcacgcggctagtagttatcttagaaaggctggggagactcacgacacggttaaaattcagatatccagttggcaatggaccaggacgtggacaagcatggggatgtgatttaagctacgattatgttaaaataaatgctgagtacacaacataggcaaaaggaaac

SEQ ID NO: 3032 - DNA, 704 bp, Glycine max
tgagtgttgaaatgctacaatctcaccaagttcatgcaatttgcagggtctttttctgtcagtattgcagcaggattcagaaatacgtctagcgggctatagaatgctaagtggattggttgcccgaccatggtgcttgatggagatatgttcaaaacaagagattataaataaagttacggacccaagtactgaaacgacaaaaataggtatggaaggcagatataactgctgcaaggcaatacacaaatcattgacagtgtctagtagagtttctgctaatcctgcttttgcaggaatagctgcaaagtttcaggaagctgttggaatgggtccatatcttgttaaaaggcatgttgaagctcaacctgctgtgataacggctgatagattttagttttcacacctgagtggtcaagcaatacctgtaatggagcagttttttttctcttctcaaatacaatgtggagtgttatagaacaaaaaccttttccccctcaaatgttgaaacttgatggaatgagtatattaatcatagttttttagtgtattatatttcaatggcttttgtcaactctagcaaatagatattctttttggctttggatgtgtgttgcatgtgtgaagtagtagtctttgtcaacaattacattgtctactaactggcatatatactgaacttgcattcagctataatttagctt

SEQ ID NO: 3033 - DNA, 683 bp, Glycine max
  unsure (1)..(683): unsure at all n locations
gttgagtggaaacgtgaaattagggttcatcgaggaggaagaagaagaagaagatgtcgtacctgttgcctcacttgcactctgggtgggcggttgatcaagcaatcctggcagaagaggagcgtctggtcgtgatccgtttcgggcacgactgggacgaaacctgcatgcagatggacgaggtgttggcgtcggtggcggagacgataaagaactttgcggtgatatacctggttgacataacggaggtgccggatttcaacaccatgtacgagctctacgacccttccacggtgatgttcttcttcaggaacaagcacatcatgattgatctcggaaccggtaacaacaacaagatcaactgggctctcaaggacaagcaggagttcatcgacattgttgagaccgtctatcgtggagccaggaagggacggggtctcgtcatcgctcccaaagattactccaccaagtaccgttactagtttgattccttcaagtcatgtactcacccacccgccacccacccctatggatcggatctgtaacatacagcaaacaaaattttatctgttttcttacttctgtggtggtggtggttgtatgatcattctgatttctgcttattcacagaccttaaactccaactctgtgaaatgaattgcttttgtccaaaacaaaaanan

SEQ ID NO: 3034 - DNA, 432 bp, Glycine max
cttcaggaacaagcacatcatgattgatctgggaaccggtaacaacaacaagatcaactgggctctcaaggtcaagcaggagttcatcgacattgttgagaccgtcttccgtggagccaggaagggacgtggtctcgtcatcgctcccaaagattactccaccaagtaccgttactagtttcattcatctgtaacatacaacaaactaaatattatctcttttcttacttctctggtgtggtgctggttgtggttgtatgatcattctgatttctgcttattcacaactctgttacatgaattgcttttgtcatatgctaaagtgttgttagaataattccttagttttgcaactttgctttagtagtttaggatcgttggtgaagcaaacccaatttgattttttcaataaaagttgacattttttctttg

SEQ ID NO: 3035 - DNA, 634 bp, Glycine max
gacgcatacgccacgcacaacacaacacaattctcagcttcttcagcgttcttttttttctctctctctctcttccttacgcacccaagagagagaaagagaaagagaatcgatcgacgctgctagagaagtagaagaagatggcgggtggtgctcccaaacaattgttcggattcggagttgtggcgttgcttgccactctcattcttcctctctttatgcccgccgctgttcaggctcaatccgcagcccctgcacctgcccctgctagcgacgggtcctcccttgatcaagggatagcttatgtgttgatgttgctggctctggtactcacatacatcatccactcggcctaaatttcctccaccttctgaacttatagagcagaaaagggttatgggtgtttgaagggggtgttgtgtttgttatgattaacaagtttcgtacattgtgtagcaagcagtgggaaatgtaatattgctaatacttatgttagaagagtaggtgttatgtttattttcccagttaataaagcggtctgtgccatttagtggctagtggttgtggtcagtacctggttacagagattgccaatgcatttcttttaataataattatcttgcttttggcataa

SEQ ID NO: 3036 - DNA, 497 bp, Glycine max
  unsure (1)..(497): unsure at all n locations
gacgcacacgccaacgcacacgccacgcacaacacaatctcagctccagccttcttcttcttttcttttttttctctcccttccgcacccaagagagagaaagacgctgctagagaagaagaatatggcgggtgctgctcccaaacaattgttcggattcggagttgtggcgatgctcgccactctcattcttgctctctttatgcccgccgctgttcaggctcaatccgcatcccctgcacctgcacctactagcgacgggacctcccttgatcaagggatagcatatgtgttgatgctgctggctctggtactcacatacatcatccattcgccctaaatttcctccaccttctgaacttagagcagaaagggatatgggtgtttgatagggggttggtgtgtctgttatgattaacaagtttcgtacattgtgtagcaagaagtggaaaatgtaatattgctatgatactnttgttacaagagtaagtggtatg

SEQ ID NO: 3037 - DNA, 1337 bp, Glycine max
ctcacgcgtccggccacgcgtacgcccctgtgtagtgtgaattaataaatattccgttttgcgtttctctgcctaaaaggattgaaagatgggtcaagcactaggttgctatcaagttgatcagtcaaatgtggctatcaaggagcattttggaaaatttgatgatgtcctagaacctggatgtcattgcctgccttggtgtcttgggtaccagattgctggtagtttgtcactgcgtgtgcagcaacttgatgttcgatgtgagacgaaaaccaaggacaatgtctttgtcactgtggttgcatctgtgcaataccgagctgtgtctgagaaagcatctgatgcattctataggcttaccaacacaagggagcagatccaatcatatgtttttgatgtcatcagggccagtgtaccaaagttggagttggattctgtctttgagcagaagaatgatatagcaaaggctgtggaggaggagcttgagaaggccatgtcaacctatggatttgagatagtccagactctcattgttgatatagagcctgatgttaatgtcaagagagcaatgaacgagattaacgcagctgctagattgaggttggctgcaaatgagaaggctgaagcagaaaaaatactgcagatcaaaaaagctgagggagaagcagaatccaaatatctgtcaggactcggtatcgctcgccaacgtcaagccattgtggatggactgagggacagtgtgcttgctttctctgagaacgtgcctgggacaacagctaaagatgtcatggacatggtgctggtgactcaatactttgacaccatgaaagagattggagcatcttcaaagtcctcatctgttttcatacctcacggtcctggggcagttaaagacattgccgtgcaaattcgggatggtctccttcaggccactgcctcacagaattaagctttcttggagttgtaaataacaaatagtatgtgtgtcaggtttttttcaggaaatgcttcttttgtttgaacttataaagtctgcatctttactcttcttatatttgatagattcatagcagtgtctattttatgtgtaagtactgatgtgcagttttgaatacttgtttaaggatagtcttaatgtcaagttgcttgtgaatcattaaggaatttgttatgtaagaattacttcccaaaagatgtgtttttcttttagtgtcctatcttgcaagtggatgtgtaaatttgtagttctctatatttactatttgctgcacaatgattcattacaaaaaaaaaaaaataatattaaaaaaactacaaactagtcatacataagatca

SEQ ID NO: 3038 - DNA, 549 bp, Glycine max
cggtcgcgtgggctttattggtaaaggggtgatgtgaattcttgaagttaaaactgattcgtgggaggaaaatacaaattttcaccaagtttaatctagtttgatgagtagggactagcgagtggtattctattgcaggattgaaagatgggtcaagcattcggttgctaccaagtcgatcagtcaaatgtggctatcaaggagcattttggaaaatttgatgatgtcctagagcctggatgtcactgcctgccttggtgtcttgggtaccagattgcttggtagtctgtccctgcgagtggcagcacttgatgttcgatgggagacgaaaaccaaagacaatgtctttggcaatgtggctgcatgctggcgataccgagctgtgtctgagaaagcatctgatgcactctatacgcttaccaacactaaggagcagatccaatcatatgtttgtgatgtgatcacggccagcggaccacagttggagttaggattctctttgagcagaaagatgatataccagatgctgtggacgaagaactcgagaag

SEQ ID NO: 3039 - DNA, 276 bp, Glycine max
tagctcgcggttcggctccgcggcatcttgtttttggatgctgggaaagcgaactactttttgtcctttgattttttttgattgaaagatgggtcaagcactaggttgctatcaagttgatcagtcaaatgtggctatcaaggagcattttggaaaatttgatgatgtcctagaacctggatgtcattgcctgccttggtgtcttgggtaccagattgctggtagtttgtcactgcgtgtgcagcaacttgatgttcgatgtgagacgaaaaccaa

SEQ ID NO: 3040 - DNA, 2001 bp, Glycine max
taatcggaggctgaaaaatgtaactggatctgcatcctataagagtagaaagcattagcaactcgtgcgtttaaagagcgagcagcattttccttcttcagcgctgattcatttataaacttgaacagagatctcatctcacttctcagagattctcaccagtgattggtgatggctcagccgcttgtgaagaaagacgatgaccgcgacgacgaagctgactattccccctttcttggaattgaaaaggggtctgttcttcaggaggccagggtttttaatgaccctcaactagatgctaggagatgttcacaggttattacaaaactcctatacctactgaatcagggagagacgtttacaaaggttgaagccacagaagttttctttgctgtgactaagcttttccagtctcgggatcctggattaaggagaatggtctacctgatgataaaggagatctctccctctgcagatgaggttatcatcgtcacaagctctctcatgaaggatatgaacagcaagattgatatgtaccgagcaaatgccattcgagtgctgtgtcgtatcactgacggaaccctcctttcacaaattgagaggtatttaaaacaagccattgtagataaaaatccagttgttgcaagtgctgctctagttagtggcattcatctactccagacaaatcctgaaattgtaaaaagatggagcaatgaggttcaggaagctgttcaatcaagagcagcccttgtacaatttcatgccctggctttgctgcatcagatacggcagaatgaccggctagctgttagcaagctggttaccagcttgaccaggggaactgttcgctcacctttagcgcagtgccttttgatccgttacacaagtcaggttattcgggaagtcaggcaattattccacagtcaggggaacgccccttctatgattatcttgagagttgccttcgccacaagtcagacatggtgatttttgaagctgccagggcaataacagagctcaatggagtaactagccgagaattaactccggcaattactgttcttcagcttttcttaagttcgactaagccagtcttgagatttgctgctgtccgcaccttgaacaaggtggcaatgacacatccgatggcagtcactaactgcaatattgatatggaaagtttaatctctgaccagaacagaagcattgccacacttgccataactactctattgaagacaggaaatgaatcaagtgtggaccgtcttatgaagcagattacaaatttcatgtctgatattgctgatgagttcaaaattgttgttgttgaagcaataagatcactatgcttgaagattccctttaaaatatagatctctgatgaatttcctaagtaacattcttagggaagaaggtggctttgattacaagaaagcaattgtagattcaattgtgattcttattagagatatccctgatgctaaggaaagtgggttgcttcatctttgtgagtttattgaagattgtgaattcacttatttgtccacacagatactgcacttcctgggagttgaaggaccaaaaacttctgaccccagcaaatatattcgttatatttataacagagtacatcttgagaatgcgactgttagggccagtgctgtgagcacattggcaaagtttggtgctgctgttgatgcattaaagccccgcatatttgtactgctaaggcggtgtctttttgatagtgatgatgaggttcgtgacaggagcaacactttacctgaacacacttggaggtgatggttcagttgttgagactgataaagatgtaaaggacttcctgtttgggccatttgatatcccacttgtcaatctggagactagtttgaaaaactatgagccttcagaagaagcttttgacattaactctgtgcccacggaggtcaagtcccagcctcttgcagaatagaaagcccctggtaaaaagccaactggttt

SEQ ID NO: 3041 - DNA, 339 bp, Glycine max
ccaatctcgtactccaactacaaagccctcctctcttttctgttctgttgacgaaccattcttctttttcttcttctctgtttgcaacaaacttgagtggtgcactcgcatcagcgcagaggcacctgcagagttgcgattgcgctctttccagatctcgtagattccgcacatggctcagcctctcgtgaagaaggacgatgaccgcgacgacgaagctgagtattctccctttttgggaattgaaaagggagctgttcttcaggaggccagggtttttaatgacccacaactagatgctaggagatgttcacaggttatcacaaaacttttatatct

SEQ ID NO: 3042 - DNA, 1112 bp, Glycine max
ggaacaaagtttgatgtcattcttgtagatcccccatgggaggagtatgtgcaccgtgcccctggtgttgctgatcacatggagtactggacatttgaagaaataatgaatctcaagattgaggccatagcagatacgccatctttcatcttcctttgggtgggtgatggtgtaggccttgaacaaggtcgccaatgtctaaaaaagtggggctttcgtaggtgtgaagatatatgttgggtaaagacaaacaaaagtaatgcaactccaggactgcggcatgattctcatactttatttcaacattcaaaggaacactgcttgatgggcataaaaggaacagttcgtcgaagtactgatggccatataattcatgccaatattgacacagatgtcattatcgctgaagaacctccttatggttccacacaaaagcctgaagatatgtacaggattattgagcactttgcccttggaaggaggagactagaactatttggtgaagaccacaatatccgagccggttggctgactgttggtaaagaattatcatcttcaaattttaataaagaggcatatgtgaaaagttttgccgacaaagatgggaaagtttggcaacgacgtgggggaagaaatccaccgccagaggcacctcatctggtggtgactactcctgatatagaggctcttaggccaaagtcaccaatgaagaaccaacaacaattgcagcagcagaattctgtatccatttcattgacgtcagctagtgcatcaaacagaaggcctgctgggaattcgccgcagaacccaactgcactcggcgtcaaccaagacgcttctagctcaaacccttctactccagctccttggggttcacctctggagggcttcaagggacgtgaaggctctgtattgccttcagatgataaagtaatggatatgtacgggtttcatggaccagcatcagcaaactatctagattttgaatcatacagacaaatgaatctgttgtagcataactcttaaggataatgttccatgattacgtatcgtgtaatttttttccccgccaatataaaatgggaagaaaattattcatattttgtctgttc

SEQ ID NO: 3043 - DNA, 516 bp, Glycine max
tgtttataagtggattagatgacagagaaaagattctgttggaggagtacacatcagttttagtgaactataaggatgtcaggctgaagctcaatgatgtggaaaagaaaaaccgtgacagcatttttgagttgactcttcagctaagggaaatgaagaacgctctttccacaaaggataaagagatacaggttttacatcagaagctggacaatccagatgcaaatccttatgaaagtccctgcaccatcaccacagaatacagatatacaccacatgaagcacttctccgaaaagcaggtcaaggtgctgatgtgtcggactcagaaatttggccttcaaatttagatgcaaatgcagccacaacgcctttcacagaacaagttgaaactgaaagaacaggaaaaaatgccttctcatctgtgagaatgacactagagaagctcatggcacatcaagataagcgccaagacctttctaacttggaacagaagttccgttcagacatcaacgact

SEQ ID NO: 3044 - DNA, 1320 bp, Glycine max
ctcatggagtcctgttcaactaaaaacaatgagctttggaggaaacaatcgtgcacaggttttctttaagcaacatggttggaatgatggtggtaaaatagaggctaagtacacatctagagctgcagatttgtataggcaaattctttcaaaggaagtagcaaaaagtatggctgaggatggaggcttgccttcatcacctgttgcttctcagtctgcccagggggttaatgggcttccagaagtcaagaccaatgaagtgccaaaagaaaacactctggagaagccagaaaagcctgagagcacttcttcacctagagcttcacattcagtaatttcaggtactgttaagaaacctatctggtgctaagaaagcagtgaagagtggggggctcggcgctcgtaaactcactaaaaagccaagtgagtctctctatgagcagaagcctgaggaaccccctgctccagtttcatcttcaacaaacaatatgcctgctgggccatctccaacgtctcggtttgagtatgtagaaaatgtccaatcatctgagttgaacactggaggttcacatttgcttagtcatgtgtctccaccaaagtcatcaagcttctttgcagactttggaatggatagtggctttccaaagaaatctgggccaagctcctccaaagtgcaaattcaggaaactgatgaagcaagaaggaagttctcaaatgctaaatctatttcttcatcccaatattttggagatcagaacaaggctgcagatgtggattctcaagctacattgtctaagttttcgggttcaagtgccatctccagtgctgatctttttggtgactcaagagacaacaacattgatcttactgctggtgacctcatcaatcgattatctttccaggcacaacaggatctctcttcccttaagaacattgcaggagagactggaaagaagctgagctcattggcctccacattgatgacagatcttcaggaccgaatcctctaaaatgtgtatgctctgtatttaagagaatctttggagttttttacatatgccagccaattatgtttcaaatgtaatagaagagttttcaatatacaattctttgagaaaataagatgctatattttcaggcttgtcatatagacgggtgcttctattttgtataacaggtactgcttagatgttgctaatgttttagatttattcctttttttttgggttagtcgataccagtttgtggtgaactcgtgaactctaaaagagtgtttacgtcagcttctatcagtgaaatagttttcttgtttacatttat

SEQ ID NO: 3045 - DNA, 571 bp, Glycine max
gtcggttttcagacacgagtggcttttgttactgcgctgcgtgcagaaacagagaaggagagaagaatggacgaggagaatggttacagtgggagtagcagctctaacttggagactacaaaagcagagagatctgtgtggctgatgaagtgccctttggtggtggctaagtcatggcaggctcatcctccttctcaacctctcgccaaggttgtgctctcccttgatcctctccaccctgaagaagacgatccctctgcagtccagtttacaatggagatggctggctccgaagctgtgaatatgccaaaaacttattcattgaatatgtttaaagactttgttcctatgtgtgtcttctccgagactagccaaggtggcaaggttgcaatggaagggaaagtagaacataagtttgatatgaagccccatggtgaaaacattgaagagtatggtaaattgtgtcgtgagaggacaaacaaatctatgattaaaaatcgacaaatacaggttattgataatgatcggtgagttctaatgaggccaatgcctggaatgattggtctagttt

SEQ ID NO: 3046 - DNA, 844 bp, Glycine max
  unsure (1)..(844): unsure at all n locations
cgcaccgcgtgtgacagtagtctagccagtagcgaacgnngttctgttggtagcattgaaagagttgaaacgccaagctttgttcattgttgggtcaattgaagtctaagaaagaaaacagagagcgaagaaggagaagagatcagaaaaatggcgtccaaagctccaaagaaggccaatctcctcgatcaccactccatcaagcacatcctcgacgagtcagtctccgaggtggtaacgagtcgtgggtttgtggaagacgtgagattgagcaatgtgaggcttctcattggggcaatcatcatcgtcattgctctcttcgcccaattctacaagaagaagttccctgaaaatagggattttctcatcgcctgcatcgccttgtatgtgatcttcaatgggttgttgcagctgatcatatacactaaggagaaaaatgccattctgttcacttatcctcctgttggatcctttactagtaccggtttggtggtttcctccaaattgcctaggttttctgacatgtacacactcactatagcaagcgcagatccaaaatcaatttctgcaaatgatcaagtacatttcaccaaaagtgtcactcagtggttcactaaggacggagtcttagttgagggcctgttctggaaggatgttgaagctttgatagttcaatatactaaagaaccaaagaagagcaagtaatatggagacatgaactttggttttgtggaaaactttttggatgagaaaacatatatttggatatggtttataattctatacttaagacatttaaaatagaactgagggaatcacgctttcaccagcttttcagcactat

SEQ ID NO: 3047 - DNA, 1801 bp, Glycine max
gaatgtaaaaaatagaggttgaagaagcaagcaccaacgtgaataccctaattcggagggtttcagttttcgccctcttttctcatctccaacatcttcgtcgtcacggaggctagtcttcctgttatcacaaacaatgtctgacggtcaagaatcagacaagaatattgagatatggaagatcaagaaattgataaaggcattggaagctgctcgaggtaatggtaccagcatgatttctctgataatgcctccacgtgatcaaatatctcgggtcactaagatgttgggagatgaatttggaactgcttcaaacatcaaaagtagggtgaaccgacagtctgtgttgggagccattacttctgctcagcagaggttgaaactatataacaaggtccctccaaatggtttggttctttacactggaaccattgtcactgaagatggcaaggaaaagaaggtgacaattgattttgagcctttcaaacctatcaatgcatcactgtacctctgtgataacaagtttcacacagaagcactgaatgaacttttagaatctgatgacaagtttggtttcattgtgatggatggaaatggcaccctttttgggactttaagtggaaacactcgtgaggtacttcacaaatttactgttgatctaccaaagaagcatggtagaggaggtcaatcagctttgcgttttgctcgacttaggatggaaaagcggcacaactatgttaggaaaactgcagaacttgctactcagtttttcatcaatcctgccaccagtcaacctaatgtttctggacttatacttgctggttctgctgacttcaagactgagttgagtcagtcagatatgtttgaccctcgattgcaagcaaaaatattgaatgtggtagatgtttcttatggtggggaaaatggattcaatcaagctattgagctatctgcagagattttatcaaatgtgaagttcattcaagagaaacgcttgatagggaaatattttgaagagatcagccaggacactgggaaatatgtctttggggttgaggacactttgaaggcactggagatgggtgctgtggaaacactcattgtatgggaaaatttggatattaataggtatgtgctgaaaaatggtactactagtgagattatcataaaacacttgaacaaggaacaagatgctgatcaaagcaacttccgtgattcagccacctctgcagagttggaagttcaggagaagatgcccttgcttgagtggtttgccaatgagtacaaaaaatttggatgctccttggaatttgtgaccaacaaatctcaagaggggtcacaattctgcagagggtttggtggcattggtggaattcttcgttaccagcttgacatcagatcatttgatgagttatctgatgatggagaagtgtatgaggattctgattaagttcctgttactgcagaacccttactttgttttggaagattggggccttcaaaaatgatttggatattattgattatggttctaagacttagactttgccctttggtttttgatccataagatgtgtagcattcacttttttcctttcctctgcttcatacattttgctattttgttactcaatgtatgcttatggcaactctgccagattgtgcgctgattcttcaagaaatagctctcaggaggtcatgattcgaagtgttttattctagatgaaggtggcatctggattttatactatttcttggttacatgattgatgattcaaataactcgtgttgcagtcttgtt

SEQ ID NO: 3048 - DNA, 281 bp, Glycine max
ctgatgtcaagctgggtaccgaggattccaccaatgccacctgatcatttgatgagttatctgatgatggagaatcctcacacacttctccatcatcagataactcatcaaatgatctgatgatggagaagtgtatgaggattctgattaagttcctgttactgcagaacccttactttgttttggaagattggggccttcaaaaatgatctgggtattattgattatggttctaagacttagactttgccctttggtttttcgatcataagatgtgtatc

SEQ ID NO: 3049 - DNA, 1377 bp, Glycine max
ggatgtggctgttcccgatgtttccagggacattggatgctaccaggaggctatggtgcgtcagagttctggggtccgcagttttaaagagatggtggaatactttaatgaaagggcaaatgtatcagggaagtttcctattgggagttttaattctgcatttagcttcactggttcaaaacatgttgatgaagcagctacaaaaaccttgtcttcagatgggttttacattcctcttgcaaaggttcagcttcaaaaatcccacttaaggttgcaaggaaatgtcaaaaaggctgtcccagtcaattgggacccactgtccttggcaagttttattgaaaattttgggactcatgtcattacatcaataactatgggtggtaaagatgttatttatgttaaacaacaccatacttctcctttgtcaaagttggagatgaaaaactatattcaggatattggaaatcagaggttctctgacatcaacagccaaacaagttcagggcaaacaaaatctaaggataagggtgttgatcccttttcattcaatagtcaaggggtttatccccaacccacgactgcaacatatcctattgggaaagaagatgtcacagtcatttttagaagaagaggaggagatgatttggaacaaaaccacagtaaatggttatcaactatcaagtcctccccagatatcattgagatgactttctgtcctataactgatctccttgatgagatacctgccaaggagcatttgactcgtgccattggtctttatcttgaatataaacctcctattgaagaacttagatatttcctagagtttcagattccttgtgtatgggctcctttacaggacaggattcctggtcaacaaaggaaggaacctgtatgcccatctttgcaattcagcataatgggccagaaactttacgtcagtcaagaacagattacagtcggacgtaggccagtaactggcttacatctttgtctagaaggaagcaagcagaatcggctgagtgttcacgttcaacacttagtatctcttccgaaaatccttcatccatattgggacagccatgtcgctataggtgctcccaagtggcagggccctgaggagcaagacagccggtggtttgagcctgttaagtggaagaacttttctcatgtgagcacggcaccaattgagaaccttgaaaccttcataggagacttctctggtgtctacatagttactggagcacaacttggagtgtgggatttcggatcacggaatgtattgtacatgaagctcttatattcaaggttacctggatgcacgatccgaagatcgctttgggatcacatcccgaacaagccgccaaagactgtgaa

SEQ ID NO: 3050 - DNA, 1546 bp, Glycine max
tttcgtccggtaattcattgacatttgtgtaaatgacttgttgtggccgaaatgtcaagtaccaacttgttccattggaaactgagaaagaaaaagaagtgattcagaccctttttctgtgaatcgacatcatttcaataaagagatggagggaagtatccggtgctctgccaactacgttcctctcactccaatcagcttcttggaccgcgccgccgtcgtttaccgcgacagactttctcttgtctccggtgacgttacctacacgtggacccagacacaccaacgctgcatcaaacttgcttcttccatttctcaacttggtgtcggtctttctcccctcgatgtggttgctgtattggcccctaatgttccagctatgtatgagctgcattttgctgttcccatgtcaggggctgttctctgcacgctaaatacacgtcatgattctgcaatggtttccttgttgctaaaacattctgaggccaaacttgtttttgttgattatcaattacttgatattgctaaaggagcacttcaaatcctgtcaaaaatcaccaccaagcttccccatttggtcttaattttggagtctggacatccatcacctccccatgctaaaggaaccttgacatacgaggatcttatagctaaagggagccttcaatttgaggtgaggaggccaaaggatgagtgggatccaatctcccttaattacacttctggaactacatcaaaccccaagggtgtgatctatagccacagaggtgcctatcttaattctctggctacggttcttcttaacgagatgaggtctatgccggtatatttatggtgtgttcccatgtttcactgcaatggttggtgcctcccttgggccattgctgctcagggtggcactaacgtctgccaaagaagtgtcaccgctgaagggatatttcacaatatttttaggcacaaggttactcacatggggggtgcaccgacagtgttaaacatgataatcaattcaccacctaaagtccagaagccgcttccgggaaaggtccaagtgatgacaggtggtgcaccaccgcctccggatgtgattttcaggatggaagaactaggatttaatgtgactcattcatatggtttgacagaaacttttggtccggcatcaatttgcacttggaaaccagaatgggacaatctgcctcaagatgcacaagcaaaactcaaggcacgtcaaggagtggcccatgttgggatggaagacctagatgtgaaagatcctcacacaatgaagagtgtaccagctgatgctaaaaccatgggtgaggtgatgttcaggggcaacactgtgatgaatggatatctgaaggacttgaaagcaacacaagaggcatttaaaggtggatggttttggactggtgatttgggagtaaagcatcctgatggatacatagagcttaaggatcgctcgaaggacatcatcacctctgggggagaaaatattagcacaattgagttggaaggagtgatttttagtcatccggcagttttt

SEQ ID NO: 3051 - DNA, 629 bp, Glycine max
agtgttactcattccggattcagttgcagttgcagtgacgttttctctgcttgagatattactaattatttaaaaattatggatggatgagatgaaaatcgacaagtatttgtctggcggagataacgacggtagatgaaaatcgacatgtttcaataaatcagatttaatccaagggtccagattcgttaatagtagtagatggaaatcgaatccattaccaaaatttagtaaagtacttatgattatcatattatgtaataacagtcacatgcattaatatgaatatatagtttgagtttgagcacaagccaggttgagagatggagggaagtatccggtgctctgccaactacgttcctctcactccaatcagcttcttggaccgcgccgccgtcgtttaccgcgacagactttctcttgtctccggtgacgttacctacacgtggacccagacacaccaacgctgcatcaaacttgcttcttccatttctcaacttggggtcggactttctcccctcaatgtggttgctgtattggcccctaatgttccagctatgtatgaactgcattttgctggtcccatgtcaagggctgttctctgcacgctaaatacacgtcatgattct

SEQ ID NO: 3052 - DNA, 495 bp, Glycine max
attgaatggcaatgtacaaatattttcatatcgtttgatcatatatgattttattttgtgattaagtaaaattcatgtaagatttattatcaaatattaaagaatattgaaaacaatatattaaataacaaaaatcctctttggtacgagttttttttacacaaattacgcttgaaaattttttcttgttgcaaatttgaagaaacagaaaagtaaattaactttgtcccatccagtgtgtacaggacctcacatttgatagacaaatgccgtagttcactagagcttttctttgccatatggttcgtgatgggcaatgtatgggcctttgactcacgttttgggtccttcccacaagccccaaaactccaagtgctctgcatcatcttgctttcttggaatgcaatatgctactcgttccctttcctactggttttgcttttgtgttgttgtgtgccactaatgagcacccttcttggatacaacatgagcatg

SEQ ID NO: 3053 - DNA, 541 bp, Glycine max
tgattaccttcttgagaagagtattccattaccaaaatggaccgagatccgatctcggctccaaccctttcaattccagcacttggatgatgctggagttgattgctttgttggtccagataacaagcacaacattcactttggccatttcaaagagtgagaagccaatttggcctatgagggtgtggatagcaggttatgatattggttgtgtccttaatcttcttctactttgtggccgctaccatcaacttcatgtcactcaagggaataacgctcttaccctctctgaattggagcagcagagaaacattgaagaatcaagtgtgtacaggacctcacatttgatagtcaaatgccgtagttctctagagctttttcttgccatatggttcgtgatgggcaatgtatgggcctttgactcacgttttggatccttcccacaagcctcaaaatttcaagtgctctgcatcatcttgctttcttggaatgcaatatgctactctttccctttcctattgtttttgcttttgtgttgtgg

SEQ ID NO: 3054 - DNA, 554 bp, Glycine max
cggcattagtgtacttggaagtaagggagaagcaatacgacaagaaggaataccttgatttttatactgaccttaccgctacatctccagccgtttctggagtgatggtatatatagcaactcccgacaagaaatctaatgtaaattatttgggccctgcatcgattgaagacattgcaaggcaaataattcaagctaaaggtcccgcaggacctaacagagattatcttttcaaccttgaaaaggctcttcatgaaataggatgcaaagacaaacatgtcattgatcttgcaaatgaagtcaggcgtattcttgcagaggaacactgaatgcatctgtgtgttatgtagttatttatgctgatcagtatgttagtaagcacaacattctgagacattgaagtatatttaaatccattggaaacttcaagtcttccaaaaaatgttatgttggaagataataattgactgtaattgctataaaattaaagtttgtatgggatgcttattgctatacaattgaagcttaatataatgatttttattaacaactac

SEQ ID NO: 3055 - DNA, 633 bp, Glycine max
  unsure (1)..(633): unsure at all n locations
ttcactcgtccgcccacgcgtccggatcgcgagcggccgcccttttttttttttttttttcctttcatcgtaccattaaatttacactgaaatcgccaaatacaactaaaagcacaacactgatcctttcatttgcaaattgcaaatgcagaaaggaaaagcggattctgtctccatcctcagttcccttcctgaagatgttgccctcaaaattgcttcgctgcttcaggtgcgggatttgtgtgccttaggttgttgttcgaggttctggagggaactctgcttctcagattgcatttgggagtctcttgtcagaaacagatggcccttactctcttccttccatttcccttcttcttccactcattctcccaatttcaagaagtggaggaaattgtacttggagaggcaagtggaattgggacttagagcaaggtctgtcgtgaagtttctggaagcttgttctcgttctgagtcacttgaggttggtgactatctgaaagctgttgacaccttgattggtaccatgtttgggtttgaagacgtgcagaggttcttgttgcaaccctcaaatgaatgtcgctgattgaacttnnggttggggctacactatttgcctacacacacatatcg

SEQ ID NO: 3056 - DNA, 455 bp, Glycine max
gtgggatcggtttcatccaacttatgcagtgaatgccattctgacagacaatatatggaatggctggcacacttaaatgtgctatcctatgagcttggaggacatggtaaataggatgccaaaatgatattgtgatgttagattactccactttttgcacataagtgtttgatacccaagggctctacttataagtaggttttttttttttttttttgcacatgttgctgaagagagttagtgtatatacatataacgttgtaaatttacaatgtaatcaaatattaatactaccaaaaacttctccgtgcataaaatcttttcaagtactgaaaagtaatgacctaataggcactgaaaaaagagttcagcatcagcatctcactgcatagccgcattgcaacctatggaagtgaagctagagcatctggaaccacttcttttgcatgctgcag

SEQ ID NO: 3057 - DNA, 1259 bp, Glycine max
  unsure (1)..(1259): unsure at all n locations
actcccncgttccggaatttccttttcgaccgcacgcgtacgcccacgcgttcgcccacgcgtccgattttctcattctctgtttcgctttcaccgagtaacttcactttccccaactccacctgagaaaaagatacccataattcgcacgcacgcacgcacgcacttgttctgactcagtgcttgtgttggacgcagaagaaccagaaaagaaaaacaagcacgaggagatgattaacttcgaagaaaccgagttgcgactcggcctccctggcgggtctgcgagtgatcacaacgagtcaacaacggtcaagggcagtggtggaaagagaggcttctctgaaactgcttctgttgatttgaagcttaatctttcttccagtgatgactctgcctcagattcaccttcatctgcgtctacagagaagactaccactgctgcacctcctcctccttctcgagccaacgaccctgcaaaaccacctgcaaaggcacaagtggtgggttggccaccagttaggtcatttagaaagaacatagttcaaaggaacaagaatgaagaggaagcagctttcgtgaaggtgagcatggatggtgcaccgtatctacgaaaggtggacataaagttgtacaagagctaccaggagctgtcagatgcgctggctaagatgttcagttccttcacgattgaaaaatgtgggtcccaagggatgaaggactttatgaatgagaccaaattgatagaccttttgaacggctctgattatgtacccacttatcaagacaaggacggagactggatgctcgtcggtgacgtgccctgggaaatgttcgttgaatcatgccagcgccttcgcataatgaaaggttctgaggctatcggccttgcaccaagagccgtggaaaagtgcaagaacagaagctgaagtgattttagggttcggccacaacaatcggcttggttgttcatctgtgtcacaaggaagcaaatgtactcgagcaagatcgagtctcttttaggaataagagtttaattataattattattattatgtgtctctgtaattttcttatatgtgtattatacgaatgagaaaatagttggaaattcgttagggacaagaaataatatagaagatgtttatatgatcccgtttttgtttccaggtaaaagtatgtgactttgtccattctattgcccgcttaatgataaagtcaatggttccagtttatcttaaaaaaaaaaaaaaagggcgaca

SEQ ID NO: 3058 - DNA, 1098 bp, Glycine max
  unsure (1)..(1098): unsure at all n locations
caaaaaggggaattcccaaaatcccaataactctctctctctgtttcgctttcaccgaagaataacttgactttcccgaactccacctgagaaaaagatacccttaattcgcaggcgcgtcttgtgttggacaacaaccacaagatgattaacttcgaagaaaccgagttgcgactcggcctccctggcaacgactcagcactcaagggaagtgctgccaagagaggcttctctgaaactgcttctgttgatttgaagcttaatctttcttcttgcattaacgactctgcctcggattcaccctcatctatgtctacagagaagcccaaagagaacaagactaccactgctgaacctcctccagctaatgatccagcaaaaccacctgcaaaggcacaagtggtgggttggccaccagttaggtcatttagaaagaacatagttcaaaggaacagcaatgaagaagaggcagagaagagcacgaagaatgctttcgtgaaggtgagcatggatggtgcaccgtatctacgaaaggtggacataaagttgtacaagagctaccaggagctgtcagatgcgctggctaagatgttcagttccttcacgattgaaaagtgtgggtcccaagggatgaaggattttatgaatgagaccaatggctctgactatgtacccacatatgaagacaaggacggagactggatgctcgtcggtgatgtgccctgggagatgttcgttgaatcatgcaagcgtcttcgcataatgaaaggctccgaggcaatcggtcttgcgccaagagccgtggaaaagtgcaagaacagaagctgaagaagtgatttcatctgcgtcacaaggaagcaaattgactcgagcaagatcgagtctaatataggaataagagtttaattatcatgggcctttgttatcttttttgtaattttcttatatgcgtattatatgaatatgagaaaatagttggaaattcgttaggggcgcgcaataatatagaagatgtttacatgaccccgtttttgttcccaagtaaaaaatgtagctttgtctattccatgttnnnnnnnnnnnnnnnnnnnnnnnnnn

SEQ ID NO: 3059 - DNA, 1096 bp, Glycine max
cacacctctttctccttctccccagttctcaaaccttacctagtattttcgtttctgaacccaattaattaagcacacaaggaccataacatacctatacctcaatatcacaagtcttatggaggcagagcgagacaagtacaagatgatcaactttgaagaaaccgagttacgactcggcctcccactcagtggaaacgagacgctcaaaaccacttgcagcactgggaagagggttttttcggatactgccgtggatttgaagcttaacctttcctcaacctcaaacagtgcttcttctgacctggctaaagagaagaacatcactgctgctgcacctcctgctaacgacccagcaaagccacctgcaaaggcacaagtggtggggtggccaccagtgaggtctttcagaaagaacattgttcaaaggagtaacaacaatgagggcgaaaaagccgccacaagtagtagcaacaatgtgaacacgggagcagctttcgtgaaggtgagcatggatggtgctccttatttacgcaaggtggatttgaagttgtacaagagctaccaagagttgttggatgcgctggctaaaatgttcagttcattcaccattgacaagtgtggatcccaaggcatgaaagacttcatgaacgagggcaaattgattgatcttctcaacggctctgattacgtaccaacctatgaagacaaagatgctgactggatgctcgttggtgacgtaccgtgggaaatgttcgtggaatcatgcaagcgcctgcgtataatgaaaggatctgaggcaatcgggctagcaccaagagcagtggaaaagtgcaagaacagaagctagagtcaaatttgtaaattccactttcgacaacaatctgctctatctgttgctcttgggcgtccacggaaagcattaatgctaatttctcgagcaaggggtagtctaatatgggagccaagttgttacataatgtgtcggtaccatttcttagaaataattttcttgtatatgtattgtgtattttatatatgtgagaaaatatataatttggaaattagggacaagaaataatgaagtatgttttat

SEQ ID NO: 3060 - DNA, 540 bp, Glycine max
gagattccccattattattattatgacagaatctctaacacgtgggatcatatccaccgccggatgtcccttcaacccaccacactcccaacatatatcaccaaaaccttattcccaattctaaaagaacacacctgagtgagtcccgacatcaacttataataattcctaatcagtgacaagtgttatggaggcagagccagacaagtacaagatgatcaactttgaagaaaccgagttgcgactcggcctgccactcagtggaaacgagacgacgctcaaaaacacttgcagtactgggaagagggttttttcggatactagcgtggatttgaagcttaacctttcctcaacctcaaataacgcccctcctcctgcaaagccacccgcaaaggcacaagtggtgggcgtggccaccagtgaggtcattcagaaagaacattgtagcacaacgttcaaaggagtaacaacaacgatggcgaaaaagccgccacaagtagtagcaacaatgtgaacatgggagcagctttcgtgaaggtg

SEQ ID NO: 3061 - DNA, 766 bp, Glycine max
gtctgggtgtgacaaccttaggaagctggagatcagggactgcccctttggtgacaaagcccttttggccaatgctgcaaagcgggagacaatgcgatccctttggatgtcctcttgcttggtgagttatggagcatgtaaattgctgggtcagaaaatgccaagacttaatgttgaagtcattgatgaaagaggacctccagattcaaggccggagagtagtcctgttgagaagttatacatatacaggactgtttctgggccaagattggacatgccaggctatgtatggagaatgcaagatgattctgcattaaggatttcttgagtgattgtgctgtggaatgagccgtggaatttatcaagcatttgatgtgagaattgttagtgcaggtacatgcccagaatgctactcaataatgaattaaatctgtttccggcctatgctgttgctgttgtggttggtgtttgagctataaggtacagcaggatatataaaggcttgagctcgattgccattcattttacactttggctgagctgcgagacaccaattctgatagagatcgtacccttgctctatgttgcataggatagttactatttttcgtatcattattataatattttatggacttgtgcataattttatatgcatgttacccctgctctttcgtagtaagatatcggtggactcgttatcattaaccgtgggaaggaataaaaatcgtctttatattctagtgcatcctgatttgttgatgcc

SEQ ID NO: 3062 - DNA, 631 bp, Glycine max
gtgatccctttggatgtcctcttgcttggtgagttatggagcatgtaaactgctgggtcagaaactgccaagacttaatgtcgaagtcattgatgaaagaggacctccagattcaaggccggagagtagtcctgttgagaagttatacatgtacaggactgtttctgggccaagattggacatgccaggctatgtatggagaatgcaagatgattctgcattaaggatttcttgagtgattgtgctgtggaatgaatgagccgtggaatttatgagcatttgatgtgggaattgttggtgcaggtacatcaataatgaattaaaactgtttaggcctatgctgttgctgttgtggttggcgtttgagcttagtaaggtacaggaggctatataaaggcttgagctcgattgccattcattttacactttggctgagctacttgacaccaattctgataaagagatcggaaccttgttgtatgttgcataggatagttacactatttttcgtatcattataatattttatggacttgtgcataatttatatgcatgttacgtagtaagatatcggtggacttgttatcattaaccgtgggaaggaataaaattcgtatttatattctagtgc

SEQ ID NO: 3063 - DNA, 1819 bp, Glycine max
agaagtgctatgacgtgcacggctccctaacgtaagctttcggttcgggtcgaagctgatcaatctctttctctctctatctgtctcttccatggaatggtagatttgaggtgaaaaggttccacattggtcaggttccgatctcacaatggggaagtcaccaggaaaatggatcaaaactgtattgttcgggaaaaagtcatctaaatcaaatatttcaaaaggcagagagaagcttgttaatcaaaaaggagtagtagttacctccaaggtgccagaaactggtttggctttagaaccaacctccgatactattgccagacatgaggaagacccagagctggaaaatgaagaagcagaaaatgttttacccgggaatcaagaaatagacacagtgggatcaattaatgaagatgctgcactagatccagagaaaatgaggctggaggaagcagctacaaaggcacaagctgctttcaggggttatttggctcggagagcatttagggctctaaaaggaataataaggttgcaagcactcatccgtgggcacttggttaggagacaagctgttgttacattatgctcaatgtatggtattgtcaagtttcaagcacttgttcgtggaggaatagttagacagtctgacgttggatctgaaatccatgagaagtgcaatatattgaaccctctggatggcaagcttgtcaagccaattgctatatccacgaaaattaccaagctgtctgcaaatgctttcattcgtaagcttctcacttcatcaaccacaataatggcgctgcagctgcaatatgttcctggtgatccaaattcagtcctaagttggttggagcgctggtcagcatctcacttttggaaaccagttccccaacccaagaaaattcgagatactaagtctcatagaaagcatggcaatatttcagttggagatgctcatatgaccaagtcaaaacgcaccaccaggaagcttcctactgcaagttttgactcagtcccagtgcaagcacatcctgaatttgaaaaaccaaaacggaacatgaggaaaattccaagccaatcctcagatcctcctgtgcaggaaaatccacaaagtgagcttgaaaagattaaacgtaacttgagaaaggttcataacccagttgttgagaatgctgttccgtcagaagttgaatcggagacgccaaaggatcatttggaaaaggcaacagttacctcatgccttgctgtttcagaacaagaggtcattagttctaatgagaagatcaagaaggaagcaacattaattgtttccagtgtgccagatatagaaactactccaagactttcagttagtaaggaggtgttagactcaccaagcagttatcaagtgactgtggaatcaaaaccattgactgagattacaactaaagataaaaacattcctgtttctgacgaagtaaagaacgagcccatagatttaccagagcctatttgtaaagatgaagattctcacttaacaaatggagatttgagtcacaaggaagatcaaataggcagtgaaaaccagaaaccaaaccaaaaagcctcaattgtagcaaagcaggaacgtgcagagaatggtatacagaatagtccagcactaccgagttacatggcagcaactgatttgcaaagggaaaagttgagggcacaaggatccccaagatttggacaggatggaagtgaaagaaacaaccatactcggcgacattctctgccatcctcaactagcagcaaaattaattcaccttcacctaggacacagagaccagttcaatca

SEQ ID NO: 3064 - DNA, 557 bp, Glycine max
ccatggtacacaaccttcttgtgtttctctctctactcttgttcactccatatattcctcttctcgctctgttaaacaaaagcaaatgaggaaataaataattattttaattttgtaattcattgtttggttctgcttcacaggaatggtagatttgaggtgaaaaggttccacattggtcaggttccgatctcacaatggggaagtcaccaggaaaatggatcaaaactgtactgtttgggaaaaagtcatccaaatcaaatatttcaaaaggcagagagaagcttgttaatcaagaagaaggagttgtagttacctccaaggtgctagaaactggtttggctttagaaccaacctccgatactattgccagacatgaggaagacctagagctggaaaatgaagaagcagaaaatgttatacctgggaatcaagaaatagacacagtgggatcaattaatgaagatgctgcactagatccagagaaaataaggctggaggaagctgctaccaaggcacaagctgctttcaggggttatttggctcggagagcattt

SEQ ID NO: 3065 - DNA, 279 bp, Glycine max
caaatttcactgatccagctagcacagttttacagagagcagcaacaaacaaagcaaccacaagatttatgcagctttagatcaatctctttctctctctctctatctgtctcttccatggaatggtagatttgaggtgaagacgttccgcattggtcaggttccgatctcacgatggggaagtcaccaggaaaatggatcaaaactgtactgttcgggaaaaagtcatccaaatcaaatatttcaaaaggcagagaggtacttgttaatcaagaagaa

SEQ ID NO: 3066 - DNA, 1117 bp, Glycine max
cccacgcgtccgcccacgcgtccgcccacgcgtccgggcttgttcaccaaagaaatagatgaggcactcttgaacagcgaaatcgacatcgctgtccattcgatgaaggatgttcctacttacttgcctgataaaacaattctgccatgtaaccttccgcgagaggatgtcagagatgcatttatatccttgactgcagcttccttagctgatcttccccctgcaagtgttattggtactgcttcgttaaggcgaaagtcacagatcctccacagatatccatctcttaatgtgcaggaaaatttccgtggcaatgtccaaacaaggttaagaaaactcaatgagggggttgtccaagctacactattagcattagctggactcaaacgcttaagtatgacagaaaatgtgacttcaatcctatcaatagatgatatgcttccagctgttgcccaaggccaaggtgccattggaatagcctgtagaagtgatgacgataaaatggcagaatacattgattcactgaatcatgaagaaacaagactagcagttttctgtgaaagagccttccttgagactttggatgggtcttgccgcactcctattgcagggtatgcttgtagaaacgaggatggcaattgtttgtttagaggattagttgcttcccctgatggaacccgagtgctagagacttccagggttggtccatatgctgttgaagatatgataaagatgggtaaggatgctggagaggagcttctttctcgagctggacctggctttttcagtcgttaactatccacattaaatggccaacacaatacttgatcagggaggttgcacggtcagctcttttagttgactgcatcccaagtatgcctattcttcaaccatgttgtaaggactaaaatattcatctgagttggaaaaatgagcccctcatcatggtccaattgttgtatcttaaggtgattagaaagccaaatttttgtagagtgttatgtgtattgttcctagtataaggttgaatggttgttttcttctttcttcagggaaatctttacatgggaatattatagttaaaaaaaaaaccaaataaaaaaaaaaatgggcggcc

SEQ ID NO: 3067 - DNA, 444 bp, Glycine max
ctttgggagatcaaatcatatctatctatcagcggcaaggcaattccaagttgtgaaatggagaccctctgctctgcattggtgttcccatctttcagaatcacaacttcagctttctccaaatgtggcatcagggcttccattgccgttgagcaacaaacttcccagactaaggttgctctcctcagaattggtaccagaggaagtccactagctctggctcaggcatatgagaccagagacaagctcatggcatcacatccagagctagcggaagaaggggctattcagattgtgataataaaaacaactggtgacaaaatactatcacagccacttgcagacattggtgggaagggcctattcacaaaagatatagatgaggcactcattaacggtgacattgacatcgccgttcactctatgaaagatgtacccacttac

SEQ ID NO: 3068 - DNA, 654 bp, Glycine max
agcagacagaagcgagcgaaacggggttgcctcaacaattcgctgttgttgttctcttctcttctctttgacatgaatactctttcttccacgctccatggcgggtggcttccccgctcagcttcgaaaaccaaaaccgcatctctctccaaatgccatcgcatttgggtcaccaaagcttctgttgccgttgagcaacaaactaaggtcgctctcatcagaattggtaccagaggaagtccactagctctagcacaagcatatgagaccagagacaaactcatggcatcacaccctgacttagccgaagagggggctattgagattgtgattataatacaacaggggacaaaatcctcacacaaccacttgcagacataggtgggaagggcttgttcaccaaagaaatagatgaggcactcttgaacagcgaaatcgacatcgctgtccattcgatgaaggatgttcctacttacttgcctgataaaacaattctgccattggaattgcctgtagaagtgatgacgataaaatggcagaatacattgattcacttaatcatgaagaaacaaggctagcagttgtctgtgaaagggcctttcttcagactatggatgggtcttgccgcactcctattgcagggtatgcttgtag

SEQ ID NO: 3069 - DNA, 270 bp, Glycine max
cgtttaaatatgacggaaaatgtgacttcgatcctatcaattgatgacatgcttccagctgttgcccaaggtgctattggaatagcctgtagaagtgatgacgataaaatggcggaataccttgcttcactgaatcatgaagaaacaagactagcagttgcctgcgagaggcgcctctcttcagacgttggaagggtcttgccgcactcctattgcaggctatgctagcagaaatgaggatggcaattgcttgtttagaggattagttgc

SEQ ID NO: 3070 - DNA, 849 bp, Glycine max
ctgtttggctacattctgaatggagctttctgcaccttcttcaccctctcttctaagatgtccttcatccctgcttctgaattctagggttagggttttccatacaatacccaaccccacacgcccacctttccaagcttcaatcttttcactcaaccaacgcaatctcactccaatggatcttcccagaaacgtctcctccgctgccttggtgggagacaacgcttcggccacgaccactttgccaattgactcagatgctagaatcggagaggttaaaagggtcaccaaggagaccaatgtatcagtcaaaataaacttggatggttctggggtggctgatagtagtactggaattcccttcctcgatcatatgcttgatcaacttgcttcacatgggctgttagatgtacatgtaaaggctacaggtgacatacatattgatgatcatcacacaaatgaagacgttgcccttgctattggaacagctttgctgcatgcccttggtgataggaagggtattaaccggtttggtaacttctctgctcctcttgatgaagcattgatacatgtttcactggatttgtctggccgaccacatctaagttataatttggacatacccactcagagggttgggacatatgatactcagttggtggagcatttcttccaatccctggtgaacacgtctggtctgacacttcacattcagcagcttgctgggaaaaattctcatcatattattgcggcaaccttcaaagcttttgctcgggctcttcgacaagcaacagcgtatgatccacgtcgccgtggaactataccaagttcgaacggggttctgtcccg

SEQ ID NO: 3071 - DNA, 366 bp, Glycine max
ggaggagatatagaaagggaaatggaagcggaaaccttcatttgagttgccattgccaccaccgtttcccatggcgtctgtttggacactgcacttccgctctctttctcttcgcccatgcctctacattagtagcaattgcagtagcgctgccactagaaatcgcattagcatcagaaatcgaatctccaattggcgctcttgcgcccaacaactcaaacacgattccatcaattccattaccaaatttcaccatcaacttgttcattccgttaccattcctccattcctgttcgaggcctctcaagtatgaagaccccttcaataatccctttgtcaaggttggcaaaagccactcaactgttg

SEQ ID NO: 3072 - DNA, 706 bp, Glycine max
cagagctcaaaaccctagagaggaggaagagagagcgtgcaagttccggccaccacccaatatagagagtttcgttcgtcaccatgactttcaagcgcaggaatggaggtcgcaacaaacacggccgcggccacgtcaagttcattcgatgctccaactgcggcaaatgctgccctaaggacaaggctatcaagaggtttctggtgaggaacattgttgaacaggctgcagtcagagatgtgcaggaggcttgtgtctacgaacaatacacgcttccgaagctgtatgtgaagatgcagtattgtgtttcctgtgctatccactctcatgttgtgagggttcgatcccgcactgataggagaaagcgtgagcctccacagcgattcatcaggcgcagggatgatgcaccaaggcctggtcagcctggtcaagccccacgtcctgctggagtaggagctcctgcccgagcttaaaagaaaattccaagtttttggggcttgtttgttcagttttatgttgcaaacttaaattccatttgctgtttatttttgaaatttcagttttgtgtagggatattatattctcttctagttgtttgcttcagtggtcggagaaaattttctattgttatcatttgatggttttgaggagaatgtaacctgatatatgatatattttagcgttttgaagtacctcagttgtgccc

SEQ ID NO: 3073 - DNA, 759 bp, Glycine max
gggcatataaaacacattttgcttgcagcaatctgtttctttcactcagcaacagcagttacagcactcaaaaacctagagcgaagagcgtgaaggcaccggccgccggccatgacattcaagcgcaggaacggaggtcgcaacaaacacggccgtggccatgtcaaattcatccgatgctccaactgcggcaaatgctgccccaaggacaaggccatcaagaggtttcttgtgaggaacattgttgaacaggctgcagtcagagatgtgcaggaagcctgtgtctatgaacaatacacgcttccgaaactctatgtgaagatgcagtactgtgtttcctgtgctatccactctcatgttgtgagggttcgatcccgcactgacaggaggaagcgtgagcctccacagagattcatcaggcgcagggatgatgcaccaagacctggtcagcccggtcaaggacctcgtcctgctggcacagcagcagcacctgtccgaacctaaaagcaagtcctaaggaataagccttgatgttatgctggaccaaatttataatataaacttttatttgttgcttaattttgaacatatcagttttgtggagggttatttttttcttccaatcatcagctttagtcttggatgatatctttttggttataatttggcggcttttatgaaaatggaacttggtatgtgataactttcagcaatttcgaaatgacatctcccgattatgttttcatcggaattggttcc

SEQ ID NO: 3074 - DNA, 519 bp, Glycine max
  unsure (1)..(519): unsure at all n locations
caaaaattaggtttttttgtggcatataaaaagggttctgcttgctgcaatcggattcactccgcagctgcagcactcaaaaccctagagaggacgagagagcgtgcaactttcggcaaccacagaccatgacattcaagcgcaggaatggaggtcgcaacaaacacggccgcggccatgtcaaattcatccgatgctccaactgcggaaaatgctgccccaaggacaaggccatcaagaggtttttggttaggaacattgttgaacaggctgcagtcagagatgtgcaggaagcttgtgtctatgaacaatatacacttccaaaactctatgtgaagatgcagcaaaaaaaaccttcctttaaattgggntttggggaaaaaaaaagggggaaaattcagactggtttctggctatcacttatgttgggggtcgacccgaccgacgaggagcgtgagctcacaaattatcagccagatatcacaaactgtagccggaagacttctgtgaagacagact

SEQ ID NO: 3075 - DNA, 469 bp, Glycine max
cgctgcgacatgacgacataatggtaccgctgcgacaacactatacaaggcggactccgcagctgcagagctcaaaaccctagagaggaggaagagagagcgtgcaacttccggccaccaccgaccatgacattcaagcgcaggaatggaggtcgcaacaaacacggccgcggccacgtcaaattcatccggtgctccaactgcggcaaatgctgccccaaggacaaggccatcaagaggtttctggtgaggaacattgttgaacaggctgcagtcagagatgtgcaggaagcttgtgtctatgaacaatatactcttccgaaactctatgtgaagatgcagtactgtgtttcctgtgctatccactctcatgttgtgagggttcgatcccgcactgacaggaggaaacgtgagcctccacagagattcatcaggcgcagggatgatgcacctaggcctggtcagcccg

SEQ ID NO: 3076 - DNA, 1045 bp, Glycine max
agacgacgacgcggggaatctccggtctccaccgacatctcttgtattctcttcacaatcccgtgatcccatttcgttccgttcacttcaatctcaatggccgataataagcaacccaatcacgaggaggcaagtcctcttctccaccagtcccaacccaaatccgaaccaccaacgccacctgagactcccgagtttcttctcggatggaccgctgatgggctcccgctgggccacggcagcgtcgtgggccagcccatgggccgcgccccttggaactcctccatctgcgcctgtctcggccaaaccgatcacttctgcagcagcgatctcgaagtttgtcttcttgggagtgtggctccttgcgtgctgtatggaagcaatgttgagagacttgaatctgctcctgggacatttgccaatcactgcttgccttattctggaatgtatataattggaaattcctgctttggttggaattgccttgcaccctggttttcctatcctagccggactgctattcgtcgcaggttcaatttagagggaagttgcgaacacttaatagatcatgcgggtgctgcggaagcattttggaagatgaggtgcagcgtgaacattgtgagtcagcatgtgacttggcaactcatgtcttctgtcatgtatgtgctctttgtcaagaaggtcgtgagctccgtcgtaggttacctcatcctggctttaatgctcaaccagtactggttatgattcccccaggagagcagaccatgggacgtgaggcttgaaaattttctccttcatcttggaagtgctattcgtgcgtatattaccgttgtcttgctctatattatataacttgatgttgtcgaaccgtgtgatgactttattaaaagagggccctttattattattatttttttttataaataagaacatgaaacatcatcataatttctgtttgcttccctactgttttgtatcatacatgcatttgaaatgatattggagaaataaatactcctagtgtctatgcgtaattacattcctt

SEQ ID NO: 3077 - DNA, 518 bp, Glycine max
ggcgtgttggagtgtttggcaataaaaggaggagacgacgacgcggggaatctccggtctccaccgacatcccttctcttccaaatcctgtgatcccattccaatccgttccgttcagctcaatctcaaaatctcaatggccgataatgagcaaccgaataacgaggaggcaagtcctcttctccaccagccccatccccaacccaaatccgaaccaccaacgccacctgagactcccgagtttctcctcggctggaccgctgatgggctccctctggcccacgccagcgtcgtgggccagcccatgggccgcgccccttggaactcctccatctgcgcctgtctcggccaaaacgatcacttctgcagcagcgatctcgaagtttgtcttcttgggagtgtggctccttgtgtgctgtatggaagcaatgttgagagacttggatctgctcgtgggacatttgccaatcactgcttgccttattctggaatgtatataattggaaattcctgctttg

SEQ ID NO: 3078 - DNA, 879 bp, Glycine max
cattgattccgaagccccacataccatttgttattcatataaaaactcgttttccttctccatttctcgtcgcaccttttcctcttctctctctctttctctctttctagttcgtgttcttcgtcgcaaatccgaagtaggatctctcttgttttttctctaggtttttcgcgatggcgtcgaagcgaattttgaaggagcttaaggatttgcagaaggatcctccaacatcttgcagtgccggtcctgttgatgctgaagatatgtttcattggcaagctacaattatgggtcctccagacagtccctatgctggaggtgttttcctagtgactattcatttccctccagattatccctttaagccacccaaggttgcattcaggacaaaggttttccacccaaatataaatagcaatggaagcatttgccttgatatattgaaggagcagtggagccctgctctaaccatttccaaggtgttgctctcaatttgttccctattgacggacccaaatcctgatgatcctttggtccctgaaattgcacacatgtacaagacagacaggaacaagtacgagtcaactgcaagaagctggacccagaaatatgccatgggctaattgacatagagaagagagcgatttttactttcagtgtttaggccaaacagccttgtatgaatatttgtggtcttcgattaaggccccccccagttgaagatgaatggggaaatatttcttctgttgtctgtattgcagaatgcaaacgctacttttaaaacagtgaaatgtaagcccaattaaaaagtttaaaattttaaccttgtattgccagtattgtgcgaatatttaaagaatgattggtttgtctctgtac

SEQ ID NO: 3079 - DNA, 961 bp, Glycine max
acagaaggggggaattggaattagaattgtaaaaaggaaaggggaaggaagcaaggcaaggaaggagagtggatcgattcctcagcagcaccagacatttataaaagctctttcccttccctcaaatcgctcatactcttccaatcttttttttttttttttttttacctttctccctcgctcaataatacaaaacaaaaaagaagaagaagaaggttttcgcgatggcatcgaaacggatcttgaaggaactcaaggatctccagaaggatcctcctacctcttgcagcgccggtcctgttgctgaagacatgtttcactggcaagcaacaattatgggtcctccagacagtccttatgctggaggtgttttcctagtcactattcatttccctccagattatcccttcaagccacccaaggttgcattcagaacaaaggtatttcacccaaatataaatagcaatggaagcatttgccttgacatattgaaggagcagtggagccctgcgctaactatttcaaaggtgttgctctcgatttgttccctgttgacggaccctaatcctgacgatcctttggtccccgaaattgcccacatgtacaagacagacaggaacaagtacgagtcaactgccagaagctggacccagaaatatgccatgggttaagtgaccttgtggtatgtgtgaggaagagcctttctactctcagtgtttaggcctctcagcccttgtatgaatatttgtcgtttttaataaggcccctccagttgaagattaatggagcaaaacgtttctcctgttgtttgtactgcaaatgttaatttagaacagtgaaatgttgcccccaatcaaatatgctcaaatttttaaccgttctattagtgccattatttcatgtttaatttttttccccgtttatgaacttgagccttaatgaattattgtttttcattttt

SEQ ID NO: 3080 - DNA, 948 bp, Glycine max
  unsure (1)..(948): unsure at all n locations
gaataataatagcaataacaatagcaacgagaaaaaattaacgagggaggggagaagagaaagaaggaaggagacatttataaaaagctctttcccttcccctaaatccctcacactcattccatttttacctttctctctcgctcgcaaacgcaaataataaaaaacaaggttttagccatggcatcgaagcggatcttgaaggaactcaaggatctccaaaaggatcctcctacctcatgcagcgccggtcctgttgctgaagacatgtttcactggcaagcaacaattatgggtcctccagacagtccttatgctggaggtgttttcctagtcactattcatttccctccagattatccctttaagccacccaaggttgcattcaggacgaaggtatttcacccaaatataaatagcaatggaagcatttgccttgacatattgaaggagcagtggagccctgcgctaactatttcaaaggtgttgctctcaatttgttccctgttgacggaccctaatcctgacgatcctttggtccctgaaattgcacacatgtacaagacagataggaacaagtacgagtcaaatgcaagaagctggacccagaaatatgccatgggctaattgacatatatagaatgagggagagcgattgtttaggcctaacaacctttgtatgaatatttgtggtcttcgattaagggccccttcagttgaagatgaatggggaaatatttcttctgttgtttgtattgcacaatgcaaatgctacttttaaaacagtgaaatgtagctcaattaaaagtttgtcaaaattttaaccttgtattgcgtttgtcgcatatttagagaaggttgtnttgctctattatcatgctntagttaataattatgatttgtgaagtaccgatctattaatattatataaagaattntgtaaaaatg

SEQ ID NO: 3081 - DNA, 405 bp, Glycine max
ctctctctttctctctttctagttcgtgttcttcgtcgcaaatccgaagtaggatctctcttgttttttctctaggtttttcgcgatggcgtcgaagcgaattttgaaggagcttaaggatttgcagaaggatcctccaacatcttgcagtgccggtatatttttatttttttgttttgatattcttttcctattttattgttgagaatttggttgtgtttgtttaaacaatttggatttaaattttggtaaggaagaagctgcgcgattctgattttctagcagtaatatttgtatattgtaaaataaaattcctgtttagaattttgtttcttaggttttttgttgagatttatttcaatcggttgtagcggatgtcgtttgatataggtcttggtgccgttt

SEQ ID NO: 3082 - DNA, 509 bp, Glycine max
gcaaagaaggaccaacacacttatacacggccgtcaaaactttcccttaatcccttacactcggaccattaacacctgggtgtgtggctcaacgacgacactgttcatataacacagttttagccatggcatcgaatcgtaatcttgaaggaactcactgatctccaaaaggatccttctacctcatgcaaagcctttcctgtagctgaaaacatgtttcactggcaagcaacaattatgggtcctccagacagtccttatgctggaggtgttttcctagtcactattcatttccctccagattatccctttaagccacccaaggttgcattcaggacgaaggtgttccacccaaatataaatagcaatggaagcatttgccttgacatattgaaggagcagtggagccctgctctaaccatttccaaggtttgttcatttatcagatagttagaaaggcctttgtttcttaaaatattattattctttaagtgccatctatctctgaa

SEQ ID NO: 3083 - DNA, 585 bp, Glycine max
actcgttcggcaaaggacatggatcggataaaagggccatggagtcctgaagaggacgaagcgttacggaggttggttcagacttacggccctaggaactggtccgttataagcaaatccattccgggtcggtctgggaaatcgtgccgcttgcggtggtgcaaccagctgtctccggaggtggagcgccggcctttcacggcggaggaagacgaggcgatcctgaaggctcacgccaggttcgggaacaagtgggccaccatcgcgcgcttcctcaatggccgcaccgacaacgccatcaagaaccattggaattccaccctcaagaggaagtgctccgagcctctctccgagcctcggcctctgaagagatccgccaccgtttcgggtagtcaatccggatccgatttgagcgattcgggtttacccattattcttgcaagaagcgtgagcgtgacggtagctccctctaaccaccttgcggaaaccgcgtcggcgtcagtaactgatcctgccacgttattgagtttgtctctaccggggagtcgattcgtgcgatggggctgataatggggctgggccgaa

SEQ ID NO: 3084 - DNA, 1137 bp, Glycine max
caacaatctttgcttcagccgccacctggtttatcaatgccttcatcgatgcagcacccaatgcagtatcccaattttacccctcctttacctactgtatcttctaatttgcctgaattaccatcatctttgctgcctgtgagtgctggtacccctagtataccatctgcttccttgcctccatctaatttgcctccagcaccttctgctttacctcctgctccatcagctttgcctcctgcaccgtctgctctatctcctgcatcttctgctttatctcccgtaccttctgcaacacttgcttctgaaaatttgccagtatcagtaacaaataaggcacccaatgtttcaacttcagcagctatgttagcttctaacttaccatcactggctttgctgaccaatcctgctcgagatatcaatgctatagtgccacccatttccagcaaatcgaatgcaatttcaggttcaagcttgccctatcaaactgtatcccagttttctcctgcagttgtgggatcatcaacttctatccatacagaaacatcagcaccttctctcctaaccccaggtcaattattgcagcctggaccaagtatagtttcttcagctcagccttcacaagcacctcataaggatgttgaagtggttcaggtatcgtcaacatcatctcctgagccatctgtgccagtttctgctgaaactcaaccaccaatactgccattgccagtaacttcacggcccagttacagacccggtgtagctcctacccaaactcatcatcatggctatagttatagaggacgtggaagaggaagaggaactgggggtttccgctcagtcacaaaattcactgaagattttgatttcacagcaatgaatgagaagttcaaaaaggatgaagtatggggtcatcttggtaaaagtaagtctcattcaaaagacaataacggggaagaaaatgcctttgatgaagattaccaagatgaagacaatgacgatttatcaaacattgaggttaaagtaatgttatctaatgtgcaactttatatgcatccagtttttaccgacatgtatttctgtaatttgggttcttgtcttcctatcgtgtttgggtctctggtattcatgggtttt

SEQ ID NO: 3085 - DNA, 1784 bp, Glycine max
ctgccataagtcccttccctattgtaatttctgccagcctcaaaaaaagacttgctctgcgctctgccactctctgagtacaatacaacactgccatggctgcctcactctccactattggagctgtcaacagagctccactgagcttgaacagctctgaagctggagattcggttcccagttcagccttctttggcacaagcttgaagaaggttactgcctcaagggtccctaacgtcaagatttctatctggaagtttcaaaatcgttgcggcggagaaagagattgatgagcaacaacagacaaacaaggacagatggaaaggtcttgcctatgatatttcagatgaccagcaagacatcacaagagggaagcggtttggttgattccctcttccaagctccacaggatactggaactcactatgcaatcatgagctcttatgagtaccttagcactggacttaaacagtataacttgggataacaacatggacggtttttccattgctcctgcttttatggacaagcttgttgttcacatcaccaagaacttcatgaccctgcctaacatcaaggttcctctcattcttggtatttggggaggcaaaggtcaaggaaaatccttccaatgcgagctcgtctttgccaagatgggaatcaaccccatcatgatgagtgctggagagttggaaagtggaaatgcaggagagccagcaaagttgataaggcaaaggtaccgtgaagctgctgatataatcagcaaggggaagatgtgctgtctcttcataaacgatcttgatgcaggagctggtcgtcttggtggaaccactcaatacactgtgaacaaccagatggtgaatgccaccctcatgaacattgctgataaccccacaaatgttcagcttcctggcatgtacaacaagcaagagaacccccgtgtgccaatcatcgtcaccggtaacgatttctcaacactcgtatgctcctctcatccgtgatgggcgcatggagaagttctactgggcacctacaagggacgatcgtgttggcgtctgcaatggaattttccgcactgacaatgttacctgaggatgaaattgtcaagcttgttgacaccttccctggccaatctattgatttctttggtgcactcagggctagagtatatgacgatgaagtgaggaagtggatttctgttgttggtgttgacttcattgggaagaagcttgtgaactccaaggaaggacctccaacctttgaccaaccgaagatgactttgagcaagctcttggagtatggtaacatgcttgtccaagaacaagagaatgtgaagagagtacaactggcagacaagtacttgacagaggctgctcttggtgatgctaatcaagattccatcaacagaggaactttctatggcaaagcagctcagcaagtaaacattcccgttcctgaaggttgtactgatccaaatgcctcaaacttcgacccaactgcaagaagtgatgatggaacctgcttatacacaccctgagaacctaagcattctccacttggagagaagctaagagttgagataataaaataagttatcttgttcatattggattgttatcctgtataatttctgatgttgacattgtctacagtttgacaatgtgtgcaatgttgaaagtgcttgatcgtctttgctcttgtccgcttgcgcatttgctggcttttctacatttaattttttccttgacacgatattaatgttatgctacctgttcgttttagtt

SEQ ID NO: 3086 - DNA, 2144 bp, Glycine max
gcaattgaagttaaaagccttatccttccctactactccaaacacaaagacatcatcatccatggctgcctccgtctccactgtcggagctgtcaacagagctcttttgaacctgaatggttctggagctggagcttcagcttccagttcagcctttctttgtgaccagccttgaagaaggttattggcctcaagggtccccaacagcaaggtttccgggtggaagcttcaagattgttgctgtagaagagaagaaagagattgaagagacccagcagaccgacaaggacagatggaaagggtcttggcctataatatcttcagacgaccaacaggacatcacaaggaggaaagggtttgggttggactcctttttccaagctcccacaggatgctggaactcactatgctgtcatgagctcctacgagtaccttagcactggacttcgccagtacttggacaacaacatggatggattttacattgctccagcttttatggacaaacttgttgttcatattacctcagtaattcatgaccctgcccaacatcaaggttcctctcattcttggtatctggggaggcaagggacaaggaaaatgctttccaatgtgccgactgtctttgccaagatgggaatcaaccccatcatgatgaggggtcgagaggttgaaaagtggaaatggcaggagagccagcaaaactacatcaggcagagataccgtgaaagccgcagacttgatcaagaaagggaaagatgtgcgctctcttcatcacacgatcttgatgcagtgagctggtcgtcttggtaggaaccacccaatacactgtcaacaaccagatggtgaatgccactgctcatgaacattgctgataaccccactaatgtgcagcttcatggtatgtataacaaggaagagaatccccgtgtttcccatcattgacaccggtaacgatttctccacacctctatgacgcctctcatacgtgatgggcgtatggagaagttccaacggggcaccaacaagtggatgaccgcattggtgtcatgcactggaatttttcgcactgatggtatttccctgaaaggacattgtcaagctttgttgacacctttccctggccaatccattgatttctttggtgcactgagggccagacgtatatgatgatgaagtgaggaagtggattttttggtggttggtgttgacggcatttgggaagaagcttgtgaactcaaaagatggacctccaacctttgagcagcccaagatgactctaggagaagctcttgacgtatggtaacatgcttgtccaagaacaagagaatcgtcaagagagtccaattgcactgacaagtacttgaacgaggctgcacttggaaatgctaacgaggatgctattaacaggggaacttttcttccaatcttgaattggaggcaaaagcaaacttggcaagtaaatatttctgttcgtgaaggtttgttgtactaatccaagtgctagaagttgtgatgggactttgcgttgtaggagttcttagaattcttaattgttttaggtgcaaagagaagattgccaagtttgaaaaggattttacaaaatttttcaaatgggacggtcttcctctataattttaagtggacactgtaactcaaaattatagaggaagacggtccacttaaattgaatttggtgccttttccttttgtcctaaattcttgattttttatgctttaaatttatatcttttgtttgacgtacaaatattagtacatatctagcccttatagcttcattttcaagtgctaaggatctgaagaacttggagagaaaggtcaagttcagagctcaataatgaatggcaagcggcccccaaatcataaacattacaaattgttccttatatacagtaactactttaggcccaaaaagaaatgagcacccaaaccacttatcaaataactcccatcagatgttgcactgataacactcttttaacgtgatctttcatttttcatatgttacactgtaatgttcttttagcatatgtacccttatgtaagtgtcgatggacattttcatgaatgaattattgaccccccgccaaaaaaagaaataacaccaagaaaatgttatgcat

SEQ ID NO: 3087 - DNA, 1608 bp, Glycine max
cgtatcgcgtgggcggacgcgtgggctctactctctctcactctctctctctctctctctcctcagctgtgtgatgattcatttctaaaccctaattctccttgtttccattgctgcttcattgttttttaagcaattccgagcattgatcaaatgggttttggttcacttccaattttctgaaacagcgtactctcaaaaaaaatatctgatcacattttctacttctgcaaattctgcatttttttccctctctttctttctggggtgtctgcagaacaagggaatctcacagattccttgtgtttctctttggtttccggtctcaaaatatcagcttttggatttttagtgttgcaaattgttgagggtttttgtggggtggtggcttttgtttgattttccatggctgcggttgctgagattcccgctgatgccaacaaaatggactcaaaacctaaggctgaatctgaattcagtgtgcagaagctggttgacatgttcacaaagttgaatcctttggcgaaggagtttttcccttcatcatattctcccaatcatgataatcgctttcagggctttaatcagctctcaccaacccactttctggtcagcactaagccctctgctgatgagaatttcccgaacaatcgaaggagaagaaatagttttaaccaaggaaggagaaaggtgagtggaagatcactaaaggctcagagagaagatagcattagaagaacagtatatgtttctgagattgatcagcattcttttttcctggtgtaggttactgaggagcggcttgctgccttattcagcagctgtggacaagtaattgattgccgaatttgtggtgatccacattcagttctccgttttgcttttgttgagtttgcagatgagtatggtgcaaggactgctctaaatcttgggggtaccgtgcttggatactatccggtcagggttcttccttcaaaaactgccattcttccggtgaatcctacattcctgcctaggtcggatgatgagcgtgaaatgtgtgcccggactgtctattgtacaaatattgataaaaaggtttctcaagctgaagtgaagaatttttttgaatcagcttgtggcgaggttatgcgccttaggctcttgggggaccacgtgcattcaactcgaattgcttttgtggaatttgcaatggctgaaagtgctattattgcactaaactgtagtgggatgctcttggggacccagccaataagggtgagtccttcaaagactccggtgaggccaagggtcactcgtccggcgtctcattaactgatcgtcttcgtgaaagatttgtgagtggatatttgcttcaactttccagttgagacttgtgtagaaagggtggtgaaacttccctttgtttgtttcagtatttccatcctttttctgtcaacagcagttacttttttgttaccagagcttataactatcatgcactagttaaacttcctagcatccagtctttgattgtgaagtatttataccgtatctacattgaaatggtctagtttcagttttttttgttacttggagctagtactaatcgtactttaatttagcttg

SEQ ID NO: 3088 - DNA, 813 bp, Glycine max
cagaagctggttgacatgttctcaaagttgaatcctttggcgaaggagtttttcccttcatcatattctgccaatcatgataatcgctttcagggctttaatcagctctcaccaacccactttctggtcagcactaagccctctgctgatgagaatttcccgaacaatcgaaggagaagaaatagttttaaccaaggaaggagaaaggtgagtggaagatcactaaaggctcagagagaagatagcattagaagaacagtatatgtttctgagattgatcagcatgttactgaggagcggcttgctgctttattcagcagctgtggacaagtaattgattgccgaatttgtggtgatccacattctgttctccgttttgcttttgttgagtttgcagatgagtatggtgcaaggaccgctctaaatcttggtggtactgtgcttggatactatccggtcagggttcttccttcaaaaactgccattcttccggtgaatcctacattcctccctaggtcggatgatgagcgtgaaatgtgtgcccggactatctattgtacaaatattgataaaaaggtttctcaagctgaagtgaagaatttttttgaatcagcttgtggcgaggttatgcgccttaggcttttaggggaccaagtgcattcaactcgaattgcttttgtggaatttgcaatggtaagtcttgactatactagttgccattaattggctgcactacactttcatagtttatgagaataactgcatcatgaacaacttattcaacctatgttgattattttatggattctatgt

SEQ ID NO: 3089 - DNA, 882 bp, Glycine max
  unsure (1)..(882): unsure at all n locations
cactgtcactctctctctctctctctctcattcacacgaatcacactctccacagtgcgattcattcaccaatggatcgcaacggtgttctctctcttgcattcatctgcattgtagtcgccggcgtcggaggccagtctcccgccgcagcgccctcgaacactccggcaacccccgccgccgccactcccgcccaagcaccttccacaccgaattcaccagccccagttgcttctcccaaatcatctccaccagcttcgtctcctaagcccgcaaccgcaacccctgcttcgtcgccggcggcatctcctaccaccacccccgccgcgcctgctccagcgaccaagccacctgcagcctctcctcctccggcgccggttcccgtgagctctccccccgctcccgtgccggtgagttctccacccgctcccgttccggtggcggcgccgaccacccctgtggctcccgctccggctccgagcaagcacaagaagaagggtaagaagcacggtgctccggctccttcaccgtcgttgctgggacctcctgcgccacccaccggggctcctggtcctagcgaggacgcttcttcccctggacctgccactgctgccaacgatgagagtggagcagagaccatcatgtgcttgaagaaggttctaggaggcttaggtttgggttgggctacccttgttttggtcttctagacaggctttgttgctgttattatattcttgtattgtatcatttattttccttttttgtttctttttcttttgaccctgttttgggtacacattacatttatttacattgttaccttcagacccttattattcgattgatgtcgttgtcatcaaaaaannnnnnnnnnnnnnnnnn

SEQ ID NO: 3090 - DNA, 478 bp, Glycine max
catcactctctctctctctctctcatccacacgaatcacactctccacagtgcgattcattcaccaatggatcgcaacggcgttctctctctcgcattcatctgcattgtagtcgccggcgtcggaggacagtctcccgccgcagcgccgtcaaacactccggcaactcccgccgccgccactcccgcccaagcaccttccacagtaccgaaatcaccagctcccgttgcttctcccaaatcatctccaccagctgcaacccctgcatctactccggcggcatctcccaccaccacccccgccgcgcctgctccggtgaccaagccacctgcagcctctcctcctccggcgactcctccaccggcaactcctcctccggcgccggttcccgtgagctctccccccgctcccgtgccggtgagttcttcaccggttctggttccggtggcgggcccaacaacccctgtggttccttttc

SEQ ID NO: 3091 - DNA, 410 bp, Glycine max
caggacttaaaaatatctctgatccaccacctggtggcactagaagaggaacgacaattcccacgggcatttatgctccccctaaccgtgatcacattgctctggcgttggcaatggcttaccaagaggtcaccaatcaccataaacagcgccctcctatcaacgatctcgggccaaatgataagcttcctagctgattcacttactgctacttaccctctcagggttttgggcttgggtccttaagcaacttgttagaacagcttcagcatgcatattgcatatatggatgtaatcattttcacatggagttaaaaagaggtagaggagatcgagttgtaggaaataaactacttttgcaaataataacataccacattaatcttcaaatctattcttatatcacaccc

SEQ ID NO: 3092 - DNA, 1792 bp, Glycine max
ctcacatgcctacttagtttatttttttgtgtgtgtgtttatgaagagagagaagaagtgaagataagcacaaggagtgtcatctagtcagctactaccaaattttcagagtggactattcttcctttattatattcttaattaccgtgccttatccgaccctctcataccaaacccaacccaacccaaccaactatatttcaaccagccgcggcgactaaacaacgaccacaccctcaaaaccatttccaactaccaactactctctctatcactctcccatggcttcctcttccctctttctctcactctctctcaccctttgccttgtttcctctctctgctatgctcacaaatcttccttaaccctacctgtgacaaaagacgattcaacccaccaatacctaacaaccctctcttatggcacccctgttgagtctgcaaaattcgtgcttgatctcggaggctcaatcctctgggctgactgtgcatccagaaccaccccatcttccacccttgccccaatcttccaccgttcaattcgctgcctcacggcaaagggtcctgaaattgagacacatagatggctctcgagtctcgcaaatcccatagatcaagatcagccgtgtcaaattcctgcagagaacagcatctcggggaaaagggtcaccgaaggagagcttgtggaagacttagtgattaatcgctctcacgagcttctcttcacttgctcacccactcttctcttgaacggtttagctaccggtgccaaaggcatggtaggtcttgatcgatctcgcacttctttttcgtctcaggtttttcactcacttggaactcagagaaaaatcactctttgtctctcttcctcttctgggattgttcaatttgggaatgtggcgcatgaatcccaacccgggtctgaaattttcagatctcttacttttacaccccttgtcgcgaaccaagaccaaacacagacacacccttccatcaacgttaactccgtcaaaatcaacggcaaaaaggtttctttcgacacccccttgggtgggggtgctcagctgagcacggtggtgccttacaccactctccaaacctcgatctatgcaaacttcgaaagcgcttatttgaaagccgcttcgtctatgagcatgaaaagggtcgatccagtttccccctttgggctctgcttcgaatccaacggcgttggaagctcccaagtggggcccaacgtgccggtcattgatctggtcctgcagagcgagatggtgaagtggagcatacacggaagaaactccatggtgcaggtgaacgacgatgttatgtgcttagggtttgttgatggaggtgagaatccgaggaaccctattgtgattggagggtatcaattggaggatgtgttggtgcagattgattttgatacttccatggtgggattcagtccttcgcttctgacgaagcatgctacttgctctcatttcaaaccctagttttcggtgaatcgtgatgattatagtttattattatccataccacatagtttttctttagattaagaagagttttgaggagtttaacacgttctgtaataacccttttattttttttttctttcttttttgctctcctgcggtattatctgtataaactgcttaagtggcctatgttaaatggcgatggcatttttgatggcatttttatttgaaattgaaatacttctccagtaaggaaaatttggttgagtttaaaacctattttttttccttctttttgaaatttatataagggc

SEQ ID NO: 3093 - DNA, 518 bp, Glycine max
atccagtttccccctttgggctttgcttcgaatccaatggcgttggaagctcccaagtggggcccaacgtgccgatcattgatctggtgctgcagagcgagatggtgaagtggagcatatacggaagaaactctatggtgcaggtgagcgacgatgttatgtgcttagggtttgttgatggaggtgagaatcccagaaattcaattgtgattggagggtttcaattggaggatgtgttggtgcagattgattttgatacttccatggtgggatttagtccttcccttctcacgaagcaagctagttgctctgatttccaaccatagtttcaaaccatagttttctggtgaatggtgataatagctttttgttatctataccacataatttttcttagattaagatgagtttcgaagagttttaaaggggtctgcaatatccttttctttttttttctcctaccatatgtgtatataattacttaagtggtttatctatggtgatgatatttttgtttg

SEQ ID NO: 3094 - DNA, 610 bp, Glycine max
tcggtagaagtgaagataagcacagagagtgtcatctactcacctctactaccataaaaaaagaaaaacaaaaagccttcagagtcgactattcatcctttcttattcttaattaccgtgccttatccacccccaactatatttcagccagccgcggcgacacaacaacgccgacaccctcatttccactaccaactattctctctcgttctctgatttctgaaatccctcacccatggcttcctcttccctctctctctcactctctctcaccctttgccttgtttccactctctgctacgctcacacatcttccctaaccctacctgtgacaaaagaccattcaacacaccaatacctaacaatcctctcttatggcacccctgttgagtctgcaaaatttgtgcttgatctcggaggctcactcctctgggctgattgtgcatccagaaccaccccatcttccaccctcgcccccattttccaccgttcaattcgctgcctcacagcaaagggtcctgaaattgagacccacaggtggctctcgagtcttgcaaatcctatagatcaagatcagccatgtcaaattacagcagagaacagcatcacg

SEQ ID NO: 3095 - DNA, 805 bp, Glycine max
cggctcgagggctcgagaaacaaagatgaaagattcaacagaaacagatgctatcagcggttccctgaacctcctgagtactcttctcgactcggagctcccgagcgtgagaaacttcaaaggaaaatggtcactcccccgagtcaaactcacccaactccaaacccacctcaccgatttctccgccgagttcccaaacgcctccacatcgaaccccctctccctccacctcctccactcaatctcccaaaccctcaacgacgccgtttcgctctccaaaacatgccaacccgaaaccctcccaaacggaaaactcaaaacccaaagcgacctggattccctcctcgccaccctcgaccgccacgtcagcgactgcgacatcctcttccgcagcggccttctcctcgaaaatagcgtctccgtttccgtctctaaacgcgaagccatccgaaacgaaagagaaaaccgtcgccaccatctcaaaaatctccaccgtggaaagcgcgaaaagcgttcttctcgcggagggcttgctccttctcaaccacttgcttagggttttggattccggaagcggcttcgctattgagaaagcatgcatcgcgcttcgggcgctgagtttgacgaaggagaacgctagggcgattggctctcgcggcggaatctcgtcgcttttggagatttgccaggctggcacccctggtgcacaggcttctgccgccgccgtgctgcgcaacctcgccgcgtttgaggaaattagagataattttgttgaggagaacgcggtggtggttctgattgcgtt

SEQ ID NO: 3096 - DNA, 346 bp, Glycine max
gaccatcgcggtggcgcagggagtcgttcccgtgctcgtgcgtctactcgattcctccccatccgaaacgacagagaaaaccgtcgccgccatctcaaaaatctccaccgtggaaagcgcgaaaagcgttcttctcgctgagggtttactccttctgaaccacttgcttagggttttggattctggaagtggcttcgctattgagaaagcatgcatcgcgcttcgggcgttgagtttgacgaacgagaacgctatggcgattggctcgcgcggcggaatctcgtcgctgctccagatctgccaggctggcacccccggcgcacacgcttcagccgccgctgtgctg

SEQ ID NO: 3097 - DNA, 615 bp, Glycine max
  unsure (1)..(615): unsure at all n locations
cttcatgctggtttagatccagcaacttcatctagtgagttctgttgcacgacagctggtattatgcactgtattttacacctcaccaacaatttttaaattgattgatcagagaagctagttgaagaaggaagaacattcgatgcagttatggccttggacgtgattgagcacgtggcagatcctgctgagttctgcaaatctctgtcagcaggaagagttccagatggagccactgtgatatccacgatcaatccatccatgagagcctacgcaactgccattgttgctgcagaatacattctccgctggcttccgagaggcacacatcaatgggccagttttctgactccagaggaactcgtcctgatcctccaacgcgccggtatcaatgtggaggagatggctggatttgtgtataacccagtgacaggacggtggtctttatcagacgatatcagcgtaaatttcatcgcgttcggtaccaaatcaaacaacacggaataaaatacatagataagatacgtgttattgtcattactatgttgaatgctaataaaacaataagggttaagtgcggtggaanaaaannnnnnnnnnnnnnnnnnnnnnnnn

SEQ ID NO: 3098 - DNA, 705 bp, Glycine max
acgaggcatctcatgcaccatctagaaaattttccacaccaccaagaaccagggcaagggcaacaccaaacttgtacactaatgttcttggaagtctagactctcttgatgtttccattaatgcaccgcgaattgacaagatagttgaattcccaatggctttctgcgaggatcctttttcacctatccgtggaccatcatcaacatcagcgcgctgctcttctagttcagcagggagtactgctgattgctccatcacaaaggacaagtgtacaatccaagaggacaaagttactctccccacaagtatcactgatgcttgccctgctccaaaggaaactaaatgctcttatgagcatgtcaaagattgtgtttcaagtcattcctctactgacttggatcaacgccggtttgacacatcatcgtaccagcaacgtgcggaggcattggaggggttgctggagttcagtgctaggctcctacaacaacagaggtttgatgagcttggggtgttgctaaagccattcgggcttgagaaggtttctccaagagaaacagctatttggttgaccaagagctttaaacaaactgcagtctaaggttttctttttcatgcatgcatatgattatttgctaactgatagtgtacataacgttgtacatttgacgataaaatagtgaataatgacttttattattggtgtt

SEQ ID NO: 3099 - DNA, 3432 bp, Glycine max
tcctcacaccgctttcaatttccctgtgatgcatatcttccttccttctcttatcccactttctatagacaacaatcaacacaaaagcaagcagaacaccaacaaaagcacccaatagcccaataacaagcttcaacactagtcctctatttgatgacccttttacagaaagtggcatgcctagtatgcaacttgccgtgcctaaatttgttggaccaaactggttaacaatagctgcagcatacagaattgtgaagtagaaacatcttgtggagttactgttgagccctgatgtcactttgaggccagcatcggagcatatgctacaacgagtttgatcactcaggtccccattgcaagaggtgtctaaggggctaatcaaccccactttttgcttccaatcatcaatggttataatacctgcacaagtggaggaattagtgacaaactgggaggagttgggaaaacaagaattgaccaaagatgggtcaattgacaaggctgtgagtttggcttggaaattggataagcaattggaggaaatggtttcattgggaagttgaaacaaggaagtttgtttgagatgttgggaaagtcctatgccaattacacttagcaagacttggcagcagtggttcttgtcaacagggtctctgcaggatgaagagtcccatggaaaggtctcaacatagttgagatccatggggcatgagctggaagattcagcggctattgaaacagtgaagagggacatgatgagaaggggaagaagaaacaaaatttgcttatccattttgtgagtttgttccgcacattttaaaattttgatcaaaatggcctgtgaaaatgacaacaacaacaaaggcctattacttgccctagggctagtactttgtgtcaccctgtccttcttcccaagggtcacagaagggagggtgccctttgcatgcgaccctaggaacggtctcacgaggggtttcaagttttgcaacacgcacgtgccaatccacgtgagggtgcaggacctcattgcgaggctcacattgccggagaagatcaggctcgtggtcaacaatgccatcgccgtgcccaggctcggcatccaaggctacgagtggtggtccgaggctctccacggcgtctccaatgtgggccccggcaccaagttcggcggagccttccccggcgccaccatgttccctcaagtcatctcgaccgctgcttcgttcaatcagtcgctgtggcaggaaattggacgggtggtgtctgatgaagcaagagcaatgtacaacggtggacaggctggtttgacgtattggagtcctaatgtgaacattttccgtgacccacggtggggccgtggccaagagactcccggcgaggacccgacattggccgcaaaatacgccgccagctatgtcaaaggactccaaggcgatggtgccggaaatcgcctcaaggttgctgcttgttgtaaacactacactgcctatgatcttgataattggaatggtgtggacaggtttcatttcaacgccaaggtgagtaaacaggatttggaggatacttatgatgtaccatttaaagcgtgcgtgttggaagggcaagtggcgagtgtgatgtgctcctacaatcaggtgaatggcaagcccacgtgtgctgacccagatctccttcgcaacactattcgtggccaatggcgcctcaatgggtatattgtctcagactgtgattcagttggagttttctttgacaaccaacactacacaaaaacacctgaagaggcagctgctgaggccattaaagcgggtctagacttggattgtggcccatttttggctatccacactgattctgccattaggaaagggcttatttccgaaaatgatcttaaccttgccttggccaaccttatttcggtccaaatgagattgggtatgttcgacggcgaaccgtcaacccaaccatacggaaacctaggcccaagagatgtgtgcacctcggcccatcaacaattggcccttgaagcagctagagagagtatagtcttactacaaaacaaaggaaactccctaccattatccccttcaagacttcgtactataggtgtcgttggacccaatgctgatgctaccgttacaatgattgggaactatgctggtgtggcatgtggttataccactcctttgcaaggaattgcgaggtatgtgaagacggctcatcaagtggggtgtaggggtgtggcttgtaggggaaatgaactatttggggctgcagagaccatagctaggcaagctgatgcgattgttttggtaatgggccttgaccagactgtagaagcggaaacaagagatagagttgggcttctcttaccgggccttcaacaagaacttgtgacaagggtggctagggccgctaagggcccagttatcttgctcatcatgtctggtggcccggttgatatctcgtttgccaaaaatgaccccaagattagtgccattttgtgggttggttatcccgggcaagctgggggaactgccattgctgatgtaatctttggtacaactaacccaggaggaaggttacccatgacatggtacccacaaggttacttggccaaagtgcccatgacaaacatggacatgcgtccaaacccaacaacagggtacccaggaagaacctatagattctacaaaggtcctgtagtgttcccattcggacatggcctaagttactcaagattcagccacagcttagcacttgcccccaaacaggtctcagtgcccataatgagcctccaagccttgacaaactcaaccctctcaagcaaagcagttaaggtgagccatgccaattgtgatgactcattggagacggaattccacgttgacgtgaaaaacgaaggctcaatggatgggacccacacccttctcatattctcacaaccaccccatggaaaatggtcgcaaattaaacaattggtgggcttccacaagacccatgttcttgctggctcaaagcaacgagtcaaggttggtgttcatgtgtgcaaacacttatccgttgtggaccagttcggggttcgaagaatcccaaccggtgaacatgaactccacattggtgatgtcaaacattcaatttctgttcaaactacgcattaaatcaagcactacaggattaattaaactgtcaagaaaatttgacagatactgaaccagaagttttgcaaatagcaaaaacatatgaagaataaagaaagaacaaaaagtgttgtctctccccgcaaatgtaaaaataaggatatatataggtggcaattgtaatttgtaaaccaatcaatcatagtggcaagtgtattatttgatacttcatatgttgaaaaaaagggttttaattttaatcaaagttaaagttcttatttctttctcattc

SEQ ID NO: 3100 - DNA, 494 bp, Glycine max
  unsure (1)..(494): unsure at all n locations
tgagtttaaccaaatcatattaagccatggccacctccaacttctcaattgttctctctctctccctagccttctttctagtgctactcaccaaggcaaactcaaccaacaccgtttctttcaccgtcagcaagttttccccacgccaacaaaaccttatcttccaaggagatgctgctatctcaccctccggggtgttacgactcaccaaggttgacagcaacgacgtgccaacgacgggatccctaggacgtgccctttatgctgccccaatccagatttgggacagtgaaacaggcaaggtagctagctgggctacatcggttaaattcaaagttttctcgcccaacaagacggccgacgggcttgccttcttcctggcgccccgtcgggtccaagccccaatccaaaggagggttccttgggtctttcaatagtgactcaaagaacatgtcagtccaaaccgttgcngttgagttcgatacttattataa

SEQ ID NO: 3101 - DNA, 935 bp, Glycine max
ggaagagtaaaataaacccaaaacaggccaataatattgatatatgttaatagatgcccttgtatattaaacatgagcaactacacgtgtcatattacattgcatacttgtaaagtgtaatggtaaaagaatgacacatatatcttctcattgggtgaaaatgatgaggacaccaacttattgcaacctcagttggtggtagttttttttttttcttgaattggttgttgagcattttgattttattacagtgcataatcatatttatttattttatgtgcttctcaatcgaccttttcagctcctccttcttcacccccaccactctatcagcaactttgcctttctgaacgagtacgaatgttggcaattggtggacctggagtgcttgagacacttccgttaactcctccacatcaatcttgatgaagtcaacatctgtgtaatttccagcaaactcttggataactgggtccatgagtttgcaaggtccacaccatgtggctgtgaaatcaagtaccatcagcttgttagtttctttggtggctttataatgagcattccattgagctatggagtggaaagcaaggatgttggaactggatgactccctttttgatgttgaagaattgaatgactctgaaaaccttttagaatacgaaaaattatagattgtgggtgccatgttggttcttcttctggctggggagtccaaggtttcttcacactggccatgcttcagagccctaacaactccatacagccagacttttataccaacaaaatttcagattttctttccctgaaagctgcagctgtatgactataatatttatacagtatccccacacggtggtgggaaaagccatgtatttaagaagtaaattgaattttgtacattccttatttatttttattaatcaatactagttcct

SEQ ID NO: 3102 - DNA, 709 bp, Glycine max
aaaaaaggaaatagacaaaactagaatccacgaaggaacacaaaacatgatgagaaacatccccgaagagcactagggatataaaatcaggaggaaactcaaatattctctggttgagatttgatgaaagattatatctagcaagaagatcctgtaaaatatgctgaagagtgaagagccttgcggatttttattttaattagtgcatgatcacacatttattttctgtgttgttcaatcaacctttgtagctcctcctttctcactcccaccactttattagccactttgcctttcttaagcagcatgaaagttggcattccctgtacttggtaatgttgagatacctccattaactcatccacatcaatcttgacaaactcaacatctctgtattttccagcaaactcttggataactgggtccatgagtttgcaaggtccacaccatgtggctgtgaaatcaagtaacatcagtttgttagtttctttggtggcgttataatgagcattccattgagctgtggagtggaaagcaaggatgttggaactggatgactctctttttgattttgaagaattgaatgactctgaaaaccttttagaatacgaaaaattatagatggtgggagccatgttggttcttcttctggcaggggatgataagccaagaagctagagacgtctaagctttgttagttgttttggac

SEQ ID NO: 3103 - DNA, 1351 bp, Glycine max
gtgcacccatccacgcaccacaaaatttccaaaccaaaaaatacaaaaacaactttgcaatttcgtaggagatgctcaggagcagcacgctaacacagagtgttacagtcacctgtgttcgtcacagtcacagacaatggttccaatcaattcccgtaaattatagattctttgacgctgctcggaactctctatcatcacccaactccgcgatcttcaaatggaaaagaaaggccaattataaccgtcatagttctggaatggggaccttcaccactcgcgcgttggcgcagccgcttcagaacgccgacgaactcatcgactccgtcgagacatttatcttcgattgtgacggagttatatggaaaggtgataaattaatagacggagtgcctgaaacgcttgacatgcttcggtcaaagggcaaaagattagtttttgtcaccaataactcaacaaagtctaggaagcaatatggaaagaagtttgaaacacttggcctgaatgtcagcgaggaggagattttcgcatcatcctttgcagctgctgcatatctgaagtccattgatttcccaaaagataaaaaggtttatgtcattggagaagatggtatcttgaaggagcttgagcttgctggatatcagtaccttggtgggccggaagatggtgggaaaaagatagaactgaagccaggatttttgatggagcatgatgaagatgttggagcagttgttgttggatttgatcgccacttcaactactataaaatccagtatgggacactctgtatacgtgaaaaccctggatgtcttttcattgctacaaaccgagatgctgttactcatctcacagatgctcaagaatgggcaggtgggggctcaatggttggcgctatcagtggatctactcaacgtgaaccattagttgttggaaaaccctcaacgtttatgatggattacttggcaaacaaatttggcatttcgaagtcacagatatgtatggttggggacagattagacactgatatcttgtttggacaaaatggtggttgcaaaactcttcttgtgctctcaggcgtcaccacactggccatgcttcagagccctaacaactccatacagccggacttctataccaacaaaatttcagattttctttccctgaaagctgcagctgtatgactataatatttatacagtatccccacatggtggtgggaaaagtcatgtatttaagaagtaaattgaattttgttcattccttatttatttttattaatcaatactagttcctaagaggactatacctattatgatattaaaccaagaagcatcattctttataaggtgaa

SEQ ID NO: 3104 - DNA, 370 bp, Glycine max
gttgcctttcttaatcagcatgaaagttggcattcccattaactcatccacatcaatcttcacaaactcgacatctctgtactttgtagcaaactcttggataactgggtccatgagtttgcaaggtccacaccatgaagcagtgaaatcaaccaccatcagtttgttagtttgtttcaaggcatcaaagtgagcattccatttagcagtggaatggaaagtaagcacttgagatgactctgatgacctagcaacatatgccatggccatgtcaatgattaatggttccttcttctaggaatgataaaccaaaattgacttgtgagcttgtatgaatcaaaggtaaatcgaaaggaaaagaggttctctg

SEQ ID NO: 3105 - DNA, 783 bp, Glycine max
  unsure (1)..(783): unsure at all n locations
agtggatcccccgggctgcaggaattcggcacgagcgcgttttctttgctttgtgcttttcagataacgtcgcgttttctttaccaaacgaaccgtagataacgccgcgtttggttgttaagttgttccgtttcagccatggtggagaacaatctcttcgaggatatctttagggtcgaaaaattaaaccccgatgacaaaaaattattcgataaagtcactcgcattgaagcaagaagtgaaaagtttgacatgtttatgcacctggacattaattccgagatatatccgttaaaggttggtcagaagtttgctcttgtgcttgtttcaacacttaatcctgatggaactccagacactggatattatacccagatcagtcgacaatcactggccaacaattttgaatatgtcatgtatgggaagctctacaggataacagagggttcagggcgtgaaaaagcggagatgaatatttcatttggtgggcttctgatgatgctgaagggagatacctctcattgcaacaagtttgagctggatcagaggttgtatcttctgataaggaaagtctgaaaattgtatgtaaaaaataaatatgaagatgtgaagccttgttgcagcaaaaagacagcagctatttctatcttcatgtttgagtacttaagctgtcgattttcttactaatgcgggtcttcagtaggacctgaagtttcaaaaccaaatatttggtgatttgatcaaagactctggttttctcnaaaaannnnnnnnnnnnnnnnn

SEQ ID NO: 3106 - DNA, 1360 bp, Glycine max
ggagataagatttgagtttgggcatgtgtgagctgtggctttgcagggaagaagagtgtcagtagaaaataaatgtcctcttcccagggacactctctatttcacagatctatatctaagtgtcggtgatcccctttctccttccttctctgagagacaatgacaatgacgtgggcgcgattcgattcgtggaagcagcaatactacaccacaagcggcgtggtggtaggttacgcagtatgctccagcctcctggccatcatcaacaaatacgccatcaccaaattcaactacccaggcctcttaaccgcgctccagtacctcacctccgcactcggcgtctacgtctttgggaaattagggtttctccaccacgaccccttcaccctccccaccgccaaaaaattcttccccgccgccctcgtcttctacctcgccatcttcaccaacaccaatcttctccgccatgccaacgtcgacaccttcatcgtcttccgatccctcacccctctcctcgtcgccctcgccgacaccgtcttccgcagccagccctgcccctccaacctcaccttcctctccctcctcgtcatcctcgccggctccttcggctacgttgccaccgactccgccttcaccctcaccgcctactcctgggccttcgcctacctcatcaccatcaccaccgagatggtctacatcaagcacatggtcatgagcctcggcctcaacacatggggcttcgtcttctacaacaacctcctctctcttatgatggctccctttttctccttcgtcaccggcgagaacgtcgagattatcgccgcggttagatccggcggccttttcgaccccgccgccttctacgccgtctccctgtcttgcctcttcggcttgctcattagtttcttcgggttcgcggccaggagggccgtttccgccaccgcgttcaccgtcaccggcgtggtgaacaagtttctcactgtggcgatcaatgtacttatttgggataagcatgctagccccattggtttggtttgcttgttttttaccattgttggtgggattctttaccagcagtctgtgactgggcttgggagtgctccggcccagcccaaacagttggatactgaaagcaacaaaggtggtggcgaagatgatgacgatggtgatttgacaggtgagagtgatggcttgattaaagctacttctatataagcatttgtactatttattttcacgtttaagctgtaatgcctgtataattattgtcttatttcagcaacattaggaaagaaattatatgcaatgtgaggtgtattgttttcagaaggatatctatggaattttaattttgcttccc

SEQ ID NO: 3107 - DNA, 488 bp, Glycine max
ctcactctcagacagataactgagcgcttcgcaaaataaccatttctctcttttgtctctctcattttcaactctcaacaatgccgccggcgaagcgcaaagcggagggaactgctgcagctgccgcttcttctgcggcggctccgatgagagtcactcgtgctgcggcgaagcgcgccgccgcgagctccgaccctccgccggtgccggtggttaagaaggcggcgaagaaggccaaagttgctgctgctgctaagaagcagaaaaggaacgaaaaggaaaatgaagatgttccggttgagagcgagaacaaagcggaagaaaaagaagaaggaggagacgcctccgagaagaacgttctagacgcttccaacaagaccatcgtcgtcgaacactgcaagcaatgtaactccttcaagaccagggccaatctggtgaaggtcggccttgagaaggccgacattggaatcactgtgattttaaacctg

SEQ ID NO: 3108 - DNA, 341 bp, Glycine max
ctcgagccgaatcggctcgagaaaacccaaataaaatctaaaaccctacccatcgttagggttctacctcatgtggcgcggagccagagtcgtttccggctacctccgccgtttctcgacggcggtgcggcggcgcatggaagacgaaggtgactggctctactcctccgagtggtggggctccgactccgacgatggtcactctgttctccgatcaacttccggcaagggaaacggcgtcgttgccgtcgttgcatatccctcctccagacccagcaaaatgcattggtcacgaatggaaagatggctgcagcaaatgtgtgaggaggtgcatcctggat

SEQ ID NO: 3109 - DNA, 553 bp, Glycine max
  unsure (1)..(553): unsure at all n locations
cccacgcgtccgcccacgcgtccggttaatggtgagggaaagattgagccgaggctgctattgcaggcaatgctggaggagggacctgaatgacaggtcgcgtctttaatttgtaggattttttctttttttagtttttagcagttcaagatttgcagagcaacctccacaccgtttctacttttcagcatattaatcccagatgcgcctatctttcatttgttcactgatgccctcctctatgagatggaagagattcaagtggtctgaagaagcttgtgttttgttttgttagaacgctggctttatagatgacagcttaaaaatcttcatagggttacttgtcttaaaaatcttcaaaaaattgaattttggaatctacagcctaaaagaatttaatagatgaagatatgcagaaacaaaactttttcttgattagtttcatccttatcgcgggctttaatctactgcttttgaaatgttccttatcattatcattatcattgcgctaaaaggtagtacaaggtanagtgtttttatccaacatcatgct

SEQ ID NO: 3110 - DNA, 970 bp, Glycine max
  unsure (1)..(970): unsure at all n locations
ttaattgcaatttagaacaggaatcccacgccacttgcaattccatctcggtgtttgattctctgcttcgtcctttcattcctcttccgaatcgttaatcgttcgatcgatccatctcccgcttccaatgacaacccctaccgacaacaataacaaccctgcacaggaaaaccctaacaaaaccctagaccccaccgaaccagatccaatccctgccaccgaggacgacgccgccgccgacactaaggactccgacgccaaaaattccccgccgcccgattctggaaacgacgctccgctctccgatattcagaagaaaatgcgccgcgccgagcgattcggcatttccgtccagttgtccgagaaagagaagcgcaattcccgagccgaaagattcggcactggttccgcttcgcagggatcagagccatcgaaatcggaggagctgaagaggaaggctagggcagaaaggtttggaatgcctagtcctactacaacttctgacgaagaggcaaagaagaaagctcgacttgctaggtttgcacctgcttccaaagttgatcctcaagaagaagataagaggaaagcaagggctcttaggtttgcgaatccgtcatcaacttctatagctaatgttaatggcgaggcaaagattgagccggctgctattgcaggcaatgctggaggagggacctgaatgacaggtcgcgtctttaatttgtaggaatttttctttttttagcagttcaaaatttgcagagcaacctccacaccgtttctacatttcagcatattaatcccagatgcgactatctttcatttgttcattgatgccctcctctatgagatggaaaatattcaagtggtctgaagaagcttgtgttttgttttgttgtagcgttggctttataggtgacagcttttggggtaattantggccatcttcatagggttacnntatctaaaaatc

SEQ ID NO: 3111 - DNA, 532 bp, Glycine max
ggacatcaacaatttgttcacttgcaatttagaaaaggaacagacaagagcacaagcacaacacaacacaacacaacatcctccaggaacgggaatcccacgccgcttgtaactccatctcggtgtttgattctctgcttcttccttcattccccttcggaatcgatcgatccatcttcctcttccaatggcaacccctaccgacaataataacaaccctgcacaggaaaaccctaacaaaaccctagaccccaccgaaccagatccaatccctgccactgaggacgccaccgccactaagggctccgacgccaaggaccccgccgacgccgacgccgacgccataacttctccgccgcccgattccggaaacgacgctccgctctccgatattcagaagaagatgcgccgcgccgagcgattcggcatttccgtccagttgtccgagaaagagaagcgcaattcccgagccgaaagatttggcactgtctccgcatcgcagggatcagagccatcaaaatcggaggatctg

SEQ ID NO: 3112 - DNA, 472 bp, Glycine max
aaaaatactaattgttatgttgtgaatcttgtgattttgatttattgaaattcaagcctcaggggcagagttttggagcttcggctccggctaacggtggcggttcgggtcagccgaagcacagggttagagccaggagaggacaagccacggacccacacagcatcgccgaaaggttacggagggagagaatcgccgagcgaatgaaggccctacaagaactggttcccaatgccaacaagactgacaaggcctccatgctggatgagatcatcgattacgtgaagttcctgcagctccaagtcaaggttctgagcatgagcagattgggcggtgctgctgctgtcgctccccttgttgctgatatgtcctctgagggaggcggagactgcatccaagccaaacgcagcaactcaaacgacagcctcgtcatgacggagcaacaggtggcgaagctgatggaggaagacat

SEQ ID NO: 3113 - DNA, 515 bp, Glycine max
  unsure (1)..(515): unsure at all n locations
acgaggggaagttcgaatccaatgcaaggccaaaattttggggcggcaccagctggtggcggtggcgcaacgaaccaagctccggggagtgggnctgccgcgggcggcgcgccggctcagccaaggcaaagggttcgagctaggagaggacaagccacggacccacacagcatcgctgaaaggttacgaagggagagaatcgcagagagaatgaaggccctacaggaactggttcccaatgccaacaagacagacaaggcatccatgctagatgagatcatcgattacgtgaagttcctgcagctccaagtcaaggttctgagcatgagcagattgggcggtgctgctgctgtcgctccccttgttgctgatatgtcctctgagggaggcggagactgcattcaagccaacggcaagagtaacggcggtggggcccaggcttcaaccaccaacaccaacaccaaccatacgacagcgacaacaacttcaaacgatagcctaacgatgacggagca

SEQ ID NO: 3114 - DNA, 635 bp, Glycine max
ggaggaggcaagaagttgtattttggcatccccgtggcttcaagaagagaatctcaatggaggcccaggagctgaagcgcgtgttccagatgttcgaccgcaacggcgacgggagaataacgaagaaggagctgaacgactcgctggagaacctgggcatcttcatctctgacaaggacctgagccaaatgatccagaggatcgacgtcaacggcgacggttgcgtggacatggacgagtttggggagctgtatcagaccataatggacgagcgcgacaatgaggaggacatgagggaggccttcaacgtcttcgaccagaacgccgacggcttcatcaccgtcgacgagttgaggaccgtcttgtcctccctcggcttgaagcagggaagaaccgtccaagactgcaaggccatgatctccaaggtcgatgttgatggagacggcatggtcgatttcaaggagttcaagcaaatgatgaaagggggtggcttcagtgctctcacttaaattcatttctttcacatccattcaatctatctattcccatacatctttgctttgttttgttcttgtatataagtttcaggagaaataattacatgattcgatcaacaaggtaattgtgttttctct

SEQ ID NO: 3115 - DNA, 1330 bp, Glycine max
  unsure (1)..(1330): unsure at all n locations
ctgaattcaactcacttcaatttctttaccttatatatatctatccaattaaccactcttatatttagaatccaaaaatctctcgtcgtccaagaaagaagcaccacaaattaattctcgtttcccattcccatccccatgccaactattttgcataggattttccttctttacaacctcgtacactcattcctcctctgtctggtccccaagaaggtgcgtcccttcctccccccttcttggttccaaaccaaaaccatcactgcaccttcttcttcttcttcttcttcttccagtgcccgcatcatcaagagaacaacaatggaccccaacgagctgaagcgcgtgttccagatgttcgaccgcaacggcgacggaagaataacgaagaaggagctgaacgactcgctggagaatcttggcatcttcattcctgacaaggagctcggccaaatgatcgagaggattgacgtcaacggcgatggctgcgtcgacatcgacgagttcggggagctctaccagaccatcatggacgagcgcgacgaggaggaggacatgagggaggccttcaacgtcttcgaccagaacgccgacggcttcatcaccgtcgacgagttgaggaccgtcctgtcctccctcggcttgaagcagggcagaacccgtcaagactgcaaggccatgatctccaaggtcgatgttgatggagatggcatggtcgattacaaggagttcaagcaaatgatgaaagggggtggattcactgctctcacttaatttctttcaatcatctattccccatatatctttcttgtacatataacttactttcaatcaggatcaccaggattattgtgattgtcatggtttcggaccatggatggtgtggtataggattagatcaattcatctcatctcgtcctaggtatgtgtacgtgtgtgtgtgcttgtgttttccaatgtgttagtcgttggtttttgggagttagcaaacctggctccataagtgagatgagcgcctcttgccctggtaatgctacaactttattatgtctttggttttttgggggaggaagacccttgaaatcgggagactactgctactgtcacaagatctgtttgtgttttcttcttgttcaagttttgagtcgagaaaggttgattctattttcactctgttggatggttttgtacacccgtatcatttcgtatccttttcattttatttgattacagctgaggtggcacgtttatttgcaagaaattcttggatgnaaaaaaaaaaaaaaaaaaaaaaaaannagcggccggctctagaggatctcaagcttac

SEQ ID NO: 3116 - DNA, 421 bp, Glycine max
cttggccttggcttgactgaacgtggcagcacgagtgatgaagcacccttatcaacttcggaagaggaagtttccaatatggaagatgatgatttgtgtcaattttgggaaacgttctggccttcctagttttatttctctttggggataaatttctgacttcccagcgtgtatggtgtgagtatttggatgtgtacaataagcttgattgagcttttagtttgtaaatcagtctaggttgtacagtgataatggcgatggacactttctctttttatgtaaaactggccttcaatgctctggtggtatataggggttcaaatatagacaagtatggtgagctgtatcagaccataatggacaaagcgctacaatgaggaggacatgagggaggccttcaacgtctttaaccagaacgccg

SEQ ID NO: 3117 - DNA, 963 bp, Glycine max
gaattgcatttgtgttgagtttcttcttctgttgcgttgtgtgtgagtgtgggcacggtaagatgcagaccattgctaggcgcttagggcagcaatcgctgaggccatcgacgtcgctcaagtccatctatccaatttccgatcaccattatggaatggatcacgagcgttacgtttctaccctcgccaccaagggagttggtcacctcgttcgtaagggcactggtggacgatcctccgtcagtggcattattgctacagtatttggggcaactggattcttaggtcgttatgttgtccaacaacttgctaaaatgggatctcaagtcctagttcctttccgaggctctgaagataatccccgtcatctcaaattgatgggggatttgggacagattgtacccatgaaatacaatccaagggatgaaagttcagtaaaagctgtgatggctaaggccaatgttgttatcaaccttattggaagggattatgagacaagaaactacagctttgaagaagtgcactatcacatggctgagcaactagcaaagatttccaaagagcatggtggtatcctgagatttattcaagtttcttgtttaggtgcatctccttcatctccatctaggatgctcagaactaaatcagctgctgaggaaatgattttaagggaactacctgaggccacaatcttgaaacctgctgtaatgattggtacagaggatcggattttgaatccatgggctcattttgctaaaaagtatggctttcttccgttgtttggagatgggagcacaaagatccaacctgtttatgttattgatgttgctgctgcactcacttcactcttgaaggatgatggcactagcatgggaaaaatttatgaactgggtggtccagagatctttactgtgcatgaattggcagacgttatgtttgatacaattcgagaatggcctcgat

SEQ ID NO: 3118 - DNA, 593 bp, Glycine max
  unsure (1)..(593): unsure at all n locations
atcctgtctaacttggaaccttgcctgtgagaacaacataacaagtaagacaggatataactggagacaggagacaccattacaaatgtacatgggatgctattattaagatgatccgctatgagggggttaatgggttttacaaaggcatgggcacaaaaatcgtacaaagtgtgctggctgctgctgttttgttcatgatgaaggaagaattagttaggggggttcgtttcttgcttgccaaggatgctgtaaagccaaagaatctgtgattggaggccactagcttgatcaagatttcatgtaccatcttcagttagcaaattagttcaaatggtaggggaattagagtgattcaaacaacatattgaaatatggctttaactgtatcttgattattttcatcaggttagtttccatagaggaaattcatgccaaaaattacacactgggttcattggtttgtttcatgaacaagacagggttgtagatttgaagtatgctgctgaaacaaatattctttttacgaacgaatnnnnnnnnnnnnnnnnnnnnnnnnnnnnnnnnnnnnnnnnnnnnnnnnnnnnnnnnnn

SEQ ID NO: 3119 - DNA, 692 bp, Glycine max
  unsure (1)..(692): unsure at all n locations
cttacattttttcttccaaccccaagaagggttcttcaattttgtagtttttttctttgtggtggccgggttaaacttcaattaataattatttggagtccaaaccttggcagctggcatcaataccggccaccaacaaagaaaaaaactaaacaatattatggcgaactgtcagcaatattattttcttttgctttctctggcaatttttattcctaccctgaatgccaattccttagagaaagatgagtattggcagagccatgtctatgagtttgatagttattggcaggaaagggcaaaagccgctaaagtggacagtcaggcagcttattttgaagacccatattcagtctccagcaacttcacttccagtgttagcgaactcacaattggcaagaaggatttacgaaggaacttgaagggaaaatatcgtggtgacggtccatgcatagccacaaaccccatcgacaggtgttggaggtgtgaccccaattgggccaacaatcgccagaagctcgcagattgcgtccaaggcttcggtagaaacaccgttggaggcaaaggtggaccattctacgtggtcaccgatccctccgacgatgatatggtgaaccctaaacccggcacgctccgccacgcggtcacgcgtgacggcccgttgtggatcatctntgctcgaagcatgttca

SEQ ID NO: 3120 - DNA, 747 bp, Glycine max
  unsure (1)..(747): unsure at all n locations
catatatagccaccctctctcctccgatcactctccactccagtgtggaaaatcaaaacaaggtgccatctttgtttgttatacatgaccatggccatgcccctgtttctgatgttccttcttctgcacatagcttgggtggcatcgtcggatctccgacctgggttttactcaaaaacatgtccaaaagcggaactcatagtccgagatgtgatgaagaaggcccttatgagggaacccagaagtgttgcctctgttatgcgcttccagttccatgattgctttgtcaacgggtgtgatggttctatgttgcttgatgatacaccaacgatgctgggggagaaattggccctctcaaatataaattcgctgagatcgtatgaagttgtcgatcaagtgaaggaagcgctcgagaaggactgccccggagtggtttcctgtgctgacatcataattatggcatctagagatgctgtctctctgacaggtggacctgagtgggaggtgaggttgggaagattggacagcttgagtgctaatcaagaagactcaaacaacatcatgccaagcccaagagccaacgcaagctctcttattgatctcttccagaaatataaccttactgtgaaagacctagtagcactctcaggatctcactctattggccaaggtcgttgnttctccgtcatgtttaggctatacaatcaatctggaactggaaggcctgaccctgccattgaccctagc

SEQ ID NO: 3121 - DNA, 1346 bp, Glycine max
cccaaaccgagaccacttcgaaagttcgaaacgcagtgtgcattgttcctcaacacacacacaaaaaaaactcccttgtatattgttgcagctctagctagggtttcgcaagtgcgatcgaagaagaacaacgacgatggcgatggctgcagctctgcgtcgcgaaggaaggcgtttgacccaaccaatcaacgccctccactcttctctcaattcctccctcatctctcaagaccaagcccctcatggcgcgcgctccatttccactcaagttgtgaggaaccgaatgaagagtgtgaggaatatccagaagatcaccaaggccatgaagatggttgccgcgtccaagctgcgggccgttcagaccagaactgaaaattcccgcggcctctggcaaccgttcaccgctcttctcggtgacgatcccagtgttgacgttaagaaaaacgttgtcgttaccatctcttcggacaaaggtctttgtggtggaatcaattccacgtctgtcaagataagcagggttttgaacaaattgaattctgggcctgataaagagacaaaatatgtcatattgggagagaaggctaaagctcaattgttgcgtgactcaaagaaacaaattgcgctcagccttactgaattgcagaaaaatcccctgaactacactcaggtgtctgtcttggcagatgacattctaaagaatgtggagtatgacgcattaaggattgttttcaacaaatttcattctgttgtacaatttttgccaacagttgcaactgtactgtctcctgaggttattgagagagaggctgaatcaggaggaaagcttggggaattggattcatatgagattgaaggtggcgagacaaaagctgaaattcttcagaatctggctgagttccagttttcttgtgtcatgtacaatgctgtgttggagaatgcttgtagtgagcaaggagcaagaatgtctgcaatggacagctctagcaggaatgctggggatatgcttgatcgtctcaccctcacctataacagaactcgtcaagcatcaatcaccactgaattgatagagattatctctggagcttcagcactggaaggttaattacaggagagcaatctgtgtaatatattcaacagtggcgcgatattaagataatatcgttggattcttttgaaatttgttggtgtcatttttttaatcttacttgacttctgtaataagtgttccaaggtcaaacccattgtggggatttcttggttgagactagatatttctggaattgtgtttttgcagttgaagatggagtctgtctttttttgaaatgactcataataagattttt

SEQ ID NO: 3122 - DNA, 753 bp, Glycine max
  unsure (1)..(753): unsure at all n locations
gcgagagacgacagaagggggatcagctgatactaaattactgatacaggaacagctagcagagaaacaaagttacaagtaaagtaaattaagaagatcattaatggcttctcttgcaaccttagctgctgttcaaccagctgcgctcaatggccttgctggaagttccctctctggaactaagctctctttcaagccctctcgccacactgtcaaatccaagaacttcaggagtggtgccgtggtagcaaagtatggtgacaagagtgtgtactttgatttggaggatctgggcaacactacggggcagtgggacttgtatggctcagatgcaccttcaccctacaaccctcttcagagcaagttcttcgagacatttgctgctccattcacaaagaggggattgttactcaagtttctgatattgggaggtggttccacccttgcatacttcagtgcaacagcctcaggtgacattctaccaatcaagaagggaccacaactcccaccaaagctcggtcctcgtggcaagatctaatttgatttgtatcagaactccatctattgagttcctttttaattattttttttctggtttgcataatgtgtaagtatacttacagactactattcaaagatgcttctttcccgtctaattgagtggcattgatttggttttccattgaagcccaaaaaaaaaaaaaaaaaaaaaaannnnancggccgccctagaggattccagcttacgtacgc

SEQ ID NO: 3123 - DNA, 561 bp, Glycine max
cccacgcgttcggatgcccaaaccgagaccacttcgaaagagcgaaacgcagtgttagcattgttcctcaacaaaaaagacatgaaaaaagaagaaaaaagactcagttgtgtatcgttgcagctctactagctagggtttcgcaagtgcgatcgaagaagaacgatggcgatggctgctgctctgcgtcgcgaaggaaggcgtttgacccaaccaatcaacgccctccgttcctctctcatctctcaagaccaatcccctcatggcgcgcgcttcatttccactcaagtggtgagaaaccgaatgaagagtgtgaggaatatccagaagatcaccaaggccatgaagatggttgccgcatccaagctgagagccgttcagaccagagctgaaaattcccgcggcctctggcagccgttcaccgctcttctcggcgacaatcccagtgctgatgttaagaaaaacgttgttgttaccatctcttcagacaaaagtctttgtggtggactcaattgcacgtctgttaagataagctgggttttgtccaattgaattctgggc

SEQ ID NO: 3124 - DNA, 668 bp, Glycine max
aagacgacagaagggggatacaggaacagcagagaaacaaagttagaagtaaagaagatcatggcttctctagcaaccttggctgctgttcaaccagctacgatcaatggccttgctggaagttccctctctggaactaagctctctttcaagccctctcgccacagtgtcaaatccaagaacttcaggagtggtgccgtggtagcaaagtatggtgacaagagtgtgtactttgatttggaggatctgggcaacactacagggcagtgggacttgtatggctcagatgcaccttcaccctacaaccctcttcagagcaagttcttcgagacatttgctgctccattcacaaagaggggattgttactcaagtttctgatattgggaggtggttccacccttgcatacttcagtgcaactgcctcaggtgacattctaccaatcaagaagggaccacaactcccaccaaagctcggtccccgtggcaagatctaatttggtttccctcttccatctgtttagctccttcccctcccccttcttcttcttctcttgaattgaacatgtatatctctatttgcatacaatgtgtaagtacgcctaaagcctacttctattaaattatgttcatttctcgtccaatagagtcatgattatttacttttagc

SEQ ID NO: 3125 - DNA, 684 bp, Glycine max
cctgcaagaggacaacagagggggccggaaagagaaagcaatggcttctctggcaagcttagctgttgttcaaccatctactgtcaagggccttgctggaactaagctctctttcaagccctctcgccagagcttcagacccaagaatttcaggagtggtgccgttgtagcaaagtacggtgacaagagtgtgtactttgatttggaggatctaggcaacactactggtcagtgggacttgtacggctccgatgcaccttcaccctacaaccctcttcagagcaagttcttcgagacattcgccgctccattcacaaagaggggattgttactaaagtttttgatcctgggaggtggttccaccctggcatacttgagtgccacagcgtcaggtgacattctaccaatcaagaagggcccacaacttccaccaaagctaggtccccgtggcaagatctaatttgatttgtatcagaactccatctattgagttcctttttaattattttttttctggtttgcataatgtgtaagtatacttacagactactattcaaagatgcttctttcccgtctaattgagtggcattgatttggttttcaattgaagcaaagacatgcttgattggatgttgatctgaaattgttattttgattacccgactacctctttaagttgtagaa

SEQ ID NO: 3126 - DNA, 671 bp, Glycine max
cggtccggaattcccgggtcgacgcaagccttcgtccacgccttccttccggttgcaaaaaaacaccaaaagggggaaaaccaaagttccaaggaggagaaattaagaagatcattaatggcttctcttgcaaccttagctgctgtgcaaccagctgcgctcaatggcctcgctggaagttccctctctggaactaagctctctttcaagccctctcgccacactgtcaaatccaagaacttcaggagtggtgccgtggtagccaagtatggtgacaagagcgtgtactttgatttggaggatctggacaaccctcttcagagcaagttcttcgagacatttgctgctccattcacaaagaggggattgttactcaagtttctgatattgggaggtggttccacccttgcatacttcagtgcaacagcctcaagtgacattctaccaatcaagaagggaccacaactcccaccaaagctctggtcctcgtggcaagatctaattcgatctgtatccgcactccatctattgagatcctctttaattattttctttctggtttgcataatgtgtaagtatacttacagactactactcaaagatatctctttcccgtctccaccctccctaaaacggaactccatagatggcgttctcatccaaatggactg

SEQ ID NO: 3127 - DNA, 442 bp, Glycine max
ttttttttttttttttttagacgggaaagaagcatctttgaatagtagtctgtaagtatacttacacattatgcaaaccagaaaaaaaataattaaaaaggaactcaatagatggagttctgatacaaatcaaattagatcttgccacgaggaccgaggtctcgagttttttttttttttttttcgggttaaaaaagacagactccatctttaattcaaaaacataattccagaaatatctagcctcaactaggaaaatcctcatcatgggtttgaccttggaacacttattacaggagtcgaggtaagatcaaaaaaatgtggcaccaacaaatttcaaaagaacacaacgatattataaaaaaattcgtaccccattgcccagaggctcttcgctatgcgaaggtatgggagactgctgaataattacatattgcccccc

SEQ ID NO: 3128 - DNA, 476 bp, Glycine max
aaacagaaaattttcacttgttactttgaagagaacgtggggggcatgactctttctcaaacacacccttgcttgcatcagtaaagaaagcccatcattattaaaatttgagaaaatcctatggcgggtcatttcgggttaaaaaagacagactccatctttaattcaaaaacataattccagaaatatctagcctcaactaggaaaatcctcatcatgggtttgaccttggaacacttattacagaagtcgaggtaagatcaaaaaaatgtggcaccaacaaatttcaaaagaacacaacgatattataatgatattataatatcgccactgctgaataattacatattgctctcctgcaattagccttccagtgctgaagctccagagataatctctatcaattcagtggtgattgatgcttgacgagttctgctataggtgagcgtgagacgatcaagcatatccccagcatt

SEQ ID NO: 3129 - DNA, 365 bp, Glycine max
aacaaagttagaagtaaagaagatcatggcttctctagcaaccttggctgctgttcaaccagctacgatcaatggccttgctggaagttccctctctggaactaagctctctttcaagccctctcgccacagtgtcagacccaagaacttcagtgtaactatgcattacaggagtggtgccgtggtagcaaagtatggtgacaagagtgtgtactttgatttggaggatctgggcaacactactggtcagtgggacttgtacggctccgatgcaccttcaccctacaaccctcttcagagcaagttcttcgagacatctgcctctccattcacataaaggggattgttactcaagtttatgatcc

SEQ ID NO: 3130 - DNA, 259 bp, Glycine max
cgaaaagtccgtgggatttgtgacaacacaacgctgtaaagtactcctcaattcgaaaacgcagtgttttagcattgttcctcaacacacacacaaaaaaaactcccttgtatattgttgcagctctagctagggtttcgcaagtgcgatcgaagaagaacaacgacgatggcgatggctgcagctctgcgtcgcgaaggaaggcgtttgacccaaccaatcaacgccctccactcttctctcaattcctccctcatct

SEQ ID NO: 3131 - DNA, 1591 bp, Glycine max
  unsure (1)..(1591): unsure at all n locations
aaaggggtcaaaaaggcaatttatgaaaaatgaagctagaagagacttggcgaaactctggtattgactcgcagtggagagagagtgttagcaccaaaaatgtcgaagttaatcttcgtgttccttgcactaattcctcttctctgcacctccttctcgccagagaaaccctcagatcggcgcgtcctcgttttgctcgatgacttcgccatcaaatcctctcattctctcttcttcaactccctcaaatctcgcggcttcgatctccaattccacctcgccgacgaccccaaaattgcgctccagagatacggccagtacctctacgacgccctaattctcttttcccccaccattgaacgttttggaggatccattgacgcggctgcaattttggattttgttgattcgggtcatgatttgatcgttgctgctgatagcaatgcatctgatttaatcagggaaatagccaccgagtgtggagtggactttgatgaggatcctgctgctgtggttgtggatcattcggcatatgcagtctctgctactgaaggagatcatacattgattgctagtgatgattttatcaagtctgacgtcatatttggaagcaaaaaaattgaggctccagtacttttccaggggattgggcattcactaaatcctaccaatagcctggtgttgaaagttctctctgcatctccttcagccttttctgctaacccaaaatctaaagtgacaagtcctccatcactcactggaacttcaatctcattagtttcaattatacaggcaagaaataatgcccggatattgatctctggctcattgagcttgttcagcaaccgatttttcaggtcaggtgtgcagaaggctgggagtccaaccaaacatgagaagtcaggtaatgagcagttcttgaatgaacttagcaaatggattttccatgaacgaggtcacctcaaggcggtgaatgtgcaacaccacaaagttggggaagctaatgaaccagccatctatcggatcaatgataatttggaatactctgttgaagtttatgagtggtctgggacagcatgggaaccttacgtagctgatgatgttcaagtgcaattttacatgatgagcccctatgtcttgaagactttatcaactgatggcaagggccgttatttcacatcatttaaggttccagatgtctatggggttttccaattcaaagttgagtacgaaaaacttggatatacaagcttatctttatcaaagcagattcctgttcgtccctttagacacaatgaatatgaaagatttataccagcagcctatccctattatggagcatcattttcaatgatggtgggtttcttcatcttcactgcagttcatctatacagcaagtagatgtaaacctttgctttaagatactgtagtttgtagtgcggggttgaacttattttgagatcgaaaattttgatttggcaatgatactaactgacgtttctaatttattatagatgcattacttttcccctttttccccctcgttnnnnnnnnnaaagcggcccgctctagaggatccaggcttgcgtac

SEQ ID NO: 3132 - DNA, 1526 bp, Glycine max
tttgttagagagcatgccagcgaaccaacgagcctatgaaacagatcacattttacgtccttttcaattcaacaattcacagaccaaccccctaaatctccataattggttaatacattctctctctctctctctctctgtggataagatcttgagaatatcacatacagatggaccccacttcctccattaaaataacaatatccaacacttctcaattccataaactgagaagaacccatttgattctctgcagaatctggggttgttcctgctttggtctggtctctcagctctgatagattggcaccgattctgggtgtgagccaaaaaagctttcttttgtttcctctgtttttcttttcggcaaagtagaagatatttgtgattttcttctgtgaattgaattcgagtcgttgcttctggcttcggtgcttgctgttttgttggcacaagttattggtccaattgaaatgaaagagtttgagtgaaaaggagacttagactgtgtggtctggccatggagaattcttataaggcaaatggaaatggaccaactgagaatggttactctgttgcaaggcattcttatcaaccctccttgaaggggtcattaccttggctggacataaaggtgttttatgtaatagtgtgcaagtgtgagcttgatgattccactcctggatctcttacactgaatcatgttcctttgaatcctgacactcttcttgaaattaatggcgttcgtactagtatatattctgataggatgtcaacccttctcaagagagacagggtagatagaaatcagaagaagtgacatttgtaagcactgatagcataaggatgagtggtagtgtcaagttcgaggtgtttgataaagatgttctgctgctttccggtgctttagaattgtgtaataccaatggtgttgttggggaatcaagttataatggacaaaggtggagtatgaactgcgagtcatatataattccaggcaccagcttctttaaggggaaacaattgctgttgccagactcaagtctcccaacaattgaggtctacattgcgggctccttcttgagtactccaattatcttgacaaaaaccttgcagctttctcagaaggagcatgcaaagaagggggtgttggatgcaattccagagcatgaggccagtgaaaatgggaaagatacttcttcaaccctttctttgcaggccccagattacctttacgacaaacatgaagatgaagattataacagcgtctacccaggaacagcatatgctgatggagaagatggagaactctcatggctcaatgctggtgttagggtcggtgttggtattggacttagtgtttgtcttggcattggcattggtgttggcttgcttgttaaaacctaccaaggcaccactagccactttagaagacggctgttctgattggtgcttctatttaagcttaaaatactctgctttttgtccatctccctcttaatccaaagacagctaaccttattttt

SEQ ID NO: 3133 - DNA, 500 bp, Glycine max
tggaaacataatactacaataatatatagggatcaaccacgattccataacccaaaccaaggttgtgttcgtatctattgagaagaaggctacatacaaagacttgaacgctctcaagatcttggtgtatgttacatgtgcggctgctggttataatctgcttctattgtgcaaacactccatttggtctagaaaaaacttcaaagggtcttatctatgcatggcttggatttgtttctcgttggatcagatcgctgtgtacatgacatttgctgcaaacactgcaacaatgggagccgcggtgctagcaatatctggatcagaggcctttcagtggctaaaggtatgtgacaaattcacaagattctgcgtcgaaataggaggagctttgttatgcggctatgcagcgtccatgttaatggctctaatatcaactatctcagcctacaaagtgttcaggatgtactcaccaaagtggttcttgcgtttgaagagcgcgt

SEQ ID NO: 3134 - DNA, 481 bp, Glycine max
tatgaagtcaatgattttggaaacataatactacaataatatatagggatcaaccacgattccataaagaagctcaaggtggagctaaaattaagagcaccggaaaaaaaggatcaattcatctggtcgaaaaaaatgaagttgcgaatggcgagaggggaagtttgtctaagggtctcagcaatactggttttggtattaacagcatgtttggttgctttagatacccaaaccaaggttgtgttcgtatctattgagaagaaggctacatacaaagacttgaacgctctcaagatcttggtgtatgttacatgtgcggctgctggttataatctgcttctattgtgcaaacactccatttggtctagaaaaaacttcaaagggtcttatctatgcatggcttggatttgtttctcgttggatcagatcgctgtgtacatgacatttgctgcaaacacttgaacaatgggagccgcggtgc

SEQ ID NO: 3135 - DNA, 1555 bp, Glycine max
tggagctccaccgcggtggcggccgctcctcttcctctctctctcccggccctctctttctctctctagaattctcagatttgcggggcgagatgatgcagcagccaggacccggcatggcacctcccaccatgggccagcagccgcagcaacagtaccagcagcagcctccgccgcagcagcaacaaccctacgtcatgatgccgccgcagcatcaggcgccgcagcctatgtgggccccatccgcccagcctccgctgccgcagcagcctgctagcgccgacgaggtccgaaccctctggatcggggatctgcagtactggatggacgagaactatctctatacctgctttgctcacaccggcgaggttacatcggttaaagtaattcgaaacaagcaaactagtcaatctgaaggttatgggtttattgagtttaatagtcgtgctggagctgagagaattcttcaaacatataatggggcaataatgccaaatggggggcagagtttcaggttgaattgggcaacttttagtgctggtgagaggtcgcgccacgacgattctccagattacaccatatttgttggtgacttggctgcagatgttactgattatcttcttcaggagacatttagggctcgttataactcggtgaagggtgcaaaagttgtcattgataggctaactggccggaccaagggatatggctttgtaaggttttcagatgagagtgagcaagtgagggctatgactgagatgcaaggggttctttgctcaacaagacccatgaggattggacccgcctctaataaaacccccaccactcagtcccagcccaaagcttcatatcagaattctcaacctcaaggttcacagaatgagaatgatccaaataatacaactatttttgttggtaatttggatcctaatgtcactgatgatcatctgaggcaagttttcagccagtatggagaattagtgcatgtgaagattccagcaggcaagcgatgtgggtttgtccaattcgcagacaggagctgtgccgaagaggcacttcgggtgttgaatgggaccctgttgggtggtcaaaatgttcgtctttcatggggccgcagtccttcaaacaaacaggctcaggcagatccaaaccagtggaatggtggtgctggttctggtggtggatactatgggtatgctgcacaaggttatgaaaattatgggtatgctcctgctgctggacaggatcccaacatgtatggcagttatccggggtatcctggttaccaaccacctcagcaacagcaacaaataggatatagttgagaagagaatgttccttttcttctgtaatcttttgtgatacttatcgagttgcgtgtctcttctcgtctcgtggaaaaccgactctgctactctttttcttttttccccttgtttgcttaataacattaaattttatcggagccgccttttgtatccataaattgcttgctgaatacttatttatgaaatgatctctattatgcattaaaattaattagtcaaaaaaaaaa

SEQ ID NO: 3136 - DNA, 1223 bp, Glycine max
tacgtaagctcgaaattcggctcgaagacagaaagaaagacactgttcacggttagggtttgagtctcaaccactctttctttaaagcacagtctcgcattcctccttgcctctttgttctctctttttctctctccttctttctttgtttctgtgtgttcgagattgaagaagatgatgcaggctggacccggcggcatggcccaacaagcgaaccaacaatacgcacagcaacagcaacaaccctacatgatgatgccgccgcagcctcagccccctcagatgtgggccacatcggcccagcctccgtcccagtcggtggctcctccgcaacccaccagcgccgatgaggtccgtaccctctggatcggtgatttgcagtactggatggacgaaaattatctctacacctgtttggcacacaccggcgaggtggcttcagttaaagtcattcggaacaaacaaactagtcaatcggagggatatgggtttattgagtttactagtcgtgctggtgctgagagagtccttcaaacatacaatggcaccattatgccaaatggcgggcagaacttcagattgaactgggcaactcttagtgcaggtgagaggcgtcacgatgatagcccagatcacaccatatttgttggagacctggctgccgatgttacggattatcttcttcaagagacattttcggcacgatatccctcaattaagggggcccaagttgtcattgataggctaactggccggaccaagggatatggctttgtaaggttttcagatgagagtgagcaagtgagggctatgactgagatgcaaggggttctttgctcaacaagacccatgaggattggacccgcctctaataaaacccccaccactcagtcccagcccaaaggtatgtctctttctttatcttgtttgttctttttgctgcaaatatctctttcatatgctgcttaagggaaaattgagctgtccttgttagatgagtgatactggttgaatttaatgctgtgtctcagaatgttgtttttggtgtatgctaaatgttattaagttttgattcttttcagttacacacttgaagattcgcagtcaaactcatttcttcctgcaatttcctttaaaaatttgggcaaaataaattatatataataataaaatcttatagaactcatgttgtctcgaagcagggtgtcaagaggctctgtcat

SEQ ID NO: 3137 - DNA, 1015 bp, Glycine max
gctaactggacggacaaagggttatggttttgttaggtttggagatgagagtgagcaggtgagggctatgactgagatgcaaggggttctttgctcaacaaggcccatgcggattggacccgcctctaataaaacccctagcactcagtctcagccaaaagggtgtcaagaggctctgtcatctcggagcctggaactgatttcagctgaaatggttaccattttagtgcatgtccttgcttagcttcatatcagaattctcaacctcaaggttcacagaatgagcatgatccaaataataccactatttttgttgggaatttggatcctaacgtcacggatgatcatctgagacaagtttttgggcagtatggggagttagttcatgtgaagattccagctggcaagagatgtggatttgtccaatttgcggaccggagctgtgcggaagaggcactgcgggttttgaatggcacacttctaggcggacaaaatgttaggctttcatgggggcgaagtccttcaaacaaacaggctcaaccagatgcaaaccagtggaatggtagtggtggtggatactacggatatgctcaggggggctatgaaaattatggttatgcccctgctggacaggaccccaatatgtatggcagttatcctgggtatgcgaattaccaacctccccagcaacagcagcaaataggatatagctaagaagttgggcaccaattttttccgttttcttctgtaatgctatgctattgctaagatactcgttttggttgcttctcttttattgtatcgtggagaacaaacttggctgaatacattctatgcgaataggatatagctaagaagtttcttatgacattctatgcgaattttattttgtatccattaaatattgcttgctgaattctatttggtgaaagcgatcacatttgattgttatgtgtaattcgcagtaccctcgagccggtggcatattgtgtagtgtataatgagttatgtatgc

SEQ ID NO: 3138 - DNA, 563 bp, Glycine max
ggcaagagacagaaagaaggacacggttcgaggttagggtttgagtctcaaccactctttctttaaagcacagtctcacatacctcattgcctttgctttgttctctctctctctctctctctcttttctctgtgtgtgtgcgtggattggtgaatttgagattgaagaagatgatgcaggctggacccggcggcatggcccaacaagcgaaccagcaatacgcacagcaacagcaacaacaacaacaacaagcctacatgatgatgccgccgcagcctcagccccctcagatgtgggccccatcggcccagcctccgtcccaatcggtagctcctccgcaacccaccagcgccgatgaggtccgtaccctctggatcggcgatttgcagtactggatggacgaaaattatctctatacctgtttcgcacacaccggcgagctggcttcagttaaagtcattaggaacaaacaaactagtcaatcggagggatatgggtttattgagtttactagtcgagctggtgccgagagagtccttcaaacatacaatggcaccattat

SEQ ID NO: 3139 - DNA, 753 bp, Glycine max
ctgaattctcaacctcaaggctcacagtaatgagaatgatccaaataatacgactgtgcgtgcttctttcaatataaagacttctttctttccagcttgtttgtgactttgaatcttaattgcagatttttgttggcaatttggatcctaatgtaaccgatgatcatctgaggcaagttttcagccagtatggagaattagttcatgtgaagattccagcaggcaagcgatgtgggtttgtccaatttgcagacaggagctgtgctgaagaggcccttcgggtgttgaatgggacgctgttgggtggacaaaatgtgcgtctttcatggggtcgcagtccttcaaacaaacaggctcaggcagatccaaaccagtggaatggtgctgctggtgctggttctggtggtggatattatgggtatgctgctcaaggatatgaaaattatggttatgctcctgctggacaggatcccaacatgtatggcagttatccgggatatcctggttaccaagctcctcaacaacagcagcaaataggatatagttgagaagagtctgttccttttcttctgtaatcttttatgatacttatcgacttgcgtatctcttatctcgtggaaaacccactctgctacttttttcctttgtttgcttagtaacattaaattttatcggagccgtcttttgtatccataaattgcttgctgaatacttatttatgaattgatctctattatgcattatggttttacg

SEQ ID NO: 3140 - DNA, 388 bp, Glycine max
caaagcttcatatcagaattctcattctgtgaaccttgaggttgagaattctgatatgaagctttgggctacgactgagtggtgggggttttattagaatactcaacctcaaggttcacagaatgagaatgatccaaataatacaactatttttgttggtaatttggatcctaacgtcacggatgaccatctgaggcaagttttcggccagtatggagagttagtgcatgtgaagattccagctggcaagcgatgtggatttgtccaatttgcggaccggtaatttagtcattcagatatttggtgttttatcttgtgttaaattactttgtctatatgtaggtccttttattgtaccatgaggtttcgttttcatgcatcaggagct

SEQ ID NO: 3141 - DNA, 449 bp, Glycine max
gaacaaactcaggcacattaaatactctgcctgtccagctgaacaatggtcctgtacttcatgaaaaggtttgagtaattaattcagcatcatcaattactcaaaccttgagtagagaagtgcttgagggccagagaaagctagtgacgctcgcagctacaagaacaaactctggcacattaaatactctgcctgtccagctaaacaatggtcctttacttcatgaaaaggtcgaggtgcctctagatcccacacaagagctagctacgttgatttctgaacggaaatatgaggaggctttcattggagctctacatagaagtgatgtatccattgtatcttggttatgtactcaggttgatatacacggacttttgtcaatggttcctcttcctttaagccaaggtgtactgctttcacttctgcagcaattggcctgtgatattaac

SEQ ID NO: 3142 - DNA, 300 bp, Glycine max
cattttgctagcgcaatcatcttgttccccaattaattaggttttttcagagtatcacattttgcatcgattcctctacgcacgccaccgtcaatcatctcagcacaacgttgcgattcggacaatcgcaatacggtctgacctgtacctcagatagtttcaccagtcaagtctttctgtgtggcatatcaaatttcattaggactaaccagactgcaaaacaaggcatacttattgactccatttggctaaaatgacagatatccttagctacaccgcttccagacagttatctcaaat

SEQ ID NO: 3143 - DNA, 377 bp, Glycine max
gctgcaagagtcttccttgaaactactaccattgccccctccaactaccacacactgttcttctaaaaagcactctcatgaagaaacaaggattaggaaaaagaattcaatacaaagtgttttccaaagggatcctttctttgctgcacttggtgaatgctcaaaggatgatgatgaagtaattactagtagaaatttgtggaatggagctaaggtgccaataaggagtattagtgatcgttttgggtttattagcctttatgcctcttgcaagagaacttgtgctgtttctgtatctttagtcgaccttccaagctcaagaagaagcacctgtgagcatgttagtcccaggtccctctaagcttgtgatgatgcat

SEQ ID NO: 3144 - DNA, 836 bp, Glycine max
  unsure (1)..(836): unsure at all n locations
gatataagatcgattatactcacaagttttgtttcgtttccaggtttcggcgcaatcggcttctgcttcaaggaaggagagcttgttattctctatcaacaagtaaaatgtcaggtgaagagggtgtcattgcagttgagccagctgctgctgctgctgccatcccaggcgagccaatggatatcatgactgccttacaacttgtgctcagaaaatctctggcttatggtggtttgtcgcgtggccttcatgaaggtgcaaaagtgattgagaagcatgctgcacaactctgtgttcttgcagaagactgtgaccagcctgactatgttaaactggttaaggccctttgtgcagagcacaatgttagcctgctgacagttccgagtgcaaagacccttggagaatgggctggtttgtgcaagattgattccgaaggaaaagcaaggaaggttactggttgctcctgtgtggttgtgaaggatttcggtgaggagcatgaagcctataacgtcgttctgcagcatgtgaaatctcaatgagttgcaagattcatagattttatgcacttcacattttcattttgggttattccttgagaatgaattttgccttgtggctggattatatctaccttgggttttgattgtttaatatgactttgccacattctcaatgttgctgttacttttttttatcctctgatgcattgctgtggctctaattaggaactcttgtttcacattaatcatataaagtagaagttaagaatttggccctttatttggcattaatgttaattcatgcgttgcccgtgnnnnnnnnnnnnnnnnnnnnnn

SEQ ID NO: 3145 - DNA, 809 bp, Glycine max
  unsure (1)..(809): unsure at all n locations
tctcgagccgatatcagaagcgcagacctagggatttcggccgtttgctccccaaaaaggaaagaagcagagtgtgtcttttgaaatcaactagaaaagatgtcaggtgaagaggtagctgttgcagctgaggcacctgctgcttcaattccaggtgagccaatggacatcatgactgctctacagcttgtgctgagaaaatctctggcctatggtggtcttgcacgaggtcttcatgaaggtgccaaggtgatcgagaagcatgctgcacagctctgcgttctagcagaagattgtgaccaacctgattatgtgaaactggtgaaggctctttgtgcagagcacaatgttagtcttttgacagttccaagtgcaaagacccttggagaatgggctggtttgtgtaagattgattccgaaggaaaagctaggaaggttactggttgctcctgtgtggttgtgaaggattttggtgaggagcatgaagcctataacgtcgttctgcagcatgtgaaatctcaatgagttgcaagattcatagattttatgcatttcattttgggttattccatgagaatgaactttgccttgtagctggattatatctaccttgggttttgattgtttaatatgactgccacattctaaatgttgttccttttttctttctttctttgatgcattgctgttactctaattaggaactcttgtttcacatttaatcattaaagaagggaaagttacccccaanaaaaaaaaaaaaaaaaaaaaaaaaaagcccgcgctaaggatccaaccttacgtacgcg

SEQ ID NO: 3146 - DNA, 478 bp, Glycine max
gatataagatcgattatactcacaagttttgttctttcctagcaattcggcgcaatcgtcttctgcttcaaggaaggagagcttgttattctctatcaacaaggaaaatgtcaggtgaagaggttgttgttgcagctgagccagctgctgccatcccaggcgagcctatggatatcatgactgccttgcaacttgtgctcagaaaatctctggcttatggtggtcttgcacgaggccttcacgaaggggcaaaagtgattgagaagcatgctgcacaactctgtgttctagcagaagactgtgaccagcctgactatgttaaactggttaaggccctttgtgcagagcacaatgttagcctgctgacagttccgagtgcaaagaccctcggagaatgggctggtttgtgtaaagatttggatatttttcccaaattaaaaaggggggggggggggaaaaaaaaaaaaaaggggggggg

SEQ ID NO: 3147 - DNA, 643 bp, Glycine max
ctgccttacaacttgtgctcagaaaatctctggcttatggtggtatgtcgagtggcgttcatgacgagtgcctttgcacatccggatgattcagcacaactctgtgttcttgcagaagactgtgaccagcctgactatgttaaactggttaaggccctttgtgcagagcacaatgttagcctgctgacagttccgagtgcaaagacccttggagaatgggctggtttgtgtaagattgattcagagggaaaggctcggaaggtaactggttgctcatgtgtggttgtcaaggatttcggggaggaacatgaagcatataatgttgttctgcagcatgtgaaagccaactgaggagttgctgcagcatgcctagatttgtgggttttagtttgaagttattgtatgagtctatttttgcctctatcatagggatattgatggtttagtacaattatacccgttctcattgttgctgagtgaatgcttttttaattactattggttttctgtgtttttaagactgacctgttgagttattaattgcttacacttcatgatagtccaaaaaaaaaaatgtttaagtgcaagtatctggcaatttatttatgtctcctaccatttttaatggatttatatatttttt

SEQ ID NO: 3148 - DNA, 730 bp, Glycine max
  unsure (1)..(730): unsure at all n locations
gatttttccgtttgctccccaaggaaagaagcagagggtgtcttttgaaatcagctagagaagatgccagggtgagccattggccttcatgactgctctacagctggtgctgagaaaatctctggcctatggtggtcttgcacaaggccttcatgaaggtgctaaggtgatcgagaagcatgctgcacagctctgcgttctagcagaagtttgtgaccaacctgatattgtgaaactggtgaaggctctttgtgcagagcacattgttagcctgctgacagttccgagtgcaaagacccttggagaatgggctggtttgtgaaagattgattcctaagaaaaagcaagtaaggctactggttgctcctgtgtggttgtgaaggatttcggtgcggagcatgaagcctataaggtcgttctgcagcatgtgaaatctcaatgagttgcaagattcatagattttatgcccttcacattttcactttgggttattccttgagaatgaattttgccttgtggctggattatatctaccttgggttttgattgtttaatatgactttgccacgttgtcaatgttgctgatacttttttttatcgtgtgatgcattgctgtggctctaattaggaccccctgtttcacatgtatcagatgaaggtgaagctccaaaaaaaaaaaaaanaaaaaaaaannaaacgcgccgcgctagaggatcccagcttacgtacg

(The sequence listing continues in the following parts.)
